United States Patent Application Publication US 2007/0054278 A1 - sequence listing, part 123

SEQ ID NO: 239855 - DNA, 201 bp, Homo sapiens
ttgatggtgataagaaatcattcctggaggacattcggaaggtgggacacagtccctggcagtggtctttgttggtcctgcggaaggcagtgggggtgggrgttgtggtgggagaacactcgaggccacaggatggcaggtggaatgaagttcagccttgacttggatcttgacttacaatgttttcctagaatattggcc

SEQ ID NO: 239856 - DNA, 201 bp, Homo sapiens
gcagctgggacgagcggaaagctctgcgcgtgggcggggagcccggagcctcgccggggcaatgtcatctaggtgctcggcgctccactgatccggccccsgggggtgggcgggcacgtttgcctcggatggtctaacaggcgtcggggagagccaatggtgtggcttcatggctccacccccttccattcgattggccgg

SEQ ID NO: 239857 - DNA, 201 bp, Homo sapiens
aattagctgggtgtgatggcacacacctgtagccccacctacttgggaggctgaggcaggaggatcacctaagtccaggagtttgaggctgcagggagccrtgattgtgccactgcactccagcctgggcaacagagtgagaccctgtctctaagaagacatttcttctggtgctttggtgatgcttctgctcagcctttc

SEQ ID NO: 239858 - DNA, 201 bp, Homo sapiens; identical to SEQ ID NO: 46943

SEQ ID NO: 239859 - DNA, 201 bp, Homo sapiens
catggtgaaaccccgtctctactaaaaatataaaaattagctgggctttgtggctcatgcctgtaatcccagttactcgggaggctgaggaatgagaatcrcttgaacctgggaggtggaggttacagtgacctgagattgtgccactccagtttggcgacagagcgagactccgtctcaaaaaaaaaatgaaaataaaat

SEQ ID NO: 239860 - DNA, 201 bp, Homo sapiens; identical to SEQ ID NO: 46945

SEQ ID NO: 239861 - DNA, 201 bp, Homo sapiens; identical to SEQ ID NO: 46947

SEQ ID NO: 239862 - DNA, 201 bp, Homo sapiens
cctatccccttggccattcgggtggcctgcatggactcagcctaatttgagggaaactgttagtaataggcctatacactatgctagtcagtcactaagcwgaaagtccccacagagtctgggtggttatcatcaccaccatttagcgtagcttacctggtgtcaggcactgtgtcactccacatacctgtcccatttact

SEQ ID NO: 239863 - DNA, 201 bp, Homo sapiens
atccagaccatcctggctaacacggtgaaaccctgtctctactaaaaatacaaaaattagccggttgtagtggtgcgtgcctgtaatcccagctactggcraggctgaggcaggagaatcgcttgaacctgggaggtggaggttgctgtgagctgagatcgtgccactccactccagcctggtgacaaagcgggactccgt

SEQ ID NO: 239864 - DNA, 201 bp, Homo sapiens
gaacgagcacgcccggtccctgctccggagcggaggacacgacgcggacccgcacggtgcaccgcagtgacctgaggaaggagcgacgggcgctcgcgccmaaggcgtccgagtgcctggtaaactgtaaagcgcggtcctgcgtgagttgctatggctacagctgcgccaggcggacggcctgcaggaccgaggtgcagc

SEQ ID NO: 239865 - DNA, 201 bp, Homo sapiens
ataaggagaaataaagaaaagggaaaaaattaaaagaggatctctaaaggaactttcgtattgcctgctgtttgcaatcatactgtctgctgctgctgcartagaaatttctgagccgggtgcgatggcttatgcctgtaatttcagtgactcaagaggctgaggtgggaggagtgcttgatccgaggagttcaagaccag

SEQ ID NO: 239866 - DNA, 201 bp, Homo sapiens
ccccaccagactcaggagcccagctggcttcacccagtggatcctgcaccaggctgcaggtggagctgcctgccagtcctgcgccatgcgcccacactccycagcccttgggtggtcgatgggactgggcgccgtggagcagggggccacgctcatcggggaggctcgggccacacaggagcccacggagtgggtgggagg

SEQ ID NO: 239867 - DNA, 201 bp, Homo sapiens
tgtagagacggggtttcaccatgtcacccaggctggtctcaaactcctggactctcaagtcatctgcctgccttggcctcacaaagtgctgaggttacagrcatgcgccaccatgcccggcctcgtgttgctgttaaagtaaactttatctcatattgtagttcagccatgctgtggatggaaaaaagcattaggctcagg

SEQ ID NO: 239868 - DNA, 201 bp, Homo sapiens
cttcccagttgcttgtctatagggccagaatgtgttgaccggactaacatttgtaaccacgaagatccatagttaaggttttcatcctacattcattaackggtattctgattttatacatcttgccagcttataaataaagatctggtctttatttataaatataaatataaatataaatataatgatggggccttggag

SEQ ID NO: 239869 - DNA, 201 bp, Homo sapiens
tttggggatgaggtaggtatcgtgaatgtccatagttgtattgttttgttttttaactcctacacataggggattaactttcctgagtcatcagttattcytagatccttgggtcatttcctgtaaatgtaggctctccattcctatcttatacttcctctcatttataagggaaacatttttgggtagcataatgaaaca

SEQ ID NO: 239870 - DNA, 201 bp, Homo sapiens
aattatggtggcatcgccctgatgtggagagggggctgcatcattagaaggtaagtgagaggcagcccagggtccgacgggaaggactcacacggctgtgsagaagtgcgatcttaggacacttagcttgagcagtttccagggatgggcacttagccccatcactggacactggcacaagataggcttagattatgtggt

SEQ ID NO: 239871 - DNA, 201 bp, Homo sapiens
tccagtaaaatgccaatgtgtgtttggcttaattattttactttggggatgaggtaggtatcgtgaatgtccatagttgtattgttttgttttttaactcmtacacataggggattaactttcctgagtcatcagttattcctagatccttgggtcatttcctgtaaatgtaggctctccattcctatcttatacttcctc

SEQ ID NO: 239872 - DNA, 201 bp, Homo sapiens
gcattgctgcaaaagtgggaactggagaaccctgctgtgactgggcaagttctgggctactctttaaagccaattggcaacatgggcgtgtctaagtgatsaagtgcgtggagaaaggccaccgtggtctcccaggggttagcttggtgacataaacgtctcgatctttgattgctagaatagccaacgcctagaatgcat

SEQ ID NO: 239873 - DNA, 201 bp, Homo sapiens
tgcagctgatctgtgaggcataccacctgatgaaagacgtgctgggcatggcgcaggacgagatggcccaggtgaggccccggcactgcctctgtgtccgktctgcagggagtgctcactttgccacagacaccgaatcttttcttcattcctatccccttggccattcgggtggcctgcatggactcagcctaatttgag

SEQ ID NO: 239874 - DNA, 201 bp, Homo sapiens
agacagagctagactcattcctgattgaaatcacagccaatattctcaagttccaagacaccgatggcaaacacctgctgccaaagatcagggacagcgcrgggcagaagggcacagggaagtggaccgccatctccgccctggaatacggcgtacccgtcaccctcattggtaatgttatgcttttcacatgggcccttt

SEQ ID NO: 239875 - DNA, 201 bp, Homo sapiens
cctcgtgatccgcccacctcagccttccaaagtgctgggatgacaggcgtgagccaccgcgcctggcctaaccatcagtttttcatttacccacattgatrtgaatgaaaatctatccgcgtcaccaggggcagatcactaatctctggccgtgcgttttgtgctcaggactcctggcggcgggcagtcagcactggggtc

SEQ ID NO: 239876 - DNA, 201 bp, Homo sapiens
tccagccagcctcatccaggtaagcctgtggagcagggattaacctggctggcccctcgggggcgtgcgccatggactgtcctgaccaacctactctctcrtttcctaggctcagcgggattacttcggggctcacacctatgaactcttggccaaaccagggcagtttatccacaccaactggacaggccatggtggcac

SEQ ID NO: 239877 - DNA, 201 bp, Homo sapiens
tgccacagacaccgaatcttttcttcattcctatccccttggccattcgggtggcctgcatggactcagcctaatttgagggaaactgttagtaataggcytatacactatgctagtcagtcactaagcagaaagtccccacagagtctgggtggttatcatcaccaccatttagcgtagcttacctggtgtcaggcactg

SEQ ID NO: 239878 - DNA, 201 bp, Homo sapiens
attacaggcgtgagccactgcgcccggctccgcattacacctactacactacaccttttaaagtacttctgtgaactatcgtgccctctggccttgcctcttgggaattttgctctgtattttcattgaaaatgccaaatcatagaaaacgtagcatttctacacatgacgttacatcgttctcatgttggctgaagattc

SEQ ID NO: 239879 - DNA, 201 bp, Homo sapiens
ttacaggcgtgagccactgcgcccggctccgcattacacctactacactacaccttttaaagtacttctgtgaactatcgtgccctctggccttgcctcttgggaattttgctctgtattttcattgaaaatgccaaatcatagaaaacgtagcatttctacacatgacgttacatcgttctcatgttggctgaagattca

SEQ ID NO: 239880 - DNA, 201 bp, Homo sapiens; identical to SEQ ID NO: 46936

SEQ ID NO: 239881 - DNA, 201 bp, Homo sapiens; identical to SEQ ID NO: 46937

SEQ ID NO: 239882 - DNA, 201 bp, Homo sapiens; identical to SEQ ID NO: 46939

SEQ ID NO: 239883 - DNA, 201 bp, Homo sapiens
ctctcggccgcgcaggcatggggcggggcgggtcccttcgagggccagggaggaggcgcggccaggcctcgccgagtctgcagggacacctgcgggacgcrtgccagcgggagccgggcgcgagggcggggctgggggccgcctgcccggccgaggctctgcagcgtgcgcgcccggcttctgggggcccgcgggaggcgc

SEQ ID NO: 239884 - DNA, 201 bp, Homo sapiens; identical to SEQ ID NO: 46940

SEQ ID NO: 239885 - DNA, 201 bp, Homo sapiens
ggtatggtggtgtaagcttatggtcccagctacaagcttatggtcccaggttcgagaccagcctggccaacatggtgaaaccccgtctctactaaaaatayaaaaattagctgggctttgtggctcatgcctgtaatcccagttactcgggaggctgaggaatgagaatcacttgaacctgggaggtggaggttacagtga

SEQ ID NO: 239886 - DNA, 201 bp, Homo sapiens; identical to SEQ ID NO: 46941

SEQ ID NO: 239887 - DNA, 201 bp, Homo sapiens
actccgtctcaaaaaaaaaatgaaaataaaatcaagatctccttagggaatcctagggaactggatgcttatttttgtaccaaacaatttgttggctttascaggtatatcttttttggaagaaaaaagtaggggaaccagtggaaataatgtgtttagatacccaaaataattctatagtaacaactctgaaaaaaccca

SEQ ID NO: 239888 - DNA, 201 bp, Homo sapiens
tttctttcctgatcaagttgggattggctttttgatagttaatctgaaaagtcagtccaagtagggaagctgaagcatttcccccaacattttattatgamaatattcaaccatgcagcacagaagtttgagagttttacagtgaacacctggatacacacctcctcctttctcccatccacaggttcctgtacttgcttt

SEQ ID NO: 239889 - DNA, 201 bp, Homo sapiens; identical to SEQ ID NO: 46942

SEQ ID NO: 239890 - DNA, 201 bp, Homo sapiens
gtggcgtgaacccgggaggcagagcttgcagtgagccgagatcacaccactgcattgcagcctgggtgacagtgcgagactccgtctcaaataaataaatwaattaattaattaattaataaagtaataataataataaagcccagcctggttggtgtgctgtaggtagatattcatgttcaaggctctgtctcttcctga

SEQ ID NO: 239891 - DNA, 201 bp, Homo sapiens
aataaatatacaatatcaaactagttagcgatgactgtgagaacgaagagtaaactgggacaagatccggtgattgcagaaggcttctgaggaggcgacastgcacagagacctaagtgaagtgaggagcccttgcctctgaggagacaacacttctggtggccagaaattcagtataaccaggttcagaacaaacacaac

SEQ ID NO: 239892 - DNA, 201 bp, Homo sapiens
tgttttctttctccaattgggcaatgggtacatggacgttcactgtaacgtgctttttctttcgtctttttttttttttttttttttttgctcctggcaarctgtgcgtgacattctttatggctttttgtatgtcaaatacttcatactaaactttctagagaattaaactttaatgatgggctcagcttggtctgattt

SEQ ID NO: 239893 - DNA, 201 bp, Homo sapiens
cgtgaacccgggaggcagagcttgcagtgagccgagatcacaccactgcattgcagcctgggtgacagtgcgagactccgtctcaaataaataaataaatwaattaattaattaataaagtaataataataataaagcccagcctggttggtgtgctgtaggtagatattcatgttcaaggctctgtctcttcctgacctc

SEQ ID NO: 239894 - DNA, 201 bp, Homo sapiens
tctctcctgtgttctgcatgtaggcctttgaggattggaataagacagagctagactcattcctgattgaaatcacagccaatattctcaagttccaagayaccgatggcaaacacctgctgccaaagatcagggacagcgcggggcagaagggcacagggaagtggaccgccatctccgccctggaatacggcgtacccg

SEQ ID NO: 239895 - DNA, 201 bp, Homo sapiens
tcactgtaacgtgctttttctttcgtctttttttttttttttttttttttgctcctggcaagctgtgcgtgacattctttatggctttttgtatgtcaaawacttcatactaaactttctagagaattaaactttaatgatgggctcagcttggtctgatttatttcctttcccacacctgtctctacttgctctaagcca

SEQ ID NO: 239896 - DNA, 201 bp, Homo sapiens
tttcaccatgttagccaggatggtcttgatctcctgaccttatgatccacccacctcggcctcccaaagtgctgggataacaggcgtgagccaccgcgccyggcctacaaaaaaaattttaaaactagctgggcattgtggttcaaggagttcaaagttgcagtgagtcatgttcacaccactgcaggagttcagggtttc

SEQ ID NO: 239897 - DNA, 201 bp, Homo sapiens
  misc_feature (1)...(201): n = A,T,C or G
tctctagagctgacatcgcgctgatcggattggccgtcatgggccagaacttaattctgaacatgaatgaccacggctttgtggtaagcggcgtgggcgcnttgtcttctctctggttcccgggcgctttagccgaggccggcgataggtttgggagcttacgggtctcctggccgtgctttgctaatgtgctctgttgct

SEQ ID NO: 239898 - DNA, 201 bp, Homo sapiens
aagcatcaaactcagaaagataaggaaataatataaagaaataaacataaaacgagaggggattaacaatatcaaaatcttggccgggggggtggttttcwgtgtgtttgtttgttttttgagacggtgttgtgctctgtcacccaggctggagttcagtggcatgatctcgggtcactgcaacctccacctcccgggttc

SEQ ID NO: 239899 - DNA, 201 bp, Homo sapiens
ccactgccctctccttctatgacgggtacagacatgagatgcttccagccagcctcatccaggtaagcctgtggagcagggattaacctggctggcccctsgggggcgtgcgccatggactgtcctgaccaacctactctctcgtttcctaggctcagcgggattacttcggggctcacacctatgaactcttggccaaac

SEQ ID NO: 239900 - DNA, 201 bp, Homo sapiens
cttcttgttattgtcttgtcacccttagtagcaggcacatacttaggaaagtcagatttcctgtgtatgagacatactagagtggaccaagggaagaaaaycctatgcagagcaacaagcgagtagcagtggacagggagcagtggagcccttagggaaaaacaaacagagctaatggccctggcagagttcctcacaccc

SEQ ID NO: 239901 - DNA, 201 bp, Homo sapiens
taggaaagtcagatttcctgtgtatgagacatactagagtggaccaagggaagaaaaccctatgcagagcaacaagcgagtagcagtggacagggagcagyggagcccttagggaaaaacaaacagagctaatggccctggcagagttcctcacacccagagctctaccaccatgtgaggctaacactacaagcccacacc

SEQ ID NO: 239902 - DNA, 201 bp, Homo sapiens
acccctactatttgatagcacaagagattgaccatagtcaacaataacttgattgtatatttttaaatgactgaaagagtgtaattggattgtttgtaacrtgaatgataaatgcttgaggggatagataacccattgtccacaataagggtgattattatgcatttagttatatctgttattatgtttgaattgccatgt

SEQ ID NO: 239903 - DNA, 201 bp, Homo sapiens
gtgtatgagacatactagagtggaccaagggaagaaaaccctatgcagagcaacaagcgagtagcagtggacagggagcagtggagcccttagggaaaaamaaacagagctaatggccctggcagagttcctcacacccagagctctaccaccatgtgaggctaacactacaagcccacacccatcatcacattgtatggg

SEQ ID NO: 239904 - DNA, 201 bp, Homo sapiens
ggtgagcagttatattaattgtagggtgtttagcaaaattcctggcctctattcactagttgtaagtaacacacagacacgcacacacacgcacgccagtkgtgaaaacctaaatgactccagacattgccaaatatcccccaggtaggtgattggggagaggagggaaaattgcctctggttaacaactgctgctctaga

SEQ ID NO: 239905 - DNA, 201 bp, Homo sapiens
ataggtataaggatatatgaacaagggaggaaacaattatataccatttatatatacctatatgcattcatattaaatcaaggcatgcacccacaggtacwgcagagaaatataaaggttgagattagggaagttcccattcaaggacattaatggaaaaacaaaaaactttgacacatgtgtttatgtgatctcactata

SEQ ID NO: 239906 - DNA, 201 bp, Homo sapiens
aagggctataggaattaagaactagggctaaaaaagaaatgtttagagtgatgcaagatgaccaattagaagcagctgcagtctgcagtgctcacaaagargaatgaaaaggggcaagggaattcagcaccttcaactgagataaccaggttctcacattgggactgactagatgaacaggtcgaccaatggagaatgaag

SEQ ID NO: 239907 - DNA, 201 bp, Homo sapiens
agaggagggaaaattgcctctggttaacaactgctgctctagatatagtttatattgataaaattcgtttctgaagcaaaaattgatcttttaaatttatygttagatggacacattttgatcgacttctacgacttattattctggtaagaatttttcatctgtttcatcaaaaaagacaacttgaaaagctgataagaa

SEQ ID NO: 239908 - DNA, 201 bp, Homo sapiens
ttcaactgagataaccaggttctcacattgggactgactagatgaacaggtcgaccaatggagaatgaagacaagcaggcagagagtgcgacagcccagcygggggcagcatggagccaaaggaacccccactgccagccaagggaagcggtgagtgagtgtgcagtcctgcccgggaaaccgtgcttctctcatggatct

SEQ ID NO: 239909 - DNA, 201 bp, Homo sapiens
cccagccgggggcagcatggagccaaaggaacccccactgccagccaagggaagcggtgagtgagtgtgcagtcctgcccgggaaaccgtgcttctctcayggatctttgcaagccatggatcaagagatccccttgtgaacccatgccaccagggctgtgggtctgatacacagacctgtattgagtctgggcacatcag

SEQ ID NO: 239910 - DNA, 201 bp, Homo sapiens
tcttctcaattcaggactactcatttgcagcataggaacttgaatggattttcagctgactccatttgagtttcaatttattaacctctagtagttatttmtgagtcccaaggatcccacagagacctcttctcatcctagaaccccagagaatgaggtcggtgctttgtagatctcaggttttctgagtcagagggctgc

SEQ ID NO: 239911 - DNA, 201 bp, Homo sapiens
tagccccggggatcttcagcacagtgggaaatctgtccatacgtatctctgggaagggggctgaatccagggagccaggcagcatcattctgcaggatccrtttccttggcacctcacaagttaagacccactggcttggaatcctagcctgccaacagcagcaggttggaatccacctcagatgggtctgtgttcctggg

SEQ ID NO: 239912 - DNA, 201 bp, Homo sapiens
ttcttagggaatgtagactgtgtagtcataagtttaatattgacccagatatggcagtattcttttaaaaatgtactctttcaagtaaaaaaatcataatrgattgataccagttacaattgtgccagtggttacaaaccaccccaaaacttactggcttataacagcaactatttatttggctcatgatactgtgatttg

SEQ ID NO: 239913 - DNA, 201 bp, Homo sapiens
ttaacctctaatgttggacatttaagtgtcattataatcaataatacagcaacagacatctttgctcataaggccttttctgtatagattgctagtagtgwaattacctagctaagagtaattttagggttcttaatatatattgccaaatccaagagcagttgtattcttgtatcaacaataaatcaaagttttaaattt

SEQ ID NO: 239914 - DNA, 201 bp, Homo sapiens
tgatagtaggtatacagaaaactgcagaatgttataacactgtaactatgatgaataaactactcttattctaagtagagagactaaactatgagccaatsaaaaatattaactacaacttttcaagacatagatggtatgataagatataaatagaaataacaaaaagttaaaaaatagggagacaaagttaagttgtag

SEQ ID NO: 239915 - DNA, 201 bp, Homo sapiens
acaaatgaagaagacataaaatctgtcatagataaaccagaacaaagataattcatcaccactagaccagccttacaagaaatgcccaagggagtcttacrtctggaagtaaaaagatgataaccaccatcatgaaaacatgaaaaactttaaaagtcactgttagagtcaatacataaaggagaaagagaaaggaatgaa

SEQ ID NO: 239916 - DNA, 201 bp, Homo sapiens
atgtaatgaatagtctgctagaaagttaaaaattatacctattaaacaaaaataagttgagtttaggttacatgagatggataaactactaccatccttayatttttgaaacacttgtgtttgttttagagtggcaggagcaacttggaaagctctttttgaagacagataaagaattctaataagatatgttaacttatt

SEQ ID NO: 239917 - DNA, 201 bp, Homo sapiens
cagactacttttattttatttaaggctgatcttttttattttcaaatttacaaataaaaaatcaatatatttatggtgtacaagatgatgttttgatatasgtaaacattgtgaaatggctaaatcaagctaattagcatatgcattactccacatatttttgtgtgagaacatctaaaatttactgtctcagcaatttta

SEQ ID NO: 239918 - DNA, 201 bp, Homo sapiens
aaaataatggattataagatagtatttacaagcctcatggtaacctcaaaccaaaaaacataacaatggatacacgaaaaataaaaaacaggaaactaagycatatcaccagagaaaattaccttcactaatggaagacaggaaggaaagaaggaagagaagaccccaaaacaaccagaaaacaaataacaaaatggcagg

SEQ ID NO: 239919 - DNA, 201 bp, Homo sapiens
acatatgttcattacagcagtattcacaatagcaaagacatggaatcaacctaaatgccagtcgatgatagattggataaagaaaatatggtacatagagygggacatcgggcttctgagcgggaacctttgtagtgccagtgatgaaagagagaattaaatatggctgattctgagaaaggcaagaaaatttttcttcag

SEQ ID NO: 239920 - DNA, 201 bp, Homo sapiens
gatagattggataaagaaaatatggtacatagagtgggacatcgggcttctgagcgggaacctttgtagtgccagtgatgaaagagagaattaaatatggstgattctgagaaaggcaagaaaatttttcttcagatgtgtgcccagtgccacactgtggaaaagggaagcaagcacaagactgggcctaaactccatggt

SEQ ID NO: 239921 - DNA, 201 bp, Homo sapiens
cttctattttccttctgacattctgttttcattcgattgaattttaataatataaatctttccttctcaccctctgtcattaccttggaagtcatatactstttttctatgtttttagtaattactgtaaagatttaaacctgcatccttgatttagctattaatttttgtttatgttgagcttgcatctagaaatcttcc

SEQ ID NO: 239922 - DNA, 201 bp, Homo sapiens
tgtcttataaaaatacatgcatgcacacatatgttcattacagcagtattcacaatagcaaagacatggaatcaacctaaatgccagtcgatgatagattrgataaagaaaatatggtacatagagtgggacatcgggcttctgagcgggaacctttgtagtgccagtgatgaaagagagaattaaatatggctgattctg

SEQ ID NO: 239923 - DNA, 201 bp, Homo sapiens
tatgcacatgaatagtcagaacttaactggtttatgtgcagagtaatgaaagctagttttaccagaaaagtaaattttgaattgtgtctcctgtctgactrtattcttttgtcgtcctctagtccacccacaaatgaattatcaggtgtgaacccacaggcaagtatgaatgaaaggtgagttatgcgtaagtgtttcttt

SEQ ID NO: 239924 - DNA, 201 bp, Homo sapiens
atagtcagaacttaactggtttatgtgcagagtaatgaaagctagttttaccagaaaagtaaattttgaattgtgtctcctgtctgactgtattcttttgwcgtcctctagtccacccacaaatgaattatcaggtgtgaacccacaggcaagtatgaatgaaaggtgagttatgcgtaagtgtttctttctttatctaat

SEQ ID NO: 239925 - DNA, 201 bp, Homo sapiens
tcacttgaacccagtaggtggaagttgcagtgagctgaggtcacatcattgcattccagcctgggtgacagagtgagactccatctcaaaataaataaatwaataaataaaataaataaataaatattaaaatcctggagatagtattacttataacctcaatcatttattaatcaacctaaatttaatccttgattttat

SEQ ID NO: 239926 - DNA, 201 bp, Homo sapiens
tgcatccttttctaatggagtgatataaaaagcagcaggtcataggagagctgctgcttcctgttagtgtatttgtcactgttagttcctagtaagtagcwtcttaaaggactcaaatttcctgagtttgagagcctaccagattgacagaagggaggagaaaatcctattcacaacatggaggagatagcagctgacaag

SEQ ID NO: 239927 - DNA, 201 bp, Homo sapiens
gcatccttttctaatggagtgatataaaaagcagcaggtcataggagagctgctgcttcctgttagtgtatttgtcactgttagttcctagtaagtagctkcttaaaggactcaaatttcctgagtttgagagcctaccagattgacagaagggaggagaaaatcctattcacaacatggaggagatagcagctgacaaga

SEQ ID NO: 239928 - DNA, 201 bp, Homo sapiens
gtatttgtcactgttagttcctagtaagtagcttcttaaaggactcaaatttcctgagtttgagagcctaccagattgacagaagggaggagaaaatcctrttcacaacatggaggagatagcagctgacaagaagcagtgaagccctgggcagaaaagaacagagctaatagaacatgaacttgtctttcacactccaga

SEQ ID NO: 239929 - DNA, 201 bp, Homo sapiens
gagagtaccttccagtaggctggccaatgcaccatgtaatatcaaggaatagagttatacatgtatctatgcatatacaaacacatacatacatgcattcrtacacacaagagagtctgagtagggctattgagtgtgacaagcatccatgggaacaaggagttcccttgaaactatttctagagtcttctcagaatgagc

SEQ ID NO: 239930 - DNA, 201 bp, Homo sapiens
ctcccctacaagaaagaaccaaggcaagaaatacacatctaagatttgattagagtattgaagggatagtcctggagtgcagcaaaggagtggagacacgyctgtggtgatgggaagttgccacagcatggaagcactccgcctgtgccgccccttctgccccatctggattgaattggcccagagacaggagggacttct

SEQ ID NO: 239931 - DNA, 201 bp, Homo sapiens
aagaaccaaggcaagaaatacacatctaagatttgattagagtattgaagggatagtcctggagtgcagcaaaggagtggagacacgtctgtggtgatggraagttgccacagcatggaagcactccgcctgtgccgccccttctgccccatctggattgaattggcccagagacaggagggacttctcattgcaggttga

SEQ ID NO: 239932 - DNA, 201 bp, Homo sapiens
agaaatacacatctaagatttgattagagtattgaagggatagtcctggagtgcagcaaaggagtggagacacgtctgtggtgatgggaagttgccacagyatggaagcactccgcctgtgccgccccttctgccccatctggattgaattggcccagagacaggagggacttctcattgcaggttgaaggtaagcagaag

SEQ ID NO: 239933 - DNA, 201 bp, Homo sapiens
atatcaccagagaaaattaccttcactaatggaagacaggaaggaaagaaggaagagaagaccccaaaacaaccagaaaacaaataacaaaatggcaggaktaagtccttacttaccaataataacattgagtgtcagtagactaaacttttcaatcaaaagatagagtggatgaatggatgaaagaacaagacccatcca

SEQ ID NO: 239934 - DNA, 201 bp, Homo sapiens
gtttgggaggccaaggcaggcagatcgcgaggtcaagagctagaaaccatgctggcaaacatggtgaaaccctgtctctactaaaaatacagaaattagcwgggtgtagttgtgcgcacctgtagtcccagctactcagatggctgaggcaggagaatcacttgaacccgggaggcagaggttgcagtgagccgagatgat

SEQ ID NO: 239935 - DNA, 201 bp, Homo sapiens
tgaaccatggttggattgtacccttttttgtaggaaagctggtattattttggagaaaggcaaagagataaaacccacagcaaaaaaatttcagggagtaraaactccttctcaggtaagttttctttttaaaaatgggagttttttttaggggagtgggttcagattgccacctgttatttggtttcattttagactctt

SEQ ID NO: 239936 - DNA, 201 bp, Homo sapiens
gggagtgggttcagattgccacctgttatttggtttcattttagactcttctcctttggtgatcaggcagcagcagttgggtgccctgcaacaggccttgktccctccctgagtctgagggtcacgcttcaggtgctgcccacatgctggggactctggcttctcttcagagaatcctgctttctattctatactggttat

SEQ ID NO: 239937 - DNA, 201 bp, Homo sapiens
atgaaacaggacttgatgggccatgggattgcgtattttgaatttgactgaatactgcctattgctctcacaatgcttataccagtctgcatctcatgaayaatgtatgatggttcctacacatacacattcacaacaacacttgacattatcaaactttctaatttatataatcagtctaataggtcataacatattgca

SEQ ID NO: 239938 - DNA, 201 bp, Homo sapiens
tcaatgtaaaaaagatccaagtctttcacaaaccattactagggcaattcaacccttgcagaacatcacaaagactgtttttggatgactcctggtgtgtrtgtgtgtgtgtgtgtgtcttttctgtgtgttgtgggggaggtgtattttaaaaaagaaaaggggaaataaacttttcaaaaccccttctgtatcccagac

SEQ ID NO: 239939 - DNA, 201 bp, Homo sapiens
atcacaaagactgtttttggatgactcctggtgtgtatgtgtgtgtgtgtgtgtcttttctgtgtgttgtgggggaggtgtattttaaaaaagaaaagggraaataaacttttcaaaaccccttctgtatcccagacagtattgcacttttacatatctcacttaatatccataacacctatatgaaatatacactgttac

SEQ ID NO: 239940 - DNA, 201 bp, Homo sapiens
gtgtgttgtgggggaggtgtattttaaaaaagaaaaggggaaataaacttttcaaaaccccttctgtatcccagacagtattgcacttttacatatctcayttaatatccataacacctatatgaaatatacactgttactctgtttttcttttagaaacattttgttatggaaaattttaatcatatacaaaagtccaga

SEQ ID NO: 239941 - DNA, 201 bp, Homo sapiens
tattttaaaaaagaaaaggggaaataaacttttcaaaaccccttctgtatcccagacagtattgcacttttacatatctcacttaatatccataacacctrtatgaaatatacactgttactctgtttttcttttagaaacattttgttatggaaaattttaatcatatacaaaagtccagagaatcatacactatatcct

SEQ ID NO: 239942 - DNA, 201 bp, Homo sapiens
ttttcaaaaccccttctgtatcccagacagtattgcacttttacatatctcacttaatatccataacacctatatgaaatatacactgttactctgttttycttttagaaacattttgttatggaaaattttaatcatatacaaaagtccagagaatcatacactatatcctcatgtagtcatcacattgctgcagcagtc

SEQ ID NO: 239943 - DNA, 201 bp, Homo sapiens
aaaagggacctggtagtcaatgttttgctgcagtgaagaaatgcctaaaactatataccttttctgaaacagtaggaaagcatccttcatgttctaataaycataaacttttagaattcctacccaggcctttgtctcaaattctcctattactaaccctattccctgccatgccgtccccactctgccctggcttttttg

SEQ ID NO: 239944 - DNA, 201 bp, Homo sapiens
atgtgccccatctaatgtaatctaatttatcatggaattgtggtttaagctggacattaagaattgcaaataaatggcttttgcctaagattaatagtaayatattaatatttttcttccatctgcaaaagtaacattaatgaaaatcaaatgttaaaattctataattattagtaaagtgttttattaagtaccttatac

SEQ ID NO: 239945 - DNA, 201 bp, Homo sapiens
gtattgtaaaaaattagtaataaaatgaaaataacatgcaaaaatactttgaaaactctgtagttctgtaaataggttttattctaaaaactgaaaataaygtaagagttcattaaaggaaaatcagaaaatacaatcaacaaatctacccacatatagtcattcttaaactttggtgcttgcacttctaagttccttaag

SEQ ID NO: 239946 - DNA, 201 bp, Homo sapiens
gtcagaagcccatttctagtctatcaatgtttatatttaaatgtttagaaaacataattataccattttttccatcaatatagagaataaagctgaacttrtacctgtgaaagataagaaatgcaacctgcctttacttctatcttcttccacaccttgaatcctagtgtaagaatgcctaaaaattcaaatcaatactat

SEQ ID NO: 239947 - DNA, 201 bp, Homo sapiens
tcacctgaagactgtattactgcacccacccagaaccaaagtcaaagcaccctactcagtgaacactataggagacaactattggaaaaagtatttctctrtgaaagtccctaacattggaagaggcaactgttcccccagatgtacaaaaatcagtttagggccacaagaaacatgaaaagcaaggaaacattacacctc

SEQ ID NO: 239948 - DNA, 201 bp, Homo sapiens
gtcaataccgtactgaatggtgaacaaatgaaaagcttttctctgcgatctaggacacaatgaggatttccacttttaccactgttgtccaacatagtacyggaagtcctagatagagccattacagaagagaaagaaagggaataaaaaaagaaatccaaattgggatggaagaagtaaaattatccttgtgtttgcaga

SEQ ID NO: 239949 - DNA, 201 bp, Homo sapiens
tggtggctcacacttgtaatcccaccactttgggaggctgaggcgggtggatcacttgaggccaggagttcaaggtgagcatggccaacatgaagaaaccrcatttctactaataatacaaaaaaattagctgggtgtgatggtgtgaacctgtagttccagttacttgggaggctgaatcacgagaattgcttaaaccct

SEQ ID NO: 239950 - DNA, 201 bp, Homo sapiens
attagccagtctgaattatcaaggagctttctttctgcttctgcaaatggcaccagcattcttccactcatgccttgggctttgattctctttgcctcagscccctaaatctagttagtcatcaatctatgttgattatgcctttcatagttttctatgttctccttcctttctgttctcactgccactaattgtccagaa

SEQ ID NO: 239951 - DNA, 201 bp, Homo sapiens
acactgtgtgcctgtaatcagagccagttaacacctttggctcaacatccttatctgtaaaataaatatcacatctcaagtgtaatgggaattaaattagwtaatatatataaaggttctttgtaaactgtaaatcactaagtgttatacgtgataattatcaggcttctttgtcacataggaaatgctccaccatatttt

SEQ ID NO: 239952 - DNA, 201 bp, Homo sapiens
catgacattacaaggcaaagtattaattgatgtattcgacagtccacctctgtatgatgatgtaaaagtgcattttttctcttcggtgagtaatcacaaartagcctctgccattgttcttgtctggtctaatgattttatttaagattgctttactacatttcccaacaagggaggggtagggggaagacaataataaat

SEQ ID NO: 239953 - DNA, 201 bp, Homo sapiens
atgtattctcaaatacaaaaaaatacaaaataaacacaaagaagtaaaagtcaagatgctaaaaaaaaaaaaacccaaaggtatgttttactgcatagcawtgattacattttgctttgcatcttttttaaaaaattaagaaattgagacagggtctcactctgtcacccaggctggagtgcagtggcgtgatcatagcta

SEQ ID NO: 239954 - DNA, 201 bp, Homo sapiens
tttactgcatagcaatgattacattttgctttgcatcttttttaaaaaattaagaaattgagacagggtctcactctgtcacccaggctggagtgcagtgrcgtgatcatagctaactgtagcttcaacctcctgggctcaagcaatcctcccacctcagcctcctgagtagctgggagcactgactggaaagagagttag

SEQ ID NO: 239955 - DNA, 201 bp, Homo sapiens
tgctcgactgatgggtgggagcaatagtgagagagagggagggacctgagggtggaagactttactgggatgtaaggtgctacctgagcagacttcctgcrgggaggtctaatttggtttaatgcaggcagctatgagtctctgctgtggctgagaggtggtcactgatatatccacatggtccctgcacagtatgggggt

SEQ ID NO: 239956 - DNA, 201 bp, Homo sapiens
attgcactctattgcactctagcctgggtgacagggcaagactccatcccccccctccccccgccaaaaaaaaaaaaaagcattttaaaataacaggagcrttcactacaaactgacttaagagcctttgggccttatgagaacattggtggtagtctggcagtagccccccatggcctgtgtttgagttggccatggatt

SEQ ID NO: 239957 - DNA, 201 bp, Homo sapiens
gtaactgggaggaggtgaactggaaactgctgagggtgactgaaccccacttctgatatcagaaaatccaatttataattaaaaggtatgctgaggcaacraaaaaattataagaattcactacaatgtagttgggtatatataggcgtaggtccttagtagagtctgtttggcactatctaaaccagattcaaatagcag

SEQ ID NO: 239958 - DNA, 201 bp, Homo sapiens
gaataattccttaagtccagcaaggcaacaggaaattaaacctctggtctacagacttgcaatgcaaaatatttaatggattttgatagagtcaactttgkatttgatggaaattttttacaagtttttttttggatgaatacaaacaataagctttttcttctaacatgagcaaagtccctcaaaaagtgagacatcagt

SEQ ID NO: 239959 - DNA, 201 bp, Homo sapiens
aaacagattttttaaatgaaaggaaagaaaattacctgacttggctgaatggccccatgtggtctctcattctccagtaggctacttcaggcctgttcacrtgatggcagaggcaagagtcccaggagcggcaacaaaacaatgcaaatcctcttcaggctcaggctcaaaattatatattaattctaccccattttattg

SEQ ID NO: 239960 - DNA, 201 bp, Homo sapiens
ggaggttgcagtgagcccagatcacgccattgcactccagcctgggcaacaagagtgaaactccatctcaaaaaaaaaaaaaaaaaaaaagagatcttgtyatttggaacaacatggaactggagatcactatgtttgttaagtgaaataaaccaggcacagaaggataaacatcacatgttctcacttattatggggctc

SEQ ID NO: 239961 - DNA, 201 bp, Homo sapiens
cccttgcataagcaggataaaggtgtatgagggtggcctgtagtgtatatttagagacgacatccaaggcttgatcctcatatggtcctatctccaggaasgtttaggaagattttggcctctgaaacattaggaatctgttgagattgaagctttcatgcttggagcacctaaagtgcagaaagcttacagaagcttatg

SEQ ID NO: 239962 - DNA, 201 bp, Homo sapiens
gggctctaaaaaaaaaaaaacaattgaactcatagacctagagagcagacggatggtcatcagaggctgggcatggtagtaggggcttcggggtggggagrtggggatggttaatgggtacaaaaaaaatagaatgagtaacccctactatttgatagcacaagagattgaccatagtcaacaataacttgattgtatatt

SEQ ID NO: 239963 - DNA, 201 bp, Homo sapiens
agtgtattaccttgatgagaatgtttgtgtatttgaaattaaaaatgtgtatcagtttatattgccacatactgatttttatggcataatatatggtgtasagagcaggttgtttaaaaaccaatattggcaaaatgctgaatattcaacatggttttatgaagttgacagatgtggagtgtattttgcatgtgtcttaac

SEQ ID NO: 239964 - DNA, 201 bp, Homo sapiens
tgaccaggaactagccattgatatagaaacattcattattcttacattttctttcttttttctgtgtcctctctctctctctctcacagacacacacacasacacacacacacacacacacacacacacacacagtctcagaagtactagtgctgtatcctgaaattgttttagttcttgtcaaaattcctccgattttat

SEQ ID NO: 239965 - DNA, 201 bp, Homo sapiens
gaatttttaggaacaacacattgcaatttgtagcgcaatcatagccaatttgaatcaaaacaaaacaaaaaaagtcgtgtatgcatttatgttgtttcttrctatttacctttcaatcctttgcactgacgccaatgaattgacatcagaaatctgtgctggagtcaacaatgaaaggtgatgtcataatatatattggag

SEQ ID NO: 239966 - DNA, 201 bp, Homo sapiens
tagcgcaatcatagccaatttgaatcaaaacaaaacaaaaaaagtcgtgtatgcatttatgttgtttcttactatttacctttcaatcctttgcactgacsccaatgaattgacatcagaaatctgtgctggagtcaacaatgaaaggtgatgtcataatatatattggagatgggaggaattcaggtttttgaaattcag

SEQ ID NO: 239967 - DNA, 201 bp, Homo sapiens
ttgtttcttactatttacctttcaatcctttgcactgacgccaatgaattgacatcagaaatctgtgctggagtcaacaatgaaaggtgatgtcataatakatattggagatgggaggaattcaggtttttgaaattcagtctcagaattattcatgggaaaatagttttctggacactgattctaaaattctttctaaaa

SEQ ID NO: 239968 - DNA, 201 bp, Homo sapiens
ttaccaatatagtccccaaaatatttttttatattttgaattaattgtctacatttaaataaaacaagagctgctgctgttgttactattcccttttaacrtctccccaaattagtgttttattcggtacactttatgagatggcagcttaacaatacccttaatatggcccaaggattctacaaaaggaaatgctggtgt

SEQ ID NO: 239969 - DNA, 201 bp, Homo sapiens
tttttatattttgaattaattgtctacatttaaataaaacaagagctgctgctgttgttactattcccttttaacatctccccaaattagtgttttattckgtacactttatgagatggcagcttaacaatacccttaatatggcccaaggattctacaaaaggaaatgctggtgtgtttgtcaaaagtgttttctggctg

SEQ ID NO: 239970 - DNA, 201 bp, Homo sapiens
actttcagtctacaaaggtaatttctaatcctcatagttttaatttacacatttaatgctttaatctacttacagtctacccttaaatatggtgttaggtrgggatttggtttcatttttctcccagtggtaggctgattttccaagtaccatctatgaaacaggtcatcctttttccttgtttatataatcatcatcaat

SEQ ID NO: 239971 - DNA, 201 bp, Homo sapiens
taatttctaatcctcatagttttaatttacacatttaatgctttaatctacttacagtctacccttaaatatggtgttaggtagggatttggtttcatttktctcccagtggtaggctgattttccaagtaccatctatgaaacaggtcatcctttttccttgtttatataatcatcatcaatgacatatatctacataag

SEQ ID NO: 239972 - DNA, 201 bp, Homo sapiens
aaaaacagactttaagtcaaactgtatgaagagacaaagaaggtcattttataataataaagagaccaacttagcaataagatataataattgtaaatatrtatgtacccaacactagagcactcagattaacaaggcaaatacttttaagtctaaagggaaagatagactccaatgcagtaacagttggggcctttaaca

SEQ ID NO: 239973 - DNA, 201 bp, Homo sapiens
aacaaggaaatatcagatttaagcttacagataggaataagttctggtgttctgtagtgctgtagggtgactacagttaacaataatttattgtatatttytaaatagagaggatgttgagtgttcccaacacaaagaatgataaatatttgaggtgatagatatgctgattatcctgatttgatcattacacattgtata

SEQ ID NO: 239974 - DNA, 201 bp, Homo sapiens
gaaagaaaattacctgacttggctgaatggccccatgtggtctctcattctccagtaggctacttcaggcctgttcacatgatggcagaggcaagagtccsaggagcggcaacaaaacaatgcaaatcctcttcaggctcaggctcaaaattatatattaattctaccccattttattggacaatgcaaattacactacca

SEQ ID NO: 239975 - DNA, 201 bp, Homo sapiens
ggtctctcattctccagtaggctacttcaggcctgttcacatgatggcagaggcaagagtcccaggagcggcaacaaaacaatgcaaatcctcttcaggcycaggctcaaaattatatattaattctaccccattttattggacaatgcaaattacactaccagtctggattcaaggagtagaaaataaactccaactctt

SEQ ID NO: 239976 - DNA, 201 bp, Homo sapiens
tacttcaggcctgttcacatgatggcagaggcaagagtcccaggagcggcaacaaaacaatgcaaatcctcttcaggctcaggctcaaaattatatattamttctaccccattttattggacaatgcaaattacactaccagtctggattcaaggagtagaaaataaactccaactcttgatggaaggaattataaagaat

SEQ ID NO: 239977 - DNA, 201 bp, Homo sapiens
cccattttattggacaatgcaaattacactaccagtctggattcaaggagtagaaaataaactccaactcttgatggaaggaattataaagaattgtggcmgtttttgatagtctaccataggggagaaagatggggatgctataacccaaaatgtgtattcttaggttgagatcctaaattatagtcagggcatacgaga

SEQ ID NO: 239978 - DNA, 201 bp, Homo sapiens
tacactaccagtctggattcaaggagtagaaaataaactccaactcttgatggaaggaattataaagaattgtggccgtttttgatagtctaccatagggragaaagatggggatgctataacccaaaatgtgtattcttaggttgagatcctaaattatagtcagggcatacgagaggtggaaggagtacctctttgcag

SEQ ID NO: 239979 - DNA, 201 bp, Homo sapiens
ttcaaggagtagaaaataaactccaactcttgatggaaggaattataaagaattgtggccgtttttgatagtctaccataggggagaaagatggggatgcyataacccaaaatgtgtattcttaggttgagatcctaaattatagtcagggcatacgagaggtggaaggagtacctctttgcagtgtgttagctcagttct

SEQ ID NO: 239980 - DNA, 201 bp, Homo sapiens
ctacgaggtgaaatgtgagggcttgaattcaggaaaagttgaagaattgagaccattgatggaatgagtctaccttattctcaggcagggaagcatttttrtacatgagatagttcacaagaaataactactatatagtcagagactcaagacttcagcaattgtataaaaatacatttgtaaatacctaaagaccttgaa

SEQ ID NO: 239981 - DNA, 201 bp, Homo sapiens
atattttattaaacttggatgtcattaattccatataaagcaatgctaagagagtcagaatgtgttactgatgtgttgctgaagattaaagtatttttatktctcactaaaaaggtggaaggagccaactgagacacaaaaaaggggctgaggttctattcatggtgaagttctttttttgtttcttctagctctaacatg

SEQ ID NO: 239982 - DNA, 201 bp, Homo sapiens
aaactccaactcttgatggaaggaattataaagaattgtggccgtttttgatagtctaccataggggagaaagatggggatgctataacccaaaatgtgtwttcttaggttgagatcctaaattatagtcagggcatacgagaggtggaaggagtacctctttgcagtgtgttagctcagttctgaacaggacagggctgc

SEQ ID NO: 239983 - DNA, 201 bp, Homo sapiens
ttttcggtgagccccaatataaaatgtaataattgttttctattcttaagctttatctaccaagaaatgaattggataatccacataaacaaaaagcttgracaatttatccaccagaatttgccgtggagatactttttggcaagaaatgacttccaatgacattgtagctggatccgattaagtatagctcccccttcc

SEQ ID NO: 239984 - DNA, 201 bp, Homo sapiens
aagaattgtggccgtttttgatagtctaccataggggagaaagatggggatgctataacccaaaatgtgtattcttaggttgagatcctaaattatagtcrgggcatacgagaggtggaaggagtacctctttgcagtgtgttagctcagttctgaacaggacagggctgcaagttcagctacttcccagaaaatgtgctg

SEQ ID NO: 239985 - DNA, 201 bp, Homo sapiens
aatcctcatagttttaatttacacatttaatgctttaatctacttacagtctacccttaaatatggtgttaggtagggatttggtttcatttttctcccartggtaggctgattttccaagtaccatctatgaaacaggtcatcctttttccttgtttatataatcatcatcaatgacatatatctacataagtttatctc

SEQ ID NO: 239986 - DNA, 201 bp, Homo sapiens
ttcatttttctcccagtggtaggctgattttccaagtaccatctatgaaacaggtcatcctttttccttgtttatataatcatcatcaatgacatatatcyacataagtttatctctgagctcaatattttgctccattgatacttatggcatccctacacctttttttattaccatgattagttaagttattaatggagc

SEQ ID NO: 239987 - DNA, 201 bp, Homo sapiens
aagtttatctctgagctcaatattttgctccattgatacttatggcatccctacacctttttttattaccatgattagttaagttattaatggagcctttrtatgttgacgtagattttgtagtaagtatgtcaatattctaaaaaattttgtaaaatacctatgtgggccctgtggtgtttgggagagggaaggggttta

SEQ ID NO: 239988 - DNA, 201 bp, Homo sapiens
atgtgggccctgtggtgtttgggagagggaaggggtttaaatactaggttgatttctttgttacttgagtattctatttctatataaatatattttcttgyactaatgttagtgttttatatttgtctaggaatttttccattccatctaagttttcacatttattagcatataattgaataatctcattttaaaaaatgt

SEQ ID NO: 239989 - DNA, 201 bp, Homo sapiens
gatagataacccattgtccacaataagggtgattattatgcatttagttatatctgttattatgtttgaattgccatgttggtattttagtcacatttaartgtcaaatgatgaatataattttattgtttgaaaatttcccatgaatgttatatttttcccttagtctactctaaaaaatacattttaaataattcatga

SEQ ID NO: 239990 - DNA, 201 bp, Homo sapiens
acagtcatacttttacagttaaggctttctgttttattttttcttaggactcccattctcatttcatatttccacatcttcctttgtgtcctcttatcctkaagaatatttgtcatgcttactttaaaatcttggtcagggtgttccagtagttttgctacagtaggtatgctgttgttcagcttgttgtatttctttttc

SEQ ID NO: 239991 - DNA, 201 bp, Homo sapiens
aaaagggaaacttcttgttattgtcttgtcacccttagtagcaggcacatacttaggaaagtcagatttcctgtgtatgagacatactagagtggaccaarggaagaaaaccctatgcagagcaacaagcgagtagcagtggacagggagcagtggagcccttagggaaaaacaaacagagctaatggccctggcagagtt

SEQ ID NO: 239992 - DNA, 201 bp, Homo sapiens; identical to SEQ ID NO: 47001

SEQ ID NO: 239993 - DNA, 201 bp, Homo sapiens
actgtagcttaaaatgtttaaaggatgttatgtttctaaatggtaccaaatattagtgaaatacttcccatataaaaaggatattttcccccaagaaattyagttatgtgcactgatcaaattttatttctacattgttgaaaaagaaaagatcttaaattagacaatttgaagctttcatcttgatggttagatatcttt

SEQ ID NO: 239994 - DNA, 201 bp, Homo sapiens
cccttttactacctctgattatggctcaacgctcttttttttttttttttttttttttttttttttttttttgagacagagtttcgctcttgttgcccagsctggagtgcaatggcatgatcttgggtcactgaaatgtctgcctcccacattcaagcaattctcctgcctcagcatcctgagtagttaggattacaggta

SEQ ID NO: 239995 - DNA, 201 bp, Homo sapiens
tctttgagttgggcagatcaacaactctttactcctgtcttatagactcccaaaagccaggctgccgaggccaccaaagtggctattgacgtaggcttccrccatattgattcagcatacttataccaaaatgaggaggaggttggacaggccatttgggagaagatcgctgatggtaccgtcaagagagaggaaatattc

SEQ ID NO: 239996 - DNA, 201 bp, Homo sapiens
tctcggctcactacaacctccgcctcctgggttcaagcagttctcctacctcagcctcttgagtagctgggactacaggtgcatgctgccacacccagctwattttttgtattttcgtagagacagggtttcactatgttgcccaggctggtctcgaactcctgagctcaggcaatctgcctgcctcggcctcccaaagtg

SEQ ID NO: 239997 - DNA, 201 bp, Homo sapiens
tacctcagtttaaagttgagtctagtcatgggtttgtactctcaaatatttatgagttgggtcaatttttctctttttgaggtcccaagaatatagggttyttgagcctgttagaaagtgacattctttatttattataggttaggaaccctgtttgggaactgcatagacaaggtatgaggccagtttttctaagaggtt

SEQ ID NO: 239998 - DNA, 201 bp, Homo sapiens
tctctgacccagcagaaatgtgtctgtaagtgaaactgccaatgtctgcaccattgtgaatccaattcttgaaggcccttactatctgtgcctgggtctascactcagggcccactgcctatgagtctagaaggctcagtgtgtaggacctacaaacctataggggcccatcataacgttctctttaatttatattaaaat

SEQ ID NO: 239999 - DNA, 201 bp, Homo sapiens
tttaataattctttatacatattgttaaagtagattagcttcttaagaaaaccttggggtggcagccaagaaggccgaataggaacagctctggtctacasctcccagcgtgagtgacgcagaagacgggtgatttctgcatttccatctgaggtaccgggttcatctcacaagggagtgccagacagtgggcacaggaca

SEQ ID NO: 240000 - DNA, 201 bp, Homo sapiens
tttcaccgtgttagccaggatggtctcgacctcctgacctcatgatccgcccacctcagcctcccaaagtgctgggattacaggcatgaggcactgcaccytgcccaaagtcagttatttcgaaccatttaaggtattaaccttggtccagacctgttgtcctcacctacagaggatgaaagtgtccaaagtgaattatgc

SEQ ID NO: 240001 - DNA, 201 bp, Homo sapiens
tgaattatgcagaaggccatttaggctgagcctcttggcatctgaattggaagccatttttaattttcatttttctcatggttgctgtgtgtgtgtttatstttgcaaaagcaatttaggccctggaattccaagctgttctgttaagacccaggctgctttgctatctcctatctttgttcaaaacaaacaaacaaaaaa

SEQ ID NO: 240002 - DNA, 201 bp, Homo sapiens
atccatttttgtttcttttggtcactgcagctttgggctactttctttcgggcagaattggttcacccggccctagaaaggtcactgaagaaacttggacyggactatgtagatctcttcattattcatgtaccatttgctatgaaggtcagcttttgtttttccttgttatgcccaagactgtttcatcatggttataag

SEQ ID NO: 240003 - DNA, 201 bp, Homo sapiens
ggtgtccaatttcaatcacaagctgctggaactcatcctcaacaagccagggctcaagtacaagcccacctgcaaccaggtgagcccttagcccaccgggrccttctctgactttttgctgttcacacacttcctgcttaatcatgtctccaagtttctgcttgatgtcttctgtgtagatgagagttcttttctctcaga

SEQ ID NO: 240004 - DNA, 201 bp, Homo sapiens
tttaaccaacagaatcatggccatttcgtagacaactacccagaaacatctacagaccgtgttgctcctgcaatcaatccaacaccaagaaagtctccccygccccccagcaggaagtagcgagaaacaacacattaccctttgtcctttcataactatagggtctggaattatagaacaggagcaccatcatctcggaca

SEQ ID NO: 240005 - DNA, 201 bp, Homo sapiens
tgcggtgttatttggacctatgacctgtttttgtagtttccttttgatgtcagtgcttgtctgagtaatacatttgtcttttaagattaattgtccctcarttgaatcaggagatagggaggtgggtttcactaaagtctatctcagcctttccataaaggctgaggtattttcatctgtttttagattcaacatggacag

SEQ ID NO: 240006 - DNA, 201 bp, Homo sapiens
acacacataaatgtaactgaaagaaggtctagctagcatcacgtatcattttacagtgttttttatacaatttaccagataagcctaatcatttactgtcttttttttgttatacttaagttttaggctacatgtgcacaatgtgcaggttacttacatatgtatacatgtgccatgttggtgtgctgcatccagtaacta

SEQ ID NO: 240007 - DNA, 201 bp, Homo sapiens
aatcttaaaatatttagtaaatttagtatatgacttgtataacacatatcacatatttatatcttgaagacatttgtattttaccaatactttttaagacwttttattttgtaaagattaaagtcacgtgaactaagaggcattataatttttaattttccttcaaaaatctttggtggtttttttttaggttaattaatt

SEQ ID NO: 240008 - DNA, 201 bp, Homo sapiens
attagttttactcacagttttcttcacagttttcttacattgcagtcattcaaggaaatctcagtatcccagcaaggacttgatttatactgagtaacatrtgtttagtcccagctcttttagctttggaccacagtgttttaagactcatatctcaatgtctgaccatgaagtttaatttttgtcctcaaatgtgtgaaa

SEQ ID NO: 240009 - DNA, 201 bp, Homo sapiens
tgaccagtgatgatgagcattttttcatgtgtcttttggctgcataaatgtcttcttttgagaagcgtctcttcatatcctttgcccactttttgatgggttttttttttcttgtaaatttgttggagttcattgtagattcttgatatttgccctttgtcagatgagtagattgcaaaaattttctcccattctctaggt

SEQ ID NO: 240010 - DNA, 201 bp, Homo sapiens
ttgtcaatcttctgattggattattggtctcaggatggagttttttttttaagaacagggctaggaaaatgtgcagtttctagggcctaataaataggtayagttggaagacaaaaatagattttgagagggatttatctgactctaattctttgggttcaggttccacaaggaaaacagagatttctctcaaaatggaat

SEQ ID NO: 240011 - DNA, 201 bp, Homo sapiens
cttattagttttactcacagttttcttcacagttttcttacattgcagtcattcaaggaaatctcagtatcccagcaaggacttgatttatactgagtaayatatgtttagtcccagctcttttagctttggaccacagtgttttaagactcatatctcaatgtctgaccatgaagtttaatttttgtcctcaaatgtgtg

SEQ ID NO: 240012 - DNA, 201 bp, Homo sapiens
tttttttttaagaacagggctaggaaaatgtgcagtttctagggcctaataaataggtatagttggaagacaaaaatagattttgagagggatttatctgwctctaattctttgggttcaggttccacaaggaaaacagagatttctctcaaaatggaatttgttgtgtatgtgtatatatggtttttcttttatttccaa

SEQ ID NO: 240013 - DNA, 201 bp, Homo sapiens
cttggaccggactatgtagatctcttcattattcatgtaccatttgctatgaaggtcagcttttgtttttccttgttatgcccaagactgtttcatcatgsttataagcatctgaattatctaattctagcttggtttccagggttcttcctgagagaggcagatttgagtgaggtgcataggattgccaaaactttcgtg

SEQ ID NO: 240014 - DNA, 201 bp, Homo sapiens
agattcttgatatttgccctttgtcagatgagtagattgcaaaaattttctcccattctctaggttgcctgttcactctgagggtagtttcttttgctgtrcagaagctcttgagtttaattagatcccatttgtcaattttggcttttgttgccattgcttttggtgttttagacatgaagtccttgcccatgcctatgt

SEQ ID NO: 240015 - DNA, 201 bp, Homo sapiens
gagggggcctgaatggtttgtcatctgtgaggttgggtctgggctgttctgaactggaaaggaaagaatgtgttgagtggacttggagaaagtgtaactcrgctttgccttggacctaggcccaggaccaatcagagactgaagtgaaagttttgtccaggaccttggtccgagactaatagagagttggagtaaaagctt

SEQ ID NO: 240016 - DNA, 201 bp, Homo sapiens
acctgttacaggaatcaactcctaaatacatcacactcgagtcaaaacctggaaagctaaggaagcaacccctgacagcccaaaaatgtcctaaatatcaytgtcaacaaataagaaatcttaagctgaaaatgataaaaagtaagtaactaagtgaaaattactcatcttactcagcctcaaccctacctcaccaaatac

SEQ ID NO: 240017 - DNA, 201 bp, Homo sapiens
agttcagatatattattttgaaatgaaaacatggtctaagttgaattctttatttacctcctaatattatgaaggcatattatagaaacagaaaagacttkcttactctgaaatattttactggtagaacacaattcttcagtgtctctgagcatcagacagtattcatgtataaaatggaaataatacttatctccttta

SEQ ID NO: 240018 - DNA, 201 bp, Homo sapiens
agaaaaccctctactaacagaaaacccaagagtctcctttgcttatgactctggtataatttgttaaggaactattgcatatctcaagccagataggtagyattgaaataagtgggagacaacaaatatgtctacttgctgttatgagtatgcttgtaatagaatcaaggagacaaacatatatgcatagcaaggtaatgc

SEQ ID NO: 240019 - DNA, 201 bp, Homo sapiens
catgtggttattggctcatatattgtgacaccttttggtcttgaaaaattacaggtggaatgtcacccttacctcaaccagagcaaactcctggagttctkcaagtccaaggacattgttctagttgcctacagtgccctgggatcccaaagagacccacagtggtaataagaatgtcaaagagttaacctatggcgggaa

SEQ ID NO: 240020 - DNA, 201 bp, Homo sapiens
cctgggtcctttggcagcatgcgtcattgtcattcttatcttctctcctttctagagtgcaagctcttctaggctcaaatggaaactttcacactcagaaytggaatatgcccttcctctaaggaatcttggtttctttcagtaaaaatggcttttagaggctataattggggcacaaggtattttaataattttcaaaca

SEQ ID NO: 240021 - DNA, 201 bp, Homo sapiens
ccattgcccaggcttgcttaggtaaacaaagcagcctggaagctcgaactggagcagaggtgtggagcccaccacagctcaaggaggcctgcctgcctctstaggctccacctctgggggcagggcacagacaaacaaaaagacagcagtaacctctgcagacttaaatgtccctgtctgacagctttgaagagagcagtg

SEQ ID NO: 240022 - DNA, 201 bp, Homo sapiens
aacaaagcagcctggaagctcgaactggagcagaggtgtggagcccaccacagctcaaggaggcctgcctgcctctctaggctccacctctgggggcaggrcacagacaaacaaaaagacagcagtaacctctgcagacttaaatgtccctgtctgacagctttgaagagagcagtggttctcccagcatgcagctggagc

SEQ ID NO: 240023 - DNA, 201 bp, Homo sapiens
ctgggggcagggcacagacaaacaaaaagacagcagtaacctctgcagacttaaatgtccctgtctgacagctttgaagagagcagtggttctcccagcaygcagctggagctctgagaacaggcagactgtctcctcaagtgggtccctgacccctaacccccgagcagcctaactgggaggcagcccccagtaggggca

SEQ ID NO: 240024 - DNA, 201 bp, Homo sapiens
ggtactcatttgagacaaaacttccagaggaatgatcagacagcagcattcgcagttcatgaaaatccgctgttctgcaatctctgctgcggatacccagrcaaacagggtctggagtggacctctagcaaactccaacagacctgcagctgagggtcctgtctgttagaaggaaaactaacaaaaagaaaggacatccac

SEQ ID NO: 240025 - DNA, 201 bp, Homo sapiens
agtggcagctttgctgtgaggttattggggctggaagtatttgccagagagtttcaaccatccaaactttttgctatataagaagccactgcgattctgtyacagtctcatcaatgtattaaaaatatagtagtctttcattttgagggattatctgaagttttttgtcttatgactgagaaaattaaggactgtggacac

SEQ ID NO: 240026 - DNA, 201 bp, Homo sapiens
aacagggtctggagtggacctctagcaaactccaacagacctgcagctgagggtcctgtctgttagaaggaaaactaacaaaaagaaaggacatccacacyaaaagcccatctgtgcatcaccatgatcaaagaccaaaagtagataaaaccacaaagatggggaaaaaacagagtagaaaaactggaaactctaaaaagc

SEQ ID NO: 240027 - DNA, 201 bp, Homo sapiens
caaactccaacagacctgcagctgagggtcctgtctgttagaaggaaaactaacaaaaagaaaggacatccacaccaaaagcccatctgtgcatcaccatsatcaaagaccaaaagtagataaaaccacaaagatggggaaaaaacagagtagaaaaactggaaactctaaaaagcagagtgcctctcctcctccaaacga

SEQ ID NO: 240028 - DNA, 201 bp, Homo sapiens
aaatattgtagttctagattaagtatattaacttgtggaaaaattaaataggtaaatctaaatctcattgtgacaacttaaacaaaaaatgcccattttaytttttgatccaattcaaaatgttaatacctgctctcatgacaaccatataacttctgaagtacatttttaaaaagagtggtggataaatgtgttggtaga

SEQ ID NO: 240029 - DNA, 201 bp, Homo sapiens
gaaaactggcacaagacagggatgccctctcttaccactcctattcaacatagtgttggaagttctggccagggcaattaggcaggagaaggaaataaagkgtattcaattggaaaagaggaagtcaaattatccctgtttgcagacgacatgattctatatctagaaaaccccatcatctcagcccaaaatctccttaag

SEQ ID NO: 240030 - DNA, 201 bp, Homo sapiens
ttattatgagtttaatatttacaagagatgacatttgagtcatatataatgtatttatttcaaaatattgtagttctagattaagtatattaacttgtggraaaattaaataggtaaatctaaatctcattgtgacaacttaaacaaaaaatgcccattttattttttgatccaattcaaaatgttaatacctgctctcat

SEQ ID NO: 240031 - DNA, 201 bp, Homo sapiens
ttcttctccttcaccttctctacctataaatgcctatttgtattttaaaatcaaacccaaataaaattagctgctctgttaaactactgggacaccccagsccagttttcaccacaaaagcccctggcatgactctgttagtgagttttttgtttattaattttacatcatttgctaatacttcagtgtgctctctggact

SEQ ID NO: 240032 - DNA, 201 bp, Homo sapiens
cctgtgctctccactctgtgctaagggaggagggcagtgtggaaggatcgacgagagggcactgaactcagagtcctcaggtttatcatctctaggcttgrctttgccacttactagttggttgacactaagcaaatttcaactcacttattttcatccgtttcaggagttctttacatggtaatgaactttaaggaccct

SEQ ID NO: 240033 - DNA, 201 bp, Homo sapiens
tacccttcccctggcagtgactctagcaggtatgaaactaggcataagtttacagaccaaccaaactaagaaattgaggagtgaagttatcttgtaaaccyttctccacatccactctggaccttgtattaatcacaggtctccaacttattttgttttgaatcccacaagaattttgaaaaaatatgtaagctgtttctc

SEQ ID NO: 240034 - DNA, 201 bp, Homo sapiens
gggccaatattcaacatccttaaagaaaagaattttcaacccagaatttcatatccagccaaactaagcttcataagtgaaggagaaataaaatactttayagacaagcaaatgctgagagatttttgtcaccaccaggcctgccctaaaagagctcctgaaggaagcactaaacatggaaaggaacaaccagtaccagcc

SEQ ID NO: 240035 - DNA, 201 bp, Homo sapiens
ctccttctggattatcttttattacccttcccctggcagtgactctagcaggtatgaaactaggcataagtttacagaccaaccaaactaagaaattgagragtgaagttatcttgtaaacccttctccacatccactctggaccttgtattaatcacaggtctccaacttattttgttttgaatcccacaagaattttga

SEQ ID NO: 240036 - DNA, 201 bp, Homo sapiens
ccttcacatctgtgtctgttccctccccaacagggtggatcccgactgcccacatctcttggaggagccgatcttgaaatccattgccaagaaacacagtsgaagcccaggccaggtcgccctgcgctaccagctgcagcggggagtggtggtgctggccaagagcttctctcaggagagaatcaaagagaacttccaggt

SEQ ID NO: 240037 - DNA, 201 bp, Homo sapiens
cacctctgccatcctccctctctgggaagtgactggggttaaaggcattgcttgcattcatgtccctttctccatgtctgatttgttgctgatcaaagttwtaagtatattcaaaaggcttttatatttttctcttcatcaatcttgttttcctagaaaaggttttttttcccagttaactgaattacttttctccattct

SEQ ID NO: 240038 - DNA, 201 bp, Homo sapiens
gtttgcatttattaatcaagcaatttcatacttatctctgccaaatactataaggtgtcaaaatttgttatagaggctacaaaagtaaaactcagcccaarcaaaataatctttgcttgtgtaatttttaataaataaaaattaatattagtttaatgaagatagctgcatctgaaactatttagtaaaatatccttactt

SEQ ID NO: 240039 - DNA, 201 bp, Homo sapiens
gtcctcaggtttatcatctctaggcttggctttgccacttactagttggttgacactaagcaaatttcaactcacttattttcatccgtttcaggagttctttacatggtaatgaactttaaggaccctgattcttctccttcaccttctctacctataaatgcctatttgtattttaaaatcaaacccaaataaaattag

SEQ ID NO: 240040 - DNA, 201 bp, Homo sapiens
agtaaattaactggttgtttaaagaaaggaatgtttacaagtcaaaaaattaaggcatatcagaaattgactgtgaaggtcatggaaaattttataaaagrgaatttatgcaagaaatgttgtacaatttaaaagtaattaggcctcctgaatgctttataaaatgccactataactgttagctgtacaacttgcctgttt

SEQ ID NO: 240041 - DNA, 201 bp, Homo sapiens
ttcagtaaaaatggcttttagaggctataattggggcacaaggtattttaataattttcaaacacgaatagaaaaggaataagaaaattactgtatcagtrtggcaaatgatgggatttgaaagtgcttcagaaggtgcatggggaaaagggccaacatgaaaagtatagtacatctattaatgtagtattacacattcct

SEQ ID NO: 240042 - DNA, 201 bp, Homo sapiens
tataaatgcctatttgtattttaaaatcaaacccaaataaaattagctgctctgttaaactactgggacaccccagcccagttttcaccacaaaagccccbggcatgactctgttagtgagttttttgtttattaattttacatcatttgctaatacttcagtgtgctctctggactgtgagaacctaaatacaatggctc

SEQ ID NO: 240043 - DNA, 201 bp, Homo sapiens
ttcattattcatgtaccatttgctatgaaggtcagcttttgtttttccttgttatgcccaagactgtttcatcatggttataagcatctgaattatctaaytctagcttggtttccagggttcttcctgagagaggcagatttgagtgaggtgcataggattgccaaaactttcgtgagtatctttcacaattgagtgact

SEQ ID NO: 240044 - DNA, 201 bp, Homo sapiens
tatagagaaagagataaatacattagatagatagatagatagatagatagatctgagtctttcatgaaattgtgtcctggatcacataatgaaagtagcatttttttttaaccaaaaaatatctgttttactattaatgggctcctcatcagggactatgtgttgacaaatgaaaactactcttgacttaagtaagagaga

SEQ ID NO: 240045 - DNA, 201 bp, Homo sapiens
tccagttcactgcatttatgaatgaatccatatgaatagttatcagaccgttttaaatcaaattgtattgtgcccactcctctcaactctctggagaattyggggaaaaggagcagcgcactgtagattttccatcctgcatccttcacatctgtgtctgttccctccccaacagggtggatcccgactgcccacatctct

SEQ ID NO: 240046 - DNA, 201 bp, Homo sapiens
ctgataactttggagattgtaacatcaaaatagaggaaaaatgttcaggacttttaaagagctaaaatgttaattaatatcaaacaggacaggaattagckgcataaattaaattaataggaagctaatctttttaacattttgcttaaagtattgtaatccttcgttttgcttttcaaagtgaaagacatttttcttttg

SEQ ID NO: 240047 - DNA, 201 bp, Homo sapiens
atgaatgaatccatatgaatagttatcagaccgttttaaatcaaattgtattgtgcccactcctctcaactctctggagaatttggggaaaaggagcagcrcactgtagattttccatcctgcatccttcacatctgtgtctgttccctccccaacagggtggatcccgactgcccacatctcttggaggagccgatcttg

SEQ ID NO: 240048 - DNA, 201 bp, Homo sapiens
agtgaaaatgctattgggggaaatgcattgattttctttgagttgggcagatcaacaactctttactcctgtcttatagactcccaaaagccaggctgccraggccaccaaagtggctattgacgtaggcttccgccatattgattcagcatacttataccaaaatgaggaggaggttggacaggccatttgggagaagat

SEQ ID NO: 240049 - DNA, 201 bp, Homo sapiens
ttaaaaaggccttatctcagattccttctatggaacaaagttccatcaaagctaatttaaaaggcctatgtaataaataattattcttgctgcactgtatrcaaataattaagccaagtataataaagcagaccaatcctaccataatctgtcttttaataaaaatgggaaactgaagagagaaaattatgtttcaaaaac

SEQ ID NO: 240050 - DNA, 201 bp, Homo sapiens
aaggcccttattaggtgaaaatttagacagaaatattgaattccccttgtttctagggaatcacaaaatcagtacctatttgaattacattcctgattacyacaacactggctgagtttacccaataagaatatatccacaacttgtaaaaatgctataacattatatacaaagaaggaacagaagacatgatagccatga

SEQ ID NO: 240051 - DNA, 201 bp, Homo sapiens
cagaaaagactttcttactctgaaatattttactggtagaacacaattcttcagtgtctctgagcatcagacagtattcatgtataaaatggaaataatamttatctcctttaactgttgtatggattaaccaagccactatgggtccactccttcagttcttcagtaagagctcttaggatgtagcaagtaaggtcacat

SEQ ID NO: 240052 - DNA, 201 bp, Homo sapiens
ggttaatgtgagtgttttcttcctttcagatttttgactttgagttgactccagaggacatgaaagccattgatggcctcaacagaaatctccgatatgayaagttacaattgtaagtgatgcttgtagattctctcacaggctgttttctgtagtatgcagggaaatggggaacacatcttccctacatcaggaagacag

SEQ ID NO: 240053 - DNA, 201 bp, Homo sapiens
tttctttctgattggtgaaagtggcctttttctgttcacagatggggtatgaagtttgatcactattagagggatatagaagggagaggaattgggaaacyagaggttttgagcaaagggctgacaaggctccccatggagaaaaaatcctatccccctaggaggtgttgtagggtctgaaatgttaggcaaaaactctga

SEQ ID NO: 240054 - DNA, 201 bp, Homo sapiens
ctaatcatttactgtcttttttttgttatacttaagttttaggctacatgtgcacaatgtgcaggttacttacatatgtatacatgtgccatgttggtgtrctgcatccagtaactagtcatttaacattaggtatatctccaaatgctatccctccccactcccctcacaacaagccccagtgtgtgttgttccccttcc

SEQ ID NO: 240055 - DNA, 201 bp, Homo sapiens
ttttttttcttcagagtctcggggtcaaaggaatctcaatgcttcagaatgcacttgagaagagtgcaggctgaagatggtttgttactcatctagacaasggaggagaaaagatgtcccttagtctctttcttctttttagagtgacccagggtggagagaaagatagaaagggtgtcccacttttccttttttctctca

SEQ ID NO: 240056 - DNA, 201 bp, Homo sapiens
aatagcacactaatataaaagtataatttggcttatttagtatcaaatcatgcagaaagcattgtcaaatataaaatggtgtttagctttctttgggctawatttatatgaatacattattgtatgtgtcccaaagttataggaaacacctataattcccatatatcttagtgtgtattatcagtaataattataattgtt

SEQ ID NO: 240057 - DNA, 201 bp, Homo sapiens
ttttttttgttatacttaagttttaggctacatgtgcacaatgtgcaggttacttacatatgtatacatgtgccatgttggtgtgctgcatccagtaactmgtcatttaacattaggtatatctccaaatgctatccctccccactcccctcacaacaagccccagtgtgtgttgttccccttcctgtgtccatgtgttct

SEQ ID NO: 240058 - DNA, 201 bp, Homo sapiens
tttttttgttatacttaagttttaggctacatgtgcacaatgtgcaggttacttacatatgtatacatgtgccatgttggtgtgctgcatccagtaactartcatttaacattaggtatatctccaaatgctatccctccccactcccctcacaacaagccccagtgtgtgttgttccccttcctgtgtccatgtgttctc

SEQ ID NO: 240059 - DNA, 201 bp, Homo sapiens
aatgggtttttcttaaagcactaacctgctctttaacaaaaattataaagggttaaaaagagtctgtaaaaatcttaccttatgctcagacattaaaattrggtaaatatgtatacaaggttttattaaaaattaaatttaaaattaatagcacactaatataaaagtataatttggcttatttagtatcaaatcatgcag

SEQ ID NO: 240060 - DNA, 201 bp, Homo sapiens
ttggggagttgtctactgtgggcttgtctgatacaactgttaagagggtagggtcaattttataatgcttacaaagatctgggttgtttttcagggcaaaraagcttgcacataggaaacctcagaccgtttcctctcctgtgtgcaggaaagatctagttgttggatagtattaaaattaacacttttctcaggagtcta

SEQ ID NO: 240061 - DNA, 201 bp, Homo sapiens
tccagtttttctgtaaattgagcattaaaataaaagcacaatgggtttttcttaaagcactaacctgctctttaacaaaaattataaagggttaaaaagaktctgtaaaaatcttaccttatgctcagacattaaaattaggtaaatatgtatacaaggttttattaaaaattaaatttaaaattaatagcacactaatat

SEQ ID NO: 240062 - DNA, 201 bp, Homo sapiens
ggttaattgtaaaggaaattctgtgtgtaaacatattggctaaggttaaaggggcatcatccagtttttctgtaaattgagcattaaaataaaagcacaaygggtttttcttaaagcactaacctgctctttaacaaaaattataaagggttaaaaagagtctgtaaaaatcttaccttatgctcagacattaaaattagg

SEQ ID NO: 240063 - DNA, 201 bp, Homo sapiens
ttaggcaggagaaggaaataaagggtattcaattggaaaagaggaagtcaaattatccctgtttgcagacgacatgattctatatctagaaaaccccatcrtctcagcccaaaatctccttaagctgataagcaacttcagcaaagtctcaggatacaaactcaatgtacaaaaatcacaagcattcttatacaccaataa

SEQ ID NO: 240064 - DNA, 201 bp, Homo sapiens
agattcaatgccatccccatcaagctaccaatgactttcttcacagaattggaaaaaactactttaaagttcgtatggaaccaaaaaagagcctgcatcamcaagtcaatcctaagccaaaagaagaaagctggaggcatcacactacctgacttcaaactatactacaaggctacagtaaccaaaacagcatggtactgg

SEQ ID NO: 240065 - DNA, 201 bp, Homo sapiens
aggcaacctacgaaatgggagaaaattttcgcaacctactcatctgacaaagggctaatatccagaatctacaatgaactcaaacaaatttacaagaaaaaaacaaacaaccccatcaaaaagtgggcgaagttcatgaacagacacttctcaaaagaagacatttatgcagccaaaaaaacacatgaaaaaatgctcacc

SEQ ID NO: 240066 - DNA, 201 bp, Homo sapiens
ggcaacctacgaaatgggagaaaattttcgcaacctactcatctgacaaagggctaatatccagaatctacaatgaactcaaacaaatttacaagaaaaaaacaaacaaccccatcaaaaagtgggcgaagttcatgaacagacacttctcaaaagaagacatttatgcagccaaaaaaacacatgaaaaaatgctcacca

SEQ ID NO: 240067 - DNA, 201 bp, Homo sapiens
gcaacctacgaaatgggagaaaattttcgcaacctactcatctgacaaagggctaatatccagaatctacaatgaactcaaacaaatttacaagaaaaaaacaaacaaccccatcaaaaagtgggcgaagttcatgaacagacacttctcaaaagaagacatttatgcagccaaaaaaacacatgaaaaaatgctcaccat

SEQ ID NO: 240068 - DNA, 201 bp, Homo sapiens
caacctacgaaatgggagaaaattttcgcaacctactcatctgacaaagggctaatatccagaatctacaatgaactcaaacaaatttacaagaaaaaaacaaacaaccccatcaaaaagtgggcgaagttcatgaacagacacttctcaaaagaagacatttatgcagccaaaaaaacacatgaaaaaatgctcaccatc

SEQ ID NO: 240069 - DNA, 201 bp, Homo sapiens
gaaagagatcatgtgcattagtttgcacctggcttctttcaccatatctgtgagctgcattcatgtagctgtgagtatctgtagttctttccattttattkctgggtgttattccagggtatggataacttgtttatccattcacctgttaatggacagccttattgtttccagttcactgcatttatgaatgaatccata

SEQ ID NO: 240070 - DNA, 201 bp, Homo sapiens
caaatcaaaaccatgatgagataccatctcacaccagttagaatggcaatcattaaaaagtcaggaaacaacaggtgctggagaggatgtggagaaatagkaacacttttacactgttggtgggactgtcaactagttcaaacattgtggaagtcagtgtggcgattcctcagggatctagaactagaaataccatttgac

SEQ ID NO: 240071 - DNA, 201 bp, Homo sapiens
ttggggtgtccaatttcaatcacaagctgctggaactcatcctcaacaagccagggctcaagtacaagcccacctgcaaccaggtgagcccttagcccacygggaccttctctgactttttgctgttcacacacttcctgcttaatcatgtctccaagtttctgcttgatgtcttctgtgtagatgagagttcttttctct

SEQ ID NO: 240072 - DNA, 201 bp, Homo sapiens
actgttggtgggactgtcaactagttcaaacattgtggaagtcagtgtggcgattcctcagggatctagaactagaaataccatttgacctagccatcccmttactgggtatatacccaaaggactataaatcatgctgctataaagacacatgcacacatatgtttattgcagcactattcacaacagcaaagacttgga

SEQ ID NO: 240073 - DNA, 201 bp, Homo sapiens
acatatgtttattgcagcactattcacaacagcaaagacttggaactaacccaaatgtccaacaatgataggctggactaagaaaatgtggcacatatacwccatggaatactatgtagccataaaaaatgatgagttcatgtcctttgtaggtacatggatgaaattggaaatcatcattctcagtaaactatcgcaagg

SEQ ID NO: 240074 - DNA, 201 bp, Homo sapiens
attttgtaaagattaaagtcacgtgaactaagaggcattataatttttaattttccttcaaaaatctttggtggtttttttttaggttaattaattagagtttttttttttatagacatcacatatctaacatatatatgactctatagacagaagaagatctagtagttgtaaaattttctgtttgtcaatcttctgatt

SEQ ID NO: 240075 - DNA, 201 bp, Homo sapiens
tgagcccttagcccaccgggaccttctctgactttttgctgttcacacacttcctgcttaatcatgtctccaagtttctgcttgatgtcttctgtgtagawgagagttcttttctctcagaaataggagataccagagaaagagcaatttgagtggggtggaagagcacaattcttcagaaggggtgaaagtttctatgag

SEQ ID NO: 240076 - DNA, 201 bp, Homo sapiens
ttaaagcgaagttttaaaaattgtattataaaaaagctcaaagattaaaagcgaaaagcaacggtgtagtttgttcccatgtatcactactgagcttaaaygtcaccaacattctttccttcctgtttcatctatgtgactacttactcccaaccccactcctaaaataaattttaaagtggtctttaggtaagatttgcc

SEQ ID NO: 240077 - DNA, 201 bp, Homo sapiens
ttctaaggttctaagtagacatagaggcacctttggccttgagatcaggttgaggatgtgagccctataaggggtcagcatagagaagcacaaaaggagtyagcatgttatctttggatagaaacacatcatggaggagggacagctgcggactgactcagcaggagggtggaaggtgcaggacagtgaacctgcccttga

SEQ ID NO: 240078 - DNA, 201 bp, Homo sapiens
cacttcctaatggcttactcatcgatccacgtgacacactttgacatgttccttttgtacttcctgtaaattgaagcttagtgctacagatctgatctcayttgattaatgccatgcgaatttatgaattttagccaatacgtcattttccattcatcataattactatttttttgatgctcaagtttccatattttgacc

SEQ ID NO: 240079 - DNA, 201 bp, Homo sapiens
agtcaaaacctggaaagctaaggaagcaacccctgacagcccaaaaatgtcctaaatatcattgtcaacaaataagaaatcttaagctgaaaatgataaamagtaagtaactaagtgaaaattactcatcttactcagcctcaaccctacctcaccaaatacattttattttttctacctctccttttaagctaaatatta

SEQ ID NO: 240080 - DNA, 201 bp, Homo sapiens
tcctcaggtttatcatctctaggcttggctttgccacttactagttggttgacactaagcaaatttcaactcacttattttcatccgtttcaggagttctytacatggtaatgaactttaaggaccctgattcttctccttcaccttctctacctataaatgcctatttgtattttaaaatcaaacccaaataaaattagc

SEQ ID NO: 240081 - DNA, 201 bp, Homo sapiens
aagtccacctctggagagcccaacatcccttgactttggtttatttataaacgtgacgttccagttgctcaactactgcaggatctcaggactaaggagasagaaggctaaatagagaggagtttagaggaaagtttagaagcaggggaaatacaattttggttgccagagtaaagactcagtctccaaaaaagatctgaa

SEQ ID NO: 240082 - DNA, 201 bp, Homo sapiens
aagcaacggtgtagtttgttcccatgtatcactactgagcttaaacgtcaccaacattctttccttcctgtttcatctatgtgactacttactcccaaccscactcctaaaataaattttaaagtggtctttaggtaagatttgcctaggctgtaatgctgtacaattttggcaaatggacatactctgtaacccacatcc

SEQ ID NO: 240083 - DNA, 201 bp, Homo sapiens
aagtgtaactcagctttgccttggacctaggcccaggaccaatcagagactgaagtgaaagttttgtccaggaccttggtccgagactaatagagagttgragtaaaagcttgaccaaggaccttggcccaggagcaatcaaaggctgtagtgatgattcttagaggctcagctcacagtcaaaagcatgtccaaaaaaga

SEQ ID NO: 240084 - DNA, 201 bp, Homo sapiens
acgtccacaaaaggagaagagactactttctagaagcctgttggttacacaaaggacaggggcatttctatgttgggtcttgttctcttattagtgtagtyatgggtatgtcttaggcttaaaggacaaaggcgtttttatgttgggacaaaggcatatctgtggtgagtcttgttctcttattagtgtagttgttggtat

SEQ ID NO: 240085 - DNA, 201 bp, Homo sapiens
gactgaagtgaaagttttgtccaggaccttggtccgagactaatagagagttggagtaaaagcttgaccaaggaccttggcccaggagcaatcaaaggctrtagtgatgattcttagaggctcagctcacagtcaaaagcatgtccaaaaaagaaaagtgtccactggaagccactgtagcccacagtgtacacgtccaca

SEQ ID NO: 240086 - DNA, 201 bp, Homo sapiens
tagtgtcataatggggactagattgtgcttctcatgaaatacactatttgccatccactcagtttactgaagggaatttaaagtgtcacactggtcacagkgaggtagggtgagctttggggttgctttgcaagaattgctctaaaaatgacagaacaatgtgcttaatcttggtagaactataacatgagaagtcaattt

SEQ ID NO: 240087 - DNA, 201 bp, Homo sapiens
gaagcctgttggttacacaaaggacaggggcatttctatgttgggtcttgttctcttattagtgtagtcatgggtatgtcttaggcttaaaggacaaaggygtttttatgttgggacaaaggcatatctgtggtgagtcttgttctcttattagtgtagttgttggtatgtcttaggcataaaggacaaatgtgtttttat

SEQ ID NO: 240088 - DNA, 201 bp, Homo sapiens
cagacagggccagttgctttcagtggcataattatccattttatccagtaagtataaggtgtgtctaatatgttatattcaatttctacagttgattgatrtggaatgagacatgatttttccatgctccagggtgaagccaatttctctaattcatttgggaatagaagttatactggagtttaatcaatgtcctcagag

SEQ ID NO: 240089 - DNA, 201 bp, Homo sapiens
catccactcagtttactgaagggaatttaaagtgtcacactggtcacagggaggtagggtgagctttggggttgctttgcaagaattgctctaaaaatgayagaacaatgtgcttaatcttggtagaactataacatgagaagtcaatttacaacagctgtcagacagggccagttgctttcagtggcataattatccatt

SEQ ID NO: 240090 - DNA, 201 bp, Homo sapiens
gtgcaaggtgtgtaagaaaagtaaaatatacttttggtaaaaagattattaaggaggcataagaatgtggatttttacctccattcaaaggttgaagaatkgttttaaaagcttaagcaagttttggaaggttaattgtaaaggaaattctgtgtgtaaacatattggctaaggttaaaggggcatcatccagtttttctg

SEQ ID NO: 240091 - DNA, 201 bp, Homo sapiens
gaagaaacagtttatgtgcaaggtgtgtaagaaaagtaaaatatacttttggtaaaaagattattaaggaggcataagaatgtggatttttacctccattyaaaggttgaagaattgttttaaaagcttaagcaagttttggaaggttaattgtaaaggaaattctgtgtgtaaacatattggctaaggttaaaggggcat

SEQ ID NO: 240092 - DNA, 201 bp, Homo sapiens
gagttttctgaactctctaaaattgtcctagatggaaatccatgcttcatatgtaaacagagctgaggtctccagggatgcaccctgtgtgtgtttacatygataatttatttttagaatgtaggtctctcagaataattctttctaggaatttattatacaggacaagagattctgttctccctgtcctgccatttcttg

SEQ ID NO: 240093 - DNA, 201 bp, Homo sapiens
aagagagatacctgggatggtgcatgtggcacagatgggctcctttgggctccgctgatctaacctctcatcacagtggacgttggctgagcacttctgaygtccttactctctgagtcgggtgagcgtaaactggggctaaacacactgatgaatagctatattaagcactgtcctccacaccagcttgtccttgggaaa

SEQ ID NO: 240094 - DNA, 201 bp, Homo sapiens
gcatagagaagcacaaaaggagtcagcatgttatctttggatagaaacacatcatggaggagggacagctgcggactgactcagcaggagggtggaaggtscaggacagtgaacctgcccttgaaaaacccatttgattgattttttttcatttttttttcccattctagaacagaggtagcagaaaaccctctactaaca

SEQ ID NO: 240095 - DNA, 201 bp, Homo sapiens
taaataagtcataattgtgtttttcaggtgtgggtattagaaatgcatctcatcccctccatagattaaaccatgtgtgccgaggtacaagtagggacgtrgtggtaaattcgggaattttagcccatcccaagtgcttcttcagaaaaactctttgacagaatggaaaaaagttactaaattaatattttttctctttca

SEQ ID NO: 240096 - DNA, 201 bp, Homo sapiens
tgctggaactcatcctcaacaagccagggctcaagtacaagcccacctgcaaccaggtgagcccttagcccaccgggaccttctctgactttttgctgttyacacacttcctgcttaatcatgtctccaagtttctgcttgatgtcttctgtgtagatgagagttcttttctctcagaaataggagataccagagaaagag

SEQ ID NO: 240097 - DNA, 201 bp, Homo sapiens
tgggattttgctccagcagttgtctgacctcagatgtggagcttctctgtgcctctgtgttctcatctgtgaagtgagagagtggaatgagatggcctctrcagttcattttaattgtaacttctaaggttctaagtagacatagaggcacctttggccttgagatcaggttgaggatgtgagccctataaggggtcagca

SEQ ID NO: 240098 - DNA, 201 bp, Homo sapiens
tattcaacatccttaaagaaaagaattttcaacccagaatttcatatccagccaaactaagcttcataagtgaaggagaaataaaatactttacagacaakcaaatgctgagagatttttgtcaccaccaggcctgccctaaaagagctcctgaaggaagcactaaacatggaaaggaacaaccagtaccagccactgcaa

SEQ ID NO: 240099 - DNA, 201 bp, Homo sapiens
tttatctgagtgagctggaggtttgtgtaagtttccttatctgtgtgtgtagtctgatttttttcaagctgtttctctgtttaaaggagttttaccaagarctcactctaactgtttaagttttttctctcatttttaccctcaggagtggagtccctaattgtcagggagattgggtgttgacttttctggctatttttt

SEQ ID NO: 240100 - DNA, 201 bp, Homo sapiens
tgaatgataattcataaaggctcatctcacggtccacatgtccacaaaaggaaaggaaagtgcccaccagagcccactggagcccaccatatacatgcccrcaaaagaaaaagagactttcctagaagtctgttggttacacaaaagacaaatgtgtttctctgttggttcttgttctcatatgagtgcagttgttgccat

SEQ ID NO: 240101 - DNA, 201 bp, Homo sapiens
ggttgtttggccgagctccttaggcaccagaaaggagaattccatagaaaatgtccttctttatcttcttttctattttccagcctgggaaagaattactkccaaaggatgccagtggagagattattttagaaactgtggagctttgtgacacttgggaggtatgttctgctgcagacaccaggcagcactgtgtagtga

SEQ ID NO: 240102 - DNA, 201 bp, Homo sapiens
ccagggtagttgtagctaagaatatgattgacaaagtaatttggttatttctgtggtttacaatagtttaacacaataaccttaattatgattgacagtayatatttagacattagaatcttagacatcttatatggttttggaacatacattaatattatttactgaaatataacttgaggaagattaaatatcattttg

SEQ ID NO: 240103 - DNA, 201 bp, Homo sapiens
tccatttttgtttcttttggtcactgcagctttgggctactttctttcgggcagaattggttcacccggccctagaaaggtcactgaagaaacttggaccrgactatgtagatctcttcattattcatgtaccatttgctatgaaggtcagcttttgtttttccttgttatgcccaagactgtttcatcatggttataagc

SEQ ID NO: 240104 - DNA, 201 bp, Homo sapiens
cctcactcgggaagtgcaaggggtcagggagttccctttcctagtcaaagaaaagggtgacagacggcacctggaaaatcgggtcactcctaccctaatascgcgcttttccgacgggcttaaaaaacagcgcaccaggagattatatcccacacatggctcggagggtcctatgtccacggagtctagctgattgctagc

SEQ ID NO: 240105 - DNA, 201 bp, Homo sapiens
ttttgtaaagattaaagtcacgtgaactaagaggcattataatttttaattttccttcaaaaatctttggtggtttttttttaggttaattaattagagtttttttttttatagacatcacatatctaacatatatatgactctatagacagaagaagatctagtagttgtaaaattttctgtttgtcaatcttctgattg

SEQ ID NO: 240106 - DNA, 201 bp, Homo sapiens
tatttttcattaattaaaattttacagagaatataaacagtgatgcttattattctttttattggtttgtatagggagaaaggccaaaagtctgagtagattttttttttttaatcgttttgttagtatgtctggcttttcggttttctaggggagtttttcttgaagtcttttttggctgtataagtttgtaccactatt

SEQ ID NO: 240107 - DNA, 201 bp, Homo sapiens
cagccagagctatgggttcaaaataagataaatgacaacgtcatgtttcaggattgcctctaagataccaatggcacaaatacatgttggagaaagcacckcataataaaaacaccaaagaaaataccacttaagcatcttatctagcagaagctccttattagtggagagtgtaatttcaatgatgtgattttttttgac

SEQ ID NO: 240108 - DNA, 201 bp, Homo sapiens
cattctagaacagaggtagcagaaaaccctctactaacagaaaacccaagagtctcctttgcttatgactctggtataatttgttaaggaactattgcatrtctcaagccagataggtagtattgaaataagtgggagacaacaaatatgtctacttgctgttatgagtatgcttgtaatagaatcaaggagacaaacata

SEQ ID NO: 240109 - DNA, 201 bp, Homo sapiens
atgttataacattttcctagggtggaaaacctttcttccaatgtaaataaagccttggttactggcgatacagcctatgcctgtttacactgacgacaacytgtttttagaatgcatctctcagcagaattgttttgaggaattcattatacaggacagtagattccattccccgtgtcctgacatttctcgactgctctc

SEQ ID NO: 240110 - DNA, 201 bp, Homo sapiens
caatcaattttttgaatatcccctcatgttataatcattttctttttatgtacccatcatcacacttaagcaataattatctcacaaccaaacatgttacrtagataattctacctctgtattattttgaagcagacatgatatcattgtatctgaaaatgttttgtaaaatattttaaaaatctctaaatctttaaataa

SEQ ID NO: 240111 - DNA, 201 bp, Homo sapiens
aagaataagtaagttatcatgttagtatgaccactgatggaatttgaaagcatttcagaaggtgcatggggaaaatgaccaatatgaaatacatagtacayatattaatatagtactagatattccttcaaagcattttaaaatttacatgtggttatttgctcatgtattctgacaccttttggtcttgaaaaattacag

SEQ ID NO: 240112 - DNA, 201 bp, Homo sapiens
tatgttataatattatatcaaaagtatatcagagaattatatactattctgtttttcaggatgcttttaagccacaagaaacagaaaactcaattcaaacrggcttaaagttgattcatttatagaaagtttgggtctttgttgctctagaagctgtaagatactctcttgaaatgaatatattttgtctgtgctccatgt

SEQ ID NO: 240113 - DNA, 201 bp, Homo sapiens
cttctctgactttctgctctttacacacttcctgcttaatcatgcttccaagtttctggctttatatcacctgtgtagatgacagctactttcatagaaakagaaaatactagagaaaaacagtttgagtggagtagaagagcctgacttcagttctttggggatgggtgtgaagttcctatgagacagccaagcggaggc

SEQ ID NO: 240114 - DNA, 201 bp, Homo sapiens
ataggtaagaggaaatggaaaagcagctttatgtttatttggtgtccccagtgtgcatgtaatagaattaaggagacaaatatgtacgcagaacaagaaarggcattcaaaattaatttattcaagggataaaacggtttgattcattataatcgtagtatatcataaatcagattttcggtttataaaaagtcagtgaca

SEQ ID NO: 240115 - DNA, 201 bp, Homo sapiens
cacctgcaaccaggtgagccgttagcccaccggggccttctctgactttctgctctttacacacttcctgcttaatcatgcttccaagtttctggctttayatcacctgtgtagatgacagctactttcatagaaagagaaaatactagagaaaaacagtttgagtggagtagaagagcctgacttcagttctttggggat

SEQ ID NO: 240116 - DNA, 201 bp, Homo sapiens
agaagagagtgggataggtaagaggaaatggaaaagcagctttatgtttatttggtgtccccagtgtgcatgtaatagaattaaggagacaaatatgtacrcagaacaagaaaaggcattcaaaattaatttattcaagggataaaacggtttgattcattataatcgtagtatatcataaatcagattttcggtttataa

SEQ ID NO: 240117 - DNA, 201 bp, Homo sapiens
ctatggtgtagtttgttaactattgcatcctaacagcaaaataggtaccatagaagagagtgggataggtaagaggaaatggaaaagcagctttatgtttmtttggtgtccccagtgtgcatgtaatagaattaaggagacaaatatgtacgcagaacaagaaaaggcattcaaaattaatttattcaagggataaaacgg

SEQ ID NO: 240118 - DNA, 201 bp, Homo sapiens
ggttatcatttctgctgttaatcattggtcttctttaatgagggcactagtaagatacatttttgttttcctgcaaattgatgtgaatggtatgctgttgygggcttcatcttcaacatcatctcgttccttcttcaaatgaattattcatttgtgaacttctgatttctttgggggattttgcccatatattttgtgtaa

SEQ ID NO: 240119 - DNA, 201 bp, Homo sapiens
tttttatcgttgtagaaagaggtagcaacaaaccctttactagaggaaaagctgagagtttcttttgcccttgactatggtgtagtttgttaactattgcrtcctaacagcaaaataggtaccatagaagagagtgggataggtaagaggaaatggaaaagcagctttatgtttatttggtgtccccagtgtgcatgtaat

SEQ ID NO: 240120 - DNA, 201 bp, Homo sapiens
aaaggagtcagcgctttatcccgggacagaaacacatcacagaggaggaatagctgcggcctgactcagcaggagggtggaaggtgcaggacagtgaaccygcccttgcaacacctataccattcatttatttttatcgttgtagaaagaggtagcaacaaaccctttactagaggaaaagctgagagtttcttttgccct

SEQ ID NO: 240121 - DNA, 201 bp, Homo sapiens
gcataaacgggggctaaacacactgatcaatagttatggtaagcgctgtcttccacaccagcctgtccttcagaaatgaaataaatttcaactgtagggamggcattcttagtgaagtgtgggggtgtatggaggaaggagcctgcaggtaactggagaaaaagtgttttgctacagtctctcagactgttctcatctttc

SEQ ID NO: 240122 - DNA, 201 bp, Homo sapiens
ctgagcacatctgatgtcctcattatccaagttgggtgagcataaacgggggctaaacacactgatcaatagttatggtaagcgctgtcttccacaccagsctgtccttcagaaatgaaataaatttcaactgtagggaaggcattcttagtgaagtgtgggggtgtatggaggaaggagcctgcaggtaactggagaaaa

SEQ ID NO: 240123 - DNA, 201 bp, Homo sapiens
gctatgaaggtcagcttttgttttttccttcttatgccccaaacagtttcatcactgttactagcacctccattgtctcattccagcttgatttcctgggytctttccgagaggggtaggtttgagtgaattgcatagaattgctaaatcattcacgagtctccttcacagccgaatgacattgcaattttctgtctgtgc

SEQ ID NO: 240124 - DNA, 201 bp, Homo sapiens
tggcttcttctggggcacagaaactgaatatggaggaagggagaaataactgaacaaaatcaggattcttataaaatatgctaatctatactattcagtayatatactaattttaaattatttaacatcttaagaataataaaaatgactaaaattaagcacacaaaatgattagaggttgctacgtggttctggtaaaat

SEQ ID NO: 240125 - DNA, 201 bp, Homo sapiens
aggcagggggcacgagcgcaggggtaagaggatgagagacaagagagggctgaaatgacttttgcaataaacccactctcacgataatggacccgttttcrcaataataaggtcagtgcttcatgacagcagggccgttatgacctagtgacctcttagagggcacgtctttacactgttgcactggggattatactttca

SEQ ID NO: 240126 - DNA, 201 bp, Homo sapiens
aaacgagtaggagcattggtatggtgaaaaataatctctggtgaagctttttgtgggtgttttcatactaaaactttggctaattttctcaaaacagttgytattcttctttagccctccagagagtcaataagcaaaatgccctgagcatcccagaaaacttgctatgaccttttctcttgattaatctccttttgcttt

SEQ ID NO: 240127 - DNA, 201 bp, Homo sapiens
tgcttccaagtttctggctttatatcacctgtgtagatgacagctactttcatagaaagagaaaatactagagaaaaacagtttgagtggagtagaagagyctgacttcagttctttggggatgggtgtgaagttcctatgagacagccaagcggaggcagagttgggaggtggtcgctttggtctggagctcagggggtg

SEQ ID NO: 240128 - DNA, 201 bp, Homo sapiens
gtgacacatgggaggtatgttctgctgcagacaccaggtggcactgtgtggtgaggttggaatcacagaaggaggggtcaaaagagatggggttttgctcyagcagttgtttgacctcagacgtggaacttctctgcgcctccgtgttctcatcgttgaagtgagggagtggaatgagataacccctacggtccattttta

SEQ ID NO: 240129 - DNA, 201 bp, Homo sapiens
tccttcttcaaatgaattattcatttgtgaacttctgatttctttgggggattttgcccatatattttgtgtaaagagtcaataatttcaccattcttccrcccatgcttcacaataaatttgatttttgttcttacttcaatttagctgaattcatgtttttctgataggggagttgttttatctttctcaatgcctcaa

SEQ ID NO: 240130 - DNA, 201 bp, Homo sapiens
atttttgatactgtggatcttcgtgacacatgggaggtatgttctgctgcagacaccaggtggcactgtgtggtgaggttggaatcacagaaggaggggtmaaaagagatggggttttgctccagcagttgtttgacctcagacgtggaacttctctgcgcctccgtgttctcatcgttgaagtgagggagtggaatgaga

SEQ ID NO: 240131 - DNA, 201 bp, Homo sapiens
tgatttctttgggggattttgcccatatattttgtgtaaagagtcaataatttcaccattcttccacccatgcttcacaataaatttgatttttgttcttmcttcaatttagctgaattcatgtttttctgataggggagttgttttatctttctcaatgcctcaaactagatcctgttcagacacatcataacaaattag

SEQ ID NO: 240132 - DNA, 201 bp, Homo sapiens
tgtgacacaaaagtgtgaactggcttcttctggggcacagaaactgaatatggaggaagggagaaataactgaacaaaatcaggattcttataaaatatgytaatctatactattcagtacatatactaattttaaattatttaacatcttaagaataataaaaatgactaaaattaagcacacaaaatgattagaggttg

SEQ ID NO: 240133 - DNA, 201 bp, Homo sapiens
tgcttcacaataaatttgatttttgttcttacttcaatttagctgaattcatgtttttctgataggggagttgttttatctttctcaatgcctcaaactasatcctgttcagacacatcataacaaattagtacaagtttattttggagcatttttttttgaaatccatgtatggttttttcataatgcacattttcaatc

SEQ ID NO: 240134 - DNA, 201 bp, Homo sapiens
tctttctcaatgcctcaaactagatcctgttcagacacatcataacaaattagtacaagtttattttggagcatttttttttgaaatccatgtatggtttyttcataatgcacattttcaatcaattttttgaatatcccctcatgttataatcattttctttttatgtacccatcatcacacttaagcaataattatctc

SEQ ID NO: 240135 - DNA, 201 bp, Homo sapiens
acaattctttgaagatgcttcaggatcttgatctcccttacctaaaatttccttggaaagctttgctcctgtctgtagctgatctggccacaacagtttcrtcacccatgaattggaaagttcactcaacttaaatttttcagttactatagtgtaaactgaaccagttgagatatctatggtgttggttatcatttctgc

SEQ ID NO: 240136 - DNA, 201 bp, Homo sapiens
tcacccaggctggactgcagtggcacgatcttggctcactgcaacctccacctcctgggttcaagctattctcctgtctcagcctcctgagtagctgggaytataggcatgcaccaccatgcctggctaatttttgtatttttagtagagacggtcagtctggtctcaaactcctgacctcatgatctgcccgcctcagcc

SEQ ID NO: 240137 - DNA, 201 bp, Homo sapiens
ctcctgggttcaagctattctcctgtctcagcctcctgagtagctgggactataggcatgcaccaccatgcctggctaatttttgtatttttagtagagayggtcagtctggtctcaaactcctgacctcatgatctgcccgcctcagcctcccagtgttttgggattacaggcgtgagccactgatcccggccaaatcac

SEQ ID NO: 240138 - DNA, 201 bp, Homo sapiens
tcatagaaaaccttcttctttatcctctgttttccagcctggggaggaattgctgcctaaggatgccagtggaaacattatttttgatactgtggatcttygtgacacatgggaggtatgttctgctgcagacaccaggtggcactgtgtggtgaggttggaatcacagaaggaggggtcaaaagagatggggttttgctc

SEQ ID NO: 240139 - DNA, 201 bp, Homo sapiens
atcttccagacactgtctgagagaaaatctccatagcctggagaggaagaaaaatgtctctggatggtggggttttgtctcctagcacagttaccacccarcgaccatccttctttacttttacaggccattatgttaagcctttttcatttgttgctctcccatatccctatttagactttgatatctgaaggtggaaac

SEQ ID NO: 240140 - DNA, 201 bp, Homo sapiens
atttttagtagagacggtcagtctggtctcaaactcctgacctcatgatctgcccgcctcagcctcccagtgttttgggattacaggcgtgagccactgaycccggccaaatcactctttcaataaataagtttgttctcttctttttttttttttacttctctcctcctcttcctcttctgcctcctctgtcttctcttt

SEQ ID NO: 240141 - DNA, 201 bp, Homo sapiens
ggtagtacttagtagtagctggaaatagtatttgggggcctgcagtgagcaagtggtatggtggaacaattgatcaagaaatgcttttctaaggccaaaasattcttggagcaaggttgtcttgtgttccaaggcttgcacagtcaaagactgggtcaagttccaggggaagtgagtaaggaaaatcctgaccaagtgtga

SEQ ID NO: 240142 - DNA, 201 bp, Homo sapiens
catgcagacacacaagcacatacatccacacacatgcacgcatgcatgttcagattaataatcacagccttctgaaagtggtgtggctaagctccttaggygccagaaagggaattctcatagaaaaccttcttctttatcctctgttttccagcctggggaggaattgctgcctaaggatgccagtggaaacattatttt

SEQ ID NO: 240143 - DNA, 201 bp, Homo sapiens
ccccaagtgtgtgaaatcataagctactttttatttcttttgttcactgcagctttggacaactttctttagaccagaattagttcgcccagccctggaarggtcactgaagaaacttcaactggactatgtcgatctcttcattatccacaatccattggctatgaaggtcagcttttgttttttccttcttatgcccca

SEQ ID NO: 240144 - DNA, 201 bp, Homo sapiens
tatcatagatggacggagagatagatagatagggctctgagttttccatcttctgcatgaaataatgaacttaatttttttaaaccacatatctttttctktgctttaagggattcttcatcaggggactatgtgtcaatgtgttttcaaataaaaacaactcttggcttaagtaagataaatatattcaaaaaaggtttt

SEQ ID NO: 240145 - DNA, 201 bp, Homo sapiens
ccgaagtggctattgatgcaggcttccgtcacattgatgcggcgttcttctaccaaaacgaggaggaggtcggaaaggccattcgagagaagattgctgayggccctgtgaagagagaggacattttctacaccactgaggtgaaatttctgtgtgtgcagtggccagaggccaccgtcagttcagatgtattatttagaa

SEQ ID NO: 240146 - DNA, 201 bp, Homo sapiens
gttagctgtacaattttgataaatgaatgtactttgtaatccacattattgtcatgatatggaaactttctcccaaaaatgttaattggtgttccttctgmgacaattcctccccacctctaggcaactatgttcataacgttttcggtcttagattagttttgtctgctgtagtactttatgtaaagaagtcatatatat

SEQ ID NO: 240147 - DNA, 201 bp, Homo sapiens
agcatttcattctagatcaagtcaaacatagaacagtgaacacaacggtgcagtgaattcccatgtgacaccactgagcttcaatgtcaccaacattcctyccctcctgtttcatttgtatatctgccttctcccaaccccactccaaatacaatttcaaagtgatttgaaggtgaaatttacatagactgtaatgcatat

SEQ ID NO: 240148 - DNA, 201 bp, Homo sapiens
actcctggagttctgcaagtccaaggacattgttctagttgcctacagggccctggcatctcacagagacccaaactggtaataagagtatcgaagagttratctatatcagcaactctattgattaagaaacttttagcatttcattctagatcaagtcaaacatagaacagtgaacacaacggtgcagtgaattcccat

SEQ ID NO: 240149 - DNA, 201 bp, Homo sapiens
tgcaggtaactggagaaaaagtgttttgctacagtctctcagactgttctcatctttcttttttcccatgtcttctcttaccaaccctcaccccaaacacrcacatgcacatccacacatatccatatccacacacatacactcatgcacacacacatatgcacacaggcacacacacatgcacacacacatacacacgtc

SEQ ID NO: 240150 - DNA, 201 bp, Homo sapiens
ttgaaagttagagctaaagatttgatcacaattggttaacatcatttgaactcatgaattttaacaaatatgtccttttcccaaccattgtagttactatkccttttgttgctcaacttgccatcattttgaccagcaggagccttttcaattgagcttcttggtcctttgacttgcctcattttctttatgttctttgcc

SEQ ID NO: 240151 - DNA, 201 bp, Homo sapiens
tggtaaaattctaggtgaccttgttgtattttttcctatatctgacatgaaaatatttcttttataacttttaaaagtttttatttttgtaaatttttaaraaaagatatagagaatatgaggagttcaaaaagttcatggaaaaatggaattaaaagatgtttataaatatatgaactatttttcaaaataagctttacc

SEQ ID NO: 240152 - DNA, 201 bp, Homo sapiens
atttttaaagttgattcatttaaattgatgtggaaataaggcccatacattgcaattggatgatatgtctcataaatcactctttttttttttttgagacygagtctcgctctgtcacccaggctggactgcagtggcacgatcttggctcactgcaacctccacctcctgggttcaagctattctcctgtctcagcctcc

SEQ ID NO: 240153 - DNA, 201 bp, Homo sapiens
tgacgacaacttgtttttagaatgcatctctcagcagaattgttttgaggaattcattatacaggacagtagattccattccccgtgtcctgacatttctygactgctctcagaggacgatgccattaacccttgatgcattaaagttgattttcctgctccatctaagttttattcacagttttcttacattgcagtcat

SEQ ID NO: 240154 - DNA, 201 bp, Homo sapiens
caccaccatgcctggctaatttttgtatttttagtagagacggtcagtctggtctcaaactcctgacctcatgatctgcccgcctcagcctcccagtgttytgggattacaggcgtgagccactgatcccggccaaatcactctttcaataaataagtttgttctcttctttttttttttttacttctctcctcctcttcc

SEQ ID NO: 240155 - DNA, 201 bp, Homo sapiens
tccttctcttcttccatagtcctcattctcattctgcctctttctttccttcaatttactaatgaaaacttaagccttttattcctgtaaagttttcctcsgtataggatatactggttgatccagtgatacaatttaacatgttccttttgtactttctgtaaattgaaagttagagctaaagatttgatcacaattggt

SEQ ID NO: 240156 - DNA, 201 bp, Homo sapiens
aagcaattctctagaaatgtcttagattgataagttgtctttcttttgagaagtggagcagagcaggagggaggtgggatggaaaagtagcagaactcagsgggaagaggtctcacctagaggccaatgaggacagaaactttacatactgccatccttgcctctgcccccggaaagccttgtattcccaggaagaagctg

SEQ ID NO: 240157 - DNA, 201 bp, Homo sapiens
tctccaggatggacccagatagcccatatctcttagaggagccaaccttgaaatccattgccaagaaatacaatagaagcccaggccaggttgccctgtgytatgagctgcagcggggggtggtggtcctggccaagagcttctctgagaagagaatcaaagagaacttccaggtacaggtcaagtggtgttgctccaaag

SEQ ID NO: 240158 - DNA, 201 bp, Homo sapiens
tggtctttaatttactttgttttgaattctaaaagaattttgaaagactatgtatgctgttttccatttaaagatggcagctagaaaaatcaacatgagtwtagttattacaaaggatgatatttgaagcatattttctaatgtatttgtttcacaactttgtagctctagattaaaatttttaagttatacaaaaatcaa

SEQ ID NO: 240159 - DNA, 201 bp, Homo sapiens
aatcagtggtctttaatttactttgttttgaattctaaaagaattttgaaagactatgtatgctgttttccatttaaagatggcagctagaaaaatcaacrtgagtttagttattacaaaggatgatatttgaagcatattttctaatgtatttgtttcacaactttgtagctctagattaaaatttttaagttatacaaa

SEQ ID NO: 240160 - DNA, 201 bp, Homo sapiens
agtccaaggacattgttctagttgcctacagggccctggcatctcacagagacccaaactggtaataagagtatcgaagagttaatctatatcagcaactytattgattaagaaacttttagcatttcattctagatcaagtcaaacatagaacagtgaacacaacggtgcagtgaattcccatgtgacaccactgagctt

SEQ ID NO: 240161 - DNA, 201 bp, Homo sapiens
aagtgagccatgggcgctggtctgggtgatctctcttccaggggggaatgcaccatatgtcattcatgcccgtgcttctctcctctgtgtgctaagggagsgggcaggatggaaaagtgcgaagagatcactggattcacagtcctaaagtttatcacctctagggctggctttgccactcactagttgtgtgacactaag

SEQ ID NO: 240162 - DNA, 201 bp, Homo sapiens
agcggggggtggtggtcctggccaagagcttctctgagaagagaatcaaagagaacttccaggtacaggtcaagtggtgttgctccaaagtgagccatggscgctggtctgggtgatctctcttccaggggggaatgcaccatatgtcattcatgcccgtgcttctctcctctgtgtgctaagggagggggcaggatggaa

SEQ ID NO: 240163 - DNA, 201 bp, Homo sapiens
tttcatctatactcttcatatctgttgtttttctccaggatggacccagatagcccatatctcttagaggagccaaccttgaaatccattgccaagaaatrcaatagaagcccaggccaggttgccctgtgctatgagctgcagcggggggtggtggtcctggccaagagcttctctgagaagagaatcaaagagaacttc

SEQ ID NO: 240164 - DNA, 201 bp, Homo sapiens
tattcacagttttcttacattgcagtcattcaagtaaatctcagcatctcatcaaggatgtaatttaccctgaataatacaaatgtagccccagttcttcyagtttgagaccacagtgttttgttactcatgtgtcaatttctgttatgtttaattttggtccccaagtgtgtgaaatcataagctactttttatttcttt

SEQ ID NO: 240165 - DNA, 201 bp, Homo sapiens
attttcctgctccatctaagttttattcacagttttcttacattgcagtcattcaagtaaatctcagcatctcatcaaggatgtaatttaccctgaataayacaaatgtagccccagttcttctagtttgagaccacagtgttttgttactcatgtgtcaatttctgttatgtttaattttggtccccaagtgtgtgaaat

SEQ ID NO: 240166 - DNA, 201 bp, Homo sapiens
tgctgggaaatattccattatatggacatgtacaccacaagttgtttatccattcacctattgatgggcagtttagttgtttccagtttgccacaattgcraataaatctctatgaatatttatgagacaccttgaaacatactatattgtgtcttctctcattgtctggggctttgggcaaaagggtagcacactctaga

SEQ ID NO: 240167 - DNA, 201 bp, Homo sapiens
ttactgctgggaaatattccattatatggacatgtacaccacaagttgtttatccattcacctattgatgggcagtttagttgtttccagtttgccacaaytgcgaataaatctctatgaatatttatgagacaccttgaaacatactatattgtgtcttctctcattgtctggggctttgggcaaaagggtagcacactc

SEQ ID NO: 240168 - DNA, 201 bp, Homo sapiens
acattgccagaatacttttataccacttgaaattgtagcaataatttcttgttgttagtaaatatcatgagtgctaaaatataattttatcatatttttaragttgattcatttaaattgatgtggaaataaggcccatacattgcaattggatgatatgtctcataaatcactctttttttttttttgagactgagtctc

SEQ ID NO: 240169 - DNA, 201 bp, Homo sapiens
catgatctgcccgcctcagcctcccagtgttttgggattacaggcgtgagccactgatcccggccaaatcactctttcaataaataagtttgttctcttctttttttttttttacttctctcctcctcttcctcttctgcctcctctgtcttctctttcttctcttcttccttcttctcctcctgctcttctaccttctct

SEQ ID NO: 240170 - DNA, 201 bp, Homo sapiens
tgttctttccattttactgctgggaaatattccattatatggacatgtacaccacaagttgtttatccattcacctattgatgggcagtttagttgtttcyagtttgccacaattgcgaataaatctctatgaatatttatgagacaccttgaaacatactatattgtgtcttctctcattgtctggggctttgggcaaaa

SEQ ID NO: 240171 - DNA, 201 bp, Homo sapiens
tatactattctgtttttcaggatgcttttaagccacaagaaacagaaaactcaattcaaacgggcttaaagttgattcatttatagaaagtttgggtcttkgttgctctagaagctgtaagatactctcttgaaatgaatatattttgtctgtgctccatgtttgatcgcttcagaatggctcctcatggcaattgggcta

SEQ ID NO: 240172 - DNA, 201 bp, Homo sapiens
tctgtgctttaagggattcttcatcaggggactatgtgtcaatgtgttttcaaataaaaacaactcttggcttaagtaagataaatatattcaaaaaaggttttttttgttgtttgttttttttgttttgttttgttttgtaaggaagtagtatttggtagtacttagtagtagctggaaatagtatttgggggcctgcag

SEQ ID NO: 240173 - DNA, 201 bp, Homo sapiens
actgggaaatacttttttatttttcaactcagcattgagtttcctgaatgttataacattttcctagggtggaaaacctttcttccaatgtaaataaagcyttggttactggcgatacagcctatgcctgtttacactgacgacaacttgtttttagaatgcatctctcagcagaattgttttgaggaattcattatacag

SEQ ID NO: 240174 - DNA, 201 bp, Homo sapiens
ttcttcatcaggggactatgtgtcaatgtgttttcaaataaaaacaactcttggcttaagtaagataaatatattcaaaaaaggttttttttgttgtttgttttttttgttttgttttgttttgtaaggaagtagtatttggtagtacttagtagtagctggaaatagtatttgggggcctgcagtgagcaagtggtatgg

SEQ ID NO: 240175 - DNA, 201 bp, Homo sapiens
ttccctttgaacctttgcaggattaccacatcatcaggaccacaccttcatcaggaatgaatattcctactacaattaaagaagaaacaaaattaatttgytggtgaaaaacgtaaaaagagaaattttctttggttttgtttaatttctttattgagggtcaccactaaaaaaaatgctcactggtcattcttttgaata

SEQ ID NO: 240176 - DNA, 201 bp, Homo sapiens
acctataagcctgtaaactcaaaagcaagttagttacttccaggatacaatggcggtacaggcattgggcaaatacagctgtttcatgtgggagaaatggkccaaaacaaaggggctacatgacccatgcaagtctgaaatccagcagggcaaattttaaagcttcaaaatgatctcctttgactccatgtttcacatcca

SEQ ID NO: 240177 - DNA, 201 bp, Homo sapiens
tcttccattctgtaggttgtctgtttactcgcatgattatttcttttgctgtgcagaatctttttagtttaattaggtcccatttatttttgctttttgtkcatttgcattttggggtcttagagacaaattcttggctgaggccaatgtacaggccaatgttaagaagagttttccaatgttatcttctaaaatttttat

SEQ ID NO: 240178 - DNA, 201 bp, Homo sapiens
ggtgttattacatggcagaagagtcctaagtataatgcctaagccattttcttgaagagtacaaccttccttctgtaacgtatgatgacaagagaagacartacatcaacctcaaagcctctgcttcaaaaattcaagaaaataacaacagccaccttcaaggctctgtcttaattagggttcctgagtccatctcttagg

SEQ ID NO: 240179 - DNA, 201 bp, Homo sapiens
ggacagagtacagaaaaggaagacaagaagaggtaaacctgttccccagctttcatatgcaacattggaatatgcaccattggaactagaaattaaggagyttgacaaaggaagttttgctgagtggtagggaagaatacatgactgaaatagaatagcaggaaatgaaggagataaactggggacaaggaagacagatat

SEQ ID NO: 240180 - DNA, 201 bp, Homo sapiens
aaaatatgccgaaagttgttttgacttaccattttgcagactgtacaaaaatcatggcaccagcatttagttttggtgagggctcaggaagcatttactcrtggtagaaggtgacagaggaggaaacatatcaaataacaagagatgaagagggaaaaaaagaaaatgtcaggctcctttttaaaccagatttcatgtgaa

SEQ ID NO: 240181 - DNA, 201 bp, Homo sapiens
aggacagagtacagaaaaggaagacaagaagaggtaaacctgttccccagctttcatatgcaacattggaatatgcaccattggaactagaaattaaggarcttgacaaaggaagttttgctgagtggtagggaagaatacatgactgaaatagaatagcaggaaatgaaggagataaactggggacaaggaagacagata

SEQ ID NO: 240182 - DNA, 201 bp, Homo sapiens
taaatggtgacactaaagtgactgcttctacttcagccaggtgagacgccactaccaaaagatgaaaatggaaaagtaatattcgacacagtggatctctstgccacatgggaggtgagtgcttggaggacagagtacagaaaaggaagacaagaagaggtaaacctgttccccagctttcatatgcaacattggaatatg

SEQ ID NO: 240183 - DNA, 201 bp, Homo sapiens
catgtgcacttctagtggtcaaaggttgttagaaactggctctggttcatagagttgctaatgctcagaaataacatttctatatatacttttagaccagyaatataaactgtatttttataaactgattgttacttgacagtaatattctgttcaaatttaatgttatactttattcagcttattttaatctttatatta

SEQ ID NO: 240184 - DNA, 201 bp, Homo sapiens
gaagatcataattatactgagtaaacttattaaagaaaacctctcaacatagaggtttaatacaaaaccatttatttaactgacaattccatggtttgaartttagcctaaagctccacctgaactcagtctcgtcctgtttctggctgggctttctcacgtgtgtgcagggcaatgaggcagctctacagaattaatcca

SEQ ID NO: 240185 - DNA, 201 bp, Homo sapiens
acttcttctaaggagggtgtaggtgttattacatggcagaagagtcctaagtataatgcctaagccattttcttgaagagtacaaccttccttctgtaacrtatgatgacaagagaagacagtacatcaacctcaaagcctctgcttcaaaaattcaagaaaataacaacagccaccttcaaggctctgtcttaattaggg

SEQ ID NO: 240186 - DNA, 201 bp, Homo sapiens
gtgcaagtgagaggtgagacaggaactctctggaactctccttctggattcactccagagctctgttctctgacagggtgagtggacccagggtcagcatsggtcaacctgtgcctctgctctcctgactccatggaaatttccagagcagccaatattattgctaaatctgcaactttcatgtaggcctggcatttctgc

SEQ ID NO: 240187 - DNA, 201 bp, Homo sapiens
acactcattaccatggggagggcacccagccattcatgagggatgcccccagggcacaaacacctcccaccaggacccacttccatcattggggaattacwttttaacatgagattaggaggggacaaatatccaaattgtatcaccatcaaactgtctaaattatacatttcaaaatttctctagattcttctgaatcta

SEQ ID NO: 240188 - DNA, 201 bp, Homo sapiens
gatggaagtggggtctggtgggaggtgtttgtgtcatgggggcaaatatagaaatatagaaatccaacaatatccatctgtattagtctgttttgtgctgytgtaaaaaaaatacttgatgctgggcaatttatacagaaaagagctatatttggctcacaatttgcaggctgtacaaaaagcatagcaccagcatctcat

SEQ ID NO: 240189 - DNA, 201 bp, Homo sapiens
ctttctagaacatttcagcacctacctcacggtggattattatcctaaaatgtacatgggagcatgcctatgggtggaaaagttaaatggtgacactaaartgactgcttctacttcagccaggtgagacgccactaccaaaagatgaaaatggaaaagtaatattcgacacagtggatctctctgccacatgggaggtga

SEQ ID NO: 240190 - DNA, 201 bp, Homo sapiens
acagtttgatggtgatacaatttggatatttgtctccttctaatctcatgttaaaatgtgatccccagtgatggaagtggggtctggtgggaggtgtttgygtcatgggggcaaatatagaaatatagaaatccaacaatatccatctgtattagtctgttttgtgctgttgtaaaaaaaatacttgatgctgggcaattt

SEQ ID NO: 240191 - DNA, 201 bp, Homo sapiens
gtctagaagaaaacggaagacccttaattgcacctcttcttggagaagtcttaatgaaaatggtacagagaccttcatgctaaattgtgtgtactattttkgggggaggtgaatttcatcaaggaggactgaaatggttaatcagaactcagggagaaggtggacttatctctaaggtatgaaagaccaccagagagtgga

SEQ ID NO: 240192 - DNA, 201 bp, Homo sapiens
ggtggttcctatgttcttgggcagctccaccactgtggctttgcagggtacagcctcccttctggctgctttcatgggctggcattgagtgtctgcagctyttccaggtgcacagtgcaagctgtcagtggatctaccattctagggtctggaggatggtggcccttttctcagagctccactaggtggtgccccagcagg

SEQ ID NO: 240193 - DNA, 201 bp, Homo sapiens
aacatgtatttaaaatttatgtatttggtaatataatacaaaatcatgattttcaattaaaaaggaattaatgtggttttaatattagttttactcaattwttattatgacaactttcaaattttagagaaatttgaagggataatacaggacatctacatgttatcatctatttccaaaattgttgacactttgccaacc

SEQ ID NO: 240194 - DNA, 201 bp, Homo sapiens
ttaccataatttcttccatgtgcctttttccatgtgttaatttcactatattaaaaataattaggagtgtgtatgcagtgactcatgcctgtaatcccagmactttggtaggccaaggcaggtggatcccttgagctccggagtttgagcctgggtaacataggaaatcccatctctaccaaaaatacaaaaacttaacca

SEQ ID NO: 240195 - DNA, 201 bp, Homo sapiens
gccaagggggctcattcccacttgagataatattaatatcatgaaattcagttaggagcttctttcgatctgtgacatgtggctgaactccccaagttcargttggctgactttgctgatgtcccctgtgagataaaataagaaatggcttccctcagtccatgctggagactggtaatacctttgtgacacttgtcactg

SEQ ID NO: 240196 - DNA, 201 bp, Homo sapiens
  misc_feature (1)...(201): n = A,T,C or G
tcctaagtataatgcctaagccattttcttgaagagtacaaccttccttctgtaacgtatgatgacaagagaagacagtacatcaacctcaaagcctctgnttcaaaaattcaagaaaataacaacagccaccttcaaggctctgtcttaattagggttcctgagtccatctcttaggatcttcacagatacagagatcca

SEQ ID NO: 240197 - DNA, 201 bp, Homo sapiens
  misc_feature (1)...(201): n = A,T,C or G
ttaaaggaagcctgtctcctaaagacattccttaaaactctgtacgtgaaacacttggcccacatcactttctagaacatttcagcacctacctcacggtngattattatcctaaaatgtacatgggagcatgcctatgggtggaaaagttaaatggtgacactaaagtgactgcttctacttcagccaggtgagacgcca

SEQ ID NO: 240198 - DNA, 201 bp, Homo sapiens
gaggtaaacctgttccccagctttcatatgcaacattggaatatgcaccattggaactagaaattaaggagcttgacaaaggaagttttgctgagtggtasggaagaatacatgactgaaatagaatagcaggaaatgaaggagataaactggggacaaggaagacagatattcctcccgctccatggacatttatctctc

SEQ ID NO: 240199 - DNA, 201 bp, Homo sapiens
caagacttcagcatttctggctttccttccagggtggacccaaactccccagttcttttggaggacccagttctttgtgccttagcaaagaaacacaaacraaccccagccctgattgccctgcgctaccagctgcagcgtggggttgtggtcctggccaagagctacaatgagcagcggatcagagagaacatccaggtg

SEQ ID NO: 240200 - DNA, 201 bp, Homo sapiens
tgccattttgatgaaaaattttagttatagcatactcagtctcctagagttcattctcaatgggtcagggtaaggggataatttgcatttcttatgagatmccaggtgatgctgctgctgttcagggacctcacttgagaggctctggtgcagaatgaacaccttagtctgtttagggagcctcctaccaaactgaatcca

SEQ ID NO: 240201 - DNA, 201 bp, Homo sapiens
atttcaaaatttctctagattcttctgaatctaagtacatgaaccaatcatgtgcacataaggtcaacttcgttccatctttagtttctgttgagatcttktcttcagttttgtgcagtttcaatatgtaatatctaggaatagatttatattttatctgatattctttaatcacttgagagtttagagatggtctttcat

SEQ ID NO: 240202 - DNA, 201 bp, Homo sapiens
gatgaatattagcatagagggtgttgcacgacatctagcagaaggccctgtgtgtggatggtgatgcagaggatgtctctatgctggtgactggacacacrgcctctggttaaatccctcccctcctgcttggcaacttcagctagctagatatatccatggtccagaaagcaaacataataaatttttatcttgaagtaa

SEQ ID NO: 240203 - DNA, 201 bp, Homo sapiens
ttctgttctcagcatgaccatcctttatgatggttgaattgaacttcttctaaggagggtgtaggtgttattacatggcagaagagtcctaagtataatgmctaagccattttcttgaagagtacaaccttccttctgtaacgtatgatgacaagagaagacagtacatcaacctcaaagcctctgcttcaaaaattcaag

SEQ ID NO: 240204 - DNA, 201 bp, Homo sapiens
agattaaaggaagcctgtctcctaaagacattccttaaaactctgtacgtgaaacacttggcccacatcactttctagaacatttcagcacctacctcacrgtggattattatcctaaaatgtacatgggagcatgcctatgggtggaaaagttaaatggtgacactaaagtgactgcttctacttcagccaggtgagacg

SEQ ID NO: 240205 - DNA, 201 bp, Homo sapiens
agaattataaaacaatgaagaataaataaaagatgtatcatgaaaacaaaaacaaaaaaaaaacatccaattgtgactttcagtttgttgtactttggtcmgttaacttgttgttccaagtttttaaaatttaagtttgtgtagattagaagttatacttgaatgctttatatcatagaagttaaacatttttggtgagaa

SEQ ID NO: 240206 - DNA, 201 bp, Homo sapiens
taagtcaataattttaaatttcactgaaattatatcgtttctaaaagagttggtcttattttttagggataaagcgtaccttactaatctctcacaggtcrcagttaatttcttaggtataaatctacatccttggaatgtatgtctttactcctagtatttagttctgtcatgcacacagaatggctaatggctgtgtag

SEQ ID NO: 240207 - DNA, 201 bp, Homo sapiens
tgaggacaagggaacttttcctgtttcactacctctcaagcacattgatcaccaaatactacctttcgttgctccttcaggttccgaggaacagagctgtrgaggtcaccaaattagcaatagaagctggcttccgccatattgattctgcttatttatacaataatgaggagcaggttggactggccatccgaagcaaga

SEQ ID NO: 240208 - DNA, 201 bp, Homo sapiens
tctgttctcagcatgaccatcctttatgatggttgaattgaacttcttctaaggagggtgtaggtgttattacatggcagaagagtcctaagtataatgcytaagccattttcttgaagagtacaaccttccttctgtaacgtatgatgacaagagaagacagtacatcaacctcaaagcctctgcttcaaaaattcaaga

SEQ ID NO: 240209 - DNA, 201 bp, Homo sapiens
ggaagtttacctaaaatgccattttgatgaaaaattttagttatagcatactcagtctcctagagttcattctcaatgggtcagggtaaggggataatttkcatttcttatgagataccaggtgatgctgctgctgttcagggacctcacttgagaggctctggtgcagaatgaacaccttagtctgtttagggagcctcc

SEQ ID NO: 240210 - DNA, 201 bp, Homo sapiens
tttacctactgaaaattttaattccattgttcagcagttgtactaactatatatgcaatatgtagctttcatataggtaggtcatatcaaaataaaacaaagggaatttttgccagaggtcatctgtttggaacggtgaaaaatgtctaaatattaggtgaagcaaactaataaaactagctcatgtttttattcaacata

SEQ ID NO: 240211 - DNA, 201 bp, Homo sapiens
  misc_feature (1)...(201): n = A,T,C or G
gtttgtgtgataaattccaggcaagggaatataagttgaaaattttcttattttgaaaaaaaaaaaacacattataaactcatgttcatgaaagacattcnacaaatagtccgaaaataaacttcttaacattcacactaatggcagcttcatataaattcactttgctaccagctttttaatagagtcatttcatccata

SEQ ID NO: 240212 - DNA, 201 bp, Homo sapiens
ttttacctactgaaaattttaattccattgttcagcagttgtactaactatatatgcaatatgtagctttcatataggtaggtcatatcaaaataaaacaaagggaatttttgccagaggtcatctgtttggaacggtgaaaaatgtctaaatattaggtgaagcaaactaataaaactagctcatgtttttattcaacat

SEQ ID NO: 240213 - DNA, 201 bp, Homo sapiens
tttttacctactgaaaattttaattccattgttcagcagttgtactaactatatatgcaatatgtagctttcatataggtaggtcatatcaaaataaaacaaagggaatttttgccagaggtcatctgtttggaacggtgaaaaatgtctaaatattaggtgaagcaaactaataaaactagctcatgtttttattcaaca

SEQ ID NO: 240214 - DNA, 201 bp, Homo sapiens
atttttacctactgaaaattttaattccattgttcagcagttgtactaactatatatgcaatatgtagctttcatataggtaggtcatatcaaaataaaacaaagggaatttttgccagaggtcatctgtttggaacggtgaaaaatgtctaaatattaggtgaagcaaactaataaaactagctcatgtttttattcaac

SEQ ID NO: 240215 - DNA, 201 bp, Homo sapiens
cacagttcagatcatcagaattacttgatatcaatttttacctactgaaaattttaattccattgttcagcagttgtactaactatatatgcaatatgtadctttcatataggtaggtcatatcaaaataaaacaaagggaatttttgccagaggtcatctgtttggaacggtgaaaaatgtctaaatattaggtgaagca

SEQ ID NO: 240216 - DNA, 201 bp, Homo sapiens
atttgtttgtcggaggagctttttggatgaggctttggggttttgtaggtatatgatcatattactggcaaacagcaatactttggcttatccttttccartttggattccctttattttttttaccttgcctgattactctggctaggacttccagtactatgtttaatagaagtggtaaaaattgggcatccttgtctt

SEQ ID NO: 240217 - DNA, 201 bp, Homo sapiens
  misc_feature (1)...(201): n = A,T,C or G
caatatgtaatatctaggaatagatttatattttatctgatattctttaatcacttgagagtttagagatggtctttcataacttttggaaacttatcaantattttacatattgcctctacaccctactgtgtgatatacttggctattccaagttgacaattatgcaatctaagaataaacattttctacttctttggt

SEQ ID NO: 240218 - DNA, 201 bp, Homo sapiens
actgaggaaaatttagcagaacattgagctgaccttttgactgtccacatcttattctgatgcactgctttgctttctgtcatcaaatcaactgtttagawgcatttattctgcgtatggttctgttctcttactcttttactacttagagtcaatgagtacaggtctacagttgaaacatgtatttaaaatttatgtatt

SEQ ID NO: 240219 - DNA, 201 bp, Homo sapiens
caccaaaggatttaacactgaaaagattaaggtaattttggaaaattctaaaagtcacttttcactcctgagatgtaggtggtcagaagaaatgaggaacwctgtagaagccatatgcaagatgcacagatggcattgtgtttgttgtggactgttgatgttaacaggatggaagaagtcaaaactgaactttataaaata

SEQ ID NO: 240220 - DNA, 201 bp, Homo sapiens
tactatcttgtccatcctgccttcacttcagtccttccacattgttatttggtgtttggactgtgctagaagaactgttttatacaggctgctattcaatraatttgtaaataccatacccacaccaaaggatttaacactgaaaagattaaggtaattttggaaaattctaaaagtcacttttcactcctgagatgtagg

SEQ ID NO: 240221 - DNA, 201 bp, Homo sapiens
tatttgcagctggaaatgggggaatgggctaactggctaaactactatcttgtccatcctgccttcacttcagtccttccacattgttatttggtgtttgractgtgctagaagaactgttttatacaggctgctattcaataaatttgtaaataccatacccacaccaaaggatttaacactgaaaagattaaggtaatt

SEQ ID NO: 240222 - DNA, 201 bp, Homo sapiens
cctcatttagacccagactccaaaacgggagtcttatagctgggccacctaggaagagaggttctaaagcataaaaaagaaagcatttcattttgggacayttatttgcagctggaaatgggggaatgggctaactggctaaactactatcttgtccatcctgccttcacttcagtccttccacattgttatttggtgttt

SEQ ID NO: 240223 - DNA, 201 bp, Homo sapiens
cttgagcccaaggtaaagaaggtgggggtgggggcagattttgtagtgagccaagattgtcccacttcacaccagcctgggtgacagagtgagactctgtytcaaataataataactatttataagttgagtcttgttaatttttctaacaaatgactgaatctgaggttgttgttgggaaactccatgctagtgattaac

SEQ ID NO: 240224 - DNA, 201 bp, Homo sapiens
atgggatgtgtttccatttgtttatgtatcatttctttttagtagtgttttgtatttttttgtagagatctttcatctctttggttaagcatattcttagkgattttatttgcagctgttgtaaatggaattcttaatttgactctcaacatggttgttgttggtgaatagcagtgctactaatttctgtaaacggatttt

SEQ ID NO: 240225 - DNA, 201 bp, Homo sapiens
gttatttgtttttatcttggtgacttgagttccttgtagattctggataatcagtcctttgctggatgcatagtttgcaaaaactttcttccattctgtargttgtctgtttactcgcatgattatttcttttgctgtgcagaatctttttagtttaattaggtcccatttatttttgctttttgtgcatttgcattttgg

SEQ ID NO: 240226 - DNA, 201 bp, Homo sapiens
tcttttcagctttttaattataaccattcttgcagaaggtgatatctcattgtgattttaatttgtacttccctgattattagttatgttgagcattttttcatatgttcgttggctgtttgtatacttcttttgagaaatgtctattcatgttatttgcccacttttcaacagggttatttgtttttatcttggtgactt

SEQ ID NO: 240227 - DNA, 201 bp, Homo sapiens
ttactcaatttttattatgacaactttcaaattttagagaaatttgaagggataatacaggacatctacatgttatcatctatttccaaaattgttgacaytttgccaacctggcaagtatataggcatatatgagtatatctgcatcaatacaggtagtatttgttgaatctcttcaaaatatattccaatgatcacaat

SEQ ID NO: 240228 - DNA, 201 bp, Homo sapiens
gccattttgatgaaaaattttagttatagcatactcagtctcctagagttcattctcaatgggtcagggtaaggggataatttgcatttcttatgagatascaggtgatgctgctgctgttcagggacctcacttgagaggctctggtgcagaatgaacaccttagtctgtttagggagcctcctaccaaactgaatccag

SEQ ID NO: 240229 - DNA, 201 bp, Homo sapiens
gccaaggcttgggacttgcaccctgtgcagccatggcctgagctgtaccttggccccttttagtcacggcaggagtgattgagatgcagggcaccaagtcsctagactgcacacagaatggagaccctgggcccagcccatgaaaccattttttcctcctagacctccacctccctctgggcctgtgatgagaagggctga

SEQ ID NO: 240230 - DNA, 201 bp, Homo sapiens
tagcatactcagtctcctagagttcattctcaatgggtcagggtaaggggataatttgcatttcttatgagataccaggtgatgctgctgctgttcagggrcctcacttgagaggctctggtgcagaatgaacaccttagtctgtttagggagcctcctaccaaactgaatccagcctcaagacttcagcatttctggctt

SEQ ID NO: 240231 - DNA, 201 bp, Homo sapiens
ctggccatccgaagcaagattgcagatggcagtgtgaagagagaagacatattctacacttcaaaggtactgtgcctatgatgagcatgtatgcacatgtrtttaatgggattgtgtggagatgacaattctgtaactggttcagtagttgtgggtgaattgtgcttattagttccaatttattcacacatattcaggtat

SEQ ID NO: 240232 - DNA, 201 bp, Homo sapiens
ggactatgttgacctctatcttcttcatttcccaatggctctcaaggtagggaatttgtgagatcaacttctcttctgttctcagcatgaccatcctttaygatggttgaattgaacttcttctaaggagggtgtaggtgttattacatggcagaagagtcctaagtataatgcctaagccattttcttgaagagtacaac

SEQ ID NO: 240233 - DNA, 201 bp, Homo sapiens
ttgatttttaatatgtgaaataagagtacaaatgtacatatacataatcttcacttgatactaaaatgtcctactaagaattattgaaaagtccatatttsctcacttatcttgatttttcatcctaagtgtccataagtacttcactgacatttcccctctttcagagttaactttcctgtactgtttaagattatgttg

SEQ ID NO: 240234 - DNA, 201 bp, Homo sapiens
actgagtaaacttattaaagaaaacctctcaacatagaggtttaatacaaaaccatttatttaactgacaattccatggtttgaaatttagcctaaagctycacctgaactcagtctcgtcctgtttctggctgggctttctcacgtgtgtgcagggcaatgaggcagctctacagaattaatccagaatccatattctgg

SEQ ID NO: 240235 - DNA, 201 bp, Homo sapiens
  misc_feature (1)...(201): n = A,T,C or G
gttgttagaaactggctctggttcatagagttgctaatgctcagaaataacatttctatatatacttttagaccagcaatataaactgtatttttataaantgattgttacttgacagtaatattctgttcaaatttaatgttatactttattcagcttattttaatctttatattaacatatctgttttgaattatctga

SEQ ID NO: 240236 - DNA, 201 bp, Homo sapiens
cccccaaaaaaattataggatcagacaaaagtaacagaagtcgactgtgaacccccattaaaacctgtaaaatggttattaatatatataatggaagtagragattaaaggaagcctgtctcctaaagacattccttaaaactctgtacgtgaaacacttggcccacatcactttctagaacatttcagcacctacctcac

SEQ ID NO: 240237 - DNA, 201 bp, Homo sapiens
ctgtgctaattatccagttctaaagccactaccacattttcagacatttttagcaatgtcccactcctggtaacaattttccatattagtccattgtgcgytgctataaagtacccgaggccagataaaatatgccgaaagttgttttgacttaccattttgcagactgtacaaaaatcatggcaccagcatttagttttg

SEQ ID NO: 240238 - DNA, 201 bp, Homo sapiens
agaggcatttcccccaaaaaaattataggatcagacaaaagtaacagaagtcgactgtgaacccccattaaaacctgtaaaatggttattaatatatatartggaagtagaagattaaaggaagcctgtctcctaaagacattccttaaaactctgtacgtgaaacacttggcccacatcactttctagaacatttcagca

SEQ ID NO: 240239 - DNA, 201 bp, Homo sapiens
aagaacttccatttgaacatgtttagcttatgatcctgctcatggactatcaagtcttcagggggataaggaactcttattgtatcacctggatcaagaayacaatcccttattgctggatatcaagggctgtttgagtcaaagagaggcatttcccccaaaaaaattataggatcagacaaaagtaacagaagtcgactg

SEQ ID NO: 240240 - DNA, 201 bp, Homo sapiens
gaaacatttgtggtaacagcacctaaagatggggtgtatgaaaactgttgggagagtactgctgagctgccgcgtggtcttgagcatgacacagtaatacyggtcctggacttaatacaatgccctgcacaactctcacctctaggaaaattatctgaaaggaaaaataactttattctaaggaaaacctagaacctcaca

SEQ ID NO: 240241 - DNA, 201 bp, Homo sapiens
tctaaatattaggtgaagcaaactaataaaactagctcatgtttttattcaacataaatcctttattttaccatgcagctttggtgcactttctttcaacyacagatggtccaaccagccttggaaagctcactgaaaaaacttcaactggactatgttgacctctatcttcttcatttcccaatggctctcaaggtaggg

SEQ ID NO: 240242 - DNA, 201 bp, Homo sapiens
cctttgcaggattaccacatcatcaggaccacaccttcatcaggaatgaatattcctactacaattaaagaagaaacaaaattaatttgttggtgaaaaaygtaaaaagagaaattttctttggttttgtttaatttctttattgagggtcaccactaaaaaaaatgctcactggtcattcttttgaatactgtctgagag

SEQ ID NO: 240243 - DNA, 201 bp, Homo sapiens
tcaaatgacagaagataaagatgggatatcatcatggcatgaacaaaaacaagatttgtagctggaggtattttatagtctaacatgatcaccaatcattytataaacctgttggatgagtttatcagacagacagagagagagattgattgattctgaatagaaaatttcactttagaaaaaaatattttgactatataa

SEQ ID NO: 240244 - DNA, 201 bp, Homo sapiens
aaatcatgtagtcagtggagcgagaagacaatagagatcaaaattgggtagaagcaaaaggatgatggctgttactccttcgttctcctgttttcataagkgctttctgttgtaagcagaatcctttctgtgcacccttgcaatatcttatgcatatatagaatgcacattcatatgcttacctacacatgccacaaaata

SEQ ID NO: 240245 - DNA, 201 bp, Homo sapiens
atgtcatttctggagataaaattaatggcaactgcacaggcattaaaatctacgtttctgatgatggcaaagctcatttttctattagtaactctgctgargatccatttattgcaattcatgctgaatctaaattgtaaaatttaaaattaaatgcaaatccgcaaagcaatagctaagtgtgtttcttttcttacatat

SEQ ID NO: 240246 - DNA, 201 bp, Homo sapiens
tgtagtcagtggagcgagaagacaatagagatcaaaattgggtagaagcaaaaggatgatggctgttactccttcgttctcctgttttcataagggctttstgttgtaagcagaatcctttctgtgcacccttgcaatatcttatgcatatatagaatgcacattcatatgcttacctacacatgccacaaaatacacaaa

SEQ ID NO: 240247 - DNA, 201 bp, Homo sapiens
ccatatgacgtgattttaaggtgaacactgataaacttcctagggttactctgtgttttttaatgaagatttcttaaagtgccaatcagaaaagcataatwctaaaaatatggtcaatttataaaaaaaaaatgttcagatgtagtattttgtacatttatctaaaaagaagcatgacggcctccaatatttatttagcat

SEQ ID NO: 240248 - DNA, 201 bp, Homo sapiens
aaacagttgaagtttaagaatatcaacgttttatatggtattgtgtttttaggaacatggttaatttccgcaatgtagtggatggccagccttttacaaaytggtatgataatgggagcaaccaagtggcttttgggagaggaaacagaggattcattgttttcaacaatgatgactggtaagtaaatatcaattaaaaat

SEQ ID NO: 240249 - DNA, 201 bp, Homo sapiens
tgtcctctaatagtaaatttccgtagcactttatttaaaacagttgaagtttaagaatatcaacgttttatatggtattgtgtttttaggaacatggttawtttccgcaatgtagtggatggccagccttttacaaactggtatgataatgggagcaaccaagtggcttttgggagaggaaacagaggattcattgttttc

SEQ ID NO: 240250 - DNA, 201 bp, Homo sapiens
acaatagagatcaaaattgggtagaagcaaaaggatgatggctgttactccttcgttctcctgttttcataagggctttctgttgtaagcagaatcctttstgtgcacccttgcaatatcttatgcatatatagaatgcacattcatatgcttacctacacatgccacaaaatacacaaagtaattaatagaaggattgtg

SEQ ID NO: 240251 - DNA, 201 bp, Homo sapiens
gatgatggctgttactccttcgttctcctgttttcataagggctttctgttgtaagcagaatcctttctgtgcacccttgcaatatcttatgcatatatayaatgcacattcatatgcttacctacacatgccacaaaatacacaaagtaattaatagaaggattgtgaaatcattaaaagaacgtttcttatagtcctgc

SEQ ID NO: 240252 - DNA, 201 bp, Homo sapiens
ccagccttttacaaactggtatgataatgggagcaaccaagtggcttttgggagaggaaacagaggattcattgttttcaacaatgatgactggtaagtamatatcaattaaaaataatattttgtaccagtatgttcttggtttattcttttttttttctgttcattgacatttatcatatctgaaaaatcatgtagtca

SEQ ID NO: 240253 - DNA, 201 bp, Homo sapiens
aagtgccaatcagaaaagcataatactaaaaatatggtcaatttataaaaaaaaaatgttcagatgtagtattttgtacatttatctaaaaagaagcatgrcggcctccaatatttatttagcatatgtcatgttcaaggcattttcacatatattacttaatttttatagcaaaagaactcattattctcattttacaaa

SEQ ID NO: 240254 - DNA, 201 bp, Homo sapiens
tccagacactacttgtggcaatgactgggtctgtgaacatcgatggcgccaaataaggtgagaatatgtatttagacatgtcctctaatagtaaatttccrtagcactttatttaaaacagttgaagtttaagaatatcaacgttttatatggtattgtgtttttaggaacatggttaatttccgcaatgtagtggatggc

SEQ ID NO: 240255 - DNA, 201 bp, Homo sapiens
accaagtggcttttgggagaggaaacagaggattcattgttttcaacaatgatgactggtaagtaaatatcaattaaaaataatattttgtaccagtatgytcttggtttattcttttttttttctgttcattgacatttatcatatctgaaaaatcatgtagtcagtggagcgagaagacaatagagatcaaaattgggt

SEQ ID NO: 240256 - DNA, 201 bp, Homo sapiens
atttccttagtttccttcttttgtggatgaaaataccaaaaaaatcttttgtgaaaaagctttatatttcaaactatcacttcctcatacaaatgctagaytgtttttatgtacaccctaaattctttttgacctcatgtagaataaaagaaggttaaaaaaataataccctttaaatttttaaagtaattggcattaagt

SEQ ID NO: 240257 - DNA, 201 bp, Homo sapiens
ggcttttgggagaggaaacagaggattcattgttttcaacaatgatgactggtaagtaaatatcaattaaaaataatattttgtaccagtatgttcttggkttattcttttttttttctgttcattgacatttatcatatctgaaaaatcatgtagtcagtggagcgagaagacaatagagatcaaaattgggtagaagca

SEQ ID NO: 240258 - DNA, 201 bp, Homo sapiens
caggcattaaaatctacgtttctgatgatggcaaagctcatttttctattagtaactctgctgaagatccatttattgcaattcatgctgaatctaaattrtaaaatttaaaattaaatgcaaatccgcaaagcaatagctaagtgtgtttcttttcttacatatacagtaatagttacatatcattaattttaaataaaa

SEQ ID NO: 240259 - DNA, 201 bp, Homo sapiens
cacttttcaccatatgacgtgattttaaggtgaacactgataaacttcctagggttactctgtgttttttaatgaagatttcttaaagtgccaatcagaaragcataatactaaaaatatggtcaatttataaaaaaaaaatgttcagatgtagtattttgtacatttatctaaaaagaagcatgacggcctccaatattt

SEQ ID NO: 240260 - DNA, 201 bp, Homo sapiens
catctatgggcttcgtagggttccatttagagttttcaatggatactgcctcttttcctactaggtatggggattctgcctctttctcaccctctttcccwttttgaatggctataggagacatgctgttcatctctgattttttctgctacctgtagggctgcctgtctctcaggagcagttagggtttaagagtaacat

SEQ ID NO: 240261 - DNA, 201 bp, Homo sapiens
gggcttcgtagggttccatttagagttttcaatggatactgcctcttttcctactaggtatggggattctgcctctttctcaccctctttcccattttgamtggctataggagacatgctgttcatctctgattttttctgctacctgtagggctgcctgtctctcaggagcagttagggtttaagagtaacataacatcc

SEQ ID NO: 240262 - DNA, 201 bp, Homo sapiens
agttcagttgagaaaaaatttgattttaccaaggtagcactttatcaaaatgtgaccgctcccgccaatcttcggtgatattcttcaactttgatttttcrgttatattttcactactgaaaaggaaattggtaggttttctgtaaggttacttttggtcctagaaagctgtttacacctactagggaggcatatgggttt

SEQ ID NO: 240263 - DNA, 201 bp, Homo sapiens
  misc_feature (1)...(201): n = A,T,C or G
ttcttggtttattcttttttttttctgttcattgacatttatcatatctgaaaaatcatgtagtcagtggagcgagaagacaatagagatcaaaattgggnagaagcaaaaggatgatggctgttactccttcgttctcctgttttcataagggctttctgttgtaagcagaatcctttctgtgcacccttgcaatatctt

SEQ ID NO: 240264 - DNA, 201 bp, Homo sapiens
ctgtaattaaggatgttaatgattgggttgggccaccaaatgataatggagtaactaaagaagttactattaatccagacactacttgtggcaatgactgsgtctgtgaacatcgatggcgccaaataaggtgagaatatgtatttagacatgtcctctaatagtaaatttccgtagcactttatttaaaacagttgaagt

SEQ ID NO: 240265 - DNA, 201 bp, Homo sapiens
ttaaaaataatattttgtaccagtatgttcttggtttattcttttttttttctgttcattgacatttatcatatctgaaaaatcatgtagtcagtggagcragaagacaatagagatcaaaattgggtagaagcaaaaggatgatggctgttactccttcgttctcctgttttcataagggctttctgttgtaagcagaat

SEQ ID NO: 240266 - DNA, 201 bp, Homo sapiens
aaacagaggattcattgttttcaacaatgatgactggtaagtaaatatcaattaaaaataatattttgtaccagtatgttcttggtttattcttttttttytctgttcattgacatttatcatatctgaaaaatcatgtagtcagtggagcgagaagacaatagagatcaaaattgggtagaagcaaaaggatgatggctg

SEQ ID NO: 240267 - DNA, 201 bp, Homo sapiens
ttttctgttcattgacatttatcatatctgaaaaatcatgtagtcagtggagcgagaagacaatagagatcaaaattgggtagaagcaaaaggatgatggstgttactccttcgttctcctgttttcataagggctttctgttgtaagcagaatcctttctgtgcacccttgcaatatcttatgcatatatagaatgcaca

SEQ ID NO: 240268 - DNA, 201 bp, Homo sapiens
tttggtttaaaggagaaggaagagataaatatatatatgctaaaatttggcttttcctcctgtaattaaggatgttaatgattgggttgggccaccaaatrataatggagtaactaaagaagttactattaatccagacactacttgtggcaatgactgggtctgtgaacatcgatggcgccaaataaggtgagaatatgt

SEQ ID NO: 240269 - DNA, 201 bp, Homo sapiens
agaaggaagagataaatatatatatgctaaaatttggcttttcctcctgtaattaaggatgttaatgattgggttgggccaccaaatgataatggagtaaytaaagaagttactattaatccagacactacttgtggcaatgactgggtctgtgaacatcgatggcgccaaataaggtgagaatatgtatttagacatgtc

SEQ ID NO: 240270 - DNA, 201 bp, Homo sapiens
gtagaaatgtgtgttcatggaagaaaagtcttaagtacatatgattttgcataatctttttttcagtcagactaaacggtaagcagtttttcaactcattraagaatcttctcagttgatggctgtaattatctgttaagggcataagatactcagctgcagtagtgtaatatttactatatagcttagttgttccatgtt

SEQ ID NO: 240271 - DNA, 201 bp, Homo sapiens
gtggtggggcctgagtatttacatttttaagaagtttccaggtgaagttgatgctgttgttctggggcccacacctagaaccattagttgtaaagcattaygttgttgataggtaaagtttttaatgattcatacacacatgtatttatacatatacacacacacacgtatatatacgcacatactttttaccataaaaaa

SEQ ID NO: 240272 - DNA, 201 bp, Homo sapiens
cttgtggataatcttacatttctattgcaagttagaaaatgcaaatcaaaattaattagaatttgcttaaaaaatgagatgattaaagctggctgtcattmcctgtcagggcaatttgcagtttgttcttcagggtcccaacctaaggagcgggagacttagcagggcctgtcctcggtggacgctgagctccagtattta

SEQ ID NO: 240273 - DNA, 201 bp, Homo sapiens
ataaaaagtacttcttttgtcataaaacctcatgatcagttttggaagtggaatgttaggtaacccagccaaatatttacatatacaaaataaacacaagwctgaaaaatagtaaatttttaacctttctcttgctgacaccaccggtcttttactagccaccaagtcatagttcttacgtttttcatagtttaatgttaa

SEQ ID NO: 240274 - DNA, 201 bp, Homo sapiens
ttaaagctggctgtcattccctgtcagggcaatttgcagtttgttcttcagggtcccaacctaaggagcgggagacttagcagggcctgtcctcggtggaygctgagctccagtatttatctccctgtgagctctgtgagtctgtgagttctagctcagcttgtgaacctcttctttttctcttctgtaattggaagaaaa

SEQ ID NO: 240275 - DNA, 201 bp, Homo sapiens
tctgtagaaacctaataaagtacaaacatttgaatactggttttatttttaaatgttaaataatcatttgtttcagcattgtttatatagaaaaaaaaaaacagatactgggtggaatttgttaaagcatatccataaaataaactaccacagagtcattaaaaagattgtgaataggtttatgtatactaacttggaaag

SEQ ID NO: 240276 - DNA, 201 bp, Homo sapiens
ggtaggactcatgtagaagagttttaggaaatagtgctgatgtaatatcttgtacttaaacaggtctgtggactggccacagatctttttttttttttttycccctctgctaagtagactatcaccctggctattcatctttctgtataactggttgagaaacaggggagtgacagtaaagaaactattgtaaagtaaatc

SEQ ID NO: 240277 - DNA, 201 bp, Homo sapiens
acaggtctgtggactggccacagatcttttttttttttttttcccctctgctaagtagactatcaccctggctattcatctttctgtataactggttgagraacaggggagtgacagtaaagaaactattgtaaagtaaatctggtgacagcagaagagaatatgagacacattgtgctcacagagcctagaagagtgtga

SEQ ID NO: 240278 - DNA, 201 bp, Homo sapiens
cctaggcttcttttttgatgctctatcaaaacttggtctttcttgaactttggatcttttacccttgtatgatattataacatcatgcattggtcatttaraaaatagtggttcaccgagatcttctaaatgttgatacatttgattttacagtatcaaaatacattcatcaatattgccatcaatgttatcaggatattc

SEQ ID NO: 240279 - DNA, 201 bp, Homo sapiens
gagcagggaggcggaggttgcagtgaactgagattgcgccactgcactccagcctgggtaacagggctagactccatctccaaaaaaaaaaaaaaaaaaaatgttgagtggtgatccatttttgctgtaatcttttagatcaggttgaaatatcttaaatcttagctcagcagaccctggtaaacagtggcttttgtgttt

SEQ ID NO: 240280 - DNA, 201 bp, Homo sapiens
ctggatacagacatgtgggttgtttccagtgttaggaacagcgaatgctgctgtgatcattcttgcttgtatttcatggtacccctgtgccagcatttctytggggcacatacttaggggcatgaggatcaatttcttcttttactcaagagttatctaggaaaaaaaaaactttttaaaaagcattttcagatggctttt

SEQ ID NO: 240281 - DNA, 201 bp, Homo sapiens
gactggatacagacatgtgggttgtttccagtgttaggaacagcgaatgctgctgtgatcattcttgcttgtatttcatggtacccctgtgccagcatttytctggggcacatacttaggggcatgaggatcaatttcttcttttactcaagagttatctaggaaaaaaaaaactttttaaaaagcattttcagatggctt

SEQ ID NO: 240282 - DNA, 201 bp, Homo sapiens
gtgatctgcccacctcggcctcccagagtgctgggattacaggggtgagccactgcacctggcccctcacttttccttctgtaagacatctgcagcttgtstttttcactgaatatcacatggacttaatgcatagagagctgcctggtttttcatgattgtgcccacgattctgtatagggatataatttatgaattcct

SEQ ID NO: 240283 - DNA, 201 bp, Homo sapiens
cttgcctatctgtcccactttctggggtacctagtgtctgagtctagagcctcttcagggcgctgtgagataaatttgccttcttgctgtcaatatccccstaacctccacctttgttggctttgctccattaattaactattttccatttactgtcattgtctagtggaggtgagttctggtctgccggtaaccccattc

SEQ ID NO: 240284 - DNA, 201 bp, Homo sapiens
cagcgaatgctgctgtgatcattcttgcttgtatttcatggtacccctgtgccagcatttctctggggcacatacttaggggcatgaggatcaatttcttyttttactcaagagttatctaggaaaaaaaaaactttttaaaaagcattttcagatggcttttcagttatttttagtgcatcaatatggtcagagaatatg

SEQ ID NO: 240285 - DNA, 201 bp, Homo sapiens
tgtggtggctcacacgtataatctgagtgctttgggaggctgaggtgggaggatcacttgagcccaagagttaagaccagcctgggcaacatattgagacsccatctttacaaaaaataaaaaattaggtgggtatggtggcacctgcctgtagtcccagctactcaagaggctaaggcaggaggatcagttgagcctatg

SEQ ID NO: 240286 - DNA, 201 bp, Homo sapiens
tttggttgattatatatttctaggttgaagataattttaccttagaatttcaaagtctatgctgttgtcttctaaccagtcgtggtggtgaagcctcatgscattctgagtttcagtcatttatgtatggctttctctctggaagcttttaggagtttgtcttttccttggtgtgctgaaacagcacaacagtatacttag

SEQ ID NO: 240287 - DNA, 201 bp, Homo sapiens
cttggcaggttgttctttgggttggctgtgcagatgccatcttgaggtttttctcatctgctctcctacagtagatccattgtttcttggatcccatgccrtctttcttggctgaccctttctcattttgcctgactatattctcaggtaaaaccctaagaaagcatggaggagtacattttctgagctctagcttctgaa

SEQ ID NO: 240288 - DNA, 201 bp, Homo sapiens
aggtctgtgtccggattgctctgcctcatcttcattatgcacttagcacgcaatagagtgtattgggtggatatcaaatccacactggagcttggtttccktttaagcatgaagatttttgttggatcgtaatttaccgttcaaccttcctcattttcatttgctccgttgtccactttgggaaagcttattctttgcttc

SEQ ID NO: 240289 - DNA, 201 bp, Homo sapiens
aggtggaggttgcagtgagctgagtttgcgccattgcactccagcctaggtaacagagtgaaactctgtctcaaaaaatatatatataatatatatatatwttttttacggtagattttaaacaccaaaattatgaaaagagactgtagctaaccttattacatgccagttcttctaatttatttaagaattattttaact

SEQ ID NO: 240290 - DNA, 201 bp, Homo sapiens
tgtactaccctgtctttcttgttgcttggtatgactccactaccctgctgcctctctccccagcactcctggagccccttccgtgccagaggccagagtgkctaggtctgtgtccggattgctctgcctcatcttcattatgcacttagcacgcaatagagtgtattgggtggatatcaaatccacactggagcttggttt

SEQ ID NO: 240291 - DNA, 201 bp, Homo sapiens
tagtggggcatagtggcgcatgcctataatcccagctacttgggaggctgaggcaggagaattgcttgatctgggaggtggaggttgcagtgagctgagtktgcgccattgcactccagcctaggtaacagagtgaaactctgtctcaaaaaatatatatataatatatatatatattttttacggtagattttaaacacc

SEQ ID NO: 240292 - DNA, 201 bp, Homo sapiens
cccatacccaaacctgggaactgtcttagcgttcttttatatactactgttctctgacccccgccccccgcaaactagtaattttctaagacctgtccttytgaatgtctcttactattttccctgtgatctcagtttcttcctcccatccctcaaatgcttttttggtgtgtgggggaagggaggaaaattgaaattcgt

SEQ ID NO: 240293 - DNA, 201 bp, Homo sapiens
ctttctgttgtgaaatagcaaaatgcagtgttcccaatccaagtgtaagtttaatttttagagtagactgggtgcagtggctcacacctgtaatcccagcrctttggggaggtggaggtgggtggatcacctgaggtcattagttggagaccagcctgaccaacatggtgaaaccctgtctctactaaataccaaaaaaaa

SEQ ID NO: 240294 - DNA, 201 bp, Homo sapiens
gaaacttgtgctgcatacaaaatctttatttatttatttatttattttattttattttattttatttgttttttgagacggagtctcgctctgtcaccccrgctggagtgcagtggcactatctcagctcactgccagctccgcctcccaggttcatgccattctcctgcctcagcctcccgagtagctgggactacaggt

SEQ ID NO: 240295 - DNA, 201 bp, Homo sapiens
cttaagcattgtgtgattctagatagattattgagcagttttgttctatgtatttcatatcccatatcttctagttatgaccctacttctttatttcttgmcatagccaaacattttttaaattaacagctttattgtgatacagtttatatatgataaaacgcttcgaagtgtacaatttggtggttgttagtatattca

SEQ ID NO: 240296 - DNA, 201 bp, Homo sapiens
ttaattagaatttgcttaaaaaatgagatgattaaagctggctgtcattccctgtcagggcaatttgcagtttgttcttcagggtcccaacctaaggagcsggagacttagcagggcctgtcctcggtggacgctgagctccagtatttatctccctgtgagctctgtgagtctgtgagttctagctcagcttgtgaacct

SEQ ID NO: 240297 - DNA, 201 bp, Homo sapiens
atatatgataaaacgcttcgaagtgtacaatttggtggttgttagtatattcacagagttgtgcagtcattactactacctaatttcagaacattttcatracttcaaaaagaaaccccgtactgattagcagtcactccctgtacccgtttcccccaccattgatcctggcaacctctcatctaatttttatctctgtag

SEQ ID NO: 240298 - DNA, 201 bp, Homo sapiens
gcagtcactccctgtacccgtttcccccaccattgatcctggcaacctctcatctaatttttatctctgtagatttgcctatcttggacatttcatataartagaatcatataaaatgtggctttttgtgactggtgttttttacagtgatttttaaatcaaatatctgaagaggctaagcttaggatagtgtttgctgta

SEQ ID NO: 240299 - DNA, 201 bp, Homo sapiens
ttttagtgggactttgtttttgattggttaattaaatttctattcattattgccaaaaagtgcctacccccaacagcaagatactaaattttaaaaatgtkggagctgtgaatctaggaggaagtgagaagtttagcttttatttagtagttaggagcttaagtaagtcacttcttttactgtgtttctgtgtactataga

SEQ ID NO: 240300 - DNA, 201 bp, Homo sapiens
tggaggatttgtgactataggtagtgttttcattattttttcctgctctaggtagaacttcagggaggggacgatctgggaggtaaatggctgaatttctrttggatttgtgtttctggaccatggctcctgataccacaaagaagggccttttctggggttggagtatttcttgagaggcctaggaagaatgtgattgcc

SEQ ID NO: 240301 - DNA, 201 bp, Homo sapiens
tactttgtttccttttaggctcttatttcagtatcaagggtatgcaggggtgacttggaaagctttacatcttttttcctaagatctagggtgtagatctrgtttacacagtaattttcaactggaggagatttttgcctcccgtgggacatttggaaatatctggagccatttctggttttcacaactggtcatggtagg

SEQ ID NO: 240302 - DNA, 201 bp, Homo sapiens
acttcccgtttcatcacttgaaatattaaaaagacatattcaaggattcagatgtagtaaaattttcactgcttcatcatagacattctttttatttttgrgacagggccttgttctgtcacccaggctggagtgcagtagcgtgatcacagctcagtggagactcgaccttctgggctcaatcaatccttctgcctcagc

SEQ ID NO: 240303 - DNA, 201 bp, Homo sapiens; identical to SEQ ID NO: 47034

SEQ ID NO: 240304 - DNA, 201 bp, Homo sapiens
gtctcttactattttccctgtgatctcagtttcttcctcccatccctcaaatgcttttttggtgtgtgggggaagggaggaaaattgaaattcgtggagartgtactaccctgtctttcttgttgcttggtatgactccactaccctgctgcctctctccccagcactcctggagccccttccgtgccagaggccagagtg

SEQ ID NO: 240305 - DNA, 201 bp, Homo sapiens
tttcattctatttcaggctggtacacccctccaaaggaagatggctaaatatgttgactgttgtatgtttggactaatgttgctttaaagaaaatctttcyaacatgcagacaaaagctttgagtgcccctattacagcagtaccgaagatgttagttaatagatattttagtggataatctgtcatctgacatccagtat

SEQ ID NO: 240306 - DNA, 201 bp, Homo sapiens
agttcttacgtttttcatagtttaatgttaaaatatctttaacgaagcctttactgattggggagaaatgacataactattgtgttttagtttttttttttgagacagagtctcactctgttgcccaggctggagtgcagtggcgcaatcttggctcactgcaacctatgcctcccgggttcaagccattctcctgcctca

SEQ ID NO: 240307 - DNA, 201 bp, Homo sapiens
ttacatgccagttcttctaatttatttaagaattattttaactttttttttttcattctatttcaggctggtacacccctccaaaggaagatggctaaatrtgttgactgttgtatgtttggactaatgttgctttaaagaaaatctttccaacatgcagacaaaagctttgagtgcccctattacagcagtaccgaagat

SEQ ID NO: 240308 - DNA, 201 bp, Homo sapiens
aatgtatatatatatgtgtgtgtttatacatgtatgtgtatatgtgtatatacgtgtgtgtgtgtgtgtgtgtgtgtatatatatatatatatatatataatgaatttcagtacaaatcccagcagatttatttttggaagttgacaaaatgactctaacatttgtttaaaagggtaaatgataaaaaaataaagaataga

SEQ ID NO: 240309 - DNA, 201 bp, Homo sapiens
aaaggaaggtatctttctttttaaaaaattaaattatatgtccttatgcctaacaccaaacttaagaaatagaaccttttttttttttatccgtccctgtrgccccctgtgtgcccctcccttgtcacttcctctttgagaggtatctttacgggaatatgaaatattggccaggaaactggaggatttgtgactataggt

SEQ ID NO: 240310 - DNA, 201 bp, Homo sapiens
aaaatgtatatatatatgtgtgtgtttatacatgtatgtgtatatgtgtatatacgtgtgtgtgtgtgtgtgtgtgtgtatatatatatatatatatatataatgaatttcagtacaaatcccagcagatttatttttggaagttgacaaaatgactctaacatttgtttaaaagggtaaatgataaaaaaataaagaata

SEQ ID NO: 240311 - DNA, 201 bp, Homo sapiens
catttttactaattcatatgggggaacgaataaagcacccaggccaaaaacaaaaaacaaaacacacaaaaaaggaaggtatctttctttttaaaaaattraattatatgtccttatgcctaacaccaaacttaagaaatagaaccttttttttttttatccgtccctgtagccccctgtgtgcccctcccttgtcacttc

SEQ ID NO: 240312 - DNA, 201 bp, Homo sapiens
tgagaccccgtctcaaaaaaaaatgtatatatatatgtgtgtgtttatacatgtatgtgtatatgtgtatatacgtgtgtgtgtgtgtgtgtgtgtgtatrtatatatatatatatatataatgaatttcagtacaaatcccagcagatttatttttggaagttgacaaaatgactctaacatttgtttaaaagggtaaat

SEQ ID NO: 240313 - DNA, 201 bp, Homo sapiens
agtgagaccccgtctcaaaaaaaaatgtatatatatatgtgtgtgtttatacatgtatgtgtatatgtgtatatacgtgtgtgtgtgtgtgtgtgtgtgtrtatatatatatatatatatataatgaatttcagtacaaatcccagcagatttatttttggaagttgacaaaatgactctaacatttgtttaaaagggtaa

SEQ ID NO: 240314 - DNA, 201 bp, Homo sapiens
agatcttaaaagaaaaagaaggcatagaatatattttgcttaacttctcttttaaggtaagaaaatagttacaggaccccatatacttccagtggggtgcrtatatttgtacaagtgctttggaaaacaatttggtaaagtagaagatactcataccctatggttcaggaatctcgtagacatattctccgttaagacgtg

SEQ ID NO: 240315 - DNA, 201 bp, Homo sapiens
gctctgttacataaaagtcaatagctttccacaattttagctataatcacattgaaggtatagtgataaagtatttttttaagtatttcaacaaaaattawatacctaagaatcaacttagatgtgcacgacttttatcaagaacatgacaattttgctgagtggaaggaaagatttgcattctgtgttcctggatgagca

SEQ ID NO: 240316 - DNA, 201 bp, Homo sapiens
tctatatagttttacatcattttaaaaaacatttactggccaggtgtggtggctcacgcctgtaatctcagcactttaggaagccgaggcgggcggatcamttgaggccaggagttcgagatcagcctggccaacatggtgaaaccctgtctctgctaaacatataaaaattaactgggcatggtggcgcatgcttgtaat

SEQ ID NO: 240317 - DNA, 201 bp, Homo sapiens
atagttgaggtcatggtctatatagttttacatcattttaaaaaacatttactggccaggtgtggtggctcacgcctgtaatctcagcactttaggaagcygaggcgggcggatcaattgaggccaggagttcgagatcagcctggccaacatggtgaaaccctgtctctgctaaacatataaaaattaactgggcatggt

SEQ ID NO: 240318 - DNA, 201 bp, Homo sapiens
aattgtgttttaaaaaagatatgggcctggcttagtggctcacgcctgtaatcccagcactttgggaggctgaggtgggctgatcacgagatcaggagttyaagaccagcctggccagcatggtgaaaccccgtctctaataaaaatacaaaaaattagcttggcgtggtggcatgtgcttgttatcccagctactcggga

SEQ ID NO: 240319 - DNA, 201 bp, Homo sapiens
tgaagacatgtatgtttcttggcttatgctgaagtttactagacaaatactaacctaataatgagatcctaagtgtagttgcagtttctttagcctaaggraaaagaaacctaaaaactaaaacagtaaaaatggtccagatggtgtattcccaatgtgtgctgaagaatttgaagaagaaaatgcagtactcaataagtg

SEQ ID NO: 240320 - DNA, 201 bp, Homo sapiens
ctttgcttcttattgctgctccttgtattatgtgtcctgctccctgcccctcaagtatatccctgaataatatctggttgttttttttttttttaacctaraaagggtttaaagggatgtgcatggagagtgtcccttgaatacttgctgtctgttatttgttcaacaaatatctgactctgtataaagtattccacattg

SEQ ID NO: 240321 - DNA, 201 bp, Homo sapiens
cgttctccaccccacatttattgaacagcaaactatgaaagtaatgtgtcccataactggccttcagaagaattacaactgctgttatctctgaaccttcmagaagtttgtgcatcagttttaaaaaaatgatgaaatccctgaagatagctgtgtcctacatttggaaagatacaaaaactgaccattctggtcaaccag

SEQ ID NO: 240322 - DNA, 201 bp, Homo sapiens
agatataatcctttaacttgattcagcaatatggagacggactctagaaccagaaagctttgtacttgtccaatggtaggaagacttataaaaatgaactktgaggcttgttgagttttattggggtacaattttggttttgttatttttataaaattgtagagaataatgaaactgagaaatgaggctattaagttaaaa

SEQ ID NO: 240323 - DNA, 201 bp, Homo sapiens
gtctcttttgtttctttttattccccttcatcctctggatgaatgttagatctctatatcttcaatgtcccttaactgttctcttacttacatctcttctrttttctcccccatctcctttttttctctgttctaaggaaatgtcactgtttgtttttcttaatcataaataccttgttgggtcaagtccatagtactctg

SEQ ID NO: 240324 - DNA, 201 bp, Homo sapiens
atctcctttttttctctgttctaaggaaatgtcactgtttgtttttcttaatcataaataccttgttgggtcaagtccatagtactctggcccttctacargtggttttttgggggtggaggggatcttatttttactttctagaattgtgcttgcatagtaatctgttttttattttgtggatgcagtatcttcccaatt

SEQ ID NO: 240325 - DNA, 201 bp, Homo sapiens
taagattaactgaaattaacatttcaatgtaagttcttctggtctttctttttctgtgcttatttcagcgtaactgaaattctttctattcttttttgtaktgtttttcattttaaagtttttcgttacaggagaaattaggctatgttagtatttcagtggcctcttaatattttgctattttgcacatgcagattttgt

SEQ ID NO: 240326 - DNA, 201 bp, Homo sapiens
taattaacctaggcatcaccttacatagttatcatttttatggtgagacactttacatccactcttaacatttttcaagaatatagtatattgttaactayagtcaccatgttgtacaatagctcaagatggattctagtttggcctgctactaactctgattttaggcatagtcatttagtcattgcacctgctgcgatg

SEQ ID NO: 240327 - DNA, 201 bp, Homo sapiens
tttttgattggttaattaaatttctattcattattgccaaaaagtgcctacccccaacagcaagatactaaattttaaaaatgttggagctgtgaatctakgaggaagtgagaagtttagcttttatttagtagttaggagcttaagtaagtcacttcttttactgtgtttctgtgtactatagataatatttttttgcac

SEQ ID NO: 240328 - DNA, 201 bp, Homo sapiens
atgtaagtttaatatgctttcctaaactttttttgagttcttgagaaaattatatacatgtgactattttcctttagagtgactgcaaactctgaactccyttactagattagatttagagtattatggtctcttttggacatttattcccaaggagctggaacctatggtgacctctatttttcctggtgatacagagca

SEQ ID NO: 240329 - DNA, 201 bp, Homo sapiens
aaattttaaaaatgttggagctgtgaatctaggaggaagtgagaagtttagcttttatttagtagttaggagcttaagtaagtcacttcttttactgtgtktctgtgtactatagataatatttttttgcactgcaagagagcatatagaggaaagctctttggcaatgatattatgttctacaaatataaaagcgatggt

SEQ ID NO: 240330 - DNA, 201 bp, Homo sapiens
tgttgttataactggagtgcagtggttgtttacaggcgtgatcatagtggactgcagcctcaagctcctgggctgatgtgatcctcctgcctcagtctccycagtagcttggactgtaggcacaagccaccatgcctgtaaagtattctttactttgctagaaatgtgtcagtttgtgacttaagatttgtgttttgtgct

SEQ ID NO: 240331 - DNA, 201 bp, Homo sapiens
gttctgaccatggcaaacttttctccttgaaccctttggctaataatgtaagtttaatatgctttcctaaactttttttgagttcttgagaaaattatatwcatgtgactattttcctttagagtgactgcaaactctgaactcccttactagattagatttagagtattatggtctcttttggacatttattcccaagga

SEQ ID NO: 240332 - DNA, 201 bp, Homo sapiens
tagcttttatttagtagttaggagcttaagtaagtcacttcttttactgtgtttctgtgtactatagataatatttttttgcactgcaagagagcatatakaggaaagctctttggcaatgatattatgttctacaaatataaaagcgatggtgtcatttgtggctgaataacactttattttgaaaatgctttataacag

SEQ ID NO: 240333 - DNA, 201 bp, Homo sapiens
actgagttaaaggcaactccttacagatggagttcttgttgttataactggagtgcagtggttgtttacaggcgtgatcatagtggactgcagcctcaagytcctgggctgatgtgatcctcctgcctcagtctccccagtagcttggactgtaggcacaagccaccatgcctgtaaagtattctttactttgctagaaat

SEQ ID NO: 240334 - DNA, 201 bp, Homo sapiens
ttttgttacctttaaagcttccgtagactgtttttggatcaggcagtaaaattgctataaaaagtacttcttttgtcataaaacctcatgatcagttttgraagtggaatgttaggtaacccagccaaatatttacatatacaaaataaacacaagactgaaaaatagtaaatttttaacctttctcttgctgacaccacc

SEQ ID NO: 240335 - DNA, 201 bp, Homo sapiens
ctatattccagcctgggcaacagaatgaggcacccggtctcttaaaaaaaaaaaaaaaaaaaaaaaagttggggggaggtgggattcaaattagacctgtwtatataggacagttgtagacaaatacaggtttttttagtgatttaagttttcatagttctgaccatggcaaacttttctccttgaaccctttggctaata

SEQ ID NO: 240336 - DNA, 201 bp, Homo sapiens
acctatcagaatagcctcaaaatacccaggaaaaactgataaaaccacagggagaagttgacaagtccaccatcacagttggagatttcaacataccctgygtactactagtaagataaacagaatgcccatatgtagatttgaacaaccagtgaacaggcatggtataatagacaaatatagacctctgtacccaataat

SEQ ID NO: 240337 - DNA, 201 bp, Homo sapiens
atggtaggggtgctgttggcatttcttaggtagaggggatgtcactaaacatcctacaacacacaggagaaccctccacaaagaattgtctggcccaataygtcaatattgctgaggttgagaaaccatggtttaaataaaactccaatctggaggatgagtctttgactgtctttttcctttttctatgtatcggtctcc

SEQ ID NO: 240338 - DNA, 201 bp, Homo sapiens
tgagaactcgtctacacaaaaaatacgccccccaccctaaaaaaacaattagctgggtatggggtacctgtctatagtctcagctactcaggaggctgagrtgggaagatcacttgagcccaggagaccgaggctgcactgaggcatgtttgcgcactccagccttggtgacagtgagactctgtctcaaaataaaaaatg

SEQ ID NO: 240339 - DNA, 201 bp, Homo sapiens
tttcatttatttttacttttttttttctctgtgcctatgcttaccaagttttttttttttaaatctttttattaactcaatcctcttaataacttaaaaartaggtgctattattatctgcattttgtagatgaggtaactgaagcatacagaagttagttagataacttgtctgaggtgacaagtggcagaacaaggatt

SEQ ID NO: 240340 - DNA, 201 bp, Homo sapiens
ttagtagagatggggtttcaccatcttggccaggctggttttgaactcctgacctcatggtacacttcccttggccttccaaagtgctgggattacaggcrtgatttaatatggatctggatgagatgtaatggtttaaaatctgtggatatatgagatattttgatggaaaaagcaatacttcctttgtacttacaaaaa

SEQ ID NO: 240341 - DNA, 201 bp, Homo sapiens
tttcacccacaatttagtgttttgatcatgtaaattagattgtaagtagaaaattctttaatagctcctactcttaaattttagtttatttttaaaatagygtctactttcaagaatgaaaaaggtaaaccaataaaatgacattgtacttggtgctgaatctatgctaggataggcattaagagtgacctttatttaagg

SEQ ID NO: 240342 - DNA, 201 bp, Homo sapiens
tagtacgggaaagaagggagcagaatgatgtgaataaagatattggtctaggggtattcaaattctttgttttcttttcctttttttttttttttttttttgagatagagtcttgctctgtcacccaggctggagtacagtagcatgatcatagctcactgcagcctcaaactcctgggcccacatgatcttcctatctca

SEQ ID NO: 240343 - DNA, 201 bp, Homo sapiens
ggctaagttcttaattactgatatcatacaaatctgaaagtattatgttctaagaaccattagaaaaaattgactagaatttcagagggattacattagcrtgataacattagaatttttaaattacccatagtcctgtatccctaacaactgttgtcatgtttgcatgttattttctcatccttacttgtgtgcatattt

SEQ ID NO: 240344 - DNA, 201 bp, Homo sapiens
aatctagaaaaaatgttaatgatttttttttttttttgagacagaatcttgctctgttgcccaggctggagtgcagtggcccaggctggcgtgtggtggcrcaatcttggctcactgcaacctctgcctcccgggtttaagcagttctctgccccagccccccgagtagctgggattataggcatgtgccactatgtccgc

SEQ ID NO: 240345 - DNA, 201 bp, Homo sapiens
aaatgaaattgtactttaccaagcttacatcaacctctatacctttcattatgtctgttaaatatagatgaaaggtgagctactttatttgaaagtagatyataataactgttgttaagttggtatcttgtgtcattaagttggtatcttgtggataatcttacatttctattgcaagttagaaaatgcaaatcaaaatta

SEQ ID NO: 240346 - DNA, 201 bp, Homo sapiens
tctcagtagctgtaatttgctgcttgtgtttgaatacttaagcattttctttttatcatgggtatatgaacatttttatttcaacaagtgttagaattttyactctgcttttgtgggctctaggttagctacttggttgtttatttgtaaaatgattagcagggaaccatgtgtatgcattttaagtatcttttgttgtca

SEQ ID NO: 240347 - DNA, 201 bp, Homo sapiens
agaatgggtaaaaacaatttgaaccataaaaccatacagatcttcatagcatggatagggtaaggtcagtgtcattgtcaggggaaaaactcatggctgtwacatgttcagatgtaaagaacacgtgaacgccatttaaggaaactgattcttctgcccctattctttggaatatttagggctaagttcttaattactgat

SEQ ID NO: 240348 - DNA, 201 bp, Homo sapiens
caaatccttgtgccattaagaaaagaatgaaaatgaatcaagcctctgattgttagaaaggacaataaaaaaaacctgaaggaggccagggacagtggctyactcctataatcctagcactttggtaggctgagatgagtggatggcctgagctcaggagttcgagaccaccttgggcaacatggtgaaaccaatctctgt

SEQ ID NO: 240349 - DNA, 201 bp, Homo sapiens
gtaaaaacaatttgaaccataaaaccatacagatcttcatagcatggatagggtaaggtcagtgtcattgtcaggggaaaaactcatggctgttacatgttcagatgtaaagaacacgtgaacgccatttaaggaaactgattcttctgcccctattctttggaatatttagggctaagttcttaattactgatatcatac

SEQ ID NO: 240350 - DNA, 201 bp, Homo sapiens
gggtaaaaacaatttgaaccataaaaccatacagatcttcatagcatggatagggtaaggtcagtgtcattgtcaggggaaaaactcatggctgttacatgttcagatgtaaagaacacgtgaacgccatttaaggaaactgattcttctgcccctattctttggaatatttagggctaagttcttaattactgatatcat

SEQ ID NO: 240351 - DNA, 201 bp, Homo sapiens
cctcctctccctccctcttcctgtctggaacattcaagaagctaatctttttcaatgaacaacacttcaaatactgaaaaacagaaaaggacagtgtcatwctctgatcttagttaaatctataagttaataataaaaccagaaaacagatacttctttctggaattgtataactcatgcaaacagcctttaggtcaaaca

SEQ ID NO: 240352 - DNA, 201 bp, Homo sapiens
caaatcatagcattcaaatagtcaacccaacatatttgagaattgtcagaaataataaataatagatatgtttcccaaggacagtaggttttggaattatyagatacagaacacagacttcagatattagaattgtgagaaaatagttatatgtgaaatctaatataaagaaaaaaagatggaatcataaaattgagcaag

SEQ ID NO: 240353 - DNA, 201 bp, Homo sapiens
cacacaaaaaaggaaggtatctttctttttaaaaaattaaattatatgtccttatgcctaacaccaaacttaagaaatagaaccttttttttttttatccrtccctgtagccccctgtgtgcccctcccttgtcacttcctctttgagaggtatctttacgggaatatgaaatattggccaggaaactggaggatttgtga

SEQ ID NO: 240354 - DNA, 201 bp, Homo sapiens
tctgtaagcctttaaatttttctttttatggtggcaggggagaatattttataattatgctttgtgctttttatcttccactcaataaatgcttcataaayatttgagtatatagcgctattctagctgtattgtatttgaacaaaaatcttaactgccttgtaagttaactgctaagaatttgtcaaaagtgcagagata

SEQ ID NO: 240355 - DNA, 201 bp, Homo sapiens
gtaaaggaattgaagtattaagtttctccataaaagtgtatcgtgaagctattcgtcgtgaaattgatgtaggatattggtccaaactgcagaatattctsttggttataataggcgtcaaggtggtggcttcgggctccttttcaaacatggctaaaaccaagtcttgtttttaactccctttggttgagtcagtgggta

SEQ ID NO: 240356 - DNA, 201 bp, Homo sapiens
ggtgggaggaggcggagggcgcgtctttccggcttctcgccaggggctggcttgggggcttctggcccatctcggtccccgtctcctagccccgagggggragtccgcggcggcccaagcccttgtggggtccatggccgccctcagccggcctgctcccgggaccggggcggggcggggcggggcggcgcagctccggct

SEQ ID NO: 240357 - DNA, 201 bp, Homo sapiens
gaagctggacgagctgcactgccagttcctggtgccgcagcagggcagcccgcactcgctgccgccgccactcacgctccactgcaacatcacggtgaggygcccggccgcggccccgcggggcagggcgaggacggagagggggcgcttcgagtcccgggacaaaggggagcctgccccggagaggctccggctccccgg

SEQ ID NO: 240358 - DNA, 201 bp, Homo sapiens
acattatatacaatactcttttagcccagtaggagagttaaagagtggaagatagatttctatgtttcagaaatagaatacacacaaaaaaatttaatccyatgaaccttcgcctgaatttaaatttttggagagtttttcttttagattttctttcacttttagattaatctttcactttgaaaggtcccagggtttggg

SEQ ID NO: 240359 - DNA, 201 bp, Homo sapiens
aagttttcatagttctgaccatggcaaacttttctccttgaaccctttggctaataatgtaagtttaatatgctttcctaaactttttttgagttcttgaraaaattatatacatgtgactattttcctttagagtgactgcaaactctgaactcccttactagattagatttagagtattatggtctcttttggacattt

SEQ ID NO: 240360 - DNA, 201 bp, Homo sapiens
cgtatgtcacaaagccgaaaagacacttttaaaaactcactcattaagcggaaatctcattagaaacccaaggcttggtaaaggaattgaagtattaagtktctccataaaagtgtatcgtgaagctattcgtcgtgaaattgatgtaggatattggtccaaactgcagaatattctcttggttataataggcgtcaaggt

SEQ ID NO: 240361 - DNA, 201 bp, Homo sapiens
ttgaattcatggaagagcatttggaaatatcagaactgtcatgttaagcacctaagtggtactttcattccagaagaatcattgttttcgtttatctgacyaatttataatatagggtcaaattcctggtggttatttatgctccctcatccccatttttatacctgtccttgaaaggaacagatatatgaagagaagact

SEQ ID NO: 240362 - DNA, 201 bp, Homo sapiens
gatatgggcctggcttagtggctcacgcctgtaatcccagcactttgggaggctgaggtgggctgatcacgagatcaggagttcaagaccagcctggccarcatggtgaaaccccgtctctaataaaaatacaaaaaattagcttggcgtggtggcatgtgcttgttatcccagctactcgggaggctgaggcaggagaat

SEQ ID NO: 240363 - DNA, 201 bp, Homo sapiens
aatatagtgtgcaccagaaacatttggagagctagtcccagggtttctgattcagtaggtctgtggtggggcctgagtatttacatttttaagaagtttccaggtgaagttgatgctgttgttctggggcccacacctagaaccattagttgtaaagcattatgttgttgataggtaaagtttttaatgattcatacacac

SEQ ID NO: 240364 - DNA, 201 bp, Homo sapiens
ttcttgttgcttggtatgactccactaccctgctgcctctctccccagcactcctggagccccttccgtgccagaggccagagtgtctaggtctgtgtccrgattgctctgcctcatcttcattatgcacttagcacgcaatagagtgtattgggtggatatcaaatccacactggagcttggtttccgtttaagcatgaa

SEQ ID NO: 240365 - DNA, 201 bp, Homo sapiens
aaacaatgaacaccatacttgtgcacatgatttaccttgcttacttgttgaaagcaaatatgcttagaaaacaatctggacttaaacatggaaatttacagttattctttgcagttttcctagtgaattattgttattttttatacagacacttaagagcctactaaatatcaagtgttacaggtttcatttaatctttac

SEQ ID NO: 240366 - DNA, 201 bp, Homo sapiens
tgcctcccgggttcaagtgattctcctgcctctcagccttccaagtagctgggattacaggcacatgtcactacggccagctgatattttataaacatctrtgatcacctggccagtctttttttttttttctgagttggagtctcgcctgtcgcccaggatggagtgcaatggtgcgatcttggctcactgcagcctccg

SEQ ID NO: 240367 - DNA, 201 bp, Homo sapiens
tacgatttatctatggtgttaaaattccatggagcaggggggtaaaactaggaagaaaacttctaaaaaggcttcttaggggggcaaaaatgaaaagaaawctgagaaacacttatttatggattcatacgtgagcagtaaaactgcccaaagaggaaaactgtccaagaacaaagaggtgattacatacaggttagggta

SEQ ID NO: 240368 - DNA, 201 bp, Homo sapiens
taagacaaaaaaatctttttcttgagcagtgacaggtaaagaggttggtttggttaatcttgagttgtgtttccctccattaagacagttttatggtgggratggtagtggtgatgaacttgtttgaaatttgtccacttacagtaatgtttatggtagcttcacagacaacttcattctcacaggccttagaattactat

SEQ ID NO: 240369 - DNA, 201 bp, Homo sapiens
aaggcaattgaatttatgtaaatgattcaggctttccaaagttaaaaagggagctattttaaggaatcggtagtttgggagattttattttaaataagccrttgatcttatgcatatagccatataagtaaaatgttttcttattttaaattagattatgttttaacatttttttctgttttgctttatatttgattgctt

SEQ ID NO: 240370 - DNA, 201 bp, Homo sapiens
ccatttgttcgagtggtgttacctgttctctcaggagggtaagtttaagtgactacttaaaaagaaatttttttcagttaaaaaaaatttttttttatagrgacgagatctcactatgttgccctggctggtcttgaattcctgggctcaagtgatcctcccaccttggcctcccaaagtgctgggattacaggcatgagg

SEQ ID NO: 240371 - DNA, 201 bp, Homo sapiens
tatctatggtgttaaaattccatggagcaggggggtaaaactaggaagaaaacttctaaaaaggcttcttaggggggcaaaaatgaaaagaaaactgagamacacttatttatggattcatacgtgagcagtaaaactgcccaaagaggaaaactgtccaagaacaaagaggtgattacatacaggttagggtaaggagtc

SEQ ID NO: 240372 - DNA, 201 bp, Homo sapiens
tcatgaacattacatatagaaattaaatgttaagagataatatgatataaaagcatgattaatgattataatcttgtaggaattaaagactagtttgtttkttttttttccttcaaattctatttactacctggtctctcttttatttcccacatgtataaccttaatttagattacaaattagggatctctttttccctg

SEQ ID NO: 240373 - DNA, 201 bp, Homo sapiens
ttcaaattctttgttttcttttcctttttttttttttttttttttgagatagagtcttgctctgtcacccaggctggagtacagtagcatgatcatagctmactgcagcctcaaactcctgggcccacatgatcttcctatctcagcctcctgaggacctgagataaaattctttttctaactttttttctagttataaac

SEQ ID NO: 240374 - DNA, 201 bp, Homo sapiens
acaaagtttgtcatttgaattaatgatgactgtactttatgtcttgtgatcgattccagtttgagttatagtcaaaacaactataagttactgaacacttytgcatgatggatactatgccaagtactttatacttcacatatcttcacatttagtcttcatagccaccgtgtgaaataggtatgcttcatattttagaga

SEQ ID NO: 240375 - DNA, 201 bp, Homo sapiens
ttgggcaaagcaagtggggagagacacttgcttggattctccaggatgggggagatgaaaaggacttctttcccttattttattattaaatattgtcactrtaacaattattaatgttagtggtctacagtaaaagtttttagatgccttgtctgcaaagtaatttggttagttgacacaaagatgcctttggttaactgg

SEQ ID NO: 240376 - DNA, 201 bp, Homo sapiens
ttaaatcagtgagtgcacattatatacaatactcttttagcccagtaggagagttaaagagtggaagatagatttctatgtttcagaaatagaatacacamaaaaaaatttaatcccatgaaccttcgcctgaatttaaatttttggagagtttttcttttagattttctttcacttttagattaatctttcactttgaaa

SEQ ID NO: 240377 - DNA, 201 bp, Homo sapiens
tgctgattaatactcagaaaaagaaatttcgtggatgggaacatgactgaggttgaaggtataggaggaaatacaggctaaaggcatttgtgagaattgtraggaaaacatgtaggatggaagatcagggctgaaaggtgcacacagggagaagggagctcaatgaagtatggagtcatgggcagagtttgagtgagaaca

SEQ ID NO: 240378 - DNA, 201 bp, Homo sapiens
gcagaagaatttttcttagtacagaacaaaatggagtctcctatgtctacttctttctacacagacacagtaacaggctgatctgtcttgcttttccccayaattattgataggaaggccttaagcagggaatagtgtgctgaggatattgtttgagaaagataatgttgaattctgtttgggatgtgctgattaatactc

SEQ ID NO: 240379 - DNA, 201 bp, Homo sapiens
ttttaacagaatactggagactgggtaatttataaagaacagacatttattttctcactgttctgaaggctgggaagtccaagatcaagataccaacattkggtgtctgaggaccttcttgttgcatcctcacatggtagaaggcagaagggcaggagagcaagctagtccattgtgtgaagcctcatttgtaagggcctt

SEQ ID NO: 240380 - DNA, 201 bp, Homo sapiens
agtaactgggctgatggtgacagacccagatgcatgtgagaatcacctcagagagcttttgaaaaacagattctctgggtaggctttgaaattggcatttsgaaaatgctctttcaatcgttgatgcaaccaaactctttgggagttttaggctaggtatatagtctttagatacccagaatagtttgatttggaatataa

SEQ ID NO: 240381 - DNA, 201 bp, Homo sapiens
tttctactgtggcctccccctcctggtttgcagacctgtgctcttcctatggcatgaggatggggaggtgctggctggtgagctttccagctcctgagctwaaaggaagaggtggagtctaagattttgctgctgcattgagttatactaaaaacactctctgtcttttctgtctggttttgacactcatagaggccatca

SEQ ID NO: 240382 - DNA, 201 bp, Homo sapiens
cactattggtgttactgctgtctttgcttcttattgctgctccttgtattatgtgtcctgctccctgcccctcaagtatatccctgaataatatctggttgttttttttttttttaacctagaaagggtttaaagggatgtgcatggagagtgtcccttgaatacttgctgtctgttatttgttcaacaaatatctgactc

SEQ ID NO: 240383 - DNA, 201 bp, Homo sapiens
tcattcttgcttgtatttcatggtacccctgtgccagcatttctctggggcacatacttaggggcatgaggatcaatttcttcttttactcaagagttatytaggaaaaaaaaaactttttaaaaagcattttcagatggcttttcagttatttttagtgcatcaatatggtcagagaatatggcctgtgacctttcagct

SEQ ID NO: 240384 - DNA, 201 bp, Homo sapiens
gaacagcgaatgctgctgtgatcattcttgcttgtatttcatggtacccctgtgccagcatttctctggggcacatacttaggggcatgaggatcaatttyttcttttactcaagagttatctaggaaaaaaaaaactttttaaaaagcattttcagatggcttttcagttatttttagtgcatcaatatggtcagagaat

SEQ ID NO: 240385 - DNA, 201 bp, Homo sapiens
ttcagagcagcatcgtttataatagcaccaaatagaaaacccaagtgttcattccaataaaatggagaattgtggtgtttataaagtggtttacagctatrtgggacaagatgggtggatcttgaacacagttgtaaaagagactggactccaaaacctattttgtacaattccctttatatacagttcaaaaataggtaa

SEQ ID NO: 240386 - DNA, 201 bp, Homo sapiens
tctggagttctgagtgattcccatgtgttttctgctgcagagcaggaaatgctgaaggattccttcgtgagcagatgttagaggtttccttttgacaggtkgttacaaagttgatcacaaatatactatcacagtgagtggaaatcccaggttgggtgtgaaatagttgtttagaattgtgtacagttttcttttgttacc

SEQ ID NO: 240387 - DNA, 201 bp, Homo sapiens
tcttaataggagatttagaagatggcttatttggtaatagttatgattttgtaaagcttttaaatctgctttacccagagtctagattttaaataaaatayaggatataaaaggtgggagcctcttgaatggaatgtgggggctttttctctctccctataggatagttacattttgtttcttgttcctcatttgagtcaa

SEQ ID NO: 240388 - DNA, 201 bp, Homo sapiens
taagaaaaatggaacttgagataaagcataacacaaagatgggagttggggcaggagggaatgtgaccttgttggtaaatccaacttgctatatttttaargaagtcactttttggtgtttcgggcagcatctgaattactgaattgaattctgaggtagtactttaagaagggtctatttagataaacttaggttcattt

SEQ ID NO: 240389 - DNA, 201 bp, Homo sapiens
tatatacgcacatactttttaccataaaaaagctaatgttttcaaatgtaaattgtgattgagggtttagagaatgttacgattagagaatggtccccacrtgcctgtgatcctaattggtacttttagggataatcatgggaaaatctcatggacctatggaactggctaattactcctagaggtaatacttgcagttta

SEQ ID NO: 240390 - DNA, 201 bp, Homo sapiens
ataagaagcaccatctgctttttaaatcaactttaaacaatttaatttggggcttaatttaattctttccaaatccttatgcacctaatctcattcttgtyacttttgattttagtgtagatgttgatacaatttgaacaacacacacacacacgaagatatttaggataagggatttaaggaattttgaatatgaaggtt

SEQ ID NO: 240391 - DNA, 201 bp, Homo sapiens
cattttttattacaaagtgttccatgttcagacttgatgaactctcattctgctttccttgaattttatttttccccataatccttgacacttgagctttygcgtttatgcaaatccatatcatatggacatcttaggaacttcttaggcctaagcctaaaacaaatggctgtttcttttattatttatataaagaataat

SEQ ID NO: 240392 - DNA, 201 bp, Homo sapiens
cagaacagcccccagcaaagggtcacccaggccacagtgtcaggagggccctaagtgaaaagggagtaatacaaaataggcttagtcggcagaacatttaycaaaataatgcaagttcagcatgtattcatcatgaatcccacattacattggagatttaccctgctaatttcttctttaatatacccaacagtgaaagtt

SEQ ID NO: 240393 - DNA, 201 bp, Homo sapiens
tgaaaatgaatacatcacttttataaaaaagtaaaatgtggttaaagtttccaaaagtaaacaaaacagggcatataagttccaatcccatcagccacgarttcacaaaagcattccttaatccatgttacactttacccaatttggtgatttgaggtgggtattgtggtggtgacatttgtattttgtattttctgctgg

SEQ ID NO: 240394 - DNA, 201 bp, Homo sapiens
atgctctccagacaggttttttttttttttttttttttttttgagatggagtttcgctcttgttgcccaggctggagtgcaatggcgtgatctcggctcamcgcaaactccacctcccgggttcaagcgattctcctgtctcagcctcccgagtagctgggattacaggcatgtgccaccacgcccagctaattttgtatt

SEQ ID NO: 240395 - DNA, 201 bp, Homo sapiens
ggaatgtttagctgatacaacgaagtctcttcagactctcttagaacccagttttcatttacgtataattcatgccctaaccacagattttacttttagtyttcatcaaaacagcacattcccctcaaacccatacattgtttatataattcccagcaaactttctgtgggtctttttggaggagatgggaaggtggttgc

SEQ ID NO: 240396 - DNA, 201 bp, Homo sapiens
ctcattattaatgtctgatcaatccctctagataattagcaattcagcaacatttcctgaccctggtactggttttgatccttttgacttatttgtttagrtgaggtcattctcactgtaagaagttttgagttttaaggaggagtgtggaatcacgcttttgtttgttttttggtctctgaagttgttgaggtgtcccct

SEQ ID NO: 240397 - DNA, 201 bp, Homo sapiens
cagcttagagtatctagcatttttcacaaattggttaaccttgcttacagggtaaaggattatcacaatgaattgcaagctctgtgttggagggagggaaygaggcttccgccctggacatgtgctggggtgtggccttggtccagtgcctcatctagcccaggcgttgttacctacctcaactttaaggtgggaaaggtg

SEQ ID NO: 240398 - DNA, 201 bp, Homo sapiens
atttgcttatgtaatgagaacatgatgtctgcagattgtttacacttactgaggaacagaatcataacaaaagcccagttaccaactctgccaggcaggtscaatctttctatggctttgaggcaaggatgcctttctgtgcaagtgtagactcaagtatctgacatctgcacctcagttggggcagagcacgtgagtctt

SEQ ID NO: 240399 - DNA, 201 bp, Homo sapiens
tacccactttttgaaattgtgccatgcagcttttcgtgctgccttccctgtcctcagctgctgctcaggtgccaaccttccatcctcaggctggtgctcgygccctggggacatgcactgtcctttgtacagctcttcgttcatctcacaaagtgcccaggacattgtaggtgctgagtaaataatgggatgattgaggaa

SEQ ID NO: 240400 - DNA, 201 bp, Homo sapiens
gggcatcccccgggctgtgggacagagggtgtggggcatccccaggctgtgggatggagggtgtgggcgcctttgggctgtgggagttgtggacatcctgwtttcaggccaggtgtggttggactctctgaaaatcagatgctgggtcagttgagtgtgcgggatgttattagggagagcctttgggattggaggacactc

SEQ ID NO: 240401 - DNA, 201 bp, Homo sapiens
tgatttaaatggctaaaaatcttgaaaaaaatgcaggcttactaacaactgaaatgaagtgaattaaaattgtgagaccctgttgttttatataaaaaaamatgtaaaaatagaccatttttacactcctaaaatcaagagtttgaggatctgggactcttaagtgcagttatgggaatgaaacgattagagcctcatcta

SEQ ID NO: 240402 - DNA, 201 bp, Homo sapiens
agcatagaggtgtttgggttttgtttccctggaaggggaggtgcgacatccctggggaggaagacccccagctccctcctcatgctacaggccagcctgcrtgctcctagttgtggtgggaattaaggctgccaagggcctggccctgcgtctggaggcttgccagcttctagcacccatggtgggccgtttctgtttgga

SEQ ID NO: 240403 - DNA, 201 bp, Homo sapiens
tgtctgtgttttaaacctgggagatttttcactgtgctggaacgaaataccatgttccccttgtcttaaccaggcatgggcaaggcacctatttatacgcrgagacgggcagtaagtatgttggcacctgggtgaacggacagcaggagggcacggccgagctcattcacctgaaccacaggtaccagggcaagttcttga

SEQ ID NO: 240404 - DNA, 201 bp, Homo sapiens
gcacatccagcctgtgagctgggttctgtgtgggaatatttctatcacccagagagtagttcctccctactccagagagtgacctctccatggctgacagrtagggaacctcagccactatggtctgcatgcacagtacagagttgaggtactttcagaattaactgaaaaatctagcgactctgcagtggtgctgtcagt

SEQ ID NO: 240405 - DNA, 201 bp, Homo sapiens
aaagtgcgagctatagttgcttgctttgctcctagataaaataagaaccagtaggtggttcttattttaatagatgtcagtgatgattctgtccaattctragaccaagatggagggttttaataccatccctgttagatagaaattgttttgttttgtttcataaatcccagaaggcttgctctataagaagcaccatct

SEQ ID NO: 240406 - DNA, 201 bp, Homo sapiens
tgtaattccagcactttgggaggccaaggatcgcttgagtccaggactttgagaccagccagggcaatatagtgagaccttgtctctacaaaaaaattttraaattagctgggaatggtggcgcatgcctatagtctcagctactcaggagtctgaggtggaaggatcactggagcctgggaggcggaggttgcagtgagc

SEQ ID NO: 240407 - DNA, 201 bp, Homo sapiens
ccaaccaaccaaccaaccaaccaaccagccaaccagccaaccaaacagctaaccaatcaacaaaccagtcaactgactagccaaccaaccaaacaaccaaygaaccagccaaccaaacagccaaccaatcaaccaaccagccaactgactagccaaccacccagccaaccagttaaccaaccaaccagccagccaaccaac

SEQ ID NO: 240408 - DNA, 201 bp, Homo sapiens
tcatactgtggttgacaaaagtagtttgcagttgtccacatcatggagtggtattatgaattttatgatatccttgccaatttcagtactgcctaccaagyctataaggacttagcagaagccgtatggaggtgaggaggtgagggaagagttcaaacagaggcatggcaccagcggatggagctggtgtgcagctggggt

SEQ ID NO: 240409 - DNA, 201 bp, Homo sapiens
gcctgtccccgctccccatcttccgggctgggagggaggcgggaccggccgcgtctccatggcgacgcgggacgcggcggtggaggcggttgctacccacytgctagaggcgctgcggctgtgatccaggctggggcgagaccatgtcggacctgggctcggaggagttggaggaggagggagagaatgatattggggtga

SEQ ID NO: 240410 - DNA, 201 bp, Homo sapiens
tacaagttgcagtgcttttataagaaagttgaggaatgggaaggggactcctcatattgcagttgtcttttttcattggagggacaatatagaggttacartcattggctacagatgacaacatacaggctaaaatgttttctgcatatgcacaagacaatcagtgaaacgtcatgattcagaaacaaatcagtatccttt

SEQ ID NO: 240411 - DNA, 201 bp, Homo sapiens
tctgtttgcattttactgaagcccctcagttcttaaggccttttctccacactgtccaggagagctcagaagagacacacttagggactcagtcgccatgrcaactgccaagctgcagggcctccagctgggaggtgggcctggaaggttgtggaaaatacagaaggcagccccagggtggtttcaacagtttccccggcc

SEQ ID NO: 240412 - DNA, 201 bp, Homo sapiens; identical to SEQ ID NO: 47043

SEQ ID NO: 240413 - DNA, 201 bp, Homo sapiens; identical to SEQ ID NO: 47044

SEQ ID NO: 240414 - DNA, 201 bp, Homo sapiens
gtaaaggattatcacaatgaattgcaagctctgtgttggagggagggaacgaggcttccgccctggacatgtgctggggtgtggccttggtccagtgcctyatctagcccaggcgttgttacctacctcaactttaaggtgggaaaggtgggacaattgagtatagtgccgggggtttagcatagtgggatgactcaaggg

SEQ ID NO: 240415 - DNA, 201 bp, Homo sapiens
accctgtctcaaaaaataaacaaaaacaaaatgcttctgtcagttaacaatctttattagagggtttttagtctttctttctcagctgtatgttaagttgrttgacaaatgcaaataaacgtctttattatcctttctttctgaaatagcctctgcttcaagttctgtaaactgaaggttaccacgtggttttgccatggt

SEQ ID NO: 240416 - DNA, 201 bp, Homo sapiens
caaccaaccagccagccaaccaaccaaccaaccaatcggttagccaactaaccaaccagccaaccagccaaccaaccaaccaaccagttaaccaacaaatmaaccaaccaaccaaccaaccaaccaactgggagttactcctgagaagaaatatagttggaaaaaacctcagttgacaagttcaagaatgatcagaaagta

SEQ ID NO: 240417 - DNA, 201 bp, Homo sapiens
atgttttagccacaaagctggctgttttggacaggtgtgcaggcataagagaattactgatgttacatggatagtcttgtcttagcatttactttgagtaygtattttgcttattttatgtcgggtaccaaaagaaaaaactgttgaagtgcatatgagataaaatttaacattcaatttttgactgatgaatgcttaata

SEQ ID NO: 240418 - DNA, 201 bp, Homo sapiens; identical to SEQ ID NO: 47042

SEQ ID NO: 240419 - DNA, 201 bp, Homo sapiens
tctagtctgggtggaaggcagcttcctgtaagtcacctgcatctaacaaaacgtagaggaatttgacatactgtcctcccccgaggttccacttcatttakgtgtgtgtgtgtgtgtgtgtgtgtgtgtgtgtgtaacctcctacacacatagtcagaagcctaagaaagacagtcggctttaggatttgattgtgacagg

SEQ ID NO: 240420 - DNA, 201 bp, Homo sapiens
cttgtgacagcatcacttcttagtgaggaggacatattcttacaaagtgcgagctatagttgcttgctttgctcctagataaaataagaaccagtaggtgrttcttattttaatagatgtcagtgatgattctgtccaattctgagaccaagatggagggttttaataccatccctgttagatagaaattgttttgttttg

SEQ ID NO: 240421 - DNA, 201 bp, Homo sapiens
ctgctggcatcttcctgggtggaggccggggacggtgctgaataccctgcagggcacagaacagcccccagcaaagggtcacccaggccacagtgtcaggrgggccctaagtgaaaagggagtaatacaaaataggcttagtcggcagaacatttatcaaaataatgcaagttcagcatgtattcatcatgaatcccacat

SEQ ID NO: 240422 - DNA, 201 bp, Homo sapiens
gaacagcccccagcaaagggtcacccaggccacagtgtcaggagggccctaagtgaaaagggagtaatacaaaataggcttagtcggcagaacatttatcaaaataatgcaagttcagcatgtattcatcatgaatcccacattacattggagatttaccctgctaatttcttctttaatatacccaacagtgaaagttat

SEQ ID NO: 240423 - DNA, 201 bp, Homo sapiens
aacagtgaaagttatagagtttaattaataataaaaaatagctctacctttcacaaaacatttaaatatagcgtcttataagaatgtggcaaatttctgctttttttttttttttttttaagatggaatcttgctctgttgctcaggctgaagtgcaatggcgtgacctcggctcactgaaacctctgccacggggttcaa

SEQ ID NO: 240424 - DNA, 201 bp, Homo sapiens
ctcccaagtaactgggttgacaggcatgtaccaccatgcccagctaatttttgtatttttagttgagacggggtttcaccatgttggccgggctggtctcraactcctgacctcaagtgatccgcctgccttggcctcccaaagtgctgggattacaggcatgagccactgcgcccggcctgcttttcttttaaattaata

SEQ ID NO: 240425 - DNA, 201 bp, Homo sapiens
tattaccttataggcgtatcctcacatgtgctttcttcagtccccatctgaactgacccaggtctttggagttatttcctgagttaggcagcagagaggakaaagagggcacatccagcctgtgagctgggttctgtgtgggaatatttctatcacccagagagtagttcctccctactccagagagtgacctctccatgg

SEQ ID NO: 240426 - DNA, 201 bp, Homo sapiens
gattgaacatgagataggtgaagaaacttcactggggggagtagaagtcagtagggtcataactaacaggaggctacaccaaaagagtaaaatctccactrgtttcaggatctgaggaggcaatgtcctatgggagagagagggagtgaatcaaacatacagctggtctcccaagtgatttgtgtaaagctaaagagtaag

SEQ ID NO: 240427 - DNA, 201 bp, Homo sapiens
agagacaaagacatatggatgggaatataaagcagcacatctcttgtaccaatctatatttgatatcctagcctagtattttattgtaaagagtcctatayctacctgtgggagactgtattagtgttagagggatggtgcatgcatagagggagccttggtgtagctcctgtaagccaccttcgtttttcatacagtgga

SEQ ID NO: 240428 - DNA, 201 bp, Homo sapiens
taagactgaatgaggctgaattttcaacagtaactatggaagccagaaaatgataaaataatattttttaaatgataaaaaaaactactggcctagacttmtataacctatgaaaatatactttaggcatgaaggtaaaagaaatatttttttagacaacaaaagttgaaagaatttataagaattgcacaggaagtttct

SEQ ID NO: 240429 - DNA, 201 bp, Homo sapiens
gaaatcacagctttctttaagcctcttttcttgttacactcctcctaccagctgttttttctctagcaacaaagttggaactatagtttaaaaaaaaaaaactagttatgccgataaaggagaaaaaaatatttttgcttcagatgcagtcacttgcttcctttgtatcaggaaaggaatcaggcagctatcaactaaaca

SEQ ID NO: 240430 - DNA, 201 bp, Homo sapiens
atagcattgattaatacaataaaattaccttgtaacatatgcaaaacatgggagtaaaatacatgacattactagcaaaaagagcaagaagtagacaaacrgtattgtagtcttgcattttgcaggaagtgttagattattaatgtagccctgcttgggatagatccatatgcctattgtacttctgacaataactactaa

SEQ ID NO: 240431 - DNA, 201 bp, Homo sapiens
cccattcttaagctgcttttaagctaattttctggctctttgcctactgcatgtgtgtgtgtgtgtgtgtgtgtgtgtgtgtgtgtgtgtgtgtgtgtgtkatgggactgttttccttggtaggttctcagatactctctgggatgtttgggttctcaaggacacctgctcttgggctgggcactgtggccttggcacatt

SEQ ID NO: 240432 - DNA, 201 bp, Homo sapiens
aggaactgcgttcctttggaggaggagaggcgctctgctttttagagtttccagtttttctgctctgttttttccccaactttgtggttttatctactttyggtctttgaggatggtgatgtacagatgggatttttgtgtggatgtcctgtttgttagttttccttctaacagacatgcaggtctgttggagtaccaggc

SEQ ID NO: 240433 - DNA, 201 bp, Homo sapiens
taatgtatatattttgatgtatctggatatatgcatacacctgtgaccccatcatcacaatcaagatactaaacatattttagtttttgttttcatctccraaaattttcttgtgttttttttgtgttttgtgtgtgtatgtgtggcaagaatacttaacatgagatctcctcttaacatattttaaagtgtacagtagca

SEQ ID NO: 240434 - DNA, 201 bp, Homo sapiens
aaatcattcagacttcagcactatacctcagcaagtaatttgagtaaaaactgaatactgaaggtgtttatttcaacttgattattctttattacattgcrttactgttttatactgattaaaatgctgactttctatgttaataaaagattatattaaattttttgattttccaaaattggcaagatggaaatatttaca

SEQ ID NO: 240435 - DNA, 201 bp, Homo sapiens
gcctttggtttgaatgtcctcccgtagctcggagtaatttgatcatctgaagccttcttctctcagctcctcaacgtcattctccgtccagctttgttccrttgctggtgaggaactgcgttcctttggaggaggagaggcgctctgctttttagagtttccagtttttctgctctgttttttccccaactttgtggtttt

SEQ ID NO: 240436 - DNA, 201 bp, Homo sapiens
aattggccgggcgtggtggcgggcgcctgtagtcccagctactcgggaggctgaggcaggagaatggcgtgaacccgggaggcagaacttgcagtgagccragatcgcgccactgcactccagcctgggcgaccgagccaggctccgtctcaaaaaaaaaaaaaaaaatgtgatcaggctgagaagccaaaatataattcc

SEQ ID NO: 240437 - DNA, 201 bp, Homo sapiens
attcttttctttaagaatgttgaatattggcccccactctcttctggctggtagagtttctgctgagagatcagctgttagtctgatgggcttccctttgwgggtaacttcacctttctctctggctgtccttaacattttttccttcatttcaactttggtgaatctgacaattatgtgtcttggagttgctcttctcga

SEQ ID NO: 240438 - DNA, 201 bp, Homo sapiens
tgggaactgtcctatcagtcactttgcctcttaaggacaattaaaatgtggtcaggctggccggacgcggaggctcaagcctgtaatcccagcactttggraggccaaggcgggcggatcacgaggtcaggagatcgagaccatcctggctaacacggtgaaaccccatctctactaaaaatacaaaaattggccgggcgt

SEQ ID NO: 240439 - DNA, 201 bp, Homo sapiens
atttgcttgtctgtgaagtattttatttgtccttcacttatgaagcttagtttggctggatatgaaattctgggttgaaaattcttttctttaagaatgtkgaatattggcccccactctcttctggctggtagagtttctgctgagagatcagctgttagtctgatgggcttccctttgtgggtaacttcacctttctct

SEQ ID NO: 240440 - DNA, 201 bp, Homo sapiens
cagactcctagattctttgattttttgaatggtttttgtgttgctatctccttcagttcaagtctgattctggttatttcttgtcttctgctagctttggsatttgtttgctctttgttctctagttcttctagtggtgaaacatcataattaaaagaggttgaaaaatttgacatttttctaactttttgatgtgggcat

SEQ ID NO: 240441 - DNA, 201 bp, Homo sapiens
atgcggtcaattttggaataggtgtggtgtggtactgaaaaaaatgtatattctgttgattttgggtggagagttctgtagatgtctattaggtccgcttrgtgcagagctgagttcaattcctgggtatccttgttaactttctgtctcgttgatctgtctaatgttgacagcggggtgtgaaagtctcccattattaat

SEQ ID NO: 240442 - DNA, 201 bp, Homo sapiens
tcataaaatttatcttcatcttctggaacatttaaaatttgaattttagatcactttttgctgtcccataaatcatgaaggctttctttttattttttatkcttttttgtctttttgtctgaatgttttattttgaaagacctgtcttcatgttctgaaaaactttctgctgctttatctagtctattgttgaagctttga

SEQ ID NO: 240443 - DNA, 201 bp, Homo sapiens
tctgtttttgtacctgtaccatgctgttttggttactgtagccctgtagtataatttgaaattgggtagcatgatgcctccagctttgttcttttgcttargattatcttggttattctggctttttttggttccttatgaatcttaaaataatcttttccaattctgtgaagaatatcaatgttagtttaataggaatgg

SEQ ID NO: 240444 - DNA, 201 bp, Homo sapiens
ctagattttctagtttatttgcgtagaggtatttgtagtattctctgatggtagtttgtatttctgtgggatcagtggtgatatcccctttatcattttttattgcatctgtttgattcttctctctttttttctttattagtctggctaacagtctgtcaattttgtagatcctttcaaaaaaccagctcctggattcat

SEQ ID NO: 240445 - DNA, 201 bp, Homo sapiens
cttctaatcaatacaatagagcaaagatgatgggatgccacctccacgattatgttatgttatagaaggttctatcatcctggcagtattctatggactamtttcctggttttgaagaagcaagctgccatattgtgggctgcctgtatgggtataatgagaaaaaccaggaattgtattaaaaaacattcctcccaaact

SEQ ID NO: 240446 - DNA, 201 bp, Homo sapiens
tgttcatgtcctttgcctgctttttaatgaggttgtttgttttgttcctgtaaatttgtttaagttccttatagatgctgtatattagactttgttgggtsccatagtttgcaaaaatattttcccattttataggttgttttttccattgatagcttatttttctgtacagaagtctttaattagatcccatttgtcaat

SEQ ID NO: 240447 - DNA, 201 bp, Homo sapiens
ccatttcttctagattttctagtttatttgcgtagaggtatttgtagtattctctgatggtagtttgtatttctgtgggatcagtggtgatatcccctttrtcattttttattgcatctgtttgattcttctctctttttttctttattagtctggctaacagtctgtcaattttgtagatcctttcaaaaaaccagctcc

SEQ ID NO: 240448 - DNA, 201 bp, Homo sapiens
atgtgtcaaggaatttatccatttcttctagattttctagtttatttgcgtagaggtatttgtagtattctctgatggtagtttgtatttctgtgggatcrgtggtgatatcccctttatcattttttattgcatctgtttgattcttctctctttttttctttattagtctggctaacagtctgtcaattttgtagatcc

SEQ ID NO: 240449 - DNA, 201 bp, Homo sapiens
cgtgaacccgggaggcagaacttgcagtgagccgagatcgcgccactgcactccagcctgggcgaccgagccaggctccgtctcaaaaaaaaaaaaaaaaatgtgatcaggctgagaagccaaaatataattccataattttaattagaatatgactttcactgtatctgattcatccagataagtcagttttatttctta

SEQ ID NO: 240450 - DNA, 201 bp, Homo sapiens
ttggtctattcagagattcaccttcttcctggtttagtcttgggagggtgtatgtgtcaaggaatttatccatttcttctagattttctagtttatttgcrtagaggtatttgtagtattctctgatggtagtttgtatttctgtgggatcagtggtgatatcccctttatcattttttattgcatctgtttgattcttct

SEQ ID NO: 240451 - DNA, 201 bp, Homo sapiens
tagaattcggctgtgaatccatctggtcctggactctttttggttggtaagctattgattattgccacaatttcagatcctgttattggtctattcagagrttcaccttcttcctggtttagtcttgggagggtgtatgtgtcaaggaatttatccatttcttctagattttctagtttatttgcgtagaggtatttgtag

SEQ ID NO: 240452 - DNA, 201 bp, Homo sapiens
ggtgcaatcacggctcactgcagtcttgacttccacagctcaagtgatcttccatctcccaggctcaaacaatcctcccacctcagcctcctgagtagctrggactacaggcatgcaccacattgcccagctaatttttgtgggttgttttttttagagatgaggtttcaccatgtttcccaggcttgtcttgaacttttg

SEQ ID NO: 240453 - DNA, 201 bp, Homo sapiens
ttaactccaaggaaagacttactaatgttaaaattctggaaatcagtctggtggaggagatatttggagtttgggtgcaggcaggtgagtggcaagtgtgkgggatgtgaggaacttccttgaagtccttctcaatactcaggttcccaggagtcaccttgcttccttcaagtttcacagagactcaccaaccagctgagt

SEQ ID NO: 240454 - DNA, 201 bp, Homo sapiens
taaaaatgtgcatttgtgtgcatctataatctcagtgtgaatgtggattcagatactgtggagcacagttttacatgttgaattttacttatttttatatktaaaattgatattttgaattttgcatcagcttagctcattatttccaaggggttgtgcactgacatgtctttgaattatgatctctccccaaagggaatt

SEQ ID NO: 240455 - DNA, 201 bp, Homo sapiens
attctcctgcctcagcctcccgagtagctgggactacaggcacctgccaccacgcccagctaacttttgttttgttttttgtatttttagtagaaatgggktttcaccgtgttagccaggatggtctcgatctcctgatctctcaatccacctgccttggcctcccaaagtgctgggattacaggcgtgagccaccgtgcc

SEQ ID NO: 240456 - DNA, 201 bp, Homo sapiens
cccttcagatttacccaccttgtattctgctgccttttactgatcttaaaatctgcacactgtgctattggaggtggtttcataacttctcaggatttcgwagtgttttatttgtaaaataatgataccaatctctgaactgtaattcattgtgttgctaagaaagatcaaatgagataacaaatgggaagatgttttgga

SEQ ID NO: 240457 - DNA, 201 bp, Homo sapiens
tttttttatcagtgttttatattttttagtgtacaggtctttcacctccttggtgaaatttgctcctaagttattttattattagttggtgtagctattayaaatgagactgttcccctgatttctttttttggaaagttcattgttagtgtagagaaatactacttatttttgtatgttgattttgtatcctgctgcttc

SEQ ID NO: 240458 - DNA, 201 bp, Homo sapiens
atatgcttgtttacccaatgctaaaggcaagtctgaaaatttgcaactgcatttaaagccatcattctaatcactgccaggcattcctataccctatatgygatttttgtgctatttaaaacataatattataataattcttttgaaaaatagaaatagggaccattaagcataggagatcgtgctttattctctctctcc

SEQ ID NO: 240459 - DNA, 201 bp, Homo sapiens
gacttctttgggtaatatggccatttttacaatattaattctggaaattcatgaacacaggatatctttccacttacttgcattttcttccattttttttwatcagtgttttatattttttagtgtacaggtctttcacctccttggtgaaatttgctcctaagttattttattattagttggtgtagctattacaaatga

SEQ ID NO: 240460 - DNA, 201 bp, Homo sapiens
atgccttgaagcccaaacatctggagtacctaaaaaaaaaaaaaaaaagaatcctgtgctccacctcagatcctctgggtatggaatttggaattctgtawtttaagtaagttccccagggaattcttttgcgcactaaagtttgagaacttctaagcctctgaagtcccttgctactcaaagtgtgatctatggaccagt

SEQ ID NO: 240461 - DNA, 201 bp, Homo sapiens
gaatattttaagctgactgttgagacctactgcttagaaaaaaaatattcctttaagaatattattgatcattgacaatgttcctggtgacccaagagctrtgatggagatgcacaaggagatcaatgtgtttcttgtctgctaacacaacgttcattctgcagcccataaatcaaggagtaattattactttcaagtgtt

SEQ ID NO: 240462 - DNA, 201 bp, Homo sapiens
atttgtgggaaattatcttaaatttttttgaaaaaagcattacaattatgcacacagatttgctcatcatcatgttacgtaggctttgaaaaaaatagaartggcctaaatacctaacaattgcgcaatagtaaataaatggcattaaatttactggatgaacaattacaaagttttaaagatgaatatttaaaaatatta

SEQ ID NO: 240463 - DNA, 201 bp, Homo sapiens
aacagctctcttttctccccatcctcatcaatgttatcttttgtcattttgataatagccattctaacaggtgtgaggttttaacgggtgtgagctcactrtgcttttaattcacatttccttgttatattgagcattttttttacatacttgttaactatttgtatgtcttcttttgagatatgtgtatacagtttcttt

SEQ ID NO: 240464 - DNA, 201 bp, Homo sapiens
acgttcattctgcagcccataaatcaaggagtaattattactttcaagtgttattatttaagaaatacatttcataaggctataggtataattcctctgaygtacctgagcaaagtaaattgaaaactttctggaaaggattaaccattctaggtgccattaagaagatttgtgattcatggcaaggagtcaaatatcacc

SEQ ID NO: 240465 - DNA, 201 bp, Homo sapiens
tttttgaaaaaagcattacaattatgcacacagatttgctcatcatcatgttacgtaggctttgaaaaaaatagaaatggcctaaatacctaacaattgcrcaatagtaaataaatggcattaaatttactggatgaacaattacaaagttttaaagatgaatatttaaaaatattataaattttacactttaaaataaga

SEQ ID NO: 240466 - DNA, 201 bp, Homo sapiens
gattggatcatcgcgttgaggtggtggtatgttcaaactggctttagctcatcagagttcaatcataaagctgatttaagaggtcgatttaaagggggtgrattttatcccaaacccaagtctgagatggtgtaaatgagttatgttccaaaataaatttagactaatattaccagcgaatatgagaacttgatattgggc

SEQ ID NO: 240467 - DNA, 201 bp, Homo sapiens
ggaatagcaaaagaactagaattagaagtggagcctgaagttgtaactgaatttctgtaatcttatggttaaactcgaactgatgaggagttgcttcttayggatgagcaaataaaatacgtttttcctcttaaaaaattttttgggtacatagtagctatatatatttatggggtacatgagatatttgatacagacata

SEQ ID NO: 240468 - DNA, 201 bp, Homo sapiens
acagacatacaatgtataataattacatcagggtaaatggggtattcatcacctcaagcatttattctttctttgtgttagaaacaatccagtcatctttktgttatttaaaaatatacaataaattattgttgcctgtaatcacctattatgctatcaaatactagatcttattcattccacctgactatatttttgtac

SEQ ID NO: 240469 - DNA, 201 bp, Homo sapiens
gggagaaagtttgagacttgccacatcagtactgagtgctaaacaaggtgactagtgtctgttttgttatgtgcattttgctttggctgggatggaaaatsctaattttgttccccatgcagctttgggcagtatcttgcaaaattgagaaccttttgcctatgtttccataaaacagaaaaggatgattttctttttgaa

SEQ ID NO: 240470 - DNA, 201 bp, Homo sapiens
gctcatgtcatagtcagccctagaaattatcttgaacaattaaaagcctttgcaagcttgaaactggctgctctagatttctgggaaaagcaatagaaacygctcaatgctgtgtagctcagtagctaagcctttatcttttggtaatggtggcccaggtttaattctcagcttctggaatgattctattctggcttatta

SEQ ID NO: 240471 - DNA, 201 bp, Homo sapiens
actgttgatgcccacatgggagaacctaagataattattaacagcctgggactcctggggaaaaacagagggggcaccacagaccccattctgggaaaaamtgttttcctcatggaaccccaggaattgaaggaaaataaatccctcaaaatctaaggctctgttctgttttgcattgcattagctgatggttttgacttt

SEQ ID NO: 240472 - DNA, 201 bp, Homo sapiens
taggaatggaatttgaaggagatgagtcaactatctatacatgcttgtatatggcccatctgggaactcattacactgttaaaaggtattctctattgaakaaatctgcttatcagccagtaaggggaaaaaaaagaggtgatttatttaactactgtatcttgttgcagtatttgtgctttttaagattttgcacaaata

SEQ ID NO: 240473 - DNA, 201 bp, Homo sapiens
agtataaaatggcacccttaattctagggatctgttttacctactttggagcattagattctagatatggcctggggacatgtggagttaaccttgccccyagctatgctgaaagcagtcagaccttatctacacttctgtctgatattctaggccccacacctggtatataattaaacttgtttacttatcagatttttc

SEQ ID NO: 240474 - DNA, 201 bp, Homo sapiens
agaagggtcatacatttttgccttttaaacttgggagtgaccatctgattttctttggcccattgaatctggacagaggcagaaactttgagagccagttkgaggttaggcatatttttcttttcccctcttcaccaggctgtctgatttgtgttgaacgtgtagtagcaaccaaaagtaaactttcccttttgtaagccg

SEQ ID NO: 240475 - DNA, 201 bp, Homo sapiens
ttgttgaattttgtcaaaggccttttctgcatctattgagataatcatgtggtttttgtctttggttctgtttatatgctggattacatttattgatttgygtatattgaatcagccttgcatcccagggatgaagcccacttgatcatggtggataagtttttgatgtgctgctggattcggtttgccagtattttattg

SEQ ID NO: 240476 - DNA, 201 bp, Homo sapiens
gagtttaattagatcccatttgtcaattttggcttttgttgccattgcttttggtgttttggacatgaagtccttgcccatgcctatgtcctgaatggtawtgcctaggttttcttctagggtttttacggttttaggtctaacctgtaagtctttaatccatcttgaattaatttttgtataatgtgtaaggaagggatc

SEQ ID NO: 240477 - DNA, 201 bp, Homo sapiens
gataagaaaaggggaaagatacaaatactgtgccttggtcttgatgggaggaaacctaatatattggaaagagcttctttgggaaatcacacaaatggacrctccagtcccagctctgttattaacagccatctgatttcagtcagttttttttagttctctgagcctccattccttcatctctaaaatggacactatatc

SEQ ID NO: 240478 - DNA, 201 bp, Homo sapiens
gacatttgggttggttccaagtctttgctattgtgaataatgccgcaataaacatacgtgtgcctgtgtctttatagcagcatgatttatagtcctttggdtatatacccagtaaagggatggctgggtcaaatggtatttctagttctagatccctgaggaatcactacactgacttccacaatggttgaactagtttac

SEQ ID NO: 240479 - DNA, 201 bp, Homo sapiens
tccaacccatggtaactgcaaatctgtttctatccatctagttctgtcttttccagaatgttaaagaagtggaatgatacaatatgtactttggttggacytctttcaatgaacaaagtccattgagattcaccaatattgttgtgtgaatcaatatttcattacttttgtatcaatgagtaatattgtattgtagcaaca

SEQ ID NO: 240480 - DNA, 201 bp, Homo sapiens
cctccccccaccccaccacagtccccagagtgtgatgttccctttcctgggtccatgtgttctcattgttcagttcccacgtatgagtgagaatatgcggkgtttggttttttgttcttgcgatagtttactgagagtgatgatttccaatttcatccatgtccctacaaaggacatgaactcatcattttttatggctgc

SEQ ID NO: 240481 - DNA, 201 bp, Homo sapiens
cattcttcatctttttccaagtgttttgactacttctgggttttgaatttacatatgcatttatcataaacttgccatgactctttttgatattccctgascttcttgaatatatggtttgttgtgtgtcattaattttgaaaacttctagtctattattgttttccaaggattctaccttgttctcattcttacttcttc

SEQ ID NO: 240482 - DNA, 201 bp, Homo sapiens
tggataaagaaaatgtggcacatatacaccatgaaatattatacagccacaaaaaagaatgagttcatgtccttccagggacatggatgaagctggaagcyatcattcttagctaactatcacaagagcagaaaaccaaacaccgcatgttctcaaaagtgggagttgaacaatgaaaacgcatggacatagggaggggga

SEQ ID NO: 240483 - DNA, 201 bp, Homo sapiens
aatcaaaaccacaatgaggtaccatctcatgccagttagaatggtgattattaaatgtcaagaaacaacagatgctggagaggatgtggagaaataggaaygcttttacattgttggtgggagtgtaattagttcaactattgtggaagacagtatggtgattcctcaaggatctagaaccagaaataccatttgatccat

SEQ ID NO: 240484 - DNA, 201 bp, Homo sapiens
catcgctggtcattagagaaacgcaaatcaaaaccacaatgaggtaccatctcatgccagttagaatggtgattattaaatgtcaagaaacaacagatgcyggagaggatgtggagaaataggaatgcttttacattgttggtgggagtgtaattagttcaactattgtggaagacagtatggtgattcctcaaggatcta

SEQ ID NO: 240485 - DNA, 201 bp, Homo sapiens
aatattgaaagttctagccagggcaatcagacaagagaaagaaataaatggtattcaaatagaaagagagaaagttaaattatctctgtttgcagctgacrtaattccatatctagaaaaccccatcatctcagcccaaaagcttcttaacctgataagcaacattagcaaagtttcaggatgcaaaatcaatgtgtaaaa

SEQ ID NO: 240486 - DNA, 201 bp, Homo sapiens
gagagtagctcctctctgcagctggctatcctgtcatctgtttagctctggctgagcccaaggcttttatagacctaagaagggagaaagtgcacactgaytggtccttgggccaccaggagcgggtcaggaaaaggtaccacaagttcccactccggttcccatcccaggtttcttgggactagcagcgcaaacctgaag

SEQ ID NO: 240487 - DNA, 201 bp, Homo sapiens
cacttatttcaaagaattttttgatttctagctaatttttttcctcaaaagtcattcaggaacaagttgtttaatttctgtgtaattgcttgtttatgggrttattcttgatattgatttctattttcattccaccgtggcctgagagtattgtttttttttttttttcttttctttccctttccctcttagggtgtgcaa

SEQ ID NO: 240488 - DNA, 201 bp, Homo sapiens
gcccaagaactccagtgaccattgcctggctactacctatgttcactcaaggcccaagggctctacaatcagtaggcaggcaatctacccaggcttgtgadctggcccccaagccatgagacaaagtccttcccactcttgcctcccttttcctcaagcagaggagtctcttcccatggccaccaccaccccaggttcaca

SEQ ID NO: 240489 - DNA, 201 bp, Homo sapiens
aagaatgctctctctcagcactcctattcaacataatattgaaagttctagccagggcaatcagacaagagaaagaaataaatggtattcaaatagaaagmgagaaagttaaattatctctgtttgcagctgacataattccatatctagaaaaccccatcatctcagcccaaaagcttcttaacctgataagcaacatta

SEQ ID NO: 240490 - DNA, 201 bp, Homo sapiens
tccaccgtggcctgagagtattgtttttttttttttttcttttctttccctttccctcttagggtgtgcaacaattgggaatgctgagcaaggctttgccyctatatccctatgcacttctgttggaaggtaagatgtggtggctcaggctgctgatccaggtgagctggtgctctgagatctagaaatctgcctgggcat

SEQ ID NO: 240491 - DNA, 201 bp, Homo sapiens
actcatagccgcctccacagggctgcctcatagcctgcagctggctcctcccaaagcaagtggtccaggagagaatgagactgcactcaagaaggaagctrtggtgttttcacaatctaatctcagaagtggcatcccagaatttctgccatactctattcttttgaagcaaagtattcagtccagcctgcaggcaggggg

SEQ ID NO: 240492 - DNA, 201 bp, Homo sapiens
ttgtaggtgagcttcattcttttttattcttttttctttttgtctcccctagctatgtattttcaaatagcctgtctacaagctcactaattctttttctscttgattagttctgatgttaagagactctgatgcattcttcagtatatcagtgcatttttcaaattcagaatttctgcttcattctttttcattattttt

SEQ ID NO: 240493 - DNA, 201 bp, Homo sapiens
ttcagcgaactgcagctgacctgaagaaaaggggcctgactgttcgaaaaaaactaacaaacagaaagcaacaacaatatcaacagaaaagacctcccccsctcccaacacacacaaactccatccaaagtttatcagcctcaaagatcaaaggtggataaatccatgaagatgaggaaaaaccagtgcaaaaacactgaa

SEQ ID NO: 240494 - DNA, 201 bp, Homo sapiens
cctgccaccacgcccagctaacttttgttttgttttttgtatttttagtagaaatggggtttcaccgtgttagccaggatggtctcgatctcctgatctckcaatccacctgccttggcctcccaaagtgctgggattacaggcgtgagccaccgtgcccgacagagatctggaaattttcaattaatttgattattgtag

SEQ ID NO: 240495 - DNA, 201 bp, Homo sapiens
aaaaaaaaaaaaaaaaagaatcctgtgctccacctcagatcctctgggtatggaatttggaattctgtattttaagtaagttccccagggaattcttttgygcactaaagtttgagaacttctaagcctctgaagtcccttgctactcaaagtgtgatctatggaccagtatctcactagcaccagcatcacctgggagtt

SEQ ID NO: 240496 - DNA, 201 bp, Homo sapiens
gtttctttggatatttaattttctgttggtgtgaatttctatgtgtcttgcctttccattagaaggaaattcaaacttaatctttctagcattttttttttcattctctgggcctttaaaaggtactttaactagttcactatcagtatattttaaaatttatttttaaatttatgtaacagtaaaatccacactttgtag

SEQ ID NO: 240497 - DNA, 201 bp, Homo sapiens
tcacatgatttatatttaatttcaaatacttggtgctttgaaatcttttaaaattaatcttaaagcacacatataaaaatagaatggaagagagtatattmcatctcctttgaggaaaaagaattcctaacaaagcaatcagactctaggatgccatcagcacacctttgaaaagtgaaagcagacagtattaaactttta

SEQ ID NO: 240498 - DNA, 201 bp, Homo sapiens
gctaattttttgtattatttttagtagagatgtggtttcaccatgttagccaggatggtctcgatttcctgacctcaagatccacccgcctcggcctcccraagtgctgggattacaggcgtgagccaccatgcctggctgggttttgtctttttttcctcgccctgtcttatggttctgacattttgatttttattattg

SEQ ID NO: 240499 - DNA, 201 bp, Homo sapiens
agtccaactcaccatgcctaaggcctttttcctccaaattgcattgtctcccaggaaccctagaatacatcttgttagaatctcttggttcttccttcttctttatgcctaactataagcacaaatgttttgagttatttatcaagaggattctatcccctttgcaaattaatggatgcaaataggaatggaatttgaagg

SEQ ID NO: 240500 - DNA, 201 bp, Homo sapiens
ttatttcatggctggaggagttttatcacaatgacatttttgctgatctaatgtcacttccgtcttctcaactttgtcctaaaagagctgctgagatagtyggttttttaaaccaaagttacaaaatcaatagtgcctggtagattatgctcaaaaaatgtttgtttaatccaaatttgaataaaagttttaatttggtga

SEQ ID NO: 240501 - DNA, 201 bp, Homo sapiens
ttttaaaaagcaaaaagtttgaatagacacttctaaaggatggacagtaaacacatgaaaaagagctcaccatcattagtaatcagggatatacaaatgasatatcccacggagtagtgtaaaacaaaaggactgaaaaaaaagaaaaagaagaaagaaaaaagaaaacaaaaaaaagactgacaatctcaagcattgatg

SEQ ID NO: 240502 - DNA, 201 bp, Homo sapiens
aaaaagaaaaagaagaaagaaaaaagaaaacaaaaaaaagactgacaatctcaagcattgatgaggatgtggggcaatcagaactctcaagcagtgctaayaggaatataaaatggtataaccaatttaaaaatctctggaaatgtcttataaaattaaactcctaccgccactctgacccaaccctcctaatcccaatta

SEQ ID NO: 240503 - DNA, 201 bp, Homo sapiens
agttcatgtttcaaaaatgcatggttattgaagagacactttatcattccctaacacctgcagaggttcataacccactccatttgtatctttaaagttcktggtggataagcagaaatgaggaatatttaaaagttctttgacttctcacctgctgaccctaagtgtaaggagaatctttaatcaagtaaactgtaattc

SEQ ID NO: 240504 - DNA, 201 bp, Homo sapiens
atggttattgaagagacactttatcattccctaacacctgcagaggttcataacccactccatttgtatctttaaagttcttggtggataagcagaaatgrggaatatttaaaagttctttgacttctcacctgctgaccctaagtgtaaggagaatctttaatcaagtaaactgtaattctttggggataatattttata

SEQ ID NO: 240505 - DNA, 201 bp, Homo sapiens
gggaagccaaaagtcaagggagcttgtggacacaatcaatacagatcagccctttggagcagagcttggtgggaaaaggcagggagcagaccttgagggcygaatggaggatctccaacacagttgctcgttggcattgaatcaaattttcattcaaccactttcaatttttatacctgaattgttcatttttccatattt

SEQ ID NO: 240506 - DNA, 201 bp, Homo sapiens
ggggacattacacaccagggcctgtcatggggtggggggcaaagggacagagaggaataggacaaatacctaatgcatgcagggcttaaaacctagatgasagattgatgggtgtagcaaacaaccatggcatatgtatacctctgtaacaaacctgcacattctgcacatgtatcccaacacttaaagtaaaataaaaat

SEQ ID NO: 240507 - DNA, 201 bp, Homo sapiens
cagaatataaaatatgaaaataggcaatgaagtcctattattactagttttttccctacattttgtcttatgggaaagagagaattttttttttcaccaartgccttgcagattttttctagcattctctctgggtatgtacttctcaatccctggttgacaaatttgtgaggatcagtgatacagtgaaatcagaaaaac

SEQ ID NO: 240508 - DNA, 201 bp, Homo sapiens
tttcatagtcattgaacattaaaatgaaaacacactgatgcagggtgagaatctgagcccatgtacctgaataacagggttttcttagaaaattgatctgyttaatggaaaattgtatagggttctaaaagatttatgaaaatcttacatatggtcaaatgaattaaaattggatagatttatacaattttattaaaaact

SEQ ID NO: 240509 - DNA, 201 bp, Homo sapiens
gcagcatagaggaagtggagttaagagacagaatgaatgaaattagatattggatgacattgttttagcctttgtttccagctgggcctgatgtcagatgkagccttggactagtcagtggctggaaacaatgtattccattttttgcttgaggctacattgaattggatttttctatgcaactgaaagtatctgcactaa

SEQ ID NO: 240510 - DNA, 201 bp, Homo sapiens
ctttgatatctgacaaacttccccaaatcaaattataaattgtgtttctgaagaggggccaagatggccaaatagaaacagctcttgtctgcagctcccaytgagaccaatgcagaaggtgggtgatttctgcatttccaactgaggtaccaagtttatctcactggtactggttaggcagtgggtacaacccacggagtg

SEQ ID NO: 240511 - DNA, 201 bp, Homo sapiens
caaatcaaattataaattgtgtttctgaagaggggccaagatggccaaatagaaacagctcttgtctgcagctcccattgagaccaatgcagaaggtgggygatttctgcatttccaactgaggtaccaagtttatctcactggtactggttaggcagtgggtacaacccacggagtgtgagcagaagcagggtggggtgt

SEQ ID NO: 240512 - DNA, 201 bp, Homo sapiens
gggtacaaaaaatacctttgcagctagcttggtgcctgcccaaacagccacccagttttgtgcttgaaacccaggtgcctggtggtgatcctacacctggraccccagcaagacagaactgttcactgccttggaaagggagctgaagccagggagtcaagtggtctcattcagtgggtcctgctcccatggagcccagca

SEQ ID NO: 240513 - DNA, 201 bp, Homo sapiens
taccaacagcttgcactttgcacctggaaaagctgcagatgctcaatgttagcccatgaaagcagccaggagggaggctgtaccctgcaaagccacagggrcgtagctgcccaagaccatggaaacccacctcttgcatcagcatgacctggatgtgagacctggagttgaatgagatcattttggagctttaaaatttga

SEQ ID NO: 240514 - DNA, 201 bp, Homo sapiens
gttttgtgcttgaaacccaggtgcctggtggtgatcctacacctggaaccccagcaagacagaactgttcactgccttggaaagggagctgaagccagggrgtcaagtggtctcattcagtgggtcctgctcccatggagcccagcaagctaagaaccactggcttgaaattctcactgccagcagaagtctggagtccac

SEQ ID NO: 240515 - DNA, 201 bp, Homo sapiens
ctgttggccacttgtgtgccttcttttgagaaatgtctgttcatgtcttttgaccgtttttaattatgggcatttggtttttatttgttcaattgtttaakatccttataggctctggatattatacccttgttgatacatagtttgtgaatatttccttccattttgtaggatgtctgtttactctgttgatagtttata

SEQ ID NO: 240516 - DNA, 201 bp, Homo sapiens
aatttagtagaggaaataggagtcatacatgttcattaggtatcaaaaactacttagtgaaaagaaggcttttactaagacaggaagaatcatatggtctratgctgggtggaaagtctagcacccaccttttaggcaatctatgctatttcagggttttactcttagtaatcattatgctttcaatcaaatgattttgcc

SEQ ID NO: 240517 - DNA, 201 bp, Homo sapiens
ttatatcctattatatggtctatgtcttgaaaagttactgtagtattttagatatgttcatattttagtctttctacttaagatatgagtagtttacacarcacagttattgggttataaaattctgcatacgtaccattaccagtgaattttataccttcacatgatttcttattgctcattaatatcccttttcttgca

SEQ ID NO: 240518 - DNA, 201 bp, Homo sapiens
agtttacacagcacagttattgggttataaaattctgcatacgtaccattaccagtgaattttataccttcacatgatttcttattgctcattaatatccyttttcttgcagattgaagaacttcctttagcatttcttgtaggacaggtccagtgttgataaaatccctcagttttgtatgattgggaaagtctttattt

SEQ ID NO: 240519 - DNA, 201 bp, Homo sapiens
aaaggagtggtgagatgacacatgtttgccttattcctaatcttagtggtaaagctttgagtttttcactcttaagcatggtgttagctgtaggtttttttgtagatattcctttaacaagttgaagaatttctcctctactcctaatttactgggagtttttgtcatgaatgggtgttcgttttcatcaaatgtttttct

SEQ ID NO: 240520 - DNA, 201 bp, Homo sapiens
gatgggagttggtgttgagcaggaccatagccacttcatcctctaaaacaggagaaaaataagtatgaacagaggtctttatttttttcttgaaggagagmgtggggcaattcaagccagattagcctaattcatttctctttgtgaagtaggagatcacatcatgtgatgggaaacaatgtcaaaatgttgggctaattc

SEQ ID NO: 240521 - DNA, 201 bp, Homo sapiens
tcaagtggggatgttttgggaaagacatcaacagaatgagaatgaaatttgccagagggaatgaagaagatctgagtgggtcactaaaattataattctcmaatctgtcatagcattgactcagtgattatatagtattctctaggacctccaggtcgatgaatatgagtgcagcattggcaaattgcaggactgagtgct

SEQ ID NO: 240522 - DNA, 201 bp, Homo sapiens
tcactaaaattataattctcaaatctgtcatagcattgactcagtgattatatagtattctctaggacctccaggtcgatgaatatgagtgcagcattggyaaattgcaggactgagtgctggctggaaatttgtagggccaatgtagcagaaagaggggcaaggaagtcaattgagattttgggtgggagaattttttag

SEQ ID NO: 240523 - DNA, 201 bp, Homo sapiens
ataacagcttaaaacaacaaacgtttattatctcccagattctaggtcaggaacacgggaacagtttagctgagtggatttggctcagggtgtctcatgaygtaataaaagtgttggctgagttgcagctgtctcacgtttgactggaggaggatccacgaccgtgcctccctcacgtggctgttggctggcctcagagga

SEQ ID NO: 240524 - DNA, 201 bp, Homo sapiens
gaaagtaaaaggccatatttgagagtatgagaaattttagcatgtgaatatatatgaaagagatgaagagatcagtatcctgttgcatgcctgtaacttaygcatgcaacctaattggaaacttgttaaccaatcacactattcctgtttcgatactccctaataccagtgtgtataactgtagactctcagacttctgtt

SEQ ID NO: 240525 - DNA, 201 bp, Homo sapiens
atcatttccatttccatttcaactattctcacaaaatatttatataaaactaggaaaatagggacacaatatgtagcgtgtctacacacacacacacacamgcatacactaaatattgtaaaaagtgtgagacagtgaaaagtatgagaaagtaaaaggccatatttgagagtatgagaaattttagcatgtgaatatata

SEQ ID NO: 240526 - DNA, 201 bp, Homo sapiens
tcacttacagatatattactcttatcatttccatttccatttcaactattctcacaaaatatttatataaaactaggaaaatagggacacaatatgtagcrtgtctacacacacacacacacacgcatacactaaatattgtaaaaagtgtgagacagtgaaaagtatgagaaagtaaaaggccatatttgagagtatgag

SEQ ID NO: 240527 - DNA, 201 bp, Homo sapiens
tatcatgcaggaatattcaattatattgaaagctttttccatgtttatggagatgataatatggctttggtttttaactctatgtgtggaatgacatttaytgatttgcatatattgaaccaactttgcaccccagaagtgaagcctacatgatcatgttgaaataacttttcaaattgctgttaaattcagtttgctaat

SEQ ID NO: 240528 - DNA, 201 bp, Homo sapiens
ttgtgaaatgagactggagtgggcttcttgggagaagtctcagagtgctagaaaagctgggtgttcacctctgattctctttttcctctgcagaaaatgtrgttcatggagaatcttttcagtgtggcactgtgctgacttgggggaaggggaaaggtaacacagtcagagtgagacatttctattaccttttccatacag

SEQ ID NO: 240529 - DNA, 201 bp, Homo sapiens
ttcaaattgctgttaaattcagtttgctaatattttgttgaagatttttgtgtctatgttcatcagggatattggcctatgtttttttttttcatcatgtytttgccaagttttggtatcagagtaatgctctaataattctactaggtgtacagtaattctactaggtgtacagctcctccttgtacacctagtagaatt

SEQ ID NO: 240530 - DNA, 201 bp, Homo sapiens
gaagctttacccagtgtttttccctcacagaatgttcaagcctcttcccaagacagctccagtgtttggggaaaataaagtgctctcccttggcctgggcycttggatcccaagtggaaaggtgagtcacggagggaggtgctcttcctctctcatgtactaggactttactcatttttgtagccagatgccatcacaagg

SEQ ID NO: 240531 - DNA, 201 bp, Homo sapiens
ggtggaaattcagaattcacacatttttcgcattttgaaatttttttaaaagtctgcaattattttaattttaattgacaattagaaatgatatatacttmtggtgtacaatatgatgttttgatataaacagacattgtggaatagctaaatcaggctacttaacatatgcattacctcacatatttataatttttttgt

SEQ ID NO: 240532 - DNA, 201 bp, Homo sapiens
taccctttcatgtcaatgaaaatagaacaagccactattaatattccacaggatggcccctctctccacccatttcttttttttttttttttttttttgaracggagtttcgctctgtcgcccaggccggactgcggactgcagtggcgcaatctcggctcactgcaagctccgcttcccgggttcacgccattctcctgc

SEQ ID NO: 240533 - DNA, 201 bp, Homo sapiens
catgcaacaatagataaaagtttaattgtatactttctgttttatcttgactcagaattgggaacacatttaatgaaaaaaatcattcagacttcagcacyatacctcagcaagtaatttgagtaaaaactgaatactgaaggtgtttatttcaacttgattattctttattacattgcattactgttttatactgattaa

SEQ ID NO: 240534 - DNA, 201 bp, Homo sapiens
attttgaaatttttttaaaagtctgcaattattttaattttaattgacaattagaaatgatatatacttatggtgtacaatatgatgttttgatataaacrgacattgtggaatagctaaatcaggctacttaacatatgcattacctcacatatttataatttttttgtggttggaagaacacttgaaatctactctctt

SEQ ID NO: 240535 - DNA, 201 bp, Homo sapiens
acattcccatcagcagtgtacaagggttcccttttcttcacattcttgccaacacttatcatttacctttttgataatagccgttctaacaaaatgagacratatctcaatgtggttttaatctgaatttacctgatgattactgatgctggccttttttcttataattgttggccatttgtgtgtcttctttggagaaat

SEQ ID NO: 240536 - DNA, 201 bp, Homo sapiens
ttttaactttgacatctattagccaatttccctgaattcaatgtactttttaggagaggcagcatgatagagaacactggatctcaaagtgtggttcccartcagcaacatcagcatcatccaggtatgactagttagaaatgcaaattcttgggttctagcccagacctactgaatcgtaagctctgaggtctgattcag

SEQ ID NO: 240537 - DNA, 201 bp, Homo sapiens
tgaggatcagtgatacagtgaaatcagaaaaacctgctgtgaattatggctgtgctatgttatcacagacctaaaaataaaagctaaaattttaagacttytaaaagaaaacatgtgctaatatctttgcaacctagggtaggcaaagatgtattaggagagttttttttttttttttccttttaaaacatagacatggaa

SEQ ID NO: 240538 - DNA, 201 bp, Homo sapiens
ggtctcgaactcctgacttcaggtgatccacccgcctcagcttcccaaagtgctgggattacagatgtgagccaccacacctggttatgcattgtcaagtytctaattaatattacctcaaccatggtggagctggttggcgtgaggaagtatatccaacaaaaatggtgcaagcctcaatgtacatgaacaatagggttg

SEQ ID NO: 240539 - DNA, 201 bp, Homo sapiens
aaagctgtgggatcatataaaatactctaatacatttgtaatgggtatcccagaaagagacaagaaagaaaatggaagaaatatttgactatttgaagaaktgatgggcaaaaatatttccgaaattaatgacaagtaccaaactacagatccagaaactcagagaacatgaaacagggtcaataccagcacacagggaca

SEQ ID NO: 240540 - DNA, 201 bp, Homo sapiens
ttgtggtaatttttttacagcagcaataataatagggtgtatgttgtaaatcttagagggaccagtaaaaatatttttgaatacctaaataaaaaatcaaygtaagagagaaaaaggaatcattaaaaattctcaattaatataaaagaaggcagaagaataaaaaagaaacaaagaacagatggaataaatataaaacaa

SEQ ID NO: 240541 - DNA, 201 bp, Homo sapiens
tgttcttttctttgaatagctgctacattttctctctgtgtgttgtgggagagtatagtgaaacatgagacctcctattctataatcttgttgatgtctcscacatatatactttaaatataaggatacaaataagtgggaagtaaatatatgggaaaacatagactatgcaatcactaactgaaaaaatctactcttcta

SEQ ID NO: 240542 - DNA, 201 bp, Homo sapiens; identical to SEQ ID NO: 47053

SEQ ID NO: 240543 - DNA, 201 bp, Homo sapiens
aattttaggtataatttgatatgcagcaatagatatctaagttaataaggagatactacaaagaattctatgcccataaatttgataacataaatgttagygaaccaactttttgaagacactaccaaaattcactcaagaagaaacagataacctgagtaattgtatatctatttataaaattgaattgtttaaaatgtt

SEQ ID NO: 240544 - DNA, 201 bp, Homo sapiens
agatctatgtgccatgcagacaccatctgttatgaactgaatgtgtcctagtaaaactaatttgttgaaactcgaatcctcaaagtggtggtattaggagrtggggcctttgggaggtaattaggtttagatgaggtcatgagtgaaatcttcatgatgggattagtcttcttgtaagaagaggaggaggcacctgagctt

SEQ ID NO: 240545 - DNA, 201 bp, Homo sapiens
agtctagagggggccaaggtggcagggggctgttatgttagcactgccctgaatgtgcacacacctggctgggcagtgacagtgaccaggcttggccccawtcctacttcaggattggagcaggctctgtgagcagggagaggccaggccatgagagtcgacactcccaagcctgtgggggcaaagggcccttcctgggcc

SEQ ID NO: 240546 - DNA, 201 bp, Homo sapiens
aaagaacagatggaataaatataaaacaaaaagatggtagatttttattgcaaccatataaatagtaacataaataaaaatgatctaaacacaccagttamagcgtaaagattgtcagagagaaaagcaagaccaaatcataatatgtctataaaagacccaccataaatataaagacataacagatatatacataggtta

SEQ ID NO: 240547 - DNA, 201 bp, Homo sapiens
ctaatccctggaatttttgactgtattaccttatacaagaatgggaactttgcagatgtgattaaattaaggatcttgaaattgtgagattaccctggatrcttgtatgaagccaatataatcaaaggagttgttacaataaaaacatgcaggtggcctttagaagctgaaaaaggccaggaaagattttctcctcagagc

SEQ ID NO: 240548 - DNA, 201 bp, Homo sapiens
tatcaaatgtattatataaaacatggtttaatattgtgaatattatttctttgtctattacacactatgcttttgtttcaagtttttcacttgcgtttatrctttgttttgtattatttagaaaaggtttatactttcatttactaaatttatcaaagttcattcttttataattcttgggtttttcattttatatagaaa

SEQ ID NO: 240549 - DNA, 201 bp, Homo sapiens
cagtatgacatgatttgaaggtagactgtgatcaactaaaaatgttttaagcagcataatgatccgtcaaggtgtccatgtcctaatccctggaatttttkactgtattaccttatacaagaatgggaactttgcagatgtgattaaattaaggatcttgaaattgtgagattaccctggatacttgtatgaagccaatat

SEQ ID NO: 240550 - DNA, 201 bp, Homo sapiens
ttctttgtctattacacactatgcttttgtttcaagtttttcacttgcgtttatactttgttttgtattatttagaaaaggtttatactttcatttactamatttatcaaagttcattcttttataattcttgggtttttcattttatatagaaaaagcatcctcttgaaaaacacataaattctatatttacttttaata

SEQ ID NO: 240551 - DNA, 201 bp, Homo sapiens
acaaagatgggagggaaggaattagaaatataccaatatgagatcattacatcagatgtgaagcagtatgacatgatttgaaggtagactgtgatcaactraaaatgttttaagcagcataatgatccgtcaaggtgtccatgtcctaatccctggaatttttgactgtattaccttatacaagaatgggaactttgcaga

SEQ ID NO: 240552 - DNA, 201 bp, Homo sapiens
gtatcacaaagatgggagggaaggaattagaaatataccaatatgagatcattacatcagatgtgaagcagtatgacatgatttgaaggtagactgtgatmaactaaaaatgttttaagcagcataatgatccgtcaaggtgtccatgtcctaatccctggaatttttgactgtattaccttatacaagaatgggaacttt

SEQ ID NO: 240553 - DNA, 201 bp, Homo sapiens
gcacatagggaatgtacttatctttatagctcttttgtcatccaccaactctattttagtcaatttacatccatttaatttatctcaacacacacacacamaaaagattattttataacttacattgtaaactgtagtatagtatttggctgtgattttacagaatagtgggcgccccaccaggtgggcactattcactat

SEQ ID NO: 240554 - DNA, 201 bp, Homo sapiens
atgtgcacatgtaccctaaaacttaaagtataataaaaacaaacaaacaaaaaaataggtttataataaataaatatttttcattttaataaaaaaaaaaacttttgaatcctgtctcttcctcatttgcgtgttttacatttgcatgtgcttttatgattgtagatactgtcttttgcttccatgtgtaacactccctaa

SEQ ID NO: 240555 - DNA, 201 bp, Homo sapiens
taatatccttataggctctggatattatacccttgttgatacatagtttgtgaatatttccttccattttgtaggatgtctgtttactctgttgatagttkatattgctgtgaagaagctctttagtttaataaggccccatttgtcaatttttgtttttgttgcaattgcttttgaggacttagtcataaattccttccc

SEQ ID NO: 240556 - DNA, 201 bp, Homo sapiens
gcatgattttgttcttttgtatggctatgtagtattccgtggcatatatgtatcatgttttctttatccattccatcactgatggaaacctagatagattmcatgtctttcgttattgtgaataatgctttgacaaacatgtgagtacatgtttcttattggtagaatgatttatttatttattatactttaagttctggg

SEQ ID NO: 240557 - DNA, 201 bp, Homo sapiens
gcaaataaacattaaaaatattttgaagggaatctttctgaaatgtattacacactttcctacttttctaaatggtttccaaagaatttaacctgaccttktccatttgacttaatttatggccctgcattgctaagctggtagcatgcttcagtttgtgtgattcttctatctcttcctttgctataaaatcacttattt

SEQ ID NO: 240558 - DNA, 201 bp, Homo sapiens
tccaattttctccctcctcttcctgctcctcttccctccatcttctgatttagttgcttttaaactgacagcattatagatgtctcatcttcatgctcacmctggtttttgcttaaggtcttagtgtgcctctgtcatttttgatttcacaaataacgcaggtcactccattaccttgaacttgcacatcaccattacaca

SEQ ID NO: 240559 - DNA, 201 bp, Homo sapiens
ggaaattcaaaagggatattgcagtactaaagggctagcaataataggaactgttagtcaacccagacctgaaggggcaaggaagaaaccagaaagagaawcttcacagccaaggctatctgacagccctatagcctttttcgaagatgcagcagagagctggaaaaataaaatccttagccagtctctctctcttcccat

SEQ ID NO: 240560 - DNA, 201 bp, Homo sapiens
aagggcacaaaactggatggagaatgagattgatgaattgacagaagtaggcttcagaaggtgggtaataacaaattcttctgagctaaaggagcatgttytaacccaatgcaagcaggctaagaatcttgataaaaggttacaggaaatgctaactagaatacacagtttagagaacaacataaatgacctgatggagct

SEQ ID NO: 240561 - DNA, 201 bp, Homo sapiens
tttgtcactacaatatttgttgaatataagtgatgaatgactgaatgactttaggtcttgttagactacttagttgcctgctggtgcaccataactatgaytacaggaaaaatggccatgcgtgattataaggcatccaaataagacccattatgttgtgagctagtgcttttctgtattaccatatatctaccaagatga

SEQ ID NO: 240562 - DNA, 201 bp, Homo sapiens
tggcatggtggctcaagcctgtaatcccagcactttgggaggccgaggagggtggatcatgaggtcaggagatcgagaccatcctggccaacatgaagaaacaatgtctttactaaaaatacaaaaattagctgggcgtggtggcgggtgcctgtaatcccagctacttgggaggctgaggcaggagaattgcttgaacca

SEQ ID NO: 240563 - DNA, 201 bp, Homo sapiens
gaatataagtgatgaatgactgaatgactttaggtcttgttagactacttagttgcctgctggtgcaccataactatgattacaggaaaaatggccatgcrtgattataaggcatccaaataagacccattatgttgtgagctagtgcttttctgtattaccatatatctaccaagatgagatacagtcagagaggtgagg

SEQ ID NO: 240564 - DNA, 201 bp, Homo sapiens
catcttctttacctctccctttcatgttccctctgattttctcacactagggaaaatggaattacgtagaaggaaattgcgaatgttcagtgttatcaaarctgccacctaaatactaaatatagacattaacaggtcagagtagaagaaaaggataatatttacacgacaatatgtaagatgtattttataaattgacat

SEQ ID NO: 240565 - DNA, 201 bp, Homo sapiens
tccactgcccagtgagaaatgcaaaaggtttcatgaggaaaaagagtcaagtgagtctaagagtctgaagtggtacatagagatgtttaacatattttgtrtgtaaagttgtgtgtgtgtgtgtgtgtgtgtgtgtaaatttaagtacggaaaaactatgaatttttttttcaacttttgttttaggttcaggggatacat

SEQ ID NO: 240566 - DNA, 201 bp, Homo sapiens
tttctgacatgtgagcaagaaggtagccatttgcaagtcaggaagagagccctcaccagaacccaaccatgctatcactctgaatttggactttccaggtwtcagaactgtgagaaataactgtctgtgtttaagccactcagtctatgatattttgttagagcacccaagctaagacactatgaaatagaaaactgaggt

SEQ ID NO: 240567 - DNA, 201 bp, Homo sapiens; identical to SEQ ID NO: 47052

SEQ ID NO: 240568 - DNA, 201 bp, Homo sapiens
tgttcaacatactattggaagttctggccaaggcaatcaggcaagagaaaaaaaaaagaattcagatagaaaaaaaggaagccaaattgtctttgtttgcrgatgacatgattctatatttagaaaattccatcatctcagcccaaagacttcataagctgataagcaacttcagcaaagtctcaggatacaaaatcaatg

SEQ ID NO: 240569 - DNA, 201 bp, Homo sapiens
attagaactcaggattcagaaactcacttaaaaccacaaaactacatggaaattgaacaacatgctcctgaatgactcctgggtaataatgaaattaaggyggaaatcaagaagttctttgaaaccaaggagaagaaaggcacaatgtaccagaatctccgagacactgctaaagcagtgttaacagggaagtttatacca

SEQ ID NO: 240570 - DNA, 201 bp, Homo sapiens
agtaaaacactcctcagcaaatgcaaaagaactgaaatcataacaaacattctctcagaacatagtgcaatcaaattagaactcaggattcagaaactcasttaaaaccacaaaactacatggaaattgaacaacatgctcctgaatgactcctgggtaataatgaaattaaggtggaaatcaagaagttctttgaaacca

SEQ ID NO: 240571 - DNA, 201 bp, Homo sapiens
aaagaaggtaagaaccttgataaaaggttacaggagctgctaactagaataaccagcttagaggggaacaaaaatgacctaatggagctgaaaaacacagsatgagaacctcataaagcatacacaattaccaatagccaaatcaatcaagcagaagaaaaaatatcagagtttgaataccatcttactaaaataatacag

SEQ ID NO: 240572 - DNA, 201 bp, Homo sapiens
gtttattattttttaaactttgccaaaataattgataaattatatttcattttcatttaaatttgcgtttctgaactattaatgaagttaagcatttttcrtatttgtaaaagccatttgcattttgttcctgtttatttctggtattctatttttgcatgagactgcttttcttatgcatactatcaaatgtattatata

SEQ ID NO: 240573 - DNA, 201 bp, Homo sapiens
tgaaaaaacgctgaaacctaaaaggccagagtgcctcttctcctccaaatgatcacaacacctctccagcgagggcacagaactatacagaggatgagatraatgaattgacagaagtacgcttcagaaggtgggtaataaataacaaattctgttgagctaaaggagcatggtctaacccaatgcaaagaaggtaagaac

SEQ ID NO: 240574 - DNA, 201 bp, Homo sapiens
caatgtgcacatgtaccctaaaacttaaagtataataaaaacaaacaaacaaaaaaataggtttataataaataaatatttttcattttaataaaaaaaamaacttttgaatcctgtctcttcctcatttgcgtgttttacatttgcatgtgcttttatgattgtagatactgtcttttgcttccatgtgtaacactccct

SEQ ID NO: 240575 - DNA, 201 bp, Homo sapiens
aaatgtccaacaatgatagactggattaagaaaatgtggcatatatacaccatggaatactatgcagccataaaaaatgatgagttcatgtcctttgtagrgacatggatgaaattggaaatcattctcagtaaactatcgcaagaacaaaaaaccaaacaccgcatattctcactcataggtgggaattgaacaatgaga

SEQ ID NO: 240576 - DNA, 201 bp, Homo sapiens
tggagttccctttgtatgtgatctgacatttttctctagctgcttttaaggctttttttttttttcaggtttgactttggacagtctggtgactatatgtyttggtgatcttcatttcatataatatcacacaggttaggtgttatctggatatcttatatttggatgtttacctgtctagcaagattagaaaaattttct

SEQ ID NO: 240577 - DNA, 201 bp, Homo sapiens
tacaagaagcgtggtgccagtgtctgcttctggtgagggcttcaggttgcttccacgcatggaggagatgaaggagagctgatattggggctggcctgggrgaggttccaggctctttttacaaccagctgtcatgggaactaacagaattcactcatccctgcccactcacagggagagcattaatctcttcatgaagga

SEQ ID NO: 240578 - DNA, 201 bp, Homo sapiens
acaagacaagaatgccctctctcaccactcctgttcaacatactattggaagttctggccaaggcaatcaggcaagagaaaaaaaaaagaattcagatagraaaaaaggaagccaaattgtctttgtttgcggatgacatgattctatatttagaaaattccatcatctcagcccaaagacttcataagctgataagcaac

SEQ ID NO: 240579 - DNA, 201 bp, Homo sapiens
gatggtttcaaaagatccattttctaagatatagaatttagtttgggaccaattccaactcctgatgcaggtaaactgtagtaatctgcagaccttctttyactgggtttccaaataaatgttccaacatgcaatacactttctgagcatctactctgtgtcagacattttaggtactaaagagttcatggtgggcaagac

SEQ ID NO: 240580 - DNA, 201 bp, Homo sapiens
ggggtggggaggaggctgtgggctgaaaaactacctatcaggtactgtgctcactgagtggatgacaagatcatttgtacctcaaacctcagcatcacacratatactcaggtaaaaaacatgcccatgtaccccctgaatctaaaataaaagttgaatttttttttaaaattggagaagatgtcaacaaaattaaaaaca

SEQ ID NO: 240581 - DNA, 201 bp, Homo sapiens
acgaagtcactcccttgacacattggggattacaattcaagatgagatttgggtagggacacagagccaaaccatatcagttccttataaaaagacttaakctagttaaactgcaatgtgtgtctctggagaagaaccttatttatgaataagatggtttcaaaagatccattttctaagatatagaatttagtttgggac

SEQ ID NO: 240582 - DNA, 201 bp, Homo sapiens
ctagttgctcataatagtcgcttatgatcctaggtatttctgtagtatcagttgtaatgtctcctttttaattgccgattttttcttagtcgagctaaagrtttattaattttgtttatcttttcaaaataatatagttgcattgatcttttttattattttcctagtctctattttatttattttctggtttttattgtt

SEQ ID NO: 240583 - DNA, 201 bp, Homo sapiens
tgatggtcaggcagttgtcacattgtgtgacactctaaaataataattggtcacagccaaggccagggagaggcagtttcccaacagataaatacacctaraactggtaatcggcagctttcaggaattgggcaagtgggctggagcatgtgcattaagaggcaaaatggtgaagtatgaccttctggggccattccattg

SEQ ID NO: 240584 - DNA, 201 bp, Homo sapiens
ttttgttgccttttgtgttttgagtcttttacctagcataatacttttgagatcaatccaggatgttgaacatgttagtggatttttttttcactgccaartaatatttcattgtatggccacagcacactttgtttatctggttgatcggcatttaatgggatttcaatttttggcaattatgaacaaagctgctataaa

SEQ ID NO: 240585 - DNA, 201 bp, Homo sapiens
gtcagtgagattgctttgttaatttcttttgcagctagttcattattggtatatataaatgctactgatttttgtatgttgattttgtatctgaaactttrctgaacttgtttatcagatctaagaggtttttttaaggtcttttggtttttctaattataagattatgtcatccacaaagaaggacaattttatttcttc

SEQ ID NO: 240586 - DNA, 201 bp, Homo sapiens
acacaataatagtgggagactttaacatcccactgtcaatattagacggatcaattagacaaaattaacaaggatattcaggacttgaaatcagctctggrtcaagtcaacctaagagacatctacagaactctccaccctaaatcaacagaatatacattcttttcagtgccacatggcacttattttaaaatagaccac

SEQ ID NO: 240587 - DNA, 201 bp, Homo sapiens
acgctttccacagttagggctatggaggtccctaccctgctccagagctggtgctccagtccctgtccagagattaaaatgcctgcatggccatgctggcrgattgccacagaatggccgactgtatgcacctaccataaaaataattttcttctctcagtcctggattgggaaaaatatctgaagctttacccagtgttt

SEQ ID NO: 240588 - DNA, 201 bp, Homo sapiens
gcagacaagattttagaaaaaaagaatgaaaaggaacaaacaaaacctctgagaaatatgggactatgtaaaaagaccaaacctatgattgattggagtamctgaaagagaaggagagaaaggaaccaagttggaaaacatacttcaggatactatccaggaaaacttccccagcctagcaaggcaggccaatattcaagt

SEQ ID NO: 240589 - DNA, 201 bp, Homo sapiens
tggcaacctctgatctgatctttgtacgtatagttttgtattttccagaaagtcatttatataaaatataatagaaacttagagtatttttgttgcctttygtgttttgagtcttttacctagcataatacttttgagatcaatccaggatgttgaacatgttagtggatttttttttcactgccaaataatatttcattg

SEQ ID NO: 240590 - DNA, 201 bp, Homo sapiens
atgtccttgtctggttttggtagtaggttaatgctggtttcatagaatgagttacaaagtagcctccccttttccaatttttggactagtttgaggagcaytggtacttgttcttataacttcggtagaagttggctgtgaagctgtcaggtcctgggcttgaaagacttttttttttttttgaaaccgattcaatgttgt

SEQ ID NO: 240591 - DNA, 201 bp, Homo sapiens
ggagtggagagggctttgttgcacaatgatctatatccagtaagagtggggcacctcaggctgctgaacccaatgcatgggtgctcagaatgtctggagayctgctttagggtgaagcaaagacagccccaatgtaccatgatcacaggggaacaggctgagacaaccgtcaatggcacatgcagactggttccaggtcac

SEQ ID NO: 240592 - DNA, 201 bp, Homo sapiens
ctatctagttttttggtatttttttttttagtagagatggggtttcaccatgttggccaggctggtcttgatctcctgacctcaggtgatccatgcacctyggcctcccaaagtgctgggattacaggcgtcagccaccgcacccagccacaatcccatttttctgtttttgcttttgttgcctgtgcttttgagatcaaa

SEQ ID NO: 240593 - DNA, 201 bp, Homo sapiens
tggcatgatcttggctcaccacagtctctgctgcctgggttcaagcaattctcctgcctcagtctcccgagtagctggaccagaggcgtgcacaaccacamctatctagttttttggtatttttttttttagtagagatggggtttcaccatgttggccaggctggtcttgatctcctgacctcaggtgatccatgcacct

SEQ ID NO: 240594 - DNA, 201 bp, Homo sapiens
tttaatttatgtatagtattccattatatgaaaaaacacttgatttctttattgatggtaattatcaatgatttttacaaaatgataaatgcattcttttktacatgtaagaaatactgaagtttatatcgaactggaattgccagatcaaagggtatatgcttttgcaactttaatgaatatagccaattgctctccagc

SEQ ID NO: 240595 - DNA, 201 bp, Homo sapiens
actctgccggtaccaattctctgtattagttcgttttcacactgctattaagatactacctgagactgggtaatttataaacaaaaggagtttaattgactcacacttcttcatggctcagggggcctgaggaaacttaaaatcatggttgaaggtgaaggagaaacaagtactttctttacaaggtggcaggaaagagag

SEQ ID NO: 240596 - DNA, 201 bp, Homo sapiens
taaatggctgagaatgttccaaaaaatgataaaagatctcaacctgcagattcaagaaaaaattcgtagaagttgcctgagtttaaaaaaaaaaaaaaaaagatgcattatctttaagacagtaagactgaatgaggctgaattttcaacagtaactatggaagccagaaaatgataaaataatattttttaaatgataaa

SEQ ID NO: 240597 - DNA, 201 bp, Homo sapiens
acacagctaaattgtttactggattctagtgattagacccttagcctgctctggggggatatgctgtgaggtttccaatgtacgtatatacacattgtctrgcatacaatgaaaatgtaagggagattgaaagagacaataaaggcagatccacagtgatccatctgttacagttactagaagcactataaagtaataatg

SEQ ID NO: 240598 - DNA, 201 bp, Homo sapiens
ttaaagagaataaaaaggtagaaaaatgaatagttaatgtacattctggaactgagaaatagaaaatccgaaattaagaatgcattggattggcttaccagtagactggacacaaaaaattagtggactcaaagatggttaattgaaataccataaatatataaaatatatatctaatatcttctctctgtctaattatct

SEQ ID NO: 240599 - DNA, 201 bp, Homo sapiens
tatttatgtttcttccaacactctctttaaggcaatgcaggctttctctaccaagcacctcaaaattcttccagccttcacccatcacccaattccaaagycactttcacattttcaggtatttgttacagcagcaccctgctctcagtaccaaaatatttggtactgagattaccaaatctaggattattagatttgatt

SEQ ID NO: 240600 - DNA, 201 bp, Homo sapiens
aactgttctggtgtttgtttttcttgagacaattgtaaagcttgcctagaaacttttaagatacctctatataaatattgaaataagggtatggaagtggrgtcttcagctgtacatagtcactccaagcctaattctccatcctcactcaggtttattaccctgacccttatttgtgctaacagttatcaaaaaagacat

SEQ ID NO: 240601 - DNA, 201 bp, Homo sapiens
tctgcattgccctagtagaggttttctataagggcttgacccctgcagcagacttctgcctggacatacaggtgtttccatacatcctctgaaatctaggkggaggtttccaaagctcaactcttgtcttctgtgtacctgcaggcccaacaccacctggaagccaccaaggattggggcttgcaccctctaaagcaatag

SEQ ID NO: 240602 - DNA, 201 bp, Homo sapiens
ctagtctttcctcctgagaagaaataattctgtcaatgacacaactgggtcaagttgccatgcagagtttttaaaattttgtggcaggctcctttagatgdctttcctcattgtattatcttcctttggtgattgcttcacagatcattcttctgtgtcttccagaaacaatctggtgcaatcggatagtctggagttgaa

SEQ ID NO: 240603 - DNA, 201 bp, Homo sapiens
tactttgacacttttgcaggcagtccttggttttaattttggctccattgtttactaactgaatgtctaaggcagattatttaagcttcatgtgcttcggrtatctcctccagggaatgagaataatgacttgtatactagtaacttgtatactaggcatactgtgaacattacaagatatatgtatatatcttgtaatat

SEQ ID NO: 240604 - DNA, 201 bp, Homo sapiens
tttaagccaaattgagttattttctgttaattatagctgaaactatttcagctgataattgtctattaacattaaaagccaggactgaccatgtagattastttcttccataacacagaaaagatagcccttccatcattaataggaggagacatggtaatcatttgcacaggtagaagaaggttataacatgatggggtt

SEQ ID NO: 240605 - DNA, 201 bp, Homo sapiens
agggaaatgaggaagattcaacctcagacttgagggattttatctttctttgaacctaaagtaattataagaagaaatgtatatatggatatgtaaacatrtgttatagccaaagtctggaacaggtgatttctgacaatagatagcaaaatttataattaacttaagcagctggctaagcaccgaagtgtcacacagaag

SEQ ID NO: 240606 - DNA, 201 bp, Homo sapiens
ttactttcacttcatatataatttgaaatcaaatagtgtgatgtttccagctttcttctttttgcttatgattgccttagtttttcaagatttttgtgctytcatatgaattttaggtttgtattttttctatttataggaaaaatgacgttgaaattttgatggaaattgcattgaatttgttgatcactgtgcctagga

SEQ ID NO: 240607 - DNA, 201 bp, Homo sapiens
aatgcaaacctagcatcattgtgcaattccctgctcaaacatttatttatttaaaaattcccagtcctgatggtattactgttttagaaacaaaccctggrctaggtgtttagggcatgatgcagctctactgcagaatgaggatttaaagagctttttgttttctttctcattgcatggaggtaaagacttttctggtat

SEQ ID NO: 240608 - DNA, 201 bp, Homo sapiens
tgagcaaggctttgcccctatatccctatgcacttctgttggaaggtaagatgtggtggctcaggctgctgatccaggtgagctggtgctctgagatctaraaatctgcctgggcatggagtggagagggctttgttgcacaatgatctatatccagtaagagtggggcacctcaggctgctgaacccaatgcatgggtgc

SEQ ID NO: 240609 - DNA, 201 bp, Homo sapiens
aatgacatttggcttatttagtataaaaattttacagaatgcattgccaaatatgaaatggtgtttggctttctttggattatatttgtgtaaatgtattrctggtatatgttacaaaattatgggaatctcctataattctaatatgacttagtgtatgttaacagtaataattgtaattgatatgttaaattattgtgt

SEQ ID NO: 240610 - DNA, 201 bp, Homo sapiens
atcttgttggatgtaaggatacagtgatgaacaagatcagcagggtcgcatattccaggagcttattattcagttgatggggaaaggcatactctatttcrtgtgaaaattccttgtaatgttgaaatagggtaatatctgtaaagagtataacaagctgtatttgctcaacaaacatttttttttcctttctgctttgca

SEQ ID NO: 240611 - DNA, 201 bp, Homo sapiens
ttatccttatgttgcacagtgaaagaactgatttgtcttacagtgtcagtgtcttcattccttattcacttaacaacattggctttaccgagtattaaccrcatgtcagatactcttctagacaccaaggatacagcagtgaaagaaacagacaaaaacacctgcctttgtggatatgattttgtattgtgtgtggtttgg

SEQ ID NO: 240612 - DNA, 201 bp, Homo sapiens
gtgggatcatataaaatactctaatacatttgtaatgggtatcccagaaagagacaagaaagaaaatggaagaaatatttgactatttgaagaagtgatgsgcaaaaatatttccgaaattaatgacaagtaccaaactacagatccagaaactcagagaacatgaaacagggtcaataccagcacacagggacacacaca

SEQ ID NO: 240613 - DNA, 201 bp, Homo sapiens
tttaccgagtattaaccgcatgtcagatactcttctagacaccaaggatacagcagtgaaagaaacagacaaaaacacctgcctttgtggatatgattttstattgtgtgtggtttgggatagggagaaatacataaacataaaagttaaattttataatatttaaaatgtgtaaaacatagatcaaagtaaggggatcag

SEQ ID NO: 240614 - DNA, 201 bp, Homo sapiens
caacaaaaaaagaaaacttcaggccaatatttctgatgaacatcaacacaaaaatcctcaataaaatactagcaatccaaatccagcagcacatcaaaaawtttactcatgataattaagtaggcttcatccctgggatgcaaggctggttcaacctatgcaaataaataaatgtaatccatcccataaactgaaccaatg

SEQ ID NO: 240615 - DNA, 201 bp, Homo sapiens
ataattgctgtcatgagcagctgcatgttgaaaaaaggtgaactaacttcagcttcttttttttctgtcagaatgtatttagtgtgaattactcatgtgcratacaatatttgataagcttatatatagccagccacatatagatgaaaatttagaattcagtttttaatcatatgacaactagcatcgaatttccagtta

SEQ ID NO: 240616 - DNA, 201 bp, Homo sapiens
actcatttgatgaggctaacatcattctgataccaaaacctggcagagacacaacaaaaaaagaaaacttcaggccaatatttctgatgaacatcaacacraaaatcctcaataaaatactagcaatccaaatccagcagcacatcaaaaaatttactcatgataattaagtaggcttcatccctgggatgcaaggctggt

SEQ ID NO: 240617 - DNA, 201 bp, Homo sapiens
agatacgtaaaatcagtgttggaagctttctttcttgtaccagaattgcatacctcacaattcatcttttcagaaacgtgttagtaagtactttttatagmtgcatgcatcatagtatcattcgattttatttatgcatggtctgtttctttctttcttttttttttttttttgagacggagttgcgttctgttgccgagg

SEQ ID NO: 240618 - DNA, 201 bp, Homo sapiens
tcatggtctccacaaagttgctgattggttagacaaattgctaagattgattgttggcaattgatgagtggtttgtagttggtttttgctatctgaaggcrtgaatgcaccccactggctgtaggcatgaatctttgacatgagataaggaggatgactggagaatttcctaactcaggagctgccagagagactccagct

SEQ ID NO: 240619 - DNA, 201 bp, Homo sapiens
gaggccaaggcgggcggatcacgaggtcaggagatcgagaccatcctggctaacacggtgaaaccccatctctactaaaaatacaaaaattggccgggcgyggtggcgggcgcctgtagtcccagctactcgggaggctgaggcaggagaatggcgtgaacccgggaggcagaacttgcagtgagccgagatcgcgccact

SEQ ID NO: 240620 - DNA, 201 bp, Homo sapiens
gtgattgcagggatgaagagactctgtattaaaggacttttggacagactacttaggattcactgccaaccctaaggggatttaaagcaccactgagagcygaggtgggtccaggccagtagacaataccactaggccctgaccaaggtggaggagaacaggtcatgagctagggctcttgggcaggtaccaacaatgccc

SEQ ID NO: 240621 - DNA, 201 bp, Homo sapiens
ttcatttctgtttgagactttacctgaagcatctttaatatttatgtttcttccaacactctctttaaggcaatgcaggctttctctaccaagcacctcaraattcttccagccttcacccatcacccaattccaaagtcactttcacattttcaggtatttgttacagcagcaccctgctctcagtaccaaaatatttgg

SEQ ID NO: 240622 - DNA, 201 bp, Homo sapiens
agatggagtgaggctaattaaaagtgctacccagccccaacacagctaaattgtttactggattctagtgattagacccttagcctgctctggggggataygctgtgaggtttccaatgtacgtatatacacattgtctagcatacaatgaaaatgtaagggagattgaaagagacaataaaggcagatccacagtgatcc

SEQ ID NO: 240623 - DNA, 201 bp, Homo sapiens
aatcaacagaatatacattcttctcagtgccatatggcaggtattctaatatctactacataattggaaataaaacattcctcagcaaatgcaaaagaatrgaaatcataactaacagtccctcagaccacagtgcaatcaaattagaactcagggttaagaaactcactcaaaactgcacaactacatggaaattcaaag

SEQ ID NO: 240624 - DNA, 201 bp, Homo sapiens
tgttcagatgaatgacttatgatgacctgggattctattttgtggtatccagtgttttaaacctttgatatctgacaaacttccccaaatcaaattataaattgtgtttctgaagaggggccaagatggccaaatagaaacagctcttgtctgcagctcccattgagaccaatgcagaaggtgggtgatttctgcatttcc

SEQ ID NO: 240625 - DNA, 201 bp, Homo sapiens
ctggggtccaaaccacagagccacgcagattctcaacagccactcagctggaatctgcttaagctgatgtctaagccatctgaactccttgggggaggggyggcagccaacactgggactgttagcttcctaacacactaagatcccagagcaggggaagggcagcagccatctctatagctctgggctgcacttttcccc

SEQ ID NO: 240626 - DNA, 201 bp, Homo sapiens
tgctgactgtccaaccttatcagtattctgtgatggaacatataggttctgggttcatagcaattatggtagaaatgaaaacaggaacaaaatttgtcttwggtagcgtcaatctcattgttctacacaggcctcctaggttctaggagtatctgtcatcaaaccccttcagatttacccaccttgtattctgctgccttt

SEQ ID NO: 240627 - DNA, 201 bp, Homo sapiens
acacaaatccattcttttagaatcatagagagttgttttactgccctaaaagtcctctgtgttctgcctatttatctttctctccccaacccttgacaacyactatcttttcattgtctccaaagcattacctttcaagaatatcagatagttggatcacacagtatgtagcgtttttcacattggccttgttcacttagt

SEQ ID NO: 240628 - DNA, 201 bp, Homo sapiens
tggtaaggtagactggaccattactcattatcagatgccaccaccattagtaaatgtgagcaagagaacactgttctgtttttgagtccagactagacaartaactatggcacaccatttaccaagggtcaatagaatgggaagtagatattcaaaaatgcctaagtcagcttcacatgagggcaatttgtagaaattagt

SEQ ID NO: 240629 - DNA, 201 bp, Homo sapiens
ttcaagacttcaatggaggaagtaactgcagatgtggtgggaatagcaaaagaactagaattagaagtggagcctgaagttgtaactgaatttctgtaatcttatggttaaactcgaactgatgaggagttgcttcttatggatgagcaaataaaatacgtttttcctcttaaaaaattttttgggtacatagtagctata

SEQ ID NO: 240630 - DNA, 201 bp, Homo sapiens
ccattgtcttatcagacttcacttaagtcacaaatccaaagataagtttataatgaatttcaagacagcaactgtaagacattaaaacccaaacacaggawcctcttctgagctgtgccttcagaggagttcgtttaaaaaaactgaagttgatgaaattacataaagccatataccatgaaggcatatagcacttgagta

SEQ ID NO: 240631 - DNA, 201 bp, Homo sapiens
ttttttcttgccaccatgtaagaagtgccgtttgcctcctaccatgattctgaggcctccccagccatgtggaactgtaagtgcaattaaacctctttttmtttccagtcttgggtatgtctttatcagcagcgtgaaaaatggactaatacagcaagtatttgaaatatgtggataggaataagaatttttgattgagac

SEQ ID NO: 240632 - DNA, 201 bp, Homo sapiens
tgtaaatattttaaacatgatttcttggtaatttgtggtttaataactatgaaaattagccttacacatgtgtcaaggaaaaggcaaaagagggaaagacyaaataaaaagagaaccaataagaaaggcaagtaaaatctacatgctatgtagtctatgatcacataactccatgaaaagtttccttccaaaatgtgtaac

SEQ ID NO: 240633 - DNA, 201 bp, Homo sapiens
tgtttaatttctgtgtaattgcttgtttatggggttattcttgatattgatttctattttcattccaccgtggcctgagagtattgtttttttttttttttcttttctttccctttccctcttagggtgtgcaacaattgggaatgctgagcaaggctttgcccctatatccctatgcacttctgttggaaggtaagatgt

SEQ ID NO: 240634 - DNA, 201 bp, Homo sapiens
agcagacctgcagtgctgtgctgggagatccattgctctcttcagagcctgcaggcagaaatatttaagtctgctgaagctgtacccacagctaccccttmccccaagtgctctgtcccagggagatgggagttttatctataagcccctgactggggctgctgcctttctttcagagatgccctgcccagagaggagaaa

SEQ ID NO: 240635 - DNA, 201 bp, Homo sapiens
ttgatttggctattgatacttgtgtatgcttcatgaagttctcatgctgtgtttttcagctccattagatcatttatattcttctctaaactggttattcyagttagcagttcctgtaaccttgtatcaaggttcttagcttccttgcattgtgttagaacatgttcctttagctcggaggagtttgttattacccacctt

SEQ ID NO: 240636 - DNA, 201 bp, Homo sapiens
ggagaatcgcttgaacccaggaggcagaggttgcagtgagccgagatagggccactgcactccagcctgggtgatggagcgagactctgtctcaaaaaatwaaaaaaaaaataaataaataaaagttgaatattggccctcactctcttttgacttacagggtttctgcagagagatctgctgttagtctgatgggcttcc

SEQ ID NO: 240637 - DNA, 201 bp, Homo sapiens
ttgatcctgtcattatgatgctagctggttattttacccattagttgatgcagtttcttcatagtgtcgatggtctttacattttggtatgtttttgcagyggctggtaccagtttttcctttacatatttagtgcttccttcaggagctcttgtaaggcaggcctggtggtaacaaaatccctcagcatttgcttgtctg

SEQ ID NO: 240638 - DNA, 201 bp, Homo sapiens
tctctttgtaggtctccaagaacttgctttatgaatctgagtgctcctgtactgggtgcatatatatttaggatagttagttcttcttgttgcattgatgygtttaccattatgtaatgcccttctttgtcttttcggatctttgttggtttaaagtttgttttatcagagactagtattgcaactttggccttttttttt

SEQ ID NO: 240639 - DNA, 201 bp, Homo sapiens
aaataacttttcaaattgctgttaaattcagtttgctaatattttgttgaagatttttgtgtctatgttcatcagggatattggcctatgtttttttttttcatcatgtctttgccaagttttggtatcagagtaatgctctaataattctactaggtgtacagtaattctactaggtgtacagctcctccttgtacacct

SEQ ID NO: 240640 - DNA, 201 bp, Homo sapiens
agtgagtttcttaatcctgagttctaatttgattgccctgtggtctgagagactgtttgttatgatttctgttctattgcatttgctgaggagtgttttayttccaataatgtggttaattttagaataagtgttatgtggtgcggagaagaatgtatattctgttgatttggggtggagagttctgtagatgtctattag

SEQ ID NO: 240641 - DNA, 201 bp, Homo sapiens
atatttaggatagttagttcttcttgttgcattgatgcgtttaccattatgtaatgcccttctttgtcttttcggatctttgttggtttaaagtttgtttkatcagagactagtattgcaactttggcctttttttttttttttcgctttccatttgctcggtaaataatcctccatccctttattttgagcctatgtgtg

SEQ ID NO: 240642 - DNA, 201 bp, Homo sapiens
agggatgttataatttatgcatataatgtggaataatttaaccaagctacttaacatatctataacttcaaatacttatctttttgtggtgagaacatttraaattcactctcagtgattttaaagtgtgtactacattattatttactatattgattacactgtataatttatagcaaaagaaaaaacccattattcctc

SEQ ID NO: 240643 - DNA, 201 bp, Homo sapiens
ccagaccaatgtcacatagtttttctcatatgttttcttctagtagttttaaactttcagtacttatggttaaatctttcatccacattgacttgatttawgtatatgatgtgagataaaggtccaatttcattcttttgcatatccatattgtttactcaacactatttatttaagggactccttttcacaacataaaag

SEQ ID NO: 240644 - DNA, 201 bp, Homo sapiens
aaaatgacgttgaaattttgatggaaattgcattgaatttgttgatcactgtgcctaggatggatattttaacaatattaatttttccataccatgaacaygaggtatctttccatttgtttattttcttcaattttttcattaacattttatagttttcagtgtacaagtctttcacttccttccacagaaagtttttaa

SEQ ID NO: 240645 - DNA, 201 bp, Homo sapiens
aatagaaatgctgagagtggacatccttgtctttttctggatcttagggaaaagggttcaatttttcactgttatttatgattttatttgtggacttattmtatatggtccttattgtgtttaggtacattccttctatacctaatttgttgaaagtttttatcattaaagaattctgaatttttctaataatttttctcc

SEQ ID NO: 240646 - DNA, 201 bp, Homo sapiens
tattgtgtttaggtacattccttctatacctaatttgttgaaagtttttatcattaaagaattctgaatttttctaataatttttctccatctaatgagaygatcatatagtttttgtttttcattctgttaatgtagcacgtcccatttattaatttgcaaatattgaatcatccttgtatcacatgaataaatcccact

SEQ ID NO: 240647 - DNA, 201 bp, Homo sapiens
acatagaggacagagagacaaagaaatagagatctggaaattttcttcttcctcttttttttttttttttttttttttttgagacggagtcttgctctgtygcccaggctggagtgcagtggtgtgatctcggctcactgcacgctctgcctgccaggttcaccccattctcctgcctcagcctcccgagtagctgggact

SEQ ID NO: 240648 - DNA, 201 bp, Homo sapiens
attttttttaatgaaagattctcttggtttttctttacatgccaaggccttacctgaaaacatgcattttaatttggtatgtttaactttgagaaattatsatccaaagtgttcttaatatagaccctggatttcctgagatacactaaattacaagtttcttctctgttgtctacataagtatatgaaatcaaagcatgt

SEQ ID NO: 240649 - DNA, 201 bp, Homo sapiens
gccttacctgaaaacatgcattttaatttggtatgtttaactttgagaaattatgatccaaagtgttcttaatatagaccctggatttcctgagatacacwaaattacaagtttcttctctgttgtctacataagtatatgaaatcaaagcatgttcttatttatttcataacttttgaaatgaataataaatgttttcag

SEQ ID NO: 240650 - DNA, 201 bp, Homo sapiens
cactatcttctcccataggatttccctccttctgggggatccaggatccaggatccagtataaaatggcacccttaattctagggatctgttttacctacyttggagcattagattctagatatggcctggggacatgtggagttaaccttgcccctagctatgctgaaagcagtcagaccttatctacacttctgtctga

SEQ ID NO: 240651 - DNA, 201 bp, Homo sapiens
tcattaggtatcaaaaactacttagtgaaaagaaggcttttactaagacaggaagaatcatatggtctgatgctgggtggaaagtctagcacccacctttwaggcaatctatgctatttcagggttttactcttagtaatcattatgctttcaatcaaatgattttgcctgcatattattatctatgtgaaagcatgtaaa

SEQ ID NO: 240652 - DNA, 201 bp, Homo sapiens
tgctttcaatcaaatgattttgcctgcatattattatctatgtgaaagcatgtaaaatgagtagtgttaatgcatcatttttattgctttaaaaaaggttycctttttggtgacctggaaactttcctgcctagcttgttaattaggtttttctgaagcagtgctcagtcttgaccatgtgattcttggtcacagacagtg

SEQ ID NO: 240653 - DNA, 201 bp, Homo sapiens
actgctttagctatgtcccagagattctggtatgttgtgtctttgttctcattggtttcaaagaacttatttatttctgccttaattttgttatttacccmgtagtcattcaggaggaggttgttcagtttccatttagttgtgtggttttgagtgagtttcttaatcctgagttctaatttgattgccctgtggtctgag

SEQ ID NO: 240654 - DNA, 201 bp, Homo sapiens
catttgcttatgtcctctctaacttccttgagcattgctttgtagttctccttgaagaagtccttcacattcccttgtaagttgtattcctaggtattttrttatctttgtagcaattgtgaatgtgagttcactcatgatttggttctctgcttgtctattattggtgtataggaatgcttgtgatttttgcacactgat

SEQ ID NO: 240655 - DNA, 201 bp, Homo sapiens
aagttgtaactgaatttctgtaatcttatggttaaactcgaactgatgaggagttgcttcttatggatgagcaaataaaatacgtttttcctcttaaaaawttttttgggtacatagtagctatatatatttatggggtacatgagatatttgatacagacatacaatgtataataattacatcagggtaaatggggtatt

SEQ ID NO: 240656 - DNA, 201 bp, Homo sapiens
tgaaagctttgtgtgttttgatgaggcttgtgcattagtgggcttcacttggaatgatagagcagtgcctctgcgttttgttggaaggctcacacaccagyatttactgggcttttctctggggctgcttactttctcttgtgagggaccagtatgtttctgatttagtgagtgttgaaacatgcccagttgtcaatattc

SEQ ID NO: 240657 - DNA, 201 bp, Homo sapiens
gcaagccctaaaatgatcccaaaggaaaaatgcctggtgatatccatgcctgtacgtaatctcctccctctgactgttagctggaattcttgccttgcctmtaatgagtaaaatattccagaaatcatgagactccacttctgaaattaggttctgaaaggaccgtgacttccaccttgggcattctttcttccttttccc

SEQ ID NO: 240658 - DNA, 201 bp, Homo sapiens
cagctcctggattcattgattttttgaaatgctttttgtgtgtctgtctccttcagttctgctctgatcttagctatttcttgatttctgctagcttttgrattcgtttgcacttgcttttgtggttcttttagttgtgatgcttgggtgttgattttagctctttcccactttctcctgtgggcatttagtgctataaat

SEQ ID NO: 240659 - DNA, 201 bp, Homo sapiens
ataatttttttaaacgtctaaaaacacttgtacaggcctggcatggtggctcaagcctgtaatcccagcactttgggaggccgaggagggtggatcatgakgtcaggagatcgagaccatcctggccaacatgaagaaacaatgtctttactaaaaatacaaaaattagctgggcgtggtggcgggtgcctgtaatcccag

SEQ ID NO: 240660 - DNA, 201 bp, Homo sapiens
tactaatgataagaaaagtagagagaatatattaatatcaggcaaatagttttcaagaaaagggttattataagagaaaggggacattttctacttataamtcatcagtttattaagaagacacaacaacctttttttgttcatgcagactattagaacaaaatctaatagacatggtggcttatttatttctcacctttc

SEQ ID NO: 240661 - DNA, 201 bp, Homo sapiens
caaaacaaactcaataaatttaaaaacactgaaataatacagagtatattttctaataacaatggaataaaattagaagtcaaaaacagaaggaaattttwaaaattcaaaaatgtgtggaaattaatatactcttaacaaatgggaaaagaagaaaccacagggaaatagataatactttgagataaacaaaataaaaat

SEQ ID NO: 240662 - DNA, 201 bp, Homo sapiens
ctcagcaagtaatttgagtaaaaactgaatactgaaggtgtttatttcaacttgattattctttattacattgcattactgttttatactgattaaaatgytgactttctatgttaataaaagattatattaaattttttgattttccaaaattggcaagatggaaatatttacaagaagttctacttgcctgtgtactaa

SEQ ID NO: 240663 - DNA, 201 bp, Homo sapiens
ttttcttttcttttcttttttttttctttttgaggcggggtctcgctctgtcgcccaggctggagtgcagtggcatgatttcagctcactgcaagctctgmctcccgagttcacaccattctcctgcctcagcctcccaagtagctgggactacaggtgtccaccatcatacccggctaatttttttgtatttttagtgga

SEQ ID NO: 240664 - DNA, 201 bp, Homo sapiens
acatctgttaaataaattgaatccaaatttaagcaactttcttgaaaagaaaaactgctgacctagatagcttcactgctgaattcttttacataattttmaatattaaaaaaataataattgacataatagccatcatagacaaacccttttaaaatagagaaaagagaacacaggcagtctagccatgccacttttttc

SEQ ID NO: 240665 - DNA, 201 bp, Homo sapiens
agactatgcaatcactaactgaaaaaatctactcttctattcctttatcggacagaatagcttggtaccaaaacttgacatggatattaaaagaaaattaygattctgtatacttggagctgggatacaaaattctaaacaaaatattaacatacaaaacttaacaacatataaaataggataagtcatcattaccaagta

SEQ ID NO: 240666 - DNA, 201 bp, Homo sapiens
gtattttgaaatgtactcttcattgctgttaattatagtcaccatactctaccatcaaacattagaacttattacttctatctaactatatgtgtataacrcaaagtgagccgtctctcttatcctttccagacagtttttattctgttctgaggattatgctggtaggccaggctcattctcactttcttggattttcac

SEQ ID NO: 240667 - DNA, 201 bp, Homo sapiens
cagtttcatccatgttgctgcaaatgacatatttttttgcagtatattcatgtaacaatgattttgctttttaatggtcaggtaatattctactatgtaartaaaccacattttctttctccattcatcaactgatggacacttagattgattccgtattttggcaattgtgaatagtgttataataaacataagagtgca

SEQ ID NO: 240668 - DNA, 201 bp, Homo sapiens
ttctccattcatcaactgatggacacttagattgattccgtattttggcaattgtgaatagtgttataataaacataagagtgcatgtatccttttgacayagtgatttcctttcctttggataaatacctgccagtgaaactgctggattgtatggtggttctatttttagttttttgagaaatctccatacagtgattc

SEQ ID NO: 240669 - DNA, 201 bp, Homo sapiens
ggtttttgtcctctattatgcgctgcatggtgttttattaatttgcatatgtaggttgagctatcataatattcctgggataaattctacttaatcatgtygtattatgtctttgatgtactgttggattcagtttacttgtattttgtcaagggcttttacatctatgtcatctggtatattggaatatagttttctttt

SEQ ID NO: 240670 - DNA, 201 bp, Homo sapiens
attgtcttcattctttattattgcttatctttatggtttgatggctttctgtagtgataacatttgaatcatgctgctataaagacacatgcacacgtatrtttattgcggcattattcacaatagcaaagacttggaaccaacccaaatgtccaacaatgatagactggattaagaaaatgtggcatatatacaccatgg

SEQ ID NO: 240671 - DNA, 201 bp, Homo sapiens
tgcataagtgttaaacaaaaatattggcctacagctttctttttttttgatgtgtctttgcctggtttggtatcaggttaatattggcctcatagaatgastttggaagtattgcctctatttttcagaatagtttgagtagttttggtattagttctcttttaaatgttcagtaaatatcagcagtgaagccttcaggtc

SEQ ID NO: 240672 - DNA, 201 bp, Homo sapiens
cacagcaatattgaataacagtggtaaaactgagcattgttttcttattccagatcttagagaaaaggctttcagtttttgcccattcagtgatactatgkgtctgtttcaaatggcttttattgcgtggaggtatggtctttctattctttgtattttgagtgtttttaacatgaagggatgctgaattttatcaaatgc

SEQ ID NO: 240673 - DNA, 201 bp, Homo sapiens
tatatatggcaagagataagggtctagtttcattcttccgcatgtggatatccagtttccccagcattatttattgaagagactgtcttttccccagtgtwttgctcttggcacctttgtagaaaatgagttcactgtaggtgtgtagatttctctgtgggttctctattctgctccattagtctatgtgtccatttttat

SEQ ID NO: 240674 - DNA, 201 bp, Homo sapiens
tctatgagttttacagtttgatgtcttagatttaagtctttaatccattttgatttgagttttatatatggcaagagataagggtctagtttcattcttcygcatgtggatatccagtttccccagcattatttattgaagagactgtcttttccccagtgtattgctcttggcacctttgtagaaaatgagttcactgta

SEQ ID NO: 240675 - DNA, 201 bp, Homo sapiens
taaatgatgagaacaatggaaatacagaggggaacaagagacactggggcctatcagagggtggcggggtgggagaagggagaggatcaggaaaaataacwaatgggtactaggcttaatacctgggtgatgaagtaatttgtacaacaaactcttgtgacagaagttgagctatataacaaacctgcacacgtacctctg

SEQ ID NO: 240676 - DNA, 201 bp, Homo sapiens
tttcctcttaaaaaattttttgggtacatagtagctatatatatttatggggtacatgagatatttgatacagacatacaatgtataataattacatcagrgtaaatggggtattcatcacctcaagcatttattctttctttgtgttagaaacaatccagtcatctttttgttatttaaaaatatacaataaattattgt

SEQ ID NO: 240677 - DNA, 201 bp, Homo sapiens
aatgtgtttcttgtctgctaacacaacgttcattctgcagcccataaatcaaggagtaattattactttcaagtgttattatttaagaaatacatttcatraggctataggtataattcctctgatgtacctgagcaaagtaaattgaaaactttctggaaaggattaaccattctaggtgccattaagaagatttgtgat

SEQ ID NO: 240678 - DNA, 201 bp, Homo sapiens
tgctgacatagaagctggagcaagagatccagaagatctagctaagatcattgatgaaggtggctacactaaacaacaggtttttaatgtagatggaacarctttatattggaaaaagaggccatctaggactttcatagctagagaagagaagtcagagactggcttcaaagctttaaaggacaagctgactttcttgtt

SEQ ID NO: 240679 - DNA, 201 bp, Homo sapiens
aagaaaagtttgaagctaacagaggttggttcatgaagttaaggaaagaaaatgtctccataacataaaagtgcaaggtgaagcagcaaatgctgacatasaagctggagcaagagatccagaagatctagctaagatcattgatgaaggtggctacactaaacaacaggtttttaatgtagatggaacagctttatattg

SEQ ID NO: 240680 - DNA, 201 bp, Homo sapiens
tttatccatgttgtcataaatgacaggatttcctgcttttttaaggttgaatagtattccactttgtgtgtgtgtgtgtgtgtgtgtgtgtgtgtgtgtgtatagtatatcacattttctttatctattcctttgctgataaacacttaggttgattccatatcttggctattatgaataagactgcaatgaacatggaag

SEQ ID NO: 240681 - DNA, 201 bp, Homo sapiens
taatcttagaatgaggaaatagaaaacattctgaataaatttaaaatggttagttggtgtgtgcaactttacttactagagctacttgaactaagtagcaygtatgttttttactctcattttttagttaatttgtctaggaaacaagtgattatgaactatacaataacgaggctaaagttgcatctgaattttctatta

SEQ ID NO: 240682 - DNA, 201 bp, Homo sapiens
gtttatccatgttgtcataaatgacaggatttcctgcttttttaaggttgaatagtattccactttgtgtgtgtgtgtgtgtgtgtgtgtgtgtgtgtgtgtatagtatatcacattttctttatctattcctttgctgataaacacttaggttgattccatatcttggctattatgaataagactgcaatgaacatggaa

SEQ ID NO: 240683 - DNA, 201 bp, Homo sapiens
atgaggaaatagaaaacattctgaataaatttaaaatggttagttggtgtgtgcaactttacttactagagctacttgaactaagtagcatgtatgttttytactctcattttttagttaatttgtctaggaaacaagtgattatgaactatacaataacgaggctaaagttgcatctgaattttctattaggctattttc

SEQ ID NO: 240684 - DNA, 201 bp, Homo sapiens
cattgtctccaaagcattacctttcaagaatatcagatagttggatcacacagtatgtagcgtttttcacattggccttgttcacttagtaatatacattkaagtttcctccctgtcttttcatggcttgataggtcattcctttttagtgctgaataatattccattatctggatgtaccacagtttatccattcaccta

SEQ ID NO: 240685 - DNA, 201 bp, Homo sapiens
atatcagatagttggatcacacagtatgtagcgtttttcacattggccttgttcacttagtaatatacatttaagtttcctccctgtcttttcatggcttrataggtcattcctttttagtgctgaataatattccattatctggatgtaccacagtttatccattcacctactgaaggatatcttggttgtctcttaagt

SEQ ID NO: 240686 - DNA, 201 bp, Homo sapiens
tcctttttagtgctgaataatattccattatctggatgtaccacagtttatccattcacctactgaaggatatcttggttgtctcttaagtttgggcaatyataaataaagctgtcataaatatcatgtgcaagtttttgtgtggacatcagttttcaacttctttcagtaaatactaaggagtgtgattactgcatcata

SEQ ID NO: 240687 - DNA, 201 bp, Homo sapiens
taaagctcagtctcttaatcctttctctcatggattatgtcttcagtgttattctaagaataattgtcatcaccaatcccaaagtcgtttaggttttcttrtgtgttatcttctaggagtttgatagtttttcattttacatttagttctgtgatccttttgagttaatttttgtaaaggttataaggtctgcatctagaa

SEQ ID NO: 240688 - DNA, 201 bp, Homo sapiens
ataacaacaaggctctaaaacgtagtagtacacaaatatgccaagtatgtgggaaactttataagggatgctacatgaccataactgataaggaagaaaayaagagtcagtagttatgagtcactctgggtaaggttggcagacacagagcttgtttaccatctccctgccccaggaaaatcagaccaacccagcattttt

SEQ ID NO: 240689 - DNA, 201 bp, Homo sapiens
tcagcagactaatgcaggagctaatgcaggaaccaaaaaccaaacactgcttgtactcacttataagtggtagctgaacagtgagaacacatggacacagrgaggggaacaatacacagtggggcctgttgtggggaggcagagcatcaggaaaaacagctaatgcatgctgggcttaatacctaggtgatgggttgatag

SEQ ID NO: 240690 - DNA, 201 bp, Homo sapiens
cccagagctgcaagctgtgctgtttgaggttggggaaggggtgatgcaagcactcccttggcaaccccagctgatgtctcactaggtcatatttcccccaygtccatgggctctgagcccagcacagatcaggacttccccagaagttgcagtttttgtggcctagacagcctttcatgtttatttaggaccctggagcct

SEQ ID NO: 240691 - DNA, 201 bp, Homo sapiens
ggtccctcccaaatctcacatcatttttatgtttcaaaaccaattatgccttcccaacagtcccccacgtcttaactcattccagcattaccccaaaagtycaagtccaaagtctcatctaagacaaggcaagtccctctgcctataagcctgtaaaatcacatgcaagtcagttacttccaagatacaatgggagtgtgg

SEQ ID NO: 240692 - DNA, 201 bp, Homo sapiens
aatcacatgcaagtcagttacttccaagatacaatgggagtgtgggcattgggtaagtgttcccattccaaatgggagaaattggccaaaacaaaggggcyacaggccccatgcaagtttgaaacccagtggggcagtcattaaatattaaatcttcaaaatctgctttgactctgtgtgtcacatccagattgcactggt

SEQ ID NO: 240693 - DNA, 201 bp, Homo sapiens
acatttgaatcatgctgctataaagacacatgcacacgtatatttattgcggcattattcacaatagcaaagacttggaaccaacccaaatgtccaacaaygatagactggattaagaaaatgtggcatatatacaccatggaatactatgcagccataaaaaatgatgagttcatgtcctttgtagagacatggatgaaa

SEQ ID NO: 240694 - DNA, 201 bp, Homo sapiens
atgtctgttagagttttagtaacttgtcttaagattctgcaacctgcaagtgatagaggtcagattaaacataggcagtttgacttcagtgcccagacgcrcacctcctatatgtagtgtctatctcttagtcaaagcttcttttgctttggctccaaatgcagtttaagctgtaaaaacatacatttgtggccagacata

SEQ ID NO: 240695 - DNA, 201 bp, Homo sapiens
ctcaaatgagactttggactgtggacttttgagttaatgctgaaatgagttaagactttgggggaccattgggaaggcatgattggttttaaaaatgcgaraacatgagatttggaggggctaggggtagaatgaaatggtttggctgtgtccccatccaaatctcagcttgaattgtgtctcccagaattcccatgtatt

SEQ ID NO: 240696 - DNA, 201 bp, Homo sapiens
ttcagttccaggatttctgtttggttcttttttatgatatctttctcttttatatcctgaattgttctgatttttttgtattgttacctgttttctcttgyatctgactgcacttctttaatattattactttgaattatttttcaggcatttgataaattttgtcttcattggagtctgttgttgaagaattattgtgtt

SEQ ID NO: 240697 - DNA, 201 bp, Homo sapiens
agtgatagaggtcagattaaacataggcagtttgacttcagtgcccagacgcgcacctcctatatgtagtgtctatctcttagtcaaagcttcttttgctktggctccaaatgcagtttaagctgtaaaaacatacatttgtggccagacatagtgactcatgcctgtagtctcagcactatgtgaggccgaggtgggcag

SEQ ID NO: 240698 - DNA, 201 bp, Homo sapiens
tgtttcttgtgtctttcattgatattagcaccttggatgtaacactcacttctaattttgtgaattggtttttgtagagaaagacttttttcctgtagatrtatttaaatgttggtcgtgtaggggagctttgctttgattccagttgcacacagtagtatactctctgtatgattactttggctgtaaacagtgtcagtg

SEQ ID NO: 240699 - DNA, 201 bp, Homo sapiens
gtcattatgatgttagctggttattttgctcgttagttgatgcagtttcttcctagtctcaatcattacgttttggcatgattttgcagcggctggtaccvgttgttcctttccatgtttagcacttccttcaggagctcttttagggcaggcctggtggtgacaaaatctctcagcatttgcttgtctgtgaagtatttt

SEQ ID NO: 240700 - DNA, 201 bp, Homo sapiens
aaatggtgctgggaaacctggctagccatatgcagaaaattgaaaccggaccccttttctacaccttatacaaaaattaagatggattaaagacttaaacrtaagacctaaaaccataaaaaccctagaagaaaacctaggcaataccattcaggacataggtatgggcaaggacttcatgactaaaacactaaaagcaac

SEQ ID NO: 240701 - DNA, 201 bp, Homo sapiens
gaggctatggtgagcttttgctgggaatagactgccgaggctagttcttatgcctcagtgatggcaacagcagtctgagtgtctttatatttggagccccrggtggtatatgttggcattggtgttaggtggtttagatgggcagtttcttgggcctttaggcagatttcttggctgtcagtagtggcagtggggggatga

SEQ ID NO: 240702 - DNA, 201 bp, Homo sapiens
aatggaacagagtgagtaactacaaaggagaaggagatacttgtaggagatactgcagagaactgcagaataaaagaggaatatggctgaaaagagtcccrggctgggacctcagtacctgaaggcagttgacactgctgtatatgctgacttctctatatcttggaactgtgaatacaaaatgactcttgggtgagtcaa

SEQ ID NO: 240703 - DNA, 201 bp, Homo sapiens
gtgtgtgagtcctttcgtcccttggatgtgtgagttcttgggtctctgagcagcatgcatggtgtgagtgatggtagttgtggtgatagtgttacgggatstttgggtgtcacttctctggctaaaaacctctgtgtcccatggtgcctttgcctgactcttgtttgggcctgctgggcttgttctgcccactcaacctgg

SEQ ID NO: 240704 - DNA, 201 bp, Homo sapiens
cttggaactgtgaatacaaaatgactcttgggtgagtcaaaatttctgtatatagcagactctgcatttggagtctctccttctgtcaaaagctcctggtyttctatgtggaaatgcattcttttctctactttccttattcttttatttgaagtcacgtttttaaatactaatagatcacctacttccagttgttttcaa

SEQ ID NO: 240705 - DNA, 201 bp, Homo sapiens
gaggaaccagtaggtttagatgaatagatcatatacagcaatctcctaggctgatgctaggggttggcaaagaattacggtaatgtgggtgagagttggcrtggtttaactccatagctatttttttaaaaattttctcgaatttcttcaatcccacttaaatacagtaactaatctgcatcgcaaagccttctacttctc

SEQ ID NO: 240706 - DNA, 201 bp, Homo sapiens
tttcgtcccttggatgtgtgagttcttgggtctctgagcagcatgcatggtgtgagtgatggtagttgtggtgatagtgttacgggatctttgggtgtcamttctctggctaaaaacctctgtgtcccatggtgcctttgcctgactcttgtttgggcctgctgggcttgttctgcccactcaacctggcaggctgtgctc

SEQ ID NO: 240707 - DNA, 201 bp, Homo sapiens
caaagaattacggtaatgtgggtgagagttggcatggtttaactccatagctatttttttaaaaattttctcgaatttcttcaatcccacttaaatacagyaactaatctgcatcgcaaagccttctacttctcttatattttagtatacgcttggctgcattttagatgacatactcatattctaatttttctaggaatt

SEQ ID NO: 240708 - DNA, 201 bp, Homo sapiens
ggtctctgagcagcatgcatggtgtgagtgatggtagttgtggtgatagtgttacgggatctttgggtgtcacttctctggctaaaaacctctgtgtcccrtggtgcctttgcctgactcttgtttgggcctgctgggcttgttctgcccactcaacctggcaggctgtgctcagctcaccctaccagcctggaactcatg

SEQ ID NO: 240709 - DNA, 201 bp, Homo sapiens
tggtttcagcatctgtacttgtaatccttgagggcctgacccttggagacgatcttgtctcccgattgcatatgccttcttattttttgtggtgctgagtrgcggttttcaactgctggaaaaagaaatgtgaaaacgtgcactgacccttgtcaatgctcaggaaggatgtcagaataacattaacctttcttttcaagt

SEQ ID NO: 240710 - DNA, 201 bp, Homo sapiens
gggcaccccaaagggccacagctcttctctccttcttgtcacctgcaatgtggcgagcaagggacatgtctcagccctgtgtgtgtgttacagctcttttrgcttcaccattcagcgggtcccgagtaattgttctgcaaccaggaagaatgagctatgcagatatgtgaagggtgagcaagacaaagaggagctttattg

SEQ ID NO: 240711 - DNA, 201 bp, Homo sapiens
gtgttacagctcttttagcttcaccattcagcgggtcccgagtaattgttctgcaaccaggaagaatgagctatgcagatatgtgaagggtgagcaagacraagaggagctttattgagtgatagaacagctcagaggagacccgcaggggcagctcctttctagaactagggtgtcccatgagtgttcagctactagcag

SEQ ID NO: 240712 - DNA, 201 bp, Homo sapiens
gatcctgaagaaaattaaaggtgctaccttagtgagcacataaatgacagaaagtgaagtcattttatggctgatatggaggaagttttggtggtctggaytgaagatcaaaccagccacaaaattcccttaagccaaaacctaatctagaacaaggccttaactctcttcagttctttgaaggctgagagaagtgaggaa

SEQ ID NO: 240713 - DNA, 201 bp, Homo sapiens
aaaatgaataacctagacttccaccttaggaaaacagaagagcaatttaagccaaaagtaatcaggaaaagagaaatttaaaaattgggcaacttggatgyaactggaggccattatcataggtgaataaatacaggaacagaaaacccaatacctcatgttctcacttttaagtaggagctaaacattgaggacacaagg

SEQ ID NO: 240714 - DNA, 201 bp, Homo sapiens
agtatactcagtggcccagttcaggtttttgactttgctgcacaaaagaatttgagagtgagtccaaagtaaaagtaagcaagagagtttattacaaagcraaagtacactctgatggctgctcaaagtgggatgctcaaaggtgagacagcaccaactgacacttgggaaactctccttatgggagtcttacatgattct

SEQ ID NO: 240715 - DNA, 201 bp, Homo sapiens
ctttttgttagtattatatctgctatggtgatctgttatcagtgatctctgatgttactgtcataattgcttggagcaccatgagctggactcatgtagtrtgggaaactgaattaataaacatgtgtgtgtttagactgatccaccaacaacaggtagttgccctctgtctcttcttctcctcaggccaccctattctga

SEQ ID NO: 240716 - DNA, 201 bp, Homo sapiens
catctgtacttgtaatccttgagggcctgacccttggagacgatcttgtctcccgattgcatatgccttcttattttttgtggtgctgagtggcggttttsaactgctggaaaaagaaatgtgaaaacgtgcactgacccttgtcaatgctcaggaaggatgtcagaataacattaacctttcttttcaagttgagcacct

SEQ ID NO: 240717 - DNA, 201 bp, Homo sapiens
acatgtctttgaattatgatctctccccaaagggaatttcttgcgtcttgaataaataacagatgttgaatgtgagggagctggggctggaagagaatgcrtttgcagaatatgagaggatattttctgttggtggatggaactacaggattgaatagatgttcaatgaaatgtaagaaatagaaaagctagagtatcact

SEQ ID NO: 240718 - DNA, 201 bp, Homo sapiens
aaactactttttatgtatgagccaatgtaaaaagaacgcagtcagacttaggggcaaataatatatttacattaaatgaaggctaaatgccatgtaatagwctctgcatgaggcttcatagtaacttaatttgaaagagaagatggcagaaatgaatcatcacctgacattaggtttgtagcaggtcttaggagaacctgc

SEQ ID NO: 240719 - DNA, 201 bp, Homo sapiens
aaacgtgcactgacccttgtcaatgctcaggaaggatgtcagaataacattaacctttcttttcaagttgagcacctgttttgtttctgttttgttttcaratcaatttctatgcaacacaaataagtactttcatgtgttcaggaatgaatagattttagtaaaataatccatggtgaagacttagaaaatgatatccat

SEQ ID NO: 240720 - DNA, 201 bp, Homo sapiens
gaatcacttgaacctgggaggcagaggttgcagcgagccaagatcgtgccactgcactgtagcctgggtgacagagtgagactctgtctcaaaaaaataamaataaataaataaataactaaaaatgtagaataccataaagcagtgcttaaagggaaatgtatagcataagtaaatgtattaaaagagagattcaaaatg

SEQ ID NO: 240721 - DNA, 201 bp, Homo sapiens
caggcttgtcttgaacttttgggcttaaagcaatttacctgccttgacttcccagagtgctgggattacaagcatgagccactgcacctggcctatcttttcttttttaactccaaggaaagacttactaatgttaaaattctggaaatcagtctggtggaggagatatttggagtttgggtgcaggcaggtgagtggcaa

SEQ ID NO: 240722 - DNA, 201 bp, Homo sapiens
cctaaaactctatctatctagaggatagttcacaggctctcagcctgcagacccattcgtgcctttagagctattctcaatataataataccttatttttwaaaaaaaaaactgcttgtagttcaatggtctatttatctgtgatctatgatctatttatctatctattgcattatgtggattatgactttaatataaacc

SEQ ID NO: 240723 - DNA, 201 bp, Homo sapiens
aaagcaagctatttaaaaaccatatattcactgatattttataaattcttggagcctgctaagagagaggttaattgtcattgtcatgtggtaccttctargtgaaagtgtttcatttctattatttctttggtagaaatgctactaaagtgagtttgcttgttttatttatagccttcttcttttagaacacactcacca

SEQ ID NO: 240724 - DNA, 201 bp, Homo sapiens
ccaggcttgtcttgaacttttgggcttaaagcaatttacctgccttgacttcccagagtgctgggattacaagcatgagccactgcacctggcctatcttttcttttttaactccaaggaaagacttactaatgttaaaattctggaaatcagtctggtggaggagatatttggagtttgggtgcaggcaggtgagtggca

SEQ ID NO: 240725 - DNA, 201 bp, Homo sapiens
aacctgggaggcggaggttgcagtgagtccagatagcaccactgcactccaccctggtgacagagcgagactgtctcaaaaaaaaaaaaaaaaaaaaaaaagtagataccgcttgtaattgattaccttgtatccaaatctacatgtttgggacagaaaattactttgaccaactttgttttttaccaaaaaacaaggaac

SEQ ID NO: 240726 - DNA, 201 bp, Homo sapiens
attccagctactgtgggagaacatgacaggaggtatggcttcaaggattatcaagaagttcagtgtgggtgaggcacagagtgtgagaaaagccagcaaasagctgaggttgcaggagcagttgggggtacagtggcagcagatcagattgatattttggatgatgtttggagagggaattaaatgagcaaacatgaaagc

SEQ ID NO: 240727 - DNA, 201 bp, Homo sapiens
aggccgaggcaggtggatcaccaggtcaagagatggagaccatcctggccaacatgatgaaaccccgtctctactaaaagtacaaaagttagctgggcatrgtggtgtgcacctgtagtcctagctactagggaggctgaggcaggagaatcacttgaacctgggaggcggaggttgcagtgagtccagatagcaccactg

SEQ ID NO: 240728 - DNA, 201 bp, Homo sapiens
gtgggcgtgtgttaccatgccactctcagtgttgccctctgcaggccgcttgtgttagtcagctcagttagaccctctctgccttgtcgcaaggacagagsgctttctgtatcctgggttctttatgtagtgtccagaaaaattggatcacacgtggggttggagaatgagtgcaaggttttttaatgagtggtggaagta

SEQ ID NO: 240729 - DNA, 201 bp, Homo sapiens
gtcagacggggcacttgacctgcaagacaccaacttgggcctcttccaagtgtactttcctttctttcattcctgctctaaagctttttcataaactcccrctcctgcacataggctaagagaagagattaaatagaattatataaactgttcaattaaacagagacagcagaaaagagaaaaaataataaatagaaaaca

SEQ ID NO: 240730 - DNA, 201 bp, Homo sapiens
aataatgaggtgagattctgaaacagaagttccctaatctcactcgcaggcacgcgatgggggtgtggctcatttctttggtgctccgctgcgcatacccstaggggagcatgcagacgggcaagtcctgagcatcgccgaccccacagcaccttcgagggttgagtgtttacaagcccccgaaaccccggtgggcgtgtg

SEQ ID NO: 240731 - DNA, 201 bp, Homo sapiens
ttatcattacatcttctttacctctccctttcatgttccctctgattttctcacactagggaaaatggaattacgtagaaggaaattgcgaatgttcagtrttatcaaaactgccacctaaatactaaatatagacattaacaggtcagagtagaagaaaaggataatatttacacgacaatatgtaagatgtattttata

SEQ ID NO: 240732 - DNA, 201 bp, Homo sapiens
gaacagcatgggggaaactgcccccatggtccaattacctctacctggtcccacccttgatttgtggggataattacaatcaaggtgagagttgggtaggkatacagagctaaaccatatcataggtatacatatacatacatacatttacatcctcttccttatcattacatcttctttacctctccctttcatgttccc

SEQ ID NO: 240733 - DNA, 201 bp, Homo sapiens
gcacgatgatctatgcccagggatgttagggcagctcagactgctgattcagaccagtagtgctctgaatgcctggagttttgcctgggggtgaaatgaaragagccctactgcaccacaatctcaggggaactggctggggcacccagcaatacacacacacagacctgttctgtattgccgagctggccctggctgtag

SEQ ID NO: 240734 - DNA, 201 bp, Homo sapiens
agattttatttctccttcacttatgaagcttaatctagtgagatataaaattcttagttgaaatttttttttctttaaaaatgcggaaaatatgtccccartctttcctgacttgtaaggtttctgctgagagtctactgttagcctgatggagttccctttgtatgtgatctgacatttttctctagctgcttttaaggc

SEQ ID NO: 240735 - DNA, 201 bp, Homo sapiens
ccacaagcggcttctgctgtgggcacctgcatctggatgaagggaatgcagtggcaccctgaagctttgagacaccagaaaccgcaaagccccaaagaagktgtcacagccctgtcttggggagcccctaggtctgggctccctgaagagccacagctcttctctccttattcccccaaggtggtgagcaggggatgggga

SEQ ID NO: 240736 - DNA, 201 bp, Homo sapiens
ctattgctttttgactttcttatcatagccagtctgactggtataagatggtatctcattttggttttgatttgcatttctctgatgattactgatgctgracattttttcatatgtctgttggccacttgtgtgccttcttttgagaaatgtctgttcatgtcttttgaccgtttttaattatgggcatttggtttttat

SEQ ID NO: 240737 - DNA, 201 bp, Homo sapiens
ccagctggatttttaaatttttttaatttttaattttgtggatatattataattgtacatatttatgcagtacatgtgatattttgatacaacctattgtmtgtttagttccagatattcatagtgctggagtagggctgagaagcaaatttgtgattataaaggtcattttgaagggtcatcctgaagggaactctggtt

SEQ ID NO: 240738 - DNA, 201 bp, Homo sapiens
ggctatgtcatgatttattaataccttattggtaagtgtttgttctagtttttttgccattacaataatatagtcttatgtacaagtgtcagtatttttcyatggcagattacaagaagtagagcttaaggttgaagaacagaaaaaaaaagttgattgatcctgccagttgaaattgatacaatgaaattatcagtatat

SEQ ID NO: 240739 - DNA, 201 bp, Homo sapiens
agcagcccctcccatcacggacctggaggcccaggagaaaaaagtggttttgtgggctgggcccagggtccctgtgctgtatgcagcctagggacttggtrccctgtgtcccagctgtgccagctgtggctgaaaggggccaatgtagagcttgggctatggcttcagagagtggaagccccaagccttggcatcttccat

SEQ ID NO: 240740 - DNA, 201 bp, Homo sapiens
tccatggcagattacaagaagtagagcttaaggttgaagaacagaaaaaaaaagttgattgatcctgccagttgaaattgatacaatgaaattatcagtayattaactatattcccatgaagagtttaggaaagtaccaattgcctgcatcaccaccaacacagtttattattttttaaactttgccaaaataattgataa

SEQ ID NO: 240741 - DNA, 201 bp, Homo sapiens
cgcccaggagcctatctgcctcatgccaccatccatgatgtccaggctgctcatgccaaggggcacctgcaggccagtgccaagctgccctcagccctccytcagattccccctgtatgcttgtcagtgcccaaagtctagagggggccaaggtggcagggggctgttatgttagcactgccctgaatgtgcacacacctg

SEQ ID NO: 240742 - DNA, 201 bp, Homo sapiens
aactatataaaaacattccccttctgatattttcacttttaattgaaattgagtctagggaaggaaggatgacctaaatttagctatgtgttcacctaatyctgaggtttttctctccattcctttactaaaatagagtagacagaaacaagggagaaagttatactcttggtctttcattgtatcttctgtccctaaact

SEQ ID NO: 240743 - DNA, 201 bp, Homo sapiens
ggaaagtaccaattgcctgcatcaccaccaacacagtttattattttttaaactttgccaaaataattgataaattatatttcattttcatttaaatttgygtttctgaactattaatgaagttaagcatttttcatatttgtaaaagccatttgcattttgttcctgtttatttctggtattctatttttgcatgagact

SEQ ID NO: 240744 - DNA, 201 bp, Homo sapiens
tgctctggggctgttattagctccttaggtgtgtgtgcctctggcaactgatgaagcaggacaattcctgaatatgtttgtgcactgggactgggggccartgccaggccaggcaggcctgttctcaggcgcccagtgctgtgcatgagtgcagactgtcataagcacagtggaccaacacccatgccccaggcagtgtgt

SEQ ID NO: 240745 - DNA, 201 bp, Homo sapiens
actttgccaaaataattgataaattatatttcattttcatttaaatttgcgtttctgaactattaatgaagttaagcatttttcatatttgtaaaagccakttgcattttgttcctgtttatttctggtattctatttttgcatgagactgcttttcttatgcatactatcaaatgtattatataaaacatggtttaatat

SEQ ID NO: 240746 - DNA, 201 bp, Homo sapiens
gaaagtcattgaaagccagtattcatgggaggaatgaaggatgatacagtgccatgagaaataatgtaattagtgttaaataaatagtacagtgaactgcrgaagaaacaagatctatgttcattgataaataaccacatctcatagggtctcaggagtcttatatttttagtaaagttgcttatatagacagggagcccc

SEQ ID NO: 240747 - DNA, 201 bp, Homo sapiens
tcacaggatgtttgtctgtagcttcatggcgaggtttatgtaactgcagccctatcacattgtgtctgtctgtaggctggtcatagggtatctgtctgtartccagtcatggagtgtctgtagctgtagccccattacagggtgtctgtaatgagtatcctaggtgctgccaatgccttctttcttctcctgattggtttg

SEQ ID NO: 240748 - DNA, 201 bp, Homo sapiens
tgtgtgtggctattgtgaatggggttgcattcttgatttggctctcatcttgaatgttattggtgtatagaaatgctactaatttttgtacactgattttktatcctccatctttactaaatttgtttatcagttccaggagccttttagaggagtctttgggatttctaggtatagaactatatcatcagtgaagagagg

SEQ ID NO: 240749 - DNA, 201 bp, Homo sapiens
cagtaatttccccggaaattccccggtttctctgattctgttgataagacagaatcacacaactccatctggtcctgcatctgtgtgtcaccatctgcctrtccctgcagtgggaataatattgttctcagcagagttttctgtgctagccctgtagatgtggcaatcaagtcctcaccttggattctgctgcttggtggg

SEQ ID NO: 240750 - DNA, 201 bp, Homo sapiens
agccttgcgttttttttttaatccaacttgaagttctgtgccttttcagtgatggcatttataccatttatatttagtattggtatgagatgtttccataytgattatcaggaagctgttagctggttgctttgtagtttcaaatgtgtggctgctctataatgtcttgggctatgaactaagtgtgtttatgtggcagta

SEQ ID NO: 240751 - DNA, 201 bp, Homo sapiens
atcagagtctggctcaatgtgcctttcggtgtctccttgttatgcaccattaaggccgtctctgaggctgattcaggagtaaggaaggatgttacttgtckgctttcaagaaggtgcagttatgtgttcatttttaggacatttagaattcatgcttcagattattgtagatggcacattgcagaacctgaaactgttcat

SEQ ID NO: 240752 - DNA, 201 bp, Homo sapiens
tttctttttctttttaattcccttttattcccttcttagatggtgtgactatagaggatgttgggcagaatcttttggccttgcttctgtagccctgtgcrcttctgtcaataggttttgtattgggctgtatggtccaacctataagccagtagatgacacttatgggtaagtaacagctgcagccaatgcaggtggaca

SEQ ID NO: 240753 - DNA, 201 bp, Homo sapiens
ggtctattcgtcttctacaatttctgggaacagaaaatttagagtgcatttttcccctaattttctgactgttataaattgaaagcaatataacctaaagmaacacattgaaaatagatataaaaaattggcaggcaatatagtttaacattattgaacactttttaagaaccaggaactaggatgagggcattccatgga

SEQ ID NO: 240754 - DNA, 201 bp, Homo sapiens
cagattaaaaatggaatcctgatcttggtcctcattctgggaaaattcctgaagcttttcctggtgtcttttatccctctcagtatttctaagcctctttycaagttaacttcaggacttggggaaacagtgttctccatcagcctgggttgcttggatccccagtggaaaggtgagtcacagaaggagactctctgcctc

SEQ ID NO: 240755 - DNA, 201 bp, Homo sapiens
tgccaccacgcccagctaacttttgttttgttttttgtatttttagtagaaatggggtttcaccgtgttagccaggatggtctcgatctcctgatctctcratccacctgccttggcctcccaaagtgctgggattacaggcgtgagccaccgtgcccgacagagatctggaaattttcaattaatttgattattgtagat

SEQ ID NO: 240756 - DNA, 201 bp, Homo sapiens
ctcaagttgctcttggctttattgttgtcccttcaccctggactatattgcttgatgcctcctttggttgatgtacttctctcgcctcttgagggatgctwgtttttatccatatttcaaggtctaggaaattggtcctttatttgtttcacagaagaaaggcttctgtttcacagaagagaggcttgggcaccaaatggg

SEQ ID NO: 240757 - DNA, 201 bp, Homo sapiens
ctccccagaatggctggtttgggtcaagttctgtaacagccaccaggccacactgtaactaataaatcccttcagaaattcttagtccaactcaccatgcmtaaggcctttttcctccaaattgcattgtctcccaggaaccctagaatacatcttgttagaatctcttggttcttccttcttctttatgcctaactataa

SEQ ID NO: 240758 - DNA, 201 bp, Homo sapiens
ctactgttttcctcagttttttcaagtctagaaatgagctcatcataggcattcttcattcctcttactgtgatttttatttctagcatttccgttaattatttcttatgatcttcagctctgaagttatccttcttaccctacatgtttccccctgtttctcttaaatctttagttattttaactttaaatttagctaga

SEQ ID NO: 240759 - DNA, 201 bp, Homo sapiens
actactgttttcctcagttttttcaagtctagaaatgagctcatcataggcattcttcattcctcttactgtgatttttatttctagcatttccgttaattatttcttatgatcttcagctctgaagttatccttcttaccctacatgtttccccctgtttctcttaaatctttagttattttaactttaaatttagctag

SEQ ID NO: 240760 - DNA, 201 bp, Homo sapiens
cactactgttttcctcagttttttcaagtctagaaatgagctcatcataggcattcttcattcctcttactgtgatttttatttctagcatttccgttaattatttcttatgatcttcagctctgaagttatccttcttaccctacatgtttccccctgtttctcttaaatctttagttattttaactttaaatttagcta

SEQ ID NO: 240761 - DNA, 201 bp, Homo sapiens
tctcttaagctggtaagagaattcttgtaaggctggtctgctgaaaacaaattcccttagttcttgcaaatctggaaaagattttatttctccttcacttrtgaagcttaatctagtgagatataaaattcttagttgaaatttttttttctttaaaaatgcggaaaatatgtccccaatctttcctgacttgtaaggttt

SEQ ID NO: 240762 - DNA, 201 bp, Homo sapiens
tcactactgttttcctcagttttttcaagtctagaaatgagctcatcataggcattcttcattcctcttactgtgatttttatttctagcatttccgttaattatttcttatgatcttcagctctgaagttatccttcttaccctacatgtttccccctgtttctcttaaatctttagttattttaactttaaatttagct

SEQ ID NO: 240763 - DNA, 201 bp, Homo sapiens
gatataagaatagtgactcctggtatttttcttttcattctttctttttattttctgtttgcatgatggatctttctccagtcctttactttgttcctgtmagtgttgttacatgtaagatgagtctcttaaagatagcaggtgaatgagccttgcgttttttttttaatccaacttgaagttctgtgccttttcagtgat

SEQ ID NO: 240764 - DNA, 201 bp, Homo sapiens
ctttgaaaatcacctaaaaactcttgggtatccaaacagtatccaccaacaaaactaagctaagatgatcttttgtggtagtgtttacacattagaatgartttgaatccccttgaatctttcttagaccagctttattatgacgatactcaccatcactacttcctctggaatgtcttaatgccaggtcttggtatgggt

SEQ ID NO: 240765 - DNA, 201 bp, Homo sapiens
cctccagaagtatgataaataaatttctgttctttataaattatccagtctctgttatagcagcataaaatggactgataatgtctctctctttctctctcatgattcaatatatactgctactcgttctttataagggatgtaaagcattccataataaggctatgtcatgatttattaataccttattggtaagtgttt

SEQ ID NO: 240766 - DNA, 201 bp, Homo sapiens
tttttgtattttagtagaggtagagtttcaacatgttggccaggatagtctcgagctcctgcactcaggcaatccacccatcttggcttcccaaagtgctrggattacaggtgtgagccaccgcacccagccgacaaaccttttaaacatttctaaaatgcaacatttttttctatggctatcataatgctaaggtagcag

SEQ ID NO: 240767 - DNA, 201 bp, Homo sapiens
cacattgttctagacttattccaacaattactgttaaagacttagcaagttctgctacattaactctttgacttggttcacttctgctatgcaatacaccscttatgaactgcttgatagctctggaccaaaggctgtgcctccttgacctgggcttatccttatgttgcacagtgaaagaactgatttgtcttacagtgt

SEQ ID NO: 240768 - DNA, 201 bp, Homo sapiens
gcctccagaagtatgataaataaatttctgttctttataaattatccagtctctgttatagcagcataaaatggactgataatgtctctctctttctctctcatgattcaatatatactgctactcgttctttataagggatgtaaagcattccataataaggctatgtcatgatttattaataccttattggtaagtgtt

SEQ ID NO: 240769 - DNA, 201 bp, Homo sapiens
ttgtctggttttggtatttggataatgctggcctaacaaaatgaaattggaatgtaatacattttcaaaggttgtgtctacatacagctaaataaagtagrgttctgcaagtttagttggcaattttagactgcataattgtggccaaaatttaaaaattaaatattaaggtttctatttcttccattataatatttaata

SEQ ID NO: 240770 - DNA, 201 bp, Homo sapiens
ttctacatccacaatgctgacaggtatcagtcactttttagccatttgaacatgttcaaagagccatttcttggtacagggttatttttttacttgtttgrccatatgtagttttaattttagcagttaattttcacatttttcatccattttttggaatgttaccttttggtcttttattttaaaaaatcataacgacat

SEQ ID NO: 240771 - DNA, 201 bp, Homo sapiens
tttatatggccaacaaacatatgaaagaaaagctcatcatcactggtcattaggagcaatgcaaatcaaaaccacaatgatataccatctcacaccagttrgaatggaggtcattaaaaagtcaggaaacaacagatgctggagaggatgtgcagaaataggaaagcttttacactgtgggtgggagtgtaaattattagt

SEQ ID NO: 240772 - DNA, 201 bp, Homo sapiens
gttgtcttatttgagttttaagagatttgtttctgtgatttctcctagaagttttatagctttaggttttacatttagatctgtgatgcattttggttttkgtctttttttttttttttttttttttgagacggagtcttgcgttttcacccaggctggagtgcagtggcactatcttggctcactgcaaactctgcctcc

SEQ ID NO: 240773 - DNA, 201 bp, Homo sapiens
tatccaactgacaaagggatagtatccagaagacaaagaacttaaacaaatttacaagaaaaaaaaaacaaccctatcaaaaagtgggtaaaggatatgarcagacacttctcaaaagaagacatttatatggccaacaaacatatgaaagaaaagctcatcatcactggtcattaggagcaatgcaaatcaaaaccacaa

SEQ ID NO: 240774 - DNA, 201 bp, Homo sapiens
atttatttaactactgtatcttgttgcagtatttgtgctttttaagattttgcacaaatattgcaacaagattcagtaaaaataaattagtaaaagtcttraagcaaagactttttgctttgcttcagattttttgtgatggtaaacgttattttgaagggtcattctgaagggaacatgatactcatggtgaagataggc

SEQ ID NO: 240775 - DNA, 201 bp, Homo sapiens
ctctgccggtaccaattctctgtattagttcgttttcacactgctattaagatactacctgagactgggtaatttataaacaaaaggagtttaattgactcacacttcttcatggctcagggggcctgaggaaacttaaaatcatggttgaaggtgaaggagaaacaagtactttctttacaaggtggcaggaaagagaga

SEQ ID NO: 240776 - DNA, 201 bp, Homo sapiens
tccaactcaccatgcctaaggcctttttcctccaaattgcattgtctcccaggaaccctagaatacatcttgttagaatctcttggttcttccttcttctttatgcctaactataagcacaaatgttttgagttatttatcaagaggattctatcccctttgcaaattaatggatgcaaataggaatggaatttgaaggag

SEQ ID NO: 240777 - DNA, 201 bp, Homo sapiens
gtcaaaaccattcaacaagtctctaggaaaatccaaactttcccacattttcctgtctacttctgagccctccaatctgtttcaacctctgcttgttaccrtttccaaagttgcttccacattttcaggttatctttgtaatagtaccctactctgccggtaccaattctctgtattagttcgttttcacactgctattaa

SEQ ID NO: 240778 - DNA, 201 bp, Homo sapiens
ttcaagaaaagggttattataagagaaaggggacattttctacttataaatcatcagtttattaagaagacacaacaacctttttttgttcatgcagactrttagaacaaaatctaatagacatggtggcttatttatttctcacctttctggaggctgagaagttatccatgatcactggtagatttggtgcctggcaag

SEQ ID NO: 240779 - DNA, 201 bp, Homo sapiens
ttctacagctggcttgaatttctttccagaaaatgggtttttcttttctaccttgtggtcaggctgccaatttttaaaacttttcatgttctacttttttwaaaaaaataaaagtttcactttcagataatctctttaggaatgcatatgactaaacactttcagaatcagccaggtaacctcttgaatgctttgctgctt

SEQ ID NO: 240780 - DNA, 201 bp, Homo sapiens
gatcctgctggagccctatgtacaggtaaatgacaagtgcggtgagaatgtggctagaattgtctagaaacttttgtgctcagagtggtcaggggcagccrggacaaaaatctgttcaagattcaaattcaaagtttcttcttagcaactaaaacagcaaagttaaggattcctgctttaccttgtttctctcttcttgtt

SEQ ID NO: 240781 - DNA, 201 bp, Homo sapiens
tcctaggtctctggacctgtgatgggagggactgccttgaagatctctgacatgccatgaagacattatctccattgtcttggcaatttaacatttggctytttgttacttatgcaaatttctacagctggcttgaatttctttccagaaaatgggtttttcttttctaccttgtggtcaggctgccaatttttaaaactt

SEQ ID NO: 240782 - DNA, 201 bp, Homo sapiens
agttatgttccaaaataaatttagactaatattaccagcgaatatgagaacttgatattgggcatcaaataaaaaaaattattactttatagggacacagcaattctccacaccaatcggaatggctgttattaaaatgtcaaaaaataacagatgctggctaggttgcagagaaaaagggatgcttatacactgttggga

SEQ ID NO: 240783 - DNA, 201 bp, Homo sapiens
gaaattataggatatatgtacacagatggaaaatgacaaaagtaattaaaaaatcaaaattgtattatttaaagtggtgagatcatagattttttttctawttagtatttttaacattactttacatcagaacaagctttaccactttgaaaatgtaattaaagatactggctgtctatataaaagatcagggacctatct

SEQ ID NO: 240784 - DNA, 201 bp, Homo sapiens
aggatcacatgatttatatttaatttcaaatacttggtgctttgaaatcttttaaaattaatcttaaagcacacatataaaaatagaatggaagagagtayattccatctcctttgaggaaaaagaattcctaacaaagcaatcagactctaggatgccatcagcacacctttgaaaagtgaaagcagacagtattaaact

SEQ ID NO: 240785 - DNA, 201 bp, Homo sapiens
ttgcatttctctgatgattactgatgctggacattttttcatatgtctgttggccacttgtgtgccttcttttgagaaatgtctgttcatgtcttttgacygtttttaattatgggcatttggtttttatttgttcaattgtttaatatccttataggctctggatattatacccttgttgatacatagtttgtgaatatt

SEQ ID NO: 240786 - DNA, 201 bp, Homo sapiens
gggttggttccaagtctttgctattgtgaatagtgcttcaataaacatacgtgtgcatgtgtctttatagtagaatgatttgtaatcctttgggtatataygcagtaatgggattgctgggtcaaatggtatttctggttctagatccttaaggagtcgccacactgtcttccacaatagttgaactaatttatactcccg

SEQ ID NO: 240787 - DNA, 201 bp, Homo sapiens
ggctcgtgcacggtgcgcgcacccactgacctgcgcccactgtctggcactccctagtgagatgaacccggtacctcagatggaaatgcagaaatcacccrtcttctgcgtggctcacactgggagctgtagacctgagctgttcctattcagccatcttggctcctctctaacaggtactcttaaatgcaggtttctgac

SEQ ID NO: 240788 - DNA, 201 bp, Homo sapiens
agaacttaaaaaataaattaaaaatgttctcttggagctagggcccaggatggggttgtcaggattctgccttttgccttattttactgtggctgagctgrtatccaagttggaagacaaagtcattttttactgtcccttctcttcttctgaaacagaggaaaggagtccctcccagagctgcaagctgtgctgtttgag

SEQ ID NO: 240789 - DNA, 201 bp, Homo sapiens
tctgtctgtaggctggtcatagggtatctgtctgtagtccagtcatggagtgtctgtagctgtagccccattacagggtgtctgtaatgagtatcctaggkgctgccaatgccttctttcttctcctgattggtttgggtccttaggggatcttgggttttctgtagccccatggtggggtgtctgtcttagttcagatcc

SEQ ID NO: 240790 - DNA, 201 bp, Homo sapiens
tataatttttaaaagcactagccaatgcaattaaacaagaagaaaaataggtatgaataccagaaaaggtaaaattatcatcagtattaagtgatatgttyaattattagccagtgtaattagtcaagaaaaacatgaaagctagaaaaaaggagtgaaacttaacattattattaaacgttatgattatacctatgaaac

SEQ ID NO: 240791 - DNA, 201 bp, Homo sapiens
catcagtattaagtgatatgtttaattattagccagtgtaattagtcaagaaaaacatgaaagctagaaaaaaggagtgaaacttaacattattattaaaygttatgattatacctatgaaacacaagagaataaattcaagaattgttgcaaatggtaggatgtttatgtggcaattaaaaattatgggaatatagaata

SEQ ID NO: 240792 - DNA, 201 bp, Homo sapiens
tcgtgttataatgattgggtatgtcaactaaattgtatatcattacaccaaatggaatcacatgcaaatgacacttatgtgtaaagagtgaaagaaagtcwtgaaaataaatgtttatgtgaatttataaataatcttgagtgggaaaagtctttctatgaatgaaccagtatccagaatttacaaataaagactgataaa

SEQ ID NO: 240793 - DNA, 201 bp, Homo sapiens
tttgcatttctctgatgattactgatgctggacattttttcatatgtctgttggccacttgtgtgccttcttttgagaaatgtctgttcatgtcttttgaycgtttttaattatgggcatttggtttttatttgttcaattgtttaatatccttataggctctggatattatacccttgttgatacatagtttgtgaatat

SEQ ID NO: 240794 - DNA, 201 bp, Homo sapiens
caactaaattgtatatcattacaccaaatggaatcacatgcaaatgacacttatgtgtaaagagtgaaagaaagtcatgaaaataaatgtttatgtgaatwtataaataatcttgagtgggaaaagtctttctatgaatgaaccagtatccagaatttacaaataaagactgataaaatttgttttaaaatgatttaaagc

SEQ ID NO: 240795 - DNA, 201 bp, Homo sapiens
gtcttctgcgtggctcacactgggagctgtagacctgagctgttcctattcagccatcttggctcctctctaacaggtactcttaaatgcaggtttctgaytgataattctggagattgtgacattagaatagagaaacattttcaaatagaagactgaaataatcttttctgacttttcccttaaaagtttgctgatcct

SEQ ID NO: 240796 - DNA, 201 bp, Homo sapiens
agaaaatttccttattaaaaagcactcacaaattaaaaagaaaatgagccaatggtagttcgcagaaaaagattaatgaaggccaataaaatattttcaayttcacaaataatgaggtgagattctgaaacagaagttccctaatctcactcgcaggcacgcgatgggggtgtggctcatttctttggtgctccgctgcgc

SEQ ID NO: 240797 - DNA, 201 bp, Homo sapiens
acttcacaaataatgaggtgagattctgaaacagaagttccctaatctcactcgcaggcacgcgatgggggtgtggctcatttctttggtgctccgctgckcatacccctaggggagcatgcagacgggcaagtcctgagcatcgccgaccccacagcaccttcgagggttgagtgtttacaagcccccgaaaccccggtg

SEQ ID NO: 240798 - DNA, 201 bp, Homo sapiens
ggcccttcttatttcatggctaaagggcttttatcacaatcacatatttaaagtgggcattgtaataaccagctggatttttaaatttttttaatttttarttttgtggatatattataattgtacatatttatgcagtacatgtgatattttgatacaacctattgtatgtttagttccagatattcatagtgctggagt

SEQ ID NO: 240799 - DNA, 201 bp, Homo sapiens
gcaagtcctgagcatcgccgaccccacagcaccttcgagggttgagtgtttacaagcccccgaaaccccggtgggcgtgtgttaccatgccactctcagtkttgccctctgcaggccgcttgtgttagtcagctcagttagaccctctctgccttgtcgcaaggacagagggctttctgtatcctgggttctttatgtagt

SEQ ID NO: 240800 - DNA, 201 bp, Homo sapiens
agcaccttcgagggttgagtgtttacaagcccccgaaaccccggtgggcgtgtgttaccatgccactctcagtgttgccctctgcaggccgcttgtgttartcagctcagttagaccctctctgccttgtcgcaaggacagagggctttctgtatcctgggttctttatgtagtgtccagaaaaattggatcacacgtggg

SEQ ID NO: 240801 - DNA, 201 bp, Homo sapiens
tacccactctctataaaatcaagtgctgtgaaaaacagattgcatgccattgatacatggaagcatgttgtcacaagcaattacagcatgctacattaaayaaccatgtgctgtgttatgtcttaggccacacgctgcaatgttctcttttaatagttataatgaagttggtttcatttttcaagtaactgggacttaaac

SEQ ID NO: 240802 - DNA, 201 bp, Homo sapiens
ctttctggggcatagttggtaaaacccatcacagttaaaaatgacgtgtctgagcccttctacttctagaatggatcctagagatagagcctcacgcatgkgcaaagatttgcttgttgcagtaatgtttgtaataagtcaaaatagtttaaaaatgatggaaactgaattatagagtagtacacagatattataaagaat

SEQ ID NO: 240803 - DNA, 201 bp, Homo sapiens
ctaacataaaatcgaaggtgagaggatttaaaatgagatctatttgtctaactgcaaaatccatattgctcccttataaaatgtgaacaacttacttgatsgtggatgaaactgagagggccaagtggcctttccaaggacacaaaagaaggggatgcgggttcagaattaagaatgaatcttctgatgctttctctagta

SEQ ID NO: 240804 - DNA, 201 bp, Homo sapiens
gtatctcagaggttacatctcaagtaacttcagggacagacagatgaatgcagtgggaaggagccaaactgcaggccagtgtaaacatttctggggtccarcttagcaccatgacatgccacgtgggacctctccacaaaaagaaatggtaaaatagtacctaagaatcctattttcacatgttttcttatattgagaggc

SEQ ID NO: 240805 - DNA, 201 bp, Homo sapiens
agcaacattccagtttgtttatccattttccagttgtttcaggttttaatgattatgagtaaaagctgctataaacatttctatacaggtttttgtgagawcataagtttttgtttctcatgagtaaatacctatgagtaggattgctgggtcataagtagtatatggttattgtataacaagccaccaaacagtctccca

SEQ ID NO: 240806 - DNA, 201 bp, Homo sapiens
tagaggttgcatattttttcctctcttttttgtgcatatgaatagccaattgtttcagcaacatttgttgaagagactatctttttccattgaattatctytgtaccttgtaccaaagttcattgtttttatatacatgtgtatatttctggagtctcttttgtttcattgatctgtttgtctatttttatttgttgtatt

SEQ ID NO: 240807 - DNA, 201 bp, Homo sapiens
gtccaactcaccatgcctaaggcctttttcctccaaattgcattgtctcccaggaaccctagaatacatcttgttagaatctcttggttcttccttcttctttatgcctaactataagcacaaatgttttgagttatttatcaagaggattctatcccctttgcaaattaatggatgcaaataggaatggaatttgaagga

SEQ ID NO: 240808 - DNA, 201 bp, Homo sapiens
tataccctttcatgtcaatgaaaatagaacaagccactattaatattccacaggatggcccctctctccacccatttcttttttttttttttttttttttkagacggagtttcgctctgtcgcccaggccggactgcggactgcagtggcgcaatctcggctcactgcaagctccgcttcccgggttcacgccattctcct

SEQ ID NO: 240809 - DNA, 201 bp, Homo sapiens
attccttgtttgttgagtgtatttatcatgaagtgatgttgaattttatcagatgctttttcttcacctattaagatgatggtttttgtcctctattatgygctgcatggtgttttattaatttgcatatgtaggttgagctatcataatattcctgggataaattctacttaatcatgttgtattatgtctttgatgtac

SEQ ID NO: 240810 - DNA, 201 bp, Homo sapiens
ctcctaggtctctggacctgtgatgggagggactgccttgaagatctctgacatgccatgaagacattatctccattgtcttggcaatttaacatttggckctttgttacttatgcaaatttctacagctggcttgaatttctttccagaaaatgggtttttcttttctaccttgtggtcaggctgccaatttttaaaact

SEQ ID NO: 240811 - DNA, 201 bp, Homo sapiens
aaggcttctagctttttcccattcagtatgatgttagctgtatgtttgtcttatatggcctttattatgctaaactatcttccttctattccttgtttgttgagtgtatttatcatgaagtgatgttgaattttatcagatgctttttcttcacctattaagatgatggtttttgtcctctattatgcgctgcatggtgtt

SEQ ID NO: 240812 - DNA, 201 bp, Homo sapiens
tcactttttagccatttgaacatgttcaaagagccatttcttggtacagggttatttttttacttgtttgaccatatgtagttttaattttagcagttaaktttcacatttttcatccattttttggaatgttaccttttggtcttttattttaaaaaatcataacgacattttaatcctttgcttttaaaatgaggaaca

SEQ ID NO: 240813 - DNA, 201 bp, Homo sapiens
atggaatcatttattcctcctaggtctctggacctgtgatgggagggactgccttgaagatctctgacatgccatgaagacattatctccattgtcttggmaatttaacatttggctctttgttacttatgcaaatttctacagctggcttgaatttctttccagaaaatgggtttttcttttctaccttgtggtcaggct

SEQ ID NO: 240814 - DNA, 201 bp, Homo sapiens
ttttctaattataagattatgtcatccacaaagaaggacaattttatttcttcctttctaatttggatgctctttatttcattctcttgccagattactckggctaagacttccagtactgtattgactaggaatagtgaaaatgggcatccttgtctagttccagttcttacaggaaaggcttctagctttttcccattc

SEQ ID NO: 240815 - DNA, 201 bp, Homo sapiens
tagtgacttagagtatgctgaggtgacatcaacccacagaaacacaaattagagccaatgaatcaattacagctgagagaggctggggcctctctcaagtygattgaaagttgtggcctttgaaaggacagtgaggccagaagaagaggcatttgcaaagcagagaaacatttaaaaacatttaatctaaaacataaaatg

SEQ ID NO: 240816 - DNA, 201 bp, Homo sapiens
atcattcccttccaacagtccccaaaagtcttaactcattccagcattacccaaaaatccaagtccaaagtgtcatctgagacaaagcaagttccttttgsttataagccagtaaaatcaaaagcaaattagttacttcctagatacaatggtggggggtggcacaggcattgagtaaatacacctcttccaaatgggaga

SEQ ID NO: 240817 - DNA, 201 bp, Homo sapiens
ctggattgtatggtggttctatttttagttttttgagaaatctccatacagtgattcataatggctgtactaatttacatttccaccaacactgaataggrgttctgatacttacacatctttgctagcatctgttacttttgatctttttgataatagcttttgtaactgggatgagataatatctcactgtggttttga

SEQ ID NO: 240818 - DNA, 201 bp, Homo sapiens
caggcttgatgctatgacctggtggtggctccacctgtcttgaccccaggtgacagcactgcctatggcctctgaaatccaggaggtgagggtgctatgcmctgggcctgtaccctccgagtccatggtgacagcattagcctgctggcctctgacccaccctggggggtcattcttcccgttttctgaaatataatacat

SEQ ID NO: 240819 - DNA, 201 bp, Homo sapiens
aatcattcccttccaacagtccccaaaagtcttaactcattccagcattacccaaaaatccaagtccaaagtgtcatctgagacaaagcaagttccttttrcttataagccagtaaaatcaaaagcaaattagttacttcctagatacaatggtggggggtggcacaggcattgagtaaatacacctcttccaaatgggag

SEQ ID NO: 240820 - DNA, 201 bp, Homo sapiens
tgctggattgtatggtggttctatttttagttttttgagaaatctccatacagtgattcataatggctgtactaatttacatttccaccaacactgaatargagttctgatacttacacatctttgctagcatctgttacttttgatctttttgataatagcttttgtaactgggatgagataatatctcactgtggtttt

SEQ ID NO: 240821 - DNA, 201 bp, Homo sapiens
gggtttttcttttgtattgcatcatcaggctgcaaattttccaagcttttagacttgcctctttttaaaacaagagttccaacttcagataacctctcackagaacagcatgtgggaaaacaccccaatgatttaattatctccacctggtcccatccttgacatgtggggattattacaattcaaggtgagatttgggta

SEQ ID NO: 240822 - DNA, 201 bp, Homo sapiens
tattctttattagtctacctagtggtccatcttattatttctttctcaaaaaaccagctcctgagtttgtggattcttttttaagggttttcatgtctctrtctccttcagttcagctctgattttagttatgtcttgtcctctactagctttggggcttgtttcctcttggctctgttgttcttttagttgtgatgttag

SEQ ID NO: 240823 - DNA, 201 bp, Homo sapiens
tgggtttttcttttgtattgcatcatcaggctgcaaattttccaagcttttagacttgcctctttttaaaacaagagttccaacttcagataacctctcasgagaacagcatgtgggaaaacaccccaatgatttaattatctccacctggtcccatccttgacatgtggggattattacaattcaaggtgagatttgggt

SEQ ID NO: 240824 - DNA, 201 bp, Homo sapiens
ataacctcaccagcatctgttgttctttgacttcttaataatagccattctgactggcatgagatggtatctcattgtggttttgatttgcatttctctartgatccataatgttaaacttttttgtcatatgtttgttaaccacgtgtacgtcttcttttgagaagtgtctgttaatgctctttgcctcctttttaatgg

SEQ ID NO: 240825 - DNA, 201 bp, Homo sapiens
ctctgtaaggtacagcccctgaagctgctttcacaggctggtgggtgttgactgactgtggcttttccaggggactctggaaaagagcagggactctgtgkgggggctccaccccacattttctctctgcattgccctagtagaggttttctataagggcttgacccctgcagcagacttctgcctggacatacaggtgtt

SEQ ID NO: 240826 - DNA, 201 bp, Homo sapiens
caccattctcctgcctcagcctcccaagtagctgggactacaggtgtccaccatcatacccggctaatttttttgtatttttagtggagacggggtttcaycgtgttagccaggatggtctctgtctcctgaccttgtgatccgcctgcctcagcctcccaaagtgctgggattacaggcgtgagccacagtgcccggctg

SEQ ID NO: 240827 - DNA, 201 bp, Homo sapiens
caaggtggcaggagagagagagagagctcgagtgcagggggaaaagtgccaattttaagccatcagatctcatgagaactcactcactatcatgagaacarcatggggaaaactgcccccatgatccaatcacattgaactaggtccctcccttgacacgtggggattatggggattacaatttgagatgagatttgggtg

SEQ ID NO: 240828 - DNA, 201 bp, Homo sapiens
cattttggtgttcctgtgcagaagattattactagaggcttctattcagctattttgctctacctcctcttccagaacaaggtttcttgagatggaatctrtttctgatgaagatgctatgagtattgttgaaatgacaacaaaggatctagaatattacataaacttagttgataaaatggcagcaatatttgagaggag

SEQ ID NO: 240829 - DNA, 201 bp, Homo sapiens
tgaagccaacttgactgtggtggataagctttttgatgcattactgggttcagtttgtgagtattttgttgaagagttttgcatcagtgttcatcaaggayattggcctgaagttttctgtttctgtgtgtctgcaaggtttttgtatcaggatgatgctggcctcatagaatgtgttagggaggagtccctcctcaattc

SEQ ID NO: 240830 - DNA, 201 bp, Homo sapiens
gcctcccgagtagctgggactacaggcacctgccaccacgcccagctaacttttgttttgttttttgtatttttagtagaaatggggtttcaccgtgttarccaggatggtctcgatctcctgatctctcaatccacctgccttggcctcccaaagtgctgggattacaggcgtgagccaccgtgcccgacagagatctgg

SEQ ID NO: 240831 - DNA, 201 bp, Homo sapiens
ttagtaattagaagttcataatggagagagaaaacagcagatttcttatactgtttccagtatgtgattcatacatgacaggtcacctgttaaaagctaartgaaattgccattatactcaagtggcaggatatattcctgactgacgcagaatgaaagggtgtgatttaaagggccagatagaaactgtgtttctagtag

SEQ ID NO: 240832 - DNA, 201 bp, Homo sapiens
actaatagatcacctacttccagttgttttcaatctcttaactgacttccacatcttgttgccttcagggcaattcattttgtagaagtagggttcttctrcaaaatgatgaagactgtctcacaaatgtggcctacctttctttacacagactgtgggtgctacactgtggtcagttaggcttagcatattatgctcttc

SEQ ID NO: 240833 - DNA, 201 bp, Homo sapiens
gctgaaaccagcatatcctgaacttgtctttcttcaggagtaatctgccaatgatgccttgaagcccaaacatctggagtacctaaaaaaaaaaaaaaaaagaatcctgtgctccacctcagatcctctgggtatggaatttggaattctgtattttaagtaagttccccagggaattcttttgcgcactaaagtttgaga

SEQ ID NO: 240834 - DNA, 201 bp, Homo sapiens
acttccagttgttttcaatctcttaactgacttccacatcttgttgccttcagggcaattcattttgtagaagtagggttcttctacaaaatgatgaagaytgtctcacaaatgtggcctacctttctttacacagactgtgggtgctacactgtggtcagttaggcttagcatattatgctcttctttctattatttctc

SEQ ID NO: 240835 - DNA, 201 bp, Homo sapiens
tcatattgagggatcagtaactgacaaagattaacatgttactttttttctgtttgtgtgtgtgtgtggtgtgtgtgtgtgtctgtgtgtgtgtgtgtgtkagacagggttttactctgtatctaggctgaagtgcaatggtgcaatcacggctcactgcagtcttgacttccacagctcaagtgatcttccatctcccag

SEQ ID NO: 240836 - DNA, 201 bp, Homo sapiens
tgcctgggggtgaaatgaagagagccctactgcaccacaatctcaggggaactggctggggcacccagcaatacacacacacagacctgttctgtattgcygagctggccctggctgtagctcttgttgctcaggagaaaccgcagatctcttcctgctacaggcctgcaatttgggaaagcacaatttcagtacctactg

SEQ ID NO: 240837 - DNA, 201 bp, Homo sapiens
tttgtctagccagttcactatgaatagtagcaatactttccccaaaaggagatgtatgaaacaagaagcattttgaaaaaggaaatgccctatccacaggsccacttcataacaaaactatctttgattttctacaggcgtttctggtgcttggttacacttctatccatgtttcaaatgattgtaatcataattcataca

SEQ ID NO: 240838 - DNA, 201 bp, Homo sapiens
ctttatttcctgtacttattatcaaaaccaaccccatttttatagggttgctttccggatccagtggtagggagaataatggatctgcaaagttgtcatcyctgaaacccgtaaataggttacttcatatggcaaagtgcactttgcagacctgagtaaggacctcaagattgagagcttaccttgtaataatacaagccc

SEQ ID NO: 240839 - DNA, 201 bp, Homo sapiens
acaatgatacagacaaatcagtgccacagttgcaccaatctttattagctttcaaatccaatctagacttgcaattatttcattccatctctaagttcttkgtattgaggcagaaaaatgaaaacaaactctttgaacaatgctagatctttctggagaagagatgttaagaatgtagatacgaggcagggcacagtggct

SEQ ID NO: 240840 - DNA, 201 bp, Homo sapiens
cttctgacctccagaattgtaagacaagaaatttgtgttttaagctgttaaatttgtgctaattcatcattgtagcaataggaaaccagtatggatatccrtgttgaaacatagtagagttaatcatattgagggatcagtaactgacaaagattaacatgttactttttttctgtttgtgtgtgtgtgtggtgtgtgtgt

SEQ ID NO: 240841 - DNA, 201 bp, Homo sapiens
ttcctcagttttttcaagtctagaaatgagctcatcataggcattcttcattcctcttactgtgatttttatttctagcatttccgttaattatttcttaygatcttcagctctgaagttatccttcttaccctacatgtttccccctgtttctcttaaatctttagttattttaactttaaatttagctagatatatttc

SEQ ID NO: 240842 - DNA, 201 bp, Homo sapiens
ctaattcatcattgtagcaataggaaaccagtatggatatccgtgttgaaacatagtagagttaatcatattgagggatcagtaactgacaaagattaacrtgttactttttttctgtttgtgtgtgtgtgtggtgtgtgtgtgtgtctgtgtgtgtgtgtgtgtgagacagggttttactctgtatctaggctgaagtgc

SEQ ID NO: 240843 - DNA, 201 bp, Homo sapiens
agcatgtatttctgcccttcctcttagtcgttaagaggtttttcctatttttttctccagacagaattagtttttaccagtgccctaagagccacagtatktgtccttccttcccatcccaaggctatggttccttctgggtgatagggaagaaggatatctgtgctcttcccacagtggctcatgtacccctcttccagg

SEQ ID NO: 240844 - DNA, 201 bp, Homo sapiens
ttgtttttctccttccccaggggatccacacttttctctagcccacattgacttttatcaatttgttaacaattaaagctgaattcacttagtcttcctcyggcagcatctgcccttggtaagaaagtggtcatgttttgtctttttctccttagattttggactagttggttgacttgtgaccctagttctctgattggt

SEQ ID NO: 240845 - DNA, 201 bp, Homo sapiens
tcaaggattttagaattgcctcttctgcactgcaggtgatttaagtgctgagctaaataagtaccaattttccaattttataccacttcagactgtgttgmtatttggcatctgaagaccaagttatccactcatttttatagtgtacaatttagtatctactataggtaagatgcagtttagaactggtaaaaatttatg

SEQ ID NO: 240846 - DNA, 201 bp, Homo sapiens
gttgaataatgctgtaataagcatgagaatgcagatatgtcttggacatactgatttcagatcctttggatatatatccagtaatgggattggtgggttgygtagttctagttttaatgttttgaagaacttccaacctgttttccacaatggctgtgctaatttacattcccatcagcagtgtacaagggttcccttttc

SEQ ID NO: 240847 - DNA, 201 bp, Homo sapiens
ctgaacctttttagctgatgtagaaagctccagataacaaattggttttaagacatatcagtgtgggaaatttcatccttttctgcttcagagtgctcaargctgagttattgctgaatctgggagaaaaatgtagaatgtcgtatcttctttacataagagtaaaaatatttagtgcaattgttaaggtgctgctctaaa

SEQ ID NO: 240848 - DNA, 201 bp, Homo sapiens
ttaaggtgctgctctaaaatgtacatgccttgagcctggtctctgttctaacactagttttatgtaaaaacttgggaaagtcacttactccccttcatccycgcttttcttgactctgagataaaagtaataatattggctctttcagcttttgatgatcaaactatcaagttaggtcctaggctacatattaacaaagct

SEQ ID NO: 240849 - DNA, 201 bp, Homo sapiens
taaaagctgaaacagaaaagacattgtcagtatggcttaaaaaacacccaaatctgcttgaacccgggaggcggaggttgctgtgagccgagattgcgccwctgcactccagtctgggcgacagggagagactctgtctcaaaatacatacatgcatacgtacacacccaaatcgatgttgtcagtatggtttaaagaaac

SEQ ID NO: 240850 - DNA, 201 bp, Homo sapiens
tagttggagacttcagcacacttctatcagtaattgctggatcaagcaggcagaaaacaaggatatagatgacctgaacaatagctatcaatcaaattgayctaattaatagtatcgaattttctgcctggcaatagcagaatattaatttttctcaggctctcatagaatattctccaagacacaataaattctgtgcta

SEQ ID NO: 240851 - DNA, 201 bp, Homo sapiens
gatcacatcatgtgatgggaaacaatgtcaaaatgttgggctaattcaagtggggatgttttgggaaagacatcaacagaatgagaatgaaatttgccagrgggaatgaagaagatctgagtgggtcactaaaattataattctcaaatctgtcatagcattgactcagtgattatatagtattctctaggacctccaggt

SEQ ID NO: 240852 - DNA, 201 bp, Homo sapiens
atttcttcaatcccacttaaatacagtaactaatctgcatcgcaaagccttctacttctcttatattttagtatacgcttggctgcattttagatgacatrctcatattctaatttttctaggaattcagtaggatttaaaggctatgatgaaagatagtcttggctttgtgaggatatcagctaaaacaaggtaataaaa

SEQ ID NO: 240853 - DNA, 201 bp, Homo sapiens
taattatattatatattaaatttatataattctatttatgtaaatatatttatataattatattacataaatataattatattgataaatagaaatataartttatatacatatttatatgtatataatacaaatataaatttatatttatattatataaatatacttacataattatatttatataatataacataattt

SEQ ID NO: 240854 - DNA, 201 bp, Homo sapiens
gaggtgagggtgctatgccctgggcctgtaccctccgagtccatggtgacagcattagcctgctggcctctgacccaccctggggggtcattcttcccgtyttctgaaatataatacatatttgcatccaaatagttcgattggtttattttcttcctgtggaatcccagaagtctgacagtgttctttctttttaaccca

SEQ ID NO: 240855 - DNA, 201 bp, Homo sapiens
cctcttttgatgtaggcatttattgctgtaaattttcctcttagaacttattttgctgcatcccataactttgggtatattttcattttcatttgtctcaagatatttttaaatttctcttttaatttcttcattgacgcatgggtgttcaggagtacgttttaaaatctccatgtgtttgtgaattttttgacgttttac

SEQ ID NO: 240856 - DNA, 201 bp, Homo sapiens
gtcattcttcccgttttctgaaatataatacatatttgcatccaaatagttcgattggtttattttcttcctgtggaatcccagaagtctgacagtgttcyttctttttaacccatgcctttacccttcagtccaggatggcagtgtttatgctgagatgactaattggatccacaaatcacatgcctaatctcctgagca

SEQ ID NO: 240857 - DNA, 201 bp, Homo sapiens
tcctcttttgatgtaggcatttattgctgtaaattttcctcttagaacttattttgctgcatcccataactttgggtatattttcattttcatttgtctcaagatatttttaaatttctcttttaatttcttcattgacgcatgggtgttcaggagtacgttttaaaatctccatgtgtttgtgaattttttgacgtttta

SEQ ID NO: 240858 - DNA, 201 bp, Homo sapiens
tcaaaattcaaacttagtgttaagtagggacagattaattgacgggagcctatggatgagtgggagaagaagatagaatgctgagcctggttcttctgtcwtgctatctaatgcaagaaaatgatttgtaataatttaatacatttttggctttttactaaaagagaagcatctctaagcagtgttatttttgtttcaaat

SEQ ID NO: 240859 - DNA, 201 bp, Homo sapiens
aaccattgtagaagacagtgtggcaattcctcaaagacctagagacagaaatatcatttgacccagcaatcccattactgggtatatacccaaaggaatakaaatcattctgttataaagatacatgcacttgtatgctcattgtaacactattcacaatagcaaagacatggaatcaaccaaaatgcccatcaatgatag

SEQ ID NO: 240860 - DNA, 201 bp, Homo sapiens
tgtaatgtctcctttttaattgccgattttttcttagtcgagctaaaggtttattaattttgtttatcttttcaaaataatatagttgcattgatcttttwtattattttcctagtctctattttatttattttctggtttttattgtttctttttttttttttttttttgctgtcatcaggcttatcctttttctatttt

SEQ ID NO: 240861 - DNA, 201 bp, Homo sapiens
acttaagagcttctgcacagaaaacaaagctatcatcatagtgaacagacaacccacagaatgggagaaaatttttgcaatctatccatctgacaaaggtytaatatccagagtctacaaggaacttaaatttacaagagaaaatcaaccccattaaaaagtgggcataggaaatgagcagacccttctgaaaagaagaca

SEQ ID NO: 240862 - DNA, 201 bp, Homo sapiens
gtatttctgtagtatcagttgtaatgtctcctttttaattgccgattttttcttagtcgagctaaaggtttattaattttgtttatcttttcaaaataatwtagttgcattgatcttttttattattttcctagtctctattttatttattttctggtttttattgtttctttttttttttttttttttgctgtcatcagg

SEQ ID NO: 240863 - DNA, 201 bp, Homo sapiens
ataataagagccatttattacaaacccagaacaaatatcatacagaatgggaaaaaggtggaagcattccacttgaaaactggcacaagacaagaatgctstctctcaccactcctattcaacatagtattggaagttctggccagggcaatcagacaagagaaagaaataaatggtactcaaataggaagagagaaagtt

SEQ ID NO: 240864 - DNA, 201 bp, Homo sapiens
ataatttgaaatcaaatagtgtgatgtttccagctttcttctttttgcttatgattgccttagtttttcaagatttttgtgctttcatatgaattttaggwttgtattttttctatttataggaaaaatgacgttgaaattttgatggaaattgcattgaatttgttgatcactgtgcctaggatggatattttaacaata

SEQ ID NO: 240865 - DNA, 201 bp, Homo sapiens
agtagctcttggatttgcccttttgaggctattttctaaatcttgtaggtgagcttcattcttttttattcttttttctttttgtctcccctagctatgtattttcaaatagcctgtctacaagctcactaattctttttctgcttgattagttctgatgttaagagactctgatgcattcttcagtatatcagtgcattt

SEQ ID NO: 240866 - DNA, 201 bp, Homo sapiens
actgttgaactgaccttctcttccctgcctcactcttaccgaggtatagtccttcctctcgcttctttggtgattagctcatgtaatctaggagtggctgwatcatacttattttattctaattgttgtccaacttttccattattaccacgcatttctttgagaatcaaaaaagtttattttaaaaataaatggaaagga

SEQ ID NO: 240867 - DNA, 201 bp, Homo sapiens
gtttcatttcttgtacagaagctttttagtttgatgcaatcccatttttctcttcttctttttttttttttttttttttgagatggagtcttgctctgttrcccaggctggagtgcagtggcatgatcttggctcaccacagtctctgctgcctgggttcaagcaattctcctgcctcagtctcccgagtagctggaccag

SEQ ID NO: 240868 - DNA, 201 bp, Homo sapiens
tatttgtttgtttttctcttgcttttagtatcattttttatcctcgacctttgggagtttgatgtttaagtgtcttgaggtagtcttctttgggttgaatrtgcttggtgttctataaccttctacttgaatattgatatctgtctctagatttgagaagttttctgttattatctatttaaataatctttctaccctgaa

SEQ ID NO: 240869 - DNA, 201 bp, Homo sapiens
gtccccagcacacggcagtcttccacatcaggtgagagccagcatcacagagcttaggggatttgagcttgcctctgaggacagggatctgagagtctgasgtccttttgaagcttccattgtgtattgctccaataaatgtattatagttctttccagagaatgacaaaacattatcttaaaactacaagtttttcaggc

SEQ ID NO: 240870 - DNA, 201 bp, Homo sapiens
tggatccacaaatcacatgcctaatctcctgagcaaacagttttccagcaataacattggtgataccgccaaagcacattttctattttttttttttttttgtaatgtggataggctgagaattttccaaatccacaagttttggattctttttgcttaactatttcttcttaaatgtatccctttcctcttgtattttac

SEQ ID NO: 240871 - DNA, 201 bp, Homo sapiens
aatctatcttgtctgaaataagtatagcttctctggctcctttttgttttccattgtcataaaatatctctttccgttcttttattttcattttatgtgtytctttataggtgtagtatgtttcttataagaacagatcattaggtcttgtattttttttttaatccattctgccactctgtcttttgattgaaaagtttg

SEQ ID NO: 240872 - DNA, 201 bp, Homo sapiens
aaaaattgaattcccattgtaattctatatcataggtgtcattataattcccattttccagatgagggaactgaggcttataaatatttcataatttgtayaagatcataccaatagggctggctacataatttgtgggaccacgtgcaagataaaaaccgtggacccccttgctcaaaaatcagaacaaaagcttttcct

SEQ ID NO: 240873 - DNA, 201 bp, Homo sapiens
ttggatccacaaatcacatgcctaatctcctgagcaaacagttttccagcaataacattggtgataccgccaaagcacattttctattttttttttttttttgtaatgtggataggctgagaattttccaaatccacaagttttggattctttttgcttaactatttcttcttaaatgtatccctttcctcttgtatttta

SEQ ID NO: 240874 - DNA, 201 bp, Homo sapiens
tcttgaaatctatcttgtctgaaataagtatagcttctctggctcctttttgttttccattgtcataaaatatctctttccgttcttttattttcattttatgtgtctctttataggtgtagtatgtttcttataagaacagatcattaggtcttgtattttttttttaatccattctgccactctgtcttttgattgaaa

SEQ ID NO: 240875 - DNA, 201 bp, Homo sapiens
atatttgatatcctagcctagtattttattgtaaagagtcctatatctacctgtgggagactgtattagtgttagagggatggtgcatgcatagagggagycttggtgtagctcctgtaagccaccttcgtttttcatacagtggagatagaaatgccaaatcccaggcttctcttgaagtagagagatagaatgttagct

SEQ ID NO: 240876 - DNA, 201 bp, Homo sapiens
tgcctctgtatagcctttgtcttgaaatctatcttgtctgaaataagtatagcttctctggctcctttttgttttccattgtcataaaatatctctttccrttcttttattttcattttatgtgtctctttataggtgtagtatgtttcttataagaacagatcattaggtcttgtattttttttttaatccattctgcca

SEQ ID NO: 240877 - DNA, 201 bp, Homo sapiens
gtcggaaaagcgcagtattcgggtgggagtgacctgattttccaggtgccgtctgtcacccctttatttgactaggaaagggaactccctgaccccttgcrcttcccaagtgaggcaatgcctcgccctgcttcggctcgtgcacggtgcgcgcacccactgacctgcgcccactgtctggcactccctagtgagatgaac

SEQ ID NO: 240878 - DNA, 201 bp, Homo sapiens
gcccgtcggaaaagcgcagtattcgggtgggagtgacctgattttccaggtgccgtctgtcacccctttatttgactaggaaagggaactccctgaccccytgcgcttcccaagtgaggcaatgcctcgccctgcttcggctcgtgcacggtgcgcgcacccactgacctgcgcccactgtctggcactccctagtgagat

SEQ ID NO: 240879 - DNA, 201 bp, Homo sapiens
ataccatatgtacggaaggcaagccctaaaatgatcccaaaggaaaaatgcctggtgatatccatgcctgtacgtaatctcctccctctgactgttagctsgaattcttgccttgcctctaatgagtaaaatattccagaaatcatgagactccacttctgaaattaggttctgaaaggaccgtgacttccaccttgggca

SEQ ID NO: 240880 - DNA, 201 bp, Homo sapiens
tcataacaagtcagggagaatatttagaaggtagtattaacaaaaattacagaaagaagaaaaggttacccataaccccaccatcaaaagacaaccggtawaattcccatcagacatttctgtgtgtatatatatatttatatatctacatatatgtgtaatcactagcacatttatgcttaccacctacatattttttat

SEQ ID NO: 240881 - DNA, 201 bp, Homo sapiens
acctgatgggaggcacctgcaccaatgaagaattttgtatgctagtgagacttttatattttccccttttattcttactaacctgtttgaaaaatagctgrtatggatatttttttcctgaggtaggtcctagtggtttgaaagaaactatctctaattaggccagagcaattcatgtagaaataatataaaatgaattcc

SEQ ID NO: 240882 - DNA, 201 bp, Homo sapiens
taataaacacacactttttgtgttcttatacatacatatgtacatacacacatgcatatgtgcattcatgtacatgtatgttgtattagtctgttctcacrctgctatgaagaaatgcccaagactgggtaatttatttaaaaaaaaaaaaaaaagaggtttaattgactcacagttccacatggctggggagaccttagg

SEQ ID NO: 240883 - DNA, 201 bp, Homo sapiens
aagatacttttaaaatcatttgaaatacagactatagtatctcagaggttacatctcaagtaacttcagggacagacagatgaatgcagtgggaaggagcyaaactgcaggccagtgtaaacatttctggggtccaacttagcaccatgacatgccacgtgggacctctccacaaaaagaaatggtaaaatagtacctaag

SEQ ID NO: 240884 - DNA, 201 bp, Homo sapiens
ctcagtgtttctaattttcaatagattgctttgttcaaaattgttagctatttattatcattattattattttttattattgatagtatttttagctaagrattttggtaagaaacaggctagccttgaacttcatccaggcagagatgttgttagtaccaaaaggatcttagagtatggctgtttcacaaagaaagcatt

SEQ ID NO: 240885 - DNA, 201 bp, Homo sapiens
gtgctgggattacaagcatgagccactgcacctggcctatcttttcttttttaactccaaggaaagacttactaatgttaaaattctggaaatcagtctgstggaggagatatttggagtttgggtgcaggcaggtgagtggcaagtgtgtgggatgtgaggaacttccttgaagtccttctcaatactcaggttcccagg

SEQ ID NO: 240886 - DNA, 201 bp, Homo sapiens
agagatgttaaatcatttatctcacattacagtcttagtaagttgtaaagccaaattggcaccttggattaatactttgtccaaagctgaaaccagcataycctgaacttgtctttcttcaggagtaatctgccaatgatgccttgaagcccaaacatctggagtacctaaaaaaaaaaaaaaaaagaatcctgtgctcca

SEQ ID NO: 240887 - DNA, 201 bp, Homo sapiens
gatgacatactcatattctaatttttctaggaattcagtaggatttaaaggctatgatgaaagatagtcttggctttgtgaggatatcagctaaaacaagktaataaaaaattctggatgatccatttttctacatattatactttgacagaattattagtgaatcctggagtaaagcacattctgttggctcatgtagaa

SEQ ID NO: 240888 - DNA, 201 bp, Homo sapiens
ttttgcgcactaaagtttgagaacttctaagcctctgaagtcccttgctactcaaagtgtgatctatggaccagtatctcactagcaccagcatcacctgrgagtttctctgtgagaaatgcagaatcttgagaaaaattccagacatactggatcaggatctgcatcataagaagattctcagggatttacaggcacatt

SEQ ID NO: 240889 - DNA, 201 bp, Homo sapiens
atttaaaatgttttgtgtctacacataacctgaatataattaaggccatttctagaaatgataagatatacaacagaaactattgacccaagttgttctaytccttataagttggatctggatatggattggtatagtactaacaatgctcttaaatactgatgcaagttagaatactgagctttaagatgtagtacttgg

SEQ ID NO: 240890 - DNA, 201 bp, Homo sapiens
tctctgtttggcatagcaagggtcaagggctacacattagagcgcccactcagtctttgactgtgtgtcaacaagcttatggaaaatgctgctccgctctscagactgcaggagtgaggcccatcagataggaaaactctagctatcttgttatctctgcattcagtctgctacacaaaactgaaccctgtgataatcctg

SEQ ID NO: 240891 - DNA, 201 bp, Homo sapiens
tatattgcttgtttttaaaaaatactcgaaatgcctgcatttaattttttttggcaccttaatgaaccaatatattacaatgatacagacaaatcagtgcyacagttgcaccaatctttattagctttcaaatccaatctagacttgcaattatttcattccatctctaagttctttgtattgaggcagaaaaatgaaaac

SEQ ID NO: 240892 - DNA, 201 bp, Homo sapiens
ggactaaattgttgcagtgcagttgctgaggctaacaatagtggatgtgctgagtttagggcagagttaaatattccttttgtagatagcaagagcaggtytctctgaatgaaggtgtcacaatgtgctgactgaaaagaggtttgaattagaaaaatccttcaaactgggtgattcaacaaatccaatggagagagaaaa

SEQ ID NO: 240893 - DNA, 201 bp, Homo sapiens
tcctctttattttccccttctattccaccttttgacactggccttaggaaggaaggacataggcttttggtctttcaggaattaaatttggagacttttcmcaaatattacttgtgattactatgaaatccacaagataagctgccaccttattaaattatctgaggaaagccccagctttttaaatcttcttgactgatt

SEQ ID NO: 240894 - DNA, 201 bp, Homo sapiens
tctctgcagtgagttgtataatagaaaagtgacaatgctcatagtcatcagctcactggtgactcattctgagatgctggagaaaggcctgaaggtagtamctgaggggactggctgacagattctcaatatttggaatgtggctctaccacttaacgctcttaatctgctacaccaacagtacattgtctttcttggcag

SEQ ID NO: 240895 - DNA, 201 bp, Homo sapiens
tattaaagattcagttcctgaagacatttttaggtcttacagttacccaagtgcagcaaatactataagagtggtgatctcctatgtcagagtgaactcartgttagcaggagattaatgaataattgttatatttgccttctttggttgctagtacagcttctcacatttacaaacccctgttctgttaggcactctgaa

SEQ ID NO: 240896 - DNA, 201 bp, Homo sapiens
tgtatcccttgacctgtagaatagtttctggatggtacacagtcagcactaatcagaaattagaaaccgtggctctcacactacatctggcctacaaatayactttttgtttggcttttagagtgtgaaatatttttgaattagtttataagatttaaaaattagaagcttccacgttaaaactttaaagtctaaaatcat

SEQ ID NO: 240897 - DNA, 201 bp, Homo sapiens
gattcagttcctgaagacatttttaggtcttacagttacccaagtgcagcaaatactataagagtggtgatctcctatgtcagagtgaactcaatgttagsaggagattaatgaataattgttatatttgccttctttggttgctagtacagcttctcacatttacaaacccctgttctgttaggcactctgaattcctta

SEQ ID NO: 240898 - DNA, 201 bp, Homo sapiens
ttagccctttgtcagatgagtaggttgtgaaaattttctcccattttgtaggttgcctgttcactctgatggtagtttcttttgctgtgcagaagctcttbagtttaattagatcccatttgtcaattttggcttttgttgccattgcttttggtgttttggacatgaagtccttgcccatgcctatgtcctgaatggtat

SEQ ID NO: 240899 - DNA, 201 bp, Homo sapiens
agaacctgcccagaagcagtcaatgccgtgtttccttggagggcagaaatttatttccagcaaaataacattaactgccacattatattaattttgctaaytagaattatatttgtatgtagtttctatttaatgtatacatttagttgggttctacagatgtttaagaatagttacaaaaatgtataaaagaagcttata

SEQ ID NO: 240900 - DNA, 201 bp, Homo sapiens
tgatccaccaacaacaggtagttgccctctgtctcttcttctcctcaggccaccctattctgagacataacaatattgaaatgaggtcaattaataactcyacaatgtcctctaagtatactcagtggcccagttcaggtttttgactttgctgcacaaaagaatttgagagtgagtccaaagtaaaagtaagcaagagag

SEQ ID NO: 240901 - DNA, 201 bp, Homo sapiens
tatgggagtcttacatgattcttcatgaaggggtgggaagaagtgctgctattaagcatattctgggtggtctgctggcagcacatgtgctgtggctgtawatgctagtacatgtatcgcatgcctcactggcatcttaaatctccacccaggggcatcttttttactattatagtgagcataggtcagcccaaggtaact

SEQ ID NO: 240902 - DNA, 201 bp, Homo sapiens; identical to SEQ ID NO: 47054

SEQ ID NO: 240903 - DNA, 201 bp, Homo sapiens; identical to SEQ ID NO: 47055

SEQ ID NO: 240904 - DNA, 201 bp, Homo sapiens; identical to SEQ ID NO: 47056

SEQ ID NO: 240905 - DNA, 201 bp, Homo sapiens; identical to SEQ ID NO: 47057

SEQ ID NO: 240906 - DNA, 201 bp, Homo sapiens; identical to SEQ ID NO: 47058

SEQ ID NO: 240907 - DNA, 201 bp, Homo sapiens; identical to SEQ ID NO: 47059

SEQ ID NO: 240908 - DNA, 201 bp, Homo sapiens; identical to SEQ ID NO: 47060

SEQ ID NO: 240909 - DNA, 201 bp, Homo sapiens; identical to SEQ ID NO: 47061

SEQ ID NO: 240910 - DNA, 201 bp, Homo sapiens; identical to SEQ ID NO: 47062

SEQ ID NO: 240911 - DNA, 201 bp, Homo sapiens
cccgtccctgactctctctcctcagcttcagcccccgtccctgacttctctctctctctcctcagcttcagccccccatccctgacttctctctctctctctcagcttcagtcagtgcagcggttgttcccagcacccccatcttcagccccagcatgggtgggggcagcaacagctccctgagtctggattctgcagggg

SEQ ID NO: 240912 - DNA, 201 bp, Homo sapiens; identical to SEQ ID NO: 106343

SEQ ID NO: 240913 - DNA, 201 bp, Homo sapiens; identical to SEQ ID NO: 106344

SEQ ID NO: 240914 - DNA, 201 bp, Homo sapiens; identical to SEQ ID NO: 106346

SEQ ID NO: 240915 - DNA, 201 bp, Homo sapiens
tgattcacccacctcggcctcccaaagtgctgggattacaggcatgagccaccgcgcccagccaaactaatcattattacagtagccctatgctgatagtyttggcttctgtcctttgttacaacagacccactcgtagggtctctggctctgtgtgtcgcatacctcagatctgtgtggtgcctcattggccctgacgtg

SEQ ID NO: 240916 - DNA, 201 bp, Homo sapiens
tctgtgtgtcgcatacctcagatctgtgtggtgcctcattggccctgacgtgtgggaggcattgctcctgctgctcagacctctggtgactccctctcccrcttctcccaactctgaggcccagggactgggaatcagtggcctgtgttgggtttggacccggccctgccacggctggcagcctgaccttgaacacatttc

SEQ ID NO: 240917 - DNA, 201 bp, Homo sapiens
agtagagcaagctggaggaactgggggccaagagcaggctggaggaactggggggccagtagaggaggctggaggaactggggggccagtagaggaggctrgaggaactggggggccagtagagcaggctggaggaactgggggactcttcgggatgagtcaggagtgggcagctgacctgggacctttccagggacagtt

SEQ ID NO: 240918 - DNA, 201 bp, Homo sapiens
gaactggggggccagtagaggaggctggaggaactggggggccagtagaggaggctagaggaactggggggccagtagagcaggctggaggaactgggggrctcttcgggatgagtcaggagtgggcagctgacctgggacctttccagggacagtttgaaccctcacagtgccccaggaggaggttcaggagcaggaggt

SEQ ID NO: 240919 - DNA, 201 bp, Homo sapiens
ggcaggtgctgggtcctgcttggacagggtgacaagtgccacaaagcttcatctctgaaaaaatcaaagatgcctcgaaggagggattgggttgggggggkgtgtgcaccaaggggggagaaaggaaatctctcagcccagaacaggcccaggcaacccaacggttgatatcggagcagtcagtctcactgttggtcacac

SEQ ID NO: 240920 - DNA, 201 bp, Homo sapiens
gcagagggcgagcacacgtgtgtagacctgttctacgtctacatgcatatatgtgtgtgagtgaggaggggcaggccaggatcttggctcttgctctgctyccttggggaagttatgaggggaggtgctggattaggtggcgttgcagctgggtgggtgcagccagtggctccgactgtggccctgggaggggttgttgtt

SEQ ID NO: 240921 - DNA, 201 bp, Homo sapiens
ccagggcagcacacccagttcccttcctcctcggcctcttcactcctcaaaattggggatcccctgctccccacttctgaggttcatcctttgagcattcwtacttctcactgcccaaccctgactacagctcagacttccagggctctggggacctgaaggggacagtcaggggctatgacatgcccccctctctcttag

SEQ ID NO: 240922 - DNA, 201 bp, Homo sapiens
ggaggccctggatcccactgagggacctgccaccggcttcagcccccccagtccctgccttctctctctctctcctcagcttcagcacccccgtccctgaytctctctcctcagcttcagcccccgtccctgacttctctctctctctcctcagcttcagccccccatccctgacttctctctctctctctcagcttcagt

SEQ ID NO: 240923 - DNA, 201 bp, Homo sapiens
gaggccctggatcccactgagggacctgccaccggcttcagcccccccagtccctgccttctctctctctctcctcagcttcagcacccccgtccctgactctctctcctcagcttcagcccccgtccctgacttctctctctctctcctcagcttcagccccccatccctgacttctctctctctctctcagcttcagtc

SEQ ID NO: 240924 - DNA, 201 bp, Homo sapiens; identical to SEQ ID NO: 47067

SEQ ID NO: 240925 - DNA, 201 bp, Homo sapiens
tcagcttcagcacccccgtccctgactctctctcctcagcttcagcccccgtccctgacttctctctctctctcctcagcttcagccccccatccctgacktctctctctctctctcagcttcagtcagtgcagcggttgttcccagcacccccatcttcagccccagcatgggtgggggcagcaacagctccctgagtct

SEQ ID NO: 240926 - DNA, 201 bp, Homo sapiens
aggccaggatcttggctcttgctctgctcccttggggaagttatgaggggaggtgctggattaggtggcgttgcagctgggtgggtgcagccagtggctcygactgtggccctgggaggggttgttgttggggctggagttggcccctcagtcccttccttccctcagatcatcaagaagctgattgagcgcaaacaggcc

SEQ ID NO: 240927 - DNA, 201 bp, Homo sapiens
tcaagaagcagaaagaggtggtgtgcacacatgcgcatctgtgggatttttcatgaatgggcatgcagagggcgagcacacgtgtgtagacctgttctacrtctacatgcatatatgtgtgtgagtgaggaggggcaggccaggatcttggctcttgctctgctcccttggggaagttatgaggggaggtgctggattagg

SEQ ID NO: 240928 - DNA, 201 bp, Homo sapiens; identical to SEQ ID NO: 106363

SEQ ID NO: 240929 - DNA, 201 bp, Homo sapiens
ctgttggtcacactggttggaggaacagagtgtgtatcttgcttggctgtgaagagggtcaagaagccttgttgatttcttctatcaatttttcctaactstgccatctgtcttgcagctgaccacgtatcccacttggagaatgtgtcagaggatgagataaaccgactgctggggatggtggtggatgtggagaatctc

SEQ ID NO: 240930 - DNA, 201 bp, Homo sapiens
ttgagaaacctaatattgagcaggtgagataggggaattggagatagcggataggagaattggggacagcttggaggagtggggagcctgtgttctccatyctcctcaagctgagaacactggggaggttcagagaaggaagggtgttttgtgctaacctcagggtgggcatggtggtagggagggggcagagcttttcta

SEQ ID NO: 240931 - DNA, 201 bp, Homo sapiens
gagagagagaggagaaggagaaccttgtccctggccagggagcatcttcctttgtctaagaaggccctgcgggctgctcacacctcattcctggttttatyccccacccaccccttctcagggtgtgctgaactttgtgcagtacaagtttagtcacctggctccccgggagcggcagacgatgttcgagctctcaaagat

SEQ ID NO: 240932 - DNA, 201 bp, Homo sapiens
tcccttggggaagttatgaggggaggtgctggattaggtggcgttgcagctgggtgggtgcagccagtggctccgactgtggccctgggaggggttgttgytggggctggagttggcccctcagtcccttccttccctcagatcatcaagaagctgattgagcgcaaacaggcccagatccgcaaggtctacccggggctc

SEQ ID NO: 240933 - DNA, 201 bp, Homo sapiens
ctaacgctgcccccacccgaccctacgccccagtagatgttactaattgtttcccatgggggcctggacacagcctcagactccttccctgcacaactctycaagaaaccagaccttaagcttgaagtgaaaccaatttctactcctgttctggtcttttctgtaccattttcttctgttcggccacaccttttaaaatct

SEQ ID NO: 240934 - DNA, 201 bp, Homo sapiens
ggacacagctggttccccggccaggtatgtgccatggtacgctctgtagggtgtctggcctgcctggctgagctaagcctcctgggtggaagagagctcasctgggccggaggccctggatcccactgagggacctgccaccggcttcagcccccccagtccctgccttctctctctctctcctcagcttcagcacccccg

SEQ ID NO: 240935 - DNA, 201 bp, Homo sapiens; identical to SEQ ID NO: 106364

SEQ ID NO: 240936 - DNA, 201 bp, Homo sapiens
agcttcagcacccccgtccctgactctctctcctcagcttcagcccccgtccctgacttctctctctctctcctcagcttcagccccccatccctgacttytctctctctctctcagcttcagtcagtgcagcggttgttcccagcacccccatcttcagccccagcatgggtgggggcagcaacagctccctgagtctgg

SEQ ID NO: 240937 - DNA, 201 bp, Homo sapiens
ccagtccctgccttctctctctctctcctcagcttcagcacccccgtccctgactctctctcctcagcttcagcccccgtccctgacttctctctctctcycctcagcttcagccccccatccctgacttctctctctctctctcagcttcagtcagtgcagcggttgttcccagcacccccatcttcagccccagcatgg

SEQ ID NO: 240938 - DNA, 201 bp, Homo sapiens; identical to SEQ ID NO: 106367

SEQ ID NO: 240939 - DNA, 201 bp, Homo sapiens; identical to SEQ ID NO: 47066

SEQ ID NO: 240940 - DNA, 201 bp, Homo sapiens
cggggctcagctgcttcaaggagggcgtgaggcagatccctgtggagagcgttcctggcattcgtaagcaggggtctcagttgcagggtagtgggggcacsatgcttggggtgtggactggcattcttagagacattctcccacttcccactttgcaggagagacaggctggaagccattggggaaggagaaggggtgagt

SEQ ID NO: 240941 - DNA, 201 bp, Homo sapiens
caggagagacaggctggaagccattggggaaggagaaggggtgagtgtcaaaggagccgggttgggggtggggcagagggacttggagcctcagacttggygtctctcgccccaggaaggagctgaaggaccccgaccagctctacacaaccctcaaaaacctgctggcccaaatcaaggtggggagaccaggtttccttt

SEQ ID NO: 240942 - DNA, 201 bp, Homo sapiens; identical to SEQ ID NO: 106375

SEQ ID NO: 240943 - DNA, 201 bp, Homo sapiens
ccccgtccctgactctctctcctcagcttcagcccccgtccctgacttctctctctctctcctcagcttcagccccccatccctgacttctctctctctctctcagcttcagtcagtgcagcggttgttcccagcacccccatcttcagccccagcatgggtgggggcagcaacagctccctgagtctggattctgcaggg

SEQ ID NO: 240944 - DNA, 201 bp, Homo sapiens
gacatatttaaactgttttgtgttaaagagatacattttttaaaatataaattttaaattctgctcttgagagtatactattaactgattttcctttttcyttcctctcctatttcaccttttttttaaagcctcctgttcaggtatacggtattgaaggtcgctatgccacagctctttattctgctgcatcaaaacaga

SEQ ID NO: 240945 - DNA, 201 bp, Homo sapiens
ctcacacctgtaatctcagcactttgagaggccgaggtgggtggatctggaagccaggagtttgagatcatccttgggtaaatacaaaataaacagagggyatttctctgctgctgtgcaaccttacagtttacttataattaattttttttccttttttctccttataattaattttccatgcagcttttcaattttctc

SEQ ID NO: 240946 - DNA, 201 bp, Homo sapiens
ttatctaaattgaaaggatggttttgcctttcagcctttagaagaagccacactctctgaattaaaaactgtcctcaagagcttcctaagtcaaggccaaktattgaaattggaggctaaggtaggttttaaattatttatggtacgttttctcgggttattttaagcttaaaatggctacagaaagtactagtgaaatat

SEQ ID NO: 240947 - DNA, 201 bp, Homo sapiens
attttctctcaccaagttgtgtcagttttggaaatctatttcaaaatttttctagatataaaaaaagatgcttagaagattcagaattgtttaaaatggcaaaaaaaaaaaaagtgggggttggtggtgccaagcaaggtggctcacacctataatcccagcactttgggaggccaaggcaggaggatcgcttgagctcag

SEQ ID NO: 240948 - DNA, 201 bp, Homo sapiens
tagccaaacatacaatctgtaacataaatatgaaaatcagattgcaagctgagaaccccccatacctactaatttaaatccttgtcagtgcagtctatttwaaaaaaaaaaaattggatatgcgttttaaataacaagttgtatcttctccattctttttttttttttttttttttgagcctgggtgtccctttctgtcac

SEQ ID NO: 240949 - DNA, 201 bp, Homo sapiens
tgggcaacatggcaaaaacctgtgtctacaaaatacaaaattagctgggtgtggctgtgtgcacatgtagtcccagctactcaggaggctgaggtgggagrattgcttgagcctgggaggctgaggctgtactcagccatgactgtgccactgcactttagcctgggcaacagagtgaggccctatctcaaaaaataagca

SEQ ID NO: 240950 - DNA, 201 bp, Homo sapiens
ggattgcttttcagatcctcatagccagctcaaaataaaagttgcagagaaagtgtgttcatgatatcatctttgaatttgtagccaaacatacaatctgyaacataaatatgaaaatcagattgcaagctgagaaccccccatacctactaatttaaatccttgtcagtgcagtctatttaaaaaaaaaaaaattggata

SEQ ID NO: 240951 - DNA, 201 bp, Homo sapiens
tgaggctgtactcagccatgactgtgccactgcactttagcctgggcaacagagtgaggccctatctcaaaaaataagcaaataaataaaataaaatggcaaaaaaaaaaacaaaaagcagaaaccatctgaattatattcagagtctagagtttcccaagtatagttgaccctagaactttttatttgtattacatctgt

SEQ ID NO: 240952 - DNA, 201 bp, Homo sapiens
ctgggctgttaaacacgatgaagaaatagacctctcttcaaagccacgggatattgagttctgtctccgcagctgagtctgcaacctaaccatgaccacaktccaggttcccccagactcactgcctgcctcctgcctgcagtgaggcctgctctgcagaaggtggcgtcatacacacaatcacagctcctacagacatgt

SEQ ID NO: 240953 - DNA, 201 bp, Homo sapiens
gaggctgtactcagccatgactgtgccactgcactttagcctgggcaacagagtgaggccctatctcaaaaaataagcaaataaataaaataaaatggcaaaaaaaaaaacaaaaagcagaaaccatctgaattatattcagagtctagagtttcccaagtatagttgaccctagaactttttatttgtattacatctgtt

SEQ ID NO: 240954 - DNA, 201 bp, Homo sapiens
ttcaggtgagtttcttgttactgagacaccttcactctggcagatttgcttgctgaaaatggtcgattaagcaatacccaaggagtcgtttctgccttttytaccatgatgagtgtccatcgcggagaggtaccttgcacagtgacctctgcatctgtaagtaacgggttgttgctgctgtgtttgccttgatattacatg

SEQ ID NO: 240955 - DNA, 201 bp, Homo sapiens
atcagaggctcttagagtactcatattctctcaccaagttgtgtaaattctggaaatctattcggaaattttcctaaatatgaaaaaaaaaaatgactggrcatggtggtgtgcacctgtagtcccaactacttgggaggctgaggtagaaggattgctttagtccaggagctctcagctgtagtgcaccatgccggtcag

SEQ ID NO: 240956 - DNA, 201 bp, Homo sapiens
tctgttttgctttatctaaattgaaaggatggttttgcctttcagcctttagaagaagccacactctctgaattaaaaactgtcctcaagagcttcctaartcaaggccaagtattgaaattggaggctaaggtaggttttaaattatttatggtacgttttctcgggttattttaagcttaaaatggctacagaaagtac

SEQ ID NO: 240957 - DNA, 201 bp, Homo sapiens
cactctctgaattaaaaactgtcctcaagagcttcctaagtcaaggccaagtattgaaattggaggctaaggtaggttttaaattatttatggtacgtttyctcgggttattttaagcttaaaatggctacagaaagtactagtgaaatattagatctaactctatactaatttttctgtagttaaaattttgtatttatt

SEQ ID NO: 240958 - DNA, 201 bp, Homo sapiens
tccagctacttgggaagctgaggcaggagaatcacttgaacctgggaggcggaggctacagtaagccgagatctcgccactctactccagcctgggtgacrgagcgagactcggtctcaaaaaaaaggcctttggtttaacagccttcttcattttcaccattagaacacttaacactataacataactaaccaggagtaa

SEQ ID NO: 240959 - DNA, 201 bp, Homo sapiens
aaaataaaataaaactcccatgctgatcattagtgggaatcatgcctgtgaatagccactgtactccagggcaaaagagccaacaccatttcttttttttwtaaaaaaaaaaaaagaaggctgggcacagtggctcatgcctgtaatctcagcactttgggaggccaaggcgggtggatcacctgaggtcaggagttcaag

SEQ ID NO: 240960 - DNA, 201 bp, Homo sapiens
tccttctggtgtgacaaaatgtataggggccagacatggtggctcacatctgtagtccagctcctctggaggctgaggcaggaggatggcttgaacccagrgaggtcgaggctgcaagtgaactgtgatggtgccactgcactccagcccgagggacacagcaagaccctgactcaaaaaaagaaatgcacagggaaattg

SEQ ID NO: 240961 - DNA, 201 bp, Homo sapiens
aaataaaataaaactcccatgctgatcattagtgggaatcatgcctgtgaatagccactgtactccagggcaaaagagccaacaccatttctttttttttwaaaaaaaaaaaaagaaggctgggcacagtggctcatgcctgtaatctcagcactttgggaggccaaggcgggtggatcacctgaggtcaggagttcaaga

SEQ ID NO: 240962 - DNA, 201 bp, Homo sapiens
tcttcagtgaacacaaggacatgattttcttttttttttttttttttttcttttttgagactgagtctcactctgtcacccaggctggagtgcagtggcaygatcttagctcactgcaacttccgcctcccaggttcaagcaattctcctgcctcagcctcccaagtagctggactacagcacctgccaccacacccggct

SEQ ID NO: 240963 - DNA, 201 bp, Homo sapiens
gctgaggcaggcggatcgcttgaggtcaggagttcaagaccagcctggccaacatggcaaaaccccatctctactaaaaagagaaaaattagccgggtgtkgttgtgtacacctgcagtcccagctactcgggaggctgaggcaggagaaccgcttgaactcaggaggcagaggttgtagtgagctgagatcacgccactg

SEQ ID NO: 240964 - DNA, 201 bp, Homo sapiens
gtaaccagtgattattcataaggcctgggttaaatgtaaagtacatcaaaatgtgttggaaaagagtggtttagactctattatacgtttgaattattttrtgaataccacttgaagtagtttcctgaaactagaattctagagtttatttttttgagacagagtctcactttgtcacccaggctagagtgcagtgacaca

SEQ ID NO: 240965 - DNA, 201 bp, Homo sapiens
agtgaagaatctcaggcctcacagcaacctgctgaatcagagtctgtatcttaaccagctccctaagtgaatcgtttgcacattgaagtgtgaggagcatygtctaaaggatactaggacctaagcatgtctaattgtatagtcagtagtttcaactgtggaggcggccagtgtgatacctaccaagaaaatggttcgtgg

SEQ ID NO: 240966 - DNA, 201 bp, Homo sapiens
tttcagcaaatcctgaaggaacccaaagtggctgcttctgttttgaatccctatgtgaagcgttccattaaagtgaaaagcctaaatgacatcacagcaaragagaggttctctcccctcactaccaatctgatcagtgagtattagaactttttcatttgaggtgtcttgaaactatgactggaaatgtggtccatggac

SEQ ID NO: 240967 - DNA, 201 bp, Homo sapiens
acttgtcagttatgcccattttaaacggaaacaatcatgtttacaatggagagaattacttggattgtggatattagaatagagtttgtctaaagcctggmagtcagtcgagacatggagaaaaagggaggcaattaccttaagacactgaatattagcagggttttggcactaagagggaaggatgatacaaggatacgc

SEQ ID NO: 240968 - DNA, 201 bp, Homo sapiens
cctcttcagaggaagtttggttttttcttcattttaagattcttcattctttaattcacatatctgcaagtttttattgtttagaaaaaacaattcatagrccagttgtatagagtaataatacttacgttctatattaatcatcgtatgtatagtctataagtattactgttctgtactgtttatgttttattcattttt

SEQ ID NO: 240969 - DNA, 201 bp, Homo sapiens
aataaaataaaactcccatgctgatcattagtgggaatcatgcctgtgaatagccactgtactccagggcaaaagagccaacaccatttcttttttttttwaaaaaaaaaaaagaaggctgggcacagtggctcatgcctgtaatctcagcactttgggaggccaaggcgggtggatcacctgaggtcaggagttcaagac

SEQ ID NO: 240970 - DNA, 201 bp, Homo sapiens
gcgcgcaccgtgcgcgagccgaagcagggcgaggcattgcctcacttgggaagcgcaaggggtcagggagttccctttccgagtcaaagaaaggggtgacrgacgcacctggaaaatcgggtcactcccacccgaatactgcgcttttccgacgggcttaaaaaacggcgcaccacgagactatatcccacacctggctcg

SEQ ID NO: 240971 - DNA, 201 bp, Homo sapiens
acccgaatactgcgcttttccgacgggcttaaaaaacggcgcaccacgagactatatcccacacctggctcggagggtcctacgcccacggagtctcgctkattgctagcacagcagtctgagatcaaactgcaaggcagcagcgaggctgggggaggggagcccgccattgcccaggcttgattaggtaaacaaagcagc

SEQ ID NO: 240972 - DNA, 201 bp, Homo sapiens
agttcaaccattgtggaagtcagtgtggagattcctcagggatctagaactggaaataccatttgacccagccatcccattactgggtatatacccaaagractataaatcatgctgctataaagacacatgcacacgtatgtttattgcggcattattcacaatagcaaagacttggaaccaacccaaatgtccaacaat

SEQ ID NO: 240973 - DNA, 201 bp, Homo sapiens
cagaattcactccaagataaataaatacttgaacaatgcaaacatttctcaggtccttctggtgtgacaaaatgtataggggccagacatggtggctcacrtctgtagtccagctcctctggaggctgaggcaggaggatggcttgaacccagggaggtcgaggctgcaagtgaactgtgatggtgccactgcactccagc

SEQ ID NO: 240974 - DNA, 201 bp, Homo sapiens
cactccttggaagttagtgtttttctgtcttacgggtatgctagcctcggtccattcctagcaaactaggaggttcgtgggaaggtgatttcccaagcaayttggcataatcctcattgggtaagtttaccccttagtaatagtaagtagctcaccctcatgtaatatgtgaatatacaaagagacaaaagtaatgatttt

SEQ ID NO: 240975 - DNA, 201 bp, Homo sapiens
ccaccttttaggtgggcctagggctactcagctagagaccacattcttgagcctctggcagcacctgaccttggtgctgagttctggcaaatgggaaaggrgaggaagcgaggtgtgccttcctggactgccctcttgagcaatccttagtccatccctctagctagatgcagacaagatggcaagcgatgccaagggcag

SEQ ID NO: 240976 - DNA, 201 bp, Homo sapiens
taattttttagttttttttttgtgaggcagggtttcaccatgttacccagggtttcacccatgttactcctggacgcaagctgtctgcccatctcggccayccaaagtgctgggattacaggcatgagccactgcacttggcctccattcacattgttaaagaacattgaatatactgtgattttaagagacaagatcttg

SEQ ID NO: 240977 - DNA, 201 bp, Homo sapiens
aatttttgagtgcccagctaattttttagttttttttttgtgaggcagggtttcaccatgttacccagggtttcacccatgttactcctggacgcaagctstctgcccatctcggccatccaaagtgctgggattacaggcatgagccactgcacttggcctccattcacattgttaaagaacattgaatatactgtgatt

SEQ ID NO: 240978 - DNA, 201 bp, Homo sapiens
acacgttgctggagcaaacgggcaaaagttaccttaggtaggtcccctgccccttcccgctttgtccctaagatgctcccaattcaccttttaaccaaaamcagttcccaggtcagctcttccactacattttaccttttggtcttctagagaaaatagttacagagttccccacgcaacagcccgctcaggtgcctgttc

SEQ ID NO: 240979 - DNA, 201 bp, Homo sapiens
ttgcctccgagtggaagaaaagaggacaattactttctttatctttctctacgttttaaaaagtttttagggggttgggtgtggtggctcacacctctaasctttgggaggctgaggcaggcggatcgcttgaggtcaggagttcaagaccagcctggccaacatggcaaaaccccatctctactaaaaagagaaaaatta

SEQ ID NO: 240980 - DNA, 201 bp, Homo sapiens
tgtctcgaaaaaaaaaaaatatcaaggtacctgggtttctaatgcagttctccatgttccattctggtgagaaatattcatactcttcacaccctttcttyccagtaggcaccaaggaggctcactatttcagggagttgccagtccctttcttttcaaaccagaagtaatccagttgaccccggataaagaggactatta

SEQ ID NO: 240981 - DNA, 201 bp, Homo sapiens
ctctgacagaggagaaaattcgaccaagttctatttagagagaatgggttgaagataggttgtttttatggatgcagacaaactatatccaaggctagtayccagttctcagtttcaatatcaaatttgctcaaacccgggttctcctattttaggcctgatgctcagatagccactctgccctagccagaatcaagaatc

SEQ ID NO: 240982 - DNA, 201 bp, Homo sapiens
agtcagtttagccagaacccccaatcttcgacaaccgatcatctttgatatctgatcagggtcttcatccttcaccatcccccaggtgatgtctgatcacyctggcctgtcttctacaagattcctctaggtcattttagccagaatccctcttaccccagtttcctctaagtaattttctatccactgacccccgcactg

SEQ ID NO: 240983 - DNA, 201 bp, Homo sapiens
cctatacccatcgctatggtcctgaataaagtcttccttatcatgctttaataagcatcactgaataattctttatttaacaatgggtagtcatggcccargtaagagagacgtggtgtccgctcctggagctgcaaggctcctgggggctttttgttttgttttggttttgtctttgtatgcaacgtgagaaaaagccat

SEQ ID NO: 240984 - DNA, 201 bp, Homo sapiens
gtccagatttctgactagtatagattggaagcgttctttctgggttaaaggaaaagtcacttttagccgggtgtggtggcacaagcctgtaatcccagcaytttaggaggtggaggggggaatatcgcttaagcccaggagttcaaaaccagcctgggcaacatagtaagaccctcatctctacaaaaagataacagaatt

SEQ ID NO: 240985 - DNA, 201 bp, Homo sapiens
atattaaaatcaaggtaccgggctgggcgcggtggctcacgcctgtagtcccagcactttgggaggccgaggtgggcagatcacgaggtcaggagtttgakaccagcctggccgacatgatgaaaccccatctctactaagcatacaaagattagccaggcatagtggcgcatgcctataatcccagccactcgggaggct

SEQ ID NO: 240986 - DNA, 201 bp, Homo sapiens
tggaactaaatctttctcatccaagcctgagctttcccactacaaccatacagcaccactaagaacatgtagtcatacattgatggtagaaaaaaagtctrtagtttattgtgaaaaataattcaagcatcaggtttttttgtaaactgccaaagggctctgttacactgaacatcgatagggaggctatgtaagggaaaa

SEQ ID NO: 240987 - DNA, 201 bp, Homo sapiens
ccttaatgagcccacgtcaggtggaatttaggaagataattatcctgtcccgtcctcattaccagccctaaatctcaaatcaaatgatcaaaatcatttcrtccttcatgtgagaccttaaaacttcataacagtgttaaggagtaactggtcttcccattttacaaaaggggaaactgaggccctgggaaaatttacctg

SEQ ID NO: 240988 - DNA, 201 bp, Homo sapiens
ttcccagtagtagtagaggactgacaggcaaagactgtgaggctgctgcaagatgttttttacttttttttttaaacatgaaaagcagaataaataaaccrtattaccagaagcctacattgtaactgaataggagaatgtctgctttcgttttcaccgaattttctagttaacaagtttctacacattctgttgcttcct

SEQ ID NO: 240989 - DNA, 201 bp, Homo sapiens
tgcactccttggaagttagtgtttttctgtcttacgggtatgctagcctcggtccattcctagcaaactaggaggttcgtgggaaggtgatttcccaagcracttggcataatcctcattgggtaagtttaccccttagtaatagtaagtagctcaccctcatgtaatatgtgaatatacaaagagacaaaagtaatgatt

SEQ ID NO: 240990 - DNA, 201 bp, Homo sapiens
ataatctttcttgaaaagcaaaaacaaatttaagaaagttcgtacagtatttttaaatttttttgaggaacatcattctatataaaatcctggtgcagtgcacagtgtattctgaaaggcagtcagaaaattgtttgattataatctttttttcatatgttcttcggcagtgctaatttaattcataaaatatttaattca

SEQ ID NO: 240991 - DNA, 201 bp, Homo sapiens
tccatagctggagtatttgaaggtgacctgtgatctgtgacctgtgcgcttgcaggtgatttttaaactgtgtattccagctctgtcttttgatgggcagratagtgtctctcagaactaaggcttcttgtcagatcaaactctgcggcagtactcaaaaaattcatctttattttcagatagcatttgcattccgaggag

SEQ ID NO: 240992 - DNA, 201 bp, Homo sapiens
taatctttcttgaaaagcaaaaacaaatttaagaaagttcgtacagtatttttaaatttttttgaggaacatcattctatataaaatcctggtgcagtgcacagtgtattctgaaaggcagtcagaaaattgtttgattataatctttttttcatatgttcttcggcagtgctaatttaattcataaaatatttaattcat

SEQ ID NO: 240993 - DNA, 201 bp, Homo sapiens
tgtgtcttaatatgtttagaagattcagaattgtttaaaatgtcaaaaagttgggggcagggcaccaagcgcggcggctcacacctgtaatctcagcactytgagaggccgaggtgggtggatctggaagccaggagtttgagatcatccttgggtaaatacaaaataaacagagggtatttctctgctgctgtgcaacct

SEQ ID NO: 240994 - DNA, 201 bp, Homo sapiens
tggctgcttctgttttgaatccctatgtgaagcgttccattaaagtgaaaagcctaaatgacatcacagcaaaagagaggttctctcccctcactaccaayctgatcagtgagtattagaactttttcatttgaggtgtcttgaaactatgactggaaatgtggtccatggactgtgggcggcatcagcatcacctgggag

SEQ ID NO: 240995 - DNA, 201 bp, Homo sapiens
ttgagatgcaaattgccatttcctagacaagctgcgtaagcaggatccaaaacgttttcaccatctataaaatgggggaataccaagcccatctacatctygagtcatcctaaaactcaaaataaaaatgaaaccatatatgtgcaaccagttaacaaatcctaaaattgaaatgaccataaaccactattttggagatgt

SEQ ID NO: 240996 - DNA, 201 bp, Homo sapiens
atcgtttgcacattgaagtgtgaggagcatcgtctaaaggatactaggacctaagcatgtctaattgtatagtcagtagtttcaactgtggaggcggccartgtgatacctaccaagaaaatggttcgtggcctgtggctataccttgatccttggatacatttgcattcttgggtacatttggactgcttttctcttttt

SEQ ID NO: 240997 - DNA, 201 bp, Homo sapiens
tacaggctagcttcaaaatcccattccagaaacacatcctgaatgattcacttattctttcaaccatagagatggaaagagatgggacttggtgcaggtgyctgggtttgagatgcaaattgccatttcctagacaagctgcgtaagcaggatccaaaacgttttcaccatctataaaatgggggaataccaagcccatct

SEQ ID NO: 240998 - DNA, 201 bp, Homo sapiens
tgatttgcctacaggcacccagaaatccaagagcaggcaggagggaggtgtggatgcagtgttatcaggcttcagggcttctgtgtttctccctttgcccmcaccactaaaatacaggctagcttcaaaatcccattccagaaacacatcctgaatgattcacttattctttcaaccatagagatggaaagagatgggact

SEQ ID NO: 240999 - DNA, 201 bp, Homo sapiens
gagagtagcagtaagtagctttcctattcattacatatgaagttcctgtttgtatattttttcctttggttgtttgtgcattcctaatgaggtgtatcctrcaagaaaaaactgggaaaaagccattgtctgtaaacacatttttagtaataatattgggtttttattataagacatataaaaagaacaaacagatacata

SEQ ID NO: 241000 - DNA, 201 bp, Homo sapiens
catgtttgcattcatcttgcctctattgaaagacaaaatactgcatttagaggggactgcatcctggggatgagagtaacagctctagtttgtggtgtgcygactccttgcccacgctgcgttaaatgttttgcaggcattacataatttacatgatatataccatcactatctccattctccaggtaaggaaatgaggca

SEQ ID NO: 241001 - DNA, 201 bp, Homo sapiens
aaacttgcaatggggaataaggaggagaagggaactgtggtcaggtatagactgagatctgatatgatgtaattctgtagcaattagtagaatttgattcycatgatatatttagaggtgatttataataagtatattaacgtttctgctgcttgttttctgtaacagaatcagcatgattcttcagaggctcttcaggtt

SEQ ID NO: 241002 - DNA, 201 bp, Homo sapiens
caatggggaataaggaggagaagggaactgtggtcaggtatagactgagatctgatatgatgtaattctgtagcaattagtagaatttgattctcatgatrtatttagaggtgatttataataagtatattaacgtttctgctgcttgttttctgtaacagaatcagcatgattcttcagaggctcttcaggttctcctct

SEQ ID NO: 241003 - DNA, 201 bp, Homo sapiens
gcattttagaggcttcttggaaggcagtgtttgggtactcatccctcttgagaatctcatggacaactgtggatcatcttcccagtttaaagaaaaaaacrtgaagaatttactcacatcattttccttatagcatgaaacagttctcaaacccacaggaggccttcagtagacctgtacacccaggggtttactctaggt

SEQ ID NO: 241004 - DNA, 201 bp, Homo sapiens
atcttgagcattctacataatccattttattgcaatttggctaagcttgacccttttttccccctcttcttagatcccaaatttgaagtcatcgaaaaacmccaggcctgaagaaataaagtaaaattaatctggtaatttgtcacggattagttgtacaactagttagaagtttcagaataaacatgcatttcataactg

SEQ ID NO: 241005 - DNA, 201 bp, Homo sapiens
tttttttttggagatggagtctcgctctgttgcccaggttcaagcaattctcctgcctcagcctcctgggtagctgggattacaggtgtgcgccaccatgyccggctaatttttgtatttttagtagagacagggtttcaccatgttggccaggctagtctcaaactcctgacctcaggtgatccacccacctcggcctcc

SEQ ID NO: 241006 - DNA, 201 bp, Homo sapiens
gcacttacatggtggataattgaaacaatgaaagtggattttacccgtgttgcagaaggagtaacatctatgcagtcagacttagagcaaattaactgtgwgaatacgtgcagcttaatctttcttagatacagttttatcatctgtaaagcagggataagaacactttaactctttgagagtattgctgtaagggtacaa

SEQ ID NO: 241007 - DNA, 201 bp, Homo sapiens
tttttttggagatggagtctcgctctgttgcccaggttcaagcaattctcctgcctcagcctcctgggtagctgggattacaggtgtgcgccaccatgccyggctaatttttgtatttttagtagagacagggtttcaccatgttggccaggctagtctcaaactcctgacctcaggtgatccacccacctcggcctccca

SEQ ID NO: 241008 - DNA, 201 bp, Homo sapiens
tgagaaattgtaccaggctgtggtgcattgtgagccttttgtcaccgttccaatatggggtttggcaagccctgtcagtttatagactcggccttaatctragaaaaatgtattctactaattatttatggtctcttttaatcatttccttttttttctttttgagacagagtcttgccctgcatccaggctggagtgcag

SEQ ID NO: 241009 - DNA, 201 bp, Homo sapiens
gtgcaatggcacaatctcggctcactgcatcctctgcctcctgggttcaagcaattctcctgcctcagcctcctgagtagctgggattacaggcatgcgcsaccacgcccagctaatttttgtatttttaatagagacagggtttctttttgttggtcaggctggtctcaaattcccaacctcaggtgatccaccagcctc

SEQ ID NO: 241010 - DNA, 201 bp, Homo sapiens
ctggagtgcagtggtgtgatctgggctcactgcagcctccgcctcctgagttcaagtgattctcctgcctcagcctcccaaataactgggattacaggcaygcgctagcacgcctgacttatttttgtatgtttagtggagacagggtttcaccattttgggcaggctggtctcgaacctctgacctcaagtgatccacct

SEQ ID NO: 241011 - DNA, 201 bp, Homo sapiens
tttgactacatgaatgctttaaaaaggtctattggccgggtgtggtggctcacgcctgtaatccgagcacttatgggaggccgaggcgggcggatcatgargtcaggagatcgagaccatcctggttaacatggtgaaaccccctctctactaaaaatacaaaaattagctgggcatggtggcgtgtgcctgtaatcccag

SEQ ID NO: 241012 - DNA, 201 bp, Homo sapiens
gttttctgtaacagaatcagcatgattcttcagaggctcttcaggttctcctctgtcattcggtcagccgtctcagtccatttgcggaggaacattggtgytacagcagtggcatttaataaggaacttgatcctatacagaaactctttgtggacaagattagagaatacaaatctaagcgacagtaagtgaataaataa

SEQ ID NO: 241013 - DNA, 201 bp, Homo sapiens
tctttttgttggtcaggctggtctcaaattcccaacctcaggtgatccaccagcctcagcctcccaaagtgctgggattacaggcgtgaaccactgcaccyggccataagtccttatttttaaaattcagacttccatctccttcaccaatttatttcactgataaagttggactgccggatcctccccactgtcatgcac

SEQ ID NO: 241014 - DNA, 201 bp, Homo sapiens
tacccttgaaggaattttcatgtgtacatttttttacatttagaatattgttcattgctaggtaggcagtagtatttatgacaaaaacagaagaatttctycaaagaattaatgagacccagttggccctgctgctggtccataatgctatatttattttcccaaaatgcacaagtctaattttgtcattttattgcttgg

SEQ ID NO: 241015 - DNA, 201 bp, Homo sapiens
ggggcagggaggcccgggggtctcgggcccgcagcctggctggggcaacccaaggtcaggcgcgcgggagagattttcggccaggcctacccgccccgggygcacgggagcgtctaggctacttaggcagaacgtgtaccattaagagggaaaaaattagtcataatattgaaagtttgcatcccacctaaaaacgatggt

SEQ ID NO: 241016 - DNA, 201 bp, Homo sapiens
tttcccaccttcaaatttgaaggtacgtcttataaatcacagattcattcttgtgggggataagtgaagaatatttacacttacctggatttttagagaaytgaatgacagtgttgacatgtgaatttattaggaccatgacgtgtgcctgagaagctgccggctaaatgtttgctgttagaataagagcagtataggaga

SEQ ID NO: 241017 - DNA, 201 bp, Homo sapiens
tacacattttcaggttgtcatgcccggctgaggtatgggaaaccttgtacattagtttgggggccagtgtacttttcctgttaggagcggacagtgttgcracagtctacctctactgttttctctgatccatgactaagttcaagggggaagaaatacctcacctcacattttgtgctctaaccctgatgaagcttcagg

SEQ ID NO: 241018 - DNA, 201 bp, Homo sapiens
aagtagaaatacttattttctttctgaagtcttttctttgactacatgaatgctttaaaaaggtctattggccgggtgtggtggctcacgcctgtaatccragcacttatgggaggccgaggcgggcggatcatgaggtcaggagatcgagaccatcctggttaacatggtgaaaccccctctctactaaaaatacaaaaa

SEQ ID NO: 241019 - DNA, 201 bp, Homo sapiens
gaaatgagagaaggctgtcctagagggggtggaatttgacctgtctcttaataagtagatagaatatacaagtcttgtggttaggagaattaacattccargtggatagggtgttataggtaagtgtatagaggagggggaaatgggttaagataaaatgaccatagctcagtttaatgggtacatgaggcaaccgaagaa

SEQ ID NO: 241020 - DNA, 201 bp, Homo sapiens
ttgattgcttgagccggaggattccagcaggttccttttttcatttccttcacaacttggggcttgagaaattccatcacccctgccatccattccaggcraagcaggaggtgtcctctgagtaatcagcccatccccaactctgttcagagtctatcaagtccagccctacctgtctcctccacacccagtgtgactagg

SEQ ID NO: 241021 - DNA, 201 bp, Homo sapiens
ctgagggaactcatccagtgcaccctcccatgtctgagccgtgccacccttcccgcttctgagcgccatcccatttctgagccatgctgcccttacccgtstctgagcagcttgattgcttgagccggaggattccagcaggttccttttttcatttccttcacaacttggggcttgagaaattccatcacccctgccatc

SEQ ID NO: 241022 - DNA, 201 bp, Homo sapiens
ccccggtggggccccgcccgcctccttcgcctctgctgctgctcctgggtctgaaggaacttgctctttgtcagcggagggagacgccgcactgcgtgttygcaggcagaaaggaggttccacttgaggggaactctcaagctttttgaccaaagccccttagggcagcgcagaaacccacagagcagaacctcagatgcc

SEQ ID NO: 241023 - DNA, 201 bp, Homo sapiens
gtaagtggccatcacgcaggcgtgtggtgtccgtgtgggaatgagggatggatgggacagatgttacctgaacagctgatgtgggcaggacggtgccttaktaaagacatcctttcaggccctgggccactcccctcccaaggccaagctgcacaggggagttcagcctcaatgtgaaccctcctgaagccaaaggctctc

SEQ ID NO: 241024 - DNA, 201 bp, Homo sapiens
tggggctcagctggcagtgctgtggtgagccgaggatgggggcacgtcacacctctcctgactgcattgtaagtggccatcacgcaggcgtgtggtgtccstgtgggaatgagggatggatgggacagatgttacctgaacagctgatgtgggcaggacggtgccttagtaaagacatcctttcaggccctgggccactcc

SEQ ID NO: 241025 - DNA, 201 bp, Homo sapiens
cccagtgtcctggcctcagagccacgtggcttgctgagacctgagagcacccggccggccctccctggctgcttcccgctgctgtggcccgtggggctcakctggcagtgctgtggtgagccgaggatgggggcacgtcacacctctcctgactgcattgtaagtggccatcacgcaggcgtgtggtgtccgtgtgggaat

SEQ ID NO: 241026 - DNA, 201 bp, Homo sapiens
gtggctcatgcctattatcccagcactttgggaggctgaggcgggcggatcacctgaggttgggagttgaagaccagcctgaccaacatggagaaaccccrtctctactaaaaatacaaaattagccgggcgtggtggcgcatgcctgtaatcccagctactcgggaagctgaggcaggagaattgcttgaacctgggagg

SEQ ID NO: 241027 - DNA, 201 bp, Homo sapiens
ggaggttgaggctgcagtgagccatgatcacaccactgcactccagcctgggcaacagagctagaccctgtcttaaagaaaggagagagaggccgggtgcrgtggctcatgcctattatcccagcactttgggaggctgaggcgggcggatcacctgaggttgggagttgaagaccagcctgaccaacatggagaaacccc

SEQ ID NO: 241028 - DNA, 201 bp, Homo sapiens
cttgaacccgggaggcagaggttgcagtgaaccgagattgcaccactgcactccagcctgggtgagaaagtgagactgcgtctcaaaaaaaaaaaaaaaaagtgtgcgtccagctctctgtagcacctgcctggtaaagcattcctctttatggtgcccaaaacaatgtcattcaagtcaaagagtgtgtcttgttttcta

SEQ ID NO: 241029 - DNA, 201 bp, Homo sapiens
ggaggtgagccccaggccagggccgcatgaggggccccctaagtggactgtggccgttggtctgggtcagggggaggggcctgggcgctctgctggagtcragaggaagctctccccgcccacagccaaccagagggaaggccaaaggctgcggtttgctgagctgctggaccgtgggctcccagccaggatggggtggag

SEQ ID NO: 241030 - DNA, 201 bp, Homo sapiens
gatctcaagtgagcctgctcgccccaaaggcggatgatgtggagtctgcctccctaccaagactggcgcagcccctcctgtttacctgacttgatgctttmggcgggacctggcctggggcaggcgcagcctcagccctccaataacctcatctggccctgtggcctcccttctctgtgcccgtgaggatagtggctgccc

SEQ ID NO: 241031 - DNA, 201 bp, Homo sapiens
aggagttggaggggagccctgtctcggaaaggggcgtggcgtggttgtgaagaccttggaccgggagggtttcctggcacacagcccagccaagggtgaaktgtggacacctcgctgggcttcagggcacaagagaccttgctcatcactgcttctgtgttacagaccaagctccacgaagatctctgtgagaagaggacg

SEQ ID NO: 241032 - DNA, 201 bp, Homo sapiens; identical to SEQ ID NO: 47107

SEQ ID NO: 241033 - DNA, 201 bp, Homo sapiens
cttagagctctgcgctgtgccccgctggggctggctcaccctcctgcctggggacatggatgtctcttggcctttgcctttcagaaggcatttcagctgcrtcttcagggcctccctctcctcctggagcagcaggatctcctcgtctttcttctgaacctgtatctccagctcagacaggcagtgatcctgggcagaaaa

SEQ ID NO: 241034 - DNA, 201 bp, Homo sapiens
ttgccccattcagaaagcaagtcagaagccaggtgcaggtgcctagacatcggctcacggctctcatttgtcattttgcgcctccattcatctctcccccscctgttgcatcagctcatggctctcatttgtcatttcgtgcctctgttcgcctctcccctgcctgttgatcagaaccctgagaaccggtccacgttccag

SEQ ID NO: 241035 - DNA, 201 bp, Homo sapiens
gctttgtctcccaggctggagtacggtggcgcagtctaatctcactgtagcgtccgcctcctgggttcaagtgattctcctgcctcagcctgctgagtagytggcattacaggtgctcaccatcatgtctggctaatttttttgtatttttaaaagagatgaggtttcaccatgttggccaggttggtcttgaactcctga

SEQ ID NO: 241036 - DNA, 201 bp, Homo sapiens
accatcatgtctggctaatttttttgtatttttaaaagagatgaggtttcaccatgttggccaggttggtcttgaactcctgacctcaagcagtccacccrccttggcctcccaaagtgtggggattacgggtgtcagccaccacacctggcctatcctaatttctggatagctttattgcagttgaaaatcagggttcca

SEQ ID NO: 241037 - DNA, 201 bp, Homo sapiens
ttacaggcgtgagccaccacgcccagctgtgccttttttctttttttttttttttaagatgtggtcgcgccatgttgcccaggctggagtgaggtggctamtcataggcgcagtcccactactgatcagcaccggagctttttgtcctgctctgtttctgacctgggctggttcactcctctttaggcagcctggtggtcc

SEQ ID NO: 241038 - DNA, 201 bp, Homo sapiens
tggtcgcgccatgttgcccaggctggagtgaggtggctaatcataggcgcagtcccactactgatcagcaccggagctttttgtcctgctctgtttctgasctgggctggttcactcctctttaggcagcctggtggtcctccactcccaggagctcaccatagtgatgacagacttagcgtagacactccattggcacag

SEQ ID NO: 241039 - DNA, 201 bp, Homo sapiens; identical to SEQ ID NO: 47100

SEQ ID NO: 241040 - DNA, 201 bp, Homo sapiens
aaaggcggatgatgtggagtctgcctccctaccaagactggcgcagcccctcctgtttacctgacttgatgctttcggcgggacctggcctggggcaggcrcagcctcagccctccaataacctcatctggccctgtggcctcccttctctgtgcccgtgaggatagtggctgcccgtgtctcccacccccagccctgggg

SEQ ID NO: 241041 - DNA, 201 bp, Homo sapiens; identical to SEQ ID NO: 47102

SEQ ID NO: 241042 - DNA, 201 bp, Homo sapiens
ggcagacccgacatgcgcctgtgccatctgatgccagcccctgacaggtgggaaggagcatttgtgggggtgcgtgggcatcactggcatgcgggacccgyggcagaagcaccagggccacttcccctctgactgtagaactgggacagctcccatccccatcctgtgccctcgcctgtctcctgggccgcaccagttctt

SEQ ID NO: 241043 - DNA, 201 bp, Homo sapiens
gagcacaaggtggaccagaggtgtcgggctgcctggataccccaggtgcacagtcagaggagcccaggccccagacgcatccacagcagatcctcctgttygtgagtctctgggagggtaggccaggcggccactcagcagggtcctgtcccatcctctccccaaccctcccagagctgtaaggacactgctcagctcagc

SEQ ID NO: 241044 - DNA, 201 bp, Homo sapiens
tgcttttatcagggagcctgcacagcctgccaccctcaagagacgaggacattgtggcccaacctaggctgcagcccctgataactgtccccctccttaaycctgcccgataaggcgcctgctggcctctggggaggctggccaggggagggggggtgcgtggggcagggcagcaggtccggggcagcggctggtacagct

SEQ ID NO: 241045 - DNA, 201 bp, Homo sapiens
tgctgctactgcagcccgaactttttttttttttggagatggagttccattgttgcccaggctggagtgcagtggcacaatctcggctcactgcagcctcygcctcctgggttgaagcgattctcctgcttcagcctcccgaatagctgagtttacaggcatgtgccaccacgcccagctaattttgtatttttagtagag

SEQ ID NO: 241046 - DNA, 201 bp, Homo sapiens
tccggccctggccccgcaccgcgggttaggccggtgggggtcagtccagggcacgcccccacccccgccagttctcagccagcgaggccgcgcacagtcgyacctgcccactgcggccgcaccgggaagccgcagcccggaccccgcgcgcctcacctgtgtccccgcgtctctgggctccgcaggggccgggcctgggca

SEQ ID NO: 241047 - DNA, 201 bp, Homo sapiens
atgagcacccgtgggtgtctgcctgtagcctcccctgctggggctggcagggctgctggtggagcccctggctgaagatgctgggcccctgccagggcggrcccagatgcagccagacagatccagggcagacccgacatgcgcctgtgccatctgatgccagcccctgacaggtgggaaggagcatttgtgggggtgcgt

SEQ ID NO: 241048 - DNA, 201 bp, Homo sapiens
agcacaaggtggaccagaggtgtcgggctgcctggataccccaggtgcacagtcagaggagcccaggccccagacgcatccacagcagatcctcctgttcrtgagtctctgggagggtaggccaggcggccactcagcagggtcctgtcccatcctctccccaaccctcccagagctgtaaggacactgctcagctcagcc

SEQ ID NO: 241049 - DNA, 201 bp, Homo sapiens
atgtatttaactcgcagcacaggtgtctctgatgttttcttcaccccaccccaccccccgactcactaataaaaacagctccgcacctggcccagcagatsctttcccaccggcactgccagaggttgttgctcgaagtgtcacaaagctcactctagcccagtggtggcttctatgtggggaggctgagggcctcctgtc

SEQ ID NO: 241050 - DNA, 201 bp, Homo sapiens
ctgctcagctcagcctaggtccatgaccctgggggtactggggctggagctgctgtctccaccatggtcacttaggggacaagtggtgtgcccgagaggcrgctgtgggttacttgagtgcctggcccaatgagcacccgtgggtgtctgcctgtagcctcccctgctggggctggcagggctgctggtggagcccctggc

SEQ ID NO: 241051 - DNA, 201 bp, Homo sapiens
caggcggccactcagcagggtcctgtcccatcctctccccaaccctcccagagctgtaaggacactgctcagctcagcctaggtccatgaccctgggggtmctggggctggagctgctgtctccaccatggtcacttaggggacaagtggtgtgcccgagaggcggctgtgggttacttgagtgcctggcccaatgagcac

SEQ ID NO: 241052 - DNA, 201 bp, Homo sapiens
cccaggtgcacagtcagaggagcccaggccccagacgcatccacagcagatcctcctgttcgtgagtctctgggagggtaggccaggcggccactcagcagggtcctgtcccatcctctccccaaccctcccagagctgtaaggacactgctcagctcagcctaggtccatgaccctgggggtactggggctggagctgct

SEQ ID NO: 241053 - DNA, 201 bp, Homo sapiens
cccatcctctccccaaccctcccagagctgtaaggacactgctcagctcagcctaggtccatgaccctgggggtactggggctggagctgctgtctccacyatggtcacttaggggacaagtggtgtgcccgagaggcggctgtgggttacttgagtgcctggcccaatgagcacccgtgggtgtctgcctgtagcctccc

SEQ ID NO: 241054 - DNA, 201 bp, Homo sapiens
ccccaggtgcacagtcagaggagcccaggccccagacgcatccacagcagatcctcctgttcgtgagtctctgggagggtaggccaggcggccactcagcagggtcctgtcccatcctctccccaaccctcccagagctgtaaggacactgctcagctcagcctaggtccatgaccctgggggtactggggctggagctgc

SEQ ID NO: 241055 - DNA, 201 bp, Homo sapiens
accccaggtgcacagtcagaggagcccaggccccagacgcatccacagcagatcctcctgttcgtgagtctctgggagggtaggccaggcggccactcagcagggtcctgtcccatcctctccccaaccctcccagagctgtaaggacactgctcagctcagcctaggtccatgaccctgggggtactggggctggagctg

SEQ ID NO: 241056 - DNA, 201 bp, Homo sapiens
acgaggcccacacactcagtgccagctggactgccgtgggtgtgtcagatgactgccttgccttgtgtcctcccaaaacctgattcctgctgctctgggcmgtcaaggcagatgccacagttggccaggggcctgccctgctggaggcttgaggcggcacgggggcttccccaggccaggactctgctggagttctggggc

SEQ ID NO: 241057 - DNA, 201 bp, Homo sapiens
ggaccccactgccttacgatctgggtgccatgtgagaagcagactcatcagctttatcgaatgacaccatttgttctctgttcagtgtctcgatttctgtrtctgtagaaatgactggtgattttgggaagcatctgcaagagccccacagcccacacacctttagttgtcaacctgagaggcccggggccctgtgcagtg

SEQ ID NO: 241058 - DNA, 201 bp, Homo sapiens
tctactaaaaatacaaaaattagctgggtgtggtggtgcatgcctgtagtcccagctactcgggaggccgaggcaggagaatcgcttgaacccgggaggcmgaggttgcagtgaaccgagattgcaccactgcactccagcctgggtgagaaagtgagactgcgtctcaaaaaaaaaaaaaaaaagtgtgcgtccagctct

SEQ ID NO: 241059 - DNA, 201 bp, Homo sapiens
caggcaggtggagccccaggagtggaccagacgcctctgcttgggaagcatcggcagtcctcagccagccgagggacagatggtagcaaaagctggaggaygcttaggtttttgagccaaaaatcttcatttatgcgccagaaaggtgggtcctgggcgccttctgttgtagacgtttccgttgtgaatgtccaggtcaga

SEQ ID NO: 241060 - DNA, 201 bp, Homo sapiens
agagccattgatcagacatgcaaaaaccctgaaaagacacagctcagaaggccggtcttaggttccacagtgctgctagtgctgttatctgcaggagtcaytggggaagtcgcatatcttgtgacctccagaagaatagctggcagttgtttatgtctaccccttagcagaattcaggttcctccatcctcctatcctcgt

SEQ ID NO: 241061 - DNA, 201 bp, Homo sapiens
ttatctatttatttgctgtagcaattcctcaagacattgcaactcattttacaagtaacatatctatataaggatatatagacaaaccctggccgggcgcrgtggctcacacctgtaatcccagcactttgggaagctgaggcgggcagatcgcttgaggtcacaccaccagcctggccaacatggtgaaaccccatctct

SEQ ID NO: 241062 - DNA, 201 bp, Homo sapiens
atcttctcttttggtttcatccttaaggcagtcctgcatttcttcccccatttttcgtctttgaatttatgcagacatttcttttttttttttttttttttgagatgtagtctggtcctgtcacccaggctggagtgcagtggcgcgatctcggctcacttcaacctccgcctcccgggttcaagcggttcttctgcctca

SEQ ID NO: 241063 - DNA, 201 bp, Homo sapiens
tctcctctatggcacgcgcggcggcactctagcagccaggtggcttctctatgggcttttccggcacaggtcggaagtggcgcgcgctgccccggaagcamcctggtgggtgggtgcctgccagcagctgaggcgccatggcggcggcagcggtgtcagagtcttggccggagctggagctggctgagcgcgagcggcggc

SEQ ID NO: 241064 - DNA, 201 bp, Homo sapiens
tttccttccagcacactccaggagcctcccttccccggtgcttttatcagggagcctgcacagcctgccaccctcaagagacgaggacattgtggcccaayctaggctgcagcccctgataactgtccccctccttaaccctgcccgataaggcgcctgctggcctctggggaggctggccaggggagggggggtgcgtgg

SEQ ID NO: 241065 - DNA, 201 bp, Homo sapiens
gcacagccaccagagccggcccttgaggctggcctccctcacttgctcagtaaacgtctctccacactcatgtgatggtcacaggtgtggcggcaggaacycatcagggactcccctccaggccctgggaggctcccggatcctggcacctcctgggggcttgtgagtgcaggaaggccctaggtacacaggcgcccctcc

SEQ ID NO: 241066 - DNA, 201 bp, Homo sapiens
ggcgtggttgtgaagaccttggaccgggagggtttcctggcacacagcccagccaagggtgaagtgtggacacctcgctgggcttcagggcacaagagacyttgctcatcactgcttctgtgttacagaccaagctccacgaagatctctgtgagaagaggacggctgccacccttgccacccacgagctccgtgccgtca

SEQ ID NO: 241067 - DNA, 201 bp, Homo sapiens
gcccacccaacaacaggctcccaggaaagcatcattgcttcagaccgcagcccaggacaggcccttgggctccctccttgggtttggagccaggagccttrgggcagtgtgcaatcagccatgcagctccacctgccaccggctggcccaggcagatctcaagtgagcctgctcgccccaaaggcggatgatgtggagtct

SEQ ID NO: 241068 - DNA, 201 bp, Homo sapiens
gggacacacccagcctctgcgcgtggtgggctgcctaggaagaactgtgcccacttactaaggaagatatggtgcatctgagacaagggcgggggacacayagccacccttacaaaaccaggagtcagaaaggcccagagaggacaggggcctgcccagggccacacagctctgcacactgctcccacggaggaaagcagc

SEQ ID NO: 241069 - DNA, 201 bp, Homo sapiens; identical to SEQ ID NO: 47098

SEQ ID NO: 241070 - DNA, 201 bp, Homo sapiens
acttatcatcggccaacctggaagacaacagaggaaggcctctgtgatgctgaaggaaaatggttttcaaacaggaatgctatatccaacccagatgttaygagggtatagagtaaggacatttgccaacatatcctgtccccaaaactttacccctgttcatcgttttttttttttttttgagatggagttttgctcttg

SEQ ID NO: 241071 - DNA, 201 bp, Homo sapiens
atgactttgataccaagaaggtacttagaatggtgcctggtccagcaagcacgctatgactcagagatgaggggggcaacaccatgcctccctatccaggygccctcctcctttccagccagtgatccaaccccttcacaatgcaacccaagacccgcagccctgcccatggggctccgcccaccactgccattgacgaac

SEQ ID NO: 241072 - DNA, 201 bp, Homo sapiens
ctggagctgggccccggcctctgctgggctgaccgtatttgggggcctggctgggcctacttggaggtccccttcttggatttgctggtcaggaaggcctstgactgttgcagggggggcactttgacgcctttctgcttcagctgattatagtagtcgcttctctctgagataattctctacacaagaaacacagccgtc

SEQ ID NO: 241073 - DNA, 201 bp, Homo sapiens
ggtgcgaggcatggacctgcagccagggaatgcactcaagcgcttcctcacctcgcaggtgggtgcccgtgggggtcctcagatgactgggacagaggtgygagacgccgcaagctgggacacatcctgaggccagcgtgtccgaaggagcagcagtggagtatggggcccagccgggtgtctgtgtgcttcagtttcctc

SEQ ID NO: 241074 - DNA, 201 bp, Homo sapiens
ctgcagcaggggtgtgctggtgaatacttacaaccggctctccagggggagaaaaaacaaacaaccctcggctttgtggcgttgccagtttctgtggtggkaatattcccacagtggctgattttcagccacggaagtgaagtcacagaatgcggagccgggggcaggtgcacaccaccagcccgcagaagcctgcactaa

SEQ ID NO: 241075 - DNA, 201 bp, Homo sapiens
agctccacgaagatctctgtgagaagaggacggctgccacccttgccacccacgagctccgtgccgtcaaagggcccctgctgtactgcgcccggcccccrcaggacctcaaggtgctgcagcctcctttgcagggtctgctgaagagtctccttggtgtcgaaagacgccatgctgctactgcagcccgaactttttttt

SEQ ID NO: 241076 - DNA, 201 bp, Homo sapiens
tcttcgtgtatgtccaggcaccacatgtgcgtgcacaccactcccgggagtcagtgtgcttggctcatgaggacacggccagccaccgcgatgattttacrgaccccactgccttacgatctgggtgccatgtgagaagcagactcatcagctttatcgaatgacaccatttgttctctgttcagtgtctcgatttctgtg

SEQ ID NO: 241077 - DNA, 201 bp, Homo sapiens
tgcagcttggcatgtgcaagggcgttgggttctccagctggcagtgatcataatcttggggggaaaagttttaatgtgaccttagaattggcagaattgcrtctcttcatactgctgttggattgctttgtgggggtggagatgtggagaccccttcaggcaagcagcctgtaggctgaaggcagtggcagcacctcaccc

SEQ ID NO: 241078 - DNA, 201 bp, Homo sapiens
actttctatgacgcagcatcttgtaaaaccatatcatgccaggatgcagcttggcatgtgcaagggcgttgggttctccagctggcagtgatcataatctyggggggaaaagttttaatgtgaccttagaattggcagaattgcgtctcttcatactgctgttggattgctttgtgggggtggagatgtggagaccccttc

SEQ ID NO: 241079 - DNA, 201 bp, Homo sapiens
atgggaccaagcgagaattccatctcaggccaagccctgacctcaggcatgtgggaggccagtgtttccttccagcacactccaggagcctcccttcccckgtgcttttatcagggagcctgcacagcctgccaccctcaagagacgaggacattgtggcccaacctaggctgcagcccctgataactgtccccctcctta

SEQ ID NO: 241080 - DNA, 201 bp, Homo sapiens; identical to SEQ ID NO: 47105

SEQ ID NO: 241081 - DNA, 201 bp, Homo sapiens
gaagtgagtgatgttcagtcatgctgctgggacacttggttttccagatgaaaacacataaataaaactacatgcaccatcgaggcttgtgtaaagactcygtgatcacacagcagcggctaagcacacgtttctcatgtgtcactgagcgacacgtgactgtcactggttcggagacccgaaaacttgggaagccaaccg

SEQ ID NO: 241082 - DNA, 201 bp, Homo sapiens
ccccctctgaggctgctgttaggagaggggcactaagggtcgggggctgactccctcaccgggtctgtcgcctgacttaacaggtgacctagacacaaagkggtagagtcatttgcccagggtcaggccgggaggatgggaccaagcgagaattccatctcaggccaagccctgacctcaggcatgtgggaggccagtgtt

SEQ ID NO: 241083 - DNA, 201 bp, Homo sapiens
gtaggggaagtgagtgatgttcagtcatgctgctgggacacttggttttccagatgaaaacacataaataaaactacatgcaccatcgaggcttgtgtaargactctgtgatcacacagcagcggctaagcacacgtttctcatgtgtcactgagcgacacgtgactgtcactggttcggagacccgaaaacttgggaagc

SEQ ID NO: 241084 - DNA, 201 bp, Homo sapiens
cacagcctgccaccctcaagagacgaggacattgtggcccaacctaggctgcagcccctgataactgtccccctccttaaccctgcccgataaggcgcctkctggcctctggggaggctggccaggggagggggggtgcgtggggcagggcagcaggtccggggcagcggctggtacagctagaccggtccctgtctgggg

SEQ ID NO: 241085 - DNA, 201 bp, Homo sapiens; identical to SEQ ID NO: 47106

SEQ ID NO: 241086 - DNA, 201 bp, Homo sapiens
agctgtgtcctcagcctgtgtgggttgcagcccctcccccacccacacctctaggagggctggggcttggggggcacgatgcactgagcacggggccgggrtggattcaaggccttggggaggccctacagagacaggagggtcgtagggctgggtggctgcccagagcaggaggggcccggccccaaggccagctccctg

SEQ ID NO: 241087 - DNA, 201 bp, Homo sapiens; identical to SEQ ID NO: 47097

SEQ ID NO: 241088 - DNA, 201 bp, Homo sapiens
tcctcctccggggcttgaggggcgtggcgcccgcacgtggcccacgctcggtgctcgcggcgggaagggaagcaggtgtgggtggggagcagagaagggtratggggagagtcccttccgaaggtgttcaggcgcccagagcctcagaggcgccggggaagcgtcggggaccacagacaccgttcccgtgcgtaaagcttt

SEQ ID NO: 241089 - DNA, 201 bp, Homo sapiens; identical to SEQ ID NO: 47099

SEQ ID NO: 241090 - DNA, 201 bp, Homo sapiens
agtctgcagatttgcaaggatgtcatggatgccctcattctggtgagtgtggggtggctcctcctgagaaacgcttttgagcgtgagtggtgctctgctcyttgacttcccacccgtcctgcttgcctcttttttgcttactgtgttggcagacagcagcatgtcttccctgggtcacctctcatctccaggttaaaaagg

SEQ ID NO: 241091 - DNA, 201 bp, Homo sapiens
caatcctcccacatcaacctcccaaagtgctggatttacaggtgtgagccactgtgcctggccacacagttttgtagatttttcctgagaacaaatgttgsagttgctgatgtctacatttgataactgttcttttctgaaatgtttttttcttttaaggttaagaaaacgacttctgatttgtttttggaagtaacaagt

SEQ ID NO: 241092 - DNA, 201 bp, Homo sapiens
ccgggatgctgtgtgcagcactgcagtcttcctctgtaaggagtgggcttggtgtgtgtgacgccatctgcttaattgattgattgagataggtcttgctstgttgccgaagttggagtgcagtggcaagatcatagctcactgcagcctcaaactcttgggcttaagcgatcctcccatgtcagcctcctgagtagctgg

SEQ ID NO: 241093 - DNA, 201 bp, Homo sapiens
gggcccgggggagtgccgcatgctggcctcagctgagttagtctgtgctcctcaggaaccgcctaatgctaccagaacccagaagcttcttaacagggtamaaagaaagcattctctttccaaaggagacgttgtggaaccagtctgtcatctagatggccctgacgtgagggaagtggaaggtgttaggagcggaggtat

SEQ ID NO: 241094 - DNA, 201 bp, Homo sapiens
cctccttccaggctgctgcagggtccagggagtgggagagcatctgcctggcaaggtcaccaacagtggcccaggcactgtggcctctgtcacgggtcctmcctctgtcagtagactgcacctgacctgtgccttcaagggggctaacgacccacccacctcacctgctcccctggagtggggcaccccaggtcagggctg

SEQ ID NO: 241095 - DNA, 201 bp, Homo sapiens
gatgcccgttgccaagcagaccgtggtctagtggtagcgtcagtgtcaaggaaaaacacctgctacttagcagaccgggaaagggagtctccctttccccrggggagtttagagaagactctactcctccacctgcatctgtaaaaacgggagtaactaatgtatcagctctagcatttgctgcgagaggggtccggggag

SEQ ID NO: 241096 - DNA, 201 bp, Homo sapiens
gacgcgtccccacagacaggccagtggtggctcttgtgagtgatgagtggtctccctgcctctcgagcatgaccttggactctcttcccagagtccgggcrtctgacgcgtccatgtttctctttgcagacgttggacctctcgaacaaccagctgagcgagatccctgcagagcttgcggactgccccaagctcaaggag

SEQ ID NO: 241097 - DNA, 201 bp, Homo sapiens
acagccggggagaaaaaagaggtggggtcatttcgcccaacctgagtatgtgtggcacccatccactttttcctaaaagatggccggcggccaggtgcagkggctcacgcctgtaatcccagcactttgggaagctgcggtgggcggatcacgaggttaagagattgagaccagcctgaccaacatggtgaaaccctgtct

SEQ ID NO: 241098 - DNA, 201 bp, Homo sapiens
cataccctggactgggagctctccagggccacgcgggtgtgctgctctgcctgctgaatcatctccttcttgctctgcaaatcctcctgcagctgcttccwcctctgcaggtggttctggtccagttccacctgctcctgcagctggctgaccttggtgtccaactctgagatgacacagtcccgcttggtgagctttctc

SEQ ID NO: 241099 - DNA, 201 bp, Homo sapiens
atggatgccctcattctggtgagtgtggggtggctcctcctgagaaacgcttttgagcgtgagtggtgctctgctccttgacttcccacccgtcctgcttkcctcttttttgcttactgtgttggcagacagcagcatgtcttccctgggtcacctctcatctccaggttaaaaaggtattttttatttgcagaaaatggc

SEQ ID NO: 241100 - DNA, 201 bp, Homo sapiens
tggctggccccaggcagtggcagcagctgtgtcctcagcctgtgtgggttgcagcccctcccccacccacacctctaggagggctggggcttggggggcaygatgcactgagcacggggccggggtggattcaaggccttggggaggccctacagagacaggagggtcgtagggctgggtggctgcccagagcaggagggg

SEQ ID NO: 241101 - DNA, 201 bp, Homo sapiens
gcgtggcggtgcatgcctgtaatcccagctactcgggaggctgaggcaggagaatcacttgaacctggaaggctgagcatagtggcacatacctgtagtcycagctactcaggaggctgaggcaggagaatcgcttgaaccccaggagacagaggttgcagtgagtcgagatcgcgccattccactccagcctgggcaaca

SEQ ID NO: 241102 - DNA, 201 bp, Homo sapiens
accgtgcgctgttgggtatcatccaagtcagggtccttggtgctgctctaagcaagatgatcatccgtaactagcccagtgatttctgtaaacacaggctkcagaatactttgttctttgaagcttgttatgcttgggcccttgatattacacttaatttgtgtaaagaactttttgagtcgtccattttaccctttaggt

SEQ ID NO: 241103 - DNA, 201 bp, Homo sapiens
gacctctggaaacagttgtgcatgagctggctttaaggttaagccctgcctcagtaggatcggtgtgtttgggcgtcaggtctccccgggacgctgcagtsgcagcccacatgcagcttcttgctgcgtggtcccgtgggatgctccctgcctgctgtagagatgaatgagggcgggagtcgggagggctcattgaggctt

SEQ ID NO: 241104 - DNA, 201 bp, Homo sapiens
ggtgcacagctgtgagaggactcggcggatgagcagtcgtgggaaaatggtttccttcactcgctcactaccttttaatcagaaattttggtctctgtccygatagtaaaaccgtttgcgtggggttggcagtagggtgagttgctgtgtcgtgctgtcctgggctgttgaatctgtggagtgcacgaggtcccggctgct

SEQ ID NO: 241105 - DNA, 201 bp, Homo sapiens
cctcagcagtagctctgcctgcgtgggagcctggcttccccagtgtcctggcctcagagccacgtggcttgctgagacctgagagcacccggccggccctycctggctgcttcccgctgctgtggcccgtggggctcagctggcagtgctgtggtgagccgaggatgggggcacgtcacacctctcctgactgcattgtaa

SEQ ID NO: 241106 - DNA, 201 bp, Homo sapiens
tagagtaggatccgatgctgttcttgcaaagacatgaaataatgaaacagaccgcgtttgcggttactcgaagcggtgcacagctgtgagaggactcggcrgatgagcagtcgtgggaaaatggtttccttcactcgctcactaccttttaatcagaaattttggtctctgtcccgatagtaaaaccgtttgcgtggggtt

SEQ ID NO: 241107 - DNA, 201 bp, Homo sapiens
gaaggaagaaagtctgctgattgataggttaagatagttttcctgatggtgattccacaaagtgagtgcctggctggccgggtggagaggagttggagggsagccctgtctcggaaaggggcgtggcgtggttgtgaagaccttggaccgggagggtttcctggcacacagcccagccaagggtgaagtgtggacacctcg

SEQ ID NO: 241108 - DNA, 201 bp, Homo sapiens
agtcagaagcttttgcagagatcactgttaaccgtggctgacgccttctcctcggagaggctcctcggatagtgcctttgatgtggggtgcagagctgggraagtgactcaaaggtgaatgacttgtggctccccagggacgcgtccccacagacaggccagtggtggctcttgtgagtgatgagtggtctccctgcctct

SEQ ID NO: 241109 - DNA, 201 bp, Homo sapiens
actcaagcgcttcctcacctcgcaggtgggtgcccgtgggggtcctcagatgactgggacagaggtgtgagacgccgcaagctgggacacatcctgaggcsagcgtgtccgaaggagcagcagtggagtatggggcccagccgggtgtctgtgtgcttcagtttcctcagctccaaaaagggaatagagcaggttctggct

SEQ ID NO: 241110 - DNA, 201 bp, Homo sapiens
gtcctctacccacatttcttgagtgtcaactctgtgtggatgctggtgtacacggcagaaccagcccgagccccagcgtacacagaccccggttctacctyggtgggcggtgggcagaggcctgggtgctcggccgccagctgctgggacagaccctcaggaggaagggctgggcataccctggactgggagctctccagg

SEQ ID NO: 241111 - DNA, 201 bp, Homo sapiens
tctggtgggaacctgacttcaaaagcctccatacatgaccttgacctttgcttaattttggattctaaatcaaggtcagggccaggcacggtagctcacayctgtattcccaacacttcgggaggccaaggcaggcagattgctggagcccaggagttcaagaccagcctggacagcatagtgagaccgtctctacaaaaa

SEQ ID NO: 241112 - DNA, 201 bp, Homo sapiens
ctcgttggccaaggacttggtcccggagatgctaaaggtggcctggatgatcttattccttaacctctcgagctgtgagcaaagggacaacactatcattygcctttacccaagaaggcacctggccagtgggctgcaccccccaccaccttattttttatgtaccaggaaggaacagctcaccctcacttttcatggctt

SEQ ID NO: 241113 - DNA, 201 bp, Homo sapiens
gccttcccagttcctcaccttggccttgaggccggtctgcacagtccgtgccagctgcccgggacgccaccctctcctcctcctccagagaggcttgctgyagcaggggtgtgctggtgaatacttacaaccggctctccagggggagaaaaaacaaacaaccctcggctttgtggcgttgccagtttctgtggtgggaat

SEQ ID NO: 241114 - DNA, 201 bp, Homo sapiens
ccggcctctgctgggctgaccgtatttgggggcctggctgggcctacttggaggtccccttcttggatttgctggtcaggaaggcctctgactgttgcagsgggggcactttgacgcctttctgcttcagctgattatagtagtcgcttctctctgagataattctctacacaagaaacacagccgtcgaggtggccttcc

SEQ ID NO: 241115 - DNA, 201 bp, Homo sapiens
tctgctcaggcgtgaggtctgtgctgagtgctgggcggacaccccggctcaggcctctggcagcctggtgccgcaaggggacctgttaggagctaggggcwcaggctggtgtgctgactccctgtgagtgagctttggaatggggagtgtccttgtagctcaaggtcgcagaggagagtaggcccccgcgtggatcccaga

SEQ ID NO: 241116 - DNA, 201 bp, Homo sapiens
ctcacttgctcagtaaacgtctctccacactcatgtgatggtcacaggtgtggcggcaggaacccatcagggactcccctccaggccctgggaggctcccrgatcctggcacctcctgggggcttgtgagtgcaggaaggccctaggtacacaggcgcccctccatagacctcttcaccccacagcgcctcagggccccac

SEQ ID NO: 241117 - DNA, 201 bp, Homo sapiens
gttgcagttggcatttctggtgggaacctgacttcaaaagcctccatacatgaccttgacctttgcttaattttggattctaaatcaaggtcagggccagkcacggtagctcacacctgtattcccaacacttcgggaggccaaggcaggcagattgctggagcccaggagttcaagaccagcctggacagcatagtgaga

SEQ ID NO: 241118 - DNA, 201 bp, Homo sapiens
tctgttgcactctcactccgtcctctacccacatttcttgagtgtcaactctgtgtggatgctggtgtacacggcagaaccagcccgagccccagcgtacwcagaccccggttctacctcggtgggcggtgggcagaggcctgggtgctcggccgccagctgctgggacagaccctcaggaggaagggctgggcataccct

SEQ ID NO: 241119 - DNA, 201 bp, Homo sapiens
tactgcgcccggcccccacaggacctcaaggtgctgcagcctcctttgcagggtctgctgaagagtctccttggtgtcgaaagacgccatgctgctactgsagcccgaactttttttttttttggagatggagttccattgttgcccaggctggagtgcagtggcacaatctcggctcactgcagcctccgcctcctgggt

SEQ ID NO: 241120 - DNA, 201 bp, Homo sapiens
tggaggtgagccccaggccagggccgcatgaggggccccctaagtggactgtggccgttggtctgggtcagggggaggggcctgggcgctctgctggagtygagaggaagctctccccgcccacagccaaccagagggaaggccaaaggctgcggtttgctgagctgctggaccgtgggctcccagccaggatggggtgga

SEQ ID NO: 241121 - DNA, 201 bp, Homo sapiens
cctgctggaggcttgaggcggcacgggggcttccccaggccaggactctgctggagttctggggctggggaccccagacagttgctctgagaggtgatttrgggctgccatggcagaggctgccctttctctgcatggcccggcccagcccgggaaggaggaagggaggaagggagggatgctggagctgccatcttggct

SEQ ID NO: 241122 - DNA, 201 bp, Homo sapiens
ccccagacagttgctctgagaggtgatttggggctgccatggcagaggctgccctttctctgcatggcccggcccagcccgggaaggaggaagggaggaarggagggatgctggagctgccatcttggctcccggggacttggtgtccatgctgtaacacatctgtcactgcgtgggtgtggatgaggctgccacatgctg

SEQ ID NO: 241123 - DNA, 201 bp, Homo sapiens; identical to SEQ ID NO: 47101

SEQ ID NO: 241124 - DNA, 201 bp, Homo sapiens
gtgatggggaggagcaggacgtgggagatgccggccggctgctgctcagggtcctgcacgtctctgaaaaccccgtacctctgacagtcagagtgagcccygaggtccgggatgtgcggccctacattgtgggggccgtggtgcgaggcatggacctgcagccagggaatgcactcaagcgcttcctcacctcgcaggtgg

SEQ ID NO: 241125 - DNA, 201 bp, Homo sapiens
ccaggcgaagcaggaggtgtcctctgagtaatcagcccatccccaactctgttcagagtctatcaagtccagccctacctgtctcctccacacccagtgtractaggactcaccagccacactgaccaagggcgagtgctggcttccagggggcccacatgctgttgcctcctctctgggggcagagccggcaccgaggct

SEQ ID NO: 241126 - DNA, 201 bp, Homo sapiens
acgcccgggcgcaaggccaagagcggctgcgtctatggtcatgacgtctgacagagcgtccacccgtcttcgacaggactctatggttcttacgcgcgcaracagaccgcctatataagccatgcgcaggcggaggagcgcctctttcccttcggtgtggtgagtaagcgcagttgtcgtctcttgcggtgccgttgctgg

SEQ ID NO: 241127 - DNA, 201 bp, Homo sapiens
aggtctgttctcgtcttccgttccgactctctctttttcgttgcagccactgaagatcctggtgtcgccatgggccgccgccccgcccgttggtgagtctwgaatccgtgtactttcactgctgggaaacgggcggggaaagaagtgcctatggccgctgaaaacaattgtggggtggagcctcccccgtgcggcggccct

SEQ ID NO: 241128 - DNA, 201 bp, Homo sapiens; identical to SEQ ID NO: 47161

SEQ ID NO: 241129 - DNA, 201 bp, Homo sapiens; identical to SEQ ID NO: 47159

SEQ ID NO: 241130 - DNA, 201 bp, Homo sapiens; identical to SEQ ID NO: 47117

SEQ ID NO: 241131 - DNA, 201 bp, Homo sapiens
aagagcggctgcgtctatggtcatgacgtctgacagagcgtccacccgtcttcgacaggactctatggttcttacgcgcgcagacagaccgcctatataarccatgcgcaggcggaggagcgcctctttcccttcggtgtggtgagtaagcgcagttgtcgtctcttgcggtgccgttgctggttctcacaccttttaggt

SEQ ID NO: 241132 - DNA, 201 bp, Homo sapiens; identical to SEQ ID NO: 47139

SEQ ID NO: 241133 - DNA, 201 bp, Homo sapiens; identical to SEQ ID NO: 47129

SEQ ID NO: 241134 - DNA, 201 bp, Homo sapiens
ctcagggacactctcgcggtcgccgggaggcccacctagggtactttccttttttccactctcagaaatatacgtctgtcacagttaacggcaaagcctarggcaagagttctacgcccaagatggccagccggaagcgggcttctcgcgaccatgtggcgaagccccattcgtcagctggccgcccgcggccctggtacc

SEQ ID NO: 241135 - DNA, 201 bp, Homo sapiens
cctctctgatctgcgcatgtgctgggctacgcccgggcgcaaggccaagagcggctgcgtctatggtcatgacgtctgacagagcgtccacccgtcttcgmcaggactctatggttcttacgcgcgcagacagaccgcctatataagccatgcgcaggcggaggagcgcctctttcccttcggtgtggtgagtaagcgcag

SEQ ID NO: 241136 - DNA, 201 bp, Homo sapiens; identical to SEQ ID NO: 47119

SEQ ID NO: 241137 - DNA, 201 bp, Homo sapiens; identical to SEQ ID NO: 47115

SEQ ID NO: 241138 - DNA, 201 bp, Homo sapiens
acccgtcttcgacaggactctatggttcttacgcgcgcagacagaccgcctatataagccatgcgcaggcggaggagcgcctctttcccttcggtgtggtragtaagcgcagttgtcgtctcttgcggtgccgttgctggttctcacaccttttaggtctgttctcgtcttccgttccgactctctctttttcgttgcagc

SEQ ID NO: 241139 - DNA, 201 bp, Homo sapiens; identical to SEQ ID NO: 47116

SEQ ID NO: 241140 - DNA, 201 bp, Homo sapiens; identical to SEQ ID NO: 47158

SEQ ID NO: 241141 - DNA, 201 bp, Homo sapiens; identical to SEQ ID NO: 47118

SEQ ID NO: 241142 - DNA, 201 bp, Homo sapiens; identical to SEQ ID NO: 47163

SEQ ID NO: 241143 - DNA, 201 bp, Homo sapiens
aacaataagaagtacacgggtttatttctgtggcctgagaaggaagggacctccacgacaggtgggctgggtgcgatcgccggctgtttggcatgttcccmccgggagtgccgggcaggagcatggggtgcttggttgtttccttcctaataaaataaacgcgggtcgccatgcgttgggcctcttgtcgctcatttctgc

SEQ ID NO: 241144 - DNA, 201 bp, Homo sapiens; identical to SEQ ID NO: 47166

SEQ ID NO: 241145 - DNA, 201 bp, Homo sapiens; identical to SEQ ID NO: 47167

SEQ ID NO: 241146 - DNA, 201 bp, Homo sapiens
tccccaccccatgactgccttccatgtcttctcaccctgccctgagagtgctggagggaagaggtgagtctcccaccccacccccaccaacacacagttgygctccaccatactgaacctgactctcagtgagactttgctggccctgagaatgcacggggaaggtggctgtcccctgccttggcccccatcacttgccaa

SEQ ID NO: 241147 - DNA, 201 bp, Homo sapiens
agctctgttccgaccttgcaatgtgactggatcctcagttttcctatctgtcaagtggggacactgcttcttcaggtggctgcaaggacccaaggcagctyaggtaggagcagagctgaggaacttgttcctctaagatgccaaaggccctcccagagcctcacagtgcgcctctttctctggccccacaggctctcactg

SEQ ID NO: 241148 - DNA, 201 bp, Homo sapiens
cctgaggtgtctctctctctcccttctgcttacagctgtataagcgttttcagttgctggaggggccccctgagtcgatgggccgaggccgagactggaaygttgacctgattcccaaattcctcatggctaacggtgagggacaggaaggaggtattgcaggtcgggggtgatagggaagacccgaggacggtcaggctc

SEQ ID NO: 241149 - DNA, 201 bp, Homo sapiens
gctctgttccgaccttgcaatgtgactggatcctcagttttcctatctgtcaagtggggacactgcttcttcaggtggctgcaaggacccaaggcagcttwggtaggagcagagctgaggaacttgttcctctaagatgccaaaggccctcccagagcctcacagtgcgcctctttctctggccccacaggctctcactga

SEQ ID NO: 241150 - DNA, 201 bp, Homo sapiens
ggaccttggttgttaacacctcaaggttacctgggaacctgtcacctcccccttgagcaaaacctctgggactttgtgtgggcaaataccaggccagctayctgagccatttatggggcaaccatgcccttctgtttgctctcgcccccaaagcccagcccaggcaccttagtgaccctaagagggagtaaaaggaggggc

SEQ ID NO: 241151 - DNA, 201 bp, Homo sapiens
caacggtcacctgatctgcggctgtcgaggccgctgaggcagtggaggctgaggctatgatggcggccatggcgacggctcgagtgcggatggggccgcgrtgcgcccaggcgctctggcgcatgccgtggctgccggtgtttttgtcgttggcggcggcggcggcggcggcagcggcggagcagcaggtcccgctggtgc

SEQ ID NO: 241152 - DNA, 201 bp, Homo sapiens
aacgcgtcgggtgggcgtagggttccgcgaagcctccctgtccctcttgtctcgtcctagtcggtctagctgggccccatcccctttcccactcggagcgkgagcgcctggagacacgtacagccaaccagtgagaaggagtggccgcgagtggcatgcacttggtccaattacctgcggccctgccggtcggcccgcgct

SEQ ID NO: 241153 - DNA, 201 bp, Homo sapiens
tgcttcttcaggtggctgcaaggacccaaggcagcttaggtaggagcagagctgaggaacttgttcctctaagatgccaaaggccctcccagagcctcacrgtgcgcctctttctctggccccacaggctctcactgacctatgaacgactctttggtaccacagtgacattcaagtgagtcctgggggtggttgaggtat

SEQ ID NO: 241154 - DNA, 201 bp, Homo sapiens
aggaggtggtccctgaggtgtctctctctctcccttctgcttacagctgtataagcgttttcagttgctggaggggccccctgagtcgatgggccgaggcygagactggaatgttgacctgattcccaaattcctcatggctaacggtgagggacaggaaggaggtattgcaggtcgggggtgatagggaagacccgagga

SEQ ID NO: 241155 - DNA, 201 bp, Homo sapiens
ggtgggcgtagggttccgcgaagcctccctgtccctcttgtctcgtcctagtcggtctagctgggccccatcccctttcccactcggagcgtgagcgcctrgagacacgtacagccaaccagtgagaaggagtggccgcgagtggcatgcacttggtccaattacctgcggccctgccggtcggcccgcgctggggccaat

SEQ ID NO: 241156 - DNA, 201 bp, Homo sapiens
tcggtctagctgggccccatcccctttcccactcggagcgtgagcgcctggagacacgtacagccaaccagtgagaaggagtggccgcgagtggcatgcamttggtccaattacctgcggccctgccggtcggcccgcgctggggccaatggaggtgcgaggcggggctcgggcgggggcaacggtcacctgatctgcggc

SEQ ID NO: 241157 - DNA, 201 bp, Homo sapiens
tattttcttatgtcacataggtagggcttggcattagggaatcgatgactgaagccacagttgtctctgggggaggctgggaatgggggtgggatgagaartagctgctcctaaggatcctcagtggaaagtaaacacaccactttcagatggtctagaaggtttctaaagcagacagtggggagtgtttctttatgcagg

SEQ ID NO: 241158 - DNA, 201 bp, Homo sapiens
cttgcatttgatcctcatcttccccaggccattcagggtggtgggaagactggcctggtacctgggtgggggtaaatcaggggtgctgctattcccccagytacctggaccagccctgccttgagaccgtcaaccgcatcaagttgtacagtgagtccctggcccggtatggcaagagcccatatttatacccgctctacg

SEQ ID NO: 241159 - DNA, 201 bp, Homo sapiens; identical to SEQ ID NO: 47168

SEQ ID NO: 241160 - DNA, 201 bp, Homo sapiens
cggggctggggaggggcagtcgggccagacttgtgtccagccactggaacccctctctgcgtatggccagcgcctctggcctgagttgacggagctcttcytgtggccagacatctacgtgtgcatgatctcctatgcacacaacgtggcggcccagggcaagtacatagctattgccagcactactgtggagaccacgga

SEQ ID NO: 241161 - DNA, 201 bp, Homo sapiens; identical to SEQ ID NO: 47169

SEQ ID NO: 241162 - DNA, 201 bp, Homo sapiens
tctcaccctgccctgagagtgctggagggaagaggtgagtctcccaccccacccccaccaacacacagttgtgctccaccatactgaacctgactctcagygagactttgctggccctgagaatgcacggggaaggtggctgtcccctgccttggcccccatcacttgccaaacctcctcagatgtctcccctatttccct

SEQ ID NO: 241163 - DNA, 201 bp, Homo sapiens
gaagtcttcagagtcatgactgtgggtgagaggtctctttcagaggccacatgccatgtctgtggtgcagaaagtgttcttgatcacagtgcctctggggkgcgggggggcgggcacccagcccgtgcgtcaaggcccacctatctgagcggcagggtagggccatgcattcaggaggggcagtagtgatggctccgagga

SEQ ID NO: 241164 - DNA, 201 bp, Homo sapiens; identical to SEQ ID NO: 47170

SEQ ID NO: 241165 - DNA, 201 bp, Homo sapiens
gggtggtcaggccaggcctcattgaggaggtgatatatgagcagcgatcttaatggagggagggagccgtttggggaaggacattcctggaacagcaaatkcgagggtcctgggcgaggtgtgctcttggccagctcaaggaagagctggtgtggctggagcacagtgagtgagagaaaggggtaggagatgtaggagatg

SEQ ID NO: 241166 - DNA, 201 bp, Homo sapiens
atgttgtgctaacaataagaagtacacgggtttatttctgtggcctgagaaggaagggacctccacgacaggtgggctgggtgcgatcgccggctgtttgrcatgttcccaccgggagtgccgggcaggagcatggggtgcttggttgtttccttcctaataaaataaacgcgggtcgccatgcgttgggcctcttgtcgc

SEQ ID NO: 241167 - DNA, 201 bp, Homo sapiens; identical to SEQ ID NO: 47173

SEQ ID NO: 241168 - DNA, 201 bp, Homo sapiens
ggggacctgggtcctggcttccagctctgttccgaccttgcaatgtgactggatcctcagttttcctatctgtcaagtggggacactgcttcttcaggtgrctgcaaggacccaaggcagcttaggtaggagcagagctgaggaacttgttcctctaagatgccaaaggccctcccagagcctcacagtgcgcctctttct

SEQ ID NO: 241169 - DNA, 201 bp, Homo sapiens
gctccagaggaggcacggccagaccagctagagcctctggagagagccgtgctgatgttgcccttgtgcacccccacagggcagctggtaaagatgctacygtatacagaggtgactcgctacctggacttcaaggtggtggagggcagctttgtctacaaggggggcaagatctacaaagtgccgtccactgagactgag

SEQ ID NO: 241170 - DNA, 201 bp, Homo sapiens; identical to SEQ ID NO: 47183

SEQ ID NO: 241171 - DNA, 201 bp, Homo sapiens; identical to SEQ ID NO: 47184

SEQ ID NO: 241172 - DNA, 201 bp, Homo sapiens; identical to SEQ ID NO: 47185

SEQ ID NO: 241173 - DNA, 201 bp, Homo sapiens; identical to SEQ ID NO: 47186

SEQ ID NO: 241174 - DNA, 201 bp, Homo sapiens; identical to SEQ ID NO: 47187

SEQ ID NO: 241175 - DNA, 201 bp, Homo sapiens; identical to SEQ ID NO: 40106

SEQ ID NO: 241176 - DNA, 201 bp, Homo sapiens
ctaaaaatttggttatcgttaacactaaagccaaaaaaggaattggaagagagccacttaaaaacccaaaggccttctccgcggcgctccgggcccgggcsgctggccttaccgcccactgggtaaggaggctcaagctgagcccggcgctgccgccgcccttctcttgctctccgtgtctcccttagttttgggcgcagg

SEQ ID NO: 241177 - DNA, 201 bp, Homo sapiens; identical to SEQ ID NO: 47204

SEQ ID NO: 241178 - DNA, 201 bp, Homo sapiens; identical to SEQ ID NO: 47191

SEQ ID NO: 241179 - DNA, 201 bp, Homo sapiens; identical to SEQ ID NO: 47192

SEQ ID NO: 241180 - DNA, 201 bp, Homo sapiens; identical to SEQ ID NO: 47207

SEQ ID NO: 241181 - DNA, 201 bp, Homo sapiens
tggttatcgttaacactaaagccaaaaaaggaattggaagagagccacttaaaaacccaaaggccttctccgcggcgctccgggcccgggccgctggcctyaccgcccactgggtaaggaggctcaagctgagcccggcgctgccgccgcccttctcttgctctccgtgtctcccttagttttgggcgcaggagagccctg

SEQ ID NO: 241182 - DNA, 201 bp, Homo sapiens; identical to SEQ ID NO: 47195

SEQ ID NO: 241183 - DNA, 201 bp, Homo sapiens; identical to SEQ ID NO: 47196

SEQ ID NO: 241184 - DNA, 201 bp, Homo sapiens; identical to SEQ ID NO: 47233

SEQ ID NO: 241185 - DNA, 201 bp, Homo sapiens; identical to SEQ ID NO: 47234

SEQ ID NO: 241186 - DNA, 201 bp, Homo sapiens; identical to SEQ ID NO: 47218

SEQ ID NO: 241187 - DNA, 201 bp, Homo sapiens
gagaaggttaatgagacagtacttgtcgcatcttgtgtgccttcaaaaattaccttgataatcctacctgacaaaacatcttaaggtaggcctagggggacatgaattttcacctgaaatatctgcattctcattaaagtcccaggaatcaaacagacttaagtgaaagatgacatactaagtttcttagtgtttcaatct

SEQ ID NO: 241188 - DNA, 201 bp, Homo sapiens
aattacttgaaatagccaaagctaatgcagctgccatgtgtgctaaggctggtgtccctttaccaccaaacctaaagcctgcacctccacctactatagawgagaaagttgctaaaaagtcaggaggagctactatagaagaactaactgaggtaagctagacagaatttgttttcattcttaaatggattattccagtga

SEQ ID NO: 241189 - DNA, 201 bp, Homo sapiens
caattacttgaaatagccaaagctaatgcagctgccatgtgtgctaaggctggtgtccctttaccaccaaacctaaagcctgcacctccacctactatagwagagaaagttgctaaaaagtcaggaggagctactatagaagaactaactgaggtaagctagacagaatttgttttcattcttaaatggattattccagtg

SEQ ID NO: 241190 - DNA, 201 bp, Homo sapiens
agacagtacttgtcgcatcttgtgtgccttcaaaaattaccttgataatcctacctgacaaaacatcttaaggtaggcctagggggacatgaattttcacytgaaatatctgcattctcattaaagtcccaggaatcaaacagacttaagtgaaagatgacatactaagtttcttagtgtttcaatctcactttgcttaga

SEQ ID NO: 241191 - DNA, 201 bp, Homo sapiens
taggaaaagcaaagtaagtgtgagaaggttaatgagacagtacttgtcgcatcttgtgtgccttcaaaaattaccttgataatcctacctgacaaaacatyttaaggtaggcctagggggacatgaattttcacctgaaatatctgcattctcattaaagtcccaggaatcaaacagacttaagtgaaagatgacatacta

SEQ ID NO: 241192 - DNA, 201 bp, Homo sapiens; identical to SEQ ID NO: 47215

SEQ ID NO: 241193 - DNA, 201 bp, Homo sapiens
cggccttttttctgtagtcttaatggctcagatttctgatgagcttttttgggggtccctaagatttatctaatttgatattggcattagagtaaataaatcccatctggttgttaaagttgaatactcccatctctttagggtatgtaaattcaaaccttcttaagttgtaaattaaggactaagaatttcctctctaaa

SEQ ID NO: 241194 - DNA, 201 bp, Homo sapiens
ccggccttttttctgtagtcttaatggctcagatttctgatgagcttttttgggggtccctaagatttatctaatttgatattggcattagagtaaataaatcccatctggttgttaaagttgaatactcccatctctttagggtatgtaaattcaaaccttcttaagttgtaaattaaggactaagaatttcctctctaa

SEQ ID NO: 241195 - DNA, 201 bp, Homo sapiens; identical to SEQ ID NO: 47245

SEQ ID NO: 241196 - DNA, 201 bp, Homo sapiens
cccggccttttttctgtagtcttaatggctcagatttctgatgagcttttttgggggtccctaagatttatctaatttgatattggcattagagtaaataaatcccatctggttgttaaagttgaatactcccatctctttagggtatgtaaattcaaaccttcttaagttgtaaattaaggactaagaatttcctctcta

SEQ ID NO: 241197 - DNA, 201 bp, Homo sapiens
ccttttttctgtagtcttaatggctcagatttctgatgagcttttttgggggtccctaagatttatctaatttgatattggcattagagtaaataaatcccatctggttgttaaagttgaatactcccatctctttagggtatgtaaattcaaaccttcttaagttgtaaattaaggactaagaatttcctctctaaaatc

SEQ ID NO: 241198 - DNA, 201 bp, Homo sapiens; identical to SEQ ID NO: 47229

SEQ ID NO: 241199 - DNA, 201 bp, Homo sapiens
tcttaagagcagccccggtaactggaggaatgggagccgttttgatgagaaaaatgggctggagagaaggagaaggattaggaaaaaacaaagaaggcaayaaggaacccatcctagttgattttaagacagaccgaaaaggtaacaagttcttttttggaatgtttattaacgtctcctttaacattacctttaatatat

SEQ ID NO: 241200 - DNA, 201 bp, Homo sapiens; identical to SEQ ID NO: 47230

SEQ ID NO: 241201 - DNA, 201 bp, Homo sapiens
aactggggctcaaagagtgatttaaggtgtcagaaggagagtaaggtcatgataattttgtgaaatgaaataggctttggcaggtttatatcttagagtgwgtgtagtagggtgatcattatagttgtgtagtaacctattgtaatattctaatgggaagctcaatatgtggacttaattccctgaatgaggccactgctg

SEQ ID NO: 241202 - DNA, 201 bp, Homo sapiens
gatctcagctgactgcaagctccgcctcccgggttcacgccattgtcctgcctcagcctccggagtagctgggactacaggcgcacaccaccacgcccggstaattttttgtattttttttttttttagtagagacggggttttaccgtgttagccaggatggtcttgatctcctggcctcgtgatccacacgtcttggcc

SEQ ID NO: 241203 - DNA, 201 bp, Homo sapiens
tcagtaagtacatgttcagacaggaaatacattgctgacagtgcaaggtgtttagtaaatctaatttgtgtgaatgacagctgatctttatcacaacaaaygttggtgactgaaaaaaagtatacaagcttctttaaaaagttgttttacggccgggtgcagtggctcacgcctgttatcccagcactttgaaaggccgag

SEQ ID NO: 241204 - DNA, 201 bp, Homo sapiens
aggcgggcggatcagttgaggtcaggagttcaagaccagcctgactaacatggagaaaccctgtctcgactaaaaatacaaaattagccgggcgcggtggygcatgtttgtaatcaatcccagctactctggaggctgaggcaggagaatcgcttgaactcgggaggaggaggttgcagtgagcagacatcgcaccattgc

SEQ ID NO: 241205 - DNA, 201 bp, Homo sapiens
gggagggtggggacccattgtcatatgagctcttttttgcatttttagtgtatctgtgtgatagtttgaagaatattaacagctgtattttttagtagctrtgcttttagatacatttcaaaatcttattaatgggattcactaaatgttgtcaaactgcttctttagaaagtttaggcaaacatttaatgttaaatatgt

SEQ ID NO: 241206 - DNA, 201 bp, Homo sapiens
tttaaattatagataaaagtagcacttaaaggaaaagattcatttgtatagaattactgaagaatatttgatgctagtatcaactaaaaaagaaacttttkaaaattaaaaatgggccacaacatgtagaagtcattaggcagctgaaaatttaggatgtatgatccatgttaaatatcacaaatattgtctactcattaa

SEQ ID NO: 241207 - DNA, 201 bp, Homo sapiens; identical to SEQ ID NO: 47227

SEQ ID NO: 241208 - DNA, 201 bp, Homo sapiens
ggcgacagagtgagactgtctcaaaaaaaaaaaaaaaaagaggtggcacttgaactggggctcaaagagtgatttaaggtgtcagaaggagagtaaggtcrtgataattttgtgaaatgaaataggctttggcaggtttatatcttagagtgtgtgtagtagggtgatcattatagttgtgtagtaacctattgtaatatt

SEQ ID NO: 241209 - DNA, 201 bp, Homo sapiens
gagtcatgtacactgctaggtagaaacttctgaatgtgcttccattacaaaattttggtctttatctaatgatgtgctgatccataatgtttgtatacttmtaaatgtgttaataacttaaataacttttaaaaagtgaatcttttactgactcaattggttttcccctaaaataatttcttctggtatttgcagtcttgt

SEQ ID NO: 241210 - DNA, 201 bp, Homo sapiens; identical to SEQ ID NO: 47213

SEQ ID NO: 241211 - DNA, 201 bp, Homo sapiens
tttttttttcttttttgttagatacccaagttcttcgatggatctaggatgcctttagttttgttagtatgttagacttttggtaatacaaaatgtacagycttttaggaaaactgcagcttgtatttttcttcttacagataaggctcaattacttgaaatagccaaagctaatgcagctgccatgtgtgctaaggctgg

SEQ ID NO: 241212 - DNA, 201 bp, Homo sapiens
caactccaccaaaaagccaggtaacattaacaaaagaattccctgtatcatctggatctcaacatcggaaaaaagaagcggatagtgtttatggagaatgrgttcctgtggagaaaaatggtgaagaaaacaaagatgatgataatgttttcagcagcaatttgccctcagaggtaagtaggaggaatattatgtattttt

SEQ ID NO: 241213 - DNA, 201 bp, Homo sapiens; identical to SEQ ID NO: 47217

SEQ ID NO: 241214 - DNA, 201 bp, Homo sapiens
ttaaatatgttttaaaagttaaatatttaagtctgcttttcagccatttttagtgaattattaccagtgatgttttaatcaggtaattttacttagttaaytgagactacttcttttcttcagattgatgcctgggctcagctgaactctattcctggccagttcacaggaagtacaggagtacaggttttgacacaagaa

SEQ ID NO: 241215 - DNA, 201 bp, Homo sapiens
attcatgactctcaaacagacttgcttagattcatggctctaacaaccttcattgaagtatgacttatctaacattttgtattatgaaacaaacaattaatagaaaatggtaagttttgctttggcctatgtcaagtgttgatttattttcttctgtagtctttttttttttttttttttttttttttgagacggagtctc

SEQ ID NO: 241216 - DNA, 201 bp, Homo sapiens
gattcatgactctcaaacagacttgcttagattcatggctctaacaaccttcattgaagtatgacttatctaacattttgtattatgaaacaaacaattaatagaaaatggtaagttttgctttggcctatgtcaagtgttgatttattttcttctgtagtctttttttttttttttttttttttttttgagacggagtct

SEQ ID NO: 241217 - DNA, 201 bp, Homo sapiens
agattcatgactctcaaacagacttgcttagattcatggctctaacaaccttcattgaagtatgacttatctaacattttgtattatgaaacaaacaattaatagaaaatggtaagttttgctttggcctatgtcaagtgttgatttattttcttctgtagtctttttttttttttttttttttttttttgagacggagtc

SEQ ID NO: 241218 - DNA, 201 bp, Homo sapiens; identical to SEQ ID NO: 47238

SEQ ID NO: 241219 - DNA, 201 bp, Homo sapiens; identical to SEQ ID NO: 47219

SEQ ID NO: 241220 - DNA, 201 bp, Homo sapiens
tagattcatgactctcaaacagacttgcttagattcatggctctaacaaccttcattgaagtatgacttatctaacattttgtattatgaaacaaacaattaatagaaaatggtaagttttgctttggcctatgtcaagtgttgatttattttcttctgtagtctttttttttttttttttttttttttttgagacggagt

SEQ ID NO: 241221 - DNA, 201 bp, Homo sapiens
agtcacaatgccatggggtaactgctatgtgatttcccatttgcaaggaagcatattaattcagtttctgctcaatatacaattaggttgtagggatataratatctcatttgagttatctgagtttttcatctttatatctaaaaatctaatctgaaaatagtaaaacacatttaaaaccttagatgctactgtagtaaa

SEQ ID NO: 241222 - DNA, 201 bp, Homo sapiens; identical to SEQ ID NO: 47222

SEQ ID NO: 241223 - DNA, 201 bp, Homo sapiens; identical to SEQ ID NO: 47223

SEQ ID NO: 241224 - DNA, 201 bp, Homo sapiens; identical to SEQ ID NO: 47224

SEQ ID NO: 241225 - DNA, 201 bp, Homo sapiens
aataacttttaaaaagtgaatcttttactgactcaattggttttcccctaaaataatttcttctggtatttgcagtcttgtaggcagttaacagactttadtaactttaaaatgtttagtagcaccttgaaaaaaggcttcaactttatattttatgtaagatatactttgggaagcaaattattttgataaattatgaga

SEQ ID NO: 241226 - DNA, 201 bp, Homo sapiens
tctgttttccaagattactttctctttctgagtcttctccctgttttccaagattattagtattataagactattattttgtttttgatatgtagcaactraagatatgagtacttttcagaatttaggggactatggtaatttgagataattatctctgttttctttcttagcctgtggacatctctacagcaatgagtg

SEQ ID NO: 241227 - DNA, 201 bp, Homo sapiens
ggttttaaaaggtagaatatgagctttgaaaagaaacaaaagtgtttcagttgatgttatggacttccacagaaatattgtaattataaatagtgtaatawacttaatataagtaataagtgtgtataaactgaaaacatggttcatttatttatatcctgaatatattgtttaaagaaattgggttcttaagaccaaagt

SEQ ID NO: 241228 - DNA, 201 bp, Homo sapiens
acccaggaggcgagaggttgcagtgagccaagactgtgccattgcactccagcttgggcaataagggcgaaactccatctcaaaaaaaaaaaaaaaaaaaatgaaaccagtagtcaaattactatttggtaatacatttttgacatgaacttgcagctcccttggtaagtctgttgaagagtaaatgaagttttactacct

SEQ ID NO: 241229 - DNA, 201 bp, Homo sapiens
tctgaacgaggcagatcacccaaacgtctgacagatttgggtgagtcattttaaagtttaatgggatggtagtagaaaatgttttaaaccttaatttttttctgaccttgagtcaagtgaaatacttagttactggtttaggataaatgtttctgtctttaagtttttattattacatggtactgtatttaggaactactg

SEQ ID NO: 241230 - DNA, 201 bp, Homo sapiens
tttttttttttttgagacagagtcttgctctgttgcctaggctggagtacagtggtgcaatttcagctcactgaaacctcgacctactgggttcaagtgakccgcctcagcctcccaaatagctgggactacaggtgcgcgtcaccatgcctggctaatttttgtatttttagtagagatggggtttcaccatgctggcca

SEQ ID NO: 241231 - DNA, 201 bp, Homo sapiens
gagaagattgatagagaaatcgagtgtactaggaatctgctgattttatttgaaggcatacattttgaggttcagactcctacagagggatctttgttttmaagtggtgctttgaaatttatttagtgaacaatttttttttaaaggtcttgttgcagtaggagaaagagcacaaaagaggtctgggaacttctctgctgc

SEQ ID NO: 241232 - DNA, 201 bp, Homo sapiens; identical to SEQ ID NO: 47226

SEQ ID NO: 241233 - DNA, 201 bp, Homo sapiens
ccaggtcttctgaacgaggcagatcacccaaacgtctgacagatttgggtgagtcattttaaagtttaatgggatggtagtagaaaatgttttaaaccttwatttttttctgaccttgagtcaagtgaaatacttagttactggtttaggataaatgtttctgtctttaagtttttattattacatggtactgtatttagg

SEQ ID NO: 241234 - DNA, 201 bp, Homo sapiens; identical to SEQ ID NO: 47254

SEQ ID NO: 241235 - DNA, 201 bp, Homo sapiens
ggacagggttttgctgttttgcccaggctggtcttgaactcctgacctcaagtgatcctcctgcttcagctttccaagtagctgcaattacaggctcaagycaccacacctggctcagagaggtctttttatgtcttcatcaggagactattctgaatagctaatacattcatatgttaggaaattcaaaaggcacaagac

SEQ ID NO: 241236 - DNA, 201 bp, Homo sapiens
cgccagtggctgcgtccagaggtacgctccaaggagcagatgctggagctgttggtgctggagcagttcctgggcgcactgccccctgagatccaggcccrtgtgcaggggcagcggccaggcagccccgaggaggctgctgccctagtagatgggctgcgccgggagccgggcggaccccggagatgggtgagtgagtgt

SEQ ID NO: 241237 - DNA, 201 bp, Homo sapiens
gggggatggggccaccagggagtgggagtcaggccaccaggggagtggggatggggtgacaggacagagaacagagccaggctgggctggccatgggggcwccagcctcaggggccatcaccagggccaccagacagctcctgggaactcaggccagcaccaggcaggctcatcggcgggggctccaccagcacagcagag

SEQ ID NO: 241238 - DNA, 201 bp, Homo sapiens
ccacagaagtaaaaaccatatcgtgaggaactgggggatggggccaccagggagtgggagtcaggccaccaggggagtggggatggggtgacaggacagaraacagagccaggctgggctggccatgggggctccagcctcaggggccatcaccagggccaccagacagctcctgggaactcaggccagcaccaggcaggc

SEQ ID NO: 241239 - DNA, 201 bp, Homo sapiens
cgaggcgggtggatcatatgaggtcaggagatcgagaccagcctggccaacatggtgaaaccatgtctctactaaaaatacaaaaaattggctaggtgcgrtggctcacgcctgcaatcccagcactttgggaggctgaagtgggcagatcacctgaggtcgggagttcgagaccagcctgaccaacatggagaaaccctg

SEQ ID NO: 241240 - DNA, 201 bp, Homo sapiens; identical to SEQ ID NO: 47416

SEQ ID NO: 241241 - DNA, 201 bp, Homo sapiens
tgtgggtgttctggtgtggaagataaaattctgacatgtcccatatctgaaacacattgtctagccctcaacattagattgaagtttggctggaagaattytttttattagtacagtcacagacctttttttatcactattgttggtgagctttttcagtttgaaattcacatctctcagttctgggaaactgccttgaaa

SEQ ID NO: 241242 - DNA, 201 bp, Homo sapiens; identical to SEQ ID NO: 47417

SEQ ID NO: 241243 - DNA, 201 bp, Homo sapiens; identical to SEQ ID NO: 47418

SEQ ID NO: 241244 - DNA, 201 bp, Homo sapiens; identical to SEQ ID NO: 47419

SEQ ID NO: 241245 - DNA, 201 bp, Homo sapiens
agggccaggaggtcctatcagagaagatggagccctccagtttccagcccctacctgaaactgagcctccaactccagagcctgggcccaagacacctccyaggactatgcaggaatcaccactgggcctgcaggtgaaagaggagtcagaggttacagaggactcaggtgagggcatgcacggtgggcgcgcctaaggtc

SEQ ID NO: 241246 - DNA, 201 bp, Homo sapiens
  misc_feature (1)...(201): n = A,T,C or G
cgataaactccataatttatggcctgcagtatctcttcttggtgagtaggaataggtggttgggtctggggagattggccttctgtccctctggcctgttnaccccccctacctgtactggccacaggagcccaaccccgaggacccactgaacaaggaggccgcagaggtcctgcagaacaaccggcggctgtttgagca

SEQ ID NO: 241247 - DNA, 201 bp, Homo sapiens
gagggcgagacccagcagccaccacccccttcccctttcccatcctaggactcaccagggagaaggtggagtcggtagccagctgatgcagggggcggcarggttcgtgacagaatagggccagcagtacacgctcacatttctacaaacattgtaagggatgtcacagctctgggcagcacctataaagcctctctgggc

SEQ ID NO: 241248 - DNA, 201 bp, Homo sapiens
gaatcagaggagtggcgcctgggcccctccgcaggcaagtgccacaccatgcgctcacggggctggcagtttccgtggtgacggccggaagtcgctgaccsgcagagttccgtttcctcccgccctccgaggcacgctgagctgtgattggatgggaagctgacccccgcctccatccccttttccagatagtgggggaag

SEQ ID NO: 241249 - DNA, 201 bp, Homo sapiens
aaagctggggtggtggaaggtgtggtcacaggtggcattggagcaccctacaacaggctgcccagtgcctggggcagctctaaagttggtggggataccakgactgtgcctggggttggttgggatgaagcctactctaggatgagaagcgtaggcaggatccagtgacctgtggcttcctggccaagaggccagcaaagt

SEQ ID NO: 241250 - DNA, 201 bp, Homo sapiens
tgtgggtgggcccaccgaggaggaggagccttctgaggctccttctatctgaggcctcaggcagaagtcaaggtctcacgaataagctgggtcctcaagtkgaggttgggtggaaagcgcccaccccggtactggcttgggtcactcgggcgggactcaaaacatgaaacactcggacgcgcagaggaaacgggagctgtt

SEQ ID NO: 241251 - DNA, 201 bp, Homo sapiens
atggggctgagtagggagagagggtgctgcctgggagctgagccatacaagtgactgcacaggttgacatggaggattaggtggagtgaggcttccaagcwgggaggggaatgatggtggggcccaaatgaggagccacatcgaagtagatgagagaatagaaggtgaagtaagggctggcgttgggtagggggagacgcc

SEQ ID NO: 241252 - DNA, 201 bp, Homo sapiens
ccatgccctacaactgggcctcactcacatctgtctcaggcctgccagtgagcttctaccatcatggacctattgttcgggcgccggaagacgccagaggrgctactgcggcagaaccagagggccctgaaccgtgccatgcgggagctggaccgcgagcgacagaaactagagacccaggagaagaaaatcattgcagac

SEQ ID NO: 241253 - DNA, 201 bp, Homo sapiens
tacacacacaaagacacacatatacatgcacaggttgagggcgagacccagcagccaccacccccttcccctttcccatcctaggactcaccagggagaargtggagtcggtagccagctgatgcagggggcggcagggttcgtgacagaatagggccagcagtacacgctcacatttctacaaacattgtaagggatgtc

SEQ ID NO: 241254 - DNA, 201 bp, Homo sapiens
cttgtgccaccagtgcttgataaggctgactagtagatacagtcaataaaccaggccccaggaccacagtcccccaaccagccaacgcctgaggaactggkgaagtttttattaaatccacagaagtaaaaaccatatcgtgaggaactgggggatggggccaccagggagtgggagtcaggccaccaggggagtggggat

SEQ ID NO: 241255 - DNA, 201 bp, Homo sapiens
ctaaagtggtcctgagcggccaaagctttctacctttatctacctatcagtaggagtacccgctgaagagttgtactcatggggacattcagcatctcacycttagtactagaggaacaaagggaagcagtggggtcacagcacttcttacagctgggagccaaggatcccacttggatctgccaacccccaggtttgtgg

SEQ ID NO: 241256 - DNA, 201 bp, Homo sapiens; identical to SEQ ID NO: 47410

SEQ ID NO: 241257 - DNA, 201 bp, Homo sapiens
ttggtgagtaggaataggtggttgggtctggggagattggccttctgtccctctggcctgttgaccccccctacctgtactggccacaggagcccaacccygaggacccactgaacaaggaggccgcagaggtcctgcagaacaaccggcggctgtttgagcagaacgtgcagcgctccatgcggggtggctacatcggct

SEQ ID NO: 241258 - DNA, 201 bp, Homo sapiens; identical to SEQ ID NO: 47411

SEQ ID NO: 241259 - DNA, 201 bp, Homo sapiens
gctgagctgtgattggatgggaagctgacccccgcctccatccccttttccagatagtgggggaagcgcagaggctgcagtgcgtgtccgctggaacttgrggcccacgccaatagcggcccgattccgcccccacgtcgcgttccccaagtgtccaccccgacaggtcttcccctacaccactgtaaccctccacagtgc

SEQ ID NO: 241260 - DNA, 201 bp, Homo sapiens
ataggggcccggtatgtggtggtttaggatattaggaaggcctggtgtctgctactagggactcggaatctcagagtcaggcagtggagtggaggaactgrcgactcgagagtctgggggttagacgggaacttgggtttggggtgacaggcggagaagagagggatagtagaggccaggggttggggatatgagtggaag

SEQ ID NO: 241261 - DNA, 201 bp, Homo sapiens
gtgccatccccttcataaacgcagattccttcctaaagccgcagctgcagaaggaacagcgcgaggagggaggtcagccccacttgcaaatggggaaacargttctcgaaggcacagtgatctgaagatgggcggaatcagagtctcgggacttccttgcaggctcctgttccggcagtcttggagcctttgccgcccccc

SEQ ID NO: 241262 - DNA, 201 bp, Homo sapiens
tggaaacgcagcttaggtgaaagtggacagatgctgagagcataagttcagcatactgcaggcttcagggcagcgtctccaggacccagtgccattgcctrttttgccctagccatcttccccttccatcccattgtccaggtccttcacacagcccctctcccccaaccctccagtgggtgacttgggtgcaggtaacac

SEQ ID NO: 241263 - DNA, 201 bp, Homo sapiens
actcaggctgcctgataccagttttcctctctagatttcctggagtctgggcctctagctgccacccaggagtctgtacccaccctcctgcctgaggaggmccaggtaagtcctgcccaggtccatgttctcctcctttccctggaagttgctgggtggggtcaggtaggtccctccctgagcccagccaggcacagagga

SEQ ID NO: 241264 - DNA, 201 bp, Homo sapiens; identical to SEQ ID NO: 47433

SEQ ID NO: 241265 - DNA, 201 bp, Homo sapiens
cctgtttcctcatctgccttccacatggggtaggtctgaggatcaaacggtacagcatagactaggcagtgaagcattcactgtactccttttgcaacagsctcatcctatttcttcaccaggggcagacactggcctcagatacctgacctggtaccctctatgaggcctgcggtgctgggctccccagaccgagcaccc

SEQ ID NO: 241266 - DNA, 201 bp, Homo sapiens
agagcgagaggcttgtcaatcactactcgttgccacgacgacaggctttgggagccccgcccccggttgcctaggcgtcgtctggacctaccttggcaccstggagcggaagttgccgcctggacttctgggaagtgtatttcgggaccctccgtaggtacctgccatcttggctatgacccaagtctctcccagggtttc

SEQ ID NO: 241267 - DNA, 201 bp, Homo sapiens
tcttaaccgggagggctatcgtgtggacgggggcggtggctgcagactcggggattccggctccccagtgagaccggaagcgcggggaacgaatccgggcmgtccttgcgggagcgcccagggctagagcgagaggcttgtcaatcactactcgttgccacgacgacaggctttgggagccccgcccccggttgcctaggc

SEQ ID NO: 241268 - DNA, 201 bp, Homo sapiens; identical to SEQ ID NO: 47407

SEQ ID NO: 241269 - DNA, 201 bp, Homo sapiens
cagggtcttgccgcgatcaccctgccttgtctgtgacccatagggtcaaaggcaggccgggcgggtggcggcagcagcggaggtgaccacccgcgccgcgmtctgcacatatatacaacttaagatgaagtgaccgcgagcaaaagcggcccacgtctgccccactcaaagatggcgactaactccgcttcctgcccggcc

SEQ ID NO: 241270 - DNA, 201 bp, Homo sapiens
tagatggcctttctttgcctgtttcctcatctgccttccacatggggtaggtctgaggatcaaacggtacagcatagactaggcagtgaagcattcactgyactccttttgcaacagcctcatcctatttcttcaccaggggcagacactggcctcagatacctgacctggtaccctctatgaggcctgcggtgctgggct

SEQ ID NO: 241271 - DNA, 201 bp, Homo sapiens; identical to SEQ ID NO: 47413

SEQ ID NO: 241272 - DNA, 201 bp, Homo sapiens; identical to SEQ ID NO: 47412

SEQ ID NO: 241273 - DNA, 201 bp, Homo sapiens
ccccctgagatccaggcccgtgtgcaggggcagcggccaggcagccccgaggaggctgctgccctagtagatgggctgcgccgggagccgggcggaccccrgagatgggtgagtgagtgtccacgagtggggttcaggactggagcatcatccagctcggcctcaccctgggcagcaccacgctttgccagacacacgttc

SEQ ID NO: 241274 - DNA, 201 bp, Homo sapiens; identical to SEQ ID NO: 47414

SEQ ID NO: 241275 - DNA, 201 bp, Homo sapiens; identical to SEQ ID NO: 47415

SEQ ID NO: 241276 - DNA, 201 bp, Homo sapiens
gggaactcaggccagcaccaggcaggctcatcggcgggggctccaccagcacagcagagaacttggtgtcaccgaaggcctcgttcatgcgcgtctcgaaraagcgctgcaggccgatgatggactgcacgtctgccttgtcctgggccaagcaggaatgcagtggatgaatgggtcctagttctttccttcacatctccc

SEQ ID NO: 241277 - DNA, 201 bp, Homo sapiens
tgaccctgatgctctctgtccacagagaggactggaagccagtccttacgataaactccataatttatggcctgcagtatctcttcttggtgagtaggaayaggtggttgggtctggggagattggccttctgtccctctggcctgttgaccccccctacctgtactggccacaggagcccaaccccgaggacccactgaa

SEQ ID NO: 241278 - DNA, 201 bp, Homo sapiens
agttaggaaacaagaattcccaatgtaaggaaaatgcattctgcacagccgccccaccccttcccttctttttttcccacacacacacacacacacacacactgtggggagaaaaactggaatagcccagcgcgttttacttctaagtgaaaaagtcgcttcttgctgggaatgcaaagggttaagcaatctgggcttcca

SEQ ID NO: 241279 - DNA, 201 bp, Homo sapiens
ttcagggaaatccaagaggcgagggctcccacctccgccgccagaggaaagtaaggaatcaggtggtggccccctatgtgtcttgcatttctctgcacackttagcaatcaagttaattgaattcattggagtttagaaccggcctgtagctcagagaaggctttgaatggccaatttctctctctccctctccccctccc

SEQ ID NO: 241280 - DNA, 201 bp, Homo sapiens; identical to SEQ ID NO: 47466

SEQ ID NO: 241281 - DNA, 201 bp, Homo sapiens
aaataatgtcttcttgacatgtttcatttactcaaaagttggtgacttgcttcatttccatatctcctggtgagaaatcttataactagtgatcatgtggyttcaacgaattacgctgatacacttagtgtggccaaaaagatgtttcagtttgttctctttcctgtgtgcaaatgctgtcctgtactttttccttatgtg

SEQ ID NO: 241282 - DNA, 201 bp, Homo sapiens; identical to SEQ ID NO: 47467

SEQ ID NO: 241283 - DNA, 201 bp, Homo sapiens
tgacatgtttcatttactcaaaagttggtgacttgcttcatttccatatctcctggtgagaaatcttataactagtgatcatgtggtttcaacgaattacrctgatacacttagtgtggccaaaaagatgtttcagtttgttctctttcctgtgtgcaaatgctgtcctgtactttttccttatgtgaggttcagttctcc

SEQ ID NO: 241284 - DNA, 201 bp, Homo sapiens
tgggcttactcgggccaggggtccctgacgcaggcggtggcacccgcagataggagcgggaggagggcgcgcatccctcctctcctcgccgggccagcccsccggccgcccggaggcagggcgtgcgtggggaccgcgcgctgcgcttcggcagctgcggcgtccccagagccaattccgacgtggcaccgcgcacgccgg

SEQ ID NO: 241285 - DNA, 201 bp, Homo sapiens; identical to SEQ ID NO: 47469

SEQ ID NO: 241286 - DNA, 201 bp, Homo sapiens; identical to SEQ ID NO: 47470

SEQ ID NO: 241287 - DNA, 201 bp, Homo sapiens; identical to SEQ ID NO: 47471

SEQ ID NO: 241288 - DNA, 201 bp, Homo sapiens
cgtggcaccgcgcacgccggcgcttctctcctcagctgcagctggggacactgcccggtgggagatctgggggcgccgtctcgagcgcccagccgatgaasggggcgaggggcctgtgggagctggggtggaggtgggagggaagccagaggctgggttgggatggataatcaacaccttggggggaattcgtcacggcag

SEQ ID NO: 241289 - DNA, 201 bp, Homo sapiens
gatggtattgagaggggaaaaatgtctccggtttaagaaaggcactgggatgttcttcctctcctctagaatttctagtgaaattctagtttttagaagaygcatcctattctttaggatcctttactgccacagagtcatgcctagtggttgtcaagtagtgagataggaatggacattggctttagagtcagttgacca

SEQ ID NO: 241290 - DNA, 201 bp, Homo sapiens
atataacccattttatatatgtagtttgatagcaaaagcaaagaaattacattagaagggacaaagaaatagcctggtgatttttaaaaaaaggagctggmaaaattgagacagaggagagaatgtagaaatctagccaaaaaaagctgataattttcaatagcctttatataaagcattatttcacgattcaaatttgca

SEQ ID NO: 241291 - DNA, 201 bp, Homo sapiens
ggaagtggcatatctcagatttccaaagcctggaatgacttggccataccaagtctatgctcaggaaggaaaggtaacacaattggtaagaagccacactmaggtttcccaaaagtacagtgcagatccccttaggaccttctcaatgtacaattgcagggaatagcaggtgactgtgtgaatggtgcctcttggagctga

SEQ ID NO: 241292 - DNA, 201 bp, Homo sapiens
tctggagaacacaagttagtaaatatttggtatcaattagtaggccaaagtctcatactgggggaaaaattaaaattttaattttaaatatttagagagtrtagatttcaaaatcatctttctacctagtagtaagtacttataatttaggattgaactaactctattttccaatttaactatacagtcatatgtctgaca

SEQ ID NO: 241293 - DNA, 201 bp, Homo sapiens
aagttccaagtctggtgctcccagcaccttcaggcattggttaatgtaccatgtgggagttttcagcatcccctcagctgtgttaattaacaagagatgcygtacttgcctgcctttcactgaaaactcagcatttcaccattccccaacagtctaaactttccacttgggttaaggttacatttatcagactcctgcatt

SEQ ID NO: 241294 - DNA, 201 bp, Homo sapiens
caattctgatcaatttatatttgttaggactttgctgcatttagcagaaaataatatgtccaattagtaaatgttggagggatagggagatggggactttyttttcctactttttttctatttctgattttctctgatcatatggaggaagctccattggcaggtataacccatcagccttttccagctgttttcattcct

SEQ ID NO: 241295 - DNA, 201 bp, Homo sapiens
gattgctagagcctgggaggtccaggctgtactaagccattatcatgccagcctgggtaacagagaaagatcctgtctcaaaaaatggaaaaaaaaaaaaagttgaagggaatgaattttttttaagagtgacaaagattttcaaaattcagaatcaatgtattttctagagaaactttgttttaaaaatggatagattct

SEQ ID NO: 241296 - DNA, 201 bp, Homo sapiens
acatagtacaactttgggcttagatgagaggataataggctattttcaaagggaaaggatgactgagaacttatagaggatatgaaaaatgaagttctggrctttaaatgagaaaacatctgttttgatattttgtctttaattttagttaaaacaattgctacatttgtcatttctaatcaaggcctcattgtttgaggg

SEQ ID NO: 241297 - DNA, 201 bp, Homo sapiens
ttagtgtggccaaaaagatgtttcagtttgttctctttcctgtgtgcaaatgctgtcctgtactttttccttatgtgaggttcagttctccttgaactggkgcatgtctcccacagattgtaatccagggctaaatagttgacattcgtgaaattgcatacttgttaccgatgagtgaggagatggctagaaagcctgttc

SEQ ID NO: 241298 - DNA, 201 bp, Homo sapiens
acattggctttagagtcagttgaccaaagttctaatcatagagattactagctggttgaccgtgggcaagaccacctctctgagtctcagtttctggatasaataaattaatgtgttccaagtgtttagcaaaagttatttatgatattatcattgatataattaaagctttttatattaatattgttgtttattatcatt

SEQ ID NO: 241299 - DNA, 201 bp, Homo sapiens
tggccaaaaagatgtttcagtttgttctctttcctgtgtgcaaatgctgtcctgtactttttccttatgtgaggttcagttctccttgaactggggcatgkctcccacagattgtaatccagggctaaatagttgacattcgtgaaattgcatacttgttaccgatgagtgaggagatggctagaaagcctgttcttgctg

SEQ ID NO: 241300 - DNA, 201 bp, Homo sapiens
cctgtgtgcaaatgctgtcctgtactttttccttatgtgaggttcagttctccttgaactggggcatgtctcccacagattgtaatccagggctaaatagytgacattcgtgaaattgcatacttgttaccgatgagtgaggagatggctagaaagcctgttcttgctgtatggattttaagaagggctaaaattatgctc

SEQ ID NO: 241301 - DNA, 201 bp, Homo sapiens
ctcatttttgttaggtctgtagaatatagccccatagtattgaatttcataaatactttcccatacatggtttccttactaggtaagatttttaaaaaaawttttttcttgaatttttaaacacttacttgtcactggttcatttatttcctgttgttggcactctggggaaagtcctttgtctatggatcaaggtagaca

SEQ ID NO: 241302 - DNA, 201 bp, Homo sapiens
tcctctcctctagaatttctagtgaaattctagtttttagaagatgcatcctattctttaggatcctttactgccacagagtcatgcctagtggttgtcargtagtgagataggaatggacattggctttagagtcagttgaccaaagttctaatcatagagattactagctggttgaccgtgggcaagaccacctctctg

SEQ ID NO: 241303 - DNA, 201 bp, Homo sapiens
gccctgtgtttctgctagaagcacattttcagtattttccagttcagtgttcctggcaactttatgtaatacaactaccataaataatgataatcaactgygtatgacatttgactggttcctgttttgttctgtatagaaagcctgagcaactgaaatattctgagggccagtattgagaatagtaagtttatttttatc

SEQ ID NO: 241304 - DNA, 201 bp, Homo sapiens
ggttcaattcacaatactaaccactcccatcctctattctaagtgtcccaggatttgagaattgcaaagcagaaaccacagaaagacaactaagggaaaargggtttgaagatgttggctgctaagcattacaagtgatggaacttggagtgcaggctggttagggaaagaaggaaacaaagttcaggtggtaatacacaa

SEQ ID NO: 241305 - DNA, 201 bp, Homo sapiens
atgcctcctgggactctcagccagttccaaacactcacacaggagtacaaatctcttagcattctgaaactggtaattccatcttttcatccctcagtaartcccctgatatttaaccatgtgtgacctataaaaatggcaatttcctaaggttcaattcacaatactaaccactcccatcctctattctaagtgtcccag

SEQ ID NO: 241306 - DNA, 201 bp, Homo sapiens; identical to SEQ ID NO: 47474

SEQ ID NO: 241307 - DNA, 201 bp, Homo sapiens
cgagctgcagcagcccagctacgggagggaacgtgtagaagccccatcagcctctccctgcccactccctcacccttgggaccgttgctgcctgttgggtytcaggagcaattgcccagaaacgcgacgctgctccaacccacgtgtctgggctgggattgcctttgacgtcacacacgggggaggtgtgacgcaatagat

SEQ ID NO: 241308 - DNA, 201 bp, Homo sapiens
actgctcattgtacattccaaggctttggctcagatttctcactgcggttaaggcatatgataagtacttctggcggtattaaaccaggttattatttttwaaaaaggttattttaaaaaggtcaacacatatttacatacacgatgccaggtttaaaattaaaatatgtatttccatagatccaagtccatcaacctctt

SEQ ID NO: 241309 - DNA, 201 bp, Homo sapiens; identical to SEQ ID NO: 47468

SEQ ID NO: 241310 - DNA, 201 bp, Homo sapiens
taattctgatttttaagtggacatttctagaacaaaatattgtaactaaagtatcatcccccctatttgttttttcttagatatcacctgagtcgggtaawtagaaaaatatattgtggacgtgctgacaaatgcatattacctgagttgcttgtactgtacccggagtcgaatccctttatcaaagaaagttatgcagtt

SEQ ID NO: 241311 - DNA, 201 bp, Homo sapiens; identical to SEQ ID NO: 47472

SEQ ID NO: 241312 - DNA, 201 bp, Homo sapiens; identical to SEQ ID NO: 47473

SEQ ID NO: 241313 - DNA, 201 bp, Homo sapiens
actgggacaagttgatcacgctacaagtcatacttagcacatcacttcagctgttctacccagcaatgtcattaacttaaatattgagtttgctgaaaaawaggctctttgtattggccatgatataacaaggcctctgttatcatcatgatacttgcttactgaggccttgtgacagtaagatgaggacacagtatgtat

SEQ ID NO: 241314 - DNA, 201 bp, Homo sapiens; identical to SEQ ID NO: 47475

SEQ ID NO: 241315 - DNA, 201 bp, Homo sapiens; identical to SEQ ID NO: 47476

SEQ ID NO: 241316 - DNA, 201 bp, Homo sapiens; identical to SEQ ID NO: 47477

SEQ ID NO: 241317 - DNA, 201 bp, Homo sapiens; identical to SEQ ID NO: 47478

SEQ ID NO: 241318 - DNA, 201 bp, Homo sapiens
gaaagggtactttttcaggtactgcgcaagactgaaaagacaaaaccagtccttcccctcaggatgctcagaatctggcaagggaaaatcacatgtgaatrcatagcagcctccacggagagggcaggaagaccaggcttccagggtgctgtgtgtctgacgagaagaggccatcctagggaacttcaaccttatctacag

SEQ ID NO: 241319 - DNA, 201 bp, Homo sapiens
tatcatagcccctaccatacatgaacacttatagatattaaaaacaaggagataggaggctttgacgtttcaccctcctaaatcatttcaaactggggaaytcaaagccaacgcatcccatgggtctctctaataatcatatctgagaatgggaattgaaatgtgccatggcttattcagtgcttaggtagaagacaccac

SEQ ID NO: 241320 - DNA, 201 bp, Homo sapiens
tgtcaaagtcatcaagacaagaggaaaggattgcaataaggccaactcaataaaattttcaagaagatcctcaccctactttatttttctttttgaatatktttttccaaagcagtctgtcttcctttatgtgatcttttcaaggtagtttctggtacaaataagttattcagatattactgtcaagtcatctgacagctc

SEQ ID NO: 241321 - DNA, 201 bp, Homo sapiens
caagacaagaggaaaggattgcaataaggccaactcaataaaattttcaagaagatcctcaccctactttatttttctttttgaatatttttttccaaagyagtctgtcttcctttatgtgatcttttcaaggtagtttctggtacaaataagttattcagatattactgtcaagtcatctgacagctcatagtatttgat

SEQ ID NO: 241322 - DNA, 201 bp, Homo sapiens
gacaagaggaaaggattgcaataaggccaactcaataaaattttcaagaagatcctcaccctactttatttttctttttgaatatttttttccaaagcagkctgtcttcctttatgtgatcttttcaaggtagtttctggtacaaataagttattcagatattactgtcaagtcatctgacagctcatagtatttgatcag

SEQ ID NO: 241323 - DNA, 201 bp, Homo sapiens
tttttattcagctgcaaagttgcttgttccaatttgaaaacttgatagaagccataaagactggaaatgttcataatattatattgcatatatcataatgttatatgttaatataccatttgtttactggtgtccccaaatttcgtgttgaccctctttatttgctgtcagaaatggacccctgtttgaggttttgtcttt

SEQ ID NO: 241324 - DNA, 201 bp, Homo sapiens
tttattcagctgcaaagttgcttgttccaatttgaaaacttgatagaagccataaagactggaaatgttcataatattatattgcatatatcataatgttatatgttaatataccatttgtttactggtgtccccaaatttcgtgttgaccctctttatttgctgtcagaaatggacccctgtttgaggttttgtctttcc

SEQ ID NO: 241325 - DNA, 201 bp, Homo sapiens
aaagttgcttgttccaatttgaaaacttgatagaagccataaagactggaaatgttcataatattatattgcatatatcataatgttatatgttaatatamcatttgtttactggtgtccccaaatttcgtgttgaccctctttatttgctgtcagaaatggacccctgtttgaggttttgtctttccctttcagcagctc

SEQ ID NO: 241326 - DNA, 201 bp, Homo sapiens
ataataccgaccttgctgaattggggtcagagctaaatcggataacaacacattaagtccccaatgcagcccggtgccaggcagcttcattatagaaaggmcgtgtgtaggtgcattcaaaaccccagtgctgtgggtttagttctggttcctcctttcactacctttatgaccaatggcaaatgataataaccctttctg

SEQ ID NO: 241327 - DNA, 201 bp, Homo sapiens
aacaaatttaagaagattcaaatcatataaagtatattttctgaccacaagggtataacactagaaattaataacaggaggaacttcacaaaattcacaamtacattgaaattaaacaacatgctcctggacaaccaatggatcaatgaaggaacttaaaggaaaattttaaaatttcttgagacaaaattggaaaacaac

SEQ ID NO: 241328 - DNA, 201 bp, Homo sapiens
cccactctgtctcacaggaaggagctaaaggttcccatttatgcctcagatccaagacacattgtccaatccatccttatctgagagtctgtgttgggggkttggtcttcaactgactgtcagacccctgtagccactccctccatcagttagcatcttatggaaaggaggggtgagtcccagcccaccctattcccactt

SEQ ID NO: 241329 - DNA, 201 bp, Homo sapiens
aaaaaataaacaaaaccaagagttgattttttttgaaaagataaagttgaaagacctattgctggactaattaagaaaaaaacaaataaaataaaatgaayaaattcatttgatgcatgcaatctaccagaactgaattatgaagaaatagaaaatcttaatagaccaatagcaagtaaggagattgagtcagtaatacaa

SEQ ID NO: 241330 - DNA, 201 bp, Homo sapiens
ggcacacaagctttaaaatcccaattctgcctattccttgtttgtgatcttgggaaatttatttacctgaatctcaaaattcttccctgtaaaataagcaycttagccactttgcagagttttatgtggatcatataagtgaatattaatacaaaatataaaacaggcagagttaagcaagtagtagagcattcggtacat

SEQ ID NO: 241331 - DNA, 201 bp, Homo sapiens
tccctctcatgataaaggcctgaaaggaactgtgtgagtgaaatcaaaatcacttacaataagggctatacaggttaaagtgggaaggaattctagctatsatgttttgaaacactgcatgaaagcaaccaaagagaaagctctatagagttaaaaaaataaataaacaacccatgctctttctagaactctgaaccatgc

SEQ ID NO: 241332 - DNA, 201 bp, Homo sapiens
aaatgcaaagtgggcaagagtcaagtcaatcaaaagtacgagtatgagggaaacctttttccctgtcatttgccttttactgagctgtttgcacagtagcmttttaaaccaagaaccaaaggtttttttttttttcctggaaacaaaggcttgaacaatgagtcatgctagctgttaagaatggcaaaagccacatgtatg

SEQ ID NO: 241333 - DNA, 201 bp, Homo sapiens
cttgaacttagacttccagcctctccaattgtgagaaaactaacatctgttgtttaagccacagagtctatggtcctttattacaacagccctagcaaacraatactataggtaatacagtaaacagagactttcccaccaaaccacagccattaggaggatgcacatttacttaagcaggatctctgactcctgctgcac

SEQ ID NO: 241334 - DNA, 201 bp, Homo sapiens
gtgaggtctcagtcttcttatcctgagaactctgcccaatcacggggaattgtggttgaacctggagagaagccacagcggaccacttgcccacatcacayctcaagagaaccaggagagtacatctgtgtctaaagccatgacccaggagtaggttgaactgaagcaagaggtgaggcatttaatgccaggcaaagcaca

SEQ ID NO: 241335 - DNA, 201 bp, Homo sapiens
tgacttttgagcagaattggacagtaggagattgttagtaagcaccaaatagtacgttgaatctggagaattgccaattacttgaatagctggagagagcrtaggagagctatattagaggagtgtcagaaaatgagctttgaagtgacagagccagagaatgaaagcttggaggccttattcagaaggcctgacaatagt

SEQ ID NO: 241336 - DNA, 201 bp, Homo sapiens
gcattccaaaagccaatcaaaatattaagcattctttcattcaaatgaacactaaagtaaacttaggaagatgacttttgagcagaattggacagtaggarattgttagtaagcaccaaatagtacgttgaatctggagaattgccaattacttgaatagctggagagagcataggagagctatattagaggagtgtcaga

SEQ ID NO: 241337 - DNA, 201 bp, Homo sapiens
cacaacaagagtcacctttgctccagttcccaacaagttcctcatctccatctgagaccatctcagccaggaccttattgtccatgtcattatcagcattwtggtcaaagccattcaacaagtctctagggaattccaaactttcccacattttcatgtcttcttctgagccctccagactgttccaacctctgcctgtta

SEQ ID NO: 241338 - DNA, 201 bp, Homo sapiens
agtcttaactcagattcatctgagaaagcggatggggacttccatttcatggaaggtcaaacgatctgttattctcccaggtcaatattattgagttcatrtgtattaacaaaatgcatcttgggaatattttgtatttattcagcacatttctcaagagagtgaaaacatctttcacacatttatttttaacatcttgca

SEQ ID NO: 241339 - DNA, 201 bp, Homo sapiens
tcaaatttccacaaatctctaggacagcagcaaaatgccaccagtctctttgctaaaacacaacaagagtcacctttgctccagttcccaacaagttcctsatctccatctgagaccatctcagccaggaccttattgtccatgtcattatcagcattttggtcaaagccattcaacaagtctctagggaattccaaactt

SEQ ID NO: 241340 - DNA, 201 bp, Homo sapiens
aagtcaatcaaaagtacgagtatgagggaaacctttttccctgtcatttgccttttactgagctgtttgcacagtagccttttaaaccaagaaccaaaggtttttttttttttcctggaaacaaaggcttgaacaatgagtcatgctagctgttaagaatggcaaaagccacatgtatgtgtgcattagtgtatgtgtgta

SEQ ID NO: 241341 - DNA, 201 bp, Homo sapiens
cctaactaatggaaggtctggaagtgggctcctactttaccaatgagaaaattggagctgtgtagtgctggacccctattgcatccagtagggatggtackgtgtctcaggctgaagatgagacctagagacagcaaataagacatagggtttacagggggaaattacatatggggtggtctagtggtggcaccctgcaca

SEQ ID NO: 241342 - DNA, 201 bp, Homo sapiens
agacctttgttcacttgtttatctgctgaccttccctccactattgtcctgtgaccctgccaaatccccctctgtgagaaacacccaagaatgatcaattwaaaaaaaaaaaaaaaaaagaaagggaatttatttcttatagttctagaggctgagaagtccaaggctgagggaccatatctagtgagagacttactgctg

SEQ ID NO: 241343 - DNA, 201 bp, Homo sapiens
gcaggagaattgctggaacccgggaggcagaggttgtggtgagccaagatcatgccattgcactaccctagccggggcaataagagcaaaactctgtctcaaaaaaaaaaaaaaaaaagaaaagaaaaagaaaaatggataaccattaaacatcatggtttacattaatattcaatggcatgaaaaatgctcatgcattta

SEQ ID NO: 241344 - DNA, 201 bp, Homo sapiens
tcttaatgcttgttgttctttgaaattttgtaagagttgtgtctttaagattgggaatccaccaaactaacaactacttctcaccggtgaaatggagatawaaaacaacccaccttagagggttgttgtgaggattaactctgttttatttatagtgcataataggagctattattagtcatctttgggttagggacaatg

SEQ ID NO: 241345 - DNA, 201 bp, Homo sapiens
tttaatatttgggaataatcatgtataactaatagaactagaaaagaaaatgttatttcaaaaaggaaaagtattgacaggtagagatgacaggaaggtgtttgtgttagggttctctggagaaacagaaccaacagggtgtgtattacttataaaaatttgttttaagaaattggttcacaaaattgtggaggctagtta

SEQ ID NO: 241346 - DNA, 201 bp, Homo sapiens
gtggtcctgaagactgagataggtgtaatgcatttagtacattgcctggcacatagtacatgctcaatgactattagctcctgtccccacttagatttttkccaaagtgctttcacctctgttttcagggaaagatcacagattcagagttggtgagggtgacatccagcccaggttgttactgttagctagctcctctgt

SEQ ID NO: 241347 - DNA, 201 bp, Homo sapiens
atgtattatatatattacatacattttatttttttgtataaaataattttatataatatatatgcgtatatacaaccatgtatttgggatccaaagagttycaaggaggctaccagctccacattttgttggaagaataacaaaccctggacgtgaacatcatcacatcattatccaatgtctgcctcagacgagtaataa

SEQ ID NO: 241348 - DNA, 201 bp, Homo sapiens
ggtgcaatcatagctcactgcagcctggaaatcctgggctcaggggatcttcccacctcagccttccaagtagccgggattataggcaaatgccactgcaccaggccctgcttccaagaattttaaacatgctgaatctcagtttcttcctgaggaaatggggataataatgtggaaggccacaccataaggactaatcca

SEQ ID NO: 241349 - DNA, 201 bp, Homo sapiens
cagggttagatctaggaagcaattatttggaaggagaccagacactgaaacatcatacaactattagcttccaaaatctagtaaaatgcatcagaggcaayaaggatgtggaataacactgaggtgttcgggtctctgccctgcacagcattggtccttagacttggctgcacattcgaatctccaaaggaacatttaaaa

SEQ ID NO: 241350 - DNA, 201 bp, Homo sapiens
aacaaatagatttattcacatattttttgtgggcgttggggtatgtcctgggtcctcccaagggattatgttgctcactaagcatcacttttcccacatgkcgtaacccaaagacatccaggagaatggtgcaaactattggtagatctaccattctggggtctggaggacggtggccctcttctcacagctccactagat

SEQ ID NO: 241351 - DNA, 201 bp, Homo sapiens
catgagatctgatggttctataaacatgagttcccctgcacaagcctctcttgcctgctgccatggaagatgtccttttgctcttcctttgtcttctgccrtgattgtgagagctcccagccatgtggaactgtgaatccattaaacctctttcctttattattacccagtctcagatacgtcttcattagcagcgtgaga

SEQ ID NO: 241352 - DNA, 201 bp, Homo sapiens
agcaaatgagtaagtgcctagtgtggtatcagccagagtcggggcacctgccttgtcattgttttattttcttcatcatagactgaaatttcaggacaccraggaacaaaagtcaatcaaaggatgtcacagatcccttcatccctatcaaagttagcatccagacaatagtcggaaacttccaattctgcctaaagatgg

SEQ ID NO: 241353 - DNA, 201 bp, Homo sapiens
aaacctccctggaaagaactcaagattttaggattcccctgataataaggtgcatgctgatttcagagatgtcaaggtgtacattttaaggaaaattgaayatttttattaagaatatatgtcttagaattttttaaatacatacaatatttatgattctaaagccttttctcttcccactgccctacctttcttcttggg

SEQ ID NO: 241354 - DNA, 201 bp, Homo sapiens
cctaggtggctgcagaaaccctcttgctctgtgcaacctaaagtaagacatgctgaaatcataaggtcaagcaaggacctggatttgcttcataatgatakcccaaggatgagtcataaataggtttcatttcctttgttaattccattcaattagtgatgcctgccagtgctgtttttggaggctgagcaagagccagtg

SEQ ID NO: 241355 - DNA, 201 bp, Homo sapiens
acaggccgtggaccagtaccagtccatggcccaggaactggggactgctgatctagggagcaggcaactgagttaatcctgcaaagctgcatggatgtagrcagattaggttgaaagcacatgcatagctgagccagggactattcagaaactcacaaaggtgtcattgtccctgcagaaaggaccctatagttataattt

SEQ ID NO: 241356 - DNA, 201 bp, Homo sapiens
atgtgttaggaatatgagaatgatgaaaacacacctcctcccttcctggaattaagtctagttaggtattcattaataggtaaggaatgtaaaatgtgccrtgtgttatgaggaaggtaagtctgggggccatggaaacacagaggtaacacatgacctttagatgagagaagacttcttgaagaaagtgactcttaagct

SEQ ID NO: 241357 - DNA, 201 bp, Homo sapiens
gagccactccatgagaggctaattatcgttcccattttacagattaaaaaaaaaactgatgcttatctccttatcccagatggtttgggggaaaaaaaaaactgatgctgaaggaaggtcactcagctagaaaatgtactgaaacctagcctgtcatactccagaataaaattactttcttctcacaggtagcataagacc

SEQ ID NO: 241358 - DNA, 201 bp, Homo sapiens
gtgtctccgcgttttcagagccgctactagggggaggagaattgatgcagaaaccagccgccggccctgttgctcccgggctattctcagagcagcgtggygagatgcccgcggctccgggggtttcgggaagatgaactcagctcggggcggcggggcgtctcctgcccactgcgaggctgcagggtgctaaaataagac

SEQ ID NO: 241359 - DNA, 201 bp, Homo sapiens
gacagaatgttcttggaggggtggtgaggaaacttacaatgtaaaggtcttttccacatcaccatttgcagttttccaaaagataggtggtggttttttttagcatactgaagtaatattttagtagcttttataaaatatcctgcccccatcacaaattatagcatgcattttaagggattttgaagttactatagtata

SEQ ID NO: 241360 - DNA, 201 bp, Homo sapiens
gaactgagttcttgtgctggagacccttttccagaagttcacgccacagtacattaaaatttcgttttctgctctccgtgtctccgcgttttcagagccgytactagggggaggagaattgatgcagaaaccagccgccggccctgttgctcccgggctattctcagagcagcgtggcgagatgcccgcggctccgggggt

SEQ ID NO: 241361 - DNA, 201 bp, Homo sapiens
aaggaaaattcaacaagccagcgcgtccacaccaacatgctcaggtgccttaagtgcaataaacagcatgttcggcggctcgctttctgcaggaatccttyttcagtgctcccgttactcttaagcagctagtttcttctgcccccacccctccaaccccgcccatttattttaagtcattgaactgagttcttgtgctgg

SEQ ID NO: 241362 - DNA, 201 bp, Homo sapiens
ggacgggcgtggtggctcacacctgtaatcccagcactttgcaaggccgaggcgggaggatcacgaggtcaggagatcgagaccatcaaggctgaggcagragaatagcgtgaacccgggaggcagaggttgcagctccattgcactccagcctgggcgacagagcgaaactccgtctcaaaaaaaaaaaaaaagaaaaga

SEQ ID NO: 241363 - DNA, 201 bp, Homo sapiens
gagctacactgatttagatgcttgagtttgcaaaacagccctttgtcaaacagcaattccaggaagagatgcgccccagatctaggaattggtcccacacrtaataagaactcttcaatactagttctaagacaataggaacctattaatcataatagaatatggggtttgattattaagcaggccacaaatgccaagaga

SEQ ID NO: 241364 - DNA, 201 bp, Homo sapiens
cacttagcagcatctgtaggtgttctactcctggcatgcaggaacacgcgttttaaaattcagtagagatcatgattctaacacaacccttcagcgggcayagcaggataggtcattcccagggtcttgtccaagaattgagctacactgatttagatgcttgagtttgcaaaacagccctttgtcaaacagcaattccag

SEQ ID NO: 241365 - DNA, 201 bp, Homo sapiens
acacggccaccactgcaattcctcctgcagccccagaaactgacattgctgtctttgctctgccctgacttcctgctcctgctgcttctttgcatctcaarttaaagcctggagcagatgggtctgattggctgagcccagtcattttctttaagtgcctggaaagcaagtctctggcattttcagcttatacagtggaac

SEQ ID NO: 241366 - DNA, 201 bp, Homo sapiens
acccgggaggtggaggttgcagtgaactgagatcgcaccactgaactccagcctggcaacagagcaagactctatctcaaaaaataataataataaacgtwttgaaaggttatgtcatggattacagaatagttagggaagaatggagaagtacatgagggaaatgggccagaatgaagcaaggccacagagtgaaaggca

SEQ ID NO: 241367 - DNA, 201 bp, Homo sapiens
gtatcttcccacttactcccccatccatgcatcagtgccctctatgtgcccagcacaacactggacaacatggcatgtactgaaaatcaaagggtgaactscatggtgaggcacacaagctttaaaatcccaattctgcctattccttgtttgtgatcttgggaaatttatttacctgaatctcaaaattcttccctgtaa

SEQ ID NO: 241368 - DNA, 201 bp, Homo sapiens
tctgggtcacctcatacccttgggggtcaattgatttttgaattagccaatgtgcaaacccttagagcagccactatcacataataggtgctgaaaagatrtgtgtttttttctttttataccactcctttctgaacctcagttttctcataggtctccttgaagtccccccatggttatcagttccttttttcttccaac

SEQ ID NO: 241369 - DNA, 201 bp, Homo sapiens
atgtgagtgtaccatctagacactagactctagaatctctttcaccatatgtgttctgggtcacctcatacccttgggggtcaattgatttttgaattagscaatgtgcaaacccttagagcagccactatcacataataggtgctgaaaagatgtgtgtttttttctttttataccactcctttctgaacctcagttttc

SEQ ID NO: 241370 - DNA, 201 bp, Homo sapiens
caggcctctttctgcgttatgacaacctcaaccacagtggagagtaagtgcccaccaccgtgagtccaaagtgtgctcaacttcctgtgggaagtggaatygttgggaaaatgatgcccgctgcattactaaaacttaaggcctgattggatattgacttatatctcaaatcaggcattctgtagtttacaagtccaagca

SEQ ID NO: 241371 - DNA, 201 bp, Homo sapiens
ggccatctagtacgcttgtttgatcacttcattattcaggactcagcaaaggcattaaaatccaatcaaaattctatactaattgacttttttcttagagycttccactcaagagttctcttcagagctttggtgatagtcaaatacatcttatcaaaatctaattaggttactgcattatagaatacatactgtggacca

SEQ ID NO: 241372 - DNA, 201 bp, Homo sapiens
ggttgacacttgaacactgggtgagaggatgcaggcagagcacctacagcatcagacaccacatgcacacagaagtacaaatgcttccgtgttctggagcrcatatccaactggggagttgcagacaataaagctgaagagataggtggaggcaggggcatgcatatatgtcatgcttcagtgtgtgagctttatcctgag

SEQ ID NO: 241373 - DNA, 201 bp, Homo sapiens
gccacctgtagtcactcaccttaacattcttcttgaaaaataaatctatttcccttttctccactttccttacgatctatgaaattaaaaaaaaaaaaaaactaaacaaacttactgagctctgcagggcatgaagccaaagccactgctttctttcacctattcttgtccttctctagctgatgttgagatggtgaggca

SEQ ID NO: 241374 - DNA, 201 bp, Homo sapiens
acctttttttaactaagccctttttcttaaagttatgtcttattatttataatacagcacatttcttatttaagactttaggcaataatagtttgcaaaaatcataaagaaagtagcagagaaagactcaacattttcttcatgattaatttgcatcaaatcaccaggaagtcagggatctttgaagtaagtgaagccagg

SEQ ID NO: 241375 - DNA, 201 bp, Homo sapiens
ccacaagagaatgggagtggaaataatcagaatgtccatgagtggtggaacagataaatattttgtggtgtattaagtactatttagcagtaaaaataaakgaactatcaatgtatgcatcaaaatgaataaagaaaataatgtttagtaaaaaatgtgattccaatgatataaaatttaaaaacaactgaagtcaaacta

SEQ ID NO: 241376 - DNA, 201 bp, Homo sapiens
gatagagatattatggtgtgcttgagaacacctttgtgagggaagggataaacatacaggccctagacaggaatgggacctagttcacagtgaaatgctccatgaacgtcttaactgaatgaagtaactattttttacgatgcatttgaagaccctttccctgccttaggtggctcttttatttcctagagccacctggaa

SEQ ID NO: 241377 - DNA, 201 bp, Homo sapiens
atcgctatgagaacgtcaggtgagaaacacaacacccttgccccggctcttgcatgatccatgtgtgtttgggtgctctcattgcacttccgtgacttccrtctgcttgaatgtcagcacctttcctcatctggttgattaattcattacctagtgattattcatcagagagttctacatttccaaattaaggctagagaa

SEQ ID NO: 241378 - DNA, 201 bp, Homo sapiens
tttcccctgtttgtattcaatctactttagtgttgttgctgtatcttctggcactagcccatccatgctctgtttttattgcaagacaatgtagttgtccygtccactcccattctgaccatttccaggctctttttctgattgtatcattctcgcctgtgcctaggtggctgcagaaaccctcttgctctgtgcaaccta

SEQ ID NO: 241379 - DNA, 201 bp, Homo sapiens
agaggccttccctaagagaaggctgcctggctcacagccctttagtctctcccctagaaggactgcatattattagtctgtaagctccaagagggcaggawatgtgtttgtttggtccacatacgtataaccctagcacactgcttgacctataggaggcactcagtaaatatttgattactctacagatgaataagaagc

SEQ ID NO: 241380 - DNA, 201 bp, Homo sapiens
aattccagcgctttgggagaccgaggtgggtggatcacttgaggtcaggagttcaagactagcctggccagcatgatgaaaccccgtctctactaaaaatrcaaaaaattagccaggagtggtggcaggcacctgtaatcccagctactcagaaggctgaggcaggagaattgcttgaacccagaggcagaggttgcagtg

SEQ ID NO: 241381 - DNA, 201 bp, Homo sapiens
ctcctgggctcaaatgatcctagaaactatttacccaatgttctctaccaggaacattactggtcactgcagaaaatgcatccatgagctggatacagccsctgccttctgtatgttcacaagtttgctcgagaaatatttacttagaacctgctactctcaagcactgaggaagttgctgaggatcctgagtgaacaaag

SEQ ID NO: 241382 - DNA, 201 bp, Homo sapiens
gacagagtctcactctgttgcccaggctggagtacggtggcatgatcatagctcgctgcagccttgaactcctgggctcaaatgatcctagaaactatttrcccaatgttctctaccaggaacattactggtcactgcagaaaatgcatccatgagctggatacagcccctgccttctgtatgttcacaagtttgctcgag

SEQ ID NO: 241383 - DNA, 201 bp, Homo sapiens
aactggctggaggctggcaagcctgggtgcttgagaattttaccagtaaaattttattttcaaagtgtcccatgaaagcatcgatgacttgaggatctaaygagtgttggcacttaaagactatttaataatgttgttttctttttagagacagagtctcactctgttgcccaggctggagtacggtggcatgatcatagc

SEQ ID NO: 241384 - DNA, 201 bp, Homo sapiens
tcaggcagtgaacaaatgtgagggaaacaaaagtgttgaaaatgggcttttattagcagactccaggcaaactcccatgtcttgcagaaaatgctttacaragggaggagctgggatgattgccagtagcacaactggctggaggctggcaagcctgggtgcttgagaattttaccagtaaaattttattttcaaagtgtc

SEQ ID NO: 241385 - DNA, 201 bp, Homo sapiens
catttgtgagagcctgaaagtggcaagctcttcctgaagctgttcagaaacactgctgctatgtgtaagcccaaaagtgctgtctgattcacagggctgcsctgatacctttatcttcactgctataagcatttgcataaaataaagatcctgaatccctcactgttttcaccttgacttcccctcagggtgcactgtagc

SEQ ID NO: 241386 - DNA, 201 bp, Homo sapiens
tggagagaaagagattaataagaagtctctccatttgtgagagcctgaaagtggcaagctcttcctgaagctgttcagaaacactgctgctatgtgtaagyccaaaagtgctgtctgattcacagggctgccctgatacctttatcttcactgctataagcatttgcataaaataaagatcctgaatccctcactgttttc

SEQ ID NO: 241387 - DNA, 201 bp, Homo sapiens
caaatgcgtgactctgagttgcctgatttacttaaactctttgattttcagtatcttcatacgtataatggaatgaaaatagcatcatattccctcttacrattaatgtgaggttttaattagacaataaataggaagcacttggtgtgctacgtaatgtgtgatcaacaacaataagatattttttgtaactccagaaca

SEQ ID NO: 241388 - DNA, 201 bp, Homo sapiens
ctccccactcccctgaccccacaacaggccccggtgtgtgatgttccccaccctgtgtccatgtgttcgacaatcttcttataaaggcacttgacctttcrtctatccactcatccattccttcctttcatatacacttattatgaacctagcagatataccaggtgccggagactcagttatagataaaacacagtgcct

SEQ ID NO: 241389 - DNA, 201 bp, Homo sapiens
taaaccaacttcagcttttttaattttttatttatttttagctacccctgctggaatgggaacctccacttcttaatacatctatttttataaaaagaaakgacataaagctctgtgatgaaattgagtagttttaattttcttctttattctttactatattttttaatatttgggaataatcatgtataactaatagaa

SEQ ID NO: 241390 - DNA, 201 bp, Homo sapiens
catatgtaaaaaatagaaaaatgggtaacgaccaggtgcagtggctcacacctgtaatcccagcactttgggaggccaaggcaggcagatcacctgagatygggagttcgagaccagtctgaccaacatggagaaaccccatctctactaaaaatacaaaattagccaggcatggtggtgcgtgcctgtaatcccagctac

SEQ ID NO: 241391 - DNA, 201 bp, Homo sapiens
aagaaagaaaaacacgggcttgggtcttcactacgcacttaccaaatgcgtgactctgagttgcctgatttacttaaactctttgattttcagtatcttcrtacgtataatggaatgaaaatagcatcatattccctcttacgattaatgtgaggttttaattagacaataaataggaagcacttggtgtgctacgtaatg

SEQ ID NO: 241392 - DNA, 201 bp, Homo sapiens
ctgacactacctccttgacactgccatctgctatggaggaggagatggtgggggaagttggcaaggaaaaggtaattctgtgttttgcaaatcactgggggagggggtcttgtggcagagatacactggtagaaaaattattttctgaagaactctatatcggtttttaccatgagcttgaagtggctcaacccaggagct

SEQ ID NO: 241393 - DNA, 201 bp, Homo sapiens
taaacttcactacagggtttgtttgctgcttttagaacaatggttctgcaaaagtgaacaccatgtctgtttttcttttctgctgattcttcctgccaagsactaagccacttactcctggacttagtaaataaatgattaaatgggtgaactatgatccaagtttcagaaaaaaaaaaaaaaaaagaaagaaaaacacgg

SEQ ID NO: 241394 - DNA, 201 bp, Homo sapiens
cagctatctaaaaccttcccagggtctcacctgctgctgatagaacagccaatcaatcctaagtaactgagttgccttcccacatctctagcatgggcctsctcctgacttactgttgtagtattcatcaaactactgctggacctctctgataccatgactatcatctctccccctctcctgtcatcttggggactaaac

SEQ ID NO: 241395 - DNA, 201 bp, Homo sapiens
atcagataaggaaacaagggtccgaaaggtttcttaacttccaagagctgagcaggctgctaacctggtctgctcatctcctagtgggattttttttttttctcttacatggcatacttctctgccatcatttttaaaactctgagggggaaaaggaagctaaatgttaacatgctgtgaccagtaaaccaaagatgcagt

SEQ ID NO: 241396 - DNA, 201 bp, Homo sapiens
tctaaaacattggggtggaaagcctttattttagtgataagcacgtcttatttcttatttctagaatttcttatttctagtttttagtctccataatcttyctgacacttggtctctgtcttgctctgagtgtggatgataaaccatgcagaagcccagcttttcctcctttctgttctcagctatctaaaaccttcccag

SEQ ID NO: 241397 - DNA, 201 bp, Homo sapiens
atgtcagccaagagagcgtctaccacactaaggtggtacaggtgatgatttaaaggttgatgcaggtttcagtgaggcagaaggatgcaggtctacatgaygtacgaggacttgggggaacttcatggaggtagtgtcacttcagcagaccagttagagaaggcatcccaggtacagatctagcatgatcaaaggaatgta

SEQ ID NO: 241398 - DNA, 201 bp, Homo sapiens
tgaccaatgacacacagcttgtaagtgacatagcaaaggctctgaatcatgttcatctttattagcccgttttctgttgcttactgacagaatatttgaawcagactatgcctaaagaaagggaatttatctgcccggccaccaccccgtctgcgaggtgtacccaacagctcattgagaacgggccatgatgacaatggc

SEQ ID NO: 241399 - DNA, 201 bp, Homo sapiens
tgttggtagaaatgtaagttagttcaactactgtggaaagcatttttttagtgttgatctattgtttcttacagagaccatagccaaagtgcattagttartatttctagttccttaaaatgtactgagaatttaaaagtactttcaaaattatcagagtgacttccagatttttataacttttttcacagatgtttacag

SEQ ID NO: 241400 - DNA, 201 bp, Homo sapiens
aagaatgtaaacaaacccacaagcataaaccaaataaccctttaaaaagtgggcaaaggacatgaacagacacctctcaaaagaagacatacgagaggccracaaacctatgaaaaaatgctcagcatcactaatcaccagagaaatgcaatacaaaaccacaatgagacactatctcacacgagtaagaatggctattat

SEQ ID NO: 241401 - DNA, 201 bp, Homo sapiens
tttttcacacgtttccccctccatcctcccttttggagtccctagtgtctattatttccatctttgtgcccatgtgcactcaatgtttaataccattctakatttcagccttggccaagaacttatgactgaatgctcaaaagcaattgcaacaaaagcaaaagttgacaggtgggacctaattaaactaaagagcttcta

SEQ ID NO: 241402 - DNA, 201 bp, Homo sapiens
aaaattcctagggtcttagaccactaacaaatagacatgaatgttatccagacttccaccctccttgctgaatcagtctgaagtgaacctacagaatatgmcttcaggagccaattaagcaacagcttctgcaatgctatgctcacaattggcttttagaaacatttatgggtgaaaattccataaaaaaccctttaatat

SEQ ID NO: 241403 - DNA, 201 bp, Homo sapiens
atctgagaccatctcagccaggaccttattgtccatgtcattatcagcattttggtcaaagccattcaacaagtctctagggaattccaaactttcccacmttttcatgtcttcttctgagccctccagactgttccaacctctgcctgttacccagttccaaagttgcttccacattttggggtatcttttcagcaacgc

SEQ ID NO: 241404 - DNA, 201 bp, Homo sapiens
acaagttcctcatctccatctgagaccatctcagccaggaccttattgtccatgtcattatcagcattttggtcaaagccattcaacaagtctctagggarttccaaactttcccacattttcatgtcttcttctgagccctccagactgttccaacctctgcctgttacccagttccaaagttgcttccacattttgggg

SEQ ID NO: 241405 - DNA, 201 bp, Homo sapiens
taatcatagtatatatataattttacaccctgctttccagtttaaaattattttgaaaactctttgttgtcatttaaaaggctcctctgaaaactcttgtwtatagagctctttattcttcgggcacatgtttcttcactattgtcttctagttctcctcctcacatccccaaaaatgcctaatcaatattcttatttctc

SEQ ID NO: 241406 - DNA, 201 bp, Homo sapiens
tctaatctccctctcatgataaaggcctgaaaggaactgtgtgagtgaaatcaaaatcacttacaataagggctatacaggttaaagtgggaaggaattckagctatgatgttttgaaacactgcatgaaagcaaccaaagagaaagctctatagagttaaaaaaataaataaacaacccatgctctttctagaactctga

SEQ ID NO: 241407 - DNA, 201 bp, Homo sapiens
ggttaagtggagatcttagatctcaaaatccagctactatatttcattgactctaaggtgtcatcaactgtgagatgctgtattttctatgcagctctcaraaaggaaaaaaaaaaaaaaaaaacctcaatatgggtttctaagaggaaacacacacacatacacacacacactaataaactgggcttacaccctccgggt

SEQ ID NO: 241408 - DNA, 201 bp, Homo sapiens
gggtgcagcaaaccaccatggcatgtgtatacctatgtagcaaaactgcacgttgtgcaaatgtaccccagaacttaaagtataataataataaaaaaaacagattggtgtgcacaccaaatggaaaaagaaaagaatcattacataatatatcaaaatacgcagaccaagcatttatttttacccagatccctactaaca

SEQ ID NO: 241409 - DNA, 201 bp, Homo sapiens
ccatttatttgcctcccaagatcagataatgacaattcttatagaacacataacttgttgaggtctttgacctctgagattcttaagaagagaattatgastaatgatttagcaaatactgaaagaatcactccctagatggtatttaatatttaatttctcctagtggtttaattacattggcaccatcagttgcaaatt

SEQ ID NO: 241410 - DNA, 201 bp, Homo sapiens
taatgactgctgaaatgaccaattaaatcccttcagctctggcctgtagacatctttgccctggagttgcaaataggcttgttgtctctgtatttagagarttgtaaaatgattgtgtagtgtgtgctttgcaagattgaattatgaatttgttttccttcatatctggtaatatcacctgactgttatcagcaggtcaga

SEQ ID NO: 241411 - DNA, 201 bp, Homo sapiens
aataataaaaggcacattaaatggagtaggcaggacaaatttatattatattacccatatcatccttcccccatcccaagcagcacagtgcagaaaaatataccatccatttggggaaaagagaaggaagtgggcataggactttgacttggaccccaacactgggcctgccacagtaaaacccagcactaggcagaccct

SEQ ID NO: 241412 - DNA, 201 bp, Homo sapiens
ccaccaaaaatacttaattttagaaacatgatattagctagatgaatggcaaaaaagagattgaatgtaattttatttccaatgaaacacttaatgtcatctcatgcatgtctgttcataaaattaaattaattaaaataggtttatataatagattctattacatagattgaaaagtggctccaggtggcttctcttcac

SEQ ID NO: 241413 - DNA, 201 bp, Homo sapiens; identical to SEQ ID NO: 47492

SEQ ID NO: 241414 - DNA, 201 bp, Homo sapiens
aaattgctgaagaagttataaaatgatcaggtagaagtattgaccttcagcaagagaaggaaagacagacacatcatcatctggagttgaagtgaaagagragaaaatgaataacaggcaagtctatgaggattggaacagaggtaagtcaccaccaagagccaccaccatgttctcaatgaagtagaaaggtaagatcat

SEQ ID NO: 241415 - DNA, 201 bp, Homo sapiens
ctccaccaccatgagcaagatgatgtgtcaggtgcttcacagggtggcaagggggaaatgtgggccaggcactgtgccaagcacataaccatgattaactmatttaatcctcacaattatagaggtatacactattaaatacattcaactgaggctcagagatgttaaatgacctttccaaggtcaaacaactggtcagta

SEQ ID NO: 241416 - DNA, 201 bp, Homo sapiens; identical to SEQ ID NO: 47494

SEQ ID NO: 241417 - DNA, 201 bp, Homo sapiens
gcaaagttgcttgttccaatttgaaaacttgatagaagccataaagactggaaatgttcataatattatattgcatatatcataatgttatatgttaatawaccatttgtttactggtgtccccaaatttcgtgttgaccctctttatttgctgtcagaaatggacccctgtttgaggttttgtctttccctttcagcagc

SEQ ID NO: 241418 - DNA, 201 bp, Homo sapiens
aggtcaggagatcgagaccatcaaggctgaggcaggagaatagcgtgaacccgggaggcagaggttgcagctccattgcactccagcctgggcgacagagygaaactccgtctcaaaaaaaaaaaaaaagaaaagaaagtgcagagccaacgatgcccactctggtcttatacatgtgtctctccatttacctatgtcaac

SEQ ID NO: 241419 - DNA, 201 bp, Homo sapiens
atgctgagaggtggcttaacttggtataagcaacgcaggacttggagttgcttgagcaggtgaaggaccagactatagttccccaggcagagaggacgtcmgtcctcatactgacatatgcaggtgtgcgacggagcgcatgcacatgttcaaaatcctctactaagtccataccttcgaccaaccagaggaagatcacaa

SEQ ID NO: 241420 - DNA, 201 bp, Homo sapiens
tcatactgtttctgagagctgttcctctatgatcctggtaggtttctcttctttggggaaatttaaaaaaggaagattagtgggacaaattacagtccctkctgctgcagttgagtcttgggggcaccaaccgatgtacattattctagattcccctcacactccactagtacctctgctggtcttgtggtttacctggtg

SEQ ID NO: 241421 - DNA, 201 bp, Homo sapiens
cagcctcactcacatgcctagtattttggaagactgtggaccagggcatctaattcttcaccatgtgccctctcatcctccagcaagctagtgcaggtacrttcatatagttgtctcacggttccaagcattgcaaaagaaaacataagccctaatgtacaaacaattttgaagattctgtttatgccacatttgctgttg

SEQ ID NO: 241422 - DNA, 201 bp, Homo sapiens
cagcagccagagcccatatgaccttctcagtcatgttaagaggttgcactttatcctatggccaataggaaattactagaaggctgccaccagggttggcytcatggatgtgtggcaagtgcttttggttttattcagcatatctgacaaacagatgatggatcaagggggaaggaattattggggttgaggactctggaa

SEQ ID NO: 241423 - DNA, 201 bp, Homo sapiens
agcttgtaagtaattttgattcttcaggattcaggcccccaagagaaagcatcccgggcacagggcatctgtccctcatccaagacaggagccagcaaagrctgccattcttgataataaagctcagaagttagggaggtggaaaacccatcaagggataatgggccacacaaacgaagggtgctttgttggataggttgc

SEQ ID NO: 241424 - DNA, 201 bp, Homo sapiens
aaggtagcaggaaaggcaggcgtgactttggagtcaagcaatcaagattcaaattctgttctgactcttcttagctgggtggcctttagcaattccgtcarcccctctgtgcctcaaattcctcctatataaaatggggacaaaatattgactgcacagggttgcaaggtatattatggatatcgggtgaagttttcttaa

SEQ ID NO: 241425 - DNA, 201 bp, Homo sapiens
ggctggggtagccacacccttggcaagacttcgactgcatcacctcatccctgtgggcctccgtttcccaatctaaaagctggactctttgaacgctcaarttgacttcagctatcaacctctgagacttctccaggttcacctgaggatccacctggccaccagctttttactggaagtcattcacgctctccatcccac

SEQ ID NO: 241426 - DNA, 201 bp, Homo sapiens
tgttttcaagattttgtttttttagcatttggattatgatgtgcccaggaatagttttgttcacagttaacctatgtagggtttgctaagattattgaacstgtaaatatgtatctttataaaatttataagaattgcattatatctttaaacaaattagtttagccccattctctccttcctttccttctgagaatccaa

SEQ ID NO: 241427 - DNA, 201 bp, Homo sapiens
ttgactcaacaaaactggatgtttctagacagtacaccttcagcctgcagtcttgctgggaagaattatttgctgtgacaaactgattaatgaataccaarttttatgacaatccatgaagtgataggatctgcaagaaaagtaggattttactgggaacacagataaaagacaagtcctaaagaagagtcttctgatcat

SEQ ID NO: 241428 - DNA, 201 bp, Homo sapiens
aaatgagtaattacttaataggtcagattatgttaggtgtccatgttccaccacaaggtcagatgccacgtgcactgggtctgatactctgtgaagtagtrcccacaaggcaaggacaaactaagaagaattatgcaatatgtagaaactatatcacctatggaacaactggggaaatacatttcatgtgcctggtgaaga

SEQ ID NO: 241429 - DNA, 201 bp, Homo sapiens
tctcccatgctgagaggtggcttaacttggtataagcaacgcaggacttggagttgcttgagcaggtgaaggaccagactatagttccccaggcagagagkacgtcagtcctcatactgacatatgcaggtgtgcgacggagcgcatgcacatgttcaaaatcctctactaagtccataccttcgaccaaccagaggaaga

SEQ ID NO: 241430 - DNA, 201 bp, Homo sapiens
ttagtgtaatttgtttgagatttatcatattcttgtgtgtttcaagagttcattatttttgttctggagtagtttccaatttggtgcaaataaatttgcamatttttttaatttcttaaagttttattttaattgacaaatataattatacatattatagagtacaatgtgatgttttgatacatgtatataatatgtaat

SEQ ID NO: 241431 - DNA, 201 bp, Homo sapiens
attccaacatctgggtcagattagaatagatgtctgttgactatcttttctcttgagattgagtcacattttaatgtttatttttatgtcacataattctrtgctatgttctgggcattgtgaatgctctatggttaagactgaattatcttacattcccctggaaatagtgatttttgttttgttccgtttcactttagc

SEQ ID NO: 241432 - DNA, 201 bp, Homo sapiens
cactgtggtccatgtcaaaatctcttttcaaggagactcttggaagcagcctctaacttgtctccctgactgtccttgctgcactactgtctgttttcttyccagtcgcccaagtgactcttgaaacacagatggtaggtcatgtttccaagtgctaagaactttgcagggccttcccatctcatggagagaaaagcttca

SEQ ID NO: 241433 - DNA, 201 bp, Homo sapiens
atttattttttatccccatactggagacctataaaccacctagctaagcaaaatagatgtcctgtacctagagaacccatcccactttttccttgtgaagycttatcttttaggattcagctcttcagccttccctgaacacccagcctgggttgctttttttcccgtgtattcctatggcaacaaggatgtatcctttcc

SEQ ID NO: 241434 - DNA, 201 bp, Homo sapiens
gaccttaaattaagtcttgataacaaattagatatttctggggtgcagaatttgtaagtaagcccaatgactgtaggtcagggttacctctgaggccaacygtgcctcagtgagtagtgtggtaggaagatcagaggctttggagtcagatagacctgtgttcaaatctcagatccaccagtcaccagctcagtgacactg

SEQ ID NO: 241435 - DNA, 201 bp, Homo sapiens
ttagttacatatgtatacatgtgccatgttggtgtgctgcacccattaactcgtcatttacattaggtatatctccaaatgctatccctccccactccccygaccccacaacaggccccggtgtgtgatgttccccaccctgtgtccatgtgttcgacaatcttcttataaaggcacttgacctttcgtctatccactcat

SEQ ID NO: 241436 - DNA, 201 bp, Homo sapiens
gtgcaggttagttacatatgtatacatgtgccatgttggtgtgctgcacccattaactcgtcatttacattaggtatatctccaaatgctatccctccccmctcccctgaccccacaacaggccccggtgtgtgatgttccccaccctgtgtccatgtgttcgacaatcttcttataaaggcacttgacctttcgtctatc

SEQ ID NO: 241437 - DNA, 201 bp, Homo sapiens
ttgagattgctgagcctggcgttctcgctaggtcttttccatatcagcaatgagttggcccacactgtgagacctcagtcacaactactatagctaaatcyaaagactaccacatctgccttgtccaggagctaataaagaataaagtgctttcactagtgaccttaacctccttccacaactggctcatggagaacacac

SEQ ID NO: 241438 - DNA, 201 bp, Homo sapiens
tggccctacctacttctgaatgaagattccagcctgaaactgaaaataagcagagtctttgggaaaggttaggacatctcagcatgaaagacagaagctgyacagctgtgccttgagattgctgagcctggcgttctcgctaggtcttttccatatcagcaatgagttggcccacactgtgagacctcagtcacaactact

SEQ ID NO: 241439 - DNA, 201 bp, Homo sapiens
ggctcactgtttttcctgtgtcttgtaggacataggaagttcataagaactgaaaggtggaacctctgccttttccacaacccaaaggctgcaggcatcargtttaaaatagaggtacagaggcttccaagttaggcacagaaacatgctgccacaggggtaatggaagcgtgctcccagaataggttggggaaactactg

SEQ ID NO: 241440 - DNA, 201 bp, Homo sapiens
gctccagtttaccaatattagttgaaaggccaagagtgaggttgtggggttccaatgagtagcaaatgagtaagtgcctagtgtggtatcagccagagtcrgggcacctgccttgtcattgttttattttcttcatcatagactgaaatttcaggacaccaaggaacaaaagtcaatcaaaggatgtcacagatcccttca

SEQ ID NO: 241441 - DNA, 201 bp, Homo sapiens
tcccaaactgagatgagaatcttctttttaaggagctcaaagaataatatcagaggcaagcatctaggattagctaatagattggtggaatagagtcaggyaagcttctcaggcaggagggaatcattgtcagaccccacttgacccaagttaacctggctggattccttaggccagctctaagggacaaaatctagaatg

SEQ ID NO: 241442 - DNA, 201 bp, Homo sapiens
aattctccaggttgccaacccaaggtcattcagtcaatgggatagtggtcatctcaccaactacagccaatgacatttcaacccagctaattcagtgctargagatatttcaattcacacctaccctgtggccctatgaacaaaccaccaatgtttcagtttctctctcccctacttgtgagtcccatgtgaatcctggca

SEQ ID NO: 241443 - DNA, 201 bp, Homo sapiens
catttgtgatctgctagacatattcatatacagtatatatatataatgtatatatataaaatatttgtatatatagtatgtgtatatattagatatatataatatataatatttgtatatatagtatgtgtatatattagatatacacacacgtatatgtagtattaacctcacttgtatgaggcaagggtttattcccat

SEQ ID NO: 241444 - DNA, 201 bp, Homo sapiens
gcatttgtgatctgctagacatattcatatacagtatatatatataatgtatatatataaaatatttgtatatatagtatgtgtatatattagatatatataatatataatatttgtatatatagtatgtgtatatattagatatacacacacgtatatgtagtattaacctcacttgtatgaggcaagggtttattccca

SEQ ID NO: 241445 - DNA, 201 bp, Homo sapiens
aaaagatcttattatatcctttgatctttgcacatggatggtcatatttatgaaataagtctacagaattagggttactgaactcatgagtagaaatattrtcaatttttacagatattgccagattcacacatttcaccaactaggtataagagtgactattttccccacaacctagccagtgtgaaatgttagtaatct

SEQ ID NO: 241446 - DNA, 201 bp, Homo sapiens
ggcatttgtgatctgctagacatattcatatacagtatatatatataatgtatatatataaaatatttgtatatatagtatgtgtatatattagatatatataatatataatatttgtatatatagtatgtgtatatattagatatacacacacgtatatgtagtattaacctcacttgtatgaggcaagggtttattccc

SEQ ID NO: 241447 - DNA, 201 bp, Homo sapiens
cgccatctcttaatagaattttaagcattatctggccaagctttcctgccctacattaggctaccgccccagactacattaggctgggctggccagcttgrtgatcaaagtggatccagagtaattctgcatgcatccaagcctcttcgaagacagctggattaccattccagcacagggcaaagagactaggaatttcca

SEQ ID NO: 241448 - DNA, 201 bp, Homo sapiens
gggcatttgtgatctgctagacatattcatatacagtatatatatataatgtatatatataaaatatttgtatatatagtatgtgtatatattagatatatataatatataatatttgtatatatagtatgtgtatatattagatatacacacacgtatatgtagtattaacctcacttgtatgaggcaagggtttattcc

SEQ ID NO: 241449 - DNA, 201 bp, Homo sapiens
tccatatatatctaacatttattgggcatttgtgatctgctagacatattcatatacagtatatatatataatgtatatatataaaatatttgtatatatagtatgtgtatatattagatatatataatatataatatttgtatatatagtatgtgtatatattagatatacacacacgtatatgtagtattaacctcact

SEQ ID NO: 241450 - DNA, 201 bp, Homo sapiens
ttccatatatatctaacatttattgggcatttgtgatctgctagacatattcatatacagtatatatatataatgtatatatataaaatatttgtatatatagtatgtgtatatattagatatatataatatataatatttgtatatatagtatgtgtatatattagatatacacacacgtatatgtagtattaacctcac

SEQ ID NO: 241451 - DNA, 201 bp, Homo sapiens
tttccatatatatctaacatttattgggcatttgtgatctgctagacatattcatatacagtatatatatataatgtatatatataaaatatttgtatatatagtatgtgtatatattagatatatataatatataatatttgtatatatagtatgtgtatatattagatatacacacacgtatatgtagtattaacctca

SEQ ID NO: 241452 - DNA, 201 bp, Homo sapiens
atttccatatatatctaacatttattgggcatttgtgatctgctagacatattcatatacagtatatatatataatgtatatatataaaatatttgtatatatagtatgtgtatatattagatatatataatatataatatttgtatatatagtatgtgtatatattagatatacacacacgtatatgtagtattaacctc

SEQ ID NO: 241453 - DNA, 201 bp, Homo sapiens
agttgttaatagaggtttttcatcattcagttttactcttttatttattttacttttatttacttttttagctgagttcagcaggcctcatttttttttttaccttttcttagatttttacttaagtttactactttattgctatgttattttttaagcttcactatgaactatttataattctttctccaattcagtgtg

SEQ ID NO: 241454 - DNA, 201 bp, Homo sapiens; identical to SEQ ID NO: 47493

SEQ ID NO: 241455 - DNA, 201 bp, Homo sapiens
tcttaagtcacaactcaattccatttcattttcaaaacacccgcaattttcttgaaaaacactcccttattgagagagagagagagagagagagagagacagacagagagagagagagagagagagagagagagagagagagagaatttgttccatgtgttttctggttttcccagcagatagtaagagcaatgaagatag

SEQ ID NO: 241456 - DNA, 201 bp, Homo sapiens
caccatagggagaatccttatggggtgggctggatggcttcacagaggtcaaagctcctgactccagctgtggtcctggagtcagcagatctggcttggcrgcaaatgagcaagtctctctgaggctcatcgatatctgaaggtttggcaagaggatctgcaaggtcctatgtcacctctcacaggctgccatttgatgac

SEQ ID NO: 241457 - DNA, 201 bp, Homo sapiens
ttgggcttatggattcataaagggaatgtgttaaaccaagtgatctaagagcctgtccacttcccacctgtcatagcaatgacttttctttcttcaaaaakagcatagctgagcaataaagaggatggatgccagagccaggcttcctggttcaaattctagctcttcatgattataggcaagatacgtaggcctcagttc

SEQ ID NO: 241458 - DNA, 201 bp, Homo sapiens
gggacatattagcgaagtaaaaaatttagcaatctttatcaagtttaaggagcagatcctggcatatttggctgtctttctatgagtaatgctaaaaaaamaaaatgcaagccataagaccccaagtctctccaccaccattaaatgaaaggtcacacgaaaatgtggaatctactcagttggagatgatcatttttgggg

SEQ ID NO: 241459 - DNA, 201 bp, Homo sapiens
aaaagaagactcaaagaacaaagactcctttaactcagtaagcatcaagagtttcttccactttcagattattaagccaagtggcattaacagccacttamctttgcttttagatgaattcacatcagctgcaaccattttaacataataaatgagggcacccaataacttgatgtaagcggtcagtgataaacactgtct

SEQ ID NO: 241460 - DNA, 201 bp, Homo sapiens
tgtggattcagagtcaaatttgaattccacctctgccactttcttgctatgtgaacttagataagtaaagtaacctctctgagcgtgagttcccctctgtrtgatgaggataatgaatgcacctacctcacagttaatatgaaagtcttcagggcaacaccttgattaggtaaagtgttcaaggatggcagctatcaccac

SEQ ID NO: 241461 - DNA, 201 bp, Homo sapiens
tttataaataattacatagacttttatcttattttgcagtgtatactttgaggctgtgctattaaatgtgtagatgttcagaatttttatgtatttctgawgtattaaaccctttattattgtatagtgaccctacttatctctagtaatgcccttttcaaaaaattatctttagtctggcatttatacaacaaagccagc

SEQ ID NO: 241462 - DNA, 201 bp, Homo sapiens
atagaaccaaactttattttgggaggtaatgtgcccagttgcattactagaggatttggagaagcgtttaaaaggtgtctgatccctctgggagacccacmtttttttcacccaccctacatcctttagccatctttctacctggtagacagatgtcatgacagctccaacagccatcttggactatgaggagagatggaa

SEQ ID NO: 241463 - DNA, 201 bp, Homo sapiens
agtagctcctttatcagtaaatgagctaatgaataagaaaacattttgaaccaatatacagcagtaaacaaacactgggctgtattattattattattatwaattattcctataacacagttgtgtctgatgatgtcacgcaatagcaagctgtcttgttctgtcattggcgtgaaactgccaaacacgcgacagtggtcc

SEQ ID NO: 241464 - DNA, 201 bp, Homo sapiens
agactaataaacaaataagtcacagaatacaatgtcaatatacaaaagtcaattgttttcctttatatcagccatctaacgttgaaatttgaaattaaagaaacaatattatttacaatagcaccaaaaatgaaatacttaaatataaatttaacaaaatttgtacaagaaatcttcaaaacactgatgaaataaatcaaa

SEQ ID NO: 241465 - DNA, 201 bp, Homo sapiens
aagactaataaacaaataagtcacagaatacaatgtcaatatacaaaagtcaattgttttcctttatatcagccatctaacgttgaaatttgaaattaaagaaacaatattatttacaatagcaccaaaaatgaaatacttaaatataaatttaacaaaatttgtacaagaaatcttcaaaacactgatgaaataaatcaa

SEQ ID NO: 241466 - DNA, 201 bp, Homo sapiens; identical to SEQ ID NO: 47489

SEQ ID NO: 241467 - DNA, 201 bp, Homo sapiens
acgccatgctccaacagaacttctcccaggtatataaagtttattcaacattctaaaatcaaacaatagtggttaactatattagtaagttaaagaaggamaatcatatgatcttatcaattgccaaataaatgcattggataaacttcaacgtccatttatgttaaaaactctcagaaaactagcagcagaagggaactt

SEQ ID NO: 241468 - DNA, 201 bp, Homo sapiens
atagccaaagtgcattagttagtatttctagttccttaaaatgtactgagaatttaaaagtactttcaaaattatcagagtgacttccagatttttataayttttttcacagatgtttacagctatcttgccgacatctaatttagtgtcattgttttagctgctcagcattacaaagtcttcccaaagtatttgatttca

SEQ ID NO: 241469 - DNA, 201 bp, Homo sapiens
acaaaaaattagccaggcgtggtggccggcgtctgtagtcccaactacttgggaggctgaggcaggagaatggcgtgaacctgggaggcggagcttgcagwgagccaagattgcgccgctgcaattcagcctgggagagtgagactcggtctaaaaaaacaaaacaaaacaaaacaaaattgaactaaatgaaaatgaaaa

SEQ ID NO: 241470 - DNA, 201 bp, Homo sapiens
agggtgatagacccatacattccaatatagaagtgggtagcaacaatcccccaatagccccaaaatctgtgtgatatcagtacctgtatgggagaaagcasaaagaagtactgggcatgtcacaccggggaacaaaaggatctcaatacagccaacagatatgcactgagaagtgctgtgagccaaattaagaaagcaaat

SEQ ID NO: 241471 - DNA, 201 bp, Homo sapiens
ttttgggagaatgaggcgggtggatcacttgaggtcaggagttcaagaccagcctggccaacatggcaaaaccctgcccctactaaaaatacaaatattakccaggtgtggtggcacacacctgtaatcccagctactcgggaggctgaggcacaagaatcgcttgaacctgggaggcagaggttgcagtgaactgagatc

SEQ ID NO: 241472 - DNA, 201 bp, Homo sapiens
gacaagatggctcaagagaagacaaagccagaaatagcctcccagaacaatcaaacccggccgggagtggtcacttatgcctgtaatcctagcattttggragaatgaggcgggtggatcacttgaggtcaggagttcaagaccagcctggccaacatggcaaaaccctgcccctactaaaaatacaaatattagccaggt

SEQ ID NO: 241473 - DNA, 201 bp, Homo sapiens
tctctttggatctttcaacccagggtaaccactgttaccattctggcatctgtcattctggtcttacatgagtgtgaatctatagacttatgtacacaacygtattagtccattttcatgctgctgaaaaagacatacctaagatggggcaatttacaaaagaaagaggtttattggacttacagttacacatggctgggg

SEQ ID NO: 241474 - DNA, 201 bp, Homo sapiens
caaaatccagctactatatttcattgactctaaggtgtcatcaactgtgagatgctgtattttctatgcagctctcagaaaggaaaaaaaaaaaaaaaaaacctcaatatgggtttctaagaggaaacacacacacatacacacacacactaataaactgggcttacaccctccgggtaaggatatggggggctgaggggc

SEQ ID NO: 241475 - DNA, 201 bp, Homo sapiens
tcaaaatccagctactatatttcattgactctaaggtgtcatcaactgtgagatgctgtattttctatgcagctctcagaaaggaaaaaaaaaaaaaaaaaacctcaatatgggtttctaagaggaaacacacacacatacacacacacactaataaactgggcttacaccctccgggtaaggatatggggggctgagggg

SEQ ID NO: 241476 - DNA, 201 bp, Homo sapiens
agttccaattcctttaataatgatttgacaagttctgcttcattttatgctctcagtaactttaggtgataaggatttattttttcttttgcatgtgaagmgactgtaatttcactggaatatgagatctagggggacagagacttgttctgtatccctgagccaggggtagtgtctggcacacagtatataataggtcac

SEQ ID NO: 241477 - DNA, 201 bp, Homo sapiens
ggttgtatttctctgcaccaaatgctatcagatcaacttctgtaggtttcactgaatacaactgcatggaatgctattactgtttgcaatgcaacatgatytaaaaacattgcatttctgttttatctaaaggggactagcaggtttattgtgtttgcatgtgctttccccctagactctggctgccctaacaagaaattc

SEQ ID NO: 241478 - DNA, 201 bp, Homo sapiens
gcccaagctgatgttggccccttttagccatgactggggctcagagcgccaagtcctgaggctgcacagagcagcaggggggcccttggcctaccccaggmaaccatttgttcctcctgggcctccaggcctgtgatggggtagggaggctgctgtgaaggtctctgacatgccctgcagacattttccccattgtcttgg

SEQ ID NO: 241479 - DNA, 201 bp, Homo sapiens
catattagcgaagtaaaaaatttagcaatctttatcaagtttaaggagcagatcctggcatatttggctgtctttctatgagtaatgctaaaaaaaaaaaatgcaagccataagaccccaagtctctccaccaccattaaatgaaaggtcacacgaaaatgtggaatctactcagttggagatgatcatttttggggactt

SEQ ID NO: 241480 - DNA, 201 bp, Homo sapiens
ttcaatgtaaaggactgtcttttattctgagactacatcattcctgttaaggaaaaaaaaaaacgccctttcttctattacataatggtcatattaaagarctgtggttgctactgctgctgctgctactgaaatttaaagaaatcaatccccaaactattttttgaaacttctctcctctgtgaaatccaaaagtcttag

SEQ ID NO: 241481 - DNA, 201 bp, Homo sapiens
aaaaacaccagctaagtatacacatatacatatattatatataaatacaatgtatacttcaatcatacattgaagcatacgttcaaatatatgtattctawtatatatatattatattatagtcaagtattatggcattttccattttattccattttgtccatttgtttttcctattctttagccaattgtttagagtgt

SEQ ID NO: 241482 - DNA, 201 bp, Homo sapiens
acagatcccttcatccctatcaaagttagcatccagacaatagtcggaaacttccaattctgcctaaagatgggaagcaacgatttcccaaatgacctgakccccagactgacattgtttactcataactgggaaaccagacaacagaggggtgctgaaatcctacagtaggcttatagaaatgtctaggctattattgca

SEQ ID NO: 241483 - DNA, 201 bp, Homo sapiens
ttcgcgataactgttcctcaagtggcctttctataacacatacccgaccaagtcacttacctgttaaatcccttcagtgggtcactgtagtgacatatagmcaatgaaaacaataataatgacaataactgcaaccacagtcaatacatattgagtaatgattgtgttacaggtcttctgctaatttcattgattatccaa

SEQ ID NO: 241484 - DNA, 201 bp, Homo sapiens
ttcatctgcctaaattaaaagttacttctgaaccttcaaagctaaacatttaaataattctatttcaattttctcaaaatttctattaagaaaacacaacsacaaccacacacacaaacatgcacacccgcaaacacacacataaacatgcacaccccaaaacacacaaacatgcacacccacaaacacacacacgcataa

SEQ ID NO: 241485 - DNA, 201 bp, Homo sapiens
tttggatacattgtatgaagtatcacccactctggacttcatgtctggggaaaacttaaacacaggaccactgataagggataagcctggaaataaacacrcgggataataaaaaaccagaaaagctaaaccaattacaccattcttatagaaatgtgtgtgttgggaaagttagggtaaaaggaagtagcaggcacaacc

SEQ ID NO: 241486 - DNA, 201 bp, Homo sapiens
cacactgtgagatagtaaggactttggatacattgtatgaagtatcacccactctggacttcatgtctggggaaaacttaaacacaggaccactgataagkgataagcctggaaataaacacgcgggataataaaaaaccagaaaagctaaaccaattacaccattcttatagaaatgtgtgtgttgggaaagttagggta

SEQ ID NO: 241487 - DNA, 201 bp, Homo sapiens
atcacagtgttcctccctcccttaggcaataacatctgcaaaagctcagagttagaatatatggagatgagtcagggtgactatcaaaatgtattaatggyaaaaaccgcaattacttttgcaccaacttagtaatagtaaaaacactttcacttcattggataagtggcagagcctttagaggtttgtgggcaggggagt

SEQ ID NO: 241488 - DNA, 201 bp, Homo sapiens
agctcatgcaaagtatccctcccattgtatttactcctgggctctcactggaaagttggcaggagggatggggataatgctctgtgaaggttttattaagrtatgaattattcttaatttaaaaaaaatctaattgccttgtttcttcttgatgtttccctcaacctcaaacactgcactctgctgcaaagtaactcattc

SEQ ID NO: 241489 - DNA, 201 bp, Homo sapiens
tcatgtcacactgtgagatagtaaggactttggatacattgtatgaagtatcacccactctggacttcatgtctggggaaaacttaaacacaggaccactsataagggataagcctggaaataaacacgcgggataataaaaaaccagaaaagctaaaccaattacaccattcttatagaaatgtgtgtgttgggaaagtt

SEQ ID NO: 241490 - DNA, 201 bp, Homo sapiens
cagagataacaacttttctgggcaaagagtgggacacagaagggcagttttttagaggccaaaggagaatagccagcaaagttggtccagttaactccaarttatcctgtgtgactagaagcctggaagtacacagggaagaaataagagtcaggagagggaaccagagaggagagggaaagcaccaaatcccaaaggctc

SEQ ID NO: 241491 - DNA, 201 bp, Homo sapiens
cccattgtatttactcctgggctctcactggaaagttggcaggagggatggggataatgctctgtgaaggttttattaagatatgaattattcttaatttwaaaaaaatctaattgccttgtttcttcttgatgtttccctcaacctcaaacactgcactctgctgcaaagtaactcattctctctttttttaattacagt

SEQ ID NO: 241492 - DNA, 201 bp, Homo sapiens
ccctgaaggacacatagctggtaaataacagagatggaattagagccccatatatctgactcaaaaagccccatgctttccatcagttcacactgcttccrtctttgtggcctgaagatatatgctgggtgtcatcttctaccttgttttcaggtcatctgtcagtctcagaaggtgagtgagtatttatgtgtgttgtgt

SEQ ID NO: 241493 - DNA, 201 bp, Homo sapiens
ctgtgtgtcaactacaggaatacatcaatggatggcagtaactcctgcccacaggaaaacacagacaagacccaagaactgacaggagctatagagcagtrtgataacagtttgctggcaggaaatgtgagagggggacagcctaaaagatagggggctttcagggaaagagaagctgcttcttgtgcattgtgaagcatg

SEQ ID NO: 241494 - DNA, 201 bp, Homo sapiens
atcatatacatccattgcagataagtcatgaatggctctaaaagattgatatcatcaagaaactgaaatcctctgtttgagaacaaagcctccatggaaasgttgtcatctggccttggcactcacccatgcctttctgaggaaattattacaggtcttttggaaaccctcagttctgacatttctcatggagatctaaac

SEQ ID NO: 241495 - DNA, 201 bp, Homo sapiens
gtattgtccctgaggacatgtcctaataatacccttgtgtaacctggtgttggttttgtacaggtcaaaaaaatatagcctttgcaggcaacatcaggagygtgtaatgacctatgccttctacacacaggaggattcacatttccaaagccacgctggactgtctcaacggtgactataacgtggaagagggccatggta

SEQ ID NO: 241496 - DNA, 201 bp, Homo sapiens
caataaaatcagctgttcatgtgacaggtatcaattgtctcagtgtacctctgtcctagcactcattcctctatgcagtaagtgcatgtctaattgtctgycttcctcaccagacctgaactacttgagggcagggagatcatctatcatgatcatatttgtaccctcagtgtgcagttcaatggatagctgtaaagtcac

SEQ ID NO: 241497 - DNA, 201 bp, Homo sapiens
tttccagagtaacaatgcaccacattctgaaacacagcattttatatttgatgatgtcaacttcacaattataagattcttcttttatgtgattatgctargcactgaagttcaaacaggaaaataatagaatgcttcaaacttatgaactacattaacgccaaacttatgaactatattaatgttcccatttgacagata

SEQ ID NO: 241498 - DNA, 201 bp, Homo sapiens
ttttggggtcaccgctgagtgcaaggtacaatactgtacagaggaatagaagacagcatcctgcaaggcaacaccattgaaaaggcaagcttcacatagawgaaagtatagaaataaaataagtataattaattgattgacagtaggtaacatttatatagggttatcgtggaaggcactgttctaagcatcttatatata

SEQ ID NO: 241499 - DNA, 201 bp, Homo sapiens
ttctatctccatgtaacaaatggagagcaaacacacttcattgcctggaatatagataaacatccacaaggtcaccaacactgacaggagtagagagcttygggacaggtagcatgtcgggagtggtgtgcccatgtttttccacctaattctcacaccaaccttacagggtaagtgtgatgtgcctacttcacaaatggg

SEQ ID NO: 241500 - DNA, 201 bp, Homo sapiens
atttcactctgtcgcccaggctggagtgcaatggcacgatctcggctcactgcaacctccgcctcccgggttccagcgattcttccaactcagcctcttargtagctgagattaccggcgcgtgccagcacccttggctaatttttgtatttttagtagagatgggatttcaccatgttggccaggctggtcacgaactcc

SEQ ID NO: 241501 - DNA, 201 bp, Homo sapiens
ttttattgagatggaatttcactctgtcgcccaggctggagtgcaatggcacgatctcggctcactgcaacctccgcctcccgggttccagcgattcttcyaactcagcctcttaagtagctgagattaccggcgcgtgccagcacccttggctaatttttgtatttttagtagagatgggatttcaccatgttggccagg

SEQ ID NO: 241502 - DNA, 201 bp, Homo sapiens
gaatatccaggaagttcaaggctagattattaaatgagttatcaacatggacattgaatctctcagttgaaagacaacattgcaaatgaaaggaagataasaacaggatccttatcataaaggttatattttccttttctgctgcatgctctgagtaaaatctatatctgggcttgagctattgttcattctgttatttaa

SEQ ID NO: 241503 - DNA, 201 bp, Homo sapiens
attaaagtttgttgaataagtgaattaaatgatagatatgggtagtgagggagaggaatcagtcaagtttgaattctagattttttgcttggaactgcgtsgatgatagaacttccaactaaaataagcagtactggaataggagattgtgtgaggaagactaggaattctctttgggacatgtggagcttgaagtgtctg

SEQ ID NO: 241504 - DNA, 201 bp, Homo sapiens
tgctatgtagatagcagatgttcagatagttacatcctcatgtattcattcattcaataaggattaattgagcatctattacaagccaactactgctagtaaaaaaaaaaaaaaaaaaaaaagaggagggatggggaaaaaaaatcactttagagacaaagtcagccagtggtttatattcttaatgaagatagaaattat

SEQ ID NO: 241505 - DNA, 201 bp, Homo sapiens
actttgttgtcacccagcggcacagagcctggagcccaggctgaaggcaccgacaaatctgatttgccataaaagcattttctttctgttttttttttttttgtatttcttttatatataaaataaatatactaataaaaaggtttaattttttttagaacaaggatggtttcgttggtctttgaatgtaccagatcaagg

SEQ ID NO: 241506 - DNA, 201 bp, Homo sapiens
taatctgtattgtacatgaacttgctactaataactgagagccaagaagagggaggtggaggttcttggttttattctatagttgattgatgtggttaaaytgtataggaatgcttgaaatatttatttgctgatttcctaaagatatttcctgatgtcaccaaatacctattataagagatgtcattattagctagagat

SEQ ID NO: 241507 - DNA, 201 bp, Homo sapiens
gactttgttgtcacccagcggcacagagcctggagcccaggctgaaggcaccgacaaatctgatttgccataaaagcattttctttctgttttttttttttttgtatttcttttatatataaaataaatatactaataaaaaggtttaattttttttagaacaaggatggtttcgttggtctttgaatgtaccagatcaag

SEQ ID NO: 241508 - DNA, 201 bp, Homo sapiens
aggttgaacctaggctgcatgccttgcaagagttgacccttaggtcttcgacagctcttttgtgagtgtttaatttcccccaaaaattattatgcccacamaagtcataactgattgcaatgcctaggttctttccatctctgagttggtgtgcatggtacagtttgctgttttataaaataatggtgttatatacttcct

SEQ ID NO: 241509 - DNA, 201 bp, Homo sapiens
tggacacatacatggacatacatgtgcacataaacatcacacatgcacacatgtactgtacacatgtgcacataaacatcacacatgcacacatgtactgtacacatgtagacatacacacatcactacacatgtactgtacacatgtagacatacacacatcactacaaatgtgcccacatgtgtgtccacacacatatg

SEQ ID NO: 241510 - DNA, 201 bp, Homo sapiens
gctgcaggttgaacctaggctgcatgccttgcaagagttgacccttaggtcttcgacagctcttttgtgagtgtttaatttcccccaaaaattattatgcmcacacaagtcataactgattgcaatgcctaggttctttccatctctgagttggtgtgcatggtacagtttgctgttttataaaataatggtgttatatac

SEQ ID NO: 241511 - DNA, 201 bp, Homo sapiens
gtggacacatacatggacatacatgtgcacataaacatcacacatgcacacatgtactgtacacatgtgcacataaacatcacacatgcacacatgtactgtacacatgtagacatacacacatcactacacatgtactgtacacatgtagacatacacacatcactacaaatgtgcccacatgtgtgtccacacacatat

SEQ ID NO: 241512 - DNA, 201 bp, Homo sapiens
taaaggggaggatcaagtacatgggaatgcccctttttcggtagctggccatcatcagttctgtgtcaccctctgagattcaaaatcaggggggcactgcwgatttggaaataggaaaggagcaccaagtgatgcctagagttagggagttcaggaggagcatgcaatttcaaagccacccacatgattctatttttatat

SEQ ID NO: 241513 - DNA, 201 bp, Homo sapiens
ggcatacaaactaaagacacagatgtgaacattccactgcattataatatgttactttgtacaactcaaattcaaagagagaaacttcctccaaaaccctrtgcagatttgacagaactctgaacctggttctttgttttccttgcaaataatagttggattttattatgcacatgatcccctagaagcagcatctcccca

SEQ ID NO: 241514 - DNA, 201 bp, Homo sapiens
tgtggacacatacatggacatacatgtgcacataaacatcacacatgcacacatgtactgtacacatgtgcacataaacatcacacatgcacacatgtactgtacacatgtagacatacacacatcactacacatgtactgtacacatgtagacatacacacatcactacaaatgtgcccacatgtgtgtccacacacata

SEQ ID NO: 241515 - DNA, 201 bp, Homo sapiens
ctttcaggtcccatccataaagcactctagatgcaatgcttggcaggccctacataaagaggggagagaattgaatcggtattcactctggtcttcaaaasatatctaatttgcctatctgtgaatatttatagactttatttccacagcaatgttgaaaatgtccctgtgtccacatgaggagccttctcagaaagtata

SEQ ID NO: 241516 - DNA, 201 bp, Homo sapiens
gcatgtggacacatacatggacatacatgtgcacataaacatcacacatgcacacatgtactgtacacatgtgcacataaacatcacacatgcacacatgtactgtacacatgtagacatacacacatcactacacatgtactgtacacatgtagacatacacacatcactacaaatgtgcccacatgtgtgtccacacac

SEQ ID NO: 241517 - DNA, 201 bp, Homo sapiens
tgcatgtggacacatacatggacatacatgtgcacataaacatcacacatgcacacatgtactgtacacatgtgcacataaacatcacacatgcacacatgtactgtacacatgtagacatacacacatcactacacatgtactgtacacatgtagacatacacacatcactacaaatgtgcccacatgtgtgtccacaca

SEQ ID NO: 241518 - DNA, 201 bp, Homo sapiens
attttaagaagcagatggaccctacgtttcatacggcaggctgacactaaagtccagcagaggcaatagaatggatcagggttgaaggaaaagttgggctycatggccaccacaatggcagtccctaccccacaatgactcctgaagtaccctcagcaaactcagatctataagaagggaggctttggagattaatctgta

SEQ ID NO: 241519 - DNA, 201 bp, Homo sapiens
catgcatgtggacacatacatggacatacatgtgcacataaacatcacacatgcacacatgtactgtacacatgtgcacataaacatcacacatgcacacatgtactgtacacatgtagacatacacacatcactacacatgtactgtacacatgtagacatacacacatcactacaaatgtgcccacatgtgtgtccaca

SEQ ID NO: 241520 - DNA, 201 bp, Homo sapiens
ctaatttgtcttatttgtcactggaatctaaatgcctcagtcatacttgggactcaataaatgcttataaagtgaatgaatgagggaggaaattatatatkggtagtcattatcaacattaacctaataacctagatggtacaaactaattaaatccattgattaggtttatttgacaaattcattcattcaactgcatta

SEQ ID NO: 241521 - DNA, 201 bp, Homo sapiens
agtcagctcagaccccagtagtccacatacttccttttgtatttccctttaaagaagccatgcagggaagtagaaatggaccaatgggttcaggcttatayacccggggtgaaattctaactagtccatcaataactgtgtgacgtaaagcaatatacctctcgtgactcagttctctcacttgtaaactggctctggtag

SEQ ID NO: 241522 - DNA, 201 bp, Homo sapiens
tgcaattcaaaacatacttccaatttttttaattaccctattaaaaatatctgactaaaggttaagacgtcaggctttgttgtattttaaactttatagcrggggtgtccagtgttttggcttccttgggctacaatgaaagaagaattgtcttgggctacctataaaatacactaacactaaggatagctgatgggcttt

SEQ ID NO: 241523 - DNA, 201 bp, Homo sapiens
tgtctaactaaaactttataccctttaactaatatctccctcttcccaccccaccccccaggttctgaaaaccaccattccactatttgcttctgagtttsacgtttttagattccacgtataagtgatgtcatatgtacttgtttttctgtgcctggggtatttcacttagcatcatatcctccagacccatccatgttg

SEQ ID NO: 241524 - DNA, 201 bp, Homo sapiens
gggccttctactcccccattccccatcttgaaggacaccagtgtccatccagttacttaagcctgagctgggaagcaagtgattcactgagaaaatgctayggaataagccaaatccctgcctaactccagagggaactcaggcacataaatggtacaactgtctcacactgaggcagggggccaggcttttggataccca

SEQ ID NO: 241525 - DNA, 201 bp, Homo sapiens
tgggatctacctcttagatctgactgctctccctcaggtagtggtaatcttcatcttgttctccttccacaatatttttcattcagttctttgaaagaccyatgccatcttctacccctcagctgtctaagtttctgttcttcctttgcccaagatgttcttccctcattctcagctcaaggaacctttctcagggacgct

SEQ ID NO: 241526 - DNA, 201 bp, Homo sapiens
ttttgttatagcagcccacatggactaaaacacactgttgacataacgatatccaagcctcattttctgtctctctgtgggtgactgtgcacgtgtgtacmcacatgtgtgcacaggaagcatcactgcagaaccgacctctgatgaccatttctggtgccctctgtgtgtctctgtccaggagctgtattctcaatccta

SEQ ID NO: 241527 - DNA, 201 bp, Homo sapiens
gagttgaagtgaaagagaagaaaatgaataacaggcaagtctatgaggattggaacagaggtaagtcaccaccaagagccaccaccatgttctcaatgaartagaaaggtaagatcatccactgagagaaatagagtagagggttaagtggagatctgaaggtttggactagccattgaggagaaaagaaaaggaagctta

SEQ ID NO: 241528 - DNA, 201 bp, Homo sapiens
taaacttacatgtgtgcattgatttttccactttgactgcaggctagactgttcttagttcatttcattccagtctgagatgccagtgggcattaagagcrtgggaataggcagtgaaggtaactagtttgagaagtttggaaacaaggaggaagagaacctagttgatagccacaagtgtctgcaggatccagggcactt

SEQ ID NO: 241529 - DNA, 201 bp, Homo sapiens
tctgtctcatttcctgtatcagtaaagtgggaataattatcatatgacttcatagaattattgcaaggattaaatcactgaattcatatgaaagcaatttrtaaggtttcatgtttcctacgaaggtcaggaagtcattaatcaaccaacagttttgagtatttaccttggaccagactgtctagggtgtgcattatatag

SEQ ID NO: 241530 - DNA, 201 bp, Homo sapiens
cattagggggacctaacccaacatgactggtgccctaatagaaagaggagactagaacctaagggaagaccaagtgaagacacagggaagacagcatctgyaaccatggggaaagccctctgacaacaccaacctgccaacaccttgaacttagacttccagcctctccaattgtgagaaaactaacatctgttgtttaag

SEQ ID NO: 241531 - DNA, 201 bp, Homo sapiens
ttttttttgtaacctagctaaaaataaatattatgtgaagctgaattgtaattttaccaaaaaaaaaaaaaaaccactcatgttggaaaaaataaaccctytgttattaaactaaaggggaggatcaagtacatgggaatgcccctttttcggtagctggccatcatcagttctgtgtcaccctctgagattcaaaatcag

SEQ ID NO: 241532 - DNA, 201 bp, Homo sapiens
tcctaacaccctctctctctctctttttttttttttgtaacctagctaaaaataaatattatgtgaagctgaattgtaattttaccaaaaaaaaaaaaaaaccactcatgttggaaaaaataaaccctctgttattaaactaaaggggaggatcaagtacatgggaatgcccctttttcggtagctggccatcatcagttc

SEQ ID NO: 241533 - DNA, 201 bp, Homo sapiens
ttcctaacaccctctctctctctctttttttttttttgtaacctagctaaaaataaatattatgtgaagctgaattgtaattttaccaaaaaaaaaaaaaaaccactcatgttggaaaaaataaaccctctgttattaaactaaaggggaggatcaagtacatgggaatgcccctttttcggtagctggccatcatcagtt

SEQ ID NO: 241534 - DNA, 201 bp, Homo sapiens
aaattagtaatacctaaatagggctgtcttgaggaagcgttgcagattactgtgtgtagaattttgtgcactgacttgcattgtttataataaagacttcrttacagatctgtcctaattagataaaatgcctgccatatggattatgctttccatgagcccctactctttaccagaatctggagtgggcactgtgggcag

SEQ ID NO: 241535 - DNA, 201 bp, Homo sapiens
gcatgcatgtggacacatacatggacatacatgtgcacataaacatcacacatgcacacatgtactgtacacatgtgcacataaacatcacacatgcacacatgtactgtacacatgtagacatacacacatcactacacatgtactgtacacatgtagacatacacacatcactacaaatgtgcccacatgtgtgtccac

SEQ ID NO: 241536 - DNA, 201 bp, Homo sapiens
ctgtctcctcaggacagaattaacctcgtatgcaatttcaggaaatgccagaaatgccagagggttcctaacaccctctctctctctctttttttttttttgtaacctagctaaaaataaatattatgtgaagctgaattgtaattttaccaaaaaaaaaaaaaaaccactcatgttggaaaaaataaaccctctgttatt

SEQ ID NO: 241537 - DNA, 201 bp, Homo sapiens
aggatgttcagagactctttctagttattaaagaacctaagaaggcttcatggaaggggtgacattgaaagtgaagaggtggacgggcgtggtggctcacrcctgtaatcccagcactttgcaaggccgaggcgggaggatcacgaggtcaggagatcgagaccatcaaggctgaggcaggagaatagcgtgaacccggga

SEQ ID NO: 241538 - DNA, 201 bp, Homo sapiens
aaatgcatgcatgtggacacatacatggacatacatgtgcacataaacatcacacatgcacacatgtactgtacacatgtgcacataaacatcacacatgcacacatgtactgtacacatgtagacatacacacatcactacacatgtactgtacacatgtagacatacacacatcactacaaatgtgcccacatgtgtgt

SEQ ID NO: 241539 - DNA, 201 bp, Homo sapiens
gatcaagacttaggtgacttgggaaaatgttccaacttttggtgcatactgtactttatcaaccctgaacaacagatgcattttaagagaaaacaagcccktggcaagttgctatttttcgctcagtaactaatgatgaatcaaaatgcttcttcaaacccaattacccaataaaaattgccatagtaaccatcacattac

SEQ ID NO: 241540 - DNA, 201 bp, Homo sapiens
ggaaatggaatgtgtaatgaagtatgaaatcaataatctatctcaggttaatgttgggtagaaaaagatgctggtgccattccctgagacagaggttacasagcaggttttggaggaaggtttcaaagagcccttaaaagtacagataaaaggctaaggatgttcagagactctttctagttattaaagaacctaagaagg

SEQ ID NO: 241541 - DNA, 201 bp, Homo sapiens
cacaaatgcatgcatgtggacacatacatggacatacatgtgcacataaacatcacacatgcacacatgtactgtacacatgtgcacataaacatcacacatgcacacatgtactgtacacatgtagacatacacacatcactacacatgtactgtacacatgtagacatacacacatcactacaaatgtgcccacatgtg

SEQ ID NO: 241542 - DNA, 201 bp, Homo sapiens
aactgatgcctctctttagctagatcaccaattttaagccactctattctctatactcatcagagaaaaggagtattgggagaccacttgattggtctcarcttgtaaaataatacagttgagaaactttgtaaagttatttcatgtgaagtcaccttctttatgagtggggctactcaatttgtacttaacaaaccattt

SEQ ID NO: 241543 - DNA, 201 bp, Homo sapiens
gttgacattttggttggaaatggaatgtgtaatgaagtatgaaatcaataatctatctcaggttaatgttgggtagaaaaagatgctggtgccattccctragacagaggttacacagcaggttttggaggaaggtttcaaagagcccttaaaagtacagataaaaggctaaggatgttcagagactctttctagttatta

SEQ ID NO: 241544 - DNA, 201 bp, Homo sapiens
tactcacacaaatgcatgcatgtggacacatacatggacatacatgtgcacataaacatcacacatgcacacatgtactgtacacatgtgcacataaacatcacacatgcacacatgtactgtacacatgtagacatacacacatcactacacatgtactgtacacatgtagacatacacacatcactacaaatgtgccca

SEQ ID NO: 241545 - DNA, 201 bp, Homo sapiens
attctactacaaagtattatcttctaccatttgattttctgcataaatgacatcatttaatcataaactaaaattgttcaaaatactctgaaagaaagaaygctcatgactacaggaaatcatccaatggtagaaattcttctgtcttctcaagatgcctcctccatacttacagtcagaggatgaccagacatgtatccc

SEQ ID NO: 241546 - DNA, 201 bp, Homo sapiens
gtgcctcaaattcctcctatataaaatggggacaaaatattgactgcacagggttgcaaggtatattatggatatcgggtgaagttttcttaaactgcactgaggtgagaagccatccaaatatcacctagtgtttccaaggaatattaacaattatcagtgcatcccagaccattagacttggggtacaaggaaacatgc

SEQ ID NO: 241547 - DNA, 201 bp, Homo sapiens
tggaacacttgtcttctgtcaaagacaaatgaatagctcacctttaagtctgacaactcttttaagcattttgaagtcacataatcattgcatttggggggcaatgaaggtttttctagtaattctactacaaagtattatcttctaccatttgattttctgcataaatgacatcatttaatcataaactaaaattgttca

SEQ ID NO: 241548 - DNA, 201 bp, Homo sapiens
tgtgcctcaaattcctcctatataaaatggggacaaaatattgactgcacagggttgcaaggtatattatggatatcgggtgaagttttcttaaactgcactgaggtgagaagccatccaaatatcacctagtgtttccaaggaatattaacaattatcagtgcatcccagaccattagacttggggtacaaggaaacatg

SEQ ID NO: 241549 - DNA, 201 bp, Homo sapiens
aaacttccattctcaaaatgctttcttcagagcatcaatttctttaaaaatcagttactttcttgctcattcttaagtcatcatcttgagttggaagaaayaaattaagcaagtttgtgtgtttttttcaaatatatgctagaaggaatattaatggcgacttattatcacaaaaatatcagcaaatttggaacacttgtc

SEQ ID NO: 241550 - DNA, 201 bp, Homo sapiens
ctgtgcctcaaattcctcctatataaaatggggacaaaatattgactgcacagggttgcaaggtatattatggatatcgggtgaagttttcttaaactgcactgaggtgagaagccatccaaatatcacctagtgtttccaaggaatattaacaattatcagtgcatcccagaccattagacttggggtacaaggaaacat

SEQ ID NO: 241551 - DNA, 201 bp, Homo sapiens
tctgtgcctcaaattcctcctatataaaatggggacaaaatattgactgcacagggttgcaaggtatattatggatatcgggtgaagttttcttaaactgcactgaggtgagaagccatccaaatatcacctagtgtttccaaggaatattaacaattatcagtgcatcccagaccattagacttggggtacaaggaaaca

SEQ ID NO: 241552 - DNA, 201 bp, Homo sapiens
cgatgaggtaaatctaagcctgagacatttacaatcacaaatgggcatcgttgtcaaagcgttgtgttattcattgtaggaattacttattttttttttttgcacttaacggaattccagcctgcattataaacacaaacatgtattatctgatttaattatcacaattatcacctgagttaaatgctattatttccctat

SEQ ID NO: 241553 - DNA, 201 bp, Homo sapiens
atgaaggcaattgctgcaaatgtttgttgataatggaatctgtactcctcattactcctttggatacctgcatagtgtgctcaccatttggggtctctgcrtaaatataacctcatcagagataccttccctggctactccacctaaaatggaaactcccttcttctataatttgtttctccttttaatcagctttatttt

SEQ ID NO: 241554 - DNA, 201 bp, Homo sapiens
ctaacacccgtgtgacttaacctctctgggctccagcttccttggttgtaaaatgggaataaaccacattgatgtaagctccatgaatgcagaacttgatytgtctgtttgggtcactgcttatatctttagagttcttcaacagacacttgttgaaagaataaatggatgagctgtatatgtagcctgtggtggaaatga

SEQ ID NO: 241555 - DNA, 201 bp, Homo sapiens
tttttttttttgagacggagtctcgctctgtcacccaggctggagtgcagtggcgggatctcggctcactgcaagctccgcctcccgggttcacgccattytcctgcctcagcctcccaagtagctgggactacaggcgcccgccactacgcccggctaattttttgtatttttagtagagacagggtttcaccgttttag

SEQ ID NO: 241556 - DNA, 201 bp, Homo sapiens
agacttgtctcaaattctggcctcaagtgatcctttttcttggcctcccaaagtgctgggattgcaagtgtgagccaccatgcccagcctcttatttaaawttgtaacctccccccaccatactgcattcccaccccaaccccatgttactctcccctttaactgctctattgttttaaattactttttaccttctatcac

SEQ ID NO: 241557 - DNA, 201 bp, Homo sapiens
tttcctcagagatctgcaagactcactcaagctttgacacaaaagtgacccaatcagtgagagctcctcctgtgacattctttttttattttttaaaagasagagatggggtctcgattgatcacccaggctagagtgcagtagtgcaatcatagctcactgaggactcaatctcctgggcttaagcaatcctcccacctc

SEQ ID NO: 241558 - DNA, 201 bp, Homo sapiens
atcgcaccactgcactccagcctgggtgacagagcaagactccatctcaaaaaaaaaaagatcaaattcatattaaacaaaactgaagttgaatgagcttygtttgctacacacaactaagcttttgccagttttatattatgataactattgtaaatagtgcttactatgaaccaagttctgtgctgagtattttcaaaa

SEQ ID NO: 241559 - DNA, 201 bp, Homo sapiens
tggacctgtttgtgcccaaggtgaacccaccttctcctcacatatggcaagccacataacacaggtttccctttctgccccacaagaagctaaagacccaycattctccaggctccctgccagccactgaatagacaaattagctcagtcccactctgtctcacaggaaggagctaaaggttcccatttatgcctcagatc

SEQ ID NO: 241560 - DNA, 201 bp, Homo sapiens
attgtggggcccgggtgctaaagacccacaaagacctcaatctgtcttgtatcctcatggacctgtttgtgcccaaggtgaacccaccttctcctcacatrtggcaagccacataacacaggtttccctttctgccccacaagaagctaaagacccaccattctccaggctccctgccagccactgaatagacaaattagc

SEQ ID NO: 241561 - DNA, 201 bp, Homo sapiens
agggatgactgctctcccaccactagccttgggtttctgggagatttcttagggtttccctacttcctgccctcatctttctaattaagccctttatcagytaacccttcctgaatcatcttgatctgaatgtgtgccctcttttctgctgggtctctaattgaagcaatagggataaggaggagatgaatattccactgt

SEQ ID NO: 241562 - DNA, 201 bp, Homo sapiens
taactcttctttcttcattctcactgtccaactgaatttgcaatttagatttatgggagccatgtcttttgtatattaattacagggatgtaaatatttcrtctttacaacccctgattccccaacagctcaaagcattttagttttcacacaattattccagaatctctttggaatatgcaagggacatatgatgccttg

SEQ ID NO: 241563 - DNA, 201 bp, Homo sapiens
tccgtgtgcccctcaaaatcccttcacctcttctctctgctcttcctgaggggtcacgggtgagagggctcatctacatgggttacatctgtgacctgctmggccctcaggcacccaggtgagggatcatcaatggccggccctgggtaagagatgaggggaagtgaggaatgtgaggtgaggatgtttattcccttgcga

SEQ ID NO: 241564 - DNA, 201 bp, Homo sapiens
ccatttcctcatctgattaataggggaaataataccgaccttgctgaattggggtcagagctaaatcggataacaacacattaagtccccaatgcagcccrgtgccaggcagcttcattatagaaaggccgtgtgtaggtgcattcaaaaccccagtgctgtgggtttagttctggttcctcctttcactacctttatgac

SEQ ID NO: 241565 - DNA, 201 bp, Homo sapiens
cctctggtcaggaacattcttgcagataaagccagctggaggtccaggcctgagtatctcatcaatgtcaagcaggctagctctgagtcccgggaaacccrctggctcatcatggctttatgagttgttgaaaagacactagcaagggcagctgtcccaggtgctggagagtccacacagcataaatcccatctctgtcac

SEQ ID NO: 241566 - DNA, 201 bp, Homo sapiens
aaatccaaagagaaatgagaaaaaaaaacagctttttaatcaagacaccgaaacagtgaggcacataggaccagtggagaagagcaaggacatactggttycatcctgaaaggaaggaaaccaaccagagacgcatgctgagactccaggtcatcagctgtcattcaggccaaagcaaaataaaggactgcttcagcatta

SEQ ID NO: 241567 - DNA, 201 bp, Homo sapiens
tgaggcatttaacttgggaaagctaaccccttgctgaggatgctacaaaggcaatatggattgtctgagaggcagggataataccgctcttccaggactakattttcagactgagctaaacaggaaatgaaaaacccttaggacaagaattacgaactctaagaccctgagacaaatctgaccaatgagccagttggcttg

SEQ ID NO: 241568 - DNA, 201 bp, Homo sapiens
acttttccacattttcctgtcttcttctgagccctccaaacttttccaacctctgcctgtaacccagttccaaagtcacgtccacatttttgagtactctyatagcagcacaccactcctggtaccaatttattgtattagtctgttctcacactactatgaagaaatacccaagactgggtaatttataaagaaaagagg

SEQ ID NO: 241569 - DNA, 201 bp, Homo sapiens
ttttaaaatatcttaaattaattacaatttaatttagacttttctgctttcaccatttattagagagcaatgggtttaaacataattctttttaaaaaaaatttttaatagtttgtgatatagtaatgtaaaggtcaggttttaagttcaatttatctctataccaggcttcagtggctatcagagctaaacatatatctt

SEQ ID NO: 241570 - DNA, 201 bp, Homo sapiens
ttttaaaggataatgagaaaataaaaatactttaaagtattttaatttacagtatccaatttaatttaaatattttaatttgattacaattttaaaatatyttaaattaattacaatttaatttagacttttctgctttcaccatttattagagagcaatgggtttaaacataattctttttaaaaaaaatttttaatagt

SEQ ID NO: 241571 - DNA, 201 bp, Homo sapiens
ggattttaaaggataatgagaaaataaaaatactttaaagtattttaatttacagtatccaatttaatttaaatattttaatttgattacaattttaaaawatcttaaattaattacaatttaatttagacttttctgctttcaccatttattagagagcaatgggtttaaacataattctttttaaaaaaaatttttaat

SEQ ID NO: 241572 - DNA, 201 bp, Homo sapiens
taatatagggattttaaaggataatgagaaaataaaaatactttaaagtattttaatttacagtatccaatttaatttaaatattttaatttgattacaawtttaaaatatcttaaattaattacaatttaatttagacttttctgctttcaccatttattagagagcaatgggtttaaacataattctttttaaaaaaaa

SEQ ID NO: 241573 - DNA, 201 bp, Homo sapiens
tttgtttgtgctgttataaccaaatacttgatactggccaattttttttttttttttttttttttttttttttttttttgagacggagtctcgctctgtcrcccaggctggagtgcagtggcgggatctcggctcactgcaagctccgcctcccgggttcacgccattctcctgcctcagcctcccaagtagctgggacta

SEQ ID NO: 241574 - DNA, 201 bp, Homo sapiens
cctctgcctgaattatcctttcctcagagatctgcaagactcactcaagctttgacacaaaagtgacccaatcagtgagagctcctcctgtgacattcttyttttattttttaaaagagagagatggggtctcgattgatcacccaggctagagtgcagtagtgcaatcatagctcactgaggactcaatctcctgggctt

SEQ ID NO: 241575 - DNA, 201 bp, Homo sapiens
agataaagccagctggaggtccaggcctgagtatctcatcaatgtcaagcaggctagctctgagtcccgggaaacccgctggctcatcatggctttatgarttgttgaaaagacactagcaagggcagctgtcccaggtgctggagagtccacacagcataaatcccatctctgtcactaactagctgtgtgacctacgcc

SEQ ID NO: 241576 - DNA, 201 bp, Homo sapiens
gaccaatgggttcaggcttatacacccggggtgaaattctaactagtccatcaataactgtgtgacgtaaagcaatatacctctcgtgactcagttctctyacttgtaaactggctctggtagtgatacccaggtttgttatgaagatgattccatagctgcacaaaacgccctgggcaatgaacgtagttgacctccata

SEQ ID NO: 241577 - DNA, 201 bp, Homo sapiens
caagagttccagagatagatggtgaagatggttgcacaacaatgtgactatacttaatgccactaaactatacacttaaaaatggtcaagatggccgggcrcagtggctcacgcctataatctcagcactttgggaggctcaggcgggtggaccatgaggtcaggagttgaagaccagcctggccaagatggtgaaacccc

SEQ ID NO: 241578 - DNA, 201 bp, Homo sapiens
taacagcaatcattagcattgtttctatagatattaaattaactaaaagtatcccttgagggaaacgaagggatgggccgaattaattgcagcaggaacaygcccttaaggcacagatcgctcatgcttttgtttgtggcttaagaatgcctttaagcggtttccgccctgggtgggccaggtgttccttgccctcattcc

SEQ ID NO: 241579 - DNA, 201 bp, Homo sapiens
ggaggcagcctgtctgctagtttgtgttctgtcaattttagcagatgggccaatggcttttgggggataactctcgaacagaagtcaggcctgtcctctgytccaaacctagaaggactcctcatctcatgccgggtcgagccagtgtccctacaatggtccaaagacctgcctctggccctacaccttcttcgtccctgt

SEQ ID NO: 241580 - DNA, 201 bp, Homo sapiens
gttgccaagggctggagggaggggagaattggagttattgtttcatgagtgcaaagaatttcagttttgcaagatcacaagagttccagagatagatggtkaagatggttgcacaacaatgtgactatacttaatgccactaaactatacacttaaaaatggtcaagatggccgggcacagtggctcacgcctataatctc

SEQ ID NO: 241581 - DNA, 201 bp, Homo sapiens
cttccttctccatttctctcctgcatcactgtaacaaccctttggttccctgcaattcattctccaggctgcagccagagtgatccttctaaaatctaaawctagttaggtcatctctatgacttctgtactgggttgaatagtgtccccctaaaatgcatgttcccccgaacctcaaaatgtgatcttacttggaaatag

SEQ ID NO: 241582 - DNA, 201 bp, Homo sapiens
gtccaggtggagataactgagccatgggggcagtttcccccatactgttctcatggtagtgaatgactttcatgagatctgatggttttataaatgggagytcccctgcacaagctctcacttgcctgctgccatgtaagaggttcctttgctcttccttcatcttccaccatgattgtgaggcctcctcagccatgtgga

SEQ ID NO: 241583 - DNA, 201 bp, Homo sapiens
gaagggtaagtacttcaaagcccacttctttcccttaaaccaacacttattccaaatgacaaactccctcaattacccgtaacattaatgtttatactcgrcatttgtaatacaataaaacataaaatgtttatactcggcatttgtaatacaatttatattttaaagttttctgatatttgatgtatcagatgttggtgc

SEQ ID NO: 241584 - DNA, 201 bp, Homo sapiens
aattcatatttatttgtgtattttattgttgcttgtaaatagcttttgttttaagcacctgaccagactgtgtttattttaggttgtggcccaggcagtgytattcatgtgtatgaacacagctggaatcttcatcagttacctgtcagaccgggcccagcgccaagctttcctggagactcggaggtgtgtggaggccag

SEQ ID NO: 241585 - DNA, 201 bp, Homo sapiens
ttcaagctcacactacccatcctctccattttccctgacatgcagtaataattatgagcagttaattctctttctcatccatcttttttccacattttttyccaacgtttctaaccctacttccttctccatttctctcctgcatcactgtaacaaccctttggttccctgcaattcattctccaggctgcagccagagtg

SEQ ID NO: 241586 - DNA, 201 bp, Homo sapiens
agggctccaatatatgaatttgagagggacacagacattcagtctgtaacagtaaggatgtaaagtcgaacagatagaagcacctctgaccatatgatatrgtttggctgtgttcccacccaaatctcaccctgaattataataatccccatatgtcaaggatgggtccaggtggagataactgagccatgggggcagttt

SEQ ID NO: 241587 - DNA, 201 bp, Homo sapiens
aactgaaaaaaataaagttgaatacgagcattattccttcaaggtagtgtattttaacaaaaggaggggaaagaactacctctctttctttgagggttctstttgagctttgaaaaataataattgctaaagaagacagtatcagaactacattgagtcattattttatatgaaatattgaagaagggtaagtacttcaaa

SEQ ID NO: 241588 - DNA, 201 bp, Homo sapiens
agacgtggggggtagacttgaaagaaccagctagctatgagtgtttagtgtatactgttgacagcctttcacagtagataggctagtgaatcacttaagtkgggtagggaggccactgtgatgcagtgctattctgtaaattatttatgaaaagtccaaaattccaagtttatcttttaaaaaccttgacactactcttga

SEQ ID NO: 241589 - DNA, 201 bp, Homo sapiens
tttggtttgtttccagcctttgttattaaaaattctgctgaatggataaccttttgcatatggtcttttcatacttttgccatccactgagactttaaaawttttttaaaaagaaaagaagctatctgaactgtctaagcccttgaattcagggcagctcaccatgtgtttaccagggcagcatactgttcatgtcaacag

SEQ ID NO: 241590 - DNA, 201 bp, Homo sapiens
atgcgattaaacatatggattactacattaggatttaccttggaaattcatatttatttgtgtattttattgttgcttgtaaatagcttttgttttaagcrcctgaccagactgtgtttattttaggttgtggcccaggcagtgttattcatgtgtatgaacacagctggaatcttcatcagttacctgtcagaccgggcc

SEQ ID NO: 241591 - DNA, 201 bp, Homo sapiens
acttcaccatggaggtggcaggtgaactgggtaagatttagagataacaacaaaaatagacctccactgatagacatggaggcctaacctcctcctaaccmtgcccttccttatatgttaatctccaggagattaacactcctatatttcctctcaaatggaagaagatggtttggcagaatgagtgagaacacatgctgt

SEQ ID NO: 241592 - DNA, 201 bp, Homo sapiens
cgaatgtctttctttcatccatccctcatagccaatctgtcacaccatagcaaaagtagatctaaaagccattcacctctctccctgccaccatgttccargtccctgtcatttctcattggacactcagaataacctcactggatactcagaataacctaacgggtctgttttcattcttgcttttctataagccattct

SEQ ID NO: 241593 - DNA, 201 bp, Homo sapiens
aaaaccatcctagaatttttttccttctaatcttttgcaaatgtcttgcccacacctcatttgaaagcaatgtttttagaatgaaagttttgagtatagtrtagtattcaactcatttttcatagaaacgaaagcttgcttatcatgaacagatttggaaacaaacattactgcctcttggtaaagaaagataggacacag

SEQ ID NO: 241594 - DNA, 201 bp, Homo sapiens
ctttgacttgttttcccattttggctaaaattatgatgaaacactaggccaaatgtcaaagtctagccatttctagaattcctgtttttaggtctttccagctatctgtgaggactggggtcttgtcttctgctacttgacagctttcatttctaggggagagtgccttagtctgacacacaaatgacaatccatttgaga

SEQ ID NO: 241595 - DNA, 201 bp, Homo sapiens
gctaccctatttgtgcaatgctaaaggccaagattgcctaatatacaccagctcatcattttcattaataccaacaataccgtcaatttcataccatcatmttcctctttctcctccctcctcatcaccttcacaagagtccctggcatttctgtagtgttttgagctaaaatgaaagtgtcattatttctgagaacattg

SEQ ID NO: 241596 - DNA, 201 bp, Homo sapiens
gttctgcagtaatatacaaataacattgggttctctatgtgtatcaatatcatgttcagtatccttaattcacacttaaccctcttgtaagaggttccttmtcagcagggcttctgtaactgggaataatactttgacttataaataatctaagcaagagtaccaaatacaggtgatgtctaactctatcaccaggagctt

SEQ ID NO: 241597 - DNA, 201 bp, Homo sapiens
agaaattgaaattggaaacctaatatagcctaactataaaatgctgaagagaagacatgctctgttgccttgatacagttgaaggcacttttcaagagtgrcagtaaaatagagcaggagaaaaataaaataagtattttttaaataacccatgcctaaaatagcttattttagtgggacttgagtatgggtcagttgacc

SEQ ID NO: 241598 - DNA, 201 bp, Homo sapiens
tgtgtctatgtcctcaaaataagcctgatggtgatggtggatggctggaaggatggatggatggatggatggatggatggatggatggatggatggatggdttcatggattcatggattcatggattcatgaatggatggatgactcctcagccctaaaatgcaggatgacaatgtgtggctcacagtccagccctcttca

SEQ ID NO: 241599 - DNA, 201 bp, Homo sapiens
taatgttatttcttttttcggttagcagccacataaaaccaaggatttgccacacaagagaatctttagataattatttggctcagtacaattggttcttmgctatgtccagaatgtctctcagtttttttctgtcatttataaagaaaatcaaagttaaatggaggctttaaaaacttcaagaaaaatgaatcataaact

SEQ ID NO: 241600 - DNA, 201 bp, Homo sapiens
tgatatagttagctaccctatttgtgcaatgctaaaggccaagattgcctaatatacaccagctcatcattttcattaataccaacaataccgtcaatttyataccatcatattcctctttctcctccctcctcatcaccttcacaagagtccctggcatttctgtagtgttttgagctaaaatgaaagtgtcattatttc

SEQ ID NO: 241601 - DNA, 201 bp, Homo sapiens
ccccagcttagtacacaagcctctttataatctggcccttgcctaattccacatccaactatttgaagctccatgaatacatcatctttgtcatatcatcrttgcttcactcatacaatttcttctacttaaaaccattgtcactcttatccatctagctaaagtctgcttgtgctccaaaactcagctcacatatcacct

SEQ ID NO: 241602 - DNA, 201 bp, Homo sapiens
tttttcagtaactctcttttattatcccttttgaggtaccagctatgtcctgccaggaaactaaatgacatgccactattgctccattaggatgagatgtyccactcccactctgcatatatttgtgaggcagttcagcagagcagaaagacactgggctagaagtcagaaaatctctactctgtccagtatggtactagc

SEQ ID NO: 241603 - DNA, 201 bp, Homo sapiens
acatgattttttgacctatgtatatgtggtagaatggctacatcaagctaattaacatatgcattacttcacatgctttttttgtaggtggtgacagcacrtaagatctactctcttagcaattttcaagtatacaatacattgctattagctatagttgccatgttttacaatcgatctcttgaatttatttctcttgtc

SEQ ID NO: 241604 - DNA, 201 bp, Homo sapiens
aagtaccatttcgtgtgtattttttaatcagatcaattagccagttccagtcccataaagccagcattttcagagtcagaagtgccaatttcacctataayagtgtaatatagaattacagaattatgaggccattgacctggtcactgaagcaattgtaacgcttcatgggtagacatcattatcatctacaaccaggga

SEQ ID NO: 241605 - DNA, 201 bp, Homo sapiens
atcctaggtaaggctaaaaattgaagctaaaatgtttccagtaccagcagcttaacaggaatcatatcaagagaagatgacccaaagaatctgccaaattrtaactccaatgatcctacacaaaatcactgtgccagaatgatgttcttcttttaatagctgatgttctggtaaaaatacttgtggcttccacagccttta

SEQ ID NO: 241606 - DNA, 201 bp, Homo sapiens
attgacctatatacactgaaatctcacagctacctcatcagttgttgtgagaactaaatgattcatgtacagggcttgacacatagtaagtgctcaataaragtatggttggtaatggttttgtcaaaatgattgctattctctcttgggcttttgctttattattgaaataatgtattccctcctccttgtaagagtggt

SEQ ID NO: 241607 - DNA, 201 bp, Homo sapiens
tgttgagatggtgaggcaggaatccattggtttctcttttccagagagcagtattcatatgttagaagtcattgtatatacattctccagacctttctgtsgggtaagaatgtgcttcctccccacaggcagtctaccccacagggagcccactcatgcagtctcctctcctccccacagggagcccactcatgcaggctc

SEQ ID NO: 241608 - DNA, 201 bp, Homo sapiens
tatacccaaaataattgaaaaaagggtctcaaagacatatttgtatatctagaagcattatttacaatagtcaaaaagttgaagcagccccaagggtccaytgatggacgaatagataaacaaaatgtgatatatacataaagtggaatattattcaggctttaaaaagaagggaattctcacacatgctacagcaatgga

SEQ ID NO: 241609 - DNA, 201 bp, Homo sapiens
ttcagattcctgtttccttcacatatccctcttcctcctccaaacacttaaaggtaggcatccttcaagggcctctccttgaccccttcttttttgttcaygtcttggttctcttttggtgctgtatcatggcttcaaccttcacttccggattgttcccacatcagcatctctaacattacattcttttctgagatccag

SEQ ID NO: 241610 - DNA, 201 bp, Homo sapiens
  misc_feature (1)...(201): n = A,T,C or G
tcacacaaacaagtatgaaatcacagggggcaataatgctgtgaaaggcaggcgcacatccctgtgaaacctaatcattctctgatcacttggcttccaanaaaatgcctcccaaaatattcagatcaggctctgtttcatttgtgaagagttccagagaagcctttcctgcctcccagttgtctgtgcctgaagcctaca

SEQ ID NO: 241611 - DNA, 201 bp, Homo sapiens
gtatggaattaatctctttatatattctgctatacccttgccttatttttgcctcctcgtatccttgattttcacagcacttggcattgctgagtcacccsccaaccccctttccttgaagcactctcctctcttaattttactagggggaacttgattttctttccagtctttcagattcctgtttccttcacatatccc

SEQ ID NO: 241612 - DNA, 201 bp, Homo sapiens
gtaaagtcgaacagatagaagcacctctgaccatatgatatggtttggctgtgttcccacccaaatctcaccctgaattataataatccccatatgtcaargatgggtccaggtggagataactgagccatgggggcagtttcccccatactgttctcatggtagtgaatgactttcatgagatctgatggttttataaat

SEQ ID NO: 241613 - DNA, 201 bp, Homo sapiens
attgggggttagggctccaatatatgaatttgagagggacacagacattcagtctgtaacagtaaggatgtaaagtcgaacagatagaagcacctctgacsatatgatatggtttggctgtgttcccacccaaatctcaccctgaattataataatccccatatgtcaaggatgggtccaggtggagataactgagccatg

SEQ ID NO: 241614 - DNA, 201 bp, Homo sapiens
tatgataagcaccatgtaagtgttagctagttttattatgataacttatttaataagccatcaaatattaagtgcctgccctgtgccaaacgtgttactaygtggtaagtgtattcgtatctccacctgtcgtacataacaatatgccatagactgagtgtatttaacaacagaaatttatcttctcatggttctggaggc

SEQ ID NO: 241615 - DNA, 201 bp, Homo sapiens
tgcaggcaacatcaggagcgtgtaatgacctatgccttctacacacaggaggattcacatttccaaagccacgctggactgtctcaacggtgactataacrtggaagagggccatggtaaagagaggaatgaattcctgaggaagcataatatcgaaacttacttaattaagcagcctgaggacagtctgctgtccttgcc

SEQ ID NO: 241616 - DNA, 201 bp, Homo sapiens
attaaaggatttaatatgtgtatattgtttaaaaacattcctggtatatgataagcaccatgtaagtgttagctagttttattatgataacttatttaatragccatcaaatattaagtgcctgccctgtgccaaacgtgttactacgtggtaagtgtattcgtatctccacctgtcgtacataacaatatgccatagact

SEQ ID NO: 241617 - DNA, 201 bp, Homo sapiens
ttattaattcatgtttgctttgattttcttatctgtaaaataagaaatgacaataataccttcctattagggctattacatggattaaaggatttaatatrtgtatattgtttaaaaacattcctggtatatgataagcaccatgtaagtgttagctagttttattatgataacttatttaataagccatcaaatattaag

SEQ ID NO: 241618 - DNA, 201 bp, Homo sapiens
tgtgtttatctataacttcctataatgcctattccgcccctgcctggtcactgatgttcacatcaatttcagagatgaggaaactgagatgaagtaacttktccagggttaaagtgtgtaaatgtggaactagaactctaagctatatctgtctagcaactaaatctgtaatcctttcactaatgagttcattcatttatt

SEQ ID NO: 241619 - DNA, 201 bp, Homo sapiens
cccatttaggttacacctcaaatattttagaaagacaggtagaagtatatttcaaaggtaggttctccttaccccaagttgcagaccacctaaccctgctygcctctttctcaagcctttctgaagaactgatccttctgctgacatagacctttccctcttatcctgttccttccaggagcatcactgccttcgtattaa

SEQ ID NO: 241620 - DNA, 201 bp, Homo sapiens
aatttctttatgattccattccacctctgggtccttcaaacccccatttaggttacacctcaaatattttagaaagacaggtagaagtatatttcaaaggyaggttctccttaccccaagttgcagaccacctaaccctgctcgcctctttctcaagcctttctgaagaactgatccttctgctgacatagacctttccct

SEQ ID NO: 241621 - DNA, 201 bp, Homo sapiens
ctttccatactaaggcaaaaggacaagagacagaaccataaactggcttatggttgaatagctaagaaaacaaccctcttcttgggccttgcatgagtccrgagggggacatgaaggcacacgatcttcctgaattagaagtatgtttctgtttgcctacatttttggtccattcagctcacttagtaaaagaacctgaaa

SEQ ID NO: 241622 - DNA, 201 bp, Homo sapiens
ttctttatctacaaagtgaggatattataaacaagaccttcttcaagagttgcaatagttaaatgagaacattcatgtaaagcgtgtatcacagcaccagycttgcactagatattagtccttattattcaaattccttatcctagattttgacctttttttgaatcaactaagaccctaaagattgagaaataataatat

SEQ ID NO: 241623 - DNA, 201 bp, Homo sapiens
tcttccctattatcagttcacccatcctggcctaaaaaggggctcattattttgcattgcattgtgatgaggatccattcatcaatcaggaaaatatagcrgtggcattttattaaactaatttttaggctgtttctaatgtccattgtttgcccatatgctttactttcattctaaccaagatttacataggcttaaatt

SEQ ID NO: 241624 - DNA, 201 bp, Homo sapiens
ttactcagccacaaagctcgccatttctttgggcttaaagacatcaccgcacaaagcaacaacgtaacattaatcactgcaatcaataataatcctttatatttgccattccttccacatctctactgagcctcagtgacctcctaaaatgcagtctgaatatccctggtctagtccacattctcattttgtagatgagta

SEQ ID NO: 241625 - DNA, 201 bp, Homo sapiens
tgcctcaaattcctcctatataaaatggggacaaaatattgactgcacagggttgcaaggtatattatggatatcgggtgaagttttcttaaactgcactgaggtgagaagccatccaaatatcacctagtgtttccaaggaatattaacaattatcagtgcatcccagaccattagacttggggtacaaggaaacatgca

SEQ ID NO: 241626 - DNA, 201 bp, Homo sapiens
ggcttattcagtgcttaggtagaagacaccacagaaccgtatagtttaagttcaaatctggaagagaagttcaaatccacattaactccagccctcaaagcagcatgcacttgtccatgatgtgtggggatgtgcaactcaggacacggcaagcccatcaaaggcaaagactttgtatccctacctcagtgcctggaatat

SEQ ID NO: 241627 - DNA, 201 bp, Homo sapiens
tgctggatggatattaaatgagataatgaagttcctttctgcctccaaattatcttctgagggggaggcttaccagagcctgaagctggctcttggccaaktgattctgaagagaagagaaggaaaagtacctgctctccacaggaccacatcagatcagtccaccaccagcagaaagctgggggaaagtagttacaggga

SEQ ID NO: 241628 - DNA, 201 bp, Homo sapiens
gtaaacaatgctaacaactagtcatattttcttatgcatttttaaaaggataatgtgtttcagatgttgaaattcctttctctagtattattctcctctctgtctcctcaaatccaacttctaatgtactgaatatatatccttcccatccatgttatatatataatgtatacatacacacatatatacacacgcacatat

SEQ ID NO: 241629 - DNA, 201 bp, Homo sapiens
agtaaacaatgctaacaactagtcatattttcttatgcatttttaaaaggataatgtgtttcagatgttgaaattcctttctctagtattattctcctctctgtctcctcaaatccaacttctaatgtactgaatatatatccttcccatccatgttatatatataatgtatacatacacacatatatacacacgcacata

SEQ ID NO: 241630 - DNA, 201 bp, Homo sapiens
tgacaacagccacacacaacaggagcactcagaagccgttagccctccttcctagtcatgtagcctaatcaaccatcctgtctttccatatgtgttaattmattgtatcaattatcttttgctctgtaaaaaagtaacaccagaatgtagtggcttaaagcaatcaccatttacttagctcacaaatgtgtgttggctgga

SEQ ID NO: 241631 - DNA, 201 bp, Homo sapiens
atagaaaatactctacttttgttttagttctcctttaccaatatctaatataatttctaatcaatattggctgcaaaatatactcatgctgtatcatccartaaattaacattaactattttttgagataacattgtaattgcaattcttctatcttatacttatctgtttaatcacctaagacaaatagagccatttaca

SEQ ID NO: 241632 - DNA, 201 bp, Homo sapiens
aagtaaacaatgctaacaactagtcatattttcttatgcatttttaaaaggataatgtgtttcagatgttgaaattcctttctctagtattattctcctctctgtctcctcaaatccaacttctaatgtactgaatatatatccttcccatccatgttatatatataatgtatacatacacacatatatacacacgcacat

SEQ ID NO: 241633 - DNA, 201 bp, Homo sapiens
aaggctgccattcttgataataaagctcagaagttagggaggtggaaaacccatcaagggataatgggccacacaaacgaagggtgctttgttggataggktgctagtctactctacagacagagagacagctttggaagcactttgtatacacatattatcaagagtattcaaaagagtattggcttgtgtgtcaagctt

SEQ ID NO: 241634 - DNA, 201 bp, Homo sapiens
gaagtaaacaatgctaacaactagtcatattttcttatgcatttttaaaaggataatgtgtttcagatgttgaaattcctttctctagtattattctcctctctgtctcctcaaatccaacttctaatgtactgaatatatatccttcccatccatgttatatatataatgtatacatacacacatatatacacacgcaca

SEQ ID NO: 241635 - DNA, 201 bp, Homo sapiens
gggtgtacataatttctaagggcctgatgaattttagaaaggatttttgagagtgttgattaaattataaaatgccttccttctcctctcacctctcccaygattaaacaagaggacagcactgttcttgcccatgggcctcggaggtgggtgaaattctctcttgatagatcgaagcttctcttctgaacctggtgaagc

SEQ ID NO: 241636 - DNA, 201 bp, Homo sapiens
atgggtcttctcattatactccaaaaacctcttacttccaagtcattttctgttattcttcattccttacattcaaagccacccactgaccacccatcatrttcagccttatctgttatcaacatctttcatattcattattctttagtttatactgaaatattcactgtttcttacacattcttcttaccctctacactc

SEQ ID NO: 241637 - DNA, 201 bp, Homo sapiens
aggagggaaggaaggagaaggaaggaaggaaaaggaaggaagggagggaggaaggaagggagggaggggaagaaggggaaggaaggaaggaatgaaggaakgaaggaaggaaggaagggagggagggagggagagagggaagaaggaagagagggaggaagggaattacaaaggcagaaaattagaactaaacttaactga

SEQ ID NO: 241638 - DNA, 201 bp, Homo sapiens
cacatgcagtcatgggttaggtagttatccaaggtgttagcatcttccgacacttacaataatgaaatacagtttgctttatcacaagtgcccttatcatsaagccaatgatggttaagcttcaaaggccttcactcgcaagccccttctaaggccttcagaggggccctagcaagttcgcagttatgattttcacagttt

SEQ ID NO: 241639 - DNA, 201 bp, Homo sapiens
gactttttaaagttaaaaataatattgattagtacagtagagctttgtcattgttaattcattcagagaatcaaggttgacctaaaagtggtagaaccttrgaatctttattctttctgctccaactagatgggtcttctcattatactccaaaaacctcttacttccaagtcattttctgttattcttcattccttacat

SEQ ID NO: 241640 - DNA, 201 bp, Homo sapiens
aattaaggaacaaaggaaggaaggaaggagaaggaaggaaggaaggaaggaaggaaggaaggaaggaaggaaggaagggaagggaagggaagggaagggargggaggggaggggaggaaggaaggaaggggaggggagggaaggaaggaaagggaggggagggaaggaaggaaggagaaggaaggaaggagaaggaaggaa

SEQ ID NO: 241641 - DNA, 201 bp, Homo sapiens
tgtcgcatattaatacttgaaataggcaataatttgctttatctgtccacatgcagtcatgggttaggtagttatccaaggtgttagcatcttccgacacytacaataatgaaatacagtttgctttatcacaagtgcccttatcatgaagccaatgatggttaagcttcaaaggccttcactcgcaagccccttctaagg

SEQ ID NO: 241642 - DNA, 201 bp, Homo sapiens
agcagatgttttagctgtattaaagcaattctgttaaacttaaatatctttgttagacaatactggtgtaaactggtggttcggacagtagattgagaaarctgggtttcctactgagttctgagttgattagtttgattcattttggtaccttttaacatcttggggactttttaaagttaaaaataatattgattagta

SEQ ID NO: 241643 - DNA, 201 bp, Homo sapiens
ggagggacacaaacattcagaccatagcaacattcttccatcattcattaatgcatgctttcatttagcctcatatggcgaatatttatggagtaccacartgtgctgcatgcaggcagtaggggtgctgtggtgaggaaaagaatccaggatcctgctattaaagagattataatctagagttatagacagtcatccatc

SEQ ID NO: 241644 - DNA, 201 bp, Homo sapiens
tttgcatttggtcagagaactaattgcaagtacaaacatactacagatagcggtttcttcctccaggctccatgagtctagtgaacacattctgtggggggaaatgctcacgctgcacttcagttccattcataaacttgacacaagtgggccttctactcccccattccccatcttgaaggacaccagtgtccatccagt

SEQ ID NO: 241645 - DNA, 201 bp, Homo sapiens
ctctagggatgcatgtaatttttaaaaatctctcctgctaataacctttttcttggacaaacagaactttcaaagaagtatccgatgcaagggatgggaaaggaagaccaggaatagaatttcagtgttgctcagacaattgatgccaatgacccaacattctgtgtttccctgcagagtgatgccaatgaccatccagtt

SEQ ID NO: 241646 - DNA, 201 bp, Homo sapiens
aatttcagtagatgagtgcataaaatatatatcaatgaataagaaatgacttcagaattataaaaattgaattagaaactaagaattcgctatgtagatgrtggtgttcaaataacctctgaagcatgtattatggcatagggataatcaggtatctatggaaactgtcgcatattaatacttgaaataggcaataatttg

SEQ ID NO: 241647 - DNA, 201 bp, Homo sapiens
catcttaagctgacttgttaggggaattttccatctggaagctacatcttgaagcatctttctttagggagttagattctaatttagtagttttcataatyctgctgcttctcccaaatgatgcaaatggcccatatttattttaaatattaaaatgaattaattgtttttcttgcagcttggagaattgtataaacctcc

SEQ ID NO: 241648 - DNA, 201 bp, Homo sapiens
ctccaactttaatgtgaataggaatcacttggagatcttgacaaaatttggatttaggaggaggaccctaggttctgtgtttctgacaagttgccaggtartggatgcttgcagtctgcagatcataatttgtgggaaaggctttggagtttggcacagaccccaccttctcttcagtgggtccctgctactccaccaggt

SEQ ID NO: 241649 - DNA, 201 bp, Homo sapiens
gtgctctagggatgcatgtaatttttaaaaatctctcctgctaataacctttttcttggacaaacagaactttcaaagaagtatccgatgcaagggatgggaaaggaagaccaggaatagaatttcagtgttgctcagacaattgatgccaatgacccaacattctgtgtttccctgcagagtgatgccaatgaccatcca

SEQ ID NO: 241650 - DNA, 201 bp, Homo sapiens
tggaatattactgctttccattcaataacagatatatatttcctgagtgttaactatgcaccaggcattattcaaagtgctgtgtacaccaaagtgaagamattctttgacagatctgtgttaacagcatgccacactggatctcaatcattgcatgtctctttccccaaactgctatttcaccagcctgtgccatgtatt

SEQ ID NO: 241651 - DNA, 201 bp, Homo sapiens
agctcaggaggttgttgaagagatgaaataatacacatggagtatttaaatcagaacctggtaaagaggaatcaggtaatacatttcatttgattttatartttaagttttaaaacaatcaccctttttcaatgagttctctgccctaagctgacagtttctgggcttcacctggcttaacccctgcatcttttagaccag

SEQ ID NO: 241652 - DNA, 201 bp, Homo sapiens
agtgctctagggatgcatgtaatttttaaaaatctctcctgctaataacctttttcttggacaaacagaactttcaaagaagtatccgatgcaagggatgggaaaggaagaccaggaatagaatttcagtgttgctcagacaattgatgccaatgacccaacattctgtgtttccctgcagagtgatgccaatgaccatcc

SEQ ID NO: 241653 - DNA, 201 bp, Homo sapiens
catgattaatttgcatcaaatcaccaggaagtcagggatctttgaagtaagtgaagccaggtccgtgtgactctaatggatgagacagacaggtagggccyacctgacaggactgaactcccactgccatctgctgtctcccagggcagaggaaactactgagttttcagatcttactttgactttacaaaattcagaata

SEQ ID NO: 241654 - DNA, 201 bp, Homo sapiens
gtcacttaagcagtgcttcggaagccagattttctccctgcaagattttttacagtcagccctgtgggggagaggaagaatgcagaatagattaattaacyatggagatgccagacattccacaggaggcccaggcacattctggtaggcataaaagccacctaccagcaaatgccactatgccactaccttctcgataaa

SEQ ID NO: 241655 - DNA, 201 bp, Homo sapiens
gagtgctctagggatgcatgtaatttttaaaaatctctcctgctaataacctttttcttggacaaacagaactttcaaagaagtatccgatgcaagggatgggaaaggaagaccaggaatagaatttcagtgttgctcagacaattgatgccaatgacccaacattctgtgtttccctgcagagtgatgccaatgaccatc

SEQ ID NO: 241656 - DNA, 201 bp, Homo sapiens
atgtaattggatttacacactcaaattatatcatgtgagttttgtttatgaaggactattttaagaagtcaggtcacttaagcagtgcttcggaagccagrttttctccctgcaagattttttacagtcagccctgtgggggagaggaagaatgcagaatagattaattaactatggagatgccagacattccacaggagg

SEQ ID NO: 241657 - DNA, 201 bp, Homo sapiens
gcatcaacttgtagcatcctaagtatatatgctcttggaaattttatgcttgtagatatattatctctacaatcctagacctttttttaactaagcccttyttcttaaagttatgtcttattatttataatacagcacatttcttatttaagactttaggcaataatagtttgcaaaaatcataaagaaagtagcagagaa

SEQ ID NO: 241658 - DNA, 201 bp, Homo sapiens
acttttgccatccactgagactttaaaatttttttaaaaagaaaagaagctatctgaactgtctaagcccttgaattcagggcagctcaccatgtgtttascagggcagcatactgttcatgtcaacagttaaagactgaaataatgacatacgcagaactgcagtaaaaacgggctgtgagatcctttggaaaggacact

SEQ ID NO: 241659 - DNA, 201 bp, Homo sapiens
gtggatgttataagaacttaaaagtagctttggcctcaaataatatatttctccaaaattaaatttactttcaaagaataaagatttgtccctattaaagmtatttatatattttaagtccatgaatacctttgttctgaacacaattttccaggaggaatatcaagtatgtgttgaaaactgattttagcatcaacttgt

SEQ ID NO: 241660 - DNA, 201 bp, Homo sapiens
cttagataaatggtagcatactatatacagttttctcctcttggagaccagttcctcaaagtatggagagatagtcttcatttctttttaatagctgcatyatgttcaatgatatttctgtactaaagtttactcagccaacaaaatgaacatttggtttgtttccagcctttgttattaaaaattctgctgaatggataa

SEQ ID NO: 241661 - DNA, 201 bp, Homo sapiens
aaaaaaaagaaaaaaaaattaattaagaaatatgtgtgtgtgcatgcatgtggataaagagatcgatctttcttagataaatggtagcatactatatacasttttctcctcttggagaccagttcctcaaagtatggagagatagtcttcatttctttttaatagctgcatcatgttcaatgatatttctgtactaaagtt

SEQ ID NO: 241662 - DNA, 201 bp, Homo sapiens
attactactaagttttcattgtttctagaacttgatttcagtgggcagagctagaaaatctatacatcatgagttcccagtgtgatacttccacttcatartgaggaccacaagcttttgacttaacttcatcaatcttatatctgcagctcctttttctcttccccaaaattccagttttaatgacaccaacacagttac

SEQ ID NO: 241663 - DNA, 201 bp, Homo sapiens
ccaatttgggggtgacagtggggttaccactgtaaagcttcacccagaacctgttcctgactcaatgatgtcaaccctcaagatacaacatatggaggagrtggacactccatcctgggtctgggaggtgtgacttcattcaggactccaggaaatagaggagcaaggggacatgatgatgctgagaattctcatcagatt

SEQ ID NO: 241664 - DNA, 201 bp, Homo sapiens
accacaatctggacactgggagttattactactaagttttcattgtttctagaacttgatttcagtgggcagagctagaaaatctatacatcatgagttcmcagtgtgatacttccacttcatagtgaggaccacaagcttttgacttaacttcatcaatcttatatctgcagctcctttttctcttccccaaaattccag

SEQ ID NO: 241665 - DNA, 201 bp, Homo sapiens
tgcatactacagatagtttctagtgtgttttatttaatagcattcacatctaagggaggaacagcatgcctgaggttgatttctgtgaccagggaagattmttctagaagagccagagtacagcaccctgaacaaacatgggacttgcccattgacagtctagccacagaccacctagcctgtgctatgcattgcatgggt

SEQ ID NO: 241666 - DNA, 201 bp, Homo sapiens
tgaacattctcaacattgaacagagacagcaaacaactgggtgcctcccacctggtgcctgattcactggtagccctggaggtttgggctttgcctgggamtcttcggttttagcagaggaagccacgcctccacaaggagaaagagaataatgaggtcctgtctccagtaacttccaggtgtgataatggcaggcacctg

SEQ ID NO: 241667 - DNA, 201 bp, Homo sapiens
agtaccaggcactatttctaagctgtctgcataaatcaactgacaaaaacagtaataaaaagtagatgttattatgagcttcattttatacttggtgaaasgtgacatggagaaactactatgaagcttttccaaagtcaaactgtcagagagggactggaatctgagcctaccatgatgccatagccactgctcttgtct

SEQ ID NO: 241668 - DNA, 201 bp, Homo sapiens
gttagccatctggtcctaagacaagaacagagattgaagtcccctgaggtcacaaagcctgtaagaaacgccagactggagcgggaatccaaatgctcaarctcctagttccattctgtttccttcacatgccactgcctccctgtgataggggcggctttctgcagggttgtatcacttcaagtgtcttctatctgcagc

SEQ ID NO: 241669 - DNA, 201 bp, Homo sapiens
taagctgtctgcataaatcaactgacaaaaacagtaataaaaagtagatgttattatgagcttcattttatacttggtgaaaggtgacatggagaaactaytatgaagcttttccaaagtcaaactgtcagagagggactggaatctgagcctaccatgatgccatagccactgctcttgtctgttgactatgctgcctct

SEQ ID NO: 241670 - DNA, 201 bp, Homo sapiens
agaagcacattgctgggaaatcaccatggaaatggaggtaacgaaccctgagaaaatagggatgaaacagcccaaaaccccaagaacacagagacacatawttaaagttatttgtaataaaggggattgtacagtgtagtcaagaaaaaaatagataatattaaaacttggcaagtgaaggaaatgaataaagaattaata

SEQ ID NO: 241671 - DNA, 201 bp, Homo sapiens
catgaccaatgtggaagatgagcacctgcagcaccagttccatcggatctacatccatcgctatgagaacgtcaggtgagaaacacaacacccttgccccrgctcttgcatgatccatgtgtgtttgggtgctctcattgcacttccgtgacttccgtctgcttgaatgtcagcacctttcctcatctggttgattaattc

SEQ ID NO: 241672 - DNA, 201 bp, Homo sapiens
ttcccccacattccgcattaaatgatttcttctcctcatgtttgcttcagcaatgtgaagacaagtggggacatttgtgtgctctggctgacttctcactygccctgacagaaagcatacaggagatcaacaagcattcattcaacaattttgaactccggattggtgagtagcagctgcaggtggggcctgatagagcca

SEQ ID NO: 241673 - DNA, 201 bp, Homo sapiens
agagtgctctagggatgcatgtaatttttaaaaatctctcctgctaataacctttttcttggacaaacagaactttcaaagaagtatccgatgcaagggatgggaaaggaagaccaggaatagaatttcagtgttgctcagacaattgatgccaatgacccaacattctgtgtttccctgcagagtgatgccaatgaccat

SEQ ID NO: 241674 - DNA, 201 bp, Homo sapiens
agagagtgctctagggatgcatgtaatttttaaaaatctctcctgctaataacctttttcttggacaaacagaactttcaaagaagtatccgatgcaagggatgggaaaggaagaccaggaatagaatttcagtgttgctcagacaattgatgccaatgacccaacattctgtgtttccctgcagagtgatgccaatgacc

SEQ ID NO: 241675 - DNA, 201 bp, Homo sapiens
gattatcaagcatgaaatggagagatgagagactctgagtaagggttgattgactgaactttttcttattaaagacaataatgagtgttttatcacagtcrccatgaaccttcatatctacatataacaaataagtctcaatctgggaagtggaagtcaaattctttggtattaactatttctcaatcctgtttacatgaa

SEQ ID NO: 241676 - DNA, 201 bp, Homo sapiens
tagagagagtgctctagggatgcatgtaatttttaaaaatctctcctgctaataacctttttcttggacaaacagaactttcaaagaagtatccgatgcaagggatgggaaaggaagaccaggaatagaatttcagtgttgctcagacaattgatgccaatgacccaacattctgtgtttccctgcagagtgatgccaatg

SEQ ID NO: 241677 - DNA, 201 bp, Homo sapiens
atagagagagtgctctagggatgcatgtaatttttaaaaatctctcctgctaataacctttttcttggacaaacagaactttcaaagaagtatccgatgcaagggatgggaaaggaagaccaggaatagaatttcagtgttgctcagacaattgatgccaatgacccaacattctgtgtttccctgcagagtgatgccaat

SEQ ID NO: 241678 - DNA, 201 bp, Homo sapiens
aatgtttcatttcacggttgttaatcatatgagctttccagattatctctatctttgctgactttttaatctgtttggtatataaactgctgaaaattgtkttaaaagagaccactatgactatagatttataaataattacatagacttttatcttattttgcagtgtatactttgaggctgtgctattaaatgtgtaga

SEQ ID NO: 241679 - DNA, 201 bp, Homo sapiens
aatagagagagtgctctagggatgcatgtaatttttaaaaatctctcctgctaataacctttttcttggacaaacagaactttcaaagaagtatccgatgcaagggatgggaaaggaagaccaggaatagaatttcagtgttgctcagacaattgatgccaatgacccaacattctgtgtttccctgcagagtgatgccaa

SEQ ID NO: 241680 - DNA, 201 bp, Homo sapiens
ctccttttgctgctgaataaatcatcctgggagctgtccaggttggagaaagattttcataggaaagttccaactgcatccagcccctcatttattcaggytgagtccttagggccccaaggagaaagaagtgagaaaataaagtgatgtcttccattgccaagtttgctaatatggtcattagcacagatgccttcgggc

SEQ ID NO: 241681 - DNA, 201 bp, Homo sapiens
ccactggatccctcccactacacctcagaattatgggagctacaattcaagatgagattttggtagggacacagccaaaccatatcaatgtttcatttcamggttgttaatcatatgagctttccagattatctctatctttgctgactttttaatctgtttggtatataaactgctgaaaattgttttaaaagagaccac

SEQ ID NO: 241682 - DNA, 201 bp, Homo sapiens
ctcaatagagagagtgctctagggatgcatgtaatttttaaaaatctctcctgctaataacctttttcttggacaaacagaactttcaaagaagtatccgatgcaagggatgggaaaggaagaccaggaatagaatttcagtgttgctcagacaattgatgccaatgacccaacattctgtgtttccctgcagagtgatgc

SEQ ID NO: 241683 - DNA, 201 bp, Homo sapiens
gccacctggtgaccacagaagcaattgcaaacctccctggaaagaactcaagattttaggattcccctgataataaggtgcatgctgatttcagagatgtyaaggtgtacattttaaggaaaattgaacatttttattaagaatatatgtcttagaattttttaaatacatacaatatttatgattctaaagccttttctc

SEQ ID NO: 241684 - DNA, 201 bp, Homo sapiens
acaatcatggcagaaggagaaaggcatgtcttacatggtggcaggcaagacagaatgaaagccaagtgaaagaagaaatctctcataaaaccatcagatamcttaagacttattcactaccatgagaacagtatgggggaaaccatagccatgatttaattttatcccactggatccctcccactacacctcagaattatg

SEQ ID NO: 241685 - DNA, 201 bp, Homo sapiens
tctcaatagagagagtgctctagggatgcatgtaatttttaaaaatctctcctgctaataacctttttcttggacaaacagaactttcaaagaagtatccgatgcaagggatgggaaaggaagaccaggaatagaatttcagtgttgctcagacaattgatgccaatgacccaacattctgtgtttccctgcagagtgatg

SEQ ID NO: 241686 - DNA, 201 bp, Homo sapiens
gtcccaacatagtatgaatatcttggcctcctccttcagatgtgaaggacaggtttcaaagaggcttcgggaagaaatccatcccttaatgagacagtagmcttataagactcctttattgtcttgatattatcttgcaaaattacagctgtttctaccaccctctaggtagtcaaatgatatcaagtaccatttcgtgtg

SEQ ID NO: 241687 - DNA, 201 bp, Homo sapiens
ggtgtacattttaaggaaaattgaacatttttattaagaatatatgtcttagaattttttaaatacatacaatatttatgattctaaagccttttctcttsccactgccctacctttcttcttgggaacaagtctggaccataaaagtatgttttctgaaaggaaaaatggaaatggaaaaataattgttcctttgcaatc

SEQ ID NO: 241688 - DNA, 201 bp, Homo sapiens
ccaactattaacggcagaaacaatagccaatatcattgacatcttaattagttcagcttacacaattctggctgaacaatgaaagttgatcaaactctacktgatgggtatcaaaatccatgtgcccaaatcagctgcagacaaaagcagagctttcagtggacattttaaacaagtaggatcaagatcctgaagcatttc

SEQ ID NO: 241689 - DNA, 201 bp, Homo sapiens
ataatgtttagtaaaaaatgtgattccaatgatataaaatttaaaaacaactgaagtcaaactaagcaatacgagagatttttcaaaatgttcatgcccayttgactccacaggatcagtgattcctcacagttgtttatttaactggatttaaatgatgggtttatggtaagataatatggatttcaaaactttttgcac

SEQ ID NO: 241690 - DNA, 201 bp, Homo sapiens
actaataaacaaataagtcacagaatacaatgtcaatatacaaaagtcaattgttttcctttatatcagccatctaacgttgaaatttgaaattaaagaaacaatattatttacaatagcaccaaaaatgaaatacttaaatataaatttaacaaaatttgtacaagaaatcttcaaaacactgatgaaataaatcaaaga

SEQ ID NO: 241691 - DNA, 201 bp, Homo sapiens
gactaataaacaaataagtcacagaatacaatgtcaatatacaaaagtcaattgttttcctttatatcagccatctaacgttgaaatttgaaattaaagaaacaatattatttacaatagcaccaaaaatgaaatacttaaatataaatttaacaaaatttgtacaagaaatcttcaaaacactgatgaaataaatcaaag

SEQ ID NO: 241692 - DNA, 201 bp, Homo sapiens
tccttctcccaagcccacttttcaactggatggatttacaatatgaccaatcctctgtttagggtcatttaagttatttctaattatttattattgtaaargatcttattatatcctttgatctttgcacatggatggtcatatttatgaaataagtctacagaattagggttactgaactcatgagtagaaatattgtca

SEQ ID NO: 241693 - DNA, 201 bp, Homo sapiens
acccagacttcagtttctgtccccagcattacccaataacttattgagtgtgtctgtgcatttaaaaatgatagtacatgttagttctttccttctcccamgcccacttttcaactggatggatttacaatatgaccaatcctctgtttagggtcatttaagttatttctaattatttattattgtaaaagatcttattat

SEQ ID NO: 241694 - DNA, 201 bp, Homo sapiens
tcattgttctggcatattttataaatgataattactggtacataggaaagctattcacccattcatgtatttatttatcaaatatctagaacttattaagwgctgagcaattaattgacactatgctgagcatttatttactgtgctggatgctagttgtccattaatggctaaaacaaacatcatctctgtattattaga

SEQ ID NO: 241695 - DNA, 201 bp, Homo sapiens
tcaagaggtatttgtgttttctcttgaaaatgtgtttcaaatgataaatttctgggcttaaagtcttctgtatggcaaagcaaaggatatccaaagtgccrggcagagcagggatttgggaagaagtcacaaggaggagctgaacgcaggacatgctcattcaaactaagcaatgtgaacaagtgactttttaaagctcca

SEQ ID NO: 241696 - DNA, 201 bp, Homo sapiens
ataaaactgcctgacacatagaactcgttccataaataatttcaaatggattaattaatagaagtgaggggttaggaaggcttttcaaatgtagtttacaratgcataagggcaggaaaaaatgattaataaatatttctcaagtatatcacacctagcacatcaactctgggtcagaggtggcttacagataggatggga

SEQ ID NO: 241697 - DNA, 201 bp, Homo sapiens
cagtcatttggctctctttggaagttctttaaggaatcattgaaactacaaaaataaaaactttctaatttcaaaccacagttctgatgctcctcagcctrgctgacttactgtgcatattctgcagtctgtgctcaggctgttttttccatctgcaatacagtgaatgactcaaaaattgttcataatttttactttttc

SEQ ID NO: 241698 - DNA, 201 bp, Homo sapiens
atgaccatttctggtgccctctgtgtgtctctgtccaggagctgtattctcaatcctatgatgctgttggggtgatgtttgcctccatcccaggatttgcrgacttttactctcagactgaaatgaataaccagggagtggaatgcctgcgcttgctcaatgagatcattgctgacttcgatgaggtaaatctaagcctga

SEQ ID NO: 241699 - DNA, 201 bp, Homo sapiens
gggggcaggatctggaccctcccgttcatccacagagaccccacacatagtgatcactgtcccagggaggggtccaaacaccccattgtcccccttctccstctgacttcttgctcctttgcttcaccccccaggcatcagccacggctcagtggtagctggcgttatcggcgctaagaaaccacagtatgacatttgggg

SEQ ID NO: 241700 - DNA, 201 bp, Homo sapiens
ctgggtggtaggcttaagggcaatttttatttttttatatgtgcatctttattagtttccaaactcactataattagcataaatatttctgtaatgaatarcactcaaatattaatttttgtgatacatcagataagatgatctctaaagattgttatagccctgaaaattacattatgctacatgggttttcacttaaga

SEQ ID NO: 241701 - DNA, 201 bp, Homo sapiens
gccacagtggctttacttgtattatctcattaaatctgcctttaattatttccattctactgatgagaaaagtgaggtccaaataggttaattaactgacycaggtgatacatctaataagtgactgggggcaggatctggaccctcccgttcatccacagagaccccacacatagtgatcactgtcccagggaggggtcc

SEQ ID NO: 241702 - DNA, 201 bp, Homo sapiens
taatatgaactagaataaatctgctaagtgcacaaaaggtacttaattacttgaaattattttcataatttttagtaagtctgaagtagcttacgaaacartatgagagctatgcaatcctaaatttgtaaacatacttttttgtatggggtaaaaggaaatgacatttagttaactccaaaattttaaccattgtcttct

SEQ ID NO: 241703 - DNA, 201 bp, Homo sapiens
tcagagaggttattgattgtgagtctaaggatcattggctttatcctgtaagtgaaaggagccctggaagatatttaagtgggttgtaacttgatcagatrtgcaacttgatcagaacgagccctcccgctcctgcagcagtgtggaggatgagctcaagggaacaagggaggagacagggaggacagttagaaagccatc

SEQ ID NO: 241704 - DNA, 201 bp, Homo sapiens
ggtttattatgagtgtcatagaagcaattgggaactaataataaactaaaaattcggggtcaaatgtgctataatgaacatgctgaatttggtgcctgagmtatgagttctcatcctggctctgacacaaatgagctatgtgaccttgggaaaatgactactcctccgtgggcctcagtctctacctgtaaaataaaaggc

SEQ ID NO: 241705 - DNA, 201 bp, Homo sapiens
gtggagatcttagatctcaaaatccagctactatatttcattgactctaaggtgtcatcaactgtgagatgctgtattttctatgcagctctcagaaaggraaaaaaaaaaaaaaaaacctcaatatgggtttctaagaggaaacacacacacatacacacacacactaataaactgggcttacaccctccgggtaaggat

SEQ ID NO: 241706 - DNA, 201 bp, Homo sapiens
tttgcctcggcctagaataatcttaccgagatatctgcatggctattcccaccatattctctgctcaacaaggtctttgctaacctccttactccgagatrtactctcttccatctttctccattattttaccctcattgatttttctttgtagccctaatcattcattaatattatattacatttgtaaaattattttct

SEQ ID NO: 241707 - DNA, 201 bp, Homo sapiens
cacagaggagggcattgtagctactgaaaaataccactgagatctgaattgatagctagtcttcactgttcgctagctaattaagttaaattttttaacawctcagtcttggattttttttctagaatgggaataatagtatcttgattgttgatatgacaattaaagtaggcagaatatgtaaagtggttattagagtat

SEQ ID NO: 241708 - DNA, 201 bp, Homo sapiens
gcttttgcctcggcctagaataatcttaccgagatatctgcatggctattcccaccatattctctgctcaacaaggtctttgctaacctccttactccgaratgtactctcttccatctttctccattattttaccctcattgatttttctttgtagccctaatcattcattaatattatattacatttgtaaaattattt

SEQ ID NO: 241709 - DNA, 201 bp, Homo sapiens
acacattacattgttttctgtgggtttttactaggccctgcaggttcatagatgaataaggcattatttttatcctttaggaccttaagggcaagcaattrtaagtaggtacacagaggagggcattgtagctactgaaaaataccactgagatctgaattgatagctagtcttcactgttcgctagctaattaagttaaa

SEQ ID NO: 241710 - DNA, 201 bp, Homo sapiens
atataggaacccgtttgcctttccacctttatgaaaacactgaaatgttcaaacaccgaaatgaacaaagctccatcgaaatgtacagaaatatcattcasacattccctggtcacgtttgcctataataattggcgtgcctatccacaacattatgtgaaacaggacttttatataattcatggtattgcataaatactt

SEQ ID NO: 241711 - DNA, 201 bp, Homo sapiens
cttgcttttgcctcggcctagaataatcttaccgagatatctgcatggctattcccaccatattctctgctcaacaaggtctttgctaacctccttactcygagatgtactctcttccatctttctccattattttaccctcattgatttttctttgtagccctaatcattcattaatattatattacatttgtaaaatta

SEQ ID NO: 241712 - DNA, 201 bp, Homo sapiens
gcaaattttaaagagctaactatcattgtgattcccatgtactccatagagtgagattttcaaatttccagtcacttatatcagtgggtatacgtgtcttkcttttgcctcggcctagaataatcttaccgagatatctgcatggctattcccaccatattctctgctcaacaaggtctttgctaacctccttactccgag

SEQ ID NO: 241713 - DNA, 201 bp, Homo sapiens
aagaatgaatgaactggcagtcagaactcaggccccagctgaggctggagaccatgaattttcagtcatcacattccatatggtgatgatgctgtgactgkggtgcaatggactgaatattcatgatcctccagaattcctatgttgaaaccctaactcacaaggtgatggtattaggaggtgggaaatttgggaggtgat

SEQ ID NO: 241714 - DNA, 201 bp, Homo sapiens
gctgtatgactttgggtgaatcatttaaaccttctgtgtctccgtttcctcctatgtaagctgggtgttaaattattacctcctctgcctctctacctcayaataataatatgagaatcaaatgggatattggctgtcaaagttctctgcaaattttaaagagctaactatcattgtgattcccatgtactccatagagtg

SEQ ID NO: 241715 - DNA, 201 bp, Homo sapiens
tccacatctctactgagcctcagtgacctcctaaaatgcagtctgaatatccctggtctagtccacattctcattttgtagatgagtaaatgcgggcctaygaaaagggagtaactagcctaagatcacacagtcacaccagcagcagctccagcatttcctaactctgagacaatgacattctggctgccagagtgcagt

SEQ ID NO: 241716 - DNA, 201 bp, Homo sapiens
taaaagcagaggagacccaacccagctgtgctgaaccacacagaaccatgttctagccgttggcccatgctgttcccaagaatttgggaaagggcatgaaygtgtaaactgagtactacagatctggaaactacatcatcaagagattactctggggaaattcaaaggagatttgggaaataggagagatgtaagaaccac

SEQ ID NO: 241717 - DNA, 201 bp, Homo sapiens
cgtttgaacctggggggcagaggttgcagtgagttgagattgtgccactgcactccagcctgggcgacagactgagaatccatctcaaaaaaaaaaaaaaagatcaagatggtaaattgtatattatatgcattttaccacaattaaaaataataaaatatatgcatgtatatatacataaatgtatgtatgcatatatgt

SEQ ID NO: 241718 - DNA, 201 bp, Homo sapiens
tatcacactctcataccaccaccaccaccatgtgttaaatattccttggcttgcttgtttattgcccatctcccaccactagaatgacagcaggacattayctgctttgtacactgccagtttataaaactgcctgacacatagaactcgttccataaataatttcaaatggattaattaatagaagtgaggggttaggaa

SEQ ID NO: 241719 - DNA, 201 bp, Homo sapiens
ctgctccagccacagtgggccgcatgctgggctgaagtgggttcttgcttctcctgcctcagaaccttggaacttttctgtgcctggaatgctcttcccaratgaggatgactccctcacttctttcaggtcattgctcaaatgtcttcttatcagagaggccttctctgaactccctttaaattagcagtcttattcctg

SEQ ID NO: 241720 - DNA, 201 bp, Homo sapiens
gcactgtgccaagcacataaccatgattaactcatttaatcctcacaattatagaggtatacactattaaatacattcaactgaggctcagagatgttaartgacctttccaaggtcaaacaactggtcagtagaaaagctgacattggaacctggatcttcacgagtccaaacctcatgtctttaatcttttttcagggg

SEQ ID NO: 241721 - DNA, 201 bp, Homo sapiens
tcagggtgtggccctatctcatcacctgcataattaccactgtggtccatgtcaaaatctcttttcaaggagactcttggaagcagcctctaacttgtctmcctgactgtccttgctgcactactgtctgttttcttcccagtcgcccaagtgactcttgaaacacagatggtaggtcatgtttccaagtgctaagaactt

SEQ ID NO: 241722 - DNA, 201 bp, Homo sapiens
ttttctgacctaaaattgttttagtttgatccccatttgtttattacatcggaaatgttcatttgtccacacagtcctcataaataaccagaattgtaaagactgatgatagtggccatatatcaattttctctcatatatatacaatacttaatagttcatatgtctctttctaatttatcatctcatttaaacatcttg

SEQ ID NO: 241723 - DNA, 201 bp, Homo sapiens
tgagttagaatagatagtatctaggaaaaacacttatctaaaagcatttggagggaattaaagaaaattggcacaggcagaatctagaagccatgtggtggagaaaagattttttctgacctaaaattgttttagtttgatccccatttgtttattacatcggaaatgttcatttgtccacacagtcctcataaataacca

SEQ ID NO: 241724 - DNA, 201 bp, Homo sapiens
aatgtactaccagatgagacataaaatgtactaccattctcatgaatgagaatgagttagaatagatagtatctaggaaaaacacttatctaaaagcattkggagggaattaaagaaaattggcacaggcagaatctagaagccatgtggtggagaaaagattttttctgacctaaaattgttttagtttgatccccattt

SEQ ID NO: 241725 - DNA, 201 bp, Homo sapiens; identical to SEQ ID NO: 47486

SEQ ID NO: 241726 - DNA, 201 bp, Homo sapiens
gtggcctttctataacacatacccgaccaagtcacttacctgttaaatcccttcagtgggtcactgtagtgacatatagacaatgaaaacaataataatgmcaataactgcaaccacagtcaatacatattgagtaatgattgtgttacaggtcttctgctaatttcattgattatccaacattttgaggaaggtattcct

SEQ ID NO: 241727 - DNA, 201 bp, Homo sapiens
gacaagtatttatcatacaagatcctttcttacataaaatctctttcctttataaacttcttttcaaagccagggtgtgacatattaccaaacccaataaraagtttacagttcacaatctaaaacaaagatgataccagccccttcctaagatatacttccctcttacctgggaaccagaccaagaaactagccacaaga

SEQ ID NO: 241728 - DNA, 201 bp, Homo sapiens
actgttcctcaagtggcctttctataacacatacccgaccaagtcacttacctgttaaatcccttcagtgggtcactgtagtgacatatagacaatgaaamcaataataatgacaataactgcaaccacagtcaatacatattgagtaatgattgtgttacaggtcttctgctaatttcattgattatccaacattttgag

SEQ ID NO: 241729 - DNA, 201 bp, Homo sapiens
acatccttctttttaaacaaccaactattctttttaggacaagtatttaccttccttataatcctttcatgacttccatgaaccatctacaacatgtttaraccttctgacttgtcctaaacatgcttcttttaaacaaccaactattgtctttaggacaagtatttatcatacaagatcctttcttacataaaatctctt

SEQ ID NO: 241730 - DNA, 201 bp, Homo sapiens
aaatgaataaccagggagtggaatgcctgcgcttgctcaatgagatcattgctgacttcgatgaggtaaatctaagcctgagacatttacaatcacaaatkggcatcgttgtcaaagcgttgtgttattcattgtaggaattacttattttttttttttgcacttaacggaattccagcctgcattataaacacaaacatg

SEQ ID NO: 241731 - DNA, 201 bp, Homo sapiens
cctgaggatggcagatactatacttccagggacaggctttactcagccacaaagctcgccatttctttgggcttaaagacatcaccgcacaaagcaacaaygtaacattaatcactgcaatcaataataatcctttatatttgccattccttccacatctctactgagcctcagtgacctcctaaaatgcagtctgaatat

SEQ ID NO: 241732 - DNA, 201 bp, Homo sapiens
gattggtaaccctaagtgctgttaggggtgttggatgacaaaggtttctggctacttcctgctgaaaagggcattgtgtgaagaacagcagctagggctcstcctggggtaaatctaagggtccttggaagaaaggcatgttcatgcatggttctgtctacagcaccatttggagtttgattgctgtcagccattccagtg

SEQ ID NO: 241733 - DNA, 201 bp, Homo sapiens
tacccttgggggtcaattgatttttgaattagccaatgtgcaaacccttagagcagccactatcacataataggtgctgaaaagatgtgtgtttttttctwtttataccactcctttctgaacctcagttttctcataggtctccttgaagtccccccatggttatcagttccttttttcttccaacagagatttcctggg

SEQ ID NO: 241734 - DNA, 201 bp, Homo sapiens
ccttggggaaagatggggagaaaatctaatggactggattataatagttacgtgatgtggatttgcccccaaggtaggtagagtctaccagatgaagccaygctgcttttttgagaaacttctaggctttgttctgaacctcattgttcccttgaacaaaatcaagagcccagaaatagcctattgtgatttagttgtgga

SEQ ID NO: 241735 - DNA, 201 bp, Homo sapiens
gccctcactatctgcctaagtaatttcttcttaactcctgtatcgttcctccctctggattggtaaccctaagtgctgttaggggtgttggatgacaaagstttctggctacttcctgctgaaaagggcattgtgtgaagaacagcagctagggctcctcctggggtaaatctaagggtccttggaagaaaggcatgttca

SEQ ID NO: 241736 - DNA, 201 bp, Homo sapiens
aacactgaaatgttcaaacaccgaaatgaacaaagctccatcgaaatgtacagaaatatcattcacacattccctggtcacgtttgcctataataattggygtgcctatccacaacattatgtgaaacaggacttttatataattcatggtattgcataaatacttgttgaatgaataaggaaatgaataaagactcagtt

SEQ ID NO: 241737 - DNA, 201 bp, Homo sapiens
cacctacatggccgtgtcaggcctgtcacctgaaaaacaggtaaaggactctttggactcagccacaatgcatggtggggtcttgctgttgtcatgtcacygacggtggtgaagcctctgtcaccaagatccttggggaaagatggggagaaaatctaatggactggattataatagttacgtgatgtggatttgccccca

SEQ ID NO: 241738 - DNA, 201 bp, Homo sapiens
agggacagatgcatcagattttataatcaggtttgaggaaacagtgtctgatttacatagggctcacagattaattcaatcaggtatgacatcatatcatrtggggaaagctgacccctccaccctaatattattatgaaaatgggctttccagttgactggtgccatcttatctgctccttactgtacacgtggctgaca

SEQ ID NO: 241739 - DNA, 201 bp, Homo sapiens
cacccagtgtggatgatatgtaacaagtcatgtgacccaaggcttgggcctcagccaggttagaattagtgactcaacatcttccttcactacccagccartcatcaggactttctaagcagaactctggataggggagaggagacctattgcagttgccaaaggccttcttcagctcttcccacatttcccagatgaatc

SEQ ID NO: 241740 - DNA, 201 bp, Homo sapiens
tgggaagtggaatcgttgggaaaatgatgcccgctgcattactaaaacttaaggcctgattggatattgacttatatctcaaatcaggcattctgtagttyacaagtccaagcaaaaatcctgacttttcagtggtatcatttatatgaattacagatgaattaatcaaagtttggactgaatagtagctcaggtctcctc

SEQ ID NO: 241741 - DNA, 201 bp, Homo sapiens
gagtaagccatacacttgtcccagggaagagtagcccagcaagagaacaacaggtgcagaagtcctgaggccaaagcaggctgagcttgttctcaggtcaktgtggcaaggggcaaaggggatcagtgcagctggagcagagtgagagagggagacgataagagagcggacaggtcttggcaagccttgcaagtcacagtg

SEQ ID NO: 241742 - DNA, 201 bp, Homo sapiens
tggatttgtgtcatacttcacatttaatgtggtttttttctatttgcccaagccttctggcttgttccaaagcatttagtgttttgtcctctcatagtctytattacttatgtattctaactgatcaccagaagatactatttccacactacctacaccttgttgacttcttaaaacataggcaaaatactggaatgcatt

SEQ ID NO: 241743 - DNA, 201 bp, Homo sapiens
ttcccagatgaatcatttgcccttctttagtcaggctagatatttcctaagtgggcttacagatctcatgggcaagcacaaatcagaactatggtaaagakatgtagaaaacttaatgtgtctgtcagatgctaccaatcacattggtatttccttattgaatatttcttattggatattttcttattaaaagaagaatgc

SEQ ID NO: 241744 - DNA, 201 bp, Homo sapiens
tgagggagtaagccatacacttgtcccagggaagagtagcccagcaagagaacaacaggtgcagaagtcctgaggccaaagcaggctgagcttgttctcasgtcagtgtggcaaggggcaaaggggatcagtgcagctggagcagagtgagagagggagacgataagagagcggacaggtcttggcaagccttgcaagtca

SEQ ID NO: 241745 - DNA, 201 bp, Homo sapiens
ctcaacctataagcacaatttgcttttggatttgtgtcatacttcacatttaatgtggtttttttctatttgcccaagccttctggcttgttccaaagcayttagtgttttgtcctctcatagtctttattacttatgtattctaactgatcaccagaagatactatttccacactacctacaccttgttgacttcttaaa

SEQ ID NO: 241746 - DNA, 201 bp, Homo sapiens
agcatagagacccattgtcttcaatatcatctgtgtgtcctccagggccttgtgtgttctggcccccactacctctctcagctcttttccttcaacttatrgcctggcttaccacactgtggccaaactgacctcgtcttcactctttggacctcctgtacattctccccaacttccagacctcatctatgctggccccta

SEQ ID NO: 241747 - DNA, 201 bp, Homo sapiens
aatctgctcgtcaaactacctgtcccacaacaaccctctgatttagttcatgatgcccagcccaaaacaggagaggcacccttacccctaacatcttagcmgtcactagagacccatcttcctcagcatttcttgtagggaagcactatatctcaatacttgtgagtacaagtttaggacttaaaccaactgaattgaaat

SEQ ID NO: 241748 - DNA, 201 bp, Homo sapiens
ggtctcccctcatgtttccctcccctcatgacaataagaatgaactttccaaaatccaaacctgacttggtctctttctgcctacaccctttcagtgcttstcactactcttagcatagagacccattgtcttcaatatcatctgtgtgtcctccagggccttgtgtgttctggcccccactacctctctcagctcttttc

SEQ ID NO: 241749 - DNA, 201 bp, Homo sapiens
aggtagcacagaaaaccctggacacaacaacctggccgcatcttcattgggatggccctgaatacttcacactgacatctcccaatctgctcgtcaaactrcctgtcccacaacaaccctctgatttagttcatgatgcccagcccaaaacaggagaggcacccttacccctaacatcttagcagtcactagagacccatc

SEQ ID NO: 241750 - DNA, 201 bp, Homo sapiens
acacatcactacacatgtactgtacacatgtagacatacacacatcactacaaatgtgcccacatgtgtgtccacacacatatgtatgcaggtggacacayatgcacataaacaccatacacacatatatgcacatatacacccacacccacacgcaatatgcacacatagttgcacacaggcacacacacacaaatctac

SEQ ID NO: 241751 - DNA, 201 bp, Homo sapiens
cacccacgaagcttcctcagaggagaggccaggcacagggatacatgcttcaacttgtctagggagcccacagacattgagattagccagcccattagagyttagggaatgtctttactcttaatagcatatatttggttttatgtaattattttaacaggtttgttgtcttatagttgattcaaaaacctgcatataaaa

SEQ ID NO: 241752 - DNA, 201 bp, Homo sapiens
gaggaaaatatgactgataatgagggaaaaaaatcaaccaaagaagaccaactcagatttgactgagtatatttgaattaactttttttttttttttttttgagacagagtgtcactctgttgctcaggctgaaatgcagtggtgcaatctcggctcactacaacatccacttcccaggttcaagcaattcctgtgcctcc

SEQ ID NO: 241753 - DNA, 201 bp, Homo sapiens
caggagttaaagaaaaaaaaattaaaaagtatttgaggtaaaatcttacctaactagggaatgagatttacccttttctctaagcataacttatgattttrtgtagataaacacccaaacatcattacagacatcatcacactttgcctgctttcaaggtcctgttttcaccatggtcattatgttctcttattgagtgat

SEQ ID NO: 241754 - DNA, 201 bp, Homo sapiens
taaacacccaaacatcattacagacatcatcacactttgcctgctttcaaggtcctgttttcaccatggtcattatgttctcttattgagtgatattgttscctgggatttgatttctttccttcttctttctgcccctaaagggtggattcaaactaaggggcaagcctcttttttgtgaatatgaaggcgtgcaaaaaa

SEQ ID NO: 241755 - DNA, 201 bp, Homo sapiens
gttctcttattgagtgatattgttccctgggatttgatttctttccttcttctttctgcccctaaagggtggattcaaactaaggggcaagcctctttttygtgaatatgaaggcgtgcaaaaaaatgcattttttaaattcaaactcatcttacttttatcattcagcttaagaaaggcaatcctatcaagatgcttatt

SEQ ID NO: 241756 - DNA, 201 bp, Homo sapiens
tttgatttctttccttcttctttctgcccctaaagggtggattcaaactaaggggcaagcctcttttttgtgaatatgaaggcgtgcaaaaaaatgcattytttaaattcaaactcatcttacttttatcattcagcttaagaaaggcaatcctatcaagatgcttatttgttcattcattcattcagccatgcatttatc

SEQ ID NO: 241757 - DNA, 201 bp, Homo sapiens; identical to SEQ ID NO: 47484

SEQ ID NO: 241758 - DNA, 201 bp, Homo sapiens
gcacgtaagatctactctcttagcaattttcaagtatacaatacattgctattagctatagttgccatgttttacaatcgatctcttgaatttatttctcytgtctaactaaaattttgtatcctttgactaaaagctcctcaatttcatgtcacacacacacacctcaagtctctggtaaccataattttactatctgct

SEQ ID NO: 241759 - DNA, 201 bp, Homo sapiens
gaaaagtgcctcagaaactgatgtgctcctctcaaaggctggattccatttcttctcttgccttgtcaattttttttaaatggctcctacagttttcattrtcagtagatataaagtaccatatgctttttaacttgggagttaaagtaaaaacaatgacccagaaaccaggaacttcaccaagatcaagaaaaacctcat

SEQ ID NO: 241760 - DNA, 201 bp, Homo sapiens
ttttaattaacaaataattgtatatacttatggtataaaacatgattttttgacctatgtatatgtggtagaatggctacatcaagctaattaacatatgyattacttcacatgctttttttgtaggtggtgacagcacgtaagatctactctcttagcaattttcaagtatacaatacattgctattagctatagttgcc

SEQ ID NO: 241761 - DNA, 201 bp, Homo sapiens
aatgtgccatggcttattcagtgcttaggtagaagacaccacagaaccgtatagtttaagttcaaatctggaagagaagttcaaatccacattaactccarccctcaaagcagcatgcacttgtccatgatgtgtggggatgtgcaactcaggacacggcaagcccatcaaaggcaaagactttgtatccctacctcagtg

SEQ ID NO: 241762 - DNA, 201 bp, Homo sapiens
tggcttgggaaatgctatgaatagtgatgccattcagagaagtagggcttggcagtaggcaaatgaagagtttgatttgggacctgttgaatttcaggagrccttgagacctccaaatggaaactctctgcaaatgtgtgtaagacctactagcatccatggctaggagagggaactgctgcccccattgaatctgaccac

SEQ ID NO: 241763 - DNA, 201 bp, Homo sapiens
ggacaaaggagaatgctggagcagcatgcctacatgacaagggatggacctgtaaacacctgtggggctcggccctcactaggagcactgagagttcctcyccacacctggagagaggcacatgtgtgcacacaggtgcaggtaagtggagtgagctgtagaagcaggtgtgcactactataatctcctgccaaaggttca

SEQ ID NO: 241764 - DNA, 201 bp, Homo sapiens
atgagatgaaacacataaagtcattcaaagtcattcacagaatacgtgcccaataaatatttaggtttaattgttacatctactttccaccaacttaatcrctgatttacagacatccccaacccagctggtccctccaccaatcttacctggagttcatctaatgtaagatgaatctggtctctttcacacctccacgtc

SEQ ID NO: 241765 - DNA, 201 bp, Homo sapiens
tatgggagctacaagatgagatttgggtggggacagagagccaaaccatatcaaaaatttttataaaaatagaccattgtatgcacagggcttcgtaacayagtgttaaacattctttgcttgagcttttttcctcattattaaatattcacttacacagtaattttagtatttacatactatctcattgcacatttaact

SEQ ID NO: 241766 - DNA, 201 bp, Homo sapiens
agtagagccccatcagctgggtccagtgctgctggtagcccaagagaagcgaggctgaggacagccagcagcatgggacatggagggcctccaggacctgsaaaggagcagtttcagtggcatggcaggaccaggcttaggaaaaaatggggaggaggaaaatggaagcaatcagtctagacaactcttttcagaagttgt

SEQ ID NO: 241767 - DNA, 201 bp, Homo sapiens
gtccttgggtcatttaaggagttaaatgagatgaaacacataaagtcattcaaagtcattcacagaatacgtgcccaataaatatttaggtttaattgttwcatctactttccaccaacttaatcgctgatttacagacatccccaacccagctggtccctccaccaatcttacctggagttcatctaatgtaagatgaat

SEQ ID NO: 241768 - DNA, 201 bp, Homo sapiens
agagagccaaaccatatcaaaaatttttataaaaatagaccattgtatgcacagggcttcgtaacatagtgttaaacattctttgcttgagcttttttccycattattaaatattcacttacacagtaattttagtatttacatactatctcattgcacatttaactatttcaggcttttaaaaaaagtttttcactatta

SEQ ID NO: 241769 - DNA, 201 bp, Homo sapiens
tactgagtctgaaggtcaaggcagggcatgcagttaggagttttcagcaaagagattgtatttacagctgtaagacatgatgataccacaaggaaatgagytagatggaaaagaaaagaggtctgaggcctgagccctgaggctcacctatgatataagataatggtggaaagaaggaattaaccacagagactggtgaag

SEQ ID NO: 241770 - DNA, 201 bp, Homo sapiens
catatacttcctctcttctttaaagtggacccaagaataatacctgtccttgggtcatttaaggagttaaatgagatgaaacacataaagtcattcaaagwcattcacagaatacgtgcccaataaatatttaggtttaattgttacatctactttccaccaacttaatcgctgatttacagacatccccaacccagctgg

SEQ ID NO: 241771 - DNA, 201 bp, Homo sapiens
tggggggcatggcggcaggcaaggaaaagcccacgttctaagccctgaggagggtgtgtgcagcaggctttctcttgttctcttgagcaagtcaggtgatrgaacctgacttgtgctgccttaggggtgagccagctgcatcagcatgtcttgggtactttctatttagacagggaaagacttgggccgcagctcctggcc

SEQ ID NO: 241772 - DNA, 201 bp, Homo sapiens
gtgtactagagcaccaaccacatacaaaattttcttttcccctaattaacacaacccagtgaacaccctggagagtcagaccagccatcttcccatcaccytgtggtggtccccaggtttatgatgccctccttgctcgacattctgcagagtctaggctggtctcagaagaagcagagcagcttctgtcatttgcctgga

SEQ ID NO: 241773 - DNA, 201 bp, Homo sapiens
gagatacattcggtgggggaagataatgcagggaacatgggaaggaaggtttggagggaggggtgcaattagagtcacccactcatcgcttacccaggackttcctggtgttggcactaaaagttttgcatctcaaaaaatcccccgacctgggtgaaccgagatggttggacacccatagtgcaatttcagagagggttc

SEQ ID NO: 241774 - DNA, 201 bp, Homo sapiens
ctactcgggaggctgaggcaggagaatcacttgaacctgggaagtggaggttgcagtgagccgagatcgcaccactgcactccagcccaggcaacagtgcragactctgtctcaaaacaaacaaacgaacaaacaaacaaatccagaatgcattctttcacaattccggaagcaagaagagtgagatcaaggggtgagcag

SEQ ID NO: 241775 - DNA, 201 bp, Homo sapiens
aggacaataatcctgaaagacaggaagcaagtgattgcctgagctttattattgctttaagagaatttttagactatggctcaggaagaggaaaccaaggyggactccctgatttgagaatactaagctgagagtcctgggagaccaaggtggctacagtctgcagaacatactactctggagagttgcatagagagaaaa

SEQ ID NO: 241776 - DNA, 201 bp, Homo sapiens
gtcaggagttcgagaccagtctggccaacatagtgaaaccccatctctagtaaaaatacaaaaaatgagccaggcgtgctggtgggtgcctataatcctarctactcgggaggctgaggcaggagaatcacttgaacctgggaagtggaggttgcagtgagccgagatcgcaccactgcactccagcccaggcaacagtgc

SEQ ID NO: 241777 - DNA, 201 bp, Homo sapiens
tccacattttcattttgcactggaccctgcaaactatgcgtggtcctgtctcccctttctcaccctgggaccttgggacacattattttaccgcatggagsctctgctgattcatctgcaaagtgaatactaagctcaaagtgccactcagagaaacagatgatcgacggaggcagagcccctagttctgtgccccagtat

SEQ ID NO: 241778 - DNA, 201 bp, Homo sapiens
cacaaaacctggatcaatcactactgctatccccttggagtagacagaatgttcttggaggggtggtgaggaaacttacaatgtaaaggtcttttccacaycaccatttgcagttttccaaaagataggtggtggttttttttagcatactgaagtaatattttagtagcttttataaaatatcctgcccccatcacaaat

SEQ ID NO: 241779 - DNA, 201 bp, Homo sapiens
ccatgcttgttttaatgttctgctattgctctcatgtgtgtcttaatttttgaaaaaggtgttccacattttcattttgcactggaccctgcaaactatgygtggtcctgtctcccctttctcaccctgggaccttgggacacattattttaccgcatggagcctctgctgattcatctgcaaagtgaatactaagctcaa

SEQ ID NO: 241780 - DNA, 201 bp, Homo sapiens
attcttaatttaaaaaaaatctaattgccttgtttcttcttgatgtttccctcaacctcaaacactgcactctgctgcaaagtaactcattctctcttttyttaattacagtattctcaaatgagggatgaagtgttcaagtcaaacttggtctgtgcatttatcgttcttctatttatcacggcaatacaaagtttgctt

SEQ ID NO: 241781 - DNA, 201 bp, Homo sapiens
cccagagttcaaggttcttgcttctacaatggaccttgttttgtggttgggagtttcttgctcctgcattccccacagactgtgtgttcttcaggatggtracatatttaactcccagcagcacattcagagcctgtcacatgtcagcatgactactgtttattgaagggaattgaattgaatagtcaaacagagtcaagt

SEQ ID NO: 241782 - DNA, 201 bp, Homo sapiens
gctcggtgctgtgcggtgttttgggactaaggaagtggcagtttgatgtctggtcttgggatgtggatattgcaaacaaactcgaatctggaggaatcccygggtaagataaagcaaagcccttttcatgcttaacggttgtcattggcttattttgtgacagtgggtttcctgtgtacagaaattcagggttagatctag

SEQ ID NO: 241783 - DNA, 201 bp, Homo sapiens
tacctatgtcaacaggtatgtgcggtcaaggacaaaacacgatgttgacatgaggattggaatccactccggctcggtgctgtgcggtgttttgggactamggaagtggcagtttgatgtctggtcttgggatgtggatattgcaaacaaactcgaatctggaggaatccctgggtaagataaagcaaagcccttttcatg

SEQ ID NO: 241784 - DNA, 201 bp, Homo sapiens
caaagtcacgtccacatttttgagtactcttatagcagcacaccactcctggtaccaatttattgtattagtctgttctcacactactatgaagaaatacycaagactgggtaatttataaagaaaagaggcttaattgactcacagttccacatggctggctggagaggcctcaggaaacttacaattatagtgtaaggc

SEQ ID NO: 241785 - DNA, 201 bp, Homo sapiens
ggtcaggagatcgagaccatcaaggctgaggcaggagaatagcgtgaacccgggaggcagaggttgcagctccattgcactccagcctgggcgacagagcraaactccgtctcaaaaaaaaaaaaaaagaaaagaaagtgcagagccaacgatgcccactctggtcttatacatgtgtctctccatttacctatgtcaaca

SEQ ID NO: 241786 - DNA, 201 bp, Homo sapiens
catactgtttctgagagctgttcctctatgatcctggtaggtttctcttctttggggaaatttaaaaaaggaagattagtgggacaaattacagtccctgytgctgcagttgagtcttgggggcaccaaccgatgtacattattctagattcccctcacactccactagtacctctgctggtcttgtggtttacctggtgg

SEQ ID NO: 241787 - DNA, 201 bp, Homo sapiens
agatttgtccagttgctactaagagaccttgggcaaccacttctcccctccaaggctcggtgtcctcatttgaacaatagcaaaactggactggatgatcsaacaattcctttcagctctgacattgccctattcagtttccctacctcagacacaggctccaagactgtggccatactggtgagccacatacacttcaga

SEQ ID NO: 241788 - DNA, 201 bp, Homo sapiens
atctgacttcaaagccgtctatcttagtcatcatggtagcccacctcccaactccagatttgtgcaattgctactgatgcctgaaatttgccatcaatacycaaaggatcaacatatagtttaggagatcctacatacattggtacatttctaatactttagcagaactgatattgaaagaggaaaatgtcagtcaataaa

SEQ ID NO: 241789 - DNA, 201 bp, Homo sapiens
gtcccagagaggaaagaaggaacacaaggttcagacaatgacttgttgtttggatggctggagtctaatgtgtgcatgaggaatgagaagaataactaagrcactggacagatcatgaggaattttgtgtgccagactaggaattttccattgtatcttatagaccagtagtatctaaatattttgatcccctatttttat

SEQ ID NO: 241790 - DNA, 201 bp, Homo sapiens
aaatatatgctagaaggaatattaatggcgacttattatcacaaaaatatcagcaaatttggaacacttgtcttctgtcaaagacaaatgaatagctcacytttaagtctgacaactcttttaagcattttgaagtcacataatcattgcatttggggggcaatgaaggtttttctagtaattctactacaaagtattatc

SEQ ID NO: 241791 - DNA, 201 bp, Homo sapiens
aatatacccgtgtatgttatgatacaactcaacaacagaaatgtttaaaagtaagataaaatgaatatggattgatgttaccattttctccacaatgaaayggtcatcttgttcaggaggtcagcaaactacagccacaggccaaattcaccagctgcaacaaccacctgatctgacccaccagttgacattctgatacat

SEQ ID NO: 241792 - DNA, 201 bp, Homo sapiens
tttagctcttcacatggcatctgacatgaagcagctatttatctgtgcccacacatcactttgaattaatattgtatacccttgacctaacacctgaaccsccaaacacaagaccacagcactcagagattagccaaatcctaagaaagtggtgggtaagatttttgatcacacagctttgtttcagtgcctcagtttcct

SEQ ID NO: 241793 - DNA, 201 bp, Homo sapiens
acattctgggtcataaagtagaacagttaacatgtcccagcagaccccagccaaccccatacctaggactctgggtagattcttgttctctaagaggctgmcacactcagaaggccctccaacatatgaatggagaaaaggctccctgtagtctcttctaggcctaagaattggtcccagaaacattccaacaaggagacc

SEQ ID NO: 241794 - DNA, 201 bp, Homo sapiens
ctttcttttcccttgtccttctaattaatcctcttctaacccaaacctgcacaaggcaagaccctctttaagataaatctcatatgggccaatcttaatgygtcttgtatcccagggtaccagggttccaaccgtcattaatctaagcaagtacagccttgtagctcattggaagaggtgcttccaacaatctcccaggat

SEQ ID NO: 241795 - DNA, 201 bp, Homo sapiens
gaacctgactttcaattcctcagctgtgtttacagatatctgctcctacccagaggtatttatttatgagctccccttggtgagagttggacatagatatrtctctaccagctccaaataaacaagactggctgaagggccatagaaaatactcaagaggcctgttttccttcttctgcctcttcttctttcctttcttct

SEQ ID NO: 241796 - DNA, 201 bp, Homo sapiens
atcactgtgccctttgggcctgaaggagggtccccaagtgtgcagggacccaagctatagactcccacaattgttggcctgtgacttggagccctagactrcctgaaatcactgtccaatttggcccagtaattaccttacttaagttctgtggttgtccttctagtgaaggctctgtggataaaggaaaagaggaaaagg

SEQ ID NO: 241797 - DNA, 201 bp, Homo sapiens
aatccatcactgtgccctttgggcctgaaggagggtccccaagtgtgcagggacccaagctatagactcccacaattgttggcctgtgacttggagccctmgactgcctgaaatcactgtccaatttggcccagtaattaccttacttaagttctgtggttgtccttctagtgaaggctctgtggataaaggaaaagagga

SEQ ID NO: 241798 - DNA, 201 bp, Homo sapiens
gtgatttgtttggttccaggtcttaaacttggcttgttgagagaggctagttgaggcattgtcatgtggttgaatccatcactgtgccctttgggcctgarggagggtccccaagtgtgcagggacccaagctatagactcccacaattgttggcctgtgacttggagccctagactgcctgaaatcactgtccaatttgg

SEQ ID NO: 241799 - DNA, 201 bp, Homo sapiens
acccacattgtcatggtttcattttttctcaagaattgtaccatggtagctataggtattttctgtgcttttacaagtagtctgtgttgtccatgactcargcagctagatttttgaggtgatttgtttggttccaggtcttaaacttggcttgttgagagaggctagttgaggcattgtcatgtggttgaatccatcact

SEQ ID NO: 241800 - DNA, 201 bp, Homo sapiens
gggaaaagggtatgtgggttcatcccacagccagagtgttgatatcaaactagagtggtgtgttgccatgacagcaattgcctagtgacaaaaattaatargagggaaaaaatgggcaggagcaataaatcaagccaaatattctgtttttttgcaaagtttctcaatagagagagtgctctagggatgcatgtaattttt

SEQ ID NO: 241801 - DNA, 201 bp, Homo sapiens
gttttagatcacagactgactaagcatcctgacaccgagcacaggtgtccaactgacacaggctaccatgggacagagttttgatgagagtttgaaactcragatgtaaactcgagagtgatgctgatgccttggacaaggatgagttctccttacccatgtctcaaataacttatggtatagtccatgaaaaccacaaaa

SEQ ID NO: 241802 - DNA, 201 bp, Homo sapiens
tagagctgccagtgtaggacatgaatggctacacagagttgagaacaaagaattaattcccaaggagaagcagattgcatggtgataaataggttgatagsggagacaggagttaaagatgcctccagagatggagttttagatcacagactgactaagcatcctgacaccgagcacaggtgtccaactgacacaggctac

SEQ ID NO: 241803 - DNA, 201 bp, Homo sapiens
agatataaaatttccctccacttctatcaaggtaccctttaacacctgcatcagtttgctgcctgaaatagagatggaaaaattagagctgccagtgtagracatgaatggctacacagagttgagaacaaagaattaattcccaaggagaagcagattgcatggtgataaataggttgataggggagacaggagttaaag

SEQ ID NO: 241804 - DNA, 201 bp, Homo sapiens
aaagctgagccttgcaggaataacaggacacaccatgttaagtgcccataaggcagaaagtgcatagcactggcgacagactgcacatagttcagcattgyccagaccatggggtgcagaagggtgagggaggaaaaaaaaaaggcaggagagagagccaagagcagacactcaaggccctgtatgccatgtggaggtcca

SEQ ID NO: 241805 - DNA, 201 bp, Homo sapiens
taaatgagaaaaaaaaaaacatcaattttacaaatttccaaacaattgcccatttagcctatgcaaaactgtgataaaagctggaatacagaatgtggctyaagtcaagagaccacatggcctccatcctgaatctcttctctgctggccctcatatcccacagttaaactctggtgtgagatcctaccactatgatgctg

SEQ ID NO: 241806 - DNA, 201 bp, Homo sapiens
taattagataaaatgtacaatctgatgttataatgtttacatgtaaagaaataaatgaatgctgaggaactgctgcagagatttccagagaaatgtaatayacagtgtcagtacttttgcttaaaaagctaatcttgtaattaatacccttgccatagaactttaaagtgcttttggtttcctgaatttcatgatgaatag

SEQ ID NO: 241807 - DNA, 201 bp, Homo sapiens
attcagctgcaaagttgcttgttccaatttgaaaacttgatagaagccataaagactggaaatgttcataatattatattgcatatatcataatgttatakgttaatataccatttgtttactggtgtccccaaatttcgtgttgaccctctttatttgctgtcagaaatggacccctgtttgaggttttgtctttccctt

SEQ ID NO: 241808 - DNA, 201 bp, Homo sapiens
aacttgatagaagccataaagactggaaatgttcataatattatattgcatatatcataatgttatatgttaatataccatttgtttactggtgtccccaratttcgtgttgaccctctttatttgctgtcagaaatggacccctgtttgaggttttgtctttccctttcagcagctctccttgtccctatttctggcatt

SEQ ID NO: 241809 - DNA, 201 bp, Homo sapiens
gtattcatatgtgaaaatagcttcaaaagagctaaggaaatcaggtgagatgtcataatactcagctgtagcacaataataataaaaggcacattaaatgragtaggcaggacaaatttatattatattacccatatcatccttcccccatcccaagcagcacagtgcagaaaaatataccatccatttggggaaaagaga

SEQ ID NO: 241810 - DNA, 201 bp, Homo sapiens; identical to SEQ ID NO: 47481

SEQ ID NO: 241811 - DNA, 201 bp, Homo sapiens
caaagagtttcaaggaggctaccagctccacattttgttggaagaataacaaaccctggacgtgaacatcatcacatcattatccaatgtctgcctcagaygagtaataaactattttacacaatctccttctaaaacacacttttgtcaggagacctaccattctggactttgccataattcctgcagttttgccaagag

SEQ ID NO: 241812 - DNA, 201 bp, Homo sapiens
gagggacagtctacaaaacacctcaccagtattcctcaaacctgtcaaagtcatgtaaaacaagggaagtctgagaaaatgtcacagcaaggaggcacctraggagacataacaactaaatggaagatgatatcctggactggagaaacacctatggggagatttagaaagaatgaccaactcagcatccatgagcatacc

SEQ ID NO: 241813 - DNA, 201 bp, Homo sapiens
cttcaggtcactctccttcctgccatctcacatacccttatggtgtcatcttagcattcacactccatccttcctacagttgatttatttatctaggacaycctttccatcctgtcaaatttattgacgtaaggagtgaagataatattgtatagctattaaagattgactaaagggcccagcacaggacaaggcccacaa

SEQ ID NO: 241814 - DNA, 201 bp, Homo sapiens
atgagccacatgagccttgcaattggccccctctctcatgggacttcctgacaaagcgatccgcctgcattctctttcatttatctccccctggtgcccasaaataatggtgtgttgtcagggagtgtttttccagcctgtttggagggaagtttcccatctgcctagagccctctgggaactcactgatgcaccaacctt

SEQ ID NO: 241815 - DNA, 201 bp, Homo sapiens
ggagcttggggaatgagggaaaggagaataaaagagatgaagtccagcatattttttagggtagtgcattcagtatactgtaatggtatatacctgacacyatgcatttatcaaaacttataaaactttacagcacagagaatgaactttaatatatacaggctttaaaacattttatttaggagtttaggggatcccatg

SEQ ID NO: 241816 - DNA, 201 bp, Homo sapiens
tatgaatatgccagccacggcgatagttatgtgttatccaagtaataaatcagaagaagggtaccagagaataccaggaaagaatgagtttcttgactacytaagagacaatgaggactagggtcctgaccgaaggcacctcggggtggcgagctgtgagtgttggtggggcctggcaggattcagccaaacctgctgggc

SEQ ID NO: 241817 - DNA, 201 bp, Homo sapiens
gtcacagaatacaatgtcaatatacaaaagtcaattgttttcctttatatcagccatctaacgttgaaatttgaaattaaagaaacaatattatttacaayagcaccaaaaatgaaatacttaaatataaatttaacaaaatttgtacaagaaatcttcaaaacactgatgaaataaatcaaagatgtaaataaatgaaga

SEQ ID NO: 241818 - DNA, 201 bp, Homo sapiens
gcaactagacagtcccatcttgggggtgatgagagacagtgataaatcatcaggcattacattcccataagaagcacgcaacctacaccctcacatgcacrgttcaccatagggtttgcgctcctatgagaatctaatgctgccaccgatctgacaggaggcagagctcaggtggtaatgtgagcaatggggagtggctgt

SEQ ID NO: 241819 - DNA, 201 bp, Homo sapiens
tggaccccaacactgggcctgccacagtaaaacccagcactaggcagaccctcatgatcccatataccaggctggtacccacagactaagcctctacacaygccccgatggcagataggaccacacagctcaaggctacaggcttgcttggccagtctgatctcaggcacacaccactattaggttgacattagtggacct

SEQ ID NO: 241820 - DNA, 201 bp, Homo sapiens
agtccatgaaaaccacaaaaccaggaaccaacctgagcaacttaaaaccaatgccaaatccagttcttggtatcaggataggtggagggggaaatcttcayaaaacccaccttgaagggaaaagggtatgtgggttcatcccacagccagagtgttgatatcaaactagagtggtgtgttgccatgacagcaattgcctag

SEQ ID NO: 241821 - DNA, 201 bp, Homo sapiens
aacatttaagggcaatagtagatgcctatacagagtacaggtcgagagatcaaaaaagaaaagagtgattgaccaagatgaggcttgacctccatgaattraatagatgattgtcagacagatgaggaggaagctgcagaaagagcatgccagaaaaatggtatggcttcaacaaaaaagcatgggaggtggagtgggaat

SEQ ID NO: 241822 - DNA, 201 bp, Homo sapiens
gcaaggcaacaccattgaaaaggcaagcttcacatagatgaaagtatagaaataaaataagtataattaattgattgacagtaggtaacatttatataggrttatcgtggaaggcactgttctaagcatcttatatatattacctcatttcattctcccagtaacccttatgagataattcctattattgtatccattttc

SEQ ID NO: 241823 - DNA, 201 bp, Homo sapiens
ctcccacacttctttaaaaatgtaattattcttagctcacccataatctgtggaccctaggagaaaagtgtggataaaactcctccttgtcttcccagaaytctccaggttttaaaataaagccctgtgtcccagtcaaaccaagacagtcaatcaccctagtaccacttactagctctattatttaacctcgctgagcct

SEQ ID NO: 241824 - DNA, 201 bp, Homo sapiens
gcatggcactgtctttgcaaaatgtatggtaggtaacaggagagtgactttgggggtttctcaaaaatgagggaaacatgtcaagtgaagtgttttcaaayagatggctggtgtgagatgcatggtcagggggctgctttgtatgggcctgctctgtcgttagcctctgtatcatttttgctgtattagaagcttaaaact

SEQ ID NO: 241825 - DNA, 201 bp, Homo sapiens
ctattattgtatccattttctagataaggaaactgagacatagaaagcttaaagattttgtccaaggttgcataggtgttagagctgggattcaaatccasttaatctagctcttgattagttcatgctcacaactgagatataaaaggataagtggggccaggtgaggacagaacagagatgagacaaggagtccttaac

SEQ ID NO: 241826 - DNA, 201 bp, Homo sapiens
aatccaagttaaataagcctcaaaccaatgataggaataccttgtccagattttcctaagacactggtttattttttccacatcataaaccaattgtttgyatcaccaattcgatttatccaccaggaaattcattacaaaatgatgttatatgtataaataaaggattgatgataagattatatttgctaggttctttca

SEQ ID NO: 241827 - DNA, 201 bp, Homo sapiens
agttatacatggtgaagacataagccggatatgaaagtaaatcacattaatgtcttggggtttcttgttaaatgagtaatgtttttacaactgccgtttcyatctacagtgccagtgtaaaaatttcacataaaaacaaaaaactataaccacttcattttgtaaacaacacatcctcattctatgtcagctgatttttca

SEQ ID NO: 241828 - DNA, 201 bp, Homo sapiens
ataaacaacacacatgtgtgtgtgcacccacacacaggcacacatacatgtggacacaggcatgaaaacaacacacacatgcacacatgcaaatgcatackcacacaaatgcatgcatgtggacacatacatggacatacatgtgcacataaacatcacacatgcacacatgtactgtacacatgtgcacataaacatcac

SEQ ID NO: 241829 - DNA, 201 bp, Homo sapiens
ttgaattgtaataatcctcacatgtcaagggcagggccaggtggaaataactaaatcataggggcagtttcccccatactgttctcctgttagtgaataaktctcatgagatctgatggttctataaacatgagttcccctgcacaagcctctcttgcctgctgccatggaagatgtccttttgctcttcctttgtcttct

SEQ ID NO: 241830 - DNA, 201 bp, Homo sapiens
ggctgaggtgggtggatcgtgaggtcaggggatcgacaccatcctggttaacacggtgaaaccctgtctctaccaaaaatacaaaaaattagccaggcttsgtggcaggtgcctgtagtcccagctacttgagaggctgaggcaggagaatggcgtgaacttgggatatggagcttgcagtgagctgagattgtgccactg

SEQ ID NO: 241831 - DNA, 201 bp, Homo sapiens
cggtgaaaccctgtctctaccaaaaatacaaaaaattagccaggcttggtggcaggtgcctgtagtcccagctacttgagaggctgaggcaggagaatggygtgaacttgggatatggagcttgcagtgagctgagattgtgccactgcactccagcctgggtgacagaacgagactccatctcaaaaaaaaaaaaaatgt

SEQ ID NO: 241832 - DNA, 201 bp, Homo sapiens
aaaccagtggcttttcaccataagatcactaaatagtaagtgagggaaatatcataaaagtatcctagctataacattttaaagaaataaaagaattaaartatcatcatattccaacccataatgatttaatgaatctacaaattgagcatcagaggatgctatcaacacaaacaagagagacagccatacctcctggtg

SEQ ID NO: 241833 - DNA, 201 bp, Homo sapiens
atattattcttggaattcaagttgttaatagaggtttttcatcattcagttttactcttttatttattttacttttatttacttttttagctgagttcagsaggcctcatttttttttttaccttttcttagatttttacttaagtttactactttattgctatgttattttttaagcttcactatgaactatttataatt

SEQ ID NO: 241834 - DNA, 201 bp, Homo sapiens
agttggagacatccatatgaactcatgtatagcttaatatagatagagatggttacatgtaggaatatttatagatatgtttatatgcacaggttagaatrtatacatacatttccttcctctgtcagtggagagggcctggaagcaatgacacctcagtggtaatgagcacatctaccactcacatcttggtttctaatg

SEQ ID NO: 241835 - DNA, 201 bp, Homo sapiens
tttgatgatgtcaacttcacaattataagattcttcttttatgtgattatgctaggcactgaagttcaaacaggaaaataatagaatgcttcaaacttatkaactacattaacgccaaacttatgaactatattaatgttcccatttgacagataagaaaagtgaggttcaaagaaattggctttgctcacaataaaatag

SEQ ID NO: 241836 - DNA, 201 bp, Homo sapiens
ggaaactgagacatagaaagcttaaagattttgtccaaggttgcataggtgttagagctgggattcaaatccagttaatctagctcttgattagttcatgytcacaactgagatataaaaggataagtggggccaggtgaggacagaacagagatgagacaaggagtccttaactttggcaggcaataagcacacaactaa

SEQ ID NO: 241837 - DNA, 201 bp, Homo sapiens
ttgaactcaaggcctcaaacacttttaaaatcaacattaatcctttcatgaaggtaaagccctcaggatctaaacacctctcattaggccccactgtaacrtttgggattaagtttccaacacatgctttatgaggggcatattcaagccataacaaggaccaaaaacaaaaaacaaaacaaggaagaatacctctggaag

SEQ ID NO: 241838 - DNA, 201 bp, Homo sapiens
ttgtctcaaaaagcctcaaaaataactgatgagtgaggcagcattccaattcccattcgtagatgaggatttatcccaggtcacatgtctgtgtaatatcygagctgaaatttgaacccagagaccaagtctgtgcttttagttactagactgctttgcatcaaaattagtgattcattctgaccacatgactcaaggaaa

SEQ ID NO: 241839 - DNA, 201 bp, Homo sapiens
accgcagcagatcgacttgggagcttcctaaaaataaagttctccaagatcacatccctggatatttgtattcagtgggtctcagtatggccaaaggatcygcattttttttaactagaacttgctgagaatcatctttgtctcttctcttttctatgtagtccacaaaaaatccaccagcaaatcctgttgtctcttccc

SEQ ID NO: 241840 - DNA, 201 bp, Homo sapiens
aacacagctaggtactaaagagataaggttattgatgtaatggagctgatgcttggatggatttgggtagggaatttgtgactccactgcagaggtttggytggaggttcacacctgactcttagaacacatctggagcacaggattcagggattcagtaaatattttacacaaatgcaagacttggactctttttactac

SEQ ID NO: 241841 - DNA, 201 bp, Homo sapiens
aattctctaagaagaacgagcaatatgaacatttatgtgcctaacaagagaatgtcaaactacataaggcaaaaacagatagaattgaaaagaaaaataartaaacccactattatagttggagacttcaacatccctctgtcagtaattaatacatcatgtaggcaggaaatcattagagatatagataacctgaattta

SEQ ID NO: 241842 - DNA, 201 bp, Homo sapiens
ctcagccagagagaagctgtgccaatggacaatgaaagatatttttgaaaccatgtaagtatatttccttaaaaacatagaaaacacaaattctcctcctrtttttgctatgggtttttcacagcaactttggcttcagcttctttgggccaaaatttcttcatgtctaaaagaaggatagttcaacactcctgacccagt

SEQ ID NO: 241843 - DNA, 201 bp, Homo sapiens
acacatggggattattaccattcgaggttggatttgggcagggacacaaagccaaaccatataagtctctgaagcctgacttgctgggctccaaatttgtwtggaggggtgagctgaagcaagttacttaacttgtctttgcttcagcatcctcatatataaactggggattagggtgacgttgcatccctattttcttat

SEQ ID NO: 241844 - DNA, 201 bp, Homo sapiens
ttggtgattgacattcagctcctcgttacttatgcaaatttctccagctggctcgaatttctctccagaaaatggatttttctttcctcttgcattgtcasgttgcaaattttgtgaacttttatgctctgctttctcttgaaccttttgccgcttagaaatttcttccactagttaccctaaatcatctctctcaagttc

SEQ ID NO: 241845 - DNA, 201 bp, Homo sapiens
tattttgcattgcattgtgatgaggatccattcatcaatcaggaaaatatagcggtggcattttattaaactaatttttaggctgtttctaatgtccattstttgcccatatgctttactttcattctaaccaagatttacataggcttaaatttttaacacattccctttctgtatatcataaattgcatcactgaaata

SEQ ID NO: 241846 - DNA, 201 bp, Homo sapiens
ggctgtttctaatgtccattgtttgcccatatgctttactttcattctaaccaagatttacataggcttaaatttttaacacattccctttctgtatatcwtaaattgcatcactgaaatatacccaagaaatctgatcatgcacctatgaacaagatagccttactctgaaaatagcaaggaagcagtagccagtgagtc

SEQ ID NO: 241847 - DNA, 201 bp, Homo sapiens
ctgaaatatacccaagaaatctgatcatgcacctatgaacaagatagccttactctgaaaatagcaaggaagcagtagccagtgagtccctgcattctagwgcaaaactcactggattctctatttgcaatctgtgaaggtgtggttgagttactcagttattcaaaccctcagtttctttatctacaaagtgaggatatt

SEQ ID NO: 241848 - DNA, 201 bp, Homo sapiens
aattttttttaacggtaaaaactgaggtgtcattatatactttcccaaggcaaaggtgatgcacttacaatgcatagcttgtctgcttcctgtatcagagrttgctgggaactttgctcactacctaacatttctcatacaaatcttggcattattattttttatcattaaaaggtctgggaaaaaacagagaaccccatt

SEQ ID NO: 241849 - DNA, 201 bp, Homo sapiens
tattggcctatttccaaatttactgattcttccgtcatctatgttctgctgttaatatccagttggttcagatattttctttttcagttctgaaattttcyttttttgaggtttctatttcttttcttatttcttatcttttcattcactgctaaaatatttactttcagtgaatttcattcactgctagaatgtcactga

SEQ ID NO: 241850 - DNA, 201 bp, Homo sapiens
aggccaggctgcgcctggagacagagaaccaaagacaggtaccaactgacaaggctgtgtgttttagttatcacctagccagtctctaaattatatggagytactgttttactcccaaacacgtcctgacttaaaagtgttctcttaaagtttatgtcacaggattccagagtctgaaatagttgtgttagacttacaggt

SEQ ID NO: 241851 - DNA, 201 bp, Homo sapiens
gaactctcagggctcctggtgagggccgaggcccacaggcatgcataggtcccatcccttgtcacctaggcatgctgctccagcattctccccttttcccygactccacccatcaccctctctgctagatctttcccattggcatacagcctgctgtaaaatttctttttgattgtttcacccacaatagagtataagctt

SEQ ID NO: 241852 - DNA, 201 bp, Homo sapiens
tactacctgatttcaaaacttactataaagctacagtatgatgctaaagaaagaataaacacatcgctcaatagaacagaaagaaaagccccaaaatacasccacacaaatataatcaattgatttgtagcaaagatgttaagaaaattccatggagaaaggatattctttttaactaatggtactgataaaattggatgc

SEQ ID NO: 241853 - DNA, 201 bp, Homo sapiens
aatgtttcagaactaccactttataaacccactcctaggtctttagctgttgaggacttaacttagatgttcctaaaaggagagtaaggtaaaagaacacrctcatatgtggcaataatttattggtgttgattccagtgtccatgggcatcagggcagaagggtctcttttgtttcagagtagcttaggcacagggcaat

SEQ ID NO: 241854 - DNA, 201 bp, Homo sapiens
aaataatacatttaactattatttttagagtagtaacagctggataaagctatgaattgtttagagataaaatagccaaaattaaagggaagacaataagsctttctggactgagtttttaaagtctctgtaaaagttgatttgtttatatcttctctaccaccctttatttgcaccattcagatttatgaaggcaattgc

SEQ ID NO: 241855 - DNA, 201 bp, Homo sapiens
ctttatttgcaccattcagatttatgaaggcaattgctgcaaatgtttgttgataatggaatctgtactcctcattactcctttggatacctgcatagtgygctcaccatttggggtctctgcgtaaatataacctcatcagagataccttccctggctactccacctaaaatggaaactcccttcttctataatttgttt

SEQ ID NO: 241856 - DNA, 201 bp, Homo sapiens
tcaaggaggtggaggaaaagaattccagacagacaggcccaaatggccaaaggcataaaaatgagatactataggatatttgctgagaaggactggggggrctacaagcacccaaatattttaagggaaagaacaggccagagcaaaggtatcataagtacaaagagacaagtcttgaagagcattgaagtagcttggatc

SEQ ID NO: 241857 - DNA, 201 bp, Homo sapiens
taacatggtggaaaaatcagtcaacacttttggggtcaccgctgagtgcaaggtacaatactgtacagaggaatagaagacagcatcctgcaaggcaacamcattgaaaaggcaagcttcacatagatgaaagtatagaaataaaataagtataattaattgattgacagtaggtaacatttatatagggttatcgtggaa

SEQ ID NO: 241858 - DNA, 201 bp, Homo sapiens
atattaatgttcccatttgacagataagaaaagtgaggttcaaagaaattggctttgctcacaataaaatagtgacaaatctaaaagcaaagtacgtctcygtactttgtctccacccaatttgccatctgaagaaaattgaaaatataatatcttacgcaactttagtctggacaaatgatgattatgtcacatttttta

SEQ ID NO: 241859 - DNA, 201 bp, Homo sapiens
cagcattgtgcttcatccagagagctcaacaactacaggatattctccaaaccttagctatgacactaagaagtggggttcagtctaaaacccagaccacmccaagaagtcagaaaagaataaaaatcatgtaactgtttattgcaaacaccataccaacaacagattggactgattttattatttcttgacctgactgaa

SEQ ID NO: 241860 - DNA, 201 bp, Homo sapiens
caaggatttgaatgcaagtaatttactcagcggtggtcccagtaaacacaagtagcttggaaaatgaaaaggaaggcaaccgataaatgatgcatcatccrattagttacctctgtgggcgactggagcttaatccggctgggaaattcagggaaatggtgtgagagcatgcctcaaagttatcaggcccaaggggcgagg

SEQ ID NO: 241861 - DNA, 201 bp, Homo sapiens
cccacaggagtgttttgagagacaaataacataatgcctgaaaaagtgttatttcagctgtaaagaattctacaaatgttagggctatttctgtgaaaatytcaccaacgccccaatctgatgctcagatgccccgccccccttatgaagcatcctctaatgtttcctgttgtaagttatttctttctttttggcactaag

SEQ ID NO: 241862 - DNA, 201 bp, Homo sapiens
ctatttatctgtgcccacacatcactttgaattaatattgtatacccttgacctaacacctgaacccccaaacacaagaccacagcactcagagattagcmaaatcctaagaaagtggtgggtaagatttttgatcacacagctttgtttcagtgcctcagtttccttatctgtaaaacggggataaaagtagggccttcc

SEQ ID NO: 241863 - DNA, 201 bp, Homo sapiens; identical to SEQ ID NO: 47480

SEQ ID NO: 241864 - DNA, 201 bp, Homo sapiens
gtccatcaggcatggctcagagtgttcactctagtgattcttgggaagtgcctccagcagagctcagagcattcatgctattgattcttgggaagtccatyaggaacagctcagagcattcagtatgcttggtttggattctgtttgtgtccactccattgggcatcttatactgagatgatataggaagacataaagcca

SEQ ID NO: 241865 - DNA, 201 bp, Homo sapiens
ccccataagaaataaagaggttacagtcacaaatttattttctgacacctttcactgacatctgtgtttgtgaacaaggtcatgattcctcaaaatcatcrgcatgcctatctttgaccctctttcttttaaactgtaaatgtgttatttcagacattttttttctgtttaccaattcaaattagagtaagcgcatggaag

SEQ ID NO: 241866 - DNA, 201 bp, Homo sapiens
cagctttatttttctccatagcacttttcatcaaggcaaataaaatgttattttttctttgtttattttctgtctctccataaggcaagtgagagatttcwtctattttgatgactgacatatcctcagagcctagagttgttcctgctctcaccaaattgaagaaactgctctttatcaatcaattttccaaaaatatag

SEQ ID NO: 241867 - DNA, 201 bp, Homo sapiens
agcaggggaaagagtcacttgattctttcaggtcccatccataaagcactctagatgcaatgcttggcaggccctacataaagaggggagagaattgaatyggtattcactctggtcttcaaaacatatctaatttgcctatctgtgaatatttatagactttatttccacagcaatgttgaaaatgtccctgtgtccaca

SEQ ID NO: 241868 - DNA, 201 bp, Homo sapiens; identical to SEQ ID NO: 47479

SEQ ID NO: 241869 - DNA, 201 bp, Homo sapiens
tcattcacagatacagcatcgtagctccttgggtccgcaaaatcaacactttaataataatgcaaacacctgtttgtggccagccactgttctactttacrtacaaaaacttctggaatccccatgacaaccttatgaggtaggtgccatgattatcctcattttaaagaggagggaactgaggctcataatagttaaata

SEQ ID NO: 241870 - DNA, 201 bp, Homo sapiens
tgggttcttaaccctctattaaacacatattgtccaggttatagatgctctagccaggatttgaacctagttctggattagtccaatagctatgctttttyctctcctctaaactataagctagctcctgcctcttttctcagctaaattgccttctccctatacttactatgagttttcccctttcacatgattaaaaat

SEQ ID NO: 241871 - DNA, 201 bp, Homo sapiens
agcaaaaattacttaagaaatatagaaagtgaaagaaagaacatcattttttaagtcaaaaagaaaatttaaaagattgacagagccttcttccccacacyttaatgtcacaccaacaaggaccctgtatactaaccacggatactaacagctgaaagaactgcaagacacagattctttctgaggaagagtacttaggga

SEQ ID NO: 241872 - DNA, 201 bp, Homo sapiens
tattattcaggctttaaaaagaagggaattctcacacatgctacagcaatggatgaattttgaatacattacgctaagtaaaatgggccattcgcaaaaamtaaatactatattattccacttatataaggtacctagagtggtcaaattcatagagatgaaaagtagaatggtggttgccaagggctggagggaggggag

SEQ ID NO: 241873 - DNA, 201 bp, Homo sapiens
gagtgcaataagatgaatggcatgtggtttttgccctcatggaatccacacttgaaggaagaaatggatgttaagacagtaatgcaggtggcaagggctayactgtagagtttttgaggtcactgcaaagcaccaagtgcagcctctaaaccccctctgtgacttgtggaagtcgtggtctctaaatggttagcggaggca

SEQ ID NO: 241874 - DNA, 201 bp, Homo sapiens
cagtgaccaaccatggtggttatgcctttccccgtctcgtgctgtgtaaccctgtgaaatggtgggaggctgcaagttgcttgcattttttacctaaaagraattacacacatatatctatatgaatatatagatatataatggcctatgctgagggagggacatattagcgaagtaaaaaatttagcaatctttatcaag

SEQ ID NO: 241875 - DNA, 201 bp, Homo sapiens
ctgaaagacaggaagcaagtgattgcctgagctttattattgctttaagagaatttttagactatggctcaggaagaggaaaccaaggcggactccctgayttgagaatactaagctgagagtcctgggagaccaaggtggctacagtctgcagaacatactactctggagagttgcatagagagaaaaacctagagatct

SEQ ID NO: 241876 - DNA, 201 bp, Homo sapiens
aaaatatctaggatttaacaaggtaaatacacaatgtctggcacccaatcaaagattactggcatcaaaaggaggaggaaaatatgactgataatgagggraaaaaatcaaccaaagaagaccaactcagatttgactgagtatatttgaattaactttttttttttttttttttgagacagagtgtcactctgttgctca

SEQ ID NO: 241877 - DNA, 201 bp, Homo sapiens
tttaagctgaaacattagcagctgaagggcgccaaaacaccaaatatgtttgattagtgtctgaaagcaaagatcagtcatgatccaaggctgaagacctktgtaccctgggcatgactggcagaatctctgtgacagcagaagaggggcttcactttagttcaagaaacaaaaataataaacaaaggctgcccctgctgt

SEQ ID NO: 241878 - DNA, 201 bp, Homo sapiens
tactgaatcaccaggaggaaaggtctccttgccaaacctggtgtgtcttcgtaagccaatgcagtttctgcatccatgtatccatatccagtgaccaaccrtggtggttatgcctttccccgtctcgtgctgtgtaaccctgtgaaatggtgggaggctgcaagttgcttgcattttttacctaaaagaaattacacacat

SEQ ID NO: 241879 - DNA, 201 bp, Homo sapiens
gggtccttgggtcactcagacctgccttttttgttttgttttgttttgttttggtcaagagaggtcctctagattctgcctggctgagttccagccagacscctgctgttcactttaatactgatgcttctcttcttgctgatataattaccacaggaacctgagatcatgcaaaattctttcctggctcagagaaaagct

SEQ ID NO: 241880 - DNA, 201 bp, Homo sapiens
cagaatgtatggtcagacgaggacagctggactgtcatttccatctcttctccaagacggaaaatggagttttatcactttccatgccatatgaaaaaaayttctgaccaaaaaaccaatgagaaatccaccaagtggctgacagttcagcttcctttgctctctgggatgctgcactaatagcatttaattccagggact

SEQ ID NO: 241881 - DNA, 201 bp, Homo sapiens
actaaggatagctgatgggctttaaaaaaattcgcaaaaaaaagtctcataatgttttaagacagtttacaaatttgtgttgggccacacattcaaagacrtcctgggccacatgtggccagtgggccgcaggttggacaagtttgctttatagcaacccatcttccaaaagtgctccctctcatattttaaaattgtagt

SEQ ID NO: 241882 - DNA, 201 bp, Homo sapiens
tattaggaggtgggaaatttgggaggtgattagatcatgaaggtaaaacccctactggatgggattagtgccctcattttaaaaggccccaaagatttgcyttgcttcttccaccacttgaggacacagtgagaaatcaacatctctgaaccagaaagtgagtcctcaccagacatcatatctgccagtaccttgatcttg

SEQ ID NO: 241883 - DNA, 201 bp, Homo sapiens
cccagctccaagcacttacgagggcaccctggcatcccaaggtcagaatgtatggtcagacgaggacagctggactgtcatttccatctcttctccaagayggaaaatggagttttatcactttccatgccatatgaaaaaaacttctgaccaaaaaaccaatgagaaatccaccaagtggctgacagttcagcttccttt

SEQ ID NO: 241884 - DNA, 201 bp, Homo sapiens
agtacttagggaagcccatatcaagaggggaaactaatacactagaggaatttgaagctactggaacatacaactatagcaaaccttaaccatagcttaaytcccagccagagtgatataaatcctcacagaaaatatctatttacttcattttctattacctgatacaatatgaacagttttcaacagaaaattacaagg

SEQ ID NO: 241885 - DNA, 201 bp, Homo sapiens
cacaagtgtctgcaggatccagggcactttgttctttttcttagaagagactcttagaagatgaggaggagcagggagaggaggctaggagaaagaaatgrgaaagaaaaggatcactgaaaaagtaaattgctgaagaagttataaaatgatcaggtagaagtattgaccttcagcaagagaaggaaagacagacacatc

SEQ ID NO: 241886 - DNA, 201 bp, Homo sapiens
aaacaaaagagtgtgagaggagctggcattcattagaatattcagggagacaaacaatcgttaagacacccctggctgcctgccattttataccatggagrcatttacatcacagggcataaaccaaagtgggaagggatctggactgcataattacacaatgaattttagagggtaggatcttctcttttttctctattt

SEQ ID NO: 241887 - DNA, 201 bp, Homo sapiens
cagccacatctagagctgctgggacacagggcaccaagtccctaggctgcacacagtatggggaccctgggcctggcccattaaaccattttttcctaggyctctgggtctgtgatgggaggagctgccatgaagacctgtgacatgccctggagacattttccccattgtcttggggattaacattcagctcctcgttac

SEQ ID NO: 241888 - DNA, 201 bp, Homo sapiens
gaagtctccagaggggtatagactcttaacatgattttaacacctgagtggggctctgaaggacaagtcagattttaacaggtagcaaaagggggaaaaakctataccagggagcaggcatagcatgtacaaagatacaggtgcataatgtatggtgggatcgaaagacctggagaagtttgatgatattggaacactgaa

SEQ ID NO: 241889 - DNA, 201 bp, Homo sapiens
gtcagacccctgtagccactccctccatcagttagcatcttatggaaaggaggggtgagtcccagcccaccctattcccacttctccaacctccagtaggrtaccacagaatcaagatctgaactcaggtcatatttcttcaagctctttcttacccctccactgtgaaacgaccacccaatcagatggacaaacctaaac

SEQ ID NO: 241890 - DNA, 201 bp, Homo sapiens
ctggcccattaaaccattttttcctaggtctctgggtctgtgatgggaggagctgccatgaagacctgtgacatgccctggagacattttccccattgtcytggggattaacattcagctcctcgttacttatgcaaatttctgcaggcagcttgaatttctcctcagaaaattggtttttcttttctatcacatcgtcaa

SEQ ID NO: 241891 - DNA, 201 bp, Homo sapiens
tgccttgtcattgttttattttcttcatcatagactgaaatttcaggacaccaaggaacaaaagtcaatcaaaggatgtcacagatcccttcatccctatcaaagttagcatccagacaatagtcggaaacttccaattctgcctaaagatgggaagcaacgatttcccaaatgacctgagccccagactgacattgttta

SEQ ID NO: 241892 - DNA, 201 bp, Homo sapiens
gactgtcagacccctgtagccactccctccatcagttagcatcttatggaaaggaggggtgagtcccagcccaccctattcccacttctccaacctccagyagggtaccacagaatcaagatctgaactcaggtcatatttcttcaagctctttcttacccctccactgtgaaacgaccacccaatcagatggacaaacct

SEQ ID NO: 241893 - DNA, 201 bp, Homo sapiens
ccctggagacattttccccattgtcttggggattaacattcagctcctcgttacttatgcaaatttctgcaggcagcttgaatttctcctcagaaaattgktttttcttttctatcacatcgtcaagttgcaaattttccaaacttttatgctctgcttcccttataaaactgaatgccttcaacagcacccaagtcatct

SEQ ID NO: 241894 - DNA, 201 bp, Homo sapiens
ctgccttcaccagctgaggaggaaatccctctaacaccgtccaccctgtggggaaatgccggggagggagtctctccctctcttatggtgctttaccccaycagactggggaaagacagggtcactggacctcgagacaattgtggggcccgggtgctaaagacccacaaagacctcaatctgtcttgtatcctcatggac

SEQ ID NO: 241895 - DNA, 201 bp, Homo sapiens
caggttaaagtctcagcagagtagatatttagaaagttgaggagggtggcaaggcttcctgtgtaatcagaggtggagacatgctgtgtttcattaggcayggagcgaactttgacatgcaggtcacaaaaatagaacaggctactttataatgggattgtgtactatcatagcccctaccatacatgaacacttatagat

SEQ ID NO: 241896 - DNA, 201 bp, Homo sapiens
ttgtatgattctctaatatgacctaaggaatcaatcctcctgacaccttgttcctttacacttttgcattcatgttattctgtcttcctaaaatgcccgtycctttccattttctactgtgtgaaatcctctctgtccttcaaggtccagttcaaactcatgtcccctgtatagccttcttcagatgtgcctgcagaatgc

SEQ ID NO: 241897 - DNA, 201 bp, Homo sapiens
tttgaggtgttccaaataaggccatgtgacctagtgggaaaatcccaacgtattaagccagaaggacatgtattcaaatcccagctcttccacttactagygtgtgatttggagcaagttagttaagttctctgagcctcagtttcttcaactgtaatatgattctaattcttaccctcctaggacccagatgttaatcag

SEQ ID NO: 241898 - DNA, 201 bp, Homo sapiens
gtagctcaatgctggtggtcaatgtattgctctcaaggtcttcaggataattccttcagacaaaagcaggattctactcctgaggatggcagatactatayttccagggacaggctttactcagccacaaagctcgccatttctttgggcttaaagacatcaccgcacaaagcaacaacgtaacattaatcactgcaatca

SEQ ID NO: 241899 - DNA, 201 bp, Homo sapiens
cactatatctcaatacttgtgagtacaagtttaggacttaaaccaactgaattgaaatcccagctgttccatcaaccagatatgtgatcttgatcaaattratttaaaatgatttaacttctctaagccctgtttttctcatcagtaaggagggaataataatagtccctatgctgtagaaatataaaaggaaacaagtgt

SEQ ID NO: 241900 - DNA, 201 bp, Homo sapiens
cgcactcaaagaggaaccgaatgtacagcctccagctggcaaagccagataacttcttagttgtaacttttgtgtatgtccctggccacagcagccagggrtatgctgaaagccatcagtgccatcattgctgcaagctcagactctcttttctctccctccttggattctaaccccttttgaggtgttccaaataaggcc

SEQ ID NO: 241901 - DNA, 201 bp, Homo sapiens
tcccaccatattctctgctcaacaaggtctttgctaacctccttactccgagatgtactctcttccatctttctccattattttaccctcattgatttttytttgtagccctaatcattcattaatattatattacatttgtaaaattattttctatctctccccagtagaaggtaaattccatggggaccagggctgtat

SEQ ID NO: 241902 - DNA, 201 bp, Homo sapiens
agaaccatggactggcccacaggggacatctttgggtttcgtgttaggaggagccttacaaggacagagccatcaggccatctcatcctcctaacacagtkagatccacaaagcagggactacatcacccttggtcaccactgtgcctggctgtggcccctgctcttaaaatgcctgtggatgaactggagtagtgggctc

SEQ ID NO: 241903 - DNA, 201 bp, Homo sapiens
ataaagcagttggcttgtatttaggtagcatgattatgaaagagatgtaactttaaacctagtgacacactgagtccagtggagtgagcacgctattggcrgccacagcttgagacactatagatcctcatcttctcactccatgtcaaatgctcatgaacagacagcattgctggaattatttaaagtgctttatttcct

SEQ ID NO: 241904 - DNA, 201 bp, Homo sapiens
aggagactctaaaagggcccaggcaagaccctggtgatgaggcctaggatggtggcagtggagatggagagaagaagatgaattacagacacctttaggayatagaatcaatagttcttgataatggagcagatgtgggaggtgagaaatgacaaaatcaaatgatttggttccccctctaaccttcaagggaaagtaact

SEQ ID NO: 241905 - DNA, 201 bp, Homo sapiens
gcgatggtcatttccacatacaatgggagcctttggaagttttaagtgtaacctagtcaattggctactgatagagagtggataggaggatcatgcaacamaaagccaggcaggagactctaaaagggcccaggcaagaccctggtgatgaggcctaggatggtggcagtggagatggagagaagaagatgaattacagac

SEQ ID NO: 241906 - DNA, 201 bp, Homo sapiens
tggctctctccttgcttccccaaccatgtgcagccactccaaccttaccatcctattctccagcaattctgggcacttttttacctccccaaatgcttccygcattttcttgactttctacccattgcttctttaaaacactttccccatccttgcttgcctaacttctatacattattcatgaatcaacttaaatgttac

SEQ ID NO: 241907 - DNA, 201 bp, Homo sapiens
cactttccccatccttgcttgcctaacttctatacattattcatgaatcaacttaaatgttacctcctcgagggagccttcctggattccctaccatctayagattctactctaatgcattatctttacagcatagtatagttagtgcttaaaagcgcagtctttgtgttagtccattctcatgctgatatgaagaaatgc

SEQ ID NO: 241908 - DNA, 201 bp, Homo sapiens
acatccattgcagataagtcatgaatggctctaaaagattgatatcatcaagaaactgaaatcctctgtttgagaacaaagcctccatggaaaggttgtcwtctggccttggcactcacccatgcctttctgaggaaattattacaggtcttttggaaaccctcagttctgacatttctcatggagatctaaacaggattg

SEQ ID NO: 241909 - DNA, 201 bp, Homo sapiens
attggcacaggcagaatctagaagccatgtggtggagaaaagattttttctgacctaaaattgttttagtttgatccccatttgtttattacatcggaaakgttcatttgtccacacagtcctcataaataaccagaattgtaaagactgatgatagtggccatatatcaattttctctcatatatatacaatacttaata

SEQ ID NO: 241910 - DNA, 201 bp, Homo sapiens
cttaaaactgttttttcttattacattatgaaggcagtctagaagtctgaaatcaaggtgctgggagtctcatgccctctccatagggtctgggggagaawctctccttggcttttccagcttctgttaggcccaggagtttcttggctgtggccacttggctctaatttctctctccattttcacacagcccttcttaaa

SEQ ID NO: 241911 - DNA, 201 bp, Homo sapiens
ttgattagcaccacgagaatggactaatacaccatacaacactgacagtctagtagaggacaccaacattatcaggtaatcacacaaacaagtatgaaatyacagggggcaataatgctgtgaaaggcaggcgcacatccctgtgaaacctaatcattctctgatcacttggcttccaacaaaatgcctcccaaaatattc

SEQ ID NO: 241912 - DNA, 201 bp, Homo sapiens
agtgtatttaacaacagaaatttatcttctcatggttctggaggctgagaagtccaaggtcaagatctggaagggtttgttttctgatgagggctcttatytggcttgcagatggctggctacctgcttgctgtatcccaacctggcctttttttagtgtgtgcatgtggagagagaaagagcgagtgttctcatgtctct

SEQ ID NO: 241913 - DNA, 201 bp, Homo sapiens
ttcctggtatatgataagcaccatgtaagtgttagctagttttattatgataacttatttaataagccatcaaatattaagtgcctgccctgtgccaaacstgttactacgtggtaagtgtattcgtatctccacctgtcgtacataacaatatgccatagactgagtgtatttaacaacagaaatttatcttctcatggt

SEQ ID NO: 241914 - DNA, 201 bp, Homo sapiens
gagttttttgataatagatttagtttaataagtaaaatattggaattattctaaagttatttacttaaaacaagacataattaaagaaatttaaattctawccctattttcccacaccattcccttcctttgtcatttcatagattaaaatataaaccattttataaaatgtaaaatggtttatatgttaatgttttaata

SEQ ID NO: 241915 - DNA, 201 bp, Homo sapiens
taacttcatcaatcttatatctgcagctcctttttctcttccccaaaattccagttttaatgacaccaacacagttactcatttactttatcttgtgattyactataatagtctaagtatattaatacaattgttaccacctataatgtgattattgtaaacagttttgacattcttgttgagctctttttatccttaggg

SEQ ID NO: 241916 - DNA, 201 bp, Homo sapiens
agtgggcagagctagaaaatctatacatcatgagttcccagtgtgatacttccacttcatagtgaggaccacaagcttttgacttaacttcatcaatcttrtatctgcagctcctttttctcttccccaaaattccagttttaatgacaccaacacagttactcatttactttatcttgtgattcactataatagtctaag

SEQ ID NO: 241917 - DNA, 201 bp, Homo sapiens
cagaggctagagaattgagtgacatgaaagaataaaaggatggtactggaatgtgtctatgtcctcaaaataagcctgatggtgatggtggatggctggawggatggatggatggatggatggatggatggatggatggatggatggatggattcatggattcatggattcatggattcatgaatggatggatgactcctc

SEQ ID NO: 241918 - DNA, 201 bp, Homo sapiens
tctgggcaaagagtgggacacagaagggcagttttttagaggccaaaggagaatagccagcaaagttggtccagttaactccaaattatcctgtgtgactrgaagcctggaagtacacagggaagaaataagagtcaggagagggaaccagagaggagagggaaagcaccaaatcccaaaggctcattcatagtctctgcc

SEQ ID NO: 241919 - DNA, 201 bp, Homo sapiens
tccatcctgtcaaatttattgacgtaaggagtgaagataatattgtatagctattaaagattgactaaagggcccagcacaggacaaggcccacaatctaygttttaaaatatttaaagagaaaggaagcattcttccaatagactaacaggaacaagatttacctttccatctgaaataactaaaaacaaacaaaatata

SEQ ID NO: 241920 - DNA, 201 bp, Homo sapiens
ggaaagcaccaaatcccaaaggctcattcatagtctctgcccagtgctttagtatggaggcagcctgtatgaggacggcagtactagtggctgccattttsggatatttactgtgtatcaggcaaatactaagtattttgtagacagcgcttccaatggcctcgtttagcctttatagccacccaggaagaatcctcatgc

SEQ ID NO: 241921 - DNA, 201 bp, Homo sapiens
aatgatcccagccagttgaggggggaagaagtgcacttcccttcaaccctgtgagtgtccatgagaatctaatttagcagaggccttccctaagagaaggmtgcctggctcacagccctttagtctctcccctagaaggactgcatattattagtctgtaagctccaagagggcaggatatgtgtttgtttggtccacata

SEQ ID NO: 241922 - DNA, 201 bp, Homo sapiens
tgcctggctcacagccctttagtctctcccctagaaggactgcatattattagtctgtaagctccaagagggcaggatatgtgtttgtttggtccacataygtataaccctagcacactgcttgacctataggaggcactcagtaaatatttgattactctacagatgaataagaagcagcaccgtgatgaataaatgcga

SEQ ID NO: 241923 - DNA, 201 bp, Homo sapiens
gttgttaatcatatgagctttccagattatctctatctttgctgactttttaatctgtttggtatataaactgctgaaaattgttttaaaagagaccactrtgactatagatttataaataattacatagacttttatcttattttgcagtgtatactttgaggctgtgctattaaatgtgtagatgttcagaatttttat

SEQ ID NO: 241924 - DNA, 201 bp, Homo sapiens
ctgagctctgaatctgaggatagctgctgagttcagccagggagaatcattagtggggtctgctttttcactctgtttcaaaagacaagtggatttgaagscttccagagaacattgaatggattaagtaggcaattggatccatttgctttgactcatcatccttcctttctctgaagttcctggggtagactaaggaag

SEQ ID NO: 241925 - DNA, 201 bp, Homo sapiens
taagaaattccatgtattataacccactacttttcacgcaatagcctttctcagtacacacaactagaaaacttaataagtaagtttggaatagtatttaraataacacatcctaagtggcaaattatgagtgttttcaaagttctaagtatagatatatttttcttgccaagtgaatccagaaagtaaattttggctcca

SEQ ID NO: 241926 - DNA, 201 bp, Homo sapiens
ttctcaatagagagagtgctctagggatgcatgtaatttttaaaaatctctcctgctaataacctttttcttggacaaacagaactttcaaagaagtatccgatgcaagggatgggaaaggaagaccaggaatagaatttcagtgttgctcagacaattgatgccaatgacccaacattctgtgtttccctgcagagtgat

SEQ ID NO: 241927 - DNA, 201 bp, Homo sapiens
atttttctcagagtccaattcagtaggtgtgggtggggtcagggcagctgcacttttatgaaccttcaaaacatactgatgaatggtcagatcacagaatmcatgggatagccttataaatatgtccatggacttgaatttcagggaggaacatcttcctaactaggtcctgtgaatgaatagctttcttgtgtctctctt

SEQ ID NO: 241928 - DNA, 201 bp, Homo sapiens
cttccaactggctctggggtctgatagactagatactggcccttctttgctgtataaccttgagaaactacttctccgagacttcattttctcagttgttmatctacaatgagttatttctgccatggagttatgttgaatgttatatgaaattatatatgaagctcttaactcagtccctggcccacagtagttgcttca

SEQ ID NO: 241929 - DNA, 201 bp, Homo sapiens
acctatgaacaagatagccttactctgaaaatagcaaggaagcagtagccagtgagtccctgcattctagagcaaaactcactggattctctatttgcaayctgtgaaggtgtggttgagttactcagttattcaaaccctcagtttctttatctacaaagtgaggatattataaacaagaccttcttcaagagttgcaat

SEQ ID NO: 241930 - DNA, 201 bp, Homo sapiens
cagagtacagttacagtttaggcaattaactagataattgttttagttataagcatcttctacatcttgtagaaatgtaagaatctttcagtgccttttascttacagtcaaaatggagagtctaggaaagcactgtggttttcctccccctcacctaggaagagttcttaggactatcccaggcatggaaacatggaagg

SEQ ID NO: 241931 - DNA, 201 bp, Homo sapiens
gtttacaaagtgtttttatatttttgaagcccaaaatatcaagaaacagatggcacactcaaggctgttgactggagtgagttgagtgaagggactgtctyggaaggtgtatgtaggttgtccagagctcctccgtgtgcccctcaaaatcccttcacctcttctctctgctcttcctgaggggtcacgggtgagagggct

SEQ ID NO: 241932 - DNA, 201 bp, Homo sapiens
taaccccgctatcaaggaaggacataacattaggaaatgtattaccaacctagggtcttctgtcacccctgggcaggtgtcctcccagccttgcacttctsaagcccatcaatcttaaacgcatgttagcatgtttccttgtgagtcaacttaacatgattaaatccacatttgttcagaggtcagtttgcttgggaagaa

SEQ ID NO: 241933 - DNA, 201 bp, Homo sapiens
ggtctcagcttttctctttcatttttctaaatcacatatctcctagtcattttcatgatcttattgttaaaatgatttttaaagatttattctgttatagyatcaggctgctcttgagtttttactgctctagtaagtcccaacatagtatgaatatcttggcctcctccttcagatgtgaaggacaggtttcaaagaggc

SEQ ID NO: 241934 - DNA, 201 bp, Homo sapiens
ggatcacgaggtcaggagatcgagaccatcaaggctgaggcaggagaatagcgtgaacccgggaggcagaggttgcagctccattgcactccagcctgggmgacagagcgaaactccgtctcaaaaaaaaaaaaaaagaaaagaaagtgcagagccaacgatgcccactctggtcttatacatgtgtctctccatttacct

SEQ ID NO: 241935 - DNA, 201 bp, Homo sapiens
tgtaataggaggtaggaactattatccccattttctagatgaagaaactgaggctcagggaaggaaagaaatttacccatggtcacaaagctagtgagtastgagctcaaatccaaacccaggtatgcgtaacaccaaagccagtgttctttcccctccacctcactgtaagtacatgcagagaagggaaactgtgacaaa

SEQ ID NO: 241936 - DNA, 201 bp, Homo sapiens
gctggaggtccaggcctgagtatctcatcaatgtcaagcaggctagctctgagtcccgggaaacccgctggctcatcatggctttatgagttgttgaaaaracactagcaagggcagctgtcccaggtgctggagagtccacacagcataaatcccatctctgtcactaactagctgtgtgacctacgccaggttacccaa

SEQ ID NO: 241937 - DNA, 201 bp, Homo sapiens
agttctagaccctgagcaagtagaataattaaagttcttcccaaccagactctttgttttttctgtgagtcttttgcaaccattcaaaggtagaagtgatwaaaaattttcttgtatatttgtaatatctggcatcttatttaatagtaccaaccagcctaagtatttgatagtatttttttcttttttgtgagcaagaaa

SEQ ID NO: 241938 - DNA, 201 bp, Homo sapiens
gatagaatgttaaatggtgaaagaaactttataagctagtagttcctttttttggtagtagaaccccagtatatagtacaaaaataaaaaatgtggatggktgcagtggctcatacctgtattcctggcactttgggaggccaaggcaggcagatcacttgaggtcaagagtttgagaccagcctggccaacatggtgaaa

SEQ ID NO: 241939 - DNA, 201 bp, Homo sapiens
acattcaatacatttggttggattacaccttgctgttttacatcaatcatgcatttcagagacttcactccctgatcaccctgattatatttggatatttyttagtttcctcagccacatatttattgacagagcatttcttaggctaggctgcttttatgggtggttacatttattcatttaattcattaacttgaattt

SEQ ID NO: 241940 - DNA, 201 bp, Homo sapiens
gttcatgccattctcctgcctcagcctcccaagtagctgggactataggcacccgccactatgcctggctaatttttttttttttttttttttttttttttgtatttttagagagacggggtttcaccgtgttagccaggatggtctcgatctcctgacctcatgatccacccacctcggcctcccaaagtgttgggatta

SEQ ID NO: 241941 - DNA, 201 bp, Homo sapiens
gaatttcagaagcatctgaaaaggatgcttcagatgtattttgtacttttagttaatccttcatgtaattttgaaatctggaaatccttttgacatcccamatatctatttataaggttgtagctcctccaaatatgccccgtcttactaccatgtgatgccaaagcaaaattccactcttgttggtgataaaagatcaga

SEQ ID NO: 241942 - DNA, 201 bp, Homo sapiens
ctgtagtaatgccttagaatacaatccagatagagatcctggaggtgagcattagtgaattttttttcagggggttgagttggggggcagctaacacttasggttgatttttgtgtcaggtgctatattataaacataatcaaaatactatttaatcctcacaacaaccattttacaaatggtaaaaatgaagtttagaaa

SEQ ID NO: 241943 - DNA, 201 bp, Homo sapiens
aggtagctatgcaaaagatgataccagcctcccaaagagctgtgacatcacctgggcaggcactgtccaccgttgtgaaaccactcctgcaaaacactgtkgacaagattttagaagccctgcagagagtatttccacatgcagaattcagaacaaataaaacattagactcaggtataaaacttgattgaccatttaaag

SEQ ID NO: 241944 - DNA, 201 bp, Homo sapiens
ttgcttgaattttaggttcctgattatgtcactgtaataaagcaaccaatggacctttcatctgtaatcagtaaaattgatctacacaagtatctgactgygaaagactatttgagagatattgatctaatctgtagtaatgccttagaatacaatccagatagagatcctggaggtgagcattagtgaattttttttcag

SEQ ID NO: 241945 - DNA, 201 bp, Homo sapiens
gatgatagagcagagtaagtgagggataatggaggaaaggaggccaaggttatcaagggaccagattatgtccccagtgactctgtataataattgattasagaacctccaagttaaataagctaggaaatgaatattaagtatatattagaaactctttgagtgggggaggtccttaaaggtttccagtttagttaatta

SEQ ID NO: 241946 - DNA, 201 bp, Homo sapiens
cccaacaggattacatattttgtgtccaccaaaagacatgtacaagaatattcaaagaagcaatattcataatattaggttggtacaaaagtggttgtggytttgccattaaaagtcatggttcaacactgggggtaactcaaatgcccattaccagtagaatggaaagatatgaattattatacagtgagaatccttaaa

SEQ ID NO: 241947 - DNA, 201 bp, Homo sapiens
cggtaattccccatttctatcttcccacagccctcggtaacttctgttataatttggctctgaattatttattctaggtacctcatataatttgaatatgwatttgtcttttgtgtcttatttagtgtaatgttttcaagttcatccatgttgtatcttgtgtccaaattttattcctttttagggtgaatacttttccat

SEQ ID NO: 241948 - DNA, 201 bp, Homo sapiens
ctatacatgttatcagctgcaaccctctggacataaatgacttaaaatatgaacagcaaaatattccatagtagatatttactagtacttcatggaaggcrataagcacctttgtaagtatttagatgaagagcaaaattatcttcatacatatttgtatgccatatatatatatatatacaaatatatatatatatttct

SEQ ID NO: 241949 - DNA, 201 bp, Homo sapiens
gcggtggctcacgcctgtaatcccagcattttgggaggccagggtgggcggatcacgaggtcatgtgatcgagaccatcctggctaacacggtgaaaccccatcactactaaaaatacaaaaaattagccgggcacggtggcggcacctgtagtccagctactcgggaggctgaggcaggagaatggcgtgagaccaggag

SEQ ID NO: 241950 - DNA, 201 bp, Homo sapiens
gcggcgaccacagccaaagcgggcgtgagtacgggcctgaggcgggctcccagggcggttcccggggggactgccggcagcccggcgctcggaggggcctrggggtgggcggcgccggtcagggtgacagttgtcgggggagaagtgtggtcgaggacgagtaaaatggaagctctcgggatcggaggtgcgggtcggatc

SEQ ID NO: 241951 - DNA, 201 bp, Homo sapiens
tacttttaaaatactactaatatggcatcacaatgatataattatgcctcttactcccttagtagtttgtcagctcattgtggcaggactctaataatccyttttttcatcctgagtactcattggatatctatttaaacaaaataacctgttggtatatttgaaacatattacacattttcattagttcaaaactagtaa

SEQ ID NO: 241952 - DNA, 201 bp, Homo sapiens
gaagtcgttatagtggtgtaaaccagtccatgctgtttgacaaacttataactaagtaagtaaaaattccttagatcaagatgatttatctgtcagagacwttttgttggggaggaatcatggatttcaaccagcccaaacatttaatgcattctactacgtaaagcgtacaggagaatgattatcagaggtctttgtgac

SEQ ID NO: 241953 - DNA, 201 bp, Homo sapiens
aatatagagaatgagcttgaagactctaggaagactacagcatgtacagaattgagagacaagattgcttgtaatggagatgcttctagctctcagataayacatatttctgatgaaaatgaaggaaaaggtacgtctttttcaattaaaataatttactgattttaaaagatatttcaaagtttctaaacacctaattgc

SEQ ID NO: 241954 - DNA, 201 bp, Homo sapiens
ctgtctgatttcaccaccgtgaatcactttatggtgcctgtggcatcttggtatttttatttgattatatgtctttaatttcataataaagcttcagatayaaatatttctaacacttaagttctggacctattacagaaaatgaggaaattaaaatacatatcttaagattgctccggttgaaatttagatttttttttt

SEQ ID NO: 241955 - DNA, 201 bp, Homo sapiens
gtaatcccagcactttgggaggccaaggcgggtggatcacgaggtcaggagatcgagaccatcctggctaacacggtgaaaccccatctctactaaaaatrcaaaaatattagccaggcatggtggcaggtgcctgtagtcccagctactcgggaggtggaggcagtagaatggcacgaacccgggaggcggagcttgcag

SEQ ID NO: 241956 - DNA, 201 bp, Homo sapiens
aagttgattgattgttgatggccattactaccctataagtttactgggtaaaagagattttggtcttattactcttaaatatttgctaactatattccgasgctgatttttaattttttttttaaccatggtcatgctaatagagttttgtgtttctttgtttggtcggctggttcttttcttcccctggttgctttggat

SEQ ID NO: 241957 - DNA, 201 bp, Homo sapiens
gtatttctaaagcagtctgtacatacggttttttggtttttagaagaggaggcatgaaacccattttaaactcaagaaatcaattttaatggattaggtaktttggctaaattcatggaactggaatatctttggttcagggcgaaaaaccccaattagggtaaaatttgtttgatgaaataattgttttggctgggcact

SEQ ID NO: 241958 - DNA, 201 bp, Homo sapiens
atttttttttttttttttttttgtattttaatagagacggggtttcaccatgttgcccaggatggtctcaaactcctgggctcaggcagtccacccgcctyggcctcccaaagtgcgtggattataggcatgagccaccgcgcctggctatattaacatttttaaaacataaaaatattttatatttgtagttttgtttac

SEQ ID NO: 241959 - DNA, 201 bp, Homo sapiens
tctttagcctgcctgataaagaggtaagaatttaatgtcactcaaattttgacaaaatatattgctgtttattaataataagtcttggtatagtaaaaatktggagattcttgagttttgtatcatggtcttgtcaaatgatagtaaacaactcaaatggggacaaatttttattcttttctttaaatataataatgcctt

SEQ ID NO: 241960 - DNA, 201 bp, Homo sapiens
ctcgatctcctgacctggtgatccacccacctcggcctcccaaagtgctgggattacaggtgtgagccaccacacccggctgcctcttaaattatcttaawggaacagaggtaatgacttgtaggaattagcattccaaattacaagttactaatgatttctggaggggacgtagggttagagattatggtaatacttttg

SEQ ID NO: 241961 - DNA, 201 bp, Homo sapiens
aactctgtctccaaaaaaaaaaaaaaaaaaagaattattactattattttttaatataaaatagatttttaattcttaaaaaaaaaatagacaaagtctcwctgtgttgcccagtctggtctcgaactcctgagctcaagtaatcctcccacctcagcctcccaaaatgctaggattataggcatgagccaccatgcctgg

SEQ ID NO: 241962 - DNA, 201 bp, Homo sapiens; identical to SEQ ID NO: 47501

SEQ ID NO: 241963 - DNA, 201 bp, Homo sapiens
acatcaatcatgcatttcagagacttcactccctgatcaccctgattatatttggatatttcttagtttcctcagccacatatttattgacagagcatttyttaggctaggctgcttttatgggtggttacatttattcatttaattcattaacttgaatttttcctagtctaatctcaggctgacctttttttttttttt

SEQ ID NO: 241964 - DNA, 201 bp, Homo sapiens
ggtgcaatcttggctcactacgtacaacctcagcttcccaagtagtaggactacaggcacaggtcatgtcaccatgctggctaatttttttttttttttttaatagagatggggtttccctatgttgcccaggctggtctcaaactcctggcctcgagtactcttcccacctcagcccccaagttctggggttacaggcgt

SEQ ID NO: 241965 - DNA, 201 bp, Homo sapiens
ttaataattttgagaaagtaggaatgaaatagttaatggcattgacatgtatctgataacacaagctcaaaacctaagtcatgaggttgatgcatctgctscttaaaaatctctatgcttcccattaaaacagactaaagttcttaaggtacacaaagtctttcatagtatagccccaatctatctttctaagctcatttt

SEQ ID NO: 241966 - DNA, 201 bp, Homo sapiens
tgggaggccaaggcgggtggatcacgaggtcaggagatcgagaccatcctggctaacacggtgaaaccccatctctactaaaaatacaaaaatattagccrggcatggtggcaggtgcctgtagtcccagctactcgggaggtggaggcagtagaatggcacgaacccgggaggcggagcttgcagtcagctgagatcgtg

SEQ ID NO: 241967 - DNA, 201 bp, Homo sapiens
ttaacataagatgaatgcaccccagactcatttcaaagttatttaaataatgaagtcctacaggtaaaatctatgtggcagtcttaaatactgaactgaakgtttattttcactatcaaatatatacctgaatattaatattcttaaggttgtttactgaaaaagtaatgaaatgtttctttagcttattccatattgaaa

SEQ ID NO: 241968 - DNA, 201 bp, Homo sapiens
ttttaattttctaattaaatgaatcatgaaattggtttctaatttttgttttaaaagtctgctttttaaatgtaatactaaaatgttaatgtattgttttrcagaggttgtttgttttatgggccacctggaactggaaagactctggttgccagagcacttgccaatgagtgcagtcaaggggataaaagagtagcattt

SEQ ID NO: 241969 - DNA, 201 bp, Homo sapiens
tgctgggattacaggcatgagccaccatgcccagccaccatcagttttttgttgttgttgttgttgttgtttttgattttgtttttgttgtttttttttttaaaagaaaacatcttatttgtaaaaaaaaaaaaggtatgatttcttaatttctattcttggcataaattttctttccagtgcaaccaaaacttacggaac

SEQ ID NO: 241970 - DNA, 201 bp, Homo sapiens
tttaaagtaggtgatttcctcccaaatgtgaatattatgtatagtgtaatattgaaaatagtttcaaattacagtcccaaatactttttttttttttttttagatagaggcaggggcttactttgtcacccagcaggctgcagtgcagtggtgcaatcatggctcactacagcctcgtcctcccaggctcaagcaaatctc

SEQ ID NO: 241971 - DNA, 201 bp, Homo sapiens
aggagaatcaggagaatcacttgaacccgggaggcggaggttgcagtgagctgagattatgccactgcactccagcctgggtgacagagcgaaactccctytcaaaaaaaaagtaaacctgctccgagtgtcagtgtgttgtaaagcatggtttaaaaatcttggttacagaagatttaactcatgatagaaacaaatgtc

SEQ ID NO: 241972 - DNA, 201 bp, Homo sapiens
aaaagctaaagacaccgagtactcctgtggcttgcagcactcctggtaagtactcaagtagttttcatttatgaaattataactttattcttttctaatgycattaactttctcccttattttcctttatttgtgttaatgcagtgaattacattgattttgttactattaagacaactttgcattcttgaaataaatcca

SEQ ID NO: 241973 - DNA, 201 bp, Homo sapiens
attagtttaatctttggatcaagtgtattctaggccataatgcttcacaatcaaaggatatttgaagagtttatgtggttctgcctacactcttaactagytttatctatttggaaacatgtaccgggttagtgtcctaagcacatgtagactttaagagcagggtaacgcattttcctttcctgcagacaattaactttg

SEQ ID NO: 241974 - DNA, 201 bp, Homo sapiens
gtgtggtggtgcaaacctaataatcccagctccgtggaaggctgaggcaggagaatcaggagaatcacttgaacccgggaggcggaggttgcagtgagctkagattatgccactgcactccagcctgggtgacagagcgaaactccctctcaaaaaaaaagtaaacctgctccgagtgtcagtgtgttgtaaagcatggtt

SEQ ID NO: 241975 - DNA, 201 bp, Homo sapiens
atccttttgacatcccacatatctatttataaggttgtagctcctccaaatatgccccgtcttactaccatgtgatgccaaagcaaaattccactcttgtkggtgataaaagatcagacccagagcagaatgaaaagctaaagacaccgagtactcctgtggcttgcagcactcctggtaagtactcaagtagttttcatt

SEQ ID NO: 241976 - DNA, 201 bp, Homo sapiens
cactttgggaggccaaggcaggcagatcacttgaggtcaagagtttgagaccagcctggccaacatggtgaaatcctgtctctactaaaaaaaaaaaaaawttagccgggtgtggtggtgcaaacctaataatcccagctccgtggaaggctgaggcaggagaatcaggagaatcacttgaacccgggaggcggaggttgc

SEQ ID NO: 241977 - DNA, 201 bp, Homo sapiens
cggcctgtgtggactcccagctcccaggttgagtccagaaccaggcaaggtggagctacatgccccaccccaccctcctgtgcaagccagacccacttgcsgggggaaatgacaggtgtctctttggagcagggcatggcagagcaaggaggtgaggggaggagatagccacgagaaccagaaagtgcagaatgagcctcc

SEQ ID NO: 241978 - DNA, 201 bp, Homo sapiens
gaaacattttcctatgaaaatggattatactgacttgcctcagcccctcttttcctcttttttttttaaattttttatttccgtaggtttttggggagcaggtggtatttggttacatgagtaagttcttcagtagtgatttgtgagattttggtgaacccatcacccaagcagtatacattgaacacaacttgttgtctt

SEQ ID NO: 241979 - DNA, 201 bp, Homo sapiens
tttttaaaagaaaacatcttatttgtaaaaaaaaaaaaggtatgatttcttaatttctattcttggcataaattttctttccagtgcaaccaaaacttackgaaccctcttcagcactgttattcagaacttggagttctattgctggataaaaaattcattcacaaataagctgtgcaattcgatcaccttgaagttttg

SEQ ID NO: 241980 - DNA, 201 bp, Homo sapiens
attcatctccagaactttttcatcttccagaattgaaactctgtacccattaaacacttactcccagttcctctctcctcctagtccctggcaaccactgytctactttctgtctctgaatgtgactgttctctgaatctcatattcctagactaatcatatttgtcttttatgacttgcttatttcacttagcatatctt

SEQ ID NO: 241981 - DNA, 201 bp, Homo sapiens
tactagtacttcatggaaggcaataagcacctttgtaagtatttagatgaagagcaaaattatcttcatacatatttgtatgccatatatatatatatatwcaaatatatatatatatttcttttttttagaacctcgtcaccagagaaagcccaacatattttatagtggcccagcttctcctgcaagaccaagataccg

SEQ ID NO: 241982 - DNA, 201 bp, Homo sapiens
cttgaacccaggaggtggaggttgcagtgagcggagatcatgccattgcattccagcctggacaacaagagcgaaactcagtctcaaaaaaaaaaaaaaaataataataataataatacgtggccgggcgcaatggctcacacctgtaatcccagcactttgggagaccgaggcaggcagatcacgaggtcaggagtttga

SEQ ID NO: 241983 - DNA, 201 bp, Homo sapiens
taaactgatcagttttcagagtagtagggcatagaattatagagttgttaggaacctttgactttgatttctatctttggtttgtttgtttgtttgtttgkgatggagtcttgctgtgtcgcccaggctggagtgcagtggcacgatctctgctcactgcaacctccacctcctaggttcaagcgattctcttgcctcagc

SEQ ID NO: 241984 - DNA, 201 bp, Homo sapiens
ttttttcctaaatcactgcccgtttttctaaactgatcagttttcagagtagtagggcatagaattatagagttgttaggaacctttgactttgatttctrtctttggtttgtttgtttgtttgtttgtgatggagtcttgctgtgtcgcccaggctggagtgcagtggcacgatctctgctcactgcaacctccacctcc

SEQ ID NO: 241985 - DNA, 201 bp, Homo sapiens; identical to SEQ ID NO: 47496

SEQ ID NO: 241986 - DNA, 201 bp, Homo sapiens
ttcatttttaagcaagataagagtctgctatgattcttgctgagtggtatgaacaactcttaccccgatcatttttctatcccttattgtaggttaagtcyaagattatttatatttattctactgatctgctccccaaattttctatttagaattgttgtcatttggatcttctggagcccttgacagtagatttgtttg

SEQ ID NO: 241987 - DNA, 201 bp, Homo sapiens
agaggagttccgtaataacagcgcagtgaataataccaggttgcataatgtggagggatgaagaccaacatttcatgtacgccccccgcttccaagcctcrtcataaccctttgagaatgcgtagttgtgctatctctttgacagatgaagaaacggattcaaaaaggtaaacagtaaggggtagatctaaaattggaact

SEQ ID NO: 241988 - DNA, 201 bp, Homo sapiens
aggactcccacataatttttttttttttttgcccacattgttgagtctttcttgctgcctagtacttatttggagagaatgacaagccgttcactatgcamatcaaagattctcttataccacttataagattgtcttccaagtttcttaggaaatgttttttcctagtattgtccccatccaccccttttcttgttttgt

SEQ ID NO: 241989 - DNA, 201 bp, Homo sapiens
acggcggagggattctgggcgcgcgcgctgcggccgctggcgcggagcttgtggcgccagaattcggagcgcggaagagccagagctgcgagcgcctggarctggatctctctccggtcgcgcacgccgaggccagtagggagagaagatggtggttctccgcagcagcttggagctgcacaaccactccgcggcctcggc

SEQ ID NO: 241990 - DNA, 201 bp, Homo sapiens
ctaataatcccagctccgtggaaggctgaggcaggagaatcaggagaatcacttgaacccgggaggcggaggttgcagtgagctgagattatgccactgcmctccagcctgggtgacagagcgaaactccctctcaaaaaaaaagtaaacctgctccgagtgtcagtgtgttgtaaagcatggtttaaaaatcttggttac

SEQ ID NO: 241991 - DNA, 201 bp, Homo sapiens
tactaacttgtagtttcttggggagatacaaaatgattctgcacaaaaagcagtttttactaacttgtaatcagagaatactctttggaggaatttaaatkggagttttgtaaagaaaaacttagatggctttcttaatttttcttaaaggatgggtcatcagttaaggaagttgaaacctaccaccggacacgtgcttta

SEQ ID NO: 241992 - DNA, 201 bp, Homo sapiens
tttcaaaggatgtaatttctgtcatcttttgatgttgacattaaaaagaataaaactattatgtcagactttacctgtatccactgcagtctaaaaaccarttgatatgttttgaaacatttaaaaataataacatgagcaaactcttagcaaagtttaccttgattcttttttttctctcttttaatttgcattttcagt

SEQ ID NO: 241993 - DNA, 201 bp, Homo sapiens
gtggtggtgcaaacctaataatcccagctccgtggaaggctgaggcaggagaatcaggagaatcacttgaacccgggaggcggaggttgcagtgagctgakattatgccactgcactccagcctgggtgacagagcgaaactccctctcaaaaaaaaagtaaacctgctccgagtgtcagtgtgttgtaaagcatggttta

SEQ ID NO: 241994 - DNA, 201 bp, Homo sapiens
tgtggtggtgcaaacctaataatcccagctccgtggaaggctgaggcaggagaatcaggagaatcacttgaacccgggaggcggaggttgcagtgagctgwgattatgccactgcactccagcctgggtgacagagcgaaactccctctcaaaaaaaaagtaaacctgctccgagtgtcagtgtgttgtaaagcatggttt

SEQ ID NO: 241995 - DNA, 201 bp, Homo sapiens
acctgtattcctggcactttgggaggccaaggcaggcagatcacttgaggtcaagagtttgagaccagcctggccaacatggtgaaatcctgtctctactwaaaaaaaaaaaaaattagccgggtgtggtggtgcaaacctaataatcccagctccgtggaaggctgaggcaggagaatcaggagaatcacttgaacccgg

SEQ ID NO: 241996 - DNA, 201 bp, Homo sapiens
tttttcattgtctttgtctattttctttgtcaatgcaataacaacctctataaatctcttgcaaaattctttcacattctttgttcactaatgacactgawagccttctcttttatttttcgttatcatgtttaatctcttgctattgattgattccttttttttttctgatatttcaaagggatctgaacaggacagagc

SEQ ID NO: 241997 - DNA, 201 bp, Homo sapiens; identical to SEQ ID NO: 47516

SEQ ID NO: 241998 - DNA, 201 bp, Homo sapiens
tgcaggtttccaggacttgttattccttaattaaacaatcaaaccctgttatgcatctatcaaccctccctcccccccacacaaatagtattttgagtcartttacgttccatacaggcacattttcattgtttttttctgtaagattcttaagttttaaagaaagagcaaatgcagtcataaaattatgaagaaaaattc

SEQ ID NO: 241999 - DNA, 201 bp, Homo sapiens
tatccaagaaaacatttttctaggggttaattctactttggatccatagtagatgaaaatacttctatgggttttccttatagctgctaagcagggaacaytgttagtaggtaaattaagttctaggactgaaaccatttatgttactaacaaagctttagagctactgcaatacttaaactttttttttttttttaatca

SEQ ID NO: 242000 - DNA, 201 bp, Homo sapiens
gctgctaagcagggaacactgttagtaggtaaattaagttctaggactgaaaccatttatgttactaacaaagctttagagctactgcaatacttaaactttttttttttttttaatcatgaagggcacggtagaattcaacagtgaataaatgaaacctgaattttatttaaaaacctcacttccataagcataaaggca

SEQ ID NO: 242001 - DNA, 201 bp, Homo sapiens
tgaggaagaagagggattttttttcttgcccaaattatctagattaatgatatattcattaaatttcccaaataaatgcccagaaattattttcagcgcayatagtgagtgataggattttttttaagtttgtaattatattgctgtaccttttcaatccaaaccttagactattatttgactatactgcttccctggagc

SEQ ID NO: 242002 - DNA, 201 bp, Homo sapiens
agtaggtaaattaagttctaggactgaaaccatttatgttactaacaaagctttagagctactgcaatacttaaactttttttttttttttaatcatgaagggcacggtagaattcaacagtgaataaatgaaacctgaattttatttaaaaacctcacttccataagcataaaggcatgaatcctagaagagccttagat

SEQ ID NO: 242003 - DNA, 201 bp, Homo sapiens
gaagggcacggtagaattcaacagtgaataaatgaaacctgaattttatttaaaaacctcacttccataagcataaaggcatgaatcctagaagagccttwgatagcatctgctctgttgatgttcctttacaggttagaagagtgagactcaaagatgtgagctgacttttccaagattatttgggagttggtggcagac

SEQ ID NO: 242004 - DNA, 201 bp, Homo sapiens
tccaaacctgtagataagttaaatagcctaatttagcctgatgaaaacagagatgggatcattaaggccctggtgtcagtagagacagagctgtgagaccragcaggccagagagaatgaggtttattaaagcagggccttgttgaccataaagtcagagccctgtggctctgggcataaccagaaaacacactgatgttg

SEQ ID NO: 242005 - DNA, 201 bp, Homo sapiens
ttcagtcgtggttccacgaatgattgggagttgtgcctgccagaatataccctgtagaaatagtacatgatgtgtgtataaaatgtagtaccttctagcaraggcttaacatgtagattgacttgcttaatatttgttataaaggcaaagctagattaagtatcctgaaatgtaactctttcctttgtgtacatctgtcta

SEQ ID NO: 242006 - DNA, 201 bp, Homo sapiens; identical to SEQ ID NO: 47517

SEQ ID NO: 242007 - DNA, 201 bp, Homo sapiens
gatgtcgatagtgtctaatgacttcacattcatgaacttgcattgttgtcatatatttaaagtatcaaaaatagtgacacccatttttggtttgaggtatytggagatactacacaataaaaccaaacacaccagattcgtaagatgatttagtggttttggtaacactttcttgcttaaaagaagtttattgttgaaaaa

SEQ ID NO: 242008 - DNA, 201 bp, Homo sapiens
tttggaagagtggggaaatttctttttaaactaaaagaacctcctgatagacatactttaaaatgctaatttgatcagcatcaggctttttcaagggttgygaaaaatcttaacggtttagattttttcaaaaggtatattctgctatgcagacagtgagtttgtgctttcatatacttcagctttctacaaacctagtaa

SEQ ID NO: 242009 - DNA, 201 bp, Homo sapiens
gagaaataattggaaatatcaatggaattggtcagaggggaaacgaggagagtggggagggaaaagacttccaaatttagataggatgcaaagggcgtttygatctgcaatatagtagggaaatgagaagctgtgggaagtttctttatttagattcaatgtggcagacagaatgacttagtcagtgcgagtgcacacacc

SEQ ID NO: 242010 - DNA, 201 bp, Homo sapiens; identical to SEQ ID NO: 47538

SEQ ID NO: 242011 - DNA, 201 bp, Homo sapiens
acaaaatagaatcccaggtcaccataagtcattcatttacccaaaatgataactcaaaaatttttaaaaggcaaaatcctttactcattaatagaaggaaracttagctttccaaataatctgtctcctttctttcccttctttttcctatagtttattcaaaaggcaaacaaaaatctttgttttcttttcttttttttt

SEQ ID NO: 242012 - DNA, 201 bp, Homo sapiens
cccccaaaggactggcaccctctggcccaggacacagggactgggactgcctacattgaggtaatgactgttcctaacttagagaatgtaaaaacatgtcycacaggcttaagtcttgcttttcataagaatgtaagttgctattcttttttgttaagtttcggcctaagagttcttgttttatctctgccctggaaatac

SEQ ID NO: 242013 - DNA, 201 bp, Homo sapiens
cccggcgtgaaggtcatcatcgcacacaccgagaccaaaggacccttgggagactcacacctgggagaggtgagcaggggcccatgggaggggcttgagcwctccagcctcaccagcttcaccttccttccctttttgcttcagattttggaattctaaacttgcctttgggaatctaccagaaaccatttggcccttgcc

SEQ ID NO: 242014 - DNA, 201 bp, Homo sapiens
acttcttacaatctttttaccaaaaacacatttcactttccgtgcacatttcacaccttgcaggtagaactgcttttcccatagtcccatagtctcaagtrcatgttacattgttaaccgaagaagcagtttatgaccgtaaagcatttagcaaacctaatatctgacctgtctaatttagaccaaatgcctaaatttttg

SEQ ID NO: 242015 - DNA, 201 bp, Homo sapiens
ctctcctagctcagcggggccagagggacgtcagcctcagctcactgcgcatgctgattgtggccgatggtgccaacccgtgtgagtgagcctgtgtgccyggcgcataccccacacagtgtcccctcctgcaaaccaaagtagaatacactgagaagcaaaatggaggcattttcactgccattgtcatatagatacaca

SEQ ID NO: 242016 - DNA, 201 bp, Homo sapiens
cttttctaatacaggatcatttataggaattttttatattatattctggatcccagccctgtgtcagtaataccttgcgagagttctctccctctttgtgkctggctttccactaatggtagcttagtgaacagaagttctatcaatcaccttcttttcttttatgatttttgctttttgctttttttttttttttttttt

SEQ ID NO: 242017 - DNA, 201 bp, Homo sapiens
ctcagctcactgcgcatgctgattgtggccgatggtgccaacccgtgtgagtgagcctgtgtgcccggcgcataccccacacagtgtcccctcctgcaaamcaaagtagaatacactgagaagcaaaatggaggcattttcactgccattgtcatatagatacacatgtcccatcgtttctatgacacggaacatcttggt

SEQ ID NO: 242018 - DNA, 201 bp, Homo sapiens
agtgggagaaatatgcgtcagttccagtgcaactggcacagcgtactatggattgcttggaatcacgaagaatgtgtttgaggtttgtcccttttcctgaytttcatgttgaagttaagttgcatgagcactcatggggtcccaggtgtgctgggtgctgggggattgcagaggctgcggggatggtctccttccacacag

SEQ ID NO: 242019 - DNA, 201 bp, Homo sapiens
gtgtaaagcaaggaccttagagattctcttgagcaaataatagacctctgggcctatgcccctgggcacaggggccaggaagagaattttgcttcttctaytcccaagctccttgtctgggaggaagctcttcccctaactggtccactcaaccagctgcctttttaaattttatttttctcaagggggtgcctttttttt

SEQ ID NO: 242020 - DNA, 201 bp, Homo sapiens
agggtttcaccgtgttgaccagtctggtctcgaactcctgacctcagatgatccacccatcttggcctcccaaagtgctggaattacaggcatgagtcacygtgcccagtctagtattttttttttctcattcatttctcaggtcccacagttcacttatttcatagtgttgcacctgagcttcatattattacacgggaa

SEQ ID NO: 242021 - DNA, 201 bp, Homo sapiens
atttcttgaaaattttacaggcatgtatacgtgtttatatgtgtatagctgtatatatatgcacacatatgtacatatacatatgtataccaaatactgastttttctgcttgctttttttttttttttttttttttttttttttttttttttttagataatgtctttattgcccaggctggctctcactgcaacctccac

SEQ ID NO: 242022 - DNA, 201 bp, Homo sapiens
ccaactgaaaataatcctttaaccctttaatctaggcaaaaaaaaatccacattcccatgacttcttacaatctttttaccaaaaacacatttcactttcygtgcacatttcacaccttgcaggtagaactgcttttcccatagtcccatagtctcaagtgcatgttacattgttaaccgaagaagcagtttatgaccgta

SEQ ID NO: 242023 - DNA, 201 bp, Homo sapiens
cagaagttgggaaagtgggaaccactccaaggtcacctttgtctgtgaggttgtggtcaccaggatggtgggttgtttttaactttatttcacagccgtcrtcatccatgactaaagctcctttaatcctttggttagttgtcggtgactgtgatgcaaaaatcgaaacaaattattgtaagcttttttatagttgggatt

SEQ ID NO: 242024 - DNA, 201 bp, Homo sapiens
caggtagccccatttgatagactgcattttaaatactaggacagtctgcctcttccatcgtgagggtgagaatgcatctgtgtcttgtttggcctcttgcygtgtggccatttccatgtctcatcccgcaggatcgctgtgttctctgtgaccgtgctgcacgacgaccggattgtcctggtggctgagcagcggccggat

SEQ ID NO: 242025 - DNA, 201 bp, Homo sapiens
gcttctgggttagctgtagaatgtcacacacataacacagcatagacatacagcttgataaatattcctgagaaaccagcacagctggcagataaatagarcattgacctataccaggtacccatcccaccagaggggaccactcactgatgcatggtgactgccattgctctgggttcaagtgtttggagcgttctatgt

SEQ ID NO: 242026 - DNA, 201 bp, Homo sapiens
atatacaacctgatgaattcacagagtgaatatggtcctgtaatcagcactccaagcagaagtgttgctaggttcaaagcccctcacaccccttccacacrcaaagggtaactactgtcctgactgcccacactgttggctttacctgcctttaaacaagtgttcttttagtttattctcattgatggtattattttatcg

SEQ ID NO: 242027 - DNA, 201 bp, Homo sapiens; identical to SEQ ID NO: 47521

SEQ ID NO: 242028 - DNA, 201 bp, Homo sapiens; identical to SEQ ID NO: 47522

SEQ ID NO: 242029 - DNA, 201 bp, Homo sapiens
ataaatatatcattacagtgatatagctcacttctcagtggcagttttgaataaacgagatggaaattatcttgcatttctgttcacttatatgaccgtasgcagtttctgttgctgataaattattaatgtggggtcttgctgatctaggtatctgtaacatttttgatataactatcaataatatgattactgaaaaaa

SEQ ID NO: 242030 - DNA, 201 bp, Homo sapiens
cctgtcccagaattcaggcagttgttaacaggagcattatccagaaatattcaagaatcccaaaagtaaaatttgcaaatcaaactagtgtatctcaaagsataatatgtgatgggcaggtatttgaatgcagtggttcttaggagtaaaactagagatttgtcaaatttatatgaagaaaatgacagaatactgctgagg

SEQ ID NO: 242031 - DNA, 201 bp, Homo sapiens
  misc_feature (1)...(201): n = A,T,C or G
tccagaaattaaacatgacagaggtgtctgggtcttcagcaaaagtgatcccttgttcgagtccttggtgaatctcggttttcatctggcttcatgtctcnacctgtactgtctaatgtggtagccactggccggatgtacctttttaaattatataaaatgaaatgagactaaaacttgcactccttattcgctcagtag

SEQ ID NO: 242032 - DNA, 201 bp, Homo sapiens
ggcccctccagcctcacacagatacctgacgtacctaatcatgtgactgtcactgcacctgtcaaaaccacccctgggtagtgcctttgcccattaatccrggtcatgccaggtagggagatgcactgtctttagcatgcttacagggtctctgtggttgtgctggccaagagggcacacggtgtctcttagcagagtcca

SEQ ID NO: 242033 - DNA, 201 bp, Homo sapiens
ctcaggacccctatccactccagcttcctaagatgtgttagctgcatacctctgggtgagaaaacgggcagaggaagagtgactttccgaagggtgatgcraaccaccagctcttacagaggggagatgccggatcacggcctctgggtgtgagaattgaggagatgtggtgtagagttgagaagtaagaatatccctgac

SEQ ID NO: 242034 - DNA, 201 bp, Homo sapiens
ggaacaagggattgagatgaacccaagcctctgcctgaaatgttgttgggagagtacatcggttttgttttgctttttctggtgtggctcgggcccactcrccctaagcatgtgtgctcccccacagagcgtcatgaacaggatgcacgtggtcagcgtcccctacgcgctgatgaaggcgaacccactctcctggatcca

SEQ ID NO: 242035 - DNA, 201 bp, Homo sapiens
  misc_feature (1)...(201): n = A,T,C or G
ataacacagcatagacatacagcttgataaatattcctgagaaaccagcacagctggcagataaatagaacattgacctataccaggtacccatcccaccngaggggaccactcactgatgcatggtgactgccattgctctgggttcaagtgtttggagcgttctatgtatgcattctgaacagtgtagtttagtttcgt

SEQ ID NO: 242036 - DNA, 201 bp, Homo sapiens
taatttaaaaaaaaaaacaaacaaaacaaaaaaaactttttttttgtagaaatggggggtctccctatgttgcccaggctgatatcgaactcctggctaargcagtcctcccatcttagcctctcaaagtgctgggattacaagtgtgagccactgcacctggcctcttatttctttgtatgtttcagataggcatctttc

SEQ ID NO: 242037 - DNA, 201 bp, Homo sapiens
tctgccctggaaatacagagtgtcatataaatccttgctcagatccttccaggtttctctctcatctaattctctcctaactggctccctggggatgcagrcagttatgagggagcccatggcgcaccattaccctcgggcacctgcccaagaggagccacaacttccactgaagcatcccctcagcggccagggttttgc

SEQ ID NO: 242038 - DNA, 201 bp, Homo sapiens
gtcagggcatttttcattcaaaaagaggaaaacacttttagttttctattactttatctatgactgtagttttgacctcagctgtcatggatataaatatrtaagtagaatctttatggttatagatgatctgttgataaagtatagtcagcacctgatttacttcaaatgtcagatacttaacttgagatatctttaaat

SEQ ID NO: 242039 - DNA, 201 bp, Homo sapiens
cctggacaacatagtgagaccctgtctctacaaaaaaagggagaaattttaaatagaatttttaaaaaagaaaaaaatataggtgtttaaaagcaagggtrtaagttgagggcacagctaaagcttttacttgagatttggaaagtgattttaggtattttttaagggctttattaaaaaagttagatctttcagatcaag

SEQ ID NO: 242040 - DNA, 201 bp, Homo sapiens
acctccctggaatttcatccccctcgtcagttaaacccatggtggttttattttctaggccacctgatctgggaggaccacctccaagaaaagcagtcctrtcgatgaacggtctaagttatggtgttatcagagtggatactgaagaaaagttgtcagtccttactgttcaggacgttggtcaggtgatgcctggaggta

SEQ ID NO: 242041 - DNA, 201 bp, Homo sapiens
ctcctctgtttcccccaaagagtcccaggctgttagaccttgaatatctgcttttaaggtgacttttaaccatagtgctcttttatttttttaattaattwaaaaaaattttttttttgagatggagtcttgctcttgttgcccaggctggagtgtaatggcgcgatctcaggtcaccgcaacctctgtctcccaggttca

SEQ ID NO: 242042 - DNA, 201 bp, Homo sapiens
aaaatatttgctcagttttttccctccctttgtgctaagtttaaagatgagctaaaatataaagatgtgtatatggcctatgcaactcacttacagttctktgatatttgggaagacggtgataatagctcactgtgttccaggcacaggcttcatacttcatatgtgttgaagcatttaaccccatggcaaccatgtgaa

SEQ ID NO: 242043 - DNA, 201 bp, Homo sapiens
ccgagcacacaggagcatcgctgagtggtaagagcccaggtggagggcggcttcacgtggtccatccagcccttcctctgggcatgagtgctgtgcatcgkttggagcagagcaaggactgctgggccctgggcacaggcctcctgcattgtcaccctggtctgcagtggagctgggtgccatgtagatgagccctatcta

SEQ ID NO: 242044 - DNA, 201 bp, Homo sapiens
atttctattgcagttgggtaatcagttgactcagaacatttggaagaggctatccttcccctgctgcttcggactgatttctgctgtgttgttctacttgyttatcttagcacctgctccattctgtcttcatatctggtaaagtctgcccttttaattttattttgtttttcaagcttgatttagctaatcttggccctt

SEQ ID NO: 242045 - DNA, 201 bp, Homo sapiens
gtagggggtgtggctaagggacacctcgttgcagccccacccttgtcctggccgttcctgacctcccatgtggccttggtcggtggcgctgacctccctgsccatcaccctacctgtgtgcagggccatccacacctccgagactggtgcacagtcctgcacacaggcctgagtcgggggtccccggggtggatgaggatg

SEQ ID NO: 242046 - DNA, 201 bp, Homo sapiens
ttccaagtaaactttagaattaacttgtcaatttccataaaaattactactgggatattgattggcattgcattgaatctctagttcaatttgagtagaaytaatgttttataggttgagagcatcccaaatatgaaaatccaaaatccaaaatgctctaaaatctgaaactgcttgaagctgacatgatgctcaaagaaa

SEQ ID NO: 242047 - DNA, 201 bp, Homo sapiens
agtagggccacttggtggggtctgggccttacttctctcaacggttgaggtgcctcctgggaccaagcaggaggccccagcatggccacacctgcacagtyggcagtctgtgtctctgccctgtggagctcagtggcacttctaccagccactgaggcactggatcacctgggtcacccatgttgccttgttctacctact

SEQ ID NO: 242048 - DNA, 201 bp, Homo sapiens
tggagcttctaagaaaaaattaatgttggaaatggatctgaggttttgatgtctaaattgtacctcagagttgatttttgtggaaaaagctttgagggttygttagactgcatgtgagagacggctgcagagagcttgtgacctgggagctaagtgttgtgtctgtctgtgcatgtacacctctctgtgggatgaggtaca

SEQ ID NO: 242049 - DNA, 201 bp, Homo sapiens
cccctcctgcaaaccaaagtagaatacactgagaagcaaaatggaggcattttcactgccattgtcatatagatacacatgtcccatcgtttctatgacayggaacatcttggtgattcactggtttatcccatgcatgtttattaggccactaaatttaaaagcaattttaatatgcttgatgaaaggtacatgccttaa

SEQ ID NO: 242050 - DNA, 201 bp, Homo sapiens
acgtctctggcttctggcttcacttctcccaccaggacccaaccattctccctcctggtttgcctgggtgtcccccacatcctcccaggaggagctccctrtggctgctgcctgaccacgtagggcctcctgcgtacggtggtctgaatgggaactgctttgtcaaggctgcacacgtgagctctggggcccaggactgtc

SEQ ID NO: 242051 - DNA, 201 bp, Homo sapiens
tctgatttcctttaaagataccatcttccttgaagaacatgaagtctgagggtacctgtgaaggggccccttccttctgctgatgcagccctgtggttccratggccgcaggctgcgctaacttgagcatgtccagccaccccttccctgctggccccccagttagtgctggcgttccactcttgttgctctgtgcagggt

SEQ ID NO: 242052 - DNA, 201 bp, Homo sapiens
ttaacattaaaaaaacgctattgtcgtctacaaactataaattattcttcattcttttgttctatggtgatttgttttgcacaactgtgtaatttttttcrtattggaggaaacgcctgttgctcagtattccagttactattgttgtatcacaaacaacaacagtcattttattgtctctcatgctttctgtgggccagg

SEQ ID NO: 242053 - DNA, 201 bp, Homo sapiens
gagtgagctgctctgggcttccttgcagtgcagtggcctcaacaccgtccttctgtttgccgggcttcacagggctccaggcgagtgtcccaagacaatcrggtagaagctgaattgacgttactggcctgcattggaagtcacacagcatcacaaccactgtagtcacaggcccttttcccactgagtggagtgtcgacg

SEQ ID NO: 242054 - DNA, 201 bp, Homo sapiens
gaacatgcgtttctcacaagtctgtaacatggagcagtggctttggtgcagaatcatgctgcaggcaaggtgggcccacctccctggaatttcatcccccycgtcagttaaacccatggtggttttattttctaggccacctgatctgggaggaccacctccaagaaaagcagtcctgtcgatgaacggtctaagttatgg

SEQ ID NO: 242055 - DNA, 201 bp, Homo sapiens
agctacttcagctttcctgcctccctgtgatggcccttctggggttcacgggcagctgtcagggccccttttggtgacttctagaggcaggaccccatctstcagtgcagtctccccccttccaatgcggccctgactgtgttaggggttgcaggcactgcgagaggctcagcgtcctggcccttgtgcctgcaactctgc

SEQ ID NO: 242056 - DNA, 201 bp, Homo sapiens
ccaatgcggccctgactgtgttaggggttgcaggcactgcgagaggctcagcgtcctggcccttgtgcctgcaactctgcctcttgcaggcggctgtgctraccggctgtggctgctcaggtgcagaccctgtctgtgggtggtgctggcagcccagccatctctaacctggagcctggggccagctggtgcctgatccct

SEQ ID NO: 242057 - DNA, 201 bp, Homo sapiens
tgaagcatttaaccccatggcaaccatgtgaagtgggcagctctgaggaaaatggtaatgtttgtgaataacttgataattaggttatctaagtaagttcyagcaagcatgtgttagatagaagcctcatggaagcttcccagaaattcctcgatgtcagaaaggcctatgtgaactcttctgcagaagttggctctgtag

SEQ ID NO: 242058 - DNA, 201 bp, Homo sapiens
cttctctcagaggggaagctttcaatatccaaccattaattatgatatttcctgttgggtttctaaagatgccccttatcacattaaggaagtatgtttcyttttattctgagtttaagaagaatttcaaaaatcatttaaaatcattttaaaatcatgaatgatttaaactgtttttcttttcttccatctattgatatg

SEQ ID NO: 242059 - DNA, 201 bp, Homo sapiens
agaagaatttcaaaaatcatttaaaatcattttaaaatcatgaatgatttaaactgtttttcttttcttccatctattgatatgattgttttatttttcasctttattttgttaatgtggcaaattatgtgggttttctgttgaacctctttgcattcctgagataaaactgacttggtcatgatgcattattctttttat

SEQ ID NO: 242060 - DNA, 201 bp, Homo sapiens
ggttgcaggcactgcgagaggctcagcgtcctggcccttgtgcctgcaactctgcctcttgcaggcggctgtgctaaccggctgtggctgctcaggtgcasaccctgtctgtgggtggtgctggcagcccagccatctctaacctggagcctggggccagctggtgcctgatccctgtgtgtgcacagatgctgggtcctc

SEQ ID NO: 242061 - DNA, 201 bp, Homo sapiens
tgtgggaggagtcacactgaggcctgagacatcgtgctccatgaaaaggcgcacatgtacaaattggcccccaaatgcggaaaggccgagaaattgaagarcgaggcagacaggtcgtttgtcagtagagggtggttcattggggaacttacagatagaatcctggtcttgagtggctgcaagacaggtagatctctgcac

SEQ ID NO: 242062 - DNA, 201 bp, Homo sapiens
aacttttgaagacatttttgcttgtcacaactcaagggaggggagtgctcctggcatctagtgagtacctagaggccagagatgctgctcagtgtccaacmtaagcacaggacagcacctgcgatggtattgtcagcccagaaggtccctggtgccgggtttgggacccctgcccttagctcagcagttttcagtccttca

SEQ ID NO: 242063 - DNA, 201 bp, Homo sapiens
tgcgatggtattgtcagcccagaaggtccctggtgccgggtttgggacccctgcccttagctcagcagttttcagtccttcacaaactccacccacaactygtttcccacttgtgagcctttcccatgctgacgctgccccagcagccccactttctttcacatagcctgcccctttcccatgttgcctcccttcctgatg

SEQ ID NO: 242064 - DNA, 201 bp, Homo sapiens
gtgcaatatatctcaaagaaaaaactttcctcctcctgtctaattgaggctttgtgccctttcaccatcatctcctcattgccccatccctcagcctctgrtcacagatttgtggacatgtgtacacaaatacagtgtgtgtgtttcccctttctgagttaaatggtagaaaactgcacacacttctcttcatcttgtttc

SEQ ID NO: 242065 - DNA, 201 bp, Homo sapiens
gcgtgtactgtctggccctggttcctgccaacaccttgcccaaggctcctctcggagggattcacatttctgaaaccaaacagcgctttctggaagggacrctgcacccgtgtaatgtgctgatgtgccctcacacctgtgttaccaacctccccaaacctcgtcagaaacaaccaggttagttgaacctaacaacaggat

SEQ ID NO: 242066 - DNA, 201 bp, Homo sapiens
aaccagccacgcatgggggaacttaaccacatcacctgcatggtggtttccacctgcctgttaggaaccaattttaatgataaactcaaggatggcatctyagctttgcatggctaggagatggctccctagggctagaaatgctgcccaggatcatcctggagctggacgagctggacacatcacatcacccagtgtctg

SEQ ID NO: 242067 - DNA, 201 bp, Homo sapiens
aaatgcctcattcaagtatgttttcaaaataaaaattgtaaataaaatcacgtgatgtttatatatgagaagtcaccagcttttcattcagagttcccccrtttctagaggttggaccagcctcaatgatcgtggggaacctggttgctgggaagagaatcgctcaggcttccgggagagagctcgcccacctggaggaca

SEQ ID NO: 242068 - DNA, 201 bp, Homo sapiens
tgacacacgcccaggctcagtgcaggtgacctgtgggcatggaaagtagtacaattcagggatgtttgcttatcgcttattatgtatttataatggtgtcrtatggaatattttattgaaaaggccagaaaggtcttctttacccacgtgtttctggctctgccctgggtgaatggagtgcccgcatctctccctcttagc

SEQ ID NO: 242069 - DNA, 201 bp, Homo sapiens
atcctacgggtgatttgtttgcagcagtttttcagtctgccctgtgtaggcctgtgttcactactgtatcaagtgtgtatgtggtgctttgtggcttttcrtgaccttgccccatctctgcatgtgcttgtaagtgttgtgtggcactgatggctgcctggatggccacctggaagcacagacaagcaccaccttccacat

SEQ ID NO: 242070 - DNA, 201 bp, Homo sapiens
catctctaatgtgactgctttctcagaacttccatatcatttgtcccctcttttggagttcttgctgctttttgtttttgtatttgttttcacttattcartaattattcagtgtccactgcatcctaggtaatatttcagctgtcaaaagtcagattttggctgggcatggtggctcactcctgtaatcccaacactttg

SEQ ID NO: 242071 - DNA, 201 bp, Homo sapiens
tgcaaggcgctagaggctcctgtgctgttggccccttcttggggggcctgaccatggtcctggcgcatccagcttctgcccgtgtgggtggagtcttgacscacaccctttccctcaggacaacctggtcttcatcgtgggcaaactggacgggctgatggtcactggagttcgcagacacaatgcagatgacgttgtggc

SEQ ID NO: 242072 - DNA, 201 bp, Homo sapiens
agactgcttcttgtttgatttttctctaattgtgaaatatttcaaacataccaaaaacttgtgtgagtcatgatatatgtacccacgtacctaccacccartttttaaaaaatgaagatttggacacattagattcatatttgaaccattatagagagagatgactcccattcactctctgattccatttgtcatcttccc

SEQ ID NO: 242073 - DNA, 201 bp, Homo sapiens
tgtgctgatgtgccctcacacctgtgttaccaacctccccaaacctcgtcagaaacaaccaggttagttgaacctaacaacaggatgctctctagtctaasagtggtaacagcggtgcttgtggttagggtgcggccctgctagacctccagtgccaactgcccacgtctttggggctggggtcaagagccagagcgagtg

SEQ ID NO: 242074 - DNA, 201 bp, Homo sapiens; identical to SEQ ID NO: 47560

SEQ ID NO: 242075 - DNA, 201 bp, Homo sapiens
gttaagtttcggcctaagagttcttgttttatctctgccctggaaatacagagtgtcatataaatccttgctcagatccttccaggtttctctctcatctmattctctcctaactggctccctggggatgcagacagttatgagggagcccatggcgcaccattaccctcgggcacctgcccaagaggagccacaacttcc

SEQ ID NO: 242076 - DNA, 201 bp, Homo sapiens
acaccactgcactccagcctaggggactgatcaagactccgtctcaaaaaaaaaaaaaattatgatgattatgttaatacatgtagctctggctcaatctractaactgccgtgtggtattatcttatatggttataccatgttgtggtagtttttttctcccaagtgtatttttgaaacaaatagaggatgagcaatcta

SEQ ID NO: 242077 - DNA, 201 bp, Homo sapiens
ccagagccattccagcgtcgagccctggctcgaccgggtcattcagggctcgtccacctcatcctctgcatcctccacctcatctcacccgggagggagasccaccactgctcccagtgctgcagccacgccgggggccgccgctaccactgcactcgcaggcctcgaggcccacacccacataggtcagtaataagctgc

SEQ ID NO: 242078 - DNA, 201 bp, Homo sapiens
tgagctgctactcgccaggccacagctctgtatgtgtacacagttcagggtgtccacagcagacaaggagtgaggcttcctggtcttttagtgagggtctktagttgggtaaagtagcagaaatccaaaggagaggaaatgtggatgggcaataaatattaaattatgttcaacctcagtggtagatatggaaatgcaaat

SEQ ID NO: 242079 - DNA, 201 bp, Homo sapiens
gtgttttcagagtcattgagtgtttcgctcaatattatcaagctctgtggatgtttggatggaaagcatcagactgcctgggggaccttgaacccctaggyggactcactgcagggagcagagctgctaccttcttgggtgtccccgggggccagggaggagctgccatgcagctgtacctgtagaaacaagatgttaagt

SEQ ID NO: 242080 - DNA, 201 bp, Homo sapiens
  misc_feature (1)...(201): n = A,T,C or G
ccgtctacgtggacatgcgggcactgcgccatgacaggtaatgctcccagcctgcctgggccccatggatacccagtggcaaagtgatgcaaaccaggtcngcactgactatgcacccccgggacccaggcattagaggacggcggggccaagtcaggcctaccgggacacctggatgggcacatgagaggacagctggct

SEQ ID NO: 242081 - DNA, 201 bp, Homo sapiens
caccccgtggagggtgctgggggctgcggctctgatgaacacaggtcgacttctggttggggtgggctcggctgctgcagaagtctccttccctcctttgyggctggtatatagaattacttagttatgtttttaaacacacatctgagctcaaagccaagaaagggagaagttcaggtgcaggaataaagaactcccgct

SEQ ID NO: 242082 - DNA, 201 bp, Homo sapiens
agagagccatcagacagggtagtaagtgtaggagtcaatgtgtgctcaatatagaggaagcagatctagggtgttcaaggcagatttgggatgaatctcamgtcttctagtcatagcatcactctattttttttttttttttttggagacagagtctcactctattgcccaggctggagtggtggagtggtacaatcttgg

SEQ ID NO: 242083 - DNA, 201 bp, Homo sapiens
ttctgcagcagtggagttcagccagagccatattccgtacctctgtgatgcagattaattgcctctcctacacacatgcacatttgaaaattactgccttstaaaccttaaaaagttgtgcacaagttgaaatttaataagtgaaattgtacagttatatcctgaacctgatgaggattgtcactgcagcactgagcatgt

SEQ ID NO: 242084 - DNA, 201 bp, Homo sapiens
cttttacttgagatttggaaagtgattttaggtattttttaagggctttattaaaaaagttagatctttcagatcaagccccgtgactttctttgtcttcrgctcagagctgatcttacatatgtcacctacaatttgggttctttagccaggcgtgatgatgtgtgcctatagtcccagctactcgggaagctgaggtaa

SEQ ID NO: 242085 - DNA, 201 bp, Homo sapiens
cagggaggccagtgggactgggctgagtgtggggagcagaaggagtgcgtgagtgagtgaactcacatgcaggtgcaggggcttgaaaagctcccttcccrtgtcccctgttacagtcacttcaggcggtagaccagccgagagtggagtcgggtgagcttagtggacagcacatctgtgggagccgtgggctgctgcacg

SEQ ID NO: 242086 - DNA, 201 bp, Homo sapiens
agttagatctttcagatcaagccccgtgactttctttgtcttcagctcagagctgatcttacatatgtcacctacaatttgggttctttagccaggcgtgrtgatgtgtgcctatagtcccagctactcgggaagctgaggtaagaggaccgcctgagcccaggagttttgggctgtagtgggctgtgctaaccaggtatc

SEQ ID NO: 242087 - DNA, 201 bp, Homo sapiens
tgtctacatgtattgcacgtacatcttgctgtaatttgggacaggcatgactcattatttacaggcagtggtggcagcttgacgtgcagtcccgaatgtgsagattgatctgttgtcatgggagcataaggactcacgttcctagtcctatcctcttggggaatgtgctgtcaaattgatgtcttcaaaccaggcgggcac

SEQ ID NO: 242088 - DNA, 201 bp, Homo sapiens
gacacttggtcctgcaggcacaggcctctggtcccttggtctctgcatggatgcacaaaatgcttacgtgtgtagatatgagggtgcacacaaacacgtgracaggtggatacacacacgtgaacacggatagcggacgcacacacacgcgcgtggggctgacgttaaccctgggatgtgccgtctgttttcagggcctct

SEQ ID NO: 242089 - DNA, 201 bp, Homo sapiens
atgttcacccagaggacaagctaatcatgagaattgtaatatgtatttctggtctaaataaagtcttcacatcacacatcccctgttagaacttccaggtrtgtgtaggaaaccaaatagtgtgcttacattaagaagtgttttcatgatggtgcatttcctacctcattcctaggtggtttaatttgttttcaggctgtt

SEQ ID NO: 242090 - DNA, 201 bp, Homo sapiens
gtatttctggtctaaataaagtcttcacatcacacatcccctgttagaacttccaggtatgtgtaggaaaccaaatagtgtgcttacattaagaagtgttktcatgatggtgcatttcctacctcattcctaggtggtttaatttgttttcaggctgtttttccttatgataatttactggaacagccgtcctttttcctc

SEQ ID NO: 242091 - DNA, 201 bp, Homo sapiens
acaaaccacggccgctgcacccaagcagcagaagtctcggcccaccgcctcgagggatgagcgcttccggtcaggtagggtcacagcctaggcagtggggraggtggacgggcctggagcccttggactcttgccatgaagtcttccagttatttttcctttgccacaatatctgccaaagaaattattttcacataagca

SEQ ID NO: 242092 - DNA, 201 bp, Homo sapiens
gtactgtgctgccaagggtacagggccagctgtttgatcatcacccttcatgcggatggtgaatgagaggcagggctgggtgatgtggggagaggagagcrcggaagtggatgttgcccttaacccacagcatttatgcgtctatcactgacttccagattaaaggctctttgatagagggtatgcaacagatgagaaatg

SEQ ID NO: 242093 - DNA, 201 bp, Homo sapiens
tcaaaggaagaaacacagtatttaaggagagaaaagttctgtttgctttctgtgcctgtaatttaacttagttcataaaataagagacaatgaatattatycgccccgacttcgttcagtgttttctggagcattattcttggccagtggatgtctcgtgacagaatctgaactcggtggttggtaacacatcacattctt

SEQ ID NO: 242094 - DNA, 201 bp, Homo sapiens
ggatgtctcgtgacagaatctgaactcggtggttggtaacacatcacattcttgtcctctgggcccaccagatctgggtaagcagcccccacaatgccacygggtactacaccgtttacggggaggaggcgcttcatgccgaccacttcagtgcccggctgagttttggagacacacagaccatctgggcaaggaccggct

SEQ ID NO: 242095 - DNA, 201 bp, Homo sapiens
ctccatgactgcccctcactgtccttgggcccttggcctctgctgagggcgtgggggacggtgttggtgataaggctaccaggcttctccccgaggccagrccggtctctctgccgctgtgtctttaccagtggcttccccatgcacaacccatttaaggttgtggtcaatgtccagaggactctgtgcagccaccacaag

SEQ ID NO: 242096 - DNA, 201 bp, Homo sapiens
ctggccagataaggcagaacttttggtagctcctatagatggtgtcccgttcacagagataagttatttttaataatacgctcacacttgctgtaactttsctgaggtggttccgtgctgcagagataacagcctgctctgccaggacctccatcaccctttctgcacgtggtgtgcgacctcatgatgtttcagttgaga

SEQ ID NO: 242097 - DNA, 201 bp, Homo sapiens
cagaacttttggtagctcctatagatggtgtcccgttcacagagataagttatttttaataatacgctcacacttgctgtaactttcctgaggtggttccrtgctgcagagataacagcctgctctgccaggacctccatcaccctttctgcacgtggtgtgcgacctcatgatgtttcagttgagacctccctgtgcctg

SEQ ID NO: 242098 - DNA, 201 bp, Homo sapiens
tcctgcattgtcaccctggtctgcagtggagctgggtgccatgtagatgagccctatctaccttgggcattgccagagagggctgaggacttcttgtgggytctccctctggatgtactctgcaaaacatggtgccagagcacacctcactgcctgtgtttgggtttggcttgtttttttatctgtttccttatcagtggt

SEQ ID NO: 242099 - DNA, 201 bp, Homo sapiens
aatattttattgaaaaggccagaaaggtcttctttacccacgtgtttctggctctgccctgggtgaatggagtgcccgcatctctccctcttagctgggaycacacaggagatacttgcatgcctgtcccttcactgctagtgagagagtacagatggtgagaaaagacaccagtcgtggaccatgtgcggtggcttatgc

SEQ ID NO: 242100 - DNA, 201 bp, Homo sapiens
cacaggagatacttgcatgcctgtcccttcactgctagtgagagagtacagatggtgagaaaagacaccagtcgtggaccatgtgcggtggcttatgcctrtaatcccagcactttgagaggctgaggcgggcagatcacttgaggtcaggagttcgagaccagcctggccaacatggtgaaaccccatctctaccaaaaa

SEQ ID NO: 242101 - DNA, 201 bp, Homo sapiens
gcacctgtagtcccagctacttgggaggctgaggcaggaggatcacctgagcactggagcactccagcctgggcaacagagcgagaacctgtctcttctcmccaaaaaaaaaaaaaaaaaaaaaaggaaagaaatggatggatttgagaattcttggtgattagatgctcctaggcagtctgacaaacttaaattaggaat

SEQ ID NO: 242102 - DNA, 201 bp, Homo sapiens
agcatcagataatgctctgattctcagtaaaagctttagttggaatagacatcctgtaaaatggatctggcctgatctttagattgtaaatggccttaaayagctgtgtgacattggtgggcttcactcttctttgtgccaccctttcccaagcattcattggcccctgtgacctgtgcctgtatccatgtgacccagtct

SEQ ID NO: 242103 - DNA, 201 bp, Homo sapiens; identical to SEQ ID NO: 47535

SEQ ID NO: 242104 - DNA, 201 bp, Homo sapiens
tcccttcactgctagtgagagagtacagatggtgagaaaagacaccagtcgtggaccatgtgcggtggcttatgcctgtaatcccagcactttgagaggctgaggcgggcagatcacttgaggtcaggagttcgagaccagcctggccaacatggtgaaaccccatctctaccaaaaaaaagacaccagccgtacgtctag

SEQ ID NO: 242105 - DNA, 201 bp, Homo sapiens
actctgggaattctgtatatcacactaaaatttttatatcattatgttaataaaagttattgactttgtaattctgcattttgaaatgtgtgaaaagggtytttaaattaccccgaataggttgtatcttattttgctttttttctgactataaaagcagttatgcttatagcataaaatctagaaagcacattaaagtat

SEQ ID NO: 242106 - DNA, 201 bp, Homo sapiens
tctgcctcaaaaaaaaaaaaaagaaaaaaattttaaaaattcattaccctgaaattttgtttcaaagatttttagtgtaccatttcttgggtattatttasgttatatggggatttgagccaaccgtcttttaaggaaataaatatgatgtttggtagttcggagctatggtctagccatgtgaacagcggacactgccat

SEQ ID NO: 242107 - DNA, 201 bp, Homo sapiens
tcaggcctaccgggacacctggatgggcacatgagaggacagctggctacattgggccatctgcaccaagaggaagaggagagctgtgtgccccactccgkgcgtgcctcccaggggagctcagtgtctatctctgtgcgcccgtgtccccagggctgcagttaacatccctttatctgtcacacaaccaggaagaataag

SEQ ID NO: 242108 - DNA, 201 bp, Homo sapiens
gaaggaggaaaagccacacagcccaggaaggcagcatgaagagtaagccaggcttgatatgagtcggggaccctggtgccttcacaaccgcagaggcaagrgaaggagcttggccaccctgactccgttcactgccatggccacagccacctgtggggagtcagagaggggtccagagagggacccagccaagccatgtga

SEQ ID NO: 242109 - DNA, 201 bp, Homo sapiens
gttctctgtgaccgtgctgcacgacgaccggattgtcctggtggctgagcagcggccggatgcctcggaggaggacagcttccagtggatgagccgtgtgytgcaggtgggcgccccggcacggcctatggttcggtgaatctcccaagctggcacccccactccactccaagtgccaagtggttggcttgtcccgcccgg

SEQ ID NO: 242110 - DNA, 201 bp, Homo sapiens
ggaggcgccagtgagcaagtcgccctctcgtgcagttcctgttcctggctgacgtgctgcagtggcgtgcccacaccactcctgaccacccgctgttcttrctgctgaacgccaaggtgaggcagtgtcacgcccacggggcttggaaacacctgtgggccggtggagccctttgcttgtctagttcatggtgccagtgtc

SEQ ID NO: 242111 - DNA, 201 bp, Homo sapiens
ggccgctgcacccaagcagcagaagtctcggcccaccgcctcgagggatgagcgcttccggtcaggtagggtcacagcctaggcagtggggaaggtggacrggcctggagcccttggactcttgccatgaagtcttccagttatttttcctttgccacaatatctgccaaagaaattattttcacataagcagtaatgtac

SEQ ID NO: 242112 - DNA, 201 bp, Homo sapiens
tttctttctttctttctttctttctttctttctttctttctttctttctttcttttcttttctttcttttctttctttcttctctttttttttttttttttgagacggagtttcactgtcacccaggcagagtgcagtggtgcgatcttggctcactgcaacatccacctcccaggttcaagcaattctcctgcctcagtc

SEQ ID NO: 242113 - DNA, 201 bp, Homo sapiens
tttggcctatttttttttttaattgtgcttgttttctttctttctttctttctttctttctttctttctttctttctttctttcttttcttttctttcttytctttctttcttctctttttttttttttttttgagacggagtttcactgtcacccaggcagagtgcagtggtgcgatcttggctcactgcaacatccacc

SEQ ID NO: 242114 - DNA, 201 bp, Homo sapiens
aattaaagggtaattgacataatgaattgcacatatttaaagtgtacagtttcggctgggcgcggtggctcacacctgtaatcccagcactttgggaggcygaggcgggcagatcactaggtcaggagatcgagaccatcctggctaacgtggtgaaaccccatctctactaaaaatacaaaaaaattagccgagtgtggt

SEQ ID NO: 242115 - DNA, 201 bp, Homo sapiens
tgcctatgccttcgaagagacgttctgtccttgtgcattcgtctgtggaaacctacacccctccaggtattgataaacaatgtcaagtgtggcttttttttgagtgtttcacaggcctgatgttatcctatttacttcccattgagttggaatatccgtctggcctgtagtatagattggacgcatttggagattaaaaat

SEQ ID NO: 242116 - DNA, 201 bp, Homo sapiens
aaacaaaggctaaagctaaatgcatatttttgttgaagcacagctgcaggttttgctttgtgctgtctgcaaatgtcagcaaattgggttcaaatgataccagggattttgttcagtgacttgaacaactgttccccattccttcgctcaccgtaatgtgtcttgagggcatctgtgaccaggggaccactgcccagagag

SEQ ID NO: 242117 - DNA, 201 bp, Homo sapiens
cagcccagcagatctcagccttattttacctagcccctattcaagatggagttgctctggtttaaacgcctctgacatatttcccctctctgttttatgaragaagccttaattctaaaggttgtagagggacaaagattcatcttctataacttcttcaggctgaacaggagtgatgacattcctgcctaactattaggg

SEQ ID NO: 242118 - DNA, 201 bp, Homo sapiens
agcatctattgtaaagatgtcggttcttcccacattagattgatttgtagattcagtgcattcatcatttcaataggttttgtgtgtgtgtgtgtgtgtgtaacttaacgagttagttctaaaatgtatatccaagtataaaaggtcaagagacccaaaatattttcaaaaaagaatgaggtgagaggattggcccaacca

SEQ ID NO: 242119 - DNA, 201 bp, Homo sapiens
gagcatctattgtaaagatgtcggttcttcccacattagattgatttgtagattcagtgcattcatcatttcaataggttttgtgtgtgtgtgtgtgtgtgtaacttaacgagttagttctaaaatgtatatccaagtataaaaggtcaagagacccaaaatattttcaaaaaagaatgaggtgagaggattggcccaacc

SEQ ID NO: 242120 - DNA, 201 bp, Homo sapiens
cagtagtttgttccttttttattgctgagtggtattccattttatgggtccattatagtttatttgtccagacacttcatggaaggacatcagtgtttccmgtttttcaatcataaattgatgtttaattttaaaattttggaattgtagaagaaatgcaattcttttttccattgttgttttaggtgacatcactcaaaa

SEQ ID NO: 242121 - DNA, 201 bp, Homo sapiens
gaagtttctttatttagattcaatgtggcagacagaatgacttagtcagtgcgagtgcacacacccacctatgacagaacagccccctacactctccatcytcagcagactgtgaaatcggtgcaacagcaatcatggtttcccatgtgcaggctcagagatgtcagtgtaactttcataatgtcctcatttacaccattt

SEQ ID NO: 242122 - DNA, 201 bp, Homo sapiens
tgaatggtgccaccgtgcaaaatattactcttcacagattttcctcaccttttgttctgtgtcacgagcttggagactgcctgtatttttttttttttttktgtggcatctgttttcaagttttattatggtcaggtattgtattagtctgttctcatgctgctaacaaacacgtaaccgagacttggtaatttataaagg

SEQ ID NO: 242123 - DNA, 201 bp, Homo sapiens
  misc_feature (1)...(201): n = A,T,C or G
gtcaaatttatatgaagaaaatgacagaatactgctgagggacacagaagacttggctacaaggaaatgtgtttctgtgtggaaataatttaatatcgttngtgaccaggcctctctagattaatttgtaaatttcaaacatgattcaatagaaatttcaatgccattaactttggagtttattaaaaatgcttctaaatg

SEQ ID NO: 242124 - DNA, 201 bp, Homo sapiens
gtcacattttcatgaactatttccgtgaaaagatcatatatatcaataatgggactgaattattctggaagttttatgagggatgaaaaaaagatctgttstctgtgcatggcctggagcaccaagggtctggggctgtggctgctgtgagcaccccaccccacacggtcactctgctttctgcaggatgcaggcagccag

SEQ ID NO: 242125 - DNA, 201 bp, Homo sapiens
gaggccaaggcgggtggatcacgaggtcaggagattgagaccatcctggctaacatggtgaaaccccatctctactaaaaatacaaaaaaaaaaaaaaaaattagccaggcatggtggtgggcacctgtagtcccagctactcgggaggctgaggcagaatggtgtgaacccgggaggcggagcttgcagtgagctgagat

SEQ ID NO: 242126 - DNA, 201 bp, Homo sapiens
agaggcactccttgacttaagattagtctggagtcacatggcagatttgcatttaaaataaggttactagaaagggggcaggcatgggcagagttctgtcmggctctggagcaggagatggtgtcccgggctcgtgtgtggtggtgatggtcaggagccagggccagcagcaccccatgtggacccgagagggcagtatga

SEQ ID NO: 242127 - DNA, 201 bp, Homo sapiens
tgaaaaaatttatctgctacagtgagcttgacagtttctcaatagttaacgacttctttgatgagattggtgacaatataatgaatgagtatttgatattrtataattaaatgtgtcagcatttggaagatccacataattttgtgaactaatattttccagctcaccattgcaccacgttacaaagtcatagtgcatggg

SEQ ID NO: 242128 - DNA, 201 bp, Homo sapiens
aatatagaataaattgctgaaaagaaactttgagggaatattcaaagcaccctcttattttgaaccttccttgatcatctctaatgtgactgctttctcaraacttccatatcatttgtcccctcttttggagttcttgctgctttttgtttttgtatttgttttcacttattcagtaattattcagtgtccactgcatcc

SEQ ID NO: 242129 - DNA, 201 bp, Homo sapiens; identical to SEQ ID NO: 47520

SEQ ID NO: 242130 - DNA, 201 bp, Homo sapiens
tgtgtgtatattttgagacggagtctcactctgttgcccagtctggagttcagtggcgcgatctcggctcactgcagcctccacctcccgggttcaagcarttgtcctgtcttagcctcctgagtagctgggattacaggcacacgccatcacgcctggctagttttttgtatctttagtagagacaggatttcaccatat

SEQ ID NO: 242131 - DNA, 201 bp, Homo sapiens
atcaggcatttaaatttataaaacatgtttgaaaatctttaaaagttacacttactgactagttgcttgtctgttgcactaacaaaatttattattcatgwttcgggaataccctctttaggttttgtttgttttttttttcatagtaaattatcccagtacaagtgtctttgtacaaaattttgatttctaagtttcttt

SEQ ID NO: 242132 - DNA, 201 bp, Homo sapiens
tatttcggggtattttggtttctacattaaaatgttaattacttgtttcttaaattttacattgcttagtatttttattttgttttaggtaaactttggartcggagtttaaaactagcttatactctacttaataaactgacaagtaagaatgaacctctacttaaacctggagacagagtaagtaactagaatgtcact

SEQ ID NO: 242133 - DNA, 201 bp, Homo sapiens
agtgtctttgtacaaaattttgatttctaagtttctttaaaaatatcaatgccagctgggcccagtggctcacacctataatcccagcactttgggaggtygaagaggatggctgaggaggttggatcgtttgaactcaggagtttgggatcagcctgagtgacatggtgaaaccccatctctgctaaaaaatatgaaaat

SEQ ID NO: 242134 - DNA, 201 bp, Homo sapiens
gcggggacttggccagcttcttcaccacacatgctgttttatcagtaaggtctttatgacctgtatcttgtgccgacctcctatctcatcctgtgacttaraatgcctaacttctgggggtgcagcccagcagatctcagccttattttacctagcccctattcaagatggagttgctctggtttaaacgcctctgacata

SEQ ID NO: 242135 - DNA, 201 bp, Homo sapiens
ttgtatttccaagtaaactttagaattaacttgtcaatttccataaaaattactactgggatattgattggcattgcattgaatctctagttcaatttgartagaattaatgttttataggttgagagcatcccaaatatgaaaatccaaaatccaaaatgctctaaaatctgaaactgcttgaagctgacatgatgctca

SEQ ID NO: 242136 - DNA, 201 bp, Homo sapiens
gatttctaagtttctttaaaaatatcaatgccagctgggcccagtggctcacacctataatcccagcactttgggaggtcgaagaggatggctgaggaggktggatcgtttgaactcaggagtttgggatcagcctgagtgacatggtgaaaccccatctctgctaaaaaatatgaaaattagggctgggtgcagtggctc

SEQ ID NO: 242137 - DNA, 201 bp, Homo sapiens
agactcatagaagcagagagtagaatggtggttgccagagactggggtggtgggagaatctggaaggtgttgatcaaagggtatatagtttcagttatacrggatgagtaactgctagagagctgctgtacagcatagtgcatatagttaacaatactgtattgtatatttaaaaatttgttaagagagtagagctcatgt

SEQ ID NO: 242138 - DNA, 201 bp, Homo sapiens
tttatgtttatggtgatggtttcacagggatatacttacctttaaattcatcaaaatttatatattaaatatgcacgagttcttataggttaatcatgtcratttaaaaaaagaaatatcagtgatttcaattttaatatcctaaaactttaaacatgcttcattgccagctattctgtacttgtttaattcctgtctttc

SEQ ID NO: 242139 - DNA, 201 bp, Homo sapiens
gctgtgcagtgagcttgcttctgggtagaattaacataatccttgtggctcaatctttacacctttaaattagctgacattttcagtattgcactggtctrttaaaaagactaggaagttatacactgcttagcaaagaaaactatcgtcagtgaagacacaacacttaaaaatagctgttacttctattgtgtattgata

SEQ ID NO: 242140 - DNA, 201 bp, Homo sapiens
tctggagtcacatggcagatttgcatttaaaataaggttactagaaagggggcaggcatgggcagagttctgtcaggctctggagcaggagatggtgtccygggctcgtgtgtggtggtgatggtcaggagccagggccagcagcaccccatgtggacccgagagggcagtatgacaagaggaggcacagggtttatttat

SEQ ID NO: 242141 - DNA, 201 bp, Homo sapiens
cataatccttgtggctcaatctttacacctttaaattagctgacattttcagtattgcactggtctattaaaaagactaggaagttatacactgcttagcmaagaaaactatcgtcagtgaagacacaacacttaaaaatagctgttacttctattgtgtattgatagattatcacttagactaatgtacccaagggtctc

SEQ ID NO: 242142 - DNA, 201 bp, Homo sapiens
ctctggttttggggctcagctgggacatgcagggagaagatggaggctccaacagcatctggggaaacagaacagtcccactccgccggggagggtctggyggtaaccgtagctcacacctccctgtggcccgtcgtcccctcctcttgcctgccctgagcctgcagtgtcattgcccccatttcatacgtgaggaaactg

SEQ ID NO: 242143 - DNA, 201 bp, Homo sapiens
ggctcaatctttacacctttaaattagctgacattttcagtattgcactggtctattaaaaagactaggaagttatacactgcttagcaaagaaaactatygtcagtgaagacacaacacttaaaaatagctgttacttctattgtgtattgatagattatcacttagactaatgtacccaagggtctcccttcccttttc

SEQ ID NO: 242144 - DNA, 201 bp, Homo sapiens
  misc_feature (1)...(201): n = A,T,C or G
aggaactggagtcattttgcttatttctattaacatctcttatttctttcaaaattcaaagtcaaatttggagcggcctctaaacttcctgacctgacatnagcacatcagtcctgcaggccagcttctgagggacgttattttaatgtcactgaatcaagagagtctcgtgtcatgttttctttaacaagggacatagct

SEQ ID NO: 242145 - DNA, 201 bp, Homo sapiens
ttaaattagctgacattttcagtattgcactggtctattaaaaagactaggaagttatacactgcttagcaaagaaaactatcgtcagtgaagacacaacrcttaaaaatagctgttacttctattgtgtattgatagattatcacttagactaatgtacccaagggtctcccttcccttttcacacaggaaatgcatggc

SEQ ID NO: 242146 - DNA, 201 bp, Homo sapiens
  misc_feature (1)...(201): n = A,T,C or G
tttctattaacatctcttatttctttcaaaattcaaagtcaaatttggagcggcctctaaacttcctgacctgacataagcacatcagtcctgcaggccancttctgagggacgttattttaatgtcactgaatcaagagagtctcgtgtcatgttttctttaacaagggacatagctctcctccttccagatcctccccg

SEQ ID NO: 242147 - DNA, 201 bp, Homo sapiens
tctattaaaaagactaggaagttatacactgcttagcaaagaaaactatcgtcagtgaagacacaacacttaaaaatagctgttacttctattgtgtattratagattatcacttagactaatgtacccaagggtctcccttcccttttcacacaggaaatgcatggcctctgttcttaggatttcctgggttcttgaagg

SEQ ID NO: 242148 - DNA, 201 bp, Homo sapiens
gctctccagcctcaccagcttcaccttccttccctttttgcttcagattttggaattctaaacttgcctttgggaatctaccagaaaccatttggcccttsccccgtgtacctcccagacccagttcctatgtaggattttggggtactgtgggacaaactgcctcatccctaggttgacctaaccaagagaggggaaccc

SEQ ID NO: 242149 - DNA, 201 bp, Homo sapiens
tggtattctgttacggcagcctgaacagacggacactcagtgtgtcatcctgttgtttaacaacattcaacagactgagtgccaggaggcttacagtctakcaggggctgaaagacatgtaaacagtggcaatatcatgaaatgtgtacagaacccagtcagcccaaggggagggatcatcagcactgcgcaagctgggcc

SEQ ID NO: 242150 - DNA, 201 bp, Homo sapiens
ttacccaggctggagtgcagtggcgcaatcccagctcactgcaacctccgcctcctgggttcaagaaattctcctgcctcagcctcccaaatagttgggawtacaggcgtgtgccaccacgcccggctaatttttgtatttttagtaaagatggggtttcaccatgttggccaggctggtctcgaactcccgacttcaagt

SEQ ID NO: 242151 - DNA, 201 bp, Homo sapiens
gtcctgttgtaggtggcgctcgtgtttccgaatagtgaccctgtgatgttcatggttgcattttatgggtgtctcctggcagagctggttcctgtccccayagaagtgccattaacaagaaaggtagcaaacccatggctcaggtcccgtgtggttcgcttctgaacttgataccagcagtatcttacttccttttcactc

SEQ ID NO: 242152 - DNA, 201 bp, Homo sapiens
gccagttggttggttgtccacagcctgatcgtgcccctctccactttgtgcaggcagttccggtcaccacaggaggagcacccatctttgacaggccattyaccaggacaggcctgctgggcttcatcgggcctgtgagtatgtcctcctgtaccagcactggcagtcagagaaggtagggggtgtggctaagggacacct

SEQ ID NO: 242153 - DNA, 201 bp, Homo sapiens
atcgtgcccctctccactttgtgcaggcagttccggtcaccacaggaggagcacccatctttgacaggccattcaccaggacaggcctgctgggcttcatygggcctgtgagtatgtcctcctgtaccagcactggcagtcagagaaggtagggggtgtggctaagggacacctcgttgcagccccacccttgtcctggcc

SEQ ID NO: 242154 - DNA, 201 bp, Homo sapiens
aaagaaatggatggatttgagaattcttggtgattagatgctcctaggcagtctgacaaacttaaattaggaatgggtttgacaggatctactgtactgcrtttgttaaggctctttagggaaaatcacatatacgcagtttagattctgtgcatttcaaacatatttttgcgtattgctcctaatttctgctccaatgta

SEQ ID NO: 242155 - DNA, 201 bp, Homo sapiens
gtagctggttgggtgttgtggatgtgtgaggtgaccaagagtaaggcaggaggggtgctggtacctgttgcctctagaatggcactgtttagaactttctkctacgatgggaaagttctgtggtgtccagcatggtggccaccagccacatgtggctactgaacacttgaaatgtgggtagtgggacgagggaactgattg

SEQ ID NO: 242156 - DNA, 201 bp, Homo sapiens
aaattgggggacagaaaagttagcttgaaaaacccattgcagtaatccagggcaagagattttgctggtctggacagagctgagccaataggatggagagsgcaatcagaagtagagccagcaggcttctgtgtgaagtgcacagtaaaggagggtctagggtgactctggagtttctgaaacacctgtctgggagatgat

SEQ ID NO: 242157 - DNA, 201 bp, Homo sapiens
cttaacactcttcctaactgttcagttgaacagaagatgtgcagctgaaaggttggaaaaacattgaagtggataatatctaagttctcctttcagttgcraggctagtctaagttttctaatcatgaatgtttagtaagaattatttcaccatgtggctttagctcaccaagtgatatttaaaaacattcttccattaaa

SEQ ID NO: 242158 - DNA, 201 bp, Homo sapiens
tctcctttcagttgcaaggctagtctaagttttctaatcatgaatgtttagtaagaattatttcaccatgtggctttagctcaccaagtgatatttaaaarcattcttccattaaatacctgctattttaaaaggtttattacctatttatacacaaacttgttagccaagagctatatttttatggaagagtcttgttac

SEQ ID NO: 242159 - DNA, 201 bp, Homo sapiens
tttaaaaggtttattacctatttatacacaaacttgttagccaagagctatatttttatggaagagtcttgttacctttcactgacattgttatctacctrtatgtcctgaatgcatgttcagggtcttaacttctgttagaaggaataatttaaacaagctcatgagtactgtagaaaatatggcagacattcatattga

SEQ ID NO: 242160 - DNA, 201 bp, Homo sapiens
aatgcatgttcagggtcttaacttctgttagaaggaataatttaaacaagctcatgagtactgtagaaaatatggcagacattcatattgagcaagtactytctggtccttggaaagtgcagtatagtcagccacaggcttcagtttgaaagtcttttaagagttagaaacttctgaatatggaagactgcttcttgtttg

SEQ ID NO: 242161 - DNA, 201 bp, Homo sapiens
ggtaaatctagcaacattgacttaagcttactcctcccatggtaagtcaaggaagcacgtgccctttttcctaatagaatatcaaaactaaagatttataygtatatatttttatccaggcgtggtggctcacgtctgtaatcccagcactttgggaggctgaggcaggcagatcaagaccagcctggtcaacatggtgaa

SEQ ID NO: 242162 - DNA, 201 bp, Homo sapiens
gagtagctgggattacaggcatgtgccaccatgcttggctaattttgtatttttagtagagatagggtttctccatgttggtcaggctggtctcgaactcyggacctcaggtgatctgcctgcctcggcctcccaaagtgctgggattacaggcgtgagccaccacgcctggcaaaactttcaagaattactcaggctgac

SEQ ID NO: 242163 - DNA, 201 bp, Homo sapiens
tttaatggacacacagttccacatggctggggaggcctcacaatcatggcagaagatgaagaaagcaaagggacgtcctacgtggtggcaggcaagagggygtgtgcaggggaactgtccttttataaaaccatcagatcttgtgagacttactatccggagaacagcatggggaaaaacctgcccccgtgattcagttac

SEQ ID NO: 242164 - DNA, 201 bp, Homo sapiens
ttcctttaaagataccatcttccttgaagaacatgaagtctgagggtacctgtgaaggggccccttccttctgctgatgcagccctgtggttccgatggcygcaggctgcgctaacttgagcatgtccagccaccccttccctgctggccccccagttagtgctggcgttccactcttgttgctctgtgcagggtcgatct

SEQ ID NO: 242165 - DNA, 201 bp, Homo sapiens
tggcaggcaagagggcgtgtgcaggggaactgtccttttataaaaccatcagatcttgtgagacttactatccggagaacagcatggggaaaaacctgccsccgtgattcagttacctcccactgggtccctcccatgacacgtggggattattacaattcaaagtgagatttgagtggggaggacacagagccagaccat

SEQ ID NO: 242166 - DNA, 201 bp, Homo sapiens
cacatcacattcttgtcctctgggcccaccagatctgggtaagcagcccccacaatgccaccgggtactacaccgtttacggggaggaggcgcttcatgcygaccacttcagtgcccggctgagttttggagacacacagaccatctgggcaaggaccggctaccttggcttccttcggcgaacagagctcactgatgcca

SEQ ID NO: 242167 - DNA, 201 bp, Homo sapiens; identical to SEQ ID NO: 47543

SEQ ID NO: 242168 - DNA, 201 bp, Homo sapiens
acgcctgtaatcccagcacttcgggaggccgaggcgggtggatcacaagatcaagagatggagaccatcctggccaacgtggtgaaaccccgtctctactaaaaatacaaaaaattagctgggcatggtggcaggtgcctctaatcccagatactcaggaggctgaggcaggagaattgcttgaacccgggaggcagaggt

SEQ ID NO: 242169 - DNA, 201 bp, Homo sapiens
agaacagcaccatcatccccaaacactcctcatattatccctttgcagtctcccggtcccccagctgatctattccctatccttatgggtttatcttttcmgaaatgtcatataaatggaatcatatagcatgtaacctttcgagaatggctttcttctttcagcgtaatgtattttgaaatttattcacacttttgcaag

SEQ ID NO: 242170 - DNA, 201 bp, Homo sapiens
cctctaacaagaccgacagtgagaaaataccaaagacacaaattaccagtcaggaatgaaagaggccaatctctatagactgcacagacattaaagcatgrtaagggagtactatgaacaactgtatccatatctggtcatatgcccagtagatgtttcgggcaacgattgaccacatatataacagtggctccatgagat

SEQ ID NO: 242171 - DNA, 201 bp, Homo sapiens
tctctatagactgcacagacattaaagcatgataagggagtactatgaacaactgtatccatatctggtcatatgcccagtagatgtttcgggcaacgatkgaccacatatataacagtggctccatgagatcatgataaagctaaaaattcttaccacctagtgaccttgtagccattgtaacacaacacattactcacg

SEQ ID NO: 242172 - DNA, 201 bp, Homo sapiens
tgaggattgtcactgcagcactgagcatgttggtgtgggtggtggctggctgtggacctgggagtgtgcagtgatggagtgagggggtgaacaaggatgaygtacttccaaggggtacccgggtcagtgcagtgaatcaggtgtgctcattgcattgaggaagggttggttttaaaaatggaaggcttagggaagaaaata

SEQ ID NO: 242173 - DNA, 201 bp, Homo sapiens
tacccgggtcagtgcagtgaatcaggtgtgctcattgcattgaggaagggttggttttaaaaatggaaggcttagggaagaaaatagtgatttataatatratgccattcgggtcaattaaaagtacacagacacaaagcaacatgcattctgcagaatatattctaaaagacactataaaaaagtttctaaaagacacta

SEQ ID NO: 242174 - DNA, 201 bp, Homo sapiens
aggtgtgctcattgcattgaggaagggttggttttaaaaatggaaggcttagggaagaaaatagtgatttataatatgatgccattcgggtcaattaaaavtacacagacacaaagcaacatgcattctgcagaatatattctaaaagacactataaaaaagtttctaaaagacactatagaaagaagctataagaaaata

SEQ ID NO: 242175 - DNA, 201 bp, Homo sapiens
atttcctacctcattcctaggtggtttaatttgttttcaggctgtttttccttatgataatttactggaacagccgtcctttttcctcctttcccaaggayaccccttggcctgggacggcttgtgtcccatgggtcccttattgcaatacttgtgaaacttgaacctgcacaggagttactggaggatcttgataaagtg

SEQ ID NO: 242176 - DNA, 201 bp, Homo sapiens
tatgctcatgtaaccaccactacactcccaacgtagaacagtttcaccaccctcaaaattctcttgtcttttcctcactcccagcccctggcaaccactakctgtatctgacgctatggttgtatcttttccagaatgtcataaaagttgagtattcagtagccttttgagtctggcttctttcactcagcagcatgcatg

SEQ ID NO: 242177 - DNA, 201 bp, Homo sapiens
aaattgctgtgtgtatcagtagtttgttccttttttattgctgagtggtattccattttatgggtccattatagtttatttgtccagacacttcatggaargacatcagtgtttccagtttttcaatcataaattgatgtttaattttaaaattttggaattgtagaagaaatgcaattcttttttccattgttgttttag

SEQ ID NO: 242178 - DNA, 201 bp, Homo sapiens
cacggtgcttgaacctgtcgtaaaataattctcctgagaaatagaacagtcagtcttgcacggtgcttgaacctgtcgtaaaacattttcacagacagcartcattggggtgtcacttatttactcatggggaaaatacaggtaagtgtttaaacttccctggaaaatcatgatgaggtcatgattctgaatgaatcttag

SEQ ID NO: 242179 - DNA, 201 bp, Homo sapiens
agcaggaggaacacttgaggtcaagagtttgagagcagcctggacaacatagtgagaccctgtctctacaaaaaaagggagaaattttaaatagaattttwaaaaaagaaaaaaatataggtgtttaaaagcaagggtataagttgagggcacagctaaagcttttacttgagatttggaaagtgattttaggtatttttt

SEQ ID NO: 242180 - DNA, 201 bp, Homo sapiens
caggttcaagcaattctcatgcttcagcctcccgagcagctgggattacaggcacacaccaccacactgagctaattttttgtatttttagcagagatggrgttttgccatgttggccaggctggtctcaaactcctggcctcaagtgatctgcctgcctcgtccttccaaagtacagggattacaggtgtgagtcactgc

SEQ ID NO: 242181 - DNA, 201 bp, Homo sapiens
tattattattattttgagatggagtttcgctcttgttgcccgggctggagtgcaatggcacaatctcagctcactgcaacctctgcctcccgggttcaagygattcttctgcctcagtctcctgagtagctgggattacaggcgcctgccaccacacccggctaattttttttatttttagtagagatggggtttcaccat

SEQ ID NO: 242182 - DNA, 201 bp, Homo sapiens
tactgagattattagcattactttgagtcttaagagaattaacacctttgcattattattattattattattattattattattattattattattattttgagatggagtttcgctcttgttgcccgggctggagtgcaatggcacaatctcagctcactgcaacctctgcctcccgggttcaagtgattcttctgcctc

SEQ ID NO: 242183 - DNA, 201 bp, Homo sapiens
cgaagcatcttccaaaactaagctcagcccctcctctctgcatgtgtctgcctcctcagctcagctacccctgtggaaacccaggagtcacccatgccccsccagcaccacctcccctcctctctcgcaggaacagtgaacagaggctggtgggagcctcttgcggccggcctcctcacagccagtccttgtctccacagg

SEQ ID NO: 242184 - DNA, 201 bp, Homo sapiens
cttccaaaactaagctcagcccctcctctctgcatgtgtctgcctcctcagctcagctacccctgtggaaacccaggagtcacccatgcccccccagcacsacctcccctcctctctcgcaggaacagtgaacagaggctggtgggagcctcttgcggccggcctcctcacagccagtccttgtctccacaggggtggacc

SEQ ID NO: 242185 - DNA, 201 bp, Homo sapiens
ccacaggggtggacctcattgccgcgttctatggctgcttgtactgtggctgcgtgcctgtcaccgtgcggcccccgcaccctcagaacctcggcaccacrctgcccaccgtcaagatgatcgtggaggtgcgcctacctggcccgcgggtcagagtctgtgagtgggaggctgcaaggctgccctccgctgccccctttt

SEQ ID NO: 242186 - DNA, 201 bp, Homo sapiens
ctagcaatatttctgttttcaaatatgaaaaaatcttattcataatgaaaacaaactgtcaaatgcttattaatgcatttggtaagaaagacagaacctasgttaggatcgtaaaatctatttgaaagaaataaccaagaccctaatatatgaagaaacataccagtttcctaactggaaaaacttaatacatcctataaa

SEQ ID NO: 242187 - DNA, 201 bp, Homo sapiens
atgcaaagcacaaagcaacaattttgcttcttaagatttgtgttaaataccaataaatgctaagatgtgattagcctgagagtaatgcgttttctgatgcmttatggttatgtctaaactttctgatttatgactgtctagcttacaggaactggtggctttgaagaatctcttaccttgctgggagtcaatagctcaatt

SEQ ID NO: 242188 - DNA, 201 bp, Homo sapiens
ggtctggtgagctgtttctcactcagggtttaccgacactgtagaacaatgctggggacgaacagcacggaccatttcagacttggaaacgtaattcagargtgggctttgggagggctttctaccacggctcccacccctgatgtgagctgccatgtactgtgctgccaagggtacagggccagctgtttgatcatcacc

SEQ ID NO: 242189 - DNA, 201 bp, Homo sapiens
atgagaaatgtaagctgttttcaatggactttttcataattggaaaagcaaattgttcacataaggtattcccataaaattgtgtttcaggaatagacccrtctctgcaagcagagaatagaattcctgggccctcacaaaccacggccgctgcacccaagcagcagaagtctcggcccaccgcctcgagggatgagcgct

SEQ ID NO: 242190 - DNA, 201 bp, Homo sapiens
  misc_feature (1)...(201): n = A,T,C or G
ctgggggaccttgaacccctaggcggactcactgcagggagcagagctgctaccttcttgggtgtccccgggggccagggaggagctgccatgcagctgtncctgtagaaacaagatgttaagtgaggcccctgaacagaagttcctctgctgctctccttccagggcacagctggcccggaccccacaaccgtctacgtg

SEQ ID NO: 242191 - DNA, 201 bp, Homo sapiens
aaatctcataatgttttaagaaattttacgaatttgtattaggctgcattcaaagccctcctgagccatatgaggcccatgggccacgggttgaacaagcrtggtttaaaccaacaactagatacacatttaggctcatttgtttcactttattttcaattttggggatttctcttttattcagttttgatttataactaa

SEQ ID NO: 242192 - DNA, 201 bp, Homo sapiens
cctgatgttatcctatttacttcccattgagttggaatatccgtctggcctgtagtatagattggacgcatttggagattaaaaatgtttgcatatgctcrtattccttacctgaaaatctatggtgtacatagtattcttacccaaatgggtacttgctttctataagactttttgtgtggatcttaatttcttttacta

SEQ ID NO: 242193 - DNA, 201 bp, Homo sapiens
ctactgagattattagcattactttgagtcttaagagaattaacacctttgcattattattattattattattattattattattattattattattattttgagatggagtttcgctcttgttgcccgggctggagtgcaatggcacaatctcagctcactgcaacctctgcctcccgggttcaagtgattcttctgcct

SEQ ID NO: 242194 - DNA, 201 bp, Homo sapiens
agaaatggctgtcaaattattgtttttgctaaatatagctatagacactatccaattttaaaataatgttttaataattgtaaaacccataatgaaacacwcagtcatgctgacttgaagaaaccttaatgtacagttaattttgttgtctgaagcaattttctcggagaaggaattgtttttagggctagttcacatgac

SEQ ID NO: 242195 - DNA, 201 bp, Homo sapiens
cctactgagattattagcattactttgagtcttaagagaattaacacctttgcattattattattattattattattattattattattattattattattttgagatggagtttcgctcttgttgcccgggctggagtgcaatggcacaatctcagctcactgcaacctctgcctcccgggttcaagtgattcttctgcc

SEQ ID NO: 242196 - DNA, 201 bp, Homo sapiens
acctactgagattattagcattactttgagtcttaagagaattaacacctttgcattattattattattattattattattattattattattattattattttgagatggagtttcgctcttgttgcccgggctggagtgcaatggcacaatctcagctcactgcaacctctgcctcccgggttcaagtgattcttctgc

SEQ ID NO: 242197 - DNA, 201 bp, Homo sapiens
tacctactgagattattagcattactttgagtcttaagagaattaacacctttgcattattattattattattattattattattattattattattattattttgagatggagtttcgctcttgttgcccgggctggagtgcaatggcacaatctcagctcactgcaacctctgcctcccgggttcaagtgattcttctg

SEQ ID NO: 242198 - DNA, 201 bp, Homo sapiens
gtatacctactgagattattagcattactttgagtcttaagagaattaacacctttgcattattattattattattattattattattattattattattattattttgagatggagtttcgctcttgttgcccgggctggagtgcaatggcacaatctcagctcactgcaacctctgcctcccgggttcaagtgattctt

SEQ ID NO: 242199 - DNA, 201 bp, Homo sapiens
aggctggagtgctgtggcgtgatcttggctcactgcagcctctgccttccggatcaaacaattattacgcatcagcctcccaagtagctgggagtacaggkgtgcaccaccaggcctggctaattttttgtatttttagtagagtcagggtttcactgtgttgaccaggctggtctcgaactcctgacctcaggtgatcca

SEQ ID NO: 242200 - DNA, 201 bp, Homo sapiens
aattcagggcaagtcagtgtagtaaagtgaaagcaagtttattaagaaagcaaaggagtaaaagaatggctactccctaggcagagcagctgcaccttttytaatacaggatcatttataggaattttttatattatattctggatcccagccctgtgtcagtaataccttgcgagagttctctccctctttgtggctggc

SEQ ID NO: 242201 - DNA, 201 bp, Homo sapiens
ctcaaactcctgacctcaagtgatctgcctgccctggcctcccaaattgctgggattacaggcatgagccattacacccagccatctttcattatttttttaatataaaaatcctgctcaagggagaaagcaaaatttcaccattgcattagcgcattattgatgtcaaacccaattcttaataaaaccttgtagacaaat

SEQ ID NO: 242202 - DNA, 201 bp, Homo sapiens
taaatttgtctctgatgttttacttgaatcaatagaatggccattgaaaaaaattcacattttctattatagtttatatattaataacttgagcacgttatctatttaatattttcaccactgtgtggttgtatattttcttcacatttaagctcttttgacaggcctttttcagaaaaaattttaatagggataatggtt

SEQ ID NO: 242203 - DNA, 201 bp, Homo sapiens
tacctagcccctattcaagatggagttgctctggtttaaacgcctctgacatatttcccctctctgttttatgagagaagccttaattctaaaggttgtaragggacaaagattcatcttctataacttcttcaggctgaacaggagtgatgacattcctgcctaactattagggtcttttatatttgagaaagaaaggag

SEQ ID NO: 242204 - DNA, 201 bp, Homo sapiens
aggacagctggctacattgggccatctgcaccaagaggaagaggagagctgtgtgccccactccgggcgtgcctcccaggggagctcagtgtctatctctstgcgcccgtgtccccagggctgcagttaacatccctttatctgtcacacaaccaggaagaataagagtggcccctgtgacatttggttctttagagggac

SEQ ID NO: 242205 - DNA, 201 bp, Homo sapiens
gagaagacaagtaacccatctactggcaagaacgtttcttacccgatgacccatgtgacatttggtttttagagggatagggacagatagaagacaagttwtccatctactggcaagaacgtttcttacctgatgctgtcataggatctgacttagtttcatcttgatgaacgatggtggtgcatacagtgtgtgcttgct

SEQ ID NO: 242206 - DNA, 201 bp, Homo sapiens
aaagctcccttcccgtgtcccctgttacagtcacttcaggcggtagaccagccgagagtggagtcgggtgagcttagtggacagcacatctgtgggagccrtgggctgctgcacgtcctcccttctctgagcacagggacatgtgagccgccatcgcacacagctctgcatcatccttggtgtaaactcagcgggtttccc

SEQ ID NO: 242207 - DNA, 201 bp, Homo sapiens
  misc_feature (1)...(201): n = A,T,C or G
cactgcacccctggatggatgcccatcaggtgcgctggcatcacctggctgattgtctttgtaggcttagtgaccctctgcccctcctgacacccagagangggatcccttctcaggaactggagtcattttgcttatttctattaacatctcttatttctttcaaaattcaaagtcaaatttggagcggcctctaaactt

SEQ ID NO: 242208 - DNA, 201 bp, Homo sapiens
ttctgaggcgtccgtctcagatgaaagctcacagtgccctgctctgtctccacactgcttccagctcataaaggaactgccaagactacaagggtagcagmaggcagcattttccacagagaaagtttctcttaggaaaacagcctgctcagattgtttctgtagctttcctgggtgttccatggccagaggctgctgccc

SEQ ID NO: 242209 - DNA, 201 bp, Homo sapiens
gaatgtgcagattgatctgttgtcatgggagcataaggactcacgttcctagtcctatcctcttggggaatgtgctgtcaaattgatgtcttcaaaccagrcgggcacaggcatcatttgtgagctctgctgtgaagccagactgggggcttccagcaagccgtgcccagagggaaatcactcagcctcagctggcttctc

SEQ ID NO: 242210 - DNA, 201 bp, Homo sapiens
cctcaggtgatctgcctatgtcagcctccccaagtgcagggattacaggtgtcagccaccatgcccagccccttgagggaatttctaaccaaaatctcatsaggccattgtgacaggcaggtttactctgtgcctgcctctgtgctgaagatggtggttctgagtctggatccctttgagaattgagccacccacatgcac

SEQ ID NO: 242211 - DNA, 201 bp, Homo sapiens
tgagcgtgcgggccctcaggtggtcttaccgtgtcctgatgggaaggtgtcctgggtcccaaccctgagtgtggctggtgtgagggaccctcccctcaacygtcccacttcctgcacagccaaacccaggtctgtaagtcaagggtgtacccccaagaaatggagagtctgagccaggcatggtgacccacccttgtggca

SEQ ID NO: 242212 - DNA, 201 bp, Homo sapiens
aggtggtcttaccgtgtcctgatgggaaggtgtcctgggtcccaaccctgagtgtggctggtgtgagggaccctcccctcaaccgtcccacttcctgcacrgccaaacccaggtctgtaagtcaagggtgtacccccaagaaatggagagtctgagccaggcatggtgacccacccttgtggcagatgctcaagggaaacg

SEQ ID NO: 242213 - DNA, 201 bp, Homo sapiens
gtgagggaccctcccctcaaccgtcccacttcctgcacagccaaacccaggtctgtaagtcaagggtgtacccccaagaaatggagagtctgagccaggcrtggtgacccacccttgtggcagatgctcaagggaaacgcccctattggccaccccgttctcctctttcagacgctgccatgcaggggcgtcttagagcca

SEQ ID NO: 242214 - DNA, 201 bp, Homo sapiens
tctttctttctttctttctttctttctttctttctttctttctttcttttcttttctttcttttctttctttcttctctttttttttttttttttgagacrgagtttcactgtcacccaggcagagtgcagtggtgcgatcttggctcactgcaacatccacctcccaggttcaagcaattctcctgcctcagtctcgtga

SEQ ID NO: 242215 - DNA, 201 bp, Homo sapiens
aagtcaagggtgtacccccaagaaatggagagtctgagccaggcatggtgacccacccttgtggcagatgctcaagggaaacgcccctattggccaccccrttctcctctttcagacgctgccatgcaggggcgtcttagagccagtcgaactgaccgtgggttctggacggactctctctagaagggccccatgacactt

SEQ ID NO: 242216 - DNA, 201 bp, Homo sapiens
gtttacatttttgtatgtgggtattcagttgttctagcatcatttataataaagaccattcttttcccaccaagtttccttggcatctttaatgaaaatcrgtagaccatgttggagagggaagggtctatttctgggctctgggctctgtgtgttgttccgtttccttatttatctgtccttacacctcgtatagccatg

SEQ ID NO: 242217 - DNA, 201 bp, Homo sapiens
cttgtggcagatgctcaagggaaacgcccctattggccaccccgttctcctctttcagacgctgccatgcaggggcgtcttagagccagtcgaactgaccstgggttctggacggactctctctagaagggccccatgacacttggtcctgcaggcacaggcctctggtcccttggtctctgcatggatgcacaaaatgct

SEQ ID NO: 242218 - DNA, 201 bp, Homo sapiens
tttaattttctgttcttttttttttttttttttttttttttaagacaaagtcttgctctgtcacccaggatggagtgcagtggcttgattttggctcaccrcagcctctgccttctggtgtcaagcgattctcctgccttagcctcccaagtagctggaactccaggcaactgccaccacacttggctaatttttttttct

SEQ ID NO: 242219 - DNA, 201 bp, Homo sapiens
cagagtctcctccacacccgaggattagacatagctttcaggagattatttccccgttgtaatcagatagtgtgtattagtcagggttctctagagggacrgaactaataggatagatgtatacatataaagggaagttcattaaggcatattgactcacacgatcacaaggtgaggtcccacagtaagccatctgcaagc

SEQ ID NO: 242220 - DNA, 201 bp, Homo sapiens
agggaagttcattaaggcatattgactcacacgatcacaaggtgaggtcccacagtaagccatctgcaagctgagagcaaggaagccagtctgagtcccartgctgaagtacttggaatccaatgttctagggcaggaagcatccagcacaggagaaaggtgtaggctgggaggctaggccagtctagtctttccacgttc

SEQ ID NO: 242221 - DNA, 201 bp, Homo sapiens
ggactaagaatacttagagttatttcttgactatatgctaaacaaggggtggattattcataaattttctgggaaaggggtgggcagtttctggaactgarggttcctcccattttagaccatctaggataacttcctgacgttgccatggctgctgtaaactgtcatggcactggtgggagtgtcttttagcatgccaat

SEQ ID NO: 242222 - DNA, 201 bp, Homo sapiens
tgccacgtggtagctaagcatatgtttctgaaggttgagtacttaggagtggaagtactaggtctagggttatgggcaccttcacattgctgagatggcaycaccgttctccagttcacccttggcccatcagtgtgggtgggccctacctgctccccatcattatcagcacttggtattgtcaggcttatgaattttagc

SEQ ID NO: 242223 - DNA, 201 bp, Homo sapiens
agattaattctttttaaagtaaaaaacaagattaaagtaatctttttccaggagctatataatcaaataatcttttttttttttttttttttgaggcagaktctcactctgtcgcccaggctggagtgcagtggtgcgatctcgaatcacttcaagctccacctcctgagttcacgccattctcctgcctcagcctcccga

SEQ ID NO: 242224 - DNA, 201 bp, Homo sapiens
agcccatttgtccaaaatcaccagcaatcatcaaactaaacaaccagatactgtagccatttccattccaaatgggtaaacagaaatgctggccatgcccrttcttattacacattatttgggtggtcacagctgatgcagtgcgatggaaaacaaagcagaataaataaatattagagaacaaaagataatcatctttaa

SEQ ID NO: 242225 - DNA, 201 bp, Homo sapiens
cacgcctgtaatcccagcacttcgggaggccgaggcgggtggatcacaagatcaagagatggagaccatcctggccaacgtggtgaaaccccgtctctactaaaaatacaaaaaattagctgggcatggtggcaggtgcctctaatcccagatactcaggaggctgaggcaggagaattgcttgaacccgggaggcagagg

SEQ ID NO: 242226 - DNA, 201 bp, Homo sapiens
cctagaaaaagattaattctttttaaagtaaaaaacaagattaaagtaatctttttccaggagctatataatcaaataatcttttttttttttttttttttgaggcagagtctcactctgtcgcccaggctggagtgcagtggtgcgatctcgaatcacttcaagctccacctcctgagttcacgccattctcctgcctca

SEQ ID NO: 242227 - DNA, 201 bp, Homo sapiens
tcctagaaaaagattaattctttttaaagtaaaaaacaagattaaagtaatctttttccaggagctatataatcaaataatcttttttttttttttttttttgaggcagagtctcactctgtcgcccaggctggagtgcagtggtgcgatctcgaatcacttcaagctccacctcctgagttcacgccattctcctgcctc

SEQ ID NO: 242228 - DNA, 201 bp, Homo sapiens
ctcctagaaaaagattaattctttttaaagtaaaaaacaagattaaagtaatctttttccaggagctatataatcaaataatcttttttttttttttttttttgaggcagagtctcactctgtcgcccaggctggagtgcagtggtgcgatctcgaatcacttcaagctccacctcctgagttcacgccattctcctgcct

SEQ ID NO: 242229 - DNA, 201 bp, Homo sapiens
cattaaggcatattgactcacacgatcacaaggtgaggtcccacagtaagccatctgcaagctgagagcaaggaagccagtctgagtcccagtgctgaagwacttggaatccaatgttctagggcaggaagcatccagcacaggagaaaggtgtaggctgggaggctaggccagtctagtctttccacgttcttctgcctg

SEQ ID NO: 242230 - DNA, 201 bp, Homo sapiens
gtgattttcttaaaattcttgaaattatacagtttgagtcctccaactctgctttttttttttaattttctgttcttttttttttttttttttttttttttaagacaaagtcttgctctgtcacccaggatggagtgcagtggcttgattttggctcaccgcagcctctgccttctggtgtcaagcgattctcctgcctta

SEQ ID NO: 242231 - DNA, 201 bp, Homo sapiens
tgtgattttcttaaaattcttgaaattatacagtttgagtcctccaactctgctttttttttttaattttctgttcttttttttttttttttttttttttttaagacaaagtcttgctctgtcacccaggatggagtgcagtggcttgattttggctcaccgcagcctctgccttctggtgtcaagcgattctcctgcctt

SEQ ID NO: 242232 - DNA, 201 bp, Homo sapiens
ctgtgattttcttaaaattcttgaaattatacagtttgagtcctccaactctgctttttttttttaattttctgttcttttttttttttttttttttttttttaagacaaagtcttgctctgtcacccaggatggagtgcagtggcttgattttggctcaccgcagcctctgccttctggtgtcaagcgattctcctgcct

SEQ ID NO: 242233 - DNA, 201 bp, Homo sapiens
atgaaacattttgaaacaaaggctaaagctaaatgcatatttttgttgaagcacagctgcaggttttgctttgtgctgtctgcaaatgtcagcaaattggsttcaaatgataccagggattttgttcagtgacttgaacaactgttccccattccttcgctcaccgtaatgtgtcttgagggcatctgtgaccaggggacc

SEQ ID NO: 242234 - DNA, 201 bp, Homo sapiens
aaaaaatttcagccatcccaataggcatgtagagatatctcattacagtttcaatttgcatttccctaacggctgatggtgtgttgaacatctttttatgyacctatttgccatctgtgtatctcttgagggaaagtatctgttcatacttttggcctatttttttttttaattgtgcttgttttctttctttctttcttt

SEQ ID NO: 242235 - DNA, 201 bp, Homo sapiens
cagcttcttctctgattgtataaataatatatgcttagtgttaaatatataaaaaatattataccaaatttaaggacaaagttaaaaatcacctgataccyctgaatcctgagatggccgccctcagcatttcactgagcactgttgtcctcatgcctggatgcagatgcacgcacacatgtgtactttccatgagagtgg

SEQ ID NO: 242236 - DNA, 201 bp, Homo sapiens
tgattttgttgttgttttattgttggtaccattagaaatgaaaacttttatatgaggtttctctctagcaataatgtattttagtcttcctgttaaactgyacaagatgtcgatagtgtctaatgacttcacattcatgaacttgcattgttgtcatatatttaaagtatcaaaaatagtgacacccatttttggtttgag

SEQ ID NO: 242237 - DNA, 201 bp, Homo sapiens
tcatttgtattttctcccagtctggcttgctttaacaatgcctttcaaagagcagatggtttacatttttatgacattcagtttaccaaatttttttatakattgtgcttttgtgtcatatctaagaaatttttgtctaacccaaggtcacaaatgttttctcctatattttcttccagaattttatagttttagttttta

SEQ ID NO: 242238 - DNA, 201 bp, Homo sapiens
gtctggtattgctccttgtggggggaagatgttctgacagcagttttctctgaaaatactgttttccctccatgactgcccctcactgtccttgggccctkggcctctgctgagggcgtgggggacggtgttggtgataaggctaccaggcttctccccgaggccagaccggtctctctgccgctgtgtctttaccagtgg

SEQ ID NO: 242239 - DNA, 201 bp, Homo sapiens; identical to SEQ ID NO: 47534

SEQ ID NO: 242240 - DNA, 201 bp, Homo sapiens
tcacagggcctgcgttgcagattgggtctgtggggcattgacccgtttgcaaggcgctagaggctcctgtgctgttggccccttcttggggggcctgaccrtggtcctggcgcatccagcttctgcccgtgtgggtggagtcttgacgcacaccctttccctcaggacaacctggtcttcatcgtgggcaaactggacggg

SEQ ID NO: 242241 - DNA, 201 bp, Homo sapiens
gactaaagctcctttaatcctttggttagttgtcggtgactgtgatgcaaaaatcgaaacaaattattgtaagcttttttatagttgggattaaaaaacartattataaactatgaatgcttaaaaacagaatgtgttcgtggtgctctgaattgctgattttaaagttttgattttgcttgtagttcagcaaccagatcc

SEQ ID NO: 242242 - DNA, 201 bp, Homo sapiens
tgtggggcattgacccgtttgcaaggcgctagaggctcctgtgctgttggccccttcttggggggcctgaccatggtcctggcgcatccagcttctgcccrtgtgggtggagtcttgacgcacaccctttccctcaggacaacctggtcttcatcgtgggcaaactggacgggctgatggtcactggagttcgcagacaca

SEQ ID NO: 242243 - DNA, 201 bp, Homo sapiens
tccatttagaatttaattttgtatattgttggagtaaagttgtatattgttggtataaagttggagtcattttcttatgagtatctaactgactcagtatmatttattgaaaaggcaatcctttccccaaagtactgcagtgttactttgttatatagtgggtgaaaaatgtacttgcgggtctgtttctgggctcctgtt

SEQ ID NO: 242244 - DNA, 201 bp, Homo sapiens
gagttcgcagacacaatgcagatgacgttgtggccaccgcactggccgtggagcccatgaagtttgtctacagaggcaggtgatgcgctgcggacccccaygccgggagtagattccttcatttgcagctcgggaagtctttgtgcagtagatggaaagcccagcaaacttgaattcacaaagcctaaaaattgttgtaca

SEQ ID NO: 242245 - DNA, 201 bp, Homo sapiens
atcatttattgaaaaggcaatcctttccccaaagtactgcagtgttactttgttatatagtgggtgaaaaatgtacttgcgggtctgtttctgggctcctsttggcggggggtgttgtcagtctgttgtctctccatgctctgaatcactgtagcattaggagtcctcttgctctgtgatggttcctcaagattgccttga

SEQ ID NO: 242246 - DNA, 201 bp, Homo sapiens
gcgcctgccaccgcacccagctaatttttttgtgtttttagtagagacagggtttcactgtgttagccaggatggtctcgatctcctgacgtcatgatccrcctgcctcggcctcccaaagtgctgggattacagccatgagccaccgctcttggccctgaaatttctaatctgctgtgaaatcctgatgagttccttatt

SEQ ID NO: 242247 - DNA, 201 bp, Homo sapiens
catgctgacgctgccccagcagccccactttctttcacatagcctgcccctttcccatgttgcctcccttcctgatgctgccccaccagcccccattcctyccacacagcctgcccctgttccaggcctagcttgtcacagggcctgcgttgcagattgggtctgtggggcattgacccgtttgcaaggcgctagaggctc

SEQ ID NO: 242248 - DNA, 201 bp, Homo sapiens
ttagtagagacagggtttcactgtgttagccaggatggtctcgatctcctgacgtcatgatccacctgcctcggcctcccaaagtgctgggattacagccrtgagccaccgctcttggccctgaaatttctaatctgctgtgaaatcctgatgagttccttattttagatattgccttttcagtttagaattttcatttct

SEQ ID NO: 242249 - DNA, 201 bp, Homo sapiens
ggaccagcctcaatgatcgtggggaacctggttgctgggaagagaatcgctcaggcttccgggagagagctcgcccacctggaggacagcgaccaggcacrgaaggtgacaggccagttccggggacgggtggacgggtgtctgtgccccggaggcgccagtgagcaagtcgccctctcgtgcagttcctgttcctggctg

SEQ ID NO: 242250 - DNA, 201 bp, Homo sapiens
tgagccaccgctcttggccctgaaatttctaatctgctgtgaaatcctgatgagttccttattttagatattgccttttcagtttagaattttcatttctytattatagttactattctaatactctggaaaaatttctcattattccatacactttcctaatctttgcttctgctgccttgaatacacacattaattatt

SEQ ID NO: 242251 - DNA, 201 bp, Homo sapiens
aaatgtttcctatctgttggatccatttatgctattgtcatcttagagatatgtaggggatgtataggtaagtaaaggtataagattatgtaacatggagrggaacctcgaaaaatagcttaagctgagaaagggggtaaacaaaaaaagtattgagcccagaaatggtggcttaggcctgttatgtttgcattttgggag

SEQ ID NO: 242252 - DNA, 201 bp, Homo sapiens
acagcttaaattttgtcttacaaagtcagcacttattggttattcattgttgcgtgttctcaaaggccctgagtcaactgtctctactcagttaaatactrtttggacttgtcccttatggtttcaagcacaattattacaatatttggggcttacaaaaattttatttataactagcttttaatttaactagatattgta

SEQ ID NO: 242253 - DNA, 201 bp, Homo sapiens
tctgttagtcctattagttcagctcatgcagttaactcctgttcgatattcatgaacattttggctctccatgagagtcctgaaagtttttcctctattckaatgtcgcaacctccaaagttatcagaaacctgcattcaaaaacacctgttagagttctctagttgattataaaaccaccttctaaagaggacccaaaca

SEQ ID NO: 242254 - DNA, 201 bp, Homo sapiens
ttattggttattcattgttgcgtgttctcaaaggccctgagtcaactgtctctactcagttaaatactatttggacttgtcccttatggtttcaagcacarttattacaatatttggggcttacaaaaattttatttataactagcttttaatttaactagatattgtaaaaattggaaatttggaatattcatttctttg

SEQ ID NO: 242255 - DNA, 201 bp, Homo sapiens
gtcctattagttcagctcatgcagttaactcctgttcgatattcatgaacattttggctctccatgagagtcctgaaagtttttcctctattctaatgtcrcaacctccaaagttatcagaaacctgcattcaaaaacacctgttagagttctctagttgattataaaaccaccttctaaagaggacccaaacaagacaac

SEQ ID NO: 242256 - DNA, 201 bp, Homo sapiens
gtgtttcgctcaatattatcaagctctgtggatgtttggatggaaagcatcagactgcctgggggaccttgaacccctaggcggactcactgcagggagcrgagctgctaccttcttgggtgtccccgggggccagggaggagctgccatgcagctgtacctgtagaaacaagatgttaagtgaggcccctgaacagaagt

SEQ ID NO: 242257 - DNA, 201 bp, Homo sapiens
tttcaggagattatttccccgttgtaatcagatagtgtgtattagtcagggttctctagagggacggaactaataggatagatgtatacatataaagggargttcattaaggcatattgactcacacgatcacaaggtgaggtcccacagtaagccatctgcaagctgagagcaaggaagccagtctgagtcccagtgctg

SEQ ID NO: 242258 - DNA, 201 bp, Homo sapiens
ttaataacatgtactgtcatatcagagttatagaagtttcacacgattttggaacacaaaccaataacatatttatacaaatatagcccaaagaaagccamgcatcatttcatatctgacagtgcttgctgtgtgatttttataccaaataagctgaatatgtcattttttggacttgagaggacctaatatctaaaagat

SEQ ID NO: 242259 - DNA, 201 bp, Homo sapiens
tgcggtaccaccccatcgacattgagacctctgtcatccgagcacacaggagcatcgctgagtggtaagagcccaggtggagggcggcttcacgtggtccmtccagcccttcctctgggcatgagtgctgtgcatcggttggagcagagcaaggactgctgggccctgggcacaggcctcctgcattgtcaccctggtctg

SEQ ID NO: 242260 - DNA, 201 bp, Homo sapiens
tcggcctaagagttcttgttttatctctgccctggaaatacagagtgtcatataaatccttgctcagatccttccaggtttctctctcatctaattctctsctaactggctccctggggatgcagacagttatgagggagcccatggcgcaccattaccctcgggcacctgcccaagaggagccacaacttccactgaagc

SEQ ID NO: 242261 - DNA, 201 bp, Homo sapiens
atcatttctgcattttattcagtttttaaactcatcttaggcaggagtgctggtctgccaccagtaccctctcctactcggaagcagagtcttccaccatkgtgcttttaaaattcatccatgttattgcgggtagttgtaattcatttatttctgttgaggaatgaatatatcagaatttacttaagcattatgctgttg

SEQ ID NO: 242262 - DNA, 201 bp, Homo sapiens
caccattgtgcttttaaaattcatccatgttattgcgggtagttgtaattcatttatttctgttgaggaatgaatatatcagaatttacttaagcattatrctgttgctggaatacatgggctgtatccagttttagctactagaaacagtgctcccaggaagattctggtgtgtgccacgtggtagctaagcatatgttt

SEQ ID NO: 242263 - DNA, 201 bp, Homo sapiens
tttgttaagcctcagctcaacagaccaagtgcaattgtttatacctataatcccagcactctgggagaccaaggtgggaggattgctcgaggccaggcatyggaggccagcctaggtgatagagtgagaccccttttctacaaaataacaacaacaacaacaagactcagctctcatgctttctcctatctcagattgagt

SEQ ID NO: 242264 - DNA, 201 bp, Homo sapiens
aatgaagttagagattgaaggaaactaaaggaacatactgactagatgtaatgtgtgatctaggattggatcctgatttggggaaaaatctataacagacrttattgcgataagtgaccaaatttgaatatagactgtggattagatactggtattataccagtgttaaataatcaattttgataattttactgtgattat

SEQ ID NO: 242265 - DNA, 201 bp, Homo sapiens
ccttgggaggcagaggcgggaggatcacttgagctaaggacgtcaagacctgcctgggtaacatagtgagaccctgtctctacaaaaaataaaaatttagyggggtgtggtggtgtgcacctggagtatcagctactcgggaggctgaggtgggaggatgacttgagcctgggaggtcaaagctgcagtgagctgtgattg

SEQ ID NO: 242266 - DNA, 201 bp, Homo sapiens
gttgtgcacctacatatatataatttttgtttatcaattaaataaacaaaaatttcaggttttactttcagagaactctgtaatctttgcctttcctcagyttgtcatgttacttaattaaatcagttttgtcaaaatgtgattttagatatttttccatgctatagacattgaaataatttcttaatttttagagtttta

SEQ ID NO: 242267 - DNA, 201 bp, Homo sapiens
ttctgtggaactacagttccctggataggtgctgtatctagattcatttttgatttcattgggtcttgcacagtgcctgggagcatttatatacgtggtcrgtaattaaaaacaatttatttttcctacctcttaataactatcacagttgttcagtaatagttttattggatagaactatgttcaagtatgttctaattt

SEQ ID NO: 242268 - DNA, 201 bp, Homo sapiens
aaactagttcagtgtttcaggaatgtagtgtatgaaaggccgtgacagtgttaagagttgaagcaaactaaattatctacaatagaatgttttatttattrtaaaaatatggaacaactgtgtatagtgattggggaagtaaaaagaaaaatatatagtacacattctatgttggttaaggtcgattggggctagattttt

SEQ ID NO: 242269 - DNA, 201 bp, Homo sapiens
aaactggatttagaattggcaaaaactggaaaattctgaaagagctgtaacactgataattttatatatatatatatatatatatatatatatatatatawatatatttttttttttttttttttttttttttttttttgagacgaagtctcgctctatcgtccaggctggagtgccagtggaatgttctcggctcactgc

SEQ ID NO: 242270 - DNA, 201 bp, Homo sapiens
atagaaaatatacagtaaaaatatggtattaagatgttacgggaccaccatcatatatgtggtctgtggttgatcaaaaccttgttgtgtggtacatgackgtatactaaagtgtttaataatttctagtaagtgtgagtgggcttatttcaacctcttttattttactctgttaaattgttcatgttgcttttttttttt

SEQ ID NO: 242271 - DNA, 201 bp, Homo sapiens
gaagtgtgagatatttaaatgctgtaactgagaataactcttagagattggatttaccctagtttttgccctatttttatgtgacagatttttttttttttaagtcttatcttcctctcatgttgcattgtgattatatcaaacataatcttatgtgccccttcagagtcccttggcaccatctgcctcgtagaattttct

SEQ ID NO: 242272 - DNA, 201 bp, Homo sapiens
gtaaataaagtttgtaagtaaataaataaattcggtagtgaaggaagtagtatctcgaggaatggtagggggctagagagttttgttgtgtttttgttttmaggtagtatgttgtaggctgagaggaaaaaggtagtgaagagtggaagattaaaggtataacaggggagtgataaaaatctttccccattggagaagtta

SEQ ID NO: 242273 - DNA, 201 bp, Homo sapiens
ctcaccttggccccgcaaagtgctgggattacaggtgtgagccactgtgccagctgccttatgagtcttgcagatagaccttcaagtctcttgtttatgcygaccactttttggtattgatttggcaagcacattacagggtcaaggggaaaatagatcagaacccagtttacagttaagaaattatagactgggattgtt

SEQ ID NO: 242274 - DNA, 201 bp, Homo sapiens
tcattaagttatctgtattctacaaccatttttctattgtatttcataagcataaaatttaatataaattttatatgatacaggagccttcataagtaaakgaagactcaaaaaattggtaaacttgtatattttttatttttacagtttatttttatttattgatacataatagttgtacatattttgggggtgcatgtg

SEQ ID NO: 242275 - DNA, 201 bp, Homo sapiens
aattgatgaataatttttgtaatatttaagtgcattcaaaatgttggacaggtaatttagatatctgggaatattgtagtttactggtttttttttttttyattttagtactagttgcatatatgctctgacatgaggtattgaagaaatatgaaatgtgtagtctctgctacgcttataaaacataattctgaaaatgat

SEQ ID NO: 242276 - DNA, 201 bp, Homo sapiens
ctctagagtagcagggactacaggcacccgccaccacgcccagcttattttttgtatttttagtagagaccgggtttcaccatgttagccaggttggtctygatctcctgacctcgtgatctgcctgccttggcctcccaaagtgctgggattacaggtgtgagccactgcgcccggcctaattttttatttttttgagac

SEQ ID NO: 242277 - DNA, 201 bp, Homo sapiens
tatcttggtgccatttatgtgctcctcataacttttcaaaagctgtgactggtgtcagaacaaggtggagaaagactttttgagctgattcagtataggargatccctaggaacagctctgggcatggcagtttagctctgctctatcttactgacttgctctcccttctttcctccctattttccccacttcctccttcc

SEQ ID NO: 242278 - DNA, 201 bp, Homo sapiens
agtgcaaatcaacaaagtgccctaagcaccattttgaaggaagttcttggacttcctgatgattaatgaattttacctgtgaatgggtttgtatcttgtcsggacagaaaggaattctgtatttacctaactggccattatcttggtgccatttatgtgctcctcataacttttcaaaagctgtgactggtgtcagaacaa

SEQ ID NO: 242279 - DNA, 201 bp, Homo sapiens
agcaggccaacgagggaggagggagggaaggcggcaggagcgaccgaagtggccttctgcgggcctgcagctttggtctgaagtgccagggacgccctggytgctggccccgggggccttggagcgaagggcgggcggtgggggtttagggttgtgcgtttgtgtgggagggatggttctgggcagtggcccctggggccg

SEQ ID NO: 242280 - DNA, 201 bp, Homo sapiens
ggcctaaatgaggctagcctagttaagcctgatctttttctgtttgtgaaaagagctgagcagagctgaaggctgcatggtggtttcagaaactgcctacytaatttgaaaagaacaatggtaggaaaggctagatcttccaattttaccttatccgaaaagcttgatttgctaaagcttgtgaagccatatgtgaaaatt

SEQ ID NO: 242281 - DNA, 201 bp, Homo sapiens
aaatttttatttacttttaaaaatttcttttatatggactaacaatcaagagtatatcttacaattgatggcattttagatttgatgaaatatggtaattwaaaaaaatctaattaatgatacttttccctattacaaaggtaacattttcattgtaaaaaatttgaaatatacagaaaataactcagaatagaataaaaa

SEQ ID NO: 242282 - DNA, 201 bp, Homo sapiens
gccttggatggaagtgaataaaaaaggtcctaaaggtactaaaaaaggtcctggtcatttgaatattgactctctcatatgcatccttccaaatcatcctraaggatgtttgaaactactgaggtgttatccagggctatttctaggaggttgggttatcaaattctctccagagtatagaccatttccttcttttttttt

SEQ ID NO: 242283 - DNA, 201 bp, Homo sapiens
ttttcttaaaaaatcatttgaagactcccacttgtcttccagaaatttctaaattctttagcacattaggcaggacccttcatgacatggttaatgcctcsttttccagcctcatctctcatcactccttcacacataccatgtggtccagtcataccaaaccacctgcagagcctgtaatttgccccacttctgctctgc

SEQ ID NO: 242284 - DNA, 201 bp, Homo sapiens
tacttcccttttaaaataagaaaacattaaaaataagttattttcttctttgggaatatggttagcttctagtatttcataaacttgtaattaacaatgtrtctgtaagttttaagaaaaactaaacatatgtatacttttaaaaacctagtgatattttctgatatataatgcttgtttctcaattttcttcagaatcct

SEQ ID NO: 242285 - DNA, 201 bp, Homo sapiens
cactgtcttaaaactggaagtttagatattgactttaaaatggaatatgcaggaatacctatgttttaattgtacaaggtcattgttgcatgttctctcartgtcagtgataatattattgtggtattttctttcaactaagaaaatctaatgctgcctttaaatttatctaaagaatctttctttttgattgacagggtg

SEQ ID NO: 242286 - DNA, 201 bp, Homo sapiens
tgggaaatattaatactacacttgcagggtgaaggtagcaggcatgagactgcgttagaactgctctgtaactaactcagtagaaggcatgttactttttwaaaaaatgatcaaatcatgacctataaagatttacctaacagtttcttggacttttcagatagccgttaatcttcacctttttccttccataattttagc

SEQ ID NO: 242287 - DNA, 201 bp, Homo sapiens; identical to SEQ ID NO: 47590

SEQ ID NO: 242288 - DNA, 201 bp, Homo sapiens
tctgtctctatgggtttacctattctggatatgcgatgtaatgagaatcatgcaatatgtaatcccttgtgacttttttttttttttaaaaggtaatgcaygcacatggtaaaaaactcagaagatgttaagagtatagtaaaaagttggccgggcatggtggctcacgtctgtaatcccagcactttgggaggctgaggc

SEQ ID NO: 242289 - DNA, 201 bp, Homo sapiens
gccgggcttggtggtgcatgcctgtagtcccagctactcaggatgctgaggtgggaggatcgcttgagcccaggaagtggaggtttctgtgaaccaagatyacaccactgcactccagcctgggtgacagtgagactctgtcttaaaaaaaaaaaaaaaaaaaaaaaatcaagttttctttggcgcttttactacagcatg

SEQ ID NO: 242290 - DNA, 201 bp, Homo sapiens
ccactaatttgctttctgtctctatgggtttacctattctggatatgcgatgtaatgagaatcatgcaatatgtaatcccttgtgacttttttttttttttaaaaggtaatgcacgcacatggtaaaaaactcagaagatgttaagagtatagtaaaaagttggccgggcatggtggctcacgtctgtaatcccagcactt

SEQ ID NO: 242291 - DNA, 201 bp, Homo sapiens
cctaaactcaccagttactaacattttgcctcatttgtgtgctttctctctttttctctatgtagatgcactcccctcaaccttttgaaaataagttgcayatatcatgccactttacctctagccacttaagtgtgtatttcttgaaataaatgttttctcctgcataaccacacattgttattataccaaacaggatta

SEQ ID NO: 242292 - DNA, 201 bp, Homo sapiens
agtggaagagagagagggaagaggatcagagaaagagatggtgattagggaagcagggtcagagagatgtaacatagttgactttgaatatggaggaagarggctaagccaaagaatttgtttggcttctagaattttgaaaagacaaggaaatatattctctcctggagcatccagaaaggaactcagccctggtgataa

SEQ ID NO: 242293 - DNA, 201 bp, Homo sapiens
ctttctatttattccatctgtcatctgcaggatgggttgcattcttagactggctccactcatgttaaatgatggatcccagcaactactgtggccacacrctttttctcatctatctcatgacaggcagatggttcctactcagaatcactaaataagatttcctaactttgtgctattgctgaccactttcctgtgacc

SEQ ID NO: 242294 - DNA, 201 bp, Homo sapiens
aagatcatctatggatctaaatgaaatgagagatcttggaattagagctactttaaaggtacctcaaagttaaaaggttattcttgtcttccatttccatktaaaactgagattaacagtaattggattttatgtgaagataaaactataatcttcattaatttggataagtgaagaccaatactgatttgggatggagtg

SEQ ID NO: 242295 - DNA, 201 bp, Homo sapiens
gagtgggcccattataattataagtgtccttagaagtggaagagagagagggaagaggatcagagaaagagatggtgattagggaagcagggtcagagagrtgtaacatagttgactttgaatatggaggaagagggctaagccaaagaatttgtttggcttctagaattttgaaaagacaaggaaatatattctctcctg

SEQ ID NO: 242296 - DNA, 201 bp, Homo sapiens
tatattttgtgtttttgtaaactgatcttcaaagttctgattctcaagtccttctctgtcatttttgtgacctgctctaaagctttttttctccctttttrtattgttatgccttagttgtaatgttttagctaaaatggaaaggaatgttccagatatgaggcatatttttaatttacttggtagtattatgtctatgtt

SEQ ID NO: 242297 - DNA, 201 bp, Homo sapiens
gatgatctgagtgggcccattataattataagtgtccttagaagtggaagagagagagggaagaggatcagagaaagagatggtgattagggaagcagggkcagagagatgtaacatagttgactttgaatatggaggaagagggctaagccaaagaatttgtttggcttctagaattttgaaaagacaaggaaatatatt

SEQ ID NO: 242298 - DNA, 201 bp, Homo sapiens
ggaggcggaggttgcagtgagccgagattgcgccattgcactccagcctgggccacaagagcaaaactccgtctcaaaaaaaaaaaaaaaaaaaaaaaaamaaagatgagtatttataataacatgacaactttgcctattattgtgagtttctatttaaaaaaaattcaaccatttactactgtggtagacagaaaaaat

SEQ ID NO: 242299 - DNA, 201 bp, Homo sapiens
agagttgaagcaaactaaattatctacaatagaatgttttatttattataaaaatatggaacaactgtgtatagtgattggggaagtaaaaagaaaaatakatagtacacattctatgttggttaaggtcgattggggctagatttttggagaatttgttcatgcattggtattgcctctttagtgaaattctaaagtcag

SEQ ID NO: 242300 - DNA, 201 bp, Homo sapiens
tattgaatggtaagatttcatgcaaagtccaaattttactagtgaaagttccattcaatcagttaattttcacactgatgaatgcaattttaaaaatcacrttaaaaaaaaagaaacctagattgtatctgattgttcttttgactgttcactcagcaggtatttcttgattgccttttatgggttgggcctaaagataaa

SEQ ID NO: 242301 - DNA, 201 bp, Homo sapiens
ttaatgactagcaatgctgagcatcttttcatgtgcttattggccatttgtatatctttggaaaaatgtctatttaaggtctttgcctggtttttaatggkgtctttttttgctgaaaaaaccttctaatttttgactgctttttttggtctgtatgtgtttgttttatcctatatttctttcccaagtagattgtttagc

SEQ ID NO: 242302 - DNA, 201 bp, Homo sapiens
tgaatactggaagcagtcttaatgtgtctcatttactgttaagaaaaaggattgttttggtcttaggtctaagatcaaaggcgttagtatatatgaaaggyatataaagtataaagaaggcatataaaatggagaattcacactacctactactctgcaattccctgatccttttatgttatagggattaaagtctattaa

SEQ ID NO: 242303 - DNA, 201 bp, Homo sapiens
tattctttttaattgctgcaaagtataccatggtatgaatacatcatagttgtttttagttttagtttttttttttttttaactattaaaacctctgcagygaacatccttatgcatgtggtcttgtgaacatatgcatgtatttctcaggagttgtcagatcataatgtgtttgcattacactttaatatggtctgccaa

SEQ ID NO: 242304 - DNA, 201 bp, Homo sapiens
ctgtgattcatgtagcatgggtggagtaaattttataatttgactcctttggttttgtgagggttttcaaggtccttaaatcctaggttttgattgtcttractgcttaacatcacagaatatcaccaccaaagcacagtgatgaagtgtgagatatttaaatgctgtaactgagaataactcttagagattggatttacc

SEQ ID NO: 242305 - DNA, 201 bp, Homo sapiens
tctacaaaaaataaaaatttagtggggtgtggtggtgtgcacctggagtatcagctactcgggaggctgaggtgggaggatgacttgagcctgggaggtcraagctgcagtgagctgtgattgtgccactgcactccatccagcctgggcaacacagcaagaccctgtctcattcaatcaatcaatggaataacatgtact

SEQ ID NO: 242306 - DNA, 201 bp, Homo sapiens
ctgagttgtaggagatacatacacatctcaaagggacagaggaagaatttacaattgtaaactcttcttagtgctctaagaaaggaaggtcaggggcctayagtcaggtgttggctagaataaacagtaagcttcttttgatagccctgaacttctccagacagactggagctcaaaaggaggctgggtattccagggctg

SEQ ID NO: 242307 - DNA, 201 bp, Homo sapiens
acattcacagattctggggattagggtgtggaaatctttgggagccgttattctgcctaccacactgaataatctgttgttttaatataccacaatttatwtatctattcattagttaatggtcatttgggttgtttccactttttagcaattatgagtaatactcatgaacgtttgtgtacaaatttttgtgtggatatg

SEQ ID NO: 242308 - DNA, 201 bp, Homo sapiens
cactgcacctggcctcaaattcttatatttttagtagagacggggtttcaccatgttagcctggctggtctcaaactcccgacctcaggtgatccacctgyctcggcctcctgaagtgctgggattacatgcgtgcgagccactgtgtcctgcccagctgattattcttatacgtagttacttagtattatctctgatagt

SEQ ID NO: 242309 - DNA, 201 bp, Homo sapiens
gaaaaacagtttgagtttttcactctcagacagcacagtgattcttcataaaactctatgactacaccaacgagcattggcaaagaacaaaaaattattcratgtcttttaccagttccataaactggcagtgattcatagcatttacacatatattcgtaatattcttaacaagtatatccatgataccttttcatagtc

SEQ ID NO: 242310 - DNA, 201 bp, Homo sapiens
gaggttgcagtgagccctgatgacgccactgtactccagcttgggcaacagagcaagaccctgtcccaaaaacgaaacaaaacgccctttgcatgttcagwgactggaatgtcagaagtgaaattgatgaataatttttgtaatatttaagtgcattcaaaatgttggacaggtaatttagatatctgggaatattgtagt

SEQ ID NO: 242311 - DNA, 201 bp, Homo sapiens
tggaatgtcagaagtgaaattgatgaataatttttgtaatatttaagtgcattcaaaatgttggacaggtaatttagatatctgggaatattgtagtttaytggtttttttttttttcattttagtactagttgcatatatgctctgacatgaggtattgaagaaatatgaaatgtgtagtctctgctacgcttataaaac

SEQ ID NO: 242312 - DNA, 201 bp, Homo sapiens
ctttgttgaaaataatttcgccgtatatgtgtgaatagttctatttcttgcttctcttccaatgcattggaatgtctatatgtcttttttggagaggaagsgcagtaccaaactatcttgattatcgcagcattattgtaaacatccaactttgttcttttcaaaaattgctttggttagtctacgttacttttatttcca

SEQ ID NO: 242313 - DNA, 201 bp, Homo sapiens
catagtctactggagtctatttctttttatctcctcttctcatctcctcattcttttttctttttttatctaattcaatttttataaacatgatgtaggcmtgcaaatatatccccaaaataattttggtgggtttattatctaatttcagatttatcaattgagacctgccttctagttatatttgattttgcctttttg

SEQ ID NO: 242314 - DNA, 201 bp, Homo sapiens
aatatagtttgggaattatttcatatgtaaatgaataattctaagaatacagtaataaaaatactgtacatgtgttgaaggaaacatatctaaattgtatrtgtatacattacacatacatgtgtataattttgaataaaatctgactttttagtaaggagagaaattagtaaatgtattaatctggactatgattatact

SEQ ID NO: 242315 - DNA, 201 bp, Homo sapiens
attgagtaggctaagaggagaggaggcagaggaggggttggccttgctgtatcaggggtggtggcagagatgggagaaaatctgcatataagtagacttgmgtagttcaaacccatgtgttcaagggtcaactgcatatcattaactgctcaattagataaagtcaaacctgaaatgtactgtgtaaccataaaggttaaa

SEQ ID NO: 242316 - DNA, 201 bp, Homo sapiens
agtcatttatattaaagaatttggaaggcaaagacattggaagaggtattatgatactacctaatgtttacagtttggcctgaaattagtatgtatctccrgttacataattgaaatgtaattgggttttataaagagatgataaggtattctttaatggatgttcatgcctcaactgtgtataatacataaaataatctc

SEQ ID NO: 242317 - DNA, 201 bp, Homo sapiens
tattcagaaaagccttttctctaacttcatagcaaataaggattgatataaaagggcagaaatgagccttctacatgtataaataacctttaagcaatggyttgtaactatgtttctattgaaactaaattgtttcccaagttcaattaagatgttaggtctttctttaggaaatgtgagtggaacgtaaccagtaacaat

SEQ ID NO: 242318 - DNA, 201 bp, Homo sapiens
aggctttgggaatattgtgcctggtttgaacttctttccaggccattaacactttctccatatcagcaataaagctgcttcacttaccatttgtgtgttcmcttgtaatttcctttaagagctttttctttgcattcagaacttggctaactaatgcaagagtcctagcttccagcctgtcttggctttcaacatgccttc

SEQ ID NO: 242319 - DNA, 201 bp, Homo sapiens
gtttatttgacttcggaacagtaagacatttgtagtaattatactcatctggtaatattaacacctgatatttggatttcttagtttataaaatgctaacrtgagtatgatcaaatattctttcatactatttcttaatataatctaattttcttgtgccttttggttttgtttgaatgaccttactacttagacattaaa

SEQ ID NO: 242320 - DNA, 201 bp, Homo sapiens
actcttattcctgtgacagtatagttccacactgatgaatatttacatagtctactggagtctatttctttttatctcctcttctcatctcctcattcttytttctttttttatctaattcaatttttataaacatgatgtaggcatgcaaatatatccccaaaataattttggtgggtttattatctaatttcagattta

SEQ ID NO: 242321 - DNA, 201 bp, Homo sapiens
tcttactgctttgcaaggatatcaaattatgaattttaaaatacccctaagagcaactgggtttttttagagttagaagcaattttttggttaaacttgtsttctatgtaactatttgccttggaattttcaaaagtattatcttgccactaattcagattgtaacctctggcaaaatataaaaatggcagctacattctt

SEQ ID NO: 242322 - DNA, 201 bp, Homo sapiens
ataaaagcttaccgactgctagtgtggtaaagggtcataagagcaagtgaaagaggcttttaattctggttataagaatttttttttttttttggagacgragtcttactatgttgcccagactggagtgcaatggcgttatcttggctcactgcaatctccatctcccaagttcaagtgattcttgcatctcagcctcct

SEQ ID NO: 242323 - DNA, 201 bp, Homo sapiens
ttaggaggtgagggctttgggaggtgactgggccaggagggtgaagccctcatgaatgagattatttcctctgtgaaacaggccccagagagttgccattyctctttcaccatgtgaggacacaggagacagtgccatctatgaaccagaaaggaggcccttaccaaacactgaatctgccagtttcttaatcttggactt

SEQ ID NO: 242324 - DNA, 201 bp, Homo sapiens
attattatgtatcatatattttcatactggggttaacaaatatattctaagcaccgaaactggtggccttgaaaatggctagactagctgtttcctttcayagtccaaactgtgtgaatatagctaaataaaaaatctggctctattataatagcaaatgtgattttgtatgtggagtcttaaggcgtgattatactgttt

SEQ ID NO: 242325 - DNA, 201 bp, Homo sapiens
ctgagtagctaggattacaggcgtgctccaccatgcctggctaatttttgtatttttagtagagacggggtttcaccatgttggccaggctggtcttgaaytcttgacctcaagagatccacccacctcagcctcccaaagtgctaggattacaggcatgagccactgcacctggttatgagaattttggaaaaagatttt

SEQ ID NO: 242326 - DNA, 201 bp, Homo sapiens
gtgtgcagttagatgtgtacattttgatgttttcatatacagatgtatatatactcctgtaaccatactacaatcttatatagattatttctatcacctcyaacaagttctctcatgctcctttgctttctagtcttttaaatgtacatacacccattattgtttttatttttcttttcttttgtaaaaattagaatgagg

SEQ ID NO: 242327 - DNA, 201 bp, Homo sapiens
ttaattaacactttatcctccctattaaattttttcctgttttaataatttctcttcttttctcctttttccttgtatttactctaatgttctttttccartatttaagtttaatacttagcttaatgatttttcagtcttcttttcaaagaagtggatatttaagactatacattttcctctaagctgcccataattttg

SEQ ID NO: 242328 - DNA, 201 bp, Homo sapiens
gtatattatatctactttatagcagtataatttacagtgtgcagttagatgtgtacattttgatgttttcatatacagatgtatatatactcctgtaaccmtactacaatcttatatagattatttctatcacctccaacaagttctctcatgctcctttgctttctagtcttttaaatgtacatacacccattattgttt

SEQ ID NO: 242329 - DNA, 201 bp, Homo sapiens
tcactcaagggaagaggcaacaacctgatgatatggatattgggcagtagttaattaacatgggttctagagggttgtctgtgtgtgtgtgtggtgggggrcgggggggaagggtgtggtataagacctaatattaaagctcaatttaaaacattttaaaaataaattttattgtgcatacctgaggtttacaacatgatg

SEQ ID NO: 242330 - DNA, 201 bp, Homo sapiens
tagttttaaatttcagcttctattgttctatttcatttgaccattaagtaactgagtctaagtgcaaggcctaacatccatgtcgtcctgtgacagttacygttaatcaatttcaaacttgtgtcagttatatatttagaggcctgtagtattctgcttacccattataaaaaggaaattagtttaatgaagttattttgg

SEQ ID NO: 242331 - DNA, 201 bp, Homo sapiens
aagttagttatactttttctcacagaaactatgacatgataaaacttcttttgtttgtgtatgactcttttagccccatcataaaaagggtttttgcatartatttgtggattgcttaacttttcctaggggcctaaaattctttgatattcaggtcagtctctttccaagtacctatcatgtcaaccttttgcaagattt

SEQ ID NO: 242332 - DNA, 201 bp, Homo sapiens
atattcagctgcctaattagtgtagtaattatttaccctttacaattttgctcaaggtacatctccataaaggcttcctgtttgctcccttctctttatcrtgaaaggatgaatctggattttctctttgctattcactgtatctcattgggctgacatttggtcctttgttgccaaagtattgatctaaaacagccacct

SEQ ID NO: 242333 - DNA, 201 bp, Homo sapiens
ctcattgatactgcagtgttattgcttttagctcttctagcagtcaaaactcgaaaatctatatatgattacatctatatttatctataaatattaaaaamcatcagctcataccaatacctccaattctaatatagtaccccagggttcattttagtttgcagccctttctttcatagtgaaaaatttggttattgttat

SEQ ID NO: 242334 - DNA, 201 bp, Homo sapiens
ttatggacaggacaatatgaacatacagaaccagtttaaaaagctataagggtgcaatggtcttttggggggaaatgtactgatttctgcattttactttdtatcaacaaattaaatggcttgatggatgcccaaggtcatatgtaagtagcagagttgggattctagccaggcagcctggctggctccagagtcagtctg

SEQ ID NO: 242335 - DNA, 201 bp, Homo sapiens
agcctcacccctatctctggggagaggagagaggctgagggttaaattgattaccagtggccagtgatttaatcagtcatgcctatgtaatgaagctttcwtaaaaagcccaaagccctgtgttgtagagcttcgagatagctgaataagtggaggtttctgggggttgtgcctggggtgggcatggaaactttgtgtccc

SEQ ID NO: 242336 - DNA, 201 bp, Homo sapiens
tgattaaaggaagtaaaattatttctaacagaatgaatggcagatgtggagctattcttgctgatgaaatgggtttagggaagacattgcaatgtatttcrctcatctggaccctgcagtgtcagggaccctatggaggcaagccagtaataaagaagacactaattgtcacacctggaagcttggtgaataattggaaga

SEQ ID NO: 242337 - DNA, 201 bp, Homo sapiens
tgaaattaggagagaagcagaaaaaaaccactttgtagccaagtgcatatgttattttggtaatttactaggaaagtatttttgagcctagcttcttaccmgatactgcttatttctacttgatagcacagtaaaaaaaatatcaccagtgggaatccaggacatgaatacacagtggattaattcttggggccactggtt

SEQ ID NO: 242338 - DNA, 201 bp, Homo sapiens
ctctggaataagtactagtattaccatccccatttttttggtgaggaaataggggctcagatatatatgtatatatgtatatatattatatataaaatctmtatatataatctatatatatataatcttattctggagaaacttaatgatgctgtttatttatttgtttatttatttattttttgagatgaagtcttgttc

SEQ ID NO: 242339 - DNA, 201 bp, Homo sapiens
gtgtagtttataataaaatgatctttcagttgcaagtaacaaaaaatgaaaattaggcttaaaacagtgggtttttaccctgaccatgccagtagaatcayctgaggtgcttttaagggtgtagtggctcacgcctgtaatctcagcactttgggaggctgatggggaaggattgcttgaggctaagttcgagaccagcct

SEQ ID NO: 242340 - DNA, 201 bp, Homo sapiens
ccattttgtaagactatttatgacttgctacagaatgttaatgagtttcattatggaatgctgacccagattgttcgaattatattctgaatttgtaaacstggccccacaggttttaggaaagggattttgaatttgtaatacatttttcagatgattatttatttaatgtatatctctcccactagactgtaaggtcct

SEQ ID NO: 242341 - DNA, 201 bp, Homo sapiens
ggctcctcctgccacttccaatcttgggtataacgccacacaacatccttgtaggtagcaccctaagcatctgtgaaggccagatgacacaaaatgaagtrcagtgtacttcagggtggactttgaccagtgggaaataggagacaggagggaacctgccagataaatttcttttcccacatggactactctgaggtatgg

SEQ ID NO: 242342 - DNA, 201 bp, Homo sapiens
taataacacctttctcccgtcacaaaatgatcttagaatatgcagtttaaatctgcctagtgaagaaagtactagagaaatcaataacagagataattgcrgtggaaaatattgttttgaagcacctacactggcaacattagatccacctcatacaggtaagactgctttttattgataaggtttatgcttgaccaatag

SEQ ID NO: 242343 - DNA, 201 bp, Homo sapiens
catttttgtgacctgctctaaagctttttttctccctttttatattgttatgccttagttgtaatgttttagctaaaatggaaaggaatgttccagatatraggcatatttttaatttacttggtagtattatgtctatgtttatactctctattttacatactaatttgaaatagtaattatgtggttttaaaaacttaa

SEQ ID NO: 242344 - DNA, 201 bp, Homo sapiens
ttctattgtcttctaattttggaagcaatcttgtcatctcttttcttttttttttttgagacggagtcttgctctgtcacccaggctagtgtgcagtggcrctatctcggctcactgccagctccgcctcccgggttaacgccattctcctgcctcagcctcccgagtagctgggactacaggcgcctgccaccacgtctg

SEQ ID NO: 242345 - DNA, 201 bp, Homo sapiens
cagtacatagtaaataacttataaatgtttgtaaaaagaatgaatttgttttaacttgaaccatggtgatcaaatgtaataaatcacataaactaattatyataaaacaaaaaagtattgtatttagcaggatattggcttgcctaaggattttctcattgttttacttattacaggtgattcgttggaaaaattcattgt

SEQ ID NO: 242346 - DNA, 201 bp, Homo sapiens
atatttattagttatatgtcatatataaatatataactaataactaaatataataaatataatcatgcacaatatataattataacaatatataatatttrtggtagttaaaatatgtatatatttttattttttagtgggtagaatttaaacttcatagaaatgttttcagattttcttcatagccattttggtaattaa

SEQ ID NO: 242347 - DNA, 201 bp, Homo sapiens
gatctgcccgcctcggcctcccaaagtgctgggattacaggcgtgagccaccgcgcccggcccagtagaatcttattctctgaattttagctttttatttytgaatcacttgtgaaaaattgaacttatttaggaaaatctttcaagtcctggtgtaatggctttggagttagagtttttttttttttttttttttttttt

SEQ ID NO: 242348 - DNA, 201 bp, Homo sapiens
ccaggatggtctcgatctcctgacctcgtgatctgcccgcctcggcctcccaaagtgctgggattacaggcgtgagccaccgcgcccggcccagtagaatyttattctctgaattttagctttttatttctgaatcacttgtgaaaaattgaacttatttaggaaaatctttcaagtcctggtgtaatggctttggagtta

SEQ ID NO: 242349 - DNA, 201 bp, Homo sapiens
aggcgcccgctaccacgcccggctaattttttgtatttttagtagagacggggtttcaccgtgttagccaggatggtctcgatctcctgacctcgtgatcygcccgcctcggcctcccaaagtgctgggattacaggcgtgagccaccgcgcccggcccagtagaatcttattctctgaattttagctttttatttctgaa

SEQ ID NO: 242350 - DNA, 201 bp, Homo sapiens
tttcctctgtgagtcctctgtcttcctgctacaatttgaactgatctctaatcttgctacatagctgtcatcttggggcttttttttttttttttttttttgagatggagtcttgctctgttgcccaagctggagtgcagtggcgtgatctcagctcactccaacctctgcttcctgggttcaagcaattctcgtgctttg

SEQ ID NO: 242351 - DNA, 201 bp, Homo sapiens
ctttcctctgtgagtcctctgtcttcctgctacaatttgaactgatctctaatcttgctacatagctgtcatcttggggcttttttttttttttttttttttgagatggagtcttgctctgttgcccaagctggagtgcagtggcgtgatctcagctcactccaacctctgcttcctgggttcaagcaattctcgtgcttt

SEQ ID NO: 242352 - DNA, 201 bp, Homo sapiens
gctggtggtgtaggacttaacctcattggaggatctcacttaattctctatgacattgattggaatccagccactgacattcaggtaggaatatttatgcrttaaatagatattattgaatgcctgaggatacaatgcctattgaggatacaaagataatgatgatatataatatccactgcataaagagcccttattttg

SEQ ID NO: 242353 - DNA, 201 bp, Homo sapiens; identical to SEQ ID NO: 47579

SEQ ID NO: 242354 - DNA, 201 bp, Homo sapiens
ttgtgggaaaaatccacattctatagagaatccactttccccttgttttccttccttcctttctagatccaggagataatcaagtaagagccaggcactcytttaggtctgataataaacaatatacaacctgttctctctgaagtctgctatctgagagcttcctctgcacaataaaacttggtgcctacaatcctttat

SEQ ID NO: 242355 - DNA, 201 bp, Homo sapiens
ttcattcaaaatatttgttagtgatggtaatgtatctgtcactgttgccagacacattatagtcattagtggtggagaaaacaagcatgagattgctgccytcatgtggtttatggattagtggaataggaaaaaggcaacatgtttgatatttgtatgtgaattgtatttccttgcattttgaaatttttatttaaattg

SEQ ID NO: 242356 - DNA, 201 bp, Homo sapiens
ctctatttttgttccagcaaaatagataaggtattccattgaagctattatatattttggctgtgtgatttaaagacatgtcttaattcattttgaatgtsctgttctggaaaaaatttctttcacagtaaaaatcagaatgaacaaaattaaaattttatgtattttataagtattgttattttagtattcatggaaata

SEQ ID NO: 242357 - DNA, 201 bp, Homo sapiens
ttattaaaacatatttctcttgtcattaaacatttttttaaagtactgcccccccccgccacccattaatggtatcattcacataacaaatactgaacctcttctgtgtatttggtactggcgatatactgatgaattgtacgtaagatttcatgcctgagttaatagctcagagggaatgatagggcaaatttcattgca

SEQ ID NO: 242358 - DNA, 201 bp, Homo sapiens
tgttcagtttgaaggatgtttatagttcagacctggaagtgacatagctgcattccataggccagactcagtggcaatatctaaccgtaagggaggctggraaaggtgactaagtgccctggaggaaagagaaatggatttggtgaataacggctggcctctgccattcatgttttgcataatccagcccttgaatacttg

SEQ ID NO: 242359 - DNA, 201 bp, Homo sapiens
ttagaatgaggctggacatgttttgtggccatttttcctttgatttattaaaacatatttctcttgtcattaaacatttttttaaagtactgcccccccccgccacccattaatggtatcattcacataacaaatactgaacctcttctgtgtatttggtactggcgatatactgatgaattgtacgtaagatttcatgcc

SEQ ID NO: 242360 - DNA, 201 bp, Homo sapiens
gtttgagactaacctgagcaacacagtgagaccctgactctaaaaaacaaacttagccagatatggtggcacatgcctgtagttccagctacgtgggaggytgaggtagaaggattgcttgagcctaggagtttgagtttgcagtgaactatgattggatatgatccaatatccatcctgggtgacagagcaagaccccat

SEQ ID NO: 242361 - DNA, 201 bp, Homo sapiens
gttttgagttgttatggactgaatgtttgtgtcccccagattcatatgttgaaaccctaactttcaatatagcagtattaggaggtgggcttgggaggtarttaggtttaaatgaggtcgtgagggtagagccacgtgatgagattagtgcctccgtaaccagagcaagagacaccagaacttcctttctttaccatgtga

SEQ ID NO: 242362 - DNA, 201 bp, Homo sapiens
ggggtggggaagactatccacctttaagaaattcctcatgatttgacttccaatttgtataggaggattgtattaaccattatcaaaagcgatttttaaartgatctgtgctttaaaaaaatgattttgggaaatgctaaatgacctttttattttttgaatttaatcacgatgataaagacaaaaggactagggtcaaat

SEQ ID NO: 242363 - DNA, 201 bp, Homo sapiens
attttttgaatttaatcacgatgataaagacaaaaggactagggtcaaatttcatagttatacccccaagattttctggatgcccaatgaatgtttgtcartaatagtgaagtggaaaccaaagaataggaaaactagtgttgaatatttataaaatgccatttttaaaggaaaaaatgagtcagggaaataggaaccata

SEQ ID NO: 242364 - DNA, 201 bp, Homo sapiens
agtatctgtggatcttgatggggtagggggtgtcctgaaaccaatcccccttggatactgagggatgactatacacttaagccaccagacatcttgcataycatagacaattgtttggggtccatgagctttaattacaaaatgtaatgctgggagaacatagagaagagtgattttgttttttaaatgtagacttgattc

SEQ ID NO: 242365 - DNA, 201 bp, Homo sapiens
atttattaaaacatatttctcttgtcattaaacatttttttaaagtactgcccccccccgccacccattaatggtatcattcacataacaaatactgaacctcttctgtgtatttggtactggcgatatactgatgaattgtacgtaagatttcatgcctgagttaatagctcagagggaatgatagggcaaatttcattg

SEQ ID NO: 242366 - DNA, 201 bp, Homo sapiens
ggagtaaatcctaggattttagagatggaagatatttggagaacactttttttccatctctgcagtttaggggtaatgaaacaggtccagggagaactcartgacttacttagggtaacaaagctatttatggcagagcagagaccagcacttagtttttctttgtgtaatttccatcccgctattcgatagaagtaaata

SEQ ID NO: 242367 - DNA, 201 bp, Homo sapiens
tagtcttttaaatgtacatacacccattattgtttttatttttcttttcttttgtaaaaattagaatgaggctggacatgttttgtggccatttttccttkgatttattaaaacatatttctcttgtcattaaacatttttttaaagtactgcccccccccgccacccattaatggtatcattcacataacaaatactgaa

SEQ ID NO: 242368 - DNA, 201 bp, Homo sapiens
tagattcatttttgatttcattgggtcttgcacagtgcctgggagcatttatatacgtggtcagtaattaaaaacaatttatttttcctacctcttaatarctatcacagttgttcagtaatagttttattggatagaactatgttcaagtatgttctaatttattcccctatctggaaaaatatgtatattgtgagaaaa

SEQ ID NO: 242369 - DNA, 201 bp, Homo sapiens
tcatagatgtattaaaagattctctgatttgggattggttaaggaagtgaagctctgtctaaaaacttggggtcagcagaaaggaatgttgagctctggcytgtgggtatgacttcctccaggcctctgaagaagaaattcagaacaaagaataatagcagttagagttcagtcctgtttcccctaatctgaggtctgtgt

SEQ ID NO: 242370 - DNA, 201 bp, Homo sapiens
tccctttctcctgagagctctccctctgtaaatcacatgcaaacaaatcactgtcttaggctctgcttccagtgaacgcagtatgagacaagaacccttgmgtatgtcagtcatttgcaaaggaggggacagaattaccatgattgacttaatcatttggggtttgatgaatgtctgaaagccaaccacagtgatccttct

SEQ ID NO: 242371 - DNA, 201 bp, Homo sapiens
tatactgtgctacttatgcagaattttctctcccttgaaccatggagaaaagtgttttttgcatcgcaggtataaaactgtaccctttggttagtaggtayaggtttttataatttgaaaacgacatgtagaaactgtaattttagttagttgcatattttaaaaataacagtgagtagaagaaaaataatatataaatat

SEQ ID NO: 242372 - DNA, 201 bp, Homo sapiens
atatttctgagccaaccaagaaagttatggagatgattccccagatttccagtttttgcctggtaagagacaggaaccacatacaaaggtaagctttattytgttttgttatggaaaattatggcgcctcctatctattgggctttggcttagtcgtgatagagatatgcatagtaagcatccccacaacgggagcaatga

SEQ ID NO: 242373 - DNA, 201 bp, Homo sapiens
tacagttgtggattaaaaccattgctcttgtgaactttacctgaccagtgattgaaagacttaaacagcatctgagtcatatggttcagaataggtaaaasggaagtttttcctatcagataaaagcatctgaaataagaaagttaggataacctccagtagttgagcatatcccaaagccatatacaatctttatgtttt

SEQ ID NO: 242374 - DNA, 201 bp, Homo sapiens
gaattttctctcccttgaaccatggagaaaagtgttttttgcatcgcaggtataaaactgtaccctttggttagtaggtataggtttttataatttgaaarcgacatgtagaaactgtaattttagttagttgcatattttaaaaataacagtgagtagaagaaaaataatatataaatatacaagtatctggttacattt

SEQ ID NO: 242375 - DNA, 201 bp, Homo sapiens
tggtagttcaggttttttgttgtcataatttatctttagtgattggattaataactgtgtgattaaagtgctttatagtagatgtatgcttaagactgttkattataaacttggtcaaatgtgatcttttcctcaagaaccaagattgtgtttaaagataggatttatacattttttttctaaaaagcatgttaataggac

SEQ ID NO: 242376 - DNA, 201 bp, Homo sapiens
catctgccagccagcagtgagagaagagataaagtagaaaattgttcagtttgaaggatgtttatagttcagacctggaagtgacatagctgcattccataggccagactcagtggcaatatctaaccgtaagggaggctgggaaaggtgactaagtgccctggaggaaagagaaatggatttggtgaataacggctggcc

SEQ ID NO: 242377 - DNA, 201 bp, Homo sapiens
  misc_feature (1)...(201): n = A,T,C or G
tatgaagtagggcatgcttcacacacctgagatttgttttctgaagctgtatgtaaaatatagaattccgaattttaaaacatatttctgcaaattgcatntgtggaaggggccattagtttctactgtactctcagaattctcacttattttctataggcaatgtctagagtatggagagatggtcagaaatatcctgta

SEQ ID NO: 242378 - DNA, 201 bp, Homo sapiens
gtaaattgtatgtgaatacaaacattttatataagggacttgagtatctgtggatcttgatggggtagggggtgtcctgaaaccaatcccccttggatacwgagggatgactatacacttaagccaccagacatcttgcatatcatagacaattgtttggggtccatgagctttaattacaaaatgtaatgctgggagaac

SEQ ID NO: 242379 - DNA, 201 bp, Homo sapiens
aaaataacagtgagtagaagaaaaataatatataaatatacaagtatctggttacattttgactatttgtgtgtgtgaatatttacaatattcacacacamaaaatcttttgggatatgaacatttctctgataaaaatgagttgatttgtacatttctatacctatggcttaaataataccaatttgttaggttttaaag

SEQ ID NO: 242380 - DNA, 201 bp, Homo sapiens
gggtatgacttcctccaggcctctgaagaagaaattcagaacaaagaataatagcagttagagttcagtcctgtttcccctaatctgaggtctgtgtgccrgtagacagtattttccatttggtggtggtctggatttctgaaaaacaactcaaggacatatgttaagatgttacctttagtttctagagggaaccaaaca

SEQ ID NO: 242381 - DNA, 201 bp, Homo sapiens
gcatttagtggacagcctttcataaggtaatttcgtgatccagggttctttcacttggagctcttccatccatttggaccttagagtcctctgctgggatmccctgcatctgccagccagcagtgagagaagagataaagtagaaaattgttcagtttgaaggatgtttatagttcagacctggaagtgacatagctgcat

SEQ ID NO: 242382 - DNA, 201 bp, Homo sapiens
caaaatcaataagtaaacttgttaatggcatgattgtgtatatgaagacagtttaaattatttttctaacacgtttaaaataaagatgaacacaactaaarggagttaatgcctaattagggattcagtttacttaataaaattaaaagttttttgttgttgttgtttttattccttaatagtctagtttcactttgatct

SEQ ID NO: 242383 - DNA, 201 bp, Homo sapiens
ggcatatggggtgcctggctgctggtattctagtagttggcaggaaaagggtagagggatcttattcagtatctagactttcattaacacattttttttttaaaagacagggccttgctctattgtccaggctggactgaaactcttggattcaagttatcttcctgtttcagcctcctgagtagcaggggctacaggcat

SEQ ID NO: 242384 - DNA, 201 bp, Homo sapiens
ttaaaaaaagaaaagatcacccatctccctgtactctgatttaatattcaccagacaccttctgttagtggtttgactttccctggggacgttctttcatrggacagaatgcacgtgcatagactgattggtctaaataggcaggtctcataggtcaatacattttcattctgacttattcagtctcttaatttggttaat

SEQ ID NO: 242385 - DNA, 201 bp, Homo sapiens
tctttcctctgtgagtcctctgtcttcctgctacaatttgaactgatctctaatcttgctacatagctgtcatcttggggcttttttttttttttttttttttgagatggagtcttgctctgttgcccaagctggagtgcagtggcgtgatctcagctcactccaacctctgcttcctgggttcaagcaattctcgtgctt

SEQ ID NO: 242386 - DNA, 201 bp, Homo sapiens
gataaagttataaattaggcacagtaagagattaacaacaataaccaataatagaacaatcataacagtatactgtagtgaaagttatgtgaatgtgcatyctctctttctttctcaaaataccttactgtgtgtaatatttttgaaccgaggttgaccgcaggtaactgaaacagtggaaagcagatctgcagataatgg

SEQ ID NO: 242387 - DNA, 201 bp, Homo sapiens
atccatgttgtagcatgtgtcagaatttccttcctttttaaggctaaacaatattccattgtatgtatataccacattttgtttatccattcatctattgmtgaacacttgggttgtctctactttttggctcttgtgaataatgttgctgtgaacatgggtgtgcaaataacttttcaaaaccctgctttgaattctttt

SEQ ID NO: 242388 - DNA, 201 bp, Homo sapiens
gtacatatgcagattgtgacccagtttaagagtgcaaactttcactttagcttctattcatatcttattatctttttttttttaactggacttttttttttctctgaagggtgggcgggataggtggctgtcattggacaaaggataatgagtgaaaagagttttggaagaaatgagaagagatacagtttgaatatagat

SEQ ID NO: 242389 - DNA, 201 bp, Homo sapiens
tgtacatatgcagattgtgacccagtttaagagtgcaaactttcactttagcttctattcatatcttattatctttttttttttaactggacttttttttttctctgaagggtgggcgggataggtggctgtcattggacaaaggataatgagtgaaaagagttttggaagaaatgagaagagatacagtttgaatataga

SEQ ID NO: 242390 - DNA, 201 bp, Homo sapiens
atgtacatatgcagattgtgacccagtttaagagtgcaaactttcactttagcttctattcatatcttattatctttttttttttaactggacttttttttttctctgaagggtgggcgggataggtggctgtcattggacaaaggataatgagtgaaaagagttttggaagaaatgagaagagatacagtttgaatatag

SEQ ID NO: 242391 - DNA, 201 bp, Homo sapiens
gatgtacatatgcagattgtgacccagtttaagagtgcaaactttcactttagcttctattcatatcttattatctttttttttttaactggacttttttttttctctgaagggtgggcgggataggtggctgtcattggacaaaggataatgagtgaaaagagttttggaagaaatgagaagagatacagtttgaatata

SEQ ID NO: 242392 - DNA, 201 bp, Homo sapiens
cagtttaaatctgcctagtgaagaaagtactagagaaatcaataacagagataattgcagtggaaaatattgttttgaagcacctacactggcaacattasatccacctcatacaggtaagactgctttttattgataaggtttatgcttgaccaatagtattacagtattctttaaatgatgttttaagaatgaatatgt

SEQ ID NO: 242393 - DNA, 201 bp, Homo sapiens
ctaatacgtgttcttggttaagaacttgtgcattaagatcgcccgtcttggccagggcggtggctcacgcctataatcccagcactttgcgaggctgaggygggagaattgcttgaggccaagagttcgagaccagtctgggcaacataatgaggccctgtctctttaaaaaaagaaaagatcacccatctccctgtactc

SEQ ID NO: 242394 - DNA, 201 bp, Homo sapiens
cataatttgctttaagattaaagattatactaatagagatctattttgtccttgaataagaaacagaagagagtgatctctcctactcattcctcaaactrtataaaggctggttatatataaaatatttacatgtttcattattttaacattgatgaaattgggaaatgtctaaccatcaatgatagtgtatcatggttt

SEQ ID NO: 242395 - DNA, 201 bp, Homo sapiens
ttaaatatctagttctagtttatatatataaccagtatgtcctgttttaaattagaatcttttatgtaaaaatacagaaaatacagaaaattaggtttgakttctgatttaaatatatatttgtttcttttagggtgttgcaattaataacacctttctcccgtcacaaaatgatcttagaatatgcagtttaaatctgcc

SEQ ID NO: 242396 - DNA, 201 bp, Homo sapiens
caagtgatccacctgccttggcctcccaaagtgctgggattacaggcgtgagccactgcgcccggcctcttgtttcatctttagttttccactccagctcragtccctcccttcttattttgatgcaaattccaggaatatgctttcatttgtaaatttttagaatatgtccctaaaatataagagctttttaaggccggg

SEQ ID NO: 242397 - DNA, 201 bp, Homo sapiens
tgacctcaagtgatccacctgccttggcctcccaaagtgctgggattacaggcgtgagccactgcgcccggcctcttgtttcatctttagttttccactcyagctcaagtccctcccttcttattttgatgcaaattccaggaatatgctttcatttgtaaatttttagaatatgtccctaaaatataagagctttttaag

SEQ ID NO: 242398 - DNA, 201 bp, Homo sapiens
atatattcaagtatctcctcacaacatacttaaaaaaattacaaagggaaaaatactttggcagacaccaccttaatcagtgatcaaagttaatacctctrgtaatggaacaaaccgatattatgtgcctcctaatatgatgaactgttgtattcttgccccaaattcacaatctgaaactaatcatagggaaacatcaga

SEQ ID NO: 242399 - DNA, 201 bp, Homo sapiens
cataagttttgaagtaaagaggcctttgagatcatttagattcgtctcttcactttgcattggagaaaactgaggcccaggaagatgaaccgacttacctraatacaaataatcaacggcattattgggacaaaaccccacaattaaaaattcttagttctatattagcttatcccaaagacttagttgaaatacaggcag

SEQ ID NO: 242400 - DNA, 201 bp, Homo sapiens
gactgcaggtgtataccacctccccaacttggatttactagtagtagcaagtgtagacaagagtctcctatttggaatgtaaattgttggttggaatgtaygttggcacaacttggggaaagtttggcaatgtatatcaaaagcattaaaattgtgtatatcttgtggcctggcaatactccttttatgaatttattataa

SEQ ID NO: 242401 - DNA, 201 bp, Homo sapiens
tctaatgctgcctttaaatttatctaaagaatctttctttttgattgacagggtggtgttggtatccaactatacacaaaccttgaacattttacaagaastatgtaagcgtcatggatatgcttatacaagacttgatggacaaacaccaatctctcaaaggcagcagattgttgatggctttaacagtcaacactcttc

SEQ ID NO: 242402 - DNA, 201 bp, Homo sapiens
aaaaaaaaaaaaaaaagaatattaaaggcttaggtttatgggttgtacaattaagtcattcaactccagagtggctatgcttaggaatcattcactaagaygataatgcccactattaatattaaatgacattatttccctttatcaaaacatgcccttatgaattttttttttttttttttttgagatggggtctcgctc

SEQ ID NO: 242403 - DNA, 201 bp, Homo sapiens
ggtctttgccgcactgtcttaaaactggaagtttagatattgactttaaaatggaatatgcaggaatacctatgttttaattgtacaaggtcattgttgcrtgttctctcaatgtcagtgataatattattgtggtattttctttcaactaagaaaatctaatgctgcctttaaatttatctaaagaatctttctttttga

SEQ ID NO: 242404 - DNA, 201 bp, Homo sapiens
ttgtgtatctaaacatatctaaaaatagaaaatatacagtaaaaatatggtattaagatgttacgggaccaccatcatatatgtggtctgtggttgatcaraaccttgttgtgtggtacatgactgtatactaaagtgtttaataatttctagtaagtgtgagtgggcttatttcaacctcttttattttactctgttaaa

SEQ ID NO: 242405 - DNA, 201 bp, Homo sapiens
aaaaacaaacttgagccagcattaacaatcatcattttgaataggaaaaggaatgtagctcaacttgtgataaaaatgaagaaaagagtctatacaaaggyttgctaagtgtgtttcctgctgactacaaccctctcctgtttactgaaaaggagtcaggaaaactacaggtgttgtccaagctcttagcggttatccacg

SEQ ID NO: 242406 - DNA, 201 bp, Homo sapiens
taatgaagatacaatttatctgaattctagtagtgataaattttcaggcatttggcaggttgatttacctggcttggagatgtacaagtttttttttttcsagacatatgtcttctttttctttcttcttcttcttcttttattttggtgaatacctagcagtgtaatggctggttatggtaggtgtatgtttaactttta

SEQ ID NO: 242407 - DNA, 201 bp, Homo sapiens
tcaagtctatattttattctgttcttattatcagttatgaaatgttacttcgttccctggatcaaattaagaatataaaatttgatcttctaatctgtgaygaggggcatcgtttgaagaacagtgccattaagacaactacagccctcattagcctttcttgtgagaaaagaataattctaactggtcagtattcagttt

SEQ ID NO: 242408 - DNA, 201 bp, Homo sapiens
aggctgaggcaggtggatcacttgatgtcaggagtttaagatcagcctggccgacatggtgaaaccccatctttactaaaaatataaaaattcgccagatrtagtggtgtgtgcctgtaatcccagctactcaggaggctgaggcaggaggttcccttgaacccgggaggtggaggttgcagtgagccgagatcgtgccac

SEQ ID NO: 242409 - DNA, 201 bp, Homo sapiens
accccatctttactaaaaatataaaaattcgccagatatagtggtgtgtgcctgtaatcccagctactcaggaggctgaggcaggaggttcccttgaaccygggaggtggaggttgcagtgagccgagatcgtgccactgcactccagcctgggtgatagagcaggactctgtctcaaaaacaacaacaacaaaaaagaag

SEQ ID NO: 242410 - DNA, 201 bp, Homo sapiens
aaagacactgctgagttgtaggagatacatacacatctcaaagggacagaggaagaatttacaattgtaaactcttcttagtgctctaagaaaggaaggtyaggggcctatagtcaggtgttggctagaataaacagtaagcttcttttgatagccctgaacttctccagacagactggagctcaaaaggaggctgggtat

SEQ ID NO: 242411 - DNA, 201 bp, Homo sapiens
actccatctcaaaaaaaaaaaacaaaactaaaaaattaaaaacttagctatagggtatagggtgaccttatgtctaccaaaaaaaaaaaaaaaaaaaaaaatcagccaggtgtggtggcatgtacctgtggtcccagctacttgggaggctgaggtgggaggattgcttgagcctgggaggtggaggttgtagtgagctga

SEQ ID NO: 242412 - DNA, 201 bp, Homo sapiens
taaaacattttaaaaataaattttattgtgcatacctgaggtttacaacatgatgttatgggagatatatatgtgtgtatgtgtgtgtgtgtgtgtgtgcrtgcatgtgtgtatgtatatgcatgtgcacacacgtacatatatagagacagtaaaatggtaatatagtgaagcaagttaacatattactcatcacatata

SEQ ID NO: 242413 - DNA, 201 bp, Homo sapiens
cagaactatcttatttttaaaactaattccactgtgtggatgtgccaaatgtacttaaccaatgtcttaataatggatatttagtttgtttgggatctttygttattacaaatagagctacaataaatatctatataatatatacatataggagactatgttcataaataccttggagtaggatactcatcacaaggtata

SEQ ID NO: 242414 - DNA, 201 bp, Homo sapiens
agccaggatggtctcgatctcctgacctcgtgatctgcccgcctcggcctcccaaagtgctgggattacaggcgtgagccaccgcgcccggcccagtagamtcttattctctgaattttagctttttatttctgaatcacttgtgaaaaattgaacttatttaggaaaatctttcaagtcctggtgtaatggctttggagt

SEQ ID NO: 242415 - DNA, 201 bp, Homo sapiens
accctggatgatctgagtgggcccattataattataagtgtccttagaagtggaagagagagagggaagaggatcagagaaagagatggtgattagggaakcagggtcagagagatgtaacatagttgactttgaatatggaggaagagggctaagccaaagaatttgtttggcttctagaattttgaaaagacaaggaaa

SEQ ID NO: 242416 - DNA, 201 bp, Homo sapiens
atttacattatattagccattgtaagtaatctagagatgatttaaagtatatggaaggatgtgtgtaaattgtatgtgaatacaaacattttatataaggracttgagtatctgtggatcttgatggggtagggggtgtcctgaaaccaatcccccttggatactgagggatgactatacacttaagccaccagacatctt

SEQ ID NO: 242417 - DNA, 201 bp, Homo sapiens
tatgttgtacagaatttattcataatggggtcatattttctgaggcacttagaagcataggtcaccatacttctcagtacttgatgtaagtgctagtgctrcttaagtaaagctgaaaatttaccctccagaatagacaccattcaaaaaggaactagatcaggagtaggacttgagcaatcaatgtctagtagctgaaag

SEQ ID NO: 242418 - DNA, 201 bp, Homo sapiens
gctgaatgattattataagatcttcaatgccctttcattatatcatagaaaagataaatctgagattaattctttactgttataaataatgtggtgatgartatctacaagcatatactctttgtgtatagattcctagaagtgggcttataggattaaaaggaaaaatataaatgtgtataaaaagctctcagagctttc

SEQ ID NO: 242419 - DNA, 201 bp, Homo sapiens
tttgggatctttcgttattacaaatagagctacaataaatatctatataatatatacatataggagactatgttcataaataccttggagtaggatactcrtcacaaggtatatgcctttagcattttgatggataatgataaattgccttctacagaggttagtacaggtttatactctcatcagcaatgcgtgaggagt

SEQ ID NO: 242420 - DNA, 201 bp, Homo sapiens
tggagtaggatactcatcacaaggtatatgcctttagcattttgatggataatgataaattgccttctacagaggttagtacaggtttatactctcatcascaatgcgtgaggagtgcatttatcatgtattgtgatgctcaatctatatgtaagtatatattcatatttttgatatttgacaatctaagttaaacagtgt

SEQ ID NO: 242421 - DNA, 201 bp, Homo sapiens
gaaataggggctcagatatatatgtatatatgtatatatattatatataaaatctatatatataatctatatatatataatcttattctggagaaacttartgatgctgtttatttatttgtttatttatttattttttgagatgaagtcttgttcttgtcccccaggctggagtgcaatggcatgatcttggctcactgc

SEQ ID NO: 242422 - DNA, 201 bp, Homo sapiens
gtatttactattcattaagaggaaatggatcatcataaagctcttcatccttatcatgttgagtaggctgaggaagaggaggaagaggaagggttggtttkgttgtctcaggagtggcagaggtggcggaagaggtggaggagatagaagggaggcaagagaggtaggcacactcatttataacatttattgaaaaaaacc

SEQ ID NO: 242423 - DNA, 201 bp, Homo sapiens
atcactaagtgctttattagtgttattttatttattatttacaaaactctggaataagtactagtattaccatccccatttttttggtgaggaaataggggctcagatatatatgtatatatgtatatatattatatataaaatctatatatataatctatatatatataatcttattctggagaaacttaatgatgctgt

SEQ ID NO: 242424 - DNA, 201 bp, Homo sapiens
agtgagctgagatcatgccactgcactttagcctggtgacagagtgaaactccatctcaaaaaaaaaaaacaaaactaaaaaattaaaaacttagctatarggtatagggtgaccttatgtctaccaaaaaaaaaaaaaaaaaaaaaaatcagccaggtgtggtggcatgtacctgtggtcccagctacttgggaggctga

SEQ ID NO: 242425 - DNA, 201 bp, Homo sapiens
ggcataaaaatacatggtcttactaataatatctctaataacatttaattttaaattatataacagtaggtctgtaggataacaacttttactaaattatrtgtattatatcaagtgtttagtgtttaatttttttatgatgcagggagctatttttgttgaggacttcatttactgacagaatcataaaatacagctcag

SEQ ID NO: 242426 - DNA, 201 bp, Homo sapiens
taattctgaaaatgatctttaatgcaaagaaatatcttctaggtttattttatacttattgatacttatatttagttcacattcaatctcttagatataaraaaactgtgagtgattatcagtttgaagggatttgtatattaatgtttgtatgctttttagtgtaataaaaactgtttcaatcttaaatttatattgcag

SEQ ID NO: 242427 - DNA, 201 bp, Homo sapiens
cactcatttataacatttattgaaaaaaacccatatataagtggactttcacagttcaaacccttcttgttcagtggtcaactgtatacttatgtattttkgtaatatccttaattcccttggactttcttaactttaaaaatataaaacatacacttctaaggtctttaaaaatataaagtggcataaaaatacatggtc

SEQ ID NO: 242428 - DNA, 201 bp, Homo sapiens
acacataatttcatatatgtattatatactgtatttttacaagaaagccagaaaaaagaaagcatgaagaaaaccataaggaagagaaaatgtatttactrttcattaagaggaaatggatcatcataaagctcttcatccttatcatgttgagtaggctgaggaagaggaggaagaggaagggttggtttggttgtctca

SEQ ID NO: 242429 - DNA, 201 bp, Homo sapiens
taggattacaggcatgagccactgcacctggttatgagaattttggaaaaagattttcttctgtctctacatctgaaaatagaaaaaagtttcttcttccyttttgcattttctgattaaagaatagtagtatcttaaagatattttagaggacacaaaaaaacaggagaaaaaaagaatcaaaggcccctgctaacattt

SEQ ID NO: 242430 - DNA, 201 bp, Homo sapiens
gactacatttcccatttttacttcctagtctcctacctaacaggaattgacctcaaagatgaaagttcatttcagttactcagaaacctaggaagatccasagaaaacttaccctctgggtatttgttaatggtaaacatgactaaactcttattcctgtgacagtatagttccacactgatgaatatttacatagtctac

SEQ ID NO: 242431 - DNA, 201 bp, Homo sapiens
aagacttagttgaaatacaggcagtggaagctgatgcagctgaattttctctttttgtccaaatattttgtctgtcccaccagctcttttaacaatccccmtcctctttattctcctttctctttgtacttttactattacacaatacagggctgtggggaactgaaaagaatactgtgcttattcagagatctgagtaag

SEQ ID NO: 242432 - DNA, 201 bp, Homo sapiens
ttgcattggagaaaactgaggcccaggaagatgaaccgacttacctaaatacaaataatcaacggcattattgggacaaaaccccacaattaaaaattctkagttctatattagcttatcccaaagacttagttgaaatacaggcagtggaagctgatgcagctgaattttctctttttgtccaaatattttgtctgtccc

SEQ ID NO: 242433 - DNA, 201 bp, Homo sapiens
gtttaataatttctagtaagtgtgagtgggcttatttcaacctcttttattttactctgttaaattgttcatgttgctttttttttttttttttttttggkgggggccaggctgtgagagaagagggaggagtttttaaatgacctgggtttatttaaaatattgtaacagccccgtaacttagtacctcctattaaagaa

SEQ ID NO: 242434 - DNA, 201 bp, Homo sapiens
tctcgcattcttctcaggttgccaggaaatgtttctctaaccctttcaaaagtgtttgtaaaccaagttcaaaggaaaatagacagaatgatttccaaaaytgcaaaccacgccatgacccatatacgccaagtaagattttaaaaataatttgaattttctgtttttactgtcaaaatgttttttgtgtgtgaatttgaa

SEQ ID NO: 242435 - DNA, 201 bp, Homo sapiens
tttgaatatggaggaagagggctaagccaaagaatttgtttggcttctagaattttgaaaagacaaggaaatatattctctcctggagcatccagaaaggwactcagccctggtgataactttgattttaatgcagtaagacctaagtctgagttctaacttgcgaaactataaaatgataaatttgtgttgttcaatgcc

SEQ ID NO: 242436 - DNA, 201 bp, Homo sapiens
agttaggctacaaattaagaatggctaacaccaactacagtgtctttgcattgtctcagttcaattttgagtgtgacctataactataaaatctgttctayatgtttatttacttaaaaatatagtttatagtttttaataactattatgtgccaggcagtatgctaggaataccaaagatgattataatttataatttag

SEQ ID NO: 242437 - DNA, 201 bp, Homo sapiens
gagaagtcaaactggtaaatctctatgatggagatgctgcatcaggctgtcacagtataaagatattatctattggtcaattattaattagtggtacatawtataatatcctgggaagctcttaaaattacattagtccaggcctcaacacatatggattaattcagagtttgtttgagagtaggacccaggcatgagcat

SEQ ID NO: 242438 - DNA, 201 bp, Homo sapiens
agcctttcttgtgagaaaagaataattctaactggtcagtattcagtttggggaagatattttggaatttttgcctagtgaacatacagacttgtactatratgcttaacattcaaataactggtggtgttggatggaatttatactaataaacctgtgttaattaactcttggtaggattctgaatcttcaaatccatgt

SEQ ID NO: 242439 - DNA, 201 bp, Homo sapiens
accagacaccttctgttagtggtttgactttccctggggacgttctttcataggacagaatgcacgtgcatagactgattggtctaaataggcaggtctcwtaggtcaatacattttcattctgacttattcagtctcttaatttggttaatatgaataatttccctagagcttaagcatattcaagtttctgaagatgaa

SEQ ID NO: 242440 - DNA, 201 bp, Homo sapiens
cccttaaagtgtttctagtattactaaagagggggtgcaacacacaggaaaacatttgtgaagtataaaaaaaagtcattcgatcttaaacaaccctgggrttaggggggctgacccctgtgtgtgctgttgaaaatccctttataacttgtatgacttttgactcccccaaaactgaactacgaatagcctactgttgac

SEQ ID NO: 242441 - DNA, 201 bp, Homo sapiens
atttattggtgaaattcttccttcttacagaagaaactggtaagattaagtaaacgatagtgcttgtttttggatgtaaaggtgttgtatgaagcccacarttcagtagagaatactaacagggagggaaggagagaggaaaagagaaaaagatgtatcaaagatgcaaaatgttagggttttggagaggatggattttgt

SEQ ID NO: 242442 - DNA, 201 bp, Homo sapiens
ttcatccgtgttttagcatgtattagtactttgttctttttctatgatggaattatattccattgtatgcatatgccacattttgtttatcctttgtcagytgaatgcacatttgggttgtttctacctgtcggctattattaataatcctagctataaacattcatatgcaagtttttttgtggacatatgttattattc

SEQ ID NO: 242443 - DNA, 201 bp, Homo sapiens
cacgcctgtaatcctagcactttgggaggcctaggtgggtggatcacttgaggtcacaaattcaagaccagcctggccaacctggtgaaaccccgtctctrctaaaagtacaaaaatcagctgagcatggtggtgggcgcctgtaatctcagctacgtgggaggctgaggcaggagaatcgcttgaacccaggaggcagag

SEQ ID NO: 242444 - DNA, 201 bp, Homo sapiens
cctttagtttctagagggaaccaaacattttgtcaatctaacttccctcaccattattttaagctattaccttcttgctaatcatattgctcatgtacttytcagggctagctaagtgcctggaatttcctttgaaggaactgaagattttccttttgtttctatgcttggggggccaggcaggcccataagaggggtttc

SEQ ID NO: 242445 - DNA, 201 bp, Homo sapiens
atattgaatggtaagatttcatgcaaagtccaaattttactagtgaaagttccattcaatcagttaattttcacactgatgaatgcaattttaaaaatcaygttaaaaaaaaagaaacctagattgtatctgattgttcttttgactgttcactcagcaggtatttcttgattgccttttatgggttgggcctaaagataa

SEQ ID NO: 242446 - DNA, 201 bp, Homo sapiens
ggctcacgcctgtaatctcagcactttgggaggctgatggggaaggattgcttgaggctaagttcgagaccagcctgggcaacttagcaagaccttgtctrtacaaaaaaataaattaaccaggtgtagtggcatgcatctgtaactctaactacttgggagactgaggcaggaagattgcttgaacccaggagatcgagg

SEQ ID NO: 242447 - DNA, 201 bp, Homo sapiens
aatggataatattaattagtttgatttagccatcccacagtgtatacatatatcaaaacagaatgttgtgcacctacatatatataatttttgtttatcaattaaataaacaaaaatttcaggttttactttcagagaactctgtaatctttgcctttcctcagtttgtcatgttacttaattaaatcagttttgtcaaaa

SEQ ID NO: 242448 - DNA, 201 bp, Homo sapiens
ttttcctcaagaaccaagattgtgtttaaagataggatttatacattttttttctaaaaagcatgttaataggactaaaattggagagttgaacttgaaaktagttacttgttaattcattagagtctggagtacttcaaatcagagttgaattattatgatacatacttgcatgaaaaccaagcatttaacaaatgctcc

SEQ ID NO: 242449 - DNA, 201 bp, Homo sapiens
ttttcccctcccttaacacctggactacccttctactctctgactctgactattccagatacctcatataaatggaatcatatagtttttctttctttatkttactgaccaatttcacttaacataatgtcctccaggtttatccatgttgtagcatgtgtcagaatttccttcctttttaaggctaaacaatattccatt

SEQ ID NO: 242450 - DNA, 201 bp, Homo sapiens
cttcctccttccttgcttccatccttgttaggtgactattctgttttcccagattttcttttctactttaagcccgaggtagaaaatgatccatgtatgcycagttcttttctaatttcttcatcagaaaatgacatttagactctggaatataataccttttatgttactaatcttgggctttatttgtattctaccata

SEQ ID NO: 242451 - DNA, 201 bp, Homo sapiens
ttgcagccctttctttcatagtgaaaaatttggttattgttatcttaaatatatttacctattaatttctgtttaaccagtctatcaaaaagggaccaaawttaatagtaaattttttttttttttgagacagtctcattctggattcaagcaattcttgttcctcagcctcccacgtagctgggactacaagcgtccacc

SEQ ID NO: 242452 - DNA, 201 bp, Homo sapiens
catagtatttgtggattgcttaacttttcctaggggcctaaaattctttgatattcaggtcagtctctttccaagtacctatcatgtcaaccttttgcaaratttgctgtttcattttgtagttgattgtcatgcagtctcaaagagactttgatattatggttgaggtttaagggacatttgaatggaaactgattttta

SEQ ID NO: 242453 - DNA, 201 bp, Homo sapiens
tgcccaatgtttagctcccatttataagtgagaacatgcaatatttgattttctgtttctgctttaattcgctttggataatagcctccagctgcacccaygttgctgcaaaggacatgatttcattcctttttatggctgcgctagcctaccttaaacatgctcagaacacttaccttaatctacagttgggcaaaatca

SEQ ID NO: 242454 - DNA, 201 bp, Homo sapiens
atacagttgatttttgcatatgaaccttgcatcttgtgactctgctaaatttattcttctttatttttagattctctggggatttctatgtaaatagttamattatctgtaaatgctccggttttatttcttcctttctgatctttatactttatatgcttttgttgccttattcctatttaagtaagtaggaaaatagta

SEQ ID NO: 242455 - DNA, 201 bp, Homo sapiens
tactgtggtcagtttttttttttttttaattttagtcagtataatcaagatgtggtgttatttcattgtgtgtgtgtgttttaaacagctttattgagatrcaattaacataccctatgattcagtcatgtaaagtgtacaattcattgttttttaatatagtcacagttaatgtgcaaccatcagaacagccagttgcag

SEQ ID NO: 242456 - DNA, 201 bp, Homo sapiens
gaaagtgtcagtccacatttatattcaggcatttgctttcaaagttgtgttcttatttaccacagtgtagtgccaagtacttgtggctatctggtgtattrcagttgtcagcttggccttaccattttacttggaaggactgaaactaataggtgttatagaagttgtagcatcacatcagggctaccaaatggctttatt

SEQ ID NO: 242457 - DNA, 201 bp, Homo sapiens
taaaaatggataaaggtgatgttttgtgctaatgtaggtgtaatgggtgtaatgaagtggacacccttgcttggtgggaatatcattgatacaacctttcrtggagaaaaatttgtcagtctaaatcaagaatctgaaaatctttaaattcattggactggtaatttcatttcttggactttatcttccacaaataaccag

SEQ ID NO: 242458 - DNA, 201 bp, Homo sapiens
atggataatattaattagtttgatttagccatcccacagtgtatacatatatcaaaacagaatgttgtgcacctacatatatataatttttgtttatcaattaaataaacaaaaatttcaggttttactttcagagaactctgtaatctttgcctttcctcagtttgtcatgttacttaattaaatcagttttgtcaaaat

SEQ ID NO: 242459 - DNA, 201 bp, Homo sapiens
taatggataatattaattagtttgatttagccatcccacagtgtatacatatatcaaaacagaatgttgtgcacctacatatatataatttttgtttatcaattaaataaacaaaaatttcaggttttactttcagagaactctgtaatctttgcctttcctcagtttgtcatgttacttaattaaatcagttttgtcaaa

SEQ ID NO: 242460 - DNA, 201 bp, Homo sapiens
gtaatggataatattaattagtttgatttagccatcccacagtgtatacatatatcaaaacagaatgttgtgcacctacatatatataatttttgtttatcaattaaataaacaaaaatttcaggttttactttcagagaactctgtaatctttgcctttcctcagtttgtcatgttacttaattaaatcagttttgtcaa

SEQ ID NO: 242461 - DNA, 201 bp, Homo sapiens
ttctattgatttgtttgttgtcttatttttttttctttttttttattattattatactttaagttttagggtacatgtgcacaatgtgcaggttagttacwtatgtatacatgtgccatgctggtgtgctgcacccattaactcatcatttagcattaggtatatctcctaatgctatccctcccccctcgccccaccaca

SEQ ID NO: 242462 - DNA, 201 bp, Homo sapiens
ttttcaggcatttggcaggttgatttacctggcttggagatgtacaagtttttttttttccagacatatgtcttctttttctttcttcttcttcttcttttattttggtgaatacctagcagtgtaatggctggttatggtaggtgtatgtttaacttttaaagagtctgcgaaaccattttccaaactagttgtactgtt

SEQ ID NO: 242463 - DNA, 201 bp, Homo sapiens
atttgactccttgtgggtccttaagaaacctaaaccctgccatgttgcattgaaggagaagctacactttcataagtggcacaggctgggtctttgttctkttgcttcacattatctgaagagatcgccttttctttaaaaaaaaattgtggtaatatagacataacatagagttaccattttaaccatttttttatgtat

SEQ ID NO: 242464 - DNA, 201 bp, Homo sapiens
tgtctaaaaacttggggtcagcagaaaggaatgttgagctctggcctgtgggtatgacttcctccaggcctctgaagaagaaattcagaacaaagaataayagcagttagagttcagtcctgtttcccctaatctgaggtctgtgtgccagtagacagtattttccatttggtggtggtctggatttctgaaaaacaactc

SEQ ID NO: 242465 - DNA, 201 bp, Homo sapiens
attttcaggcatttggcaggttgatttacctggcttggagatgtacaagtttttttttttccagacatatgtcttctttttctttcttcttcttcttcttttattttggtgaatacctagcagtgtaatggctggttatggtaggtgtatgtttaacttttaaagagtctgcgaaaccattttccaaactagttgtactgt

SEQ ID NO: 242466 - DNA, 201 bp, Homo sapiens
accattttcatttccaccaacagtgcacagggttcaaattgctctatctccttaccaactttgttactttctatttttttgataatagtcatcctagtggrtgggaggtgggatatcattgtagttttgatttgcatttctctaatgattagtgatatcgagcaccttttaatgtgctttttggctatcttatccttggga

SEQ ID NO: 242467 - DNA, 201 bp, Homo sapiens
taaattttcaggcatttggcaggttgatttacctggcttggagatgtacaagtttttttttttccagacatatgtcttctttttctttcttcttcttcttcttttattttggtgaatacctagcagtgtaatggctggttatggtaggtgtatgtttaacttttaaagagtctgcgaaaccattttccaaactagttgtac

SEQ ID NO: 242468 - DNA, 201 bp, Homo sapiens
cagatactaccaagccctatatggattttgttttttcatgtatattcataccagtgataaagttataaattaggcacagtaagagattaacaacaataacyaataatagaacaatcataacagtatactgtagtgaaagttatgtgaatgtgcattctctctttctttctcaaaataccttactgtgtgtaatatttttga

SEQ ID NO: 242469 - DNA, 201 bp, Homo sapiens
actgtaaacctgtactgcatgtgctgtgctgaatactgtagacagttgtaacacagtggtatttgtgtatctaaacatatctaaaaatagaaaatatacartaaaaatatggtattaagatgttacgggaccaccatcatatatgtggtctgtggttgatcaaaaccttgttgtgtggtacatgactgtatactaaagtgt

SEQ ID NO: 242470 - DNA, 201 bp, Homo sapiens
aggcaatcctgtcacttgtgacaacatgggtaaacccggaggacattatgctcagtgaaataagctggacacagaaagacaattattgtgtgatctcactyatgtgtggaattcaaaaaagtcaaactcttagaaacagaaagtagaatgatggttacctagagttggatagaggtggggcattggggagatgttggtcaa

SEQ ID NO: 242471 - DNA, 201 bp, Homo sapiens
tggggtcagcagaaaggaatgttgagctctggcctgtgggtatgacttcctccaggcctctgaagaagaaattcagaacaaagaataatagcagttagagktcagtcctgtttcccctaatctgaggtctgtgtgccagtagacagtattttccatttggtggtggtctggatttctgaaaaacaactcaaggacatatgt

SEQ ID NO: 242472 - DNA, 201 bp, Homo sapiens
agcccaggaagtggaggtttctgtgaaccaagatcacaccactgcactccagcctgggtgacagtgagactctgtcttaaaaaaaaaaaaaaaaaaaaaaaatcaagttttctttggcgcttttactacagcatgtcgatatattgatttagagtacaatcatgttgcttaatgacaggaatatgttctgagaaatgcatt

SEQ ID NO: 242473 - DNA, 201 bp, Homo sapiens
gagcccaggaagtggaggtttctgtgaaccaagatcacaccactgcactccagcctgggtgacagtgagactctgtcttaaaaaaaaaaaaaaaaaaaaaaaatcaagttttctttggcgcttttactacagcatgtcgatatattgatttagagtacaatcatgttgcttaatgacaggaatatgttctgagaaatgcat

SEQ ID NO: 242474 - DNA, 201 bp, Homo sapiens
taataacaatgtatacttgaaaaatgctaagaaagtagcattttaaaaaatgttttcaccacaaaaagtatgtgaggtaatggataatattaattagtttratttagccatcccacagtgtatacatatatcaaaacagaatgttgtgcacctacatatatataatttttgtttatcaattaaataaacaaaaatttcagg

SEQ ID NO: 242475 - DNA, 201 bp, Homo sapiens
ttgttgagtgagtgaatgaaacattttattgtggcatttatgtgttgtgtgtatgtgatgtaaatgtatatatatgtgtacatgtgaattttatatatatrtgtgtgtgtgtgtgtgtgtgtgtgtgtgtgtaaaagcacttcaggtaaatagtaaatggttaattattcttatgtatttatcttagccaaggatagaatt

SEQ ID NO: 242476 - DNA, 201 bp, Homo sapiens
ttaattacaaaatgtaatgctgggagaacatagagaagagtgattttgttttttaaatgtagacttgattctgtagaaatatactacatttgataaatatrctaagtatatagattatttcatccaatatattagtaatttagatagtggatagccactttcctatctttctcttatccatatgaatgtaatggatatgtt

SEQ ID NO: 242477 - DNA, 201 bp, Homo sapiens
agtagtgataaattttcaggcatttggcaggttgatttacctggcttggagatgtacaagtttttttttttccagacatatgtcttctttttctttcttcytcttcttcttttattttggtgaatacctagcagtgtaatggctggttatggtaggtgtatgtttaacttttaaagagtctgcgaaaccattttccaaact

SEQ ID NO: 242478 - DNA, 201 bp, Homo sapiens
tgcggcatctcccccctccctcttttgctctccctcttgtgattgagatgcagtttccccctttaccttctgccctaattataagcttctggaggctctcrtcagaaacagaagctggcaccatgcttcctatacaggctgcagaactgtgagccaaaataaacctcttttctttataaattacctgtctcaggtattcct

SEQ ID NO: 242479 - DNA, 201 bp, Homo sapiens
tttcagggctagctaagtgcctggaatttcctttgaaggaactgaagattttccttttgtttctatgcttggggggccaggcaggcccataagaggggttyctgttccatcttagttgtagttttgagctatttttatatttgggggtgattgtaattagattcgtggatagttaactgttttgggtatttttcaggtcac

SEQ ID NO: 242480 - DNA, 201 bp, Homo sapiens
ctgcccagctgattattcttatacgtagttacttagtattatctctgatagttccttaggttaaattgccagaattggaatttctgggtgaaacagataaygttggtagtcatgttcatccttgctgatggcttatgttaaatagtgttttgtggtgttgctttgaattggaatgcttgctactatccattgcagaaacat

SEQ ID NO: 242481 - DNA, 201 bp, Homo sapiens
tgcgatatttggtcttctgttgctgtattagttggctgaggataatggcttccacctccattcatgtccctgcaaaagacatgatcgaaggagtgattttytgtcttgtccctgttgtgtacctaagaaggtaagcttgtaattgacattgtcagcatgagatttaacagaactcagttttgagagttaaacttaggttgc

SEQ ID NO: 242482 - DNA, 201 bp, Homo sapiens
cacccctaccccacaattattctttactattatatctaatttatctaagttttagtaattcaactttgttcaaactttgcacatttttaatggctaaagastttaaaatacactacttgctatgttttctttttaatgataatttttgaacattttattatgatactttaaaaaatcttacataaatgttgaaagaatttt

SEQ ID NO: 242483 - DNA, 201 bp, Homo sapiens
attgctaggtgatttcgttgatgtgtgaacattgtggaatgtacttcctcaaacctagatggtatagcctgctacacacctaggctgtgtggtatagcctrtggttcctagactgtaaacctgtactgcatgtgctgtgctgaatactgtagacagttgtaacacagtggtatttgtgtatctaaacatatctaaaaatag

SEQ ID NO: 242484 - DNA, 201 bp, Homo sapiens
cacagtcacagctcactggagcctcaacctcctgggctcaagcaacctacctgcctcaacttcctgagtagctggaaccacaggtgtgcaccaccatgccyagctaatatttgtattttttatagagacagagttttgccgtattgtccaggctggtcttgaactcctgggcttgagtgattctctcaccttggccccgca

SEQ ID NO: 242485 - DNA, 201 bp, Homo sapiens
cactctagatatatattcttgcccagttttcctcccaataaattatagcatattatatttctgtacctttttcactcagtagtgtatcttgagatctttcygtattgttacagagtttcctcattctttttcttcctcagctgtataatcttccagtgtatagatatatcataatttatcccccactatattagtctgttt

SEQ ID NO: 242486 - DNA, 201 bp, Homo sapiens
ggaatcattcactaagacgataatgcccactattaatattaaatgacattatttccctttatcaaaacatgcccttatgaattttttttttttttttttttgagatggggtctcgctctgtcacccaggctggagtacagtggcacagtcacagctcactggagcctcaacctcctgggctcaagcaacctacctgcctca

SEQ ID NO: 242487 - DNA, 201 bp, Homo sapiens
atgtatgcatatataagccactctagatatatattcttgcccagttttcctcccaataaattatagcatattatatttctgtacctttttcactcagtagygtatcttgagatctttccgtattgttacagagtttcctcattctttttcttcctcagctgtataatcttccagtgtatagatatatcataatttatcccc

SEQ ID NO: 242488 - DNA, 201 bp, Homo sapiens
aggaatcattcactaagacgataatgcccactattaatattaaatgacattatttccctttatcaaaacatgcccttatgaattttttttttttttttttttgagatggggtctcgctctgtcacccaggctggagtacagtggcacagtcacagctcactggagcctcaacctcctgggctcaagcaacctacctgcctc

SEQ ID NO: 242489 - DNA, 201 bp, Homo sapiens
aaattgatgaataatttttgtaatatttaagtgcattcaaaatgttggacaggtaatttagatatctgggaatattgtagtttactggtttttttttttttcattttagtactagttgcatatatgctctgacatgaggtattgaagaaatatgaaatgtgtagtctctgctacgcttataaaacataattctgaaaatga

SEQ ID NO: 242490 - DNA, 201 bp, Homo sapiens
acttttgaatcggtaatatatttacatgactcaattatttaaaaatataaaatgtacatggtgaaaactcttcctcctactctacctcctactctacctcytactctacccttatctccctaatttctagccttctacatcaaaagaaaccaccactattagtttttttgtgtatccttccagatatatatgtatgcatat

SEQ ID NO: 242491 - DNA, 201 bp, Homo sapiens
ctaccattttctgattccattattccctttctcctgagagctctccctctgtaaatcacatgcaaacaaatcactgtcttaggctctgcttccagtgaacrcagtatgagacaagaacccttgcgtatgtcagtcatttgcaaaggaggggacagaattaccatgattgacttaatcatttggggtttgatgaatgtctga

SEQ ID NO: 242492 - DNA, 201 bp, Homo sapiens
atctgagtaagaatcatggttttgccactgaactaactggttctttgacctcttgggggtagtcactaaccttcctaatgttttgcctactcatgtgtaaracgtgggtcctaataaccaccgtagagatttagagtgtctagtatatactctttccaggaaatacttgttgagtgagtgaatgaaacattttattgtggc

SEQ ID NO: 242493 - DNA, 201 bp, Homo sapiens
ctttatctttacctgaacatacatttcctttctattgatcccaggtcttcagataaactcaaccaattgtaaaccagaaaacgtttatagcctggaacacygcccccgccgccaccccgcccccgccttgagttgtcccgcttttctgaactaaaccaatgtatttcttaaatatatttggttgatgtctcatgcctccct

SEQ ID NO: 242494 - DNA, 201 bp, Homo sapiens
ctcccacatgtgagagagaacatacggtatttgtctttccgtgcttgggttatttcacttaatataatgacttccagttccatccatgttgctgcaaatgwcaggatttcattttttataaccaaataatattccattgtgtatatgcagttcattttctttattcatctgttgatggacacttaggttgatttttttgcc

SEQ ID NO: 242495 - DNA, 201 bp, Homo sapiens
tttaaaacattttaaaaataaattttattgtgcatacctgaggtttacaacatgatgttatgggagatatatatgtgtgtatgtgtgtgtgtgtgtgtgtkcatgcatgtgtgtatgtatatgcatgtgcacacacgtacatatatagagacagtaaaatggtaatatagtgaagcaagttaacatattactcatcacata

SEQ ID NO: 242496 - DNA, 201 bp, Homo sapiens
ctatctcagattgagttagactcccctcctctgtactccatagcatcctgtacctacctctaatggagctcttctcacatgttttattagataatatttgmtatgtgcaaaagggcatgtgagatgtacatatgcagattgtgacccagtttaagagtgcaaactttcactttagcttctattcatatcttattatctttt

SEQ ID NO: 242497 - DNA, 201 bp, Homo sapiens
agtttatggtattttgttatagcggcctgaatggactaagacaacgtcctttatggcagaaacaaatttaaaaatgaataaactttttttttttcctgctrgaccaggatatgtgttgtatttagtcatcgtgtcttttagttgccttcaatctggaacgttttcttagtctttgcttctattttgtgactttttaactta

SEQ ID NO: 242498 - DNA, 201 bp, Homo sapiens; identical to SEQ ID NO: 47599

SEQ ID NO: 242499 - DNA, 201 bp, Homo sapiens; identical to SEQ ID NO: 47600

SEQ ID NO: 242500 - DNA, 201 bp, Homo sapiens; identical to SEQ ID NO: 47601

SEQ ID NO: 242501 - DNA, 201 bp, Homo sapiens
taatcccaggactttgggaggccaagatgggaggctcgcgagacagcaagaattggagactagccagggcaacatagtgagacctcgtctctacaaaaaamaaacaaacaaacaaacaaaaaacaacaatacattagctgggtgtggtggcatgcacgtagtgggaggactgcttgagcctgggaggtcgaggcttcagta

SEQ ID NO: 242502 - DNA, 201 bp, Homo sapiens
agcactgctttcacgtcattccccaaattttgataagttgtattttcatttccatttagttcaaaatatctttaaacttctcttgaaatttcttctttgascacgtgttatttagaaacatgttgtttaatctccaagtatttggggatttcccagctacctttttgttgtcaatttctagtttaattccactgtggtctg

SEQ ID NO: 242503 - DNA, 201 bp, Homo sapiens; identical to SEQ ID NO: 47602

SEQ ID NO: 242504 - DNA, 201 bp, Homo sapiens; identical to SEQ ID NO: 47603

SEQ ID NO: 242505 - DNA, 201 bp, Homo sapiens
atgagaaatgcacagtttaaccgttcaacagctggccttacttcaaaagaacactatattcatattaaacatttacagtctttccatctaactttacacatgtcctaaatcattttccagcacttctcacatagaagtctagttttgctctttaaaatcaccatctgtatcacccctagtagacgcgagggtttccccaat

SEQ ID NO: 242506 - DNA, 201 bp, Homo sapiens
aatgagaaatgcacagtttaaccgttcaacagctggccttacttcaaaagaacactatattcatattaaacatttacagtctttccatctaactttacacatgtcctaaatcattttccagcacttctcacatagaagtctagttttgctctttaaaatcaccatctgtatcacccctagtagacgcgagggtttccccaa

SEQ ID NO: 242507 - DNA, 201 bp, Homo sapiens
ggtgtgtgtgtacataacatcaaaaactactgtgtgaaacttgagaatgtctgattaaagatttcaatgtatatctaaaaactaactcaaatcgttgaccrgcactttcccagtatcataacaatgcggctgaccctcttctgccttcactttacaccccatcatagcacattatttgtgcacaactagtgaggtctgtgc

SEQ ID NO: 242508 - DNA, 201 bp, Homo sapiens
agcactaaaggctgtaggatgtgactacatcacagttccagaaggaaggggaccatggccaagagaagccctaaatgacagaagctcattaaaaccaagtsccccaaacctcctgaaacatcgttagcaaggagctactgctttcctttcttaaacatgttttgggcatgaccacactctggaagtggtgaactgttacac

SEQ ID NO: 242509 - DNA, 201 bp, Homo sapiens; identical to SEQ ID NO: 47606

SEQ ID NO: 242510 - DNA, 201 bp, Homo sapiens
ccatctaactttacacatgtcctaaatcattttccagcacttctcacatagaagtctagttttgctctttaaaatcaccatctgtatcacccctagtagamgcgagggtttccccaattacatgctgaagagagccagccaccaccccacctaaagacatccaagcagctccagagcctgcctccgaggccaccccttcgc

SEQ ID NO: 242511 - DNA, 201 bp, Homo sapiens
catctaactttacacatgtcctaaatcattttccagcacttctcacatagaagtctagttttgctctttaaaatcaccatctgtatcacccctagtagacrcgagggtttccccaattacatgctgaagagagccagccaccaccccacctaaagacatccaagcagctccagagcctgcctccgaggccaccccttcgcc

SEQ ID NO: 242512 - DNA, 201 bp, Homo sapiens
ggcttagtgaggatttgaacagcatttacctcctagggttattgtgaatgaccagagagaaagtgcctgcaaagctcttttttttttttttttttttttttgaggcggagttttgttctgtcgcccaggctggagtgcagtggctccatcttggctcactgcaacctctgcctcctgggttcaagcaattctcctgcctca

SEQ ID NO: 242513 - DNA, 201 bp, Homo sapiens
tggcttagtgaggatttgaacagcatttacctcctagggttattgtgaatgaccagagagaaagtgcctgcaaagctcttttttttttttttttttttttttgaggcggagttttgttctgtcgcccaggctggagtgcagtggctccatcttggctcactgcaacctctgcctcctgggttcaagcaattctcctgcctc

SEQ ID NO: 242514 - DNA, 201 bp, Homo sapiens
atggcacacatgattttctggtcttgtgtgatagttccagaaagagagggtgcctggggaatgacaaatccctgtgagctggatggtgatgggggaggaaragaaaccacttgatgagagccccggcttgaggatttatccttctcccagctctctcactgctcatgtccactgagagtaaaagtttaaatggctcaccaa

SEQ ID NO: 242515 - DNA, 201 bp, Homo sapiens
gtttctgtggcttaacaccaattacgtaaaataaagcagcttttaggcaggtagtgaaataaagtataatgaaaaggctctggcattcactttttttttttaaacaggaaagaattcaaagtatgcaattattttgctcagatacaaaggatttctaaagctgaagaattaaattccttaagtgattaacctggctttgct

SEQ ID NO: 242516 - DNA, 201 bp, Homo sapiens
ggttcaagtgattctcatacctctacctcctgggtagctgggattacaggcgtgtgccaccatgcccagataaaatttttttgtatttttagtagagtggygtttcactatgtcaaccagtctggtcttgaactcctgacctcaagtgatctgtctgccttggcctcccaaagtgctgggattacaggtgtgagccacggc

SEQ ID NO: 242517 - DNA, 201 bp, Homo sapiens
aatcccagctactcaggaggctgaggcaggagaatggtgtgaacccaggaggcggagcttgcagtgagccgagaccatgccactgcactctagcctgggaracagagcaagactccatctcaaaaaataaaaaataaaataaaataaaacaacataaaatgcttattagggtatttggtacacagagaacaactaataaat

SEQ ID NO: 242518 - DNA, 201 bp, Homo sapiens
tggcgtttcactatgtcaaccagtctggtcttgaactcctgacctcaagtgatctgtctgccttggcctcccaaagtgctgggattacaggtgtgagccayggcgcccggcctgaccacctccttttgaagttggttattcacaggtctgctttacactgcgggtcccatgcaggtagggacttggtgtatttctgtttcg

SEQ ID NO: 242519 - DNA, 201 bp, Homo sapiens
cgggtggatcacaaggtcaagagatggagaccatcctggccaacatggtgaaaccctgtctctcctaaaaatagaaaaattagctgggcatggtggcaagygcctgtagtcccaggtactcgggaggctgaggaaggagaattgcttgaaccgggaggtggaggttgcagtgagctgagattgcaccactgcactccagcc

SEQ ID NO: 242520 - DNA, 201 bp, Homo sapiens
gggaagtgttaaaggcaatgggaattaccccaaggctttgaggagagggatgggatgggacaatgaagaacatgactgagatgttcaagtctgtaggctgrggcgaagagcacactgctggaggtccagcctagagtggaagtgggtcctgttgggctgcatttctaggaagtacatgcctcctcaacccctcttggcagg

SEQ ID NO: 242521 - DNA, 201 bp, Homo sapiens
tctgaagaaatttatattgcattcaaattcagagaaactttgacacttatatctctgaattaacaaggaaccgggaagcttctctctctctctctctctctcttttataaccttatcggcttgtattcacttttcttcttctggaccaatattttagtgcctttttcccccccttgggaaaatgtgcttttcattttaagt

SEQ ID NO: 242522 - DNA, 201 bp, Homo sapiens
tttttttttttaaactaccctctgaagaaatttatattgcattcaaattcagagaaactttgacacttatatctctgaattaacaaggaaccgggaagctyctctctctctctctctctctcttttataaccttatcggcttgtattcacttttcttcttctggaccaatattttagtgcctttttcccccccttgggaaa

SEQ ID NO: 242523 - DNA, 201 bp, Homo sapiens
attaataaatctttatacaaatcgtccttttgaatggctatgtaatattccattgaactgttgcaacctaattcattgagtaattaaatgaatatttcccygagttttactattatgaatgatgtatcaatgaatataattgatgcatattcatacttttgcctattctccttaagataaatttttggaagtgggattttg

SEQ ID NO: 242524 - DNA, 201 bp, Homo sapiens
aaaattttttttcttgctttcccagcttctagcatttgtttcacttcatcttatcgtacagtaactgttagtgtgcctgtcattccctgccgtctgcaaayggaaaattgttatggaattctgtttggagtctcacgctctgggtagctctaaaatcttcctccacactttttgtgactttctttacatttcttttgtgct

SEQ ID NO: 242525 - DNA, 201 bp, Homo sapiens
taaactaaaacaagacaatctggattccaaaattctgacatctggatgccaaattggggcactcctccttgaggctttcaatagtaaaggaaacatatggmccactcttgggtcctttgatgagcagaattatgctgcataagttaattgttcaaaacaatgatcagaaaagacaggtacagaagagagaggcttttgaga

SEQ ID NO: 242526 - DNA, 201 bp, Homo sapiens
gattctcctgcctcagcctcccaagtggctggaattacaggcacctgctaccactcccggctaattttttgtatctttagtagagacagggtttcaccacrtttgcgaggctggtctcaaactcctgaccttgtgatcctcccgcctctgtctcccaaagtgctgggattacaggcatgagccaccgtgcccagccccatc

SEQ ID NO: 242527 - DNA, 201 bp, Homo sapiens
aaatgatagtatttcattctgaaataatcttcggctgatgctccattcttttgtgccaattcatgttcaaagacagtaattcccattatgtatgattgttyacgttgattctcatcccagcttggctgcttattagattggtgaccttggactagtgatttaatctctcaacaaatccatgtcctcatcttcaaataaaaa

SEQ ID NO: 242528 - DNA, 201 bp, Homo sapiens
tgggttttctccatgttggtcaggctggtctcgaactcctgaccttgggtgatctgcccgcctcggcctcccaaagtgctaggataacaggtgtgagccaycacgcccagccttttttctttttaaattgtctttttataatgtgataggttgcattatattactgaatatataattatttttatacttttttgagccctt

SEQ ID NO: 242529 - DNA, 201 bp, Homo sapiens
ttgccactgcttaaatggcatttctcaagttgtccaagtcagacacaacagaatcaccctaggtgacttcttccctttcattcatgacaatcatcaccaarccctgtctgatctcattgctgagtataattcatacacatacctgtgtctccacctcccccaccactgttatacttatggccagtattccctcaaattcca

SEQ ID NO: 242530 - DNA, 201 bp, Homo sapiens
agttccattcctgttccaactcactactacagcatcatcaccagctgtctggatttcactcagcctgccgacaagtgtgacggccctctctctgtgtcctycttcatcctgcctcaccggcctgacaacgaggagagctgcaatgtgagtttacagagagagtcctttaggatttgcttccatagttcaccttcgtttctt

SEQ ID NO: 242531 - DNA, 201 bp, Homo sapiens
caactaaaacctttcctaacttatacactttggccactgtaagtattttttcgaatgatacacattcaaagggctgatttcatcctggaatgactttaaargagagactttacttttaaaacgtgttccttagtgttcaaagaaaatctttctgttttccatcttaactgggtcatttgttcacagcaaatgccttttaca

SEQ ID NO: 242532 - DNA, 201 bp, Homo sapiens
gtactcaaatttgtaaatgttaggatacaattaaaactcttgttcacagacaaggctaaagtagaagtggtgagaacaggtgttggtttaatattggagcyacccaaatctgatttgctgtcacatgatataggatgtagtatttgccactagaaagttctgatgtaggaaaaaggaatggaagtaaaaaaggcagtgagc

SEQ ID NO: 242533 - DNA, 201 bp, Homo sapiens
taatcccagcactttgggaggccgaggcgggtggatcacaaggtcaagagatggagaccatcctggccaacatggtgaaaccctgtctctcctaaaaatasaaaaattagctgggcatggtggcaagtgcctgtagtcccaggtactcgggaggctgaggaaggagaattgcttgaaccgggaggtggaggttgcagtgag

SEQ ID NO: 242534 - DNA, 201 bp, Homo sapiens
aaagtatgtgaatgcacctgaaacatggttatactcaataaactttaatcagttcacaacattgatttcaggaaggcacagatttctgtgatcttcttctrgattagaaaagtgcatatgggctggattaatgactggttgaatgcatttattaaaggagagctgattaacagatggattgacatgtgaatgtctttagtg

SEQ ID NO: 242535 - DNA, 201 bp, Homo sapiens
gtgaagtaggtggcgaatagtggagccagcataagtcaaattaggcatgctttcttttttgagatgatcccaatatcatgtgtgctgatgaccatgaactkggagtcacaggacctgggctcacatccctgctctggcaattgctacttgtgtaattttctaagagatgattttattatctattaaaaaacagtaataggt

SEQ ID NO: 242536 - DNA, 201 bp, Homo sapiens
tcctaaaaagagatgtgtgcaatctaaaccttcagacagaaaggtgaatgatgattaactttgatagggagttatttaaacttgaagttgttctcaagctstttgagaccaaggtccttctcaggtatagatacacactactcttctcagaaaaaaatgcaggatacaccacatattgcactttgtatgaactttcagtgg

SEQ ID NO: 242537 - DNA, 201 bp, Homo sapiens
ggagacagaatcatctccctgaaggagggagccccttccccacaacgcgccgatcgcaggctccacaaagatgttgattgacgtgcacaattcggcacagycagtttcttggtcctttgtccttttctatttgaacaagcctttcaaacggatagggctaattttggataagactagagggagccctgggtcttaactgat

SEQ ID NO: 242538 - DNA, 201 bp, Homo sapiens
caccagcatttgttggagtcaggatacaaacccaagcactctggcctcatagctggcacttttaattccccgtctaccattgttcaagtaccccatccaaygagggcattcaggggtgagcattctgagcttgacacagattctgttagtttgtatttttccattagtattgaaagtgggttcattagggcccgtttctgt

SEQ ID NO: 242539 - DNA, 201 bp, Homo sapiens
tggcctcatagctggcacttttaattccccgtctaccattgttcaagtaccccatccaacgagggcattcaggggtgagcattctgagcttgacacagatkctgttagtttgtatttttccattagtattgaaagtgggttcattagggcccgtttctgtggcttaacaccaattacgtaaaataaagcagcttttaggca

SEQ ID NO: 242540 - DNA, 201 bp, Homo sapiens
tgagatcatgccattgcactccaacctgggcaacaagagtgaaactctgtctcaaaaaaaaaaatacacacacacacacacacacacacacacacacacayatatggtatcttcatcatgggatgttgcaaagatgcaatgagctaacatatttaaaatgcttatggccgggcctgggggctcatgcctgtagtctcagca

SEQ ID NO: 242541 - DNA, 201 bp, Homo sapiens
caaaggatttctaaagctgaagaattaaattccttaagtgattaacctggctttgctctgcctatttctaattcaattataggatatagtgatcagggtcrcatttatccaatagcattggaatatgtttaaatttggactcattttatggcacacatgattttctggtcttgtgtgatagttccagaaagagagggtgcc

SEQ ID NO: 242542 - DNA, 201 bp, Homo sapiens
ctcctaggagtaagatactaagatctttgaaaaatacagtaacccattggaatgaatggtgctttgtttgaagcaataatctttcagaggcaaattttcgwtttttaaaaaaggtcatattttcattatatgagtgatggatgcattttgtggaaaaaaaatcaaaaaaggaaagtacaaagaagaaacaaaaattatcta

SEQ ID NO: 242543 - DNA, 201 bp, Homo sapiens
ccccggcttgaggatttatccttctcccagctctctcactgctcatgtccactgagagtaaaagtttaaatggctcaccaatgttccacaataatttttcmtgaccacatttaaacttgtgctttagtttgaattcatcatgaacatgcctctaatgcctggtcttggatcggggagtgaaaatgcattttgtgctccctg

SEQ ID NO: 242544 - DNA, 201 bp, Homo sapiens
tttgtatttttagtagagatggggttttaccatgttggccaggttggtcttgaactgtgacctcaagtgatctgcctacctctttctcccaaagtgctggrgtaacaggtgtgagccaccgcgcctagctgatacatttcattgtgtaagccacccactactttgttatatggagttaactaacccacatttcttgaaagc

SEQ ID NO: 242545 - DNA, 201 bp, Homo sapiens
gcctattcttggtagatttttacagggctggaagaaaatggcaagaataccttccctaacccattattttatagaggaggaacttaaagtttcaggttagrtagtgtttctaaagtcataccattatttagaggcagaatgataacgcattatgatcattaataaaaatatgtttttaaagaacttactgtgtcttacgca

SEQ ID NO: 242546 - DNA, 201 bp, Homo sapiens
ctgaggcttggtgaggttaaatgtattgctcacattttcgcagctaggaagaagaaattgcctctgtctgatgaagcaaatgcccctaactaccgagctargtgatgttgatctatatctttttgttgttgttggagaacaatgcatgactcctgtatcctcctcttgtgagttgatgccccagagccagttatattaaca

SEQ ID NO: 242547 - DNA, 201 bp, Homo sapiens
cagggctggaagaaaatggcaagaataccttccctaacccattattttatagaggaggaacttaaagtttcaggttaggtagtgtttctaaagtcataccrttatttagaggcagaatgataacgcattatgatcattaataaaaatatgtttttaaagaacttactgtgtcttacgcactggacatgccctttccttgtc

SEQ ID NO: 242548 - DNA, 201 bp, Homo sapiens
taggtagtgtttctaaagtcataccattatttagaggcagaatgataacgcattatgatcattaataaaaatatgtttttaaagaacttactgtgtcttasgcactggacatgccctttccttgtcttgtctcatttcatccttacaaccaagctgtacagtgttctttgctgttagctttatcttaccgatgagtaaact

SEQ ID NO: 242549 - DNA, 201 bp, Homo sapiens
ataaaaatatgtttttaaagaacttactgtgtcttacgcactggacatgccctttccttgtcttgtctcatttcatccttacaaccaagctgtacagtgtyctttgctgttagctttatcttaccgatgagtaaactgagaccgagtggtcaagagaggtcacaccgccagcaagaggcggattggggatgtaagtactga

SEQ ID NO: 242550 - DNA, 201 bp, Homo sapiens
gtgtagtcttctgtggaagaggttgagcaacgtaatatgttgcaaatggaaatagtagtttaaacgctaattcgaaagagggccttttactacaaatgaartgaaaacagatggtggtaaatagagagcatttggcctgggtgcaagagcgagcactcctcaggcttgagtttgcagaaatgaaacctaacaacatgcttt

SEQ ID NO: 242551 - DNA, 201 bp, Homo sapiens
cagcggcgtgattttggctcgctggaacctccacctcccaggttcaagtgattctcctgcctcagcctcctgagcagctgggattacaggtgtgtgccatyacacctggccaatttaaaaaaatatatttttggtagagacggggtttcaccatgttggccaggctgatctcgaactcctgacctcaagtgatcctcccgc

SEQ ID NO: 242552 - DNA, 201 bp, Homo sapiens
gacagctaggatgcaggatggcatcatgaaaacactagggaggaagacaggagccatgctatatgctcctggccctgtactaacttgacactcagggacaratggaaaaaccttcaggtccttttaatttgatggaaagtttgtgctcaaaggttgattttagaagtaatggtctatgcttttgtttcacatgacagaagg

SEQ ID NO: 242553 - DNA, 201 bp, Homo sapiens
aaaaatatatttttggtagagacggggtttcaccatgttggccaggctgatctcgaactcctgacctcaagtgatcctcccgccttggcctcccaaagtcytgggattaaggcatgaggcactgcgcctggcctatactacccgttttcaatgacttagattctaggggtcatgcaaagcccatgcattatctcttgcaac

SEQ ID NO: 242554 - DNA, 201 bp, Homo sapiens
gtctgatttccatttctatttcagtgtaaaaaaccagatcagcactttaagccttacttgaaacagcaccttcccaaacgtttgcactatgccaacaacaraagaattgaggatatccatttattggtggaacgcagatggcatgttgcaaggtaactggtatatgggctatttctgtttctcatttccacaaccacccct

SEQ ID NO: 242555 - DNA, 201 bp, Homo sapiens
aggatcctttcctgacttttgaactacgttaaactcccctaccattgtttcatagctctacactgttccctttgctggtttgtaaatgacacacacactgrtaatgccatagaattgattcatctcatgaatcacgacagctctcttgtctcttggcttgtgagatttggctcgtagcatgcatcctagagagaatttggc

SEQ ID NO: 242556 - DNA, 201 bp, Homo sapiens
tggacatcatatactgtttccaaacaggtcattgagaaaattggattttatattttttattttattacattcctcatgttaatacaatgattccttgcttracagaattttgtcttagaaaatattttattttttcttaatgacagaaatcctatgttggatttattgtaagatattttgaattagcctttattcaatgtt

SEQ ID NO: 242557 - DNA, 201 bp, Homo sapiens
tagatcaaggcatcaagtggagcatggcctaaaattaaagctctatattatgcgttgcctggatgtctgaaatcaggaggaccttaaatgatctaactgcmagttcctcctctcagtggataagatcctctagccatcagtttttcctatctgggaatcatagtttttttgtttatccctatgttgaattttcctgccaga

SEQ ID NO: 242558 - DNA, 201 bp, Homo sapiens
gtattcagtgaccatgaaacggaaaatcctcttttccttttgctgcttttcttatggagatttgcctaaaactaggagcattaaaaaacaaacaaacaaawccaaagtctttggggctgtgtcttttgattgctttggtggagagagaggatgagacagaaacagaagtgcctttgccatggcttgccctggaaacagtga

SEQ ID NO: 242559 - DNA, 201 bp, Homo sapiens
aagagggccttttactacaaatgaagtgaaaacagatggtggtaaatagagagcatttggcctgggtgcaagagcgagcactcctcaggcttgagtttgcrgaaatgaaacctaacaacatgctttgcttgcttttaccctccagtgtcatccctcacgagcggagaatattaaccatattgcagtggctcaccctgccag

SEQ ID NO: 242560 - DNA, 201 bp, Homo sapiens
aaatgaaccagcagcatcccaaggattgcagaagtataaagagagacgcttctctgtaatgcagttagttgttgtttcaggctgcagattgcacggcccawgtgaattaccgccaggctctgttatcttgagggtcaaggatccgagtacaggttcaagttttcctttgtgacttttgattcctgaaggtggttccagaca

SEQ ID NO: 242561 - DNA, 201 bp, Homo sapiens
ataaaacattgtatgtatttacgagatacaacatgatgttttgatacatgtatacactgttgaatgtatacatataaaacaaactaacattagtttatcamctcacatccttatcattggtgatgagaatatttataatctgttcccttagcaattttcaagtatataatacattattatgccctagtcaccatgctgtat

SEQ ID NO: 242562 - DNA, 201 bp, Homo sapiens
catttcagattgatttgatatttaaataataatatatcctaaacttgatgttaacaggagatggggtgtattctagccttgtgggcgtcagttggagggtraataattcggaagagttggcatttgccttcaatgggctaggcatggaaaaaaatcttgagatgaaacctgcaatgcaaaacattgtaaatgaatttcagc

SEQ ID NO: 242563 - DNA, 201 bp, Homo sapiens
atagatgctctgattctgctgtctttattcaggctggactcccagaagtccataatggcctagggtgtgatcatagtgaaatttgttgacagggtggattwttcaaagtttatgataggggaatattttatgagtacacaaaatgattgaaattagagctccattaagctttcactagtgggtcttttatattaatttgat

SEQ ID NO: 242564 - DNA, 201 bp, Homo sapiens
tatactgtgaaattgtcaccacattcaagatatgaacatagtcatcacccccccaaagtaacataaattcttgagaaaaatataccactgaatgaatctgyttagcagagcaggctgactttttttttttttttttttttgagacagagtcttgctccgtcacctaggctggagtgcagtggtgtgatcttggctcactgc

SEQ ID NO: 242565 - DNA, 201 bp, Homo sapiens
attttcaaaacaaaacccatagcatgcaacgccccttaaaagcaggtttctgatagcaagagcataaggagactctttcttggtctgtatataccaagacraaaaagagatgactttttgatgactttttagattttacctaattttaaaaggactttaacttagagttcctctgtactgaaaaccttaattgtcagtgag

SEQ ID NO: 242566 - DNA, 201 bp, Homo sapiens
tttagttttcttacaaaaggttttggactaattccagtcattttagttgaatttcttaacctactttatgcactgtgaagcttttttttgtttttttttttcagctttaggtaatgagggataattttattttgtagttaatttgatagccgaggtagggactttggtcatcttggtcattctcctgacagttaatttata

SEQ ID NO: 242567 - DNA, 201 bp, Homo sapiens
acctttctacaaaaatctgtctctctttaaagcaacacagacagtttccttgtgacattaatagcttcttctgtgaatgtgacatatcaggtgataatctyctatccctgccagccacatccccaaaacgagcccatggagtttatatggttaaaaaatacatctaaatatgataaagaagcagagatatgggattcttgt

SEQ ID NO: 242568 - DNA, 201 bp, Homo sapiens
aaatcaggaggaccttaaatgatctaactgccagttcctcctctcagtggataagatcctctagccatcagtttttcctatctgggaatcatagtttttttgtttatccctatgttgaattttcctgccagaccacaattattgaagccagtcaatcacgtctgctgcaggaaccaggtcttatctccataaacgtggttc

SEQ ID NO: 242569 - DNA, 201 bp, Homo sapiens
ttttttagattccacatataaatgcaatcatgtggtatttgtctttctgtgcctggcttatttcattaagtatcatgacctccaggttcatccagattgtygcaaatgacaggctgtcattcttgtttaaggctgcctagtattccattgtgtatatataccacattttctttatcaattcatctgttgatggacacttaa

SEQ ID NO: 242570 - DNA, 201 bp, Homo sapiens
agataagaattttttcaataagaagttcaggctgatcatttttatagatgaaactagagggtctatgtaagggttggcagaaccacatttggactgtgggsgttcctaggagccttgtggaatggagtccattctctttgtaaaagtgattggtagaacctagtaggaaaagatattaagcccttgggaagtggcagctgt

SEQ ID NO: 242571 - DNA, 201 bp, Homo sapiens
tagcagatattctaacaggtccgaggtgatatttcattgtggttttgctttgcatttccctgatgattagtgatgttgagcagctttcctgtacctgttgrccttttgtatatcttcttttgagaaatgtctattcaggttcttcaaccattattttttattttactttaagttctgggatatctgtgctgaacgtgcagg

SEQ ID NO: 242572 - DNA, 201 bp, Homo sapiens
gccacctgcagagctcttatagaaagacaggcacatagtatgaaatctattcgggctattattattacattattacttatttgccttctagtaagagatgyaattaaggccaatggaatacacattttagtttcggatttcaagctttagagctaagattctgaaaatagactttggagtctgtatatttatatcccaagg

SEQ ID NO: 242573 - DNA, 201 bp, Homo sapiens
cgcccaccaccgcgccaggctaatttttgtatttttagtagagatgaggtttcaccatgttagccaggctgctctcgaactcctgacctcaggtgatccaytcgcctcagcctcccaaattgctaggattacaggcatgagtcaccgaggcaggtcagaccattgtgtttataaatgttttgaaagcacaggtgtttaaaa

SEQ ID NO: 242574 - DNA, 201 bp, Homo sapiens
agttgagtcattgtgacagagattgctggatggcacacaagacctaaaatgcttttctggtcctttacagaaactttgcctacaactgctcaaaactctcwttgaagctgtactgttattctcatttttagaatgaaacaagtggaaaactgaaacttgagaaaggtctcacggttcttagaattcaaactaagatctgtt

SEQ ID NO: 242575 - DNA, 201 bp, Homo sapiens
ttcagataatataatcctgtccacagtttatgcacagccatcatttacataattttgcttttagctagttcagagtattgactaaaatcttttacttgatrctattgaaaataaaggaggtgcatgcacgtgtgtgtctatggctggagaggtgcggctacctgtgtaattacacccaggatataaatagggaaacaaact

SEQ ID NO: 242576 - DNA, 201 bp, Homo sapiens
gcaggcagttgcctgatcccttttctcctctgcctcaaccctccacactccagttatattttccttcccttttcttcggcattctcttcctttgttaaatkgttcaagcaatattagttgaacatccctgtgtgccagggacagtgctggggtttggggacttaatgggagggacatagacttggtgtctacactggtggg

SEQ ID NO: 242577 - DNA, 201 bp, Homo sapiens
ggccgaggcaggaggatcccttgagcccaggagtttgaggctgaagttagctatgattgcaccactgcactccagcttgcgcgacagagctgagactctgyctaaaagaacaacaaaaacagaagccccagtccctaccattacacaggcaatatccacataacaaacaagcacgtggaccccctgaatctgaaatacaat

SEQ ID NO: 242578 - DNA, 201 bp, Homo sapiens
taatgaagagatttctaaatttcctatcttggttttaggtcaagttttctagaagcagatcctgagacaggaattcggtacatgcagtttattgaggaaayggatatactgcaggaaaaccatgtcggaggaaagggaagcaggatagggaaggaggagtgtggagagacaagtgaggacatgctctcagttagcctcgcc

SEQ ID NO: 242579 - DNA, 201 bp, Homo sapiens
acaggaaagaccagttgctcctccaaagaaaagaagaagaaaaatacataggatggatcattatgctgcggaaactcgtcaggacaaagtaagtttatctrttgttccaaagctttgtggcgggcaggtctgagttgaaggttgccttcagtgccttggttggaaaatcggctgagcaagttttagaaaaactctggtgca

SEQ ID NO: 242580 - DNA, 201 bp, Homo sapiens
ataaacatcagcattttaaacaaggctccagggtgattctgatacccaataaaatttgaaaaccacagaatgatttctagggactgagactgttgacaaakatttgtttctagttctaggttttcttctgccagggggcagtgttctctgaaatatggctgggctaataaaccatgttggaatttaatttttcagtctttc

SEQ ID NO: 242581 - DNA, 201 bp, Homo sapiens
aatacaatgcaacctaactctgaattttatggtttggatatgcctgaataatttttcttttgatgtagcttatgtgctttttaggaactgtggttgatttytcctgaataaaaatcaaggatgtacttagtaaactaggtaaaagcatcctgtagacagtggaaatatctttatgcgtttaaatgctgcatatgcttagaa

SEQ ID NO: 242582 - DNA, 201 bp, Homo sapiens
gtgataagtggaccaatcttcgactatgactatgatggcttacatgacacagaagacaaaataaaacagtaagcgtttcatttctactcagtgtgtgattyttaagtcccaagatctcactcaagaagtttttcaaatattcatatactagagaagagatgacaccccttaagttttttgaatttttcaatatatatatat

SEQ ID NO: 242583 - DNA, 201 bp, Homo sapiens
actcttactttacgtacaatgataacgagcacgtattagtgaactttcgcaagcttatgatatgaccaaaaaaaaaaaaaattagtgatttgtactaagakgcgtttctcgctcccattttagtgtgctggctgtaggccaagggcagctttgctccatgtgtattctttattctggaacccaggctgaaggagtagcctt

SEQ ID NO: 242584 - DNA, 201 bp, Homo sapiens
aagtagacagtaagaaaaaaacattgtaaatggctcttgggagagagctattgagtgaagaagagactgagtgggaggggagtaaggacatgttgtataamgcagttaggagtaggaataaaagagtagattcatttacttcatgttgtttggaccatttaagaaaattctacccccctctccctttttttttttaactga

SEQ ID NO: 242585 - DNA, 201 bp, Homo sapiens
  misc_feature (1)...(201): n = A,T,C or G
cctggtgctatggaaggaggaattccctccagaagagcagaactggacctaggagggcagtttactataggatttgttccacttgcttagctgcatgtcantgactgaaatgttaaatacccctacacaattatttatctttcaaacaaaacactaaagtgatagtcttctgtgggatggaaggagaaagaattgagtatc

SEQ ID NO: 242586 - DNA, 201 bp, Homo sapiens
gattgcaggcgtgagccaccacacccagctgagggtgacatatttttatcaaacactcagccatcattgtggaagacaatctgtgaggtagtgtccagtayaatttcaaattcagaaggtgggaaaggaatggttagaaatgttcccacattttcagcatagatagtaaaaaatatgatggagtttgcaaatctaaccttt

SEQ ID NO: 242587 - DNA, 201 bp, Homo sapiens
gttctaagaagaacttagaactctagaaacttgtatcagtatgggatgtttagagagacacatttgacagatacataaatatcatgctgtaattttccagkgtgtacttagagttagatatgtgggattatgaagaaagatgtacgaagaacaggaattattggagtcttctaaaacagttgtgggaaatcctcatggaga

SEQ ID NO: 242588 - DNA, 201 bp, Homo sapiens
tttacatggattatttcatgtaatactctcaagaatcctatgagatggaaacagacaagaaaactgagttttaggatggagaagtaatttgcctaagggtyatataaggtctcacagttaaactgtggtcgagctgggatttgaatttagggagtttagttttggatctagggtcctatgagcctggttaagcagcttgaa

SEQ ID NO: 242589 - DNA, 201 bp, Homo sapiens
actttcagtttagtaagaagaatttccaatagaacaaactcaatagaggaggcatggtatggtgtaaaaatcatggactttgaacgatgcagactgggttkaaatcatttctctaccacagactatgtggccttgatcaaattatttcatctttctgcgtcttggtttcttcactcataaaacgagattatagtctagcag

SEQ ID NO: 242590 - DNA, 201 bp, Homo sapiens
atgaagaaagatgtacgaagaacaggaattattggagtcttctaaaacagttgtgggaaatcctcatggagaatttactggcctggtaaattaattgggaygtgactgaaattaattggcccggtatgtgctcctgaaggaccttttatgtatggggcagcttggaaggggtcacactggcgcaggtagtaggttcatatg

SEQ ID NO: 242591 - DNA, 201 bp, Homo sapiens
agcacgagctccaaggagggcatcgtgacttcagttcacaggtcgccatttatcctgcaataactgtcaaagaaaagtcacttggagaaatgcataggatyctcttttcatcatcacaagaagaatgcaattaaaatagaggcaaactttcaaaagccccttcttagatattctttgtaccctgaaattacctttttatca

SEQ ID NO: 242592 - DNA, 201 bp, Homo sapiens
caagaatcctatgagatggaaacagacaagaaaactgagttttaggatggagaagtaatttgcctaagggtcatataaggtctcacagttaaactgtggtsgagctgggatttgaatttagggagtttagttttggatctagggtcctatgagcctggttaagcagcttgaatttaccctctaggtcagtggtcctcaaac

SEQ ID NO: 242593 - DNA, 201 bp, Homo sapiens
gtcgagaatcttacagtctcagagctagcgaagcacctagacaggcagagcatgacttttgacaagtgccctacttggtgtaagcacgagctccaaggagrgcatcgtgacttcagttcacaggtcgccatttatcctgcaataactgtcaaagaaaagtcacttggagaaatgcataggatcctcttttcatcatcacaa

SEQ ID NO: 242594 - DNA, 201 bp, Homo sapiens
tactgaatacgcacttggcaaccattcacttgctatgaaatcagcctgttcattgctcagtggcacttcaggggacagggccaaagcctcctcatgtcccyacacttctgtggagtcattagagggcagacttctagttagttattgattataagtctcatttcaaaacatggaattaaatagtcccagagaagtgcagga

SEQ ID NO: 242595 - DNA, 201 bp, Homo sapiens
gaatttgagtaactcttttttggttattatagggagaggactcagctctctgagagagtttaaagaagacagagaaatagtagatgcttagagttggaaaraagcttagatgttgtatagccaaagtgcttctgaattcagatactttttaagaaatcctgactaccaccacctagcctttgctgaatagtgactgttagt

SEQ ID NO: 242596 - DNA, 201 bp, Homo sapiens
gaacttgggtatttcagaaagctgtggcaagatgtagttagtccagaatggttcaggaggtaaggagggggtgcctgccatctacatttggttttgtccarttctgatttgtgttcacagttttcagacccatagaaggtgaagggttttaaatcttaccatatctcatcaaaaaaatataagaagcacctgcctcctttt

SEQ ID NO: 242597 - DNA, 201 bp, Homo sapiens
taattgaccttttatcccctgtgggtttgcctcttctagatgttttatataaacggaatcataaaacatgtggcttttgtggctagcttctttcacccagygtaatgttttcaaggtttgtgatgctgaagcacatataagggcttcattcctttttattgctgagtaatatttcaccgtatggatataccccatttcgtt

SEQ ID NO: 242598 - DNA, 201 bp, Homo sapiens
aacttgggtatttcagaaagctgtggcaagatgtagttagtccagaatggttcaggaggtaaggagggggtgcctgccatctacatttggttttgtccagytctgatttgtgttcacagttttcagacccatagaaggtgaagggttttaaatcttaccatatctcatcaaaaaaatataagaagcacctgcctccttttc

SEQ ID NO: 242599 - DNA, 201 bp, Homo sapiens
gtaggtcatcgtttcactttcttgccatattgacaataatgtcttccgatcatgaaaaagcagatcttcccaaatttaggtcttctttaatatatctcagygattctctctaatggttagtgtgcaaatctcacttattttgtcaaatttatttctaagtattttagacctttgactattataaatgcaattttcttttct

SEQ ID NO: 242600 - DNA, 201 bp, Homo sapiens
taccatatctcatcaaaaaaatataagaagcacctgcctccttttcttaattttcattagatctcctgggattgaagccagctcctaataatgggacccayggaagtttgaatcatctcctgcgcactaataccttcaggccaaccatgccagaggaagttaccagacccaattatccagggattatgtaccttcagtctg

SEQ ID NO: 242601 - DNA, 201 bp, Homo sapiens
aggagatcctggatgctaggaatagaccacactggatatgagtttgggaggaaggaatgaattgtcctttttaatttctcatgcttcttcattagttttgstactctgtatttcactgatctgaagtaacaagggaagaaaccagaatttcttaattagacagaaacataataatgaagagatttctaaatttcctatctt

SEQ ID NO: 242602 - DNA, 201 bp, Homo sapiens
aactatattgtgtgcatattacaaatttgtggaattttgatctcactgaattctttttttccccaaattttagttgattcttttgatttctgatatacacytatatcatgtgaaaatattgatggaggagttttttgagaagcccagattatagagcttgtatttgtaaaacactagctgaaactgtaaaagtcttctatt

SEQ ID NO: 242603 - DNA, 201 bp, Homo sapiens
actactctgcttcttacagtttggagatgagtcccctggaagaaaagccacagtttgtttttaagagatctaaactttaatgtccaattaatagtgaatgytattaataacatattaaaattccatatgaattaggccaaacaattcaacatgcagggcataaatacattaattcagagtaatttattataatgctctact

SEQ ID NO: 242604 - DNA, 201 bp, Homo sapiens
aagtggggtccttaccagacacagaatctgctggtgccttgatcgtaaacctcccagcctccagaactatgaaaaatacatttatgttatatataagccamccagtttatggtatttttttatagaagcatgaatggactaagatactttaccatctcccaattaaaacacacctttcatctcactatccttgatatcaag

SEQ ID NO: 242605 - DNA, 201 bp, Homo sapiens
acataagggaacttgtcctgttttaacgctcttgagaaaaggagctggtataaccacagctggtaacacattttaaggttttgctctcactttcaggaaayacctgggctaagaaccaaggagaatgggaggaacagatagagagcagtatcataaacaggagcagacaaagcttagaagaaccttccccctttaggctaa

SEQ ID NO: 242606 - DNA, 201 bp, Homo sapiens
ctattggccatcatccagatttgagtatttgcatctttacgggggacatttagagggaaatatgattgggagccttagatcaagtaatgttttggccatarcttttgtcatcggttaggctccttccaaaaatttaaatcatcaatagttttgttgtatcttatggaacagatggcactagaattcttttgttgttgttgt

SEQ ID NO: 242607 - DNA, 201 bp, Homo sapiens
tgaactcaacatgacaggaaaaaaagaagtcttttcctttttttaagagttagttgccctaaaactagtattaacatttaggctggagtgactattaagaktgcacttattcacagaatcagtcacatggtttgtggccctggttcttgagaacaaccctgcaaggtaaaaggaggtattctcaaagacaatgtggattag

SEQ ID NO: 242608 - DNA, 201 bp, Homo sapiens
ttgtttttctgaaatgtaagaattaagcagtgagctgtcaatcaggtatgttcagagggaaatctgtaacccatttacttggcttgaaagtaggaactctracctgtcattgtaggtaggaccacaatgggtcagtggttagaatcttgagcaaacattgtaatgccccctttatactcttcacatcctatttaggacttt

SEQ ID NO: 242609 - DNA, 201 bp, Homo sapiens
gggttttaccatgttggccaggttggtcttgaactgtgacctcaagtgatctgcctacctctttctcccaaagtgctggggtaacaggtgtgagccaccgygcctagctgatacatttcattgtgtaagccacccactactttgttatatggagttaactaacccacatttcttgaaagcataatgtccttagcatggttt

SEQ ID NO: 242610 - DNA, 201 bp, Homo sapiens; identical to SEQ ID NO: 47616

SEQ ID NO: 242611 - DNA, 201 bp, Homo sapiens
ccaaaacatggagagacaaccgaataggaaggaactattgtatttggccgatgagtgcagcttgttcattgcaacccagcagggagcactcccagataggrgagtgctaccgtcatcttcctcccctgtacttcctttcacatgtttccccttggtagagcccaacagggagccacagggcaagtttgctctttgatgcca

SEQ ID NO: 242612 - DNA, 201 bp, Homo sapiens
acagacattactggaaatgtcttcttgcacgcatatgctagggtatacagtgaagggtagagttgctgactcatgctgtttcagaattgctgagtcattaygttttagctttggtgaaaagtgatttcataaattagtttgggaatcacttcagtgtgcctagagattaatctgaaacatttaggcgctatcctaatttac

SEQ ID NO: 242613 - DNA, 201 bp, Homo sapiens
gaaaaggcttcttatttacattatagtgtaagcacaatattgtttaaaattagaatttgtatttcaaagtgactttcatacctatctggcaaaggatattkgtttattccatgtacacaagatgccagctgtgtaataaaaaaattccaatagcttttctcccccctcaatagcttttaagccctctgaaaagtacacaat

SEQ ID NO: 242614 - DNA, 201 bp, Homo sapiens
caatattctttgccagtattgaggtagagcccatacctttactaaacagtacaactgcaactgctacaactgcagttactttgggttaaaactaaacaagscacttcacatattttgcctgtaaacagtgcaacattccagggagatataaagctttgggagattaagttacagagtaccacaactataaagagctgagat

SEQ ID NO: 242615 - DNA, 201 bp, Homo sapiens
cctgccgggaagtagttggatcttctttcccatacactctccatgaaataacccagcggccagcacccaactggagaccacccaaaaggccaagcagaagwgtaatggcctgggattctagtgctgctatgcagctgaattattttgtgcaaatcataaacctccagttccttcatcagtaagttggagatgatactactg

SEQ ID NO: 242616 - DNA, 201 bp, Homo sapiens
agagagactttttgctcaacaaaaatgcagtgggtggctcccccaagatgtcataaagactaggagagtcaggctatgactctgaatctgtgattctttgrtactttgataaactgaaaaaataaaatctaaattttgattctggaccttaaaatctgtgtttcttactgcagagattatttccccctctttcttagatga

SEQ ID NO: 242617 - DNA, 201 bp, Homo sapiens
gcacctaacacagtttattttttttcttttttagagagacacctcctctatgggcgacctgcagtgctttatcggactagatatgatatcttatatcacastgactttgaaagtggttatagtgaaatattcctaatgccactctggacatcatatactgtttccaaacaggtcattgagaaaattggattttatattttt

SEQ ID NO: 242618 - DNA, 201 bp, Homo sapiens
agcttaactaaggcttctacatttactgcaatgctggagcagccgaactacccagaacaggcttgtgttgtaatagtgtgggccgctttgtctcaaatccrcagttctatctgggagggtcttgcaaagtattctacgaagacttttctccattacttgcatagaatggtaagactttaattaaagcaacatgtatacatt

SEQ ID NO: 242619 - DNA, 201 bp, Homo sapiens
caagttttctagaagcagatcctgagacaggaattcggtacatgcagtttattgaggaaacggatatactgcaggaaaaccatgtcggaggaaagggaagyaggatagggaaggaggagtgtggagagacaagtgaggacatgctctcagttagcctcgcctccctctattgcttgctctgaaaagtaaatccaggtcact

SEQ ID NO: 242620 - DNA, 201 bp, Homo sapiens
tttgtggcctgagtagagagactttttgctcaacaaaaatgcagtgggtggctcccccaagatgtcataaagactaggagagtcaggctatgactctgaayctgtgattctttgatactttgataaactgaaaaaataaaatctaaattttgattctggaccttaaaatctgtgtttcttactgcagagattatttccccc

SEQ ID NO: 242621 - DNA, 201 bp, Homo sapiens
aaacagggaactggggtgtggaatgaaggctcggtctggaattccatgacaggcattctcagcctgggaagaccaggttatactagatccacgtgaagaartcccagaaacatattgcagaagcagaggcttgcaggctagtctccagggttgctggtctcgagataaagatctcaatgtgtgccgagaacaagattcaag

SEQ ID NO: 242622 - DNA, 201 bp, Homo sapiens
gcccatagaactttctgtgacaatggacatggtctataattatgctgtccaaaatggtagctactggctagtgtgactgaggaactcaaatttttatttcrttactttataattaaagagccctatgtggcttgtggctaccatattgaatagcacaggtatagaccatgaaagacaaaaagtagaattcatgttgctatt

SEQ ID NO: 242623 - DNA, 201 bp, Homo sapiens
cctttttaatttctcatgcttcttcattagttttgctactctgtatttcactgatctgaagtaacaagggaagaaaccagaatttcttaattagacagaarcataataatgaagagatttctaaatttcctatcttggttttaggtcaagttttctagaagcagatcctgagacaggaattcggtacatgcagtttattga

SEQ ID NO: 242624 - DNA, 201 bp, Homo sapiens
caaagacatagaagtgggctagtgcttagaagtgaaaaatgattcaattgaatggggattaattttagtgacttaggcaatattcattgatcaccatttawaaaagaaagcttcaacatcaactcatcaactgtgacttcgttttaccttcctgtttcaggtacgtggaaggcagttccattcctgttccaactcactact

SEQ ID NO: 242625 - DNA, 201 bp, Homo sapiens
acagcatcatcaccagctgtctggatttcactcagcctgccgacaagtgtgacggccctctctctgtgtcctccttcatcctgcctcaccggcctgacaaygaggagagctgcaatgtgagtttacagagagagtcctttaggatttgcttccatagttcaccttcgtttcttactttatatttccatcattgaactagaa

SEQ ID NO: 242626 - DNA, 201 bp, Homo sapiens
actgtaaagcttgacccatggttaggtgatcagatcaaccacaaaagtgttaggaaaactagcttgattaaattaaggagaaggtgctatattaataatargtaagctagccattttaggtaacttgactcttccaacatttctttaacatttgatgtaaaatttaatatgcacctaacacagtttattttttttcttttt

SEQ ID NO: 242627 - DNA, 201 bp, Homo sapiens
accacaaaagtgttaggaaaactagcttgattaaattaaggagaaggtgctatattaataataagtaagctagccattttaggtaacttgactcttccaayatttctttaacatttgatgtaaaatttaatatgcacctaacacagtttattttttttcttttttagagagacacctcctctatgggcgacctgcagtgct

SEQ ID NO: 242628 - DNA, 201 bp, Homo sapiens
acacatacgtatgttcttgtacattctacacacacacacacacacacacacacacacacagataaatagtctatttagaggagatacatctatattgtttstaagagtgttattttataagttatcttcaatgagattctatttattatttcaacagtgggatttctgctttatgttctgctttctatattgtttttctta

SEQ ID NO: 242629 - DNA, 201 bp, Homo sapiens
caaagataaaaaatttaaaaaaggagtcagactatcaatcagaatacaagcataggagaagccagaggggttttgatttcagccgttcgtaacagagccayggcattgctgagtgcctctgactcccgtgcaggctgaggtttccagcgttcctgaccatctgaccagttgcgtccggcctgatgtccgtgtttctccgag

SEQ ID NO: 242630 - DNA, 201 bp, Homo sapiens
tcttatacaggcaaacttatgagtacttaggagtaattcatgagtcgaaaggttgaaggtaggtcttgaaatggtgatagttttcttccccccagttttcyccaatcacctctgcacatattggggtctgaacatcccctatattccacctcagctgaggattttacaaagtgcatctgaatattctggctaagacttttt

SEQ ID NO: 242631 - DNA, 201 bp, Homo sapiens
tcaccggcctgacaacgaggagagctgcaatgtgagtttacagagagagtcctttaggatttgcttccatagttcaccttcgtttcttactttatatttcsatcattgaactagaacatacttattataaagcattcaccctaaacagaaaaaagaaaggaaccaaacagaactttgcttaacatgtaggaattttgcctt

SEQ ID NO: 242632 - DNA, 201 bp, Homo sapiens
gctggtttgtaaatgacacacacactggtaatgccatagaattgattcatctcatgaatcacgacagctctcttgtctcttggcttgtgagatttggctcrtagcatgcatcctagagagaatttggctagagtaaggagttttcttcatgaataattgatttttggatttttgtctttgcacaggggtctggaattattt

SEQ ID NO: 242633 - DNA, 201 bp, Homo sapiens
aatatgaataaatgcatttttagtgtttaaagtccagtatatatatatgtgtgtgtgtatatatatatatatatctatatgtgtgtgtgtgtgtgtgtgtrtatatatatatatatatatatatatatatatatatatatatatatatattttagtaatctccagtcacagcagaaaatggtttaaagctattagctctgt

SEQ ID NO: 242634 - DNA, 201 bp, Homo sapiens
tagctgggactacaggtgcccacgaccacacccggctattttttttttttttttgtatttttagtagagacggggtttcaccgtgttagccaggatgctcycgatctcctgaccttgtgatccgcccacctccgcctcccaaattgctgggattacaggcatgagccaccgtgcccggccataaatgcaattttcttctta

SEQ ID NO: 242635 - DNA, 201 bp, Homo sapiens
ggggtgcctgccatctacatttggttttgtccagttctgatttgtgttcacagttttcagacccatagaaggtgaagggttttaaatcttaccatatctcrtcaaaaaaatataagaagcacctgcctccttttcttaattttcattagatctcctgggattgaagccagctcctaataatgggacccatggaagtttgaa

SEQ ID NO: 242636 - DNA, 201 bp, Homo sapiens
gctccgcctcccaggttcacgccattctcctgcctcagcctcctgagtagctgggactacaggtgcccacgaccacacccggctattttttttttttttttgtatttttagtagagacggggtttcaccgtgttagccaggatgctcccgatctcctgaccttgtgatccgcccacctccgcctcccaaattgctgggatt

SEQ ID NO: 242637 - DNA, 201 bp, Homo sapiens
gggtgtactttataagccaaaccagacactagatttttttttcagaattttttttttttttgttatatcccataaagaaagtatcaaacaggacacagatmctggaattgtgagcttcaaggcatggcatttgtaattagattcaacaatacatttacccatttttccttataggagagtcgcattgggttgatgatgact

SEQ ID NO: 242638 - DNA, 201 bp, Homo sapiens
aaaaatcttcttcctctttctttctcattttccctaaatgtaattccataacctgtttcttacagaaggaaaaagtttgttcacacctgcattttaaaaaygtgatgcaaacttggacattttctccctccttctgccctaccctgtctctcactcgtctctagttttggctctgtttttatttctatcttcatttctatc

SEQ ID NO: 242639 - DNA, 201 bp, Homo sapiens; identical to SEQ ID NO: 47627

SEQ ID NO: 242640 - DNA, 201 bp, Homo sapiens
atacaaaaatctcaaaagtcagggctcttcccattaagttactaaaaactaactaaagagatgcctggatgttatctttcgtgtctatgttaagattttcrttttaatcttgcctgaaaatattctttttctccctccccataggaatggaagatgtcacatgtgatagaactgagttcttgagtaattacctaactaatg

SEQ ID NO: 242641 - DNA, 201 bp, Homo sapiens
aaatctcaaaagtcagggctcttcccattaagttactaaaaactaactaaagagatgcctggatgttatctttcgtgtctatgttaagattttcgttttartcttgcctgaaaatattctttttctccctccccataggaatggaagatgtcacatgtgatagaactgagttcttgagtaattacctaactaatgtggatg

SEQ ID NO: 242642 - DNA, 201 bp, Homo sapiens
tatggatgagccacgttgtgtgtgtaaatgcacaaggcaaaatcctattgtgcagctgtgagcaccaatgctgaggaatgctgagaaaagcattgttagcytgaggttggggcaagacagcaagagtccacacactcttccaattcatcacaatgaccccttcacgccataggatgacagctctcattgaaatgcagggca

SEQ ID NO: 242643 - DNA, 201 bp, Homo sapiens
taacttgaaaaagcactgctcatctcgtgggaaccacgacaattatactacccattttcttttcttttcttttttctttctttctttttttttttttttttgagacaagagtctctcactgtgttgcccaggctggagtgcagcggcgtgattttggctcgctggaacctccacctcccaggttcaagtgattctcctgcc

SEQ ID NO: 242644 - DNA, 201 bp, Homo sapiens
attagcctttgtggaatagagtgttacgttgaatgcttagaaatgaggaggatttagaggaagagccagagttagtagagactatagattgtccaagattyttgtttggtggttgctctagggaggggtattgcgtatgggaacatggctgctattttattgtcccctaatggaatcgattagatgccaagcttgaatttg

SEQ ID NO: 242645 - DNA, 201 bp, Homo sapiens
cttgaaccgggaggtggaggttgcagtgagctgagattgcaccactgcactccagcctgggcaacagagtgagactctgtctcaaaaaaaaaaaaaaaaaagaaaaagaaaaagaaaaagaaaaagaaaaaaaaagtatagaacatgagacatgatagtcatcgtactctgtattgttcagaccatatttagaacaattgt

SEQ ID NO: 242646 - DNA, 201 bp, Homo sapiens
ggtgcctgttattccagctactcgggaggctgaggcaggagaatcacttgaacccaggaggcgggggttgcagtgagccgagatcgcaccattacactccrgcctgggtgacaagagcaaaactccgtctcagaaaagaaaaaaaagaaaaaaaaaaagagatagcagctcaaatttatttgggttattggtttataagag

SEQ ID NO: 242647 - DNA, 201 bp, Homo sapiens
cagttccctgtccaggtttgtgtgggttggagctttccgagagagcccattgcaggttcttgggctttggtggatagttcactgagaccactggtggtaaagagttggatgagggcatgtctgaatattcccagacctaggacatgcagccacccttcaacttgtagaagggctcttggaagccattgcaattccagaggc

SEQ ID NO: 242648 - DNA, 201 bp, Homo sapiens
gagtaaggagttttcttcatgaataattgatttttggatttttgtctttgcacaggggtctggaattatttccaaagggtattggtgaagaaatatgcttyggaaagaaatggagttaacgtgataagtggaccaatcttcgactatgactatgatggcttacatgacacagaagacaaaataaaacagtaagcgtttcat

SEQ ID NO: 242649 - DNA, 201 bp, Homo sapiens
gggattacaggcgtgagccactgcacccagccatgaaaactttttaatacacacacatacacacacacacacaaacacacacacacacacacacacacacaaagcaagagcaagcgagaaagaaatctataccttactaatcaggtttgctactagttatgatggaggtgtagcagtcactgttttctcagatagcacaga

SEQ ID NO: 242650 - DNA, 201 bp, Homo sapiens
tgggattacaggcgtgagccactgcacccagccatgaaaactttttaatacacacacatacacacacacacacaaacacacacacacacacacacacacacaaagcaagagcaagcgagaaagaaatctataccttactaatcaggtttgctactagttatgatggaggtgtagcagtcactgttttctcagatagcacag

SEQ ID NO: 242651 - DNA, 201 bp, Homo sapiens
tccgcccaccttggcctcccaaagtgctgggattacaggcgtgagccactgcacccagccatgaaaactttttaatacacacacatacacacacacacacaaacacacacacacacacacacacacacaaagcaagagcaagcgagaaagaaatctataccttactaatcaggtttgctactagttatgatggaggtgtag

SEQ ID NO: 242652 - DNA, 201 bp, Homo sapiens
tttgaatttagcagggtgctaagtcgacagaagggcacagagggaaagaacatttctgatttgctttcttttttcctttactggttttcacacatgaagarcaagttggatgaactcaacaaacggcttcatacaaaagggtctacagaaggtaaggggtggttgcaaaataatcagataaggtttttctcgttttcgaaa

SEQ ID NO: 242653 - DNA, 201 bp, Homo sapiens
cccagaatgtcagtttgagagaaaacagttaattcctcgaaagaatgtatgatatagatggagtttagagttcgcttttgaatttagcagggtgctaagtygacagaagggcacagagggaaagaacatttctgatttgctttcttttttcctttactggttttcacacatgaagaacaagttggatgaactcaacaaacg

SEQ ID NO: 242654 - DNA, 201 bp, Homo sapiens
ataaggtagagccaaaggtagaaataatctttatgtttattatggagaagtttgttgggtggctaacagtgctggcccatagaactttctgtgacaatggrcatggtctataattatgctgtccaaaatggtagctactggctagtgtgactgaggaactcaaatttttatttcattactttataattaaagagccctatg

SEQ ID NO: 242655 - DNA, 201 bp, Homo sapiens
attacgtagaaatctttttttttccttctagtttgtgagctctatatgaggacattgtgtgtatgtatgtatgtatgtatgtatgtatgtatgtatgtatttattttttgagagagagtctcattctgtcacccagactggagtgcagtggcgtgatctcagctaactgcaacctccacctcccaggttcaagtgattctc

SEQ ID NO: 242656 - DNA, 201 bp, Homo sapiens
gtggaacgcagatggcatgttgcaaggtaactggtatatgggctatttctgtttctcatttccacaaccacccctttggcaactggaaatattttatcatycttagtcatcactgaaagaaatatcagttggaaatctcactgtttccaaagattttgtgggctacataaaccatcagtgctgagacaatatatctctatg

SEQ ID NO: 242657 - DNA, 201 bp, Homo sapiens
  misc_feature (1)...(201): n = A,T,C or G
tctagtgatgtcagttctgcataatgagaaactctgggtgtagatacagtttcaatcagttcatgacaattaattacttcaggaagcaagaacgacaaccntctatcacttatctttcaaatctcactgttaacctcaagccttcttatcttcatcagggctagggaacaaggacgcatagaataatttcatgaaaagata

SEQ ID NO: 242658 - DNA, 201 bp, Homo sapiens
ggacatttcatcactccaaaacaaaaactcatacccgatatcggtcaataccccatcatctgacaactgctaattgaccttttatcccctgtgggtttgcytcttctagatgttttatataaacggaatcataaaacatgtggcttttgtggctagcttctttcacccagcgtaatgttttcaaggtttgtgatgctgaag

SEQ ID NO: 242659 - DNA, 201 bp, Homo sapiens
agtgctgggattgcaggcgtgagccaccacacccagctgagggtgacatatttttatcaaacactcagccatcattgtggaagacaatctgtgaggtagtrtccagtataatttcaaattcagaaggtgggaaaggaatggttagaaatgttcccacattttcagcatagatagtaaaaaatatgatggagtttgcaaatc

SEQ ID NO: 242660 - DNA, 201 bp, Homo sapiens
aagagagggtgctcagaagattatctaaatgaatttttatgggatccttccaaaatcagccaaaaagtgactagctttcaaaaaaatctaattctccaggrgaattctaatgtgcaagggaatcttctgtgtcccgccttacattattaaatgagaatctgaaaaggaaacagtgaatcattaagacactagtcgtttatg

SEQ ID NO: 242661 - DNA, 201 bp, Homo sapiens
  misc_feature (1)...(201): n = A,T,C or G
aaatgttaaatacccctacacaattatttatctttcaaacaaaacactaaagtgatagtcttctgtgggatggaaggagaaagaattgagtatcttgctgnaaaaatgatttctcttggtaatggttgttatttcttttgaaatctttctcctctctttgaacagatgaccccaaagccattattgccaatctcacggtaa

SEQ ID NO: 242662 - DNA, 201 bp, Homo sapiens
  misc_feature (1)...(201): n = A,T,C or G
ttttgaaatctttctcctctctttgaacagatgaccccaaagccattattgccaatctcacggtaagtgtttccagttgtcccgcctctgccctgcccagncctctgcccctggagcagcctccctcctgtgtgtgcctcccccggcggggaggggtgggaggaacactttcctcactgccctgccatcctgtatatttgt

SEQ ID NO: 242663 - DNA, 201 bp, Homo sapiens
gagctgagtagaagttaagtgaaagatgatgacagttgggcaaattagtgtagcccaaaaccaggcatgttggttaacaatgcatcttttaaatttaactyatcttgcattgttgaggtattgtatgcatatgtcttattatcccaagcccttatttttccaagggtggagacccgtatgttagattttttgttttcccaa

SEQ ID NO: 242664 - DNA, 201 bp, Homo sapiens
tgagacaatatatctctatgttctgggtctcagcattgtggtgtctctttgcagtctgtcagtgcatctgtgtgtgtgtgtgtgtgtgtgtgtgtgtgtgkctctttcatcctttgaatttacattctaaactctattcttactacttgagtaagtcaaaagtataaatgggagcttgccttagtatattgggctgatttg

SEQ ID NO: 242665 - DNA, 201 bp, Homo sapiens
atccgcccaccttggcctcccaaagtgctgggattacaggcgtgagccactgcacccagccatgaaaactttttaatacacacacatacacacacacacacaaacacacacacacacacacacacacacaaagcaagagcaagcgagaaagaaatctataccttactaatcaggtttgctactagttatgatggaggtgta

SEQ ID NO: 242666 - DNA, 201 bp, Homo sapiens
aggcgcccaccaccacgcacagctaatttttgtatttttagtagagacggggttccaccgtgttagccaggatggtctcaatctcctgacctcgtgatccrcccaccttggcctcccaaagtgctgggattacaggcgtgagccactgcacccagccatgaaaactttttaatacacacacatacacacacacacacaaac

SEQ ID NO: 242667 - DNA, 201 bp, Homo sapiens
tcatacatgaagaaaggcagcaaagtcatgcctaatattgaaaaactaagtaagtaatttccatactctgtgttcttatctgtaatctaggatctccacastaaccagtgggctgtgggctttgagatctatgggcacgtagttttaaatgtgttttattatttgaaatacagaagtgaaggtaacacatgtctgagtgtt

SEQ ID NO: 242668 - DNA, 201 bp, Homo sapiens
agtagagatgtaatctacagaagataatctttagtcaacaagtactactcaaattcctaagttgtataagctactctaggagaaacaagagtgtgttagayagagtcactattcctaggcagcccacagagtgggtcaacaaataaaacaggtatggaaattgcaacactgaaaggcaaggagccacaagaatagcttcaa

SEQ ID NO: 242669 - DNA, 201 bp, Homo sapiens
tcccgggctcacgccattctcctgcctcagcctcccgagtagctgggactataggcgcccaccaccacgcacagctaatttttgtatttttagtagagacrgggttccaccgtgttagccaggatggtctcaatctcctgacctcgtgatccgcccaccttggcctcccaaagtgctgggattacaggcgtgagccactgc

SEQ ID NO: 242670 - DNA, 201 bp, Homo sapiens
ctgttgagaaatttatagctactaaggggaaagtatgttgtgtggttacttggttagtcagcagaagagcagagctttagatttaaggcctctgactccamgagcccatcctctttccaatttatcagacttccatagtagaaccttgggaatttaggaattttttcgtacgttttaggcattaggtacccaaggaaaatg

SEQ ID NO: 242671 - DNA, 201 bp, Homo sapiens
atttatcagacttccatagtagaaccttgggaatttaggaattttttcgtacgttttaggcattaggtacccaaggaaaatgtttagttggaagagcaacrtttttggctctgctttaggaagataaatttgaaatggaggagactgaacattgtgctcaaagggcttaggcaagattcacaggagtgaggcaagagagaa

SEQ ID NO: 242672 - DNA, 201 bp, Homo sapiens
ttgtacagtattcataaatagaggaagggttcctacctaacaatgcttaactgtttttgtttttcttttcttttggaagactgtttttgtaggttatggcycaacatttaagtacaagactaaagtgcctccatttgaaaacattgaactttacaatgttatgtgtggtaagtcactcatttaatcagaaccattgaaaca

SEQ ID NO: 242673 - DNA, 201 bp, Homo sapiens
gtgatctgcccacctcagcctcccaaagtgctaggcttacaggcgtgagccactatgcctggccagaacccaaatttctgaagcaagttgaatctatatatgtagagcagtagagtgagtagagatggagaagctttattgaggaaacctttcaggagaaaatgaatctttttttttttttttttttaagagacggagcct

SEQ ID NO: 242674 - DNA, 201 bp, Homo sapiens
agtgatctgcccacctcagcctcccaaagtgctaggcttacaggcgtgagccactatgcctggccagaacccaaatttctgaagcaagttgaatctatatatgtagagcagtagagtgagtagagatggagaagctttattgaggaaacctttcaggagaaaatgaatctttttttttttttttttttaagagacggagcc

SEQ ID NO: 242675 - DNA, 201 bp, Homo sapiens
catcagtttcctgaaccaacaccctcccgaacatatttagcactggcacaagctgctgcagttccctgtccaggtttgtgtgggttggagctttccgagaragcccattgcaggttcttgggctttggtggatagttcactgagaccactggtggtaaagagttggatgagggcatgtctgaatattcccagacctaggac

SEQ ID NO: 242676 - DNA, 201 bp, Homo sapiens
aagtgatctgcccacctcagcctcccaaagtgctaggcttacaggcgtgagccactatgcctggccagaacccaaatttctgaagcaagttgaatctatatatgtagagcagtagagtgagtagagatggagaagctttattgaggaaacctttcaggagaaaatgaatctttttttttttttttttttaagagacggagc

SEQ ID NO: 242677 - DNA, 201 bp, Homo sapiens
tgcgttggctctgtgtgcaagagtgcacagaggtcatttgtggacttggagtaaactgaccatttggagaaactcctctggaaaattctgattctgatttkgttctgtttccattgcagagctcagaggacgaatcaaaatgggtagaagaactcatgaagatgcacacagctagggtgcgtgacattgaacatctcacca

SEQ ID NO: 242678 - DNA, 201 bp, Homo sapiens
caagtgatctgcccacctcagcctcccaaagtgctaggcttacaggcgtgagccactatgcctggccagaacccaaatttctgaagcaagttgaatctatatatgtagagcagtagagtgagtagagatggagaagctttattgaggaaacctttcaggagaaaatgaatctttttttttttttttttttaagagacggag

SEQ ID NO: 242679 - DNA, 201 bp, Homo sapiens
tcctctggaaaattctgattctgattttgttctgtttccattgcagagctcagaggacgaatcaaaatgggtagaagaactcatgaagatgcacacagctmgggtgcgtgacattgaacatctcaccagcctggacttcttccgaaagaccagccgcagctacccagaaatcctgacactcaagacatacctgcatacata

SEQ ID NO: 242680 - DNA, 201 bp, Homo sapiens
cctcaagtgatctgcccacctcagcctcccaaagtgctaggcttacaggcgtgagccactatgcctggccagaacccaaatttctgaagcaagttgaatctatatatgtagagcagtagagtgagtagagatggagaagctttattgaggaaacctttcaggagaaaatgaatctttttttttttttttttttaagagacg

SEQ ID NO: 242681 - DNA, 201 bp, Homo sapiens; identical to SEQ ID NO: 47626

SEQ ID NO: 242682 - DNA, 201 bp, Homo sapiens
acctcaagtgatctgcccacctcagcctcccaaagtgctaggcttacaggcgtgagccactatgcctggccagaacccaaatttctgaagcaagttgaatctatatatgtagagcagtagagtgagtagagatggagaagctttattgaggaaacctttcaggagaaaatgaatctttttttttttttttttttaagagac

SEQ ID NO: 242683 - DNA, 201 bp, Homo sapiens
tgggagaatcgcttgaggcagaggttgcagtgagccgggattgtgtcaccacactccagcctggaagacggagtgagactctgactcaaaaaaaaaaaaaaggaaatgaaaaaaagagagagtttaaaggaattgtttcagtcatgtttaatgagtaatttaccaaggctgagcagggtggatggaattcaatgaggagtg

SEQ ID NO: 242684 - DNA, 201 bp, Homo sapiens
ctgtcgcccaggctggagggcagtggcacagtctcggctcacagcaacctccgcctcccgggttcaagtgattctcatacctctacctcctgggtagctgrgattacaggcgtgtgccaccatgcccagataaaatttttttgtatttttagtagagtggcgtttcactatgtcaaccagtctggtcttgaactcctgacc

SEQ ID NO: 242685 - DNA, 201 bp, Homo sapiens
aattacgtagaaatctttttttttccttctagtttgtgagctctatatgaggacattgtgtgtatgtatgtatgtatgtatgtatgtatgtatgtatgtatttattttttgagagagagtctcattctgtcacccagactggagtgcagtggcgtgatctcagctaactgcaacctccacctcccaggttcaagtgattct

SEQ ID NO: 242686 - DNA, 201 bp, Homo sapiens
caattacgtagaaatctttttttttccttctagtttgtgagctctatatgaggacattgtgtgtatgtatgtatgtatgtatgtatgtatgtatgtatgtatttattttttgagagagagtctcattctgtcacccagactggagtgcagtggcgtgatctcagctaactgcaacctccacctcccaggttcaagtgattc

SEQ ID NO: 242687 - DNA, 201 bp, Homo sapiens
tcaattacgtagaaatctttttttttccttctagtttgtgagctctatatgaggacattgtgtgtatgtatgtatgtatgtatgtatgtatgtatgtatgdatttattttttgagagagagtctcattctgtcacccagactggagtgcagtggcgtgatctcagctaactgcaacctccacctcccaggttcaagtgatt

SEQ ID NO: 242688 - DNA, 201 bp, Homo sapiens
ttcaattacgtagaaatctttttttttccttctagtttgtgagctctatatgaggacattgtgtgtatgtatgtatgtatgtatgtatgtatgtatgtatgtatttattttttgagagagagtctcattctgtcacccagactggagtgcagtggcgtgatctcagctaactgcaacctccacctcccaggttcaagtgat

SEQ ID NO: 242689 - DNA, 201 bp, Homo sapiens
agtggtttagatgttgaagtaaagtttttaacttttaacttcaattacgtagaaatctttttttttccttctagtttgtgagctctatatgaggacattgkgtgtatgtatgtatgtatgtatgtatgtatgtatgtatgtatttattttttgagagagagtctcattctgtcacccagactggagtgcagtggcgtgatc

SEQ ID NO: 242690 - DNA, 201 bp, Homo sapiens
tgaaaaagtttttgaaaatgcctttaaggctgatgagaactataaggtgttaagtatatgataattcatttaattaatcttcaattaggtttgaaggccartgtttaaacttataccttattgagttaacaatacctttaattttaaatgacaacattttattgtttggtagcagatgtgcaaatcattcagatttatgct

SEQ ID NO: 242691 - DNA, 201 bp, Homo sapiens
tgcactatgccaacaacagaagaattgaggatatccatttattggtggaacgcagatggcatgttgcaaggtaactggtatatgggctatttctgtttctyatttccacaaccacccctttggcaactggaaatattttatcatccttagtcatcactgaaagaaatatcagttggaaatctcactgtttccaaagatttt

SEQ ID NO: 242692 - DNA, 201 bp, Homo sapiens
actgtgacttcgttttaccttcctgtttcaggtacgtggaaggcagttccattcctgttccaactcactactacagcatcatcaccagctgtctggatttyactcagcctgccgacaagtgtgacggccctctctctgtgtcctccttcatcctgcctcaccggcctgacaacgaggagagctgcaatgtgagtttacaga

SEQ ID NO: 242693 - DNA, 201 bp, Homo sapiens
actataaataaaaaaaagtaacgaaaatattttctttaaaggctttatttgcattcttgtaaattttattatttcaagtcaatgtgttaagaattactgcrcatatagttatttcttttataaatttgttttccgtgattccttcaaaagctttcttattgttggcctttattttctgcagagaagactacagttttacag

SEQ ID NO: 242694 - DNA, 201 bp, Homo sapiens
aacaccaaaaaaaattaatgtatagcagaagatacttgaaaatacgtgataaaattaattcacttgatcttagaaattgggtgtgacatttgcttatgccrtagattatgagtcgtcaaattgcctgatttatttttgcttatttacacttgctttagaatagacctgatgacttaatgttaattatcaacagcacatatt

SEQ ID NO: 242695 - DNA, 201 bp, Homo sapiens
tagaaatcattacaaaccattttcccctccccccacctctaacttagaaaatctagcttttctgtagaataccagtttctcttttaagattgggcttataktgtaattctttaacgcaagggctcaataaaatgttagatgattaattttattatttatgttgatgtattttgcttaatctggtacatttgaatctatcca

SEQ ID NO: 242696 - DNA, 201 bp, Homo sapiens
tcgagttgtgagtatatatacatggttttctgggtttaatgactaagcaaatgttactgaagcaaagaatttgtgtgaaagtagcattttaaactgttctrtagattttcaggaggtagtcctgggtaaaaggagttctagggtcaaatgaatttgagaaaggttgcaggtatttattctgcctggatgttcacagggtgt

SEQ ID NO: 242697 - DNA, 201 bp, Homo sapiens
ttgggaaggagcagtcttttaaccgcataatcaaaggagtcatttaaaatcgtgggggagaattggatatagactgtgtcttttcataagggtagaaacakcccctgctaccttagcaaacctgagccctcactacatcaaggcattttcctgggctgtgcggatacaaaggtgaagagattgaaccccagccctgctaaa

SEQ ID NO: 242698 - DNA, 201 bp, Homo sapiens
gaacagatgagtcagatgggttgaatcctgtgagtaagtgaaagagtaataggaaaaaaaacactatggtcatgaaagaactgcatcctgaaagttgtacrtagacagccacttggatggtactcattcatttactttttaataagttaagttttttttaggttcggcagaagccctcaaacactgaagattttattgagg

SEQ ID NO: 242699 - DNA, 201 bp, Homo sapiens
caaaccaactttggagacagagataactttcaaaaagtgacttcatatcatattgataattatactgataactgaataacaccaaaaaaaattaatgtatrgcagaagatacttgaaaatacgtgataaaattaattcacttgatcttagaaattgggtgtgacatttgcttatgccatagattatgagtcgtcaaattgc

SEQ ID NO: 242700 - DNA, 201 bp, Homo sapiens
ctgggctgagtcccaattttcggatttgcctgcagcattttggcactatattttaactttttttcatccgtgtgttgtatttcaagatctggactagccastacctcatggtaagaccttactgagttctgatgccttgttaggtggaagccactgtatttttaactttgcagacagagaaatttatgagtttattagact

SEQ ID NO: 242701 - DNA, 201 bp, Homo sapiens
agcagatgttggagggtaggaaccagcacatcaacctgtatgatctgccttagttcaagaaaagatgccctatctttgagataatcctccaaaactacttktttaattgaaggtttttgagacacattgatagcaacttgaaggctttttttctctggcactgctgtacagttacatgatttaataattttgaaaaggtct

SEQ ID NO: 242702 - DNA, 201 bp, Homo sapiens
ggaggaggaacagatgagtcagatgggttgaatcctgtgagtaagtgaaagagtaataggaaaaaaaacactatggtcatgaaagaactgcatcctgaaagttgtacgtagacagccacttggatggtactcattcatttactttttaataagttaagttttttttaggttcggcagaagccctcaaacactgaagatttt

SEQ ID NO: 242703 - DNA, 201 bp, Homo sapiens
atttttaaggttttctttccccaagtatcactataaacttacaagctttgacgtataatatgattcacctttggaatcatatatatatatatatcaatatrtatatatgtaatgctgaaatagtcctgtccttgggcagtgagagcctctttaagttggttcctgaatcctttctcttaaccccattgcttctgttccttg

SEQ ID NO: 242704 - DNA, 201 bp, Homo sapiens
caacaagatttttaaggttttctttccccaagtatcactataaacttacaagctttgacgtataatatgattcacctttggaatcatatatatatatatawcaatatgtatatatgtaatgctgaaatagtcctgtccttgggcagtgagagcctctttaagttggttcctgaatcctttctcttaaccccattgcttctg

SEQ ID NO: 242705 - DNA, 201 bp, Homo sapiens
tacatctggaagatagattcaatgggacttggtatttattgcttggggggaaaggagaaagaagagtcaagaatgatactcaaattttaggcttggacaartggtgaggttcttcactgaaatggggtacattggcgaaagaactcttgggaatggagaggggaaagatgatgaatttatttgggacatgttgaatttacg

SEQ ID NO: 242706 - DNA, 201 bp, Homo sapiens
tgtacataagaatcacctgagaatttgattatgtgcagattctgattttatgtgagaccaaagatcctgcatttctaacaagttcgctagtgctactgatattactgattgggtagtagcaagggatcagcaagctttttcttgaaagggtagatagtaaataatataggcttgtggtccatatggtctccttggcagctc

SEQ ID NO: 242707 - DNA, 201 bp, Homo sapiens
tttccagttattgttacagcaacattgatcatgtttagaaaatgagatacttcctttacctacattaacaaacagttaagaaaaaaaattcaaactccttgccaaaggttagatcattttcctgccctagtgaacaaacctttcatgattcaagaccttatcaaacatcaagtttatcaattataaatagaataatagaat

SEQ ID NO: 242708 - DNA, 201 bp, Homo sapiens
aaaatgtcaatatatgcacaaggccttgaaatttttcataattctttttttccttctgtgcattgtattaatcaatgtcctgaatgtgtgtgttgaaaacyatcttccaggaatatgccatatctatctaacaaatgcacatattttactgcaggaatcatatattgtttttctcagaaagactctgaacaagttacggtt

SEQ ID NO: 242709 - DNA, 201 bp, Homo sapiens
ctgcattaaaaattaatctgaattgatggccagtgcccacaagttaagaaggtgaatgggccgggcgtggtagctcatgcctgtaatcctagcactttggraggccaaggtgggcagattgcctgagctcaggagtttgagaccagcctgggcaacacagtgaaaccctgtccctactaaaatacaaaagaaattagccag

SEQ ID NO: 242710 - DNA, 201 bp, Homo sapiens
ggccttgaaatttttcataattctttttttccttctgtgcattgtattaatcaatgtcctgaatgtgtgtgttgaaaactatcttccaggaatatgccatrtctatctaacaaatgcacatattttactgcaggaatcatatattgtttttctcagaaagactctgaacaagttacggttagtttgcagaatctgggaatt

SEQ ID NO: 242711 - DNA, 201 bp, Homo sapiens
tggattgatacctaagcactggtgcaggaggacgaggcggagcttgtagggaaatctgcagctggcatgtacagtggcaaaggggacccctaaagggaagytcgtggaaaggtctctggtaagctacttcctgtgagtagctatcgcctctgtgggtctgctgttgattggcaggacctgcagttgggaggaacagctgaa

SEQ ID NO: 242712 - DNA, 201 bp, Homo sapiens
tatctgatttccccttaatagtcaggatcacttaccccagcaagtatagtaatcgccttctttgcctgttcatttgttggcatgaggaacccaaagtggcyaagtggcagtcaacttccagtttaatggaactattgctttttcccctggtacaagcatttctttcttggtaaccaagacctctaggccagcaagagtccg

SEQ ID NO: 242713 - DNA, 201 bp, Homo sapiens
aagatctggagaagattattgcacactttctaatacagcagtatcttaagtatgtacaaactcattcattattctttcaggttgtctttatggtttttttwaaaaattgcaacagaataaacggttttgcagttattttgtgtgaacttttaaatgctatagaaagtaatttacctaaaacactcaaactttaatcactat

SEQ ID NO: 242714 - DNA, 201 bp, Homo sapiens
cattgtgcaaacatcaaagtgtacttacataaacctagatggtatagtctcctaggttatatggtatagcctattgatcctaggctaccaatctgtacagygtgttactgtactgcatactgcaggcagctgtaacacatggttaagtatttgtgtatctaaacatagagtaagtacagtaaaaatatggtattataacct

SEQ ID NO: 242715 - DNA, 201 bp, Homo sapiens
agacttctcagcttaccatctccatttttcacctttaacccattctgaactcattgaatcatgcttctgccaccaccatactactgaaacaggtcatcggwgacccacccccagatgagaccacttcatcaagtggtctcatcttcattcctcttcccacttcacttcagtaacattttatatattcacctctcaccttgc

SEQ ID NO: 242716 - DNA, 201 bp, Homo sapiens
ctatcattaactttctattcaggccctaacttgtacttagcagatgctttctgcttcacagaaaatagatgccatcaggtatgaacagctcctctttctaytttcaaacattagtaatctttttttttttttcttttgttaaggcagaaaagaccactgctttataaggctaaccatgaccactcccgtttcatcctttcc

SEQ ID NO: 242717 - DNA, 201 bp, Homo sapiens
atctttctacattttcctgattgcgtccttgtggtgttctttctttctctctttcttttcttttctttctttttctttttttttttttcagttctggggtmcatatgcaggatgtgcaggtttgttacataggtaactggatccttttagttagatctaaaagcctgattgtatttggaatttttctttaacttttttttt

SEQ ID NO: 242718 - DNA, 201 bp, Homo sapiens
tttgagaccagcctgggcaacacagtgaaaccctgtccctactaaaatacaaaagaaattagccaggcatggcagcaggtgcctgtagtcccagctactcrggaggctgaggcaggagaattgcttgaacccgggaggcagaggttgcaatgagccaacatcgcaccactgcactctagcctgggcaagagagtgagactc

SEQ ID NO: 242719 - DNA, 201 bp, Homo sapiens
agagtccgatgtttcaaggatgggaagcaaaaatttcactagcggatcactaagggtaatagaagagccactcccatttccaccgctgattcccgtgaatygtggcaatgggagaaacagcactattcactgatgtatagcatgccatatcctggaggctactagtccagcccttaaagtgctgatacccagctggcagca

SEQ ID NO: 242720 - DNA, 201 bp, Homo sapiens
cacatggttaagtatttgtgtatctaaacatagagtaagtacagtaaaaatatggtattataacctgggtgacagcgagactccgtctcaaaaaaaaatawatggtattatataatctcttgggaccactggcatatacgtggtccatcaccgaccaaaatattatgtggcacaaaactgtatatacagctgggacatgag

SEQ ID NO: 242721 - DNA, 201 bp, Homo sapiens
ctgaaatatagagttttccataaaaaattagtgtcaaaagaaccatgtggttcttatttgaaaggtcactgcaatatataatttactttctaacattttcygtgcttaggaatgacagattactgttgagtgaacatcattaatagtactatttttaaaaacttgttgtcactgttgtgcttttatttttagaaagaaatt

SEQ ID NO: 242722 - DNA, 201 bp, Homo sapiens
atagttgcaaaacattgaatttaaaaatggaactcagacaattttttaaacagtgtttatcaagaatatgtggggaaaaaagtcctatgtcgggggcacartggccccccaaagatgttcacgtcctaattcctaacctgtatgttacctcacatggcaaaaggaaagtagcattgcacatggaattaagactgttcatta

SEQ ID NO: 242723 - DNA, 201 bp, Homo sapiens
tgtgcttttattgcctatcacataagaagtgctcagaaatgtcgaggtggtaaatagcagccagacagtgatagaaatgttctttctttccaatagatacwacaataatctagttaaaagaaatgagaaaatgaaaatgtcttccaaaggccagtagagtctcatgaagcatattttaaggtttcaactcaaatattgcta

SEQ ID NO: 242724 - DNA, 201 bp, Homo sapiens
aataccaagtttctccttaagaagtaagtttaaatctacttagggtggctttagactagatagcttcctgaaagctttctgtcatagttatctttgtgctyttattgcctatcacataagaagtgctcagaaatgtcgaggtggtaaatagcagccagacagtgatagaaatgttctttctttccaatagatactacaata

SEQ ID NO: 242725 - DNA, 201 bp, Homo sapiens
aagccacatacctttttataacttttaccaattaaagcaaatatgaaagtatatgacatcgtttttaagttcttactaaatacattggtggaacaccaaastgcagatccataaaagcagatgttggagggtaggaaccagcacatcaacctgtatgatctgccttagttcaagaaaagatgccctatctttgagataatc

SEQ ID NO: 242726 - DNA, 201 bp, Homo sapiens
atggtggtgatggaaaatgtgggacagcagaagctttatgagatggtatcatactgtcaaaacataagcaagtaagccacatacctttttataacttttaycaattaaagcaaatatgaaagtatatgacatcgtttttaagttcttactaaatacattggtggaacaccaaagtgcagatccataaaagcagatgttgga

SEQ ID NO: 242727 - DNA, 201 bp, Homo sapiens
cagataattacaagttcatgatatatccctactcttgaaagttggagagagaaaaaaagaacatctgtatcctagaatatatctaggagttaacaaactgmttctttgctgggatgatgaaagtagtttgactgtctctttctatctcattcactggcatgtttttatacttttttggtcctctttagattagaaggaaaa

SEQ ID NO: 242728 - DNA, 201 bp, Homo sapiens
gtggatgctctcagctggctggcgggaagattttactcccgagtagcggaaagatctgctcgaggcctgggtgctttggtgtcggagatccgagagtcggmgatcggagagtcggacacaggacagtcggacaccggacagtcaaacaccggagagttagactgggcttctcggtggggagaggctctgggataactactg

SEQ ID NO: 242729 - DNA, 201 bp, Homo sapiens; identical to SEQ ID NO: 47696

SEQ ID NO: 242730 - DNA, 201 bp, Homo sapiens
tatactacttcaagtttgtctgtaattgatatggcgggcaacacccagaaatcaatctggaaacctaaagttgtaatttactctgtctaatcattgtatcygcgctgcctcccatagctctaactgaggaactggattctataaccagtgagctacatgcagtagaaattcaaattcaagaacttacggaaaggcaacaag

SEQ ID NO: 242731 - DNA, 201 bp, Homo sapiens
aaataactagaatgctatttacacagctgccatgatgtttcgtactgagacatggtttcagttttaatgaactaaacatctgctcctagaagagccaaagsctattattgctttggagaaatgaacgttttcatttaccacctagtatttcagtctgctagcttagttttactatcattgtgtctatttttttcttttaat

SEQ ID NO: 242732 - DNA, 201 bp, Homo sapiens
tgagttttcattaaagagttatttatgttacggtttgtttttataaaagtagcatcgcaaaataaaaaagtctgcatccttgcaagttattcactgctcaygtgcttgctcttctctggtaaattaaaaaaataaagatcaagaagagtctgggaggaggaacagatgagtcagatgggttgaatcctgtgagtaagtgaa

SEQ ID NO: 242733 - DNA, 201 bp, Homo sapiens
atactacttcaagtttgtctgtaattgatatggcgggcaacacccagaaatcaatctggaaacctaaagttgtaatttactctgtctaatcattgtatccscgctgcctcccatagctctaactgaggaactggattctataaccagtgagctacatgcagtagaaattcaaattcaagaacttacggaaaggcaacaaga

SEQ ID NO: 242734 - DNA, 201 bp, Homo sapiens
caaaagctttcttattgttggcctttattttctgcagagaagactacagttttacagcttatgctaccatttcgtatttgaaaataggacctaaagctaaycttctgaacaatgaggcacatgctattactatgcaagtgacaaagtccacgcagaactctttcagggtaaatggctattaattttcagttttatatattt

SEQ ID NO: 242735 - DNA, 201 bp, Homo sapiens
gatacgttctgagaaatgcatcactaggtgattttgtcattgtgcaaacatcaaagtgtacttacataaacctagatggtatagtctcctaggttatatgktatagcctattgatcctaggctaccaatctgtacagcgtgttactgtactgcatactgcaggcagctgtaacacatggttaagtatttgtgtatctaaac

SEQ ID NO: 242736 - DNA, 201 bp, Homo sapiens
gacagagatacgttctgagaaatgcatcactaggtgattttgtcattgtgcaaacatcaaagtgtacttacataaacctagatggtatagtctcctaggtkatatggtatagcctattgatcctaggctaccaatctgtacagcgtgttactgtactgcatactgcaggcagctgtaacacatggttaagtatttgtgtat

SEQ ID NO: 242737 - DNA, 201 bp, Homo sapiens
catggaaaattattaccaagagagtggacgtgcaggtatgtaggactcaaatccagaagtaaatttttagaaagcttttccaaaaaatacatgataaatgyttaataagtctgtatgttttatctttattggatagtatttttagaacaatgtatttttagcagtttgacacttacttgcatatggagaaatttttactta

SEQ ID NO: 242738 - DNA, 201 bp, Homo sapiens
caagagagtggacgtgcaggtatgtaggactcaaatccagaagtaaatttttagaaagcttttccaaaaaatacatgataaatgcttaataagtctgtatrttttatctttattggatagtatttttagaacaatgtatttttagcagtttgacacttacttgcatatggagaaatttttacttatgttctgttatctgaa

SEQ ID NO: 242739 - DNA, 201 bp, Homo sapiens
ccaacatagggcgtcccaccctgccccacagactcttctcccaggtcaggtccgccagtccaagtctagccccggcatcccgaaggcagccccttagggtsccagcagccctagctctgtctcgcaggccaccgcccccaacccagagcttcattcattgaccccggcggaggggcgagacccagccgggcgatgggtgtg

SEQ ID NO: 242740 - DNA, 201 bp, Homo sapiens
gatagcctatctttgccctcatttctaaatcctaattacctgctaccatatttgttttattacagcatttgaaagaaagaacataacagagtactgcagasatctaatcaagatcctgaagcaggcagaggaactgaatgaaaaactcactccattgaaactgattgattcttggatgggaaagggtgcagcaaaactgag

SEQ ID NO: 242741 - DNA, 201 bp, Homo sapiens
tttaaaccagtttaactacttaagatagcctatctttgccctcatttctaaatcctaattacctgctaccatatttgttttattacagcatttgaaagaamgaacataacagagtactgcagagatctaatcaagatcctgaagcaggcagaggaactgaatgaaaaactcactccattgaaactgattgattcttggatg

SEQ ID NO: 242742 - DNA, 201 bp, Homo sapiens
acccctttcctcttagtttatttattcagaacaaattccagacatcatattttaattgtaaattcttcagtacgtatctctaactttaaagaaaagtgctrtgccatcatcacatctaagaagtttaatcaattctttagaattataaaaaaaattcagatttctatctcatttttatgtttttttttaaaaaaaatatag

SEQ ID NO: 242743 - DNA, 201 bp, Homo sapiens
ctgtagaatagcttttgtactttaaacagtttcaattataaggaagggggcatattactataacttcattcagacagtaaactgttcactgatttctactyagcataaatgaatctcgtacaaaaagtaaaagaatgcttatgcaactatcatgtttaattatacacactactgtataattaaaaatctggtttttttgga

SEQ ID NO: 242744 - DNA, 201 bp, Homo sapiens
ctcattatttcatggtttagaaggataattctagcagttagatgaattccagatacatctggaagatagattcaatgggacttggtatttattgcttgggrggaaaggagaaagaagagtcaagaatgatactcaaattttaggcttggacaaatggtgaggttcttcactgaaatggggtacattggcgaaagaactctt

SEQ ID NO: 242745 - DNA, 201 bp, Homo sapiens
gaggagttttaaaaacttctgagattaatccttttatctggttcctgaaacataaatttaaaaacatattgtactgaacattcaaaatcctctcttctagyttttcgaaaccctatctaaattattgttaaccatattcaccctacagtgctatagaacacttgaacagaagatacaaggggcaaaaaaacccaaaaatgt

SEQ ID NO: 242746 - DNA, 201 bp, Homo sapiens
atattttaaaaaactagaatgaattcttgatgggacagtgctttccagtaggcttagaggtgaaactggccatttctccagtggaatgggaaacttgcagrtggatcattctttccctgtgttctgtagtcttcaaattaaacttttattattcagacatttttttccagttattgttacagcaacattgatcatgtttag

SEQ ID NO: 242747 - DNA, 201 bp, Homo sapiens
aacacagtttctattgatatattttggcacatgcagctcttttggtgcatatcatgtcttttgacaggttacatctttgtgttttatcctctaggacttcyggatcttaaagcactgaaagatggtagaggctgattcttaggaggcttagcagtcccatacaaggcaacaaggaccattgtggggacttcagttaggagg

SEQ ID NO: 242748 - DNA, 201 bp, Homo sapiens
aattactagagccactcctggccactatctaggacattaaatccagaatttcttagtgagcccgtatcaataaacttagcttaattcgacattgtattccrtaaaccctgtttcagtacctttatgatctattcccatatacattctctaggtttctgatgtagtttggatatgtgtctcctcctaatctcatgttgaaat

SEQ ID NO: 242749 - DNA, 201 bp, Homo sapiens
gcaacctacagaatgggagaaaatttttgcaacctactcgtctgacaaatggctaatatccagaatctacaatgaactcaaacaaatttacaaaaaaaaamcaaccccatcaaaaagtcggcgaaggatatgaacagacacttctcaaaagaagatatttatgcagccaaaagacaaatgaaaaaatgctcatcatcactg

SEQ ID NO: 242750 - DNA, 201 bp, Homo sapiens
tcaattgccaatggttagcccccataccttggaatccatcattgtcgttgaatcaggtggtctacttggaagatgatatttcccactgtcattcctagctyacagagaacagccaggggagccccagcatccctgaagagctccgctgatgctggcgctctgctcatgactgtatttttcacagtcttggtgaaagaagtg

SEQ ID NO: 242751 - DNA, 201 bp, Homo sapiens
aattagcatcagttcagagctaatgtccagtagtttctgagaagtgatttctctttttctttcttttttttttggacggagtctcactctgtcacccaggstggagtacagtggtgtgatctcagctcactccaagctccgctcccgggttcacaccattctcctgcctcagcctcccaagtagctaggactacaggcgcc

SEQ ID NO: 242752 - DNA, 201 bp, Homo sapiens
tgtgttaagaattactgcgcatatagttatttcttttataaatttgttttccgtgattccttcaaaagctttcttattgttggcctttattttctgcagaraagactacagttttacagcttatgctaccatttcgtatttgaaaataggacctaaagctaatcttctgaacaatgaggcacatgctattactatgcaagt

SEQ ID NO: 242753 - DNA, 201 bp, Homo sapiens
ctggggcccatagggtaatatgtgatctgcccccatctgtctacctgatttcctactcttcctctcttcttaagccccagcatactgggcttatcattatragcacttaccactctctaatggcatatttattggtttactctttgtattgtcttgtttctttgcttgaattatagacacatttgcatagcatttttgtct

SEQ ID NO: 242754 - DNA, 201 bp, Homo sapiens
aactttaatcactataaataaaaaaaagtaacgaaaatattttctttaaaggctttatttgcattcttgtaaattttattatttcaagtcaatgtgttaaraattactgcgcatatagttatttcttttataaatttgttttccgtgattccttcaaaagctttcttattgttggcctttattttctgcagagaagactac

SEQ ID NO: 242755 - DNA, 201 bp, Homo sapiens
aatgggagatacaaagggcaatcaggtaatgtaaaaacaaaccaactttggagacagagataactttcaaaaagtgacttcatatcatattgataattatrctgataactgaataacaccaaaaaaaattaatgtatagcagaagatacttgaaaatacgtgataaaattaattcacttgatcttagaaattgggtgtgac

SEQ ID NO: 242756 - DNA, 201 bp, Homo sapiens
aaatactatgaaagttagatattgtccccattttacaggaagggaaatggggatgcaggtgagtatcttgtctgaggtcactcagcaggtaaaaggaggayctgagatttaacttaggtctatatgactcaaaaacatgctcataaccattctgctatactacttcaagtttgtctgtaattgatatggcgggcaacaccc

SEQ ID NO: 242757 - DNA, 201 bp, Homo sapiens
ttacagcttatgctaccatttcgtatttgaaaataggacctaaagctaatcttctgaacaatgaggcacatgctattactatgcaagtgacaaagtccacrcagaactctttcagggtaaatggctattaattttcagttttatatattttaaaaagtatattaaagcctatgggatgcttttctgtcatattcccctagg

SEQ ID NO: 242758 - DNA, 201 bp, Homo sapiens
ttataaatttgttttccgtgattccttcaaaagctttcttattgttggcctttattttctgcagagaagactacagttttacagcttatgctaccatttcktatttgaaaataggacctaaagctaatcttctgaacaatgaggcacatgctattactatgcaagtgacaaagtccacgcagaactctttcagggtaaatg

SEQ ID NO: 242759 - DNA, 201 bp, Homo sapiens
tattatttcaagtcaatgtgttaagaattactgcgcatatagttatttcttttataaatttgttttccgtgattccttcaaaagctttcttattgttggcmtttattttctgcagagaagactacagttttacagcttatgctaccatttcgtatttgaaaataggacctaaagctaatcttctgaacaatgaggcacatg

SEQ ID NO: 242760 - DNA, 201 bp, Homo sapiens
agtaatctctgcaatccctccaggaatgcagtaatatttttagtttgctgtattggttggtaaaggcagttttgctggcttccgtttgatctttcctatawtaataatccttagttactttgccaggagaccaatgggtggattctgccacttgctgaatatatctgttctcagtatacattctgaaactgaggaaataac

SEQ ID NO: 242761 - DNA, 201 bp, Homo sapiens
tcttttcctagattttccatggtctggtaaagttaaagatattctgcaaaatgtctttaaactggaaaagttcagaccacttcagcttgaaactattaacrtaacaatggctggaaaggaggtatttcttgttatgcctacaggaggtggaaagagcttatgttaccagttaccagcattatgttcagatggtatgtacta

SEQ ID NO: 242762 - DNA, 201 bp, Homo sapiens
atagctgaagccagatgccagggcatgtgttctgtcttattaatgaaattacagctggaaccatggctgctgttggagccacagccttattaattttggcrtaatccattctcaatctccagaatccattgtcttctgcatacaccacataggtgagttgaatgcgacatggaagtcatcattaccctcatatctttcatg

SEQ ID NO: 242763 - DNA, 201 bp, Homo sapiens
gaaacacgcagccaccctcactgccgctttaagagcgcttcctattggcgaaacctgcttccaatctcaaccaataactcgtaatgttgttcggtgacgckcatggtgaccacaccccttgaccaattagagaagggagttatctgtgattggctgaacggaccgacccggaagggtggatgctctcagctggctggcggg

SEQ ID NO: 242764 - DNA, 201 bp, Homo sapiens
agatatctcaacatgccccataccctttgactctcaccaaggtgtcaggcctctgaatttttatgggatttatcttctatcctctggcaagtgtctctctkagcagtttgtctatagtagctgctactgctgcttcttgctcagcaggtcagacaagcatgatatcatcaatgcagagagctagtgtaatgtctggtggaa

SEQ ID NO: 242765 - DNA, 201 bp, Homo sapiens
gtttcagaaaggggaggcagggtagaagagacttggcataatttagtggtttaaggtaacctgcttcgttggaatctgcccttatgttcccctccaaattkcagtctccttcccagtcagtgtgctgactttatcataaaagtccctgcaaggttgggaattcagtttgtattgaaattcagccatctgcaggatttagac

SEQ ID NO: 242766 - DNA, 201 bp, Homo sapiens
tagagcactgcaggcaggtatggtaaattcatatccggagtaagcatctgtatcagtgagaacaaagtgctgcctctttcattatagacggttccaatgcrgtcactttgccatcaagcatctgtctgtccccacagagaatggtgcctccattggaactcaaggttggtatgagctgtttgcaggttgagcacttagctc

SEQ ID NO: 242767 - DNA, 201 bp, Homo sapiens
aaagtgggtggtgagactgaatttcctcccctaatgtgacatctgttccttcgtgaaacagtaagataaagaaaggccaatcatgaaatattagagctggrtagtatttggcattgtgatctagcgaaactaggccctgggaatggaactgtcaattcagaaataactttcaaagttgagagatgtagggtaggccaaaga

SEQ ID NO: 242768 - DNA, 201 bp, Homo sapiens
tttattgactctaggtttaaaaagttgtcatctttcaaaaaaatattcaattctattttatgctaatgtttagtgaactaatttatatgtgtgtgtgtgtrtttataaacccacggatacatatatgcacaaatacacatagggagttagagacattagtattataatgatagtatatggcatacattttgatccattttt

SEQ ID NO: 242769 - DNA, 201 bp, Homo sapiens
ggattactgcgtactagtgccttcatgtttacagattgttttctatcctgatctttaacatttgtcaatgcattatgtcactgctattattaaatgtaaamatttaataagttttaaaaatcaataaacattagtgcttgatttaaatgcttgatttaattattaacttaataatcaatttaaattttaataataaaatgt

SEQ ID NO: 242770 - DNA, 201 bp, Homo sapiens
tgcctattagccatgtgatcttcaaaaacactaccagacattgcctaaatagttgtcaccagggttaaataaaattacaaattataaatgtagaaacacckagcacagtcttggcacatatttagttctcaataatgctagtttgtctttcctctagtctttataatttgacccataagccactagccacatgtagtgtgt

SEQ ID NO: 242771 - DNA, 201 bp, Homo sapiens
tattagatttatttatttattcatttatttttgagaaggagttttgctcttgttgcccaggctggagtgcaatggcgcgatctcggctcaccacaacctcygcctcccgggttcaagcaattctcctgtctcagccttctgagtagctggggttacaggcatgagccaccacgcccggctaattttgtatttttggtagag

SEQ ID NO: 242772 - DNA, 201 bp, Homo sapiens
ataataaaatgtattaaaagtcttgaatagataaagcattgttttcccttgagatgaattctgtcttcatttgttcttttgtccatttattcacaattgcytagcatctcctgctggagatccagaaatcaataatcacagtttgtgccctcagaaaattcacaggtttggggtgaaaaagagttgtatgaaataagtgat

SEQ ID NO: 242773 - DNA, 201 bp, Homo sapiens
gctttttggtattttcatgtctactggaaggtgggtggaggacagcagagtgcagaggaagaggcaatttaaaattagtgctgagtaaggattttagctcytctgcctattagccatgtgatcttcaaaaacactaccagacattgcctaaatagttgtcaccagggttaaataaaattacaaattataaatgtagaaaca

SEQ ID NO: 242774 - DNA, 201 bp, Homo sapiens
aactcttggactcaagcaatccacctgcctctgcctccaaaagtgttgtgattacaggcctgagccactgcacccggcctgtaatatattttaaattgtawacaaagttatcattgataagatatagaaaaaaatttaaaaaaaaattttatctagctgtcaatgagaaggaaagcaagctaaataatgaaaattaaatta

SEQ ID NO: 242775 - DNA, 201 bp, Homo sapiens
ttctagtcacagggaactggatatgacaaaatggaaaatagttttgcctctttgagaaagagagtaaaggtcagcatggctgaaacatgtaaaaagtgggraagttgcttagaggtactggcagaatccagatcgtgctgggcctagtaggtcatgttatgcagctgcatgttgtgcaagtgcaatcagaagtgattgaaa

SEQ ID NO: 242776 - DNA, 201 bp, Homo sapiens
aattattctcctctatgaatagagatagtcgtctataaatgcattattaatgtagaatatttcccttgtttttatagactttgccagaggccaaatataayttaaagttttgggttatttctgagtcaggaaactcatacatgtggataaaagccaaacttctaatatttaatcttaacttagcaggatattttatacaca

SEQ ID NO: 242777 - DNA, 201 bp, Homo sapiens
ctaaatagatctcacctactaaaatggccccactctctcacgcagtcagttcacatgtagctcttatgaactgtctgagtaggagggacattaaaacattwtatatccacaataaaattacttttcatgccatttctatttgaatggtatataaaagatatatctagtacagaattttgtatatatatatatatatatata

SEQ ID NO: 242778 - DNA, 201 bp, Homo sapiens
caaaagtgttgtgattacaggcctgagccactgcacccggcctgtaatatattttaaattgtaaacaaagttatcattgataagatatagaaaaaaatttwaaaaaaaattttatctagctgtcaatgagaaggaaagcaagctaaataatgaaaattaaattagcatgaggaaaatgaaaaataaagagagactggaaga

SEQ ID NO: 242779 - DNA, 201 bp, Homo sapiens
taccatggaattggtatcatggagctcattgacataaagtaaacaggcagaaaatataatttctttaaaattgcattgcattttaacatactgactaatcrgttttactgttgactaattgaataaatatatgaagacagtaaaagagacatattattttcccaagtggcagtatatttagaaattatcttacttctatct

SEQ ID NO: 242780 - DNA, 201 bp, Homo sapiens
ttttactcacacttaacactgggctggaagttgtggtcactctgagcacatagagcggattaagggacatttttgctttcaaggagctcagagtctggttytaagagatttttctcaactacccctaatgtaagcgtcttctagattttataatgcttacactcaaaatctatccctctcctaaacaatgaaatagaaaaa

SEQ ID NO: 242781 - DNA, 201 bp, Homo sapiens
gctcagtgccttggcaatagtagatcttcactagaatttttctgcaggagagtgggagatcctttactgcctttttttcatggtctaccagtaggtttgtrtagtaagtgatctttgaatttggtttttatcttgaaacttctttgtaaaaaacaacgtgaataaataaaagtattgtgtactcacgtgaattacctctgc

SEQ ID NO: 242782 - DNA, 201 bp, Homo sapiens
tttttggttactgaataatattccattgtatggctgaaccactgtttatccatttaccttttgaaggacatttttgttgcttccaaattttggtgattatraataagctgctataagcattcatatgcagtctttgtgtggacatgttttcagctcaattgggtaaatacctaggagtacattaactggatcatgtggtaa

SEQ ID NO: 242783 - DNA, 201 bp, Homo sapiens
aagggctgaacagcatgttgaataactgaagaaagagtgaaaatgctttgaaaggaacgacagaagtgaaggactctatttccacataggtataaaaaggygtaatttctgtacatctttagaaactctactgttgccttttatattggatctaatttcctagtaatgattttccactgcatagttttttcctttcactac

SEQ ID NO: 242784 - DNA, 201 bp, Homo sapiens
aaaacaagcatatatgtaagatttttaaagtcagaggttgattctttgaaataagtagtaaaattgatcgaactctagtaagactgaccaacaaagaaaamgcatgcatgcccagcactgggaaagaaaaggagacttcactacagattttaatgttattaaaaggatgacaagaaaatattaaaataaactttacgtaaa

SEQ ID NO: 242785 - DNA, 201 bp, Homo sapiens
ttatcaaataaaagataacactttatatgatatatcacaacatagagcctgtttattattatactatttatttattattttctatcatcttccaaatttcktacaacgagaatgcaataattttggttttttaatatagttttttttaatgaaaattaaaataaagctagttaaggttgtttcctttcactaccactattc

SEQ ID NO: 242786 - DNA, 201 bp, Homo sapiens
acgtgtatatgtgtgcgtatgtgtatacacacacacgtgtatgtgtgcgtatgtgtacacacacacacgtgtatgtgtgcgtatgtgtacacacacgtgtwtgtgtgcgtatgtgtacacacacgtgtgtttgtgtgcgtatgtgtacacacacgtgtgtatgtgtgcgtatgtgtacacacacgtgtgtatgtgtgcgta

SEQ ID NO: 242787 - DNA, 201 bp, Homo sapiens
cacacgtgtatgtgtgcgtatgtgtacacacacgtgtgtttgtgtgcgtatgtgtacacacacgtgtgtatgtgtgcgtatgtgtacacacacgtgtgtaygtgtgcgtatgtgtacacacacacgtgtgcgtatgtgtacacacacacgtgtgcgtatgtgtatacacacgtgtgtatgtatgtgtatacacacgtgtat

SEQ ID NO: 242788 - DNA, 201 bp, Homo sapiens
tgtgcgtatgtgtacacacacgtgtgtatgtgtgcgtatgtgtacacacacgtgtgtatgtgtgcgtatgtgtacacacacacgtgtgcgtatgtgtacayacacacgtgtgcgtatgtgtatacacacgtgtgtatgtatgtgtatacacacgtgtatgtgtgtgtatgtgtatatacacatgtgtatgtgtgtgtatgt

SEQ ID NO: 242789 - DNA, 201 bp, Homo sapiens
gtgtgtatatatgtatatatacagatatacatatatacatgtgtatatacgtatatacacatgtatacacatatatacatgtgtatatatacatatatatrtgtatacatgtatatatatacacatgtatacacatatatacacgtgtatacacatgtatatatgtgtctatacatatatacacgtgtatacatgtgtcta

SEQ ID NO: 242790 - DNA, 201 bp, Homo sapiens
atacacatgtatacacatatatacatgtgtatatatacatatatatgtgtatacatgtatatatatacacatgtatacacatatatacacgtgtatacacrtgtatatatgtgtctatacatatatacacgtgtatacatgtgtctatacgtatatacacatatatacatgtgtatatatgtatataatgtatatatacac

SEQ ID NO: 242791 - DNA, 201 bp, Homo sapiens
gcagaagctttttagcttaattagatcccattcgtctattttggcttttgttggcattgcttttggtgtttttgttatgaagtccttgcccatgcctatgkcctgaatggtattgcctaggttttcttctagggtttttatggttttaggtctaacatttaagtctttaatccatcctgagttaatttttgtataaggtgt

SEQ ID NO: 242792 - DNA, 201 bp, Homo sapiens
ttcaccatgttagccaggatggtctcgatctcctgacctcgtgatccgccctccttggcttcccaaagtgttgggattacaggcgtgagccaccgcgcccsgccaagagaaggtacttttttttttttttaacactgacattagttctctttttgactgctaaggataactacaaatgatacattctgtaaaccttttgtc

SEQ ID NO: 242793 - DNA, 201 bp, Homo sapiens
ctataaattactttgggcagtatggccattttcacgatattggttcttcctaaccatgagcatagaaaggttttccatttgtttgcatcctctcctatttmcttgagcagtggtttgtagctctccttgaagaggtgtttcacatcccttgtaagttgtatttctaggtattttattctctttgtagtaattgtgaatggg

SEQ ID NO: 242794 - DNA, 201 bp, Homo sapiens
ccatgaagcattactttttatttagataaaatgactacgattaaaaattttgtaaatcaattttcagtttctggtattacttttaaaagttcaggagtgasgtaataattcttctttcttgactccattagtatcatttcttgctaatgatacagtgtccttaattgcttcaaacagaaaaatcactaaattctaatgatt

SEQ ID NO: 242795 - DNA, 201 bp, Homo sapiens
atccatctggtattggactttttttggttggtaggctattaattattgcctcaatttcggagcctgttattggtctgttcatagattcaacttcttccggstttagtcttgagaaggtttatgtgtccaggaatttatccatttcttctagattttctagtttatttgcatagaggtgttcatagtattctctgatggtag

SEQ ID NO: 242796 - DNA, 201 bp, Homo sapiens
acgagttgaagccacatgaaaggaagaaacctggggacaaaaagcttagggaatgcccatagctaatggtggtatttaaaacacattataagcttttgctrtggcttttgcttatttttatttaaaaacttttttatttaaaaaacttttaattaaaaactgttttatgtccacgtataggcttcctcgggctgtctttac

SEQ ID NO: 242797 - DNA, 201 bp, Homo sapiens
ggtccttttgtgatataactagcgcttcccttttaagaaaagcgtgtagggtcctcacgaataccagttgtaaatgacatttaaatttctgatctgggagktaaaggaagaaatactcaacattgctgccacttggcacaccagtcatggttgctgtagcttgtgacgtgcatgaagctaccaagctgttagaagatagag

SEQ ID NO: 242798 - DNA, 201 bp, Homo sapiens
tatgatgtggtcaattttagaataagtgcgatgtggtgctgagaagaatgtatattctgttgatttggggtggagagttctgtagatgtctattaggtccrcttggtgcagagctgagttcaagtcctggatatccttcttaaccttctatctcattcatctgtctaatattggcagtggggtgttaaagtctcccattat

SEQ ID NO: 242799 - DNA, 201 bp, Homo sapiens
tatttaaaaacttttttatttaaaaaacttttaattaaaaactgttttatgtccacgtataggcttcctcgggctgtctttacaatatatgttatggtagrggattattaggctggcacaaaagtaattgtggtttttgccattaaacggagtggaccaaagaattttgcaccaattctttggtccatgtgtctgcatttc

SEQ ID NO: 242800 - DNA, 201 bp, Homo sapiens
aggatctatatgaccttcctgttcccactccatttcaaaaatgagaacaatgttctaccagattgcctcttcccaagtatagacactataacaggactctsctaaaatgtaatagagtttgcatgcattaaaacaatctattgaaatacattagtgggcttgctagaatgtcagcaaataggagaggggaaaaaacataag

SEQ ID NO: 242801 - DNA, 201 bp, Homo sapiens
gcagtggggtgttaaagtctcccattattattgtgtgggagtctaagtctctttgtatgtctctaaggacttgctgtatgaatctgggtgctcctgcattkggtgcatatatctttaggatagttagctcttcttgttgaattgatccctttaccattatgtaatggtgttctttgtctcttttgatctttgttggtttaa

SEQ ID NO: 242802 - DNA, 201 bp, Homo sapiens
ctttttgttagtttctttggtcctacatttcttcatcttcacaataagaagttggtctggataatgtgtcaaatcattgcaaaaatgttctatgctttttwgccttaatgacgttccatcctgcctaaggcctgtgcctgggggatttcactctgccctttcttctctcacaggccatttaaatgttacagctctaaattc

SEQ ID NO: 242803 - DNA, 201 bp, Homo sapiens
tttattatatttccaatgggagataactcataggtaaaataaaatactaaataaacactgtcaatgtattagaatgaataatcaaaatatgtggtacctarttttcttggcgattaagagaactggttatgaattgaaggaaaaggctataaaagtaaaataagaccgtattttatgtaatgttaccgtaaagataacaac

SEQ ID NO: 242804 - DNA, 201 bp, Homo sapiens
tgcttttttgccttaatgacgttccatcctgcctaaggcctgtgcctgggggatttcactctgccctttcttctctcacaggccatttaaatgttacagcyctaaattcgtttttctcagagtcctgctacttactaatgctaatgtgtcaagtctgtattatttccagtaattcacaatacactatgattggcctaatat

SEQ ID NO: 242805 - DNA, 201 bp, Homo sapiens
atattttccaacaggatcatttatgttgtcctgtccttgtttatgttgctcatctagctgaagagaaaaggccttacaggccacagaagggcaatgatttmtcctgacaggtgaagacccttcctgacaggagagggtctggttccatcttaacatgatagatggcatgcaagggtcaactatctttgagatgacaaaatg

SEQ ID NO: 242806 - DNA, 201 bp, Homo sapiens
atttcactctgccctttcttctctcacaggccatttaaatgttacagctctaaattcgtttttctcagagtcctgctacttactaatgctaatgtgtcaartctgtattatttccagtaattcacaatacactatgattggcctaatatattcactcccagatggcttcttcactgggggtttcactgcctgaacctaaag

SEQ ID NO: 242807 - DNA, 201 bp, Homo sapiens
atgagcagtattcatgacctccccctccatttttctccttacaacctcatgtatatataagagaccaggatttttcatatttgaaattatgttgctttacrtgtagaaagatggtttagctaatttttaactttcttctacccatgtctaattactataaactctgataatagttactgaattattgcttgcttacagatg

SEQ ID NO: 242808 - DNA, 201 bp, Homo sapiens
ttagatgaattataactgatgtgctttaaaaataattcatactgctggggaaaaaatctcactttgatgcttttccagtatatagttaagaattacactgrtgggtagtaattgaagaaattggtaagcacttgtgtgatatgaaacagcataggaaacttatatataatatatgatagccattatatataagcttatata

SEQ ID NO: 242809 - DNA, 201 bp, Homo sapiens
tggacgctcctgctctagatatactgacttttccaaggaatgacaggggttaagatccgtttttaattggttccactcctggtggaaggctttcttctatrcatgtcaggttttctttgacttatcaataccttcatgaagaaacaatgaagtgaaggacattttaaaagcaggttgtataagccactaaaaaattttgaa

SEQ ID NO: 242810 - DNA, 201 bp, Homo sapiens
cagaaggcacccttcctttcttttttcagtaaataccacaattttatttttaggtgtatgcagcatgaaatgtatgtgtgtatgtgtgtgcctgcgtgtctgtgtgtgtgtgtgtgtgtgtgagagagagagagagagagacagagagagtttgagagatagaacagagagattgattaattggttgattgattagttggt

SEQ ID NO: 242811 - DNA, 201 bp, Homo sapiens
aattttgaataatgcctagtctctgcatataagtaaaaaaaaaaagcagtttaacaatatgttaattatatgtagacattatttttatcacaataaaattragacatactacaagaacagattgacttagtttttcagtttgcaattatcttcccagttaaatataagtaaagatcttaataaatgtaacattaaagttct

SEQ ID NO: 242812 - DNA, 201 bp, Homo sapiens
agaaggcacccttcctttcttttttcagtaaataccacaattttatttttaggtgtatgcagcatgaaatgtatgtgtgtatgtgtgtgcctgcgtgtctgtgtgtgtgtgtgtgtgtgtgagagagagagagagagagacagagagagtttgagagatagaacagagagattgattaattggttgattgattagttggtt

SEQ ID NO: 242813 - DNA, 201 bp, Homo sapiens
gtgaagaataaataacaagctgttaatttattctcatagatttttttcaatccacaacacaatttaaaaagaaatccttctcaggatatatatgttacaarccctatttagatttgtacaaatatgcaagacattttctgtgccttattatgtgctatataataatagtgaaaaatccctggtcttttctagaggtatttt

SEQ ID NO: 242814 - DNA, 201 bp, Homo sapiens
acaaatgtgaggtgggcaaagaaatttgtattttgcatttttccattctcaactggtgcatttggtatctatatagtaatttcaaaaggtttagcagattrtgattttattacacttgacttggtgtaagatggaggtcagagctattttcaaaaatctagtagaattttgtctcaaatgaagaaaaaaggaaggaagaaa

SEQ ID NO: 242815 - DNA, 201 bp, Homo sapiens
cagaacatctagcaatagagggctaaagttttatttctttctattgttttaaacctcattcatgcaatctttgataatgaatagtagtggtaattaaattrtgtgcttttctagattcctatgaaagattaaagttcaaatacattggggctttgggtgaagcaccaaattaatttgaccaacccaagtatctatatagaa

SEQ ID NO: 242816 - DNA, 201 bp, Homo sapiens
tgttaagtggcaaaattcgacctactggttcactatgcactacaacatccctaaatacctccctacttatataggataaaataagagaggggaaaagaatraagcttgactttcttattctttggcctgtgaatctctagactaaaatttcttgagtttggtgcaagtttacttcctcagattacattattttttcccaat

SEQ ID NO: 242817 - DNA, 201 bp, Homo sapiens
cccctgcttttttttgctttccatttgcttggtagatcttcctccatccctttattttgagcctatgtgtgtctctgcaggtgagatgggtctcctgaatrcagcacactgatggatcttgactcattgtccaatttgccagtctgtgtcttttaattggggcagttagcccatttaaatttaaggttaatattgttatgt

SEQ ID NO: 242818 - DNA, 201 bp, Homo sapiens
gctgttagtctgatgggcttccctttgtgggtaacccgacctttgtgtctggctgcccttaacactttttccttcatttcaaccttggtgtatttgatgaktatgtgtcttggggttgcacttcttgaggaatatctttgtggtgttctctgtacttcctgaatttgaatgttggcctgccttgtgaggttggggatgttc

SEQ ID NO: 242819 - DNA, 201 bp, Homo sapiens
gttttagctactcaagcctcagcaatggcagacaccccttccccagccaggctgctccctcacagttccatctcagactgctctgctagcactgagcaagsctctatgagcgtgggacctgccaagccaggcacggaagagaatctcctcgtctgccgattgctaagaccttgggaaaagtgcagtatttgggcagaagtg

SEQ ID NO: 242820 - DNA, 201 bp, Homo sapiens
ctcacagttccatctcagactgctctgctagcactgagcaaggctctatgagcgtgggacctgccaagccaggcacggaagagaatctcctcgtctgccgrttgctaagaccttgggaaaagtgcagtatttgggcagaagtgtcccgtttttcaggtacagtctgtcatggcttcccttggctaggaaagggaaatcccc

SEQ ID NO: 242821 - DNA, 201 bp, Homo sapiens
cttattgagatgaaccaggtacctcagttggaaatgcagaaatcccccatcttctgtgtcaatcacagaagacctgcagaccagagctgttcccatttggmcattttggaatggacccaatcagtgatctttttatagtactcttgtaattgttttggggaaccatgaaccacacccaatcaagacagtgaacttggtaga

SEQ ID NO: 242822 - DNA, 201 bp, Homo sapiens
ctgactctcttgttagaggctaatgcagctagtggctttaagttgaagccagtgctcatttcccttcctcaaaatactgtgcccttcagaattatgctaartctactctacctgtgctctataaatggaaccacaaagcctgggtgacagcatatccgtttagagtgtggtttattgaggattttaagctcaatttttaga

SEQ ID NO: 242823 - DNA, 201 bp, Homo sapiens
attctgcagcccatagatcaaggagtcttttaaatttttacatcttattatttaagaaatacattctataaggctataccttccatagacagtgattcccytgatgggtctgagcaatgtacattgaaaccttctggaaaggattcaccattctagatgccattaagaacattcatgattcatgggaggaatatcaacatt

SEQ ID NO: 242824 - DNA, 201 bp, Homo sapiens
cagttctcatggatgacttcgagggggtcaatacttcaatggaggaactaactgcagaagtagcaagggaactagaattagaaatggaacctcaatatatsactgaattgctccaatctcattataaaacttgaattaataaggagttatttcttaggggttgagcaagaaaaatgttttcttgggatggagtgtactcct

SEQ ID NO: 242825 - DNA, 201 bp, Homo sapiens
tctttgttacagcagcttagtataaaccctgcttgatagagagtcccatagaatttcgttgacctgggctctgcccagcattagcaaagtgttttgaatcyccaagccccaggttcctcctgtgttacatggtactattgtgagattatactatataagagtttaaaagttcagcatttaaatataccagggactgtacta

SEQ ID NO: 242826 - DNA, 201 bp, Homo sapiens
tcacaaataatttaaaaattacactgtttggtactttgagttctgtgttcttgttaaaaaatgctgcagatagttatcacaccactacactccagcctggkcaacagagtgagactgcgtctcaaaaaaaaaaaaaaattgcagatagtaaaatataaactgcacttcagcctaggtgacagagtgagaacctgtctctaa

SEQ ID NO: 242827 - DNA, 201 bp, Homo sapiens
cagagctcatactctcaagcaataccagtagctcttagcaaagtctttggaaaatattaagcattccataagtgctaatagtattattaattcttagcaarcatcatggagcccctgttataggtaaagtaatgtgggttgtgttttggggaccctcaggctatttagcaggggacacagatgtatagaaaagtcatcaga

SEQ ID NO: 242828 - DNA, 201 bp, Homo sapiens
ttgtgtttttaggagatctttgattctctagcctcacaaattttttctttagcagagttttcaaaagtgtcatatttttacatctcacttttactactagtttttttttttttttttttttgagatggagtttcgctcttgttacccaggctggagtgcaacagcactcccaggttcaagcgatcctcctgcctcagcctc

SEQ ID NO: 242829 - DNA, 201 bp, Homo sapiens
tagtaatctaagtttaattaagactgagtaatataggggtagtttggaattgaccaatagattctgaagccttctacacatacttttggtctctctccaartggtgctattcgtgctgctggtaattacttttcttcaacgccttttgatccaggcattttcttgcttacgatctttggatggatattcatgctggcagga

SEQ ID NO: 242830 - DNA, 201 bp, Homo sapiens
gtttgtataggaggaggcaagagtatcttttttaaagccatacctctcaagttcaaatcctggcttcctcatttatgagctttgagtccgtgggcaagtarttgacacctcaacaaccatgaacatttatacctgttaatccatgagtacaaagggagggcacataaatgaaagttctgacgtgtattagaaaggttctga

SEQ ID NO: 242831 - DNA, 201 bp, Homo sapiens
tagttatataaatttgcttaaccatatacaagaaaagaacttttcttttgaggaaaaggtacactcgaactctgatctgtaattatttaagctttgggcasttcatagcctaatcatcatttgctgtaaatataccatactccctttcaaaatgatatttaatctgcatttagtacgtggtattggattttacatttctta

SEQ ID NO: 242832 - DNA, 201 bp, Homo sapiens
gctgtaaatataccatactccctttcaaaatgatatttaatctgcatttagtacgtggtattggattttacatttcttaaagatatataaaagttttggtrtactcagtaggtgattgaagatgtgctacttcatggagaaaaatatattaggtgtgtctgacctggaaagaatgttctattaatctttttcttgtgtcag

SEQ ID NO: 242833 - DNA, 201 bp, Homo sapiens
gtaaatataccatactccctttcaaaatgatatttaatctgcatttagtacgtggtattggattttacatttcttaaagatatataaaagttttggtgtaytcagtaggtgattgaagatgtgctacttcatggagaaaaatatattaggtgtgtctgacctggaaagaatgttctattaatctttttcttgtgtcagatt

SEQ ID NO: 242834 - DNA, 201 bp, Homo sapiens
ctggaaagaatgttctattaatctttttcttgtgtcagatttataacaaaaagaagtggaaactatattaagcaaggatataagttacatatatatatatrtgtgtacgtgtgtatatatatctgtaggatatgaaaagatgttagccattatattttctcttattcttgctgttctctaatttaaactcaaattctgggg

SEQ ID NO: 242835 - DNA, 201 bp, Homo sapiens
atttactgattgcagatattgaaccatcctttcatgtttgggataaatcccacttgatcatggtgaggtgtccttttaatgtgcttttgaattcagtttgstagtattttgttgaggactttttgcatctatgttcatcaggaatattggcctgtagtttatttatttattattcttgtagtgtccttgtccggctctggt

SEQ ID NO: 242836 - DNA, 201 bp, Homo sapiens
aatgttctattaatctttttcttgtgtcagatttataacaaaaagaagtggaaactatattaagcaaggatataagttacatatatatatatgtgtgtacrtgtgtatatatatctgtaggatatgaaaagatgttagccattatattttctcttattcttgctgttctctaatttaaactcaaattctggggattcgtat

SEQ ID NO: 242837 - DNA, 201 bp, Homo sapiens
ccctctactccctccctgttttctaaaaataagtcacttttggtttgttaccttataacacatgccaaaatttatcccagagtgaatttttgtagccaacktagaaccccaaaatagaaactgctgacagttccttaaatacagtaacactggcaggtgccttggtaataaattcacaagcttagaatctacaaaacaata

SEQ ID NO: 242838 - DNA, 201 bp, Homo sapiens
aatacaatttgagttgaccaattaataactggtttctctgttatcacaaccataaacagagatgggaaactgatcataggttttgcatttgataggtacarctatcaagaggtaaatggaaaataacaagacacctaacttgaagtgatcacatgtgcagagcctcttagcttttgttttaattgttccttcagcatcatt

SEQ ID NO: 242839 - DNA, 201 bp, Homo sapiens
accaggcttaaaaattccaggtttctaatcagcggtgataattgtgtttagccaatatattaaagactgctaaatatttggaattttacatgggaaaaatmcttcagttagcatgtttatcccacaagttctcctgattccttgttgccgattttgatgggtgaatttacttgggtcaaaggttgtcattgtgttgtaaaa

SEQ ID NO: 242840 - DNA, 201 bp, Homo sapiens
gaagtggaattgctgagctaagtcatagggtgggtacatgttcaactgtgtaagataattccaagttattttggaagatgtttgaaaccaatgtatatgcycatcagcagcctatgaaggctgctagtgtttcccatgtttcccaacacttgtatgtttagattttttcatttttgtcgtttggagaatgttcgtgtgatc

SEQ ID NO: 242841 - DNA, 201 bp, Homo sapiens
ttatttaaatttgacctttgaaacaataatagaaacattgatatctagatctgtttctttccttccagcatgttaagatggcaaagagaaatgagtaaaaygtacatttttcaccatactttaagatgtaagggactgtgtagttcattttgctgctttaagtgagacatgtttccctaaatacagggcaatactgataag

SEQ ID NO: 242842 - DNA, 201 bp, Homo sapiens
tgcatatccttccaagctagcagtgaaaggagtaacattggccaggattttgatgttttgccatattctaaaatcaacatgatggtatacgacattgctgmaaacattaatttagagggtggctggaaattgctgaaaatattgaactctagctagtgaacccaaacattctcctttttttctacttctagatcagagaag

SEQ ID NO: 242843 - DNA, 201 bp, Homo sapiens
tgatgttactagtatgtaattttaccacattaatatgacagtttctaaggaagtaaaaatgctatcttcttctctatattacttggtttacaagatgtttyttaatcctaaaagaactttattatcgtatattcctaaaaaggctctttgacaagtgatataaaatatatttatttcttttagtagtgaactttccaaaaa

SEQ ID NO: 242844 - DNA, 201 bp, Homo sapiens
ctctcctcacaagatgacccataccacattcagccaacagtcaaggagctatctcattttctttagggttaattttctcttcttaacgtaatgagataaayggctaaatggggttggtgtctcgggagtgttcagagggcaagaaatggtcaagaactggtttatctccaaagttcattagcctattagataactgacgca

SEQ ID NO: 242845 - DNA, 201 bp, Homo sapiens
gttgacttgatttttgttagtggttcagtagaataagttttatgaatgactgataccagtaaacaattgaagtcacctgtttgtaaaaggaaattgtggargattcatggcagagtgcaaattgctgaatgaaaattagcctatggcccatttatcaaaactaatgtacaaatgactttatatcatcattgtaaagaaatg

SEQ ID NO: 242846 - DNA, 201 bp, Homo sapiens
tcaaggtgaagtagacatgtatctagggatggctgaagtgggaagcccccagattttcagagcactgcttctcattcctccaaacacagccattaaagggwcatcactcaccagatatctttctaaatgttccataaagaaatcatcttttttaaaaatgtagacatataaaatagtgacctagggacagggattatatga

SEQ ID NO: 242847 - DNA, 201 bp, Homo sapiens
aaagagcactgaaatcattccaacatatgtatataaacatttcaaaaagtatttatgggatgtctagtatgtatacaaaatggtataacattggagggggragatgaaaaagaaaaatgaatgaggaaatgaaagaacataaaacaaaattcacaaaatacgaactaatatatgaattagttatatataaaatcagtttgt

SEQ ID NO: 242848 - DNA, 201 bp, Homo sapiens
gttatacaatgtacattgcaattagttactctttaaatttttgaaattttataaatctgattgaaaatgtttataggtaacgaatgatggtgaaaatattwgtattactgttgattgaaggcacatctattgtagtaaaatatgagtataagagaaagagatattacaatggggcattcgttggtacagtctttatagccc

SEQ ID NO: 242849 - DNA, 201 bp, Homo sapiens
ttttttttttgagacggagtctcggtctgtcgcccaggccggactgcggactgcagtggcgcaatctcagctcactgcaagctccgcctcccgggttcacrccattctcctgcctcagcctcccgagtagctgggactacaggcgcccgccaccacgcctggctaattttttgtatttttagtagagacggggtttcacct

SEQ ID NO: 242850 - DNA, 201 bp, Homo sapiens
ggggtttcaccttgttagccaggttggtctcgatctgctgacctcatgatccatccgcctcggcctcccaaagtgctgggattacaggcgtgagccaccgygcccggcccgactctctactcttgaagaatatatttcttcttcttctttttttttttttttttttttttgcccatgcaagttctcaccctgtggcccagg

SEQ ID NO: 242851 - DNA, 201 bp, Homo sapiens
ccacacccaagttagctgtttgggaattccgctgtttcatcaacctttccccacatccccaacaggcctccaacttgtatgctgaatttggaacttgattmtaaatggtgcagtccagaaatccctgagtctttagtcacaaccatgtttgataattggcatgtcactaggttaggcagatggcagttacttacttatgcc

SEQ ID NO: 242852 - DNA, 201 bp, Homo sapiens
ttgaaataagaatacttcattttcttatttaaagtaaacatgaatatcacaaagctgttaaaattcttctgttgccaaaatgagatggctaaaaaaatgcyatcatcaaagctttatttgtgttttttacattactggggccataagacctatttttttaaaaaactgtatacacacacacacacacacacacacacacac

SEQ ID NO: 242853 - DNA, 201 bp, Homo sapiens
catccattcattcattattaaataagcatgtactgtccagtaccatcctatgtgctaagtgtgaagcaacatgtagactcacattttttcttatgttgtgtttttttttttccttttcaattcccactcatgtatcttgtcatacctatcacttagactctgcattgattttcttctattcataattgtcaactctggtag

SEQ ID NO: 242854 - DNA, 201 bp, Homo sapiens
tgattggaggtagttcctggcttccagcattatcacagatgatttttgtcctttgatgtgctgcgaaatagaaagtaatgttagaagcaaaatgcggggatttttttttcttagttaccattgactgagagcttactgcttccagcatcgtcttgtgctgtgttaagcactttatatgtattgactgattgaatgctaaca

SEQ ID NO: 242855 - DNA, 201 bp, Homo sapiens
aggacttctattctcccagggcactgccctgagaaacctccttgaattaagctttgatggttaccacacaaggaatcaactcaactagttctgctgagactttttttttttttttttgcctttcccgctttagaattttcaaactttgtgtgaaaataaatcaccctgggtagcagaagttatgcactgccaggccagaag

SEQ ID NO: 242856 - DNA, 201 bp, Homo sapiens
atttttcatatttgaaattatgttgctttacgtgtagaaagatggtttagctaatttttaactttcttctacccatgtctaattactataaactctgatamtagttactgaattattgcttgcttacagatgcttattaatgtggtagttcttgggatttttcttttatgatcgtattctttgagaagaaattttctctgt

SEQ ID NO: 242857 - DNA, 201 bp, Homo sapiens
taatctttttcttgtgtcagatttataacaaaaagaagtggaaactatattaagcaaggatataagttacatatatatatatgtgtgtacgtgtgtatatrtatctgtaggatatgaaaagatgttagccattatattttctcttattcttgctgttctctaatttaaactcaaattctggggattcgtatgagtttttat

SEQ ID NO: 242858 - DNA, 201 bp, Homo sapiens
tgttatttattttttctcccaattatagtgatcctctccataattaataatctatcagcctcttccagtttgaataacttcctttcagtttagaaatactgtcttttcaagatcaccttattattggacttaatgtctttaggtaattgcttagcctctcagattcctctttgaagatggcatttgggcacctgagggagg

SEQ ID NO: 242859 - DNA, 201 bp, Homo sapiens
gtgattgtacagtattgcttgatgcaaaagtcaactcatttttcaccagggattcctgtccattcctggaaatgaggtaggatgaacccggccggggggcrggggggtgtcacagtagaaggtggtggtttaggaaaatctacaagtgacggtaaatactattctagaaagttaatttttttttatttcagggagcaaatc

SEQ ID NO: 242860 - DNA, 201 bp, Homo sapiens
aaatcaaagctcttcattaaggcaaatcagcatagggattattccctaggcaaatttttgggagatggatcgtacactttattcactgttttaggaaaatgtaatcacccctacctcctgagaaaacatttagcttcccatcctcccagtgttagtgggtgtctttgagaatgcaaaattcttttaatgttaactaaacca

SEQ ID NO: 242861 - DNA, 201 bp, Homo sapiens
aatcttccattagtttttcataccactctgcagactttattatatggtggccacagtttagtgtagacatgacttcaaaaagtcccaaatattggctgaaygcggtggttcacacctgtcatcccagcattttgggaggctgaggcagacggatcacctgaggtcaggagttcaagactagcctggccaacatggtgaaac

SEQ ID NO: 242862 - DNA, 201 bp, Homo sapiens
agtttctgcattctgtcacagctatccattctcttttctcatacctttttaatatgtttgaaataaaaaataattatgagatcaaggtttttttccttcawagttgtctaaaatgattaaggacatcaatttccactgatatgatgctgtgggcaagaaaatgtataatggttcaattccccaggttaacttgccttgcag

SEQ ID NO: 242863 - DNA, 201 bp, Homo sapiens
tcgaggtaatgacagatcttatgctaacttagggaccctttggattaaaattgaatagtaacctgcaatgacatggatgatctttgaatcaataactttcytactacaaatgaagcattcatggaagctgaatgagctcagctaacccagtaaggtaactcacattcaacaaactgatttggtctttgacaaggctcaagt

SEQ ID NO: 242864 - DNA, 201 bp, Homo sapiens
cattcaaagctcctgtgaccctctctaactggatatctttacttctctagaaactgttgaacactatgtagtatgttttgccatgaaaacaaaggaggaawaagtggtatgaaaattcagagttactgcagaaatttttagttctttctattttgtgaaatagtgcttgcatttacatagggggaaaataacatgcccaat

SEQ ID NO: 242865 - DNA, 201 bp, Homo sapiens
ctcgcaaagtgctgggattacaggcgtgagccaccacgcccggccataaataacttgtttagctcatatgtgattgtccaattttgggcatgtatacatakatacatatacatatataaatgtatataaataaatatgtgtatatgtgtacataaatgattatgggcatatgtatttgtgtgtttgaatatatgtgcttag

SEQ ID NO: 242866 - DNA, 201 bp, Homo sapiens
tccatcctacaagtacacattaccaggagcacaagatgcaaaggatgatttcccccttcgaaaaactggtaagttggtttaacaggaactctgtttgctcytctgtaacacacctgtaagtttcattttgccacacctctagaagaaagtcaaaggatttgagtcgtagataatatacctccccacccctgcccccagcat

SEQ ID NO: 242867 - DNA, 201 bp, Homo sapiens
ggtgggagcctgcttcctgattcatagacagttaccttttcacatggtggatgggtgatggaactctcaggggtctcttttataagggcaccaatcccatwcataagggtagagccatggatgattgggtaggacccaatcacctaccaaaggcccacctcctaataccatcacattggaggttagaattttaacgtattc

SEQ ID NO: 242868 - DNA, 201 bp, Homo sapiens
acaagtacacattaccaggagcacaagatgcaaaggatgatttcccccttcgaaaaactggtaagttggtttaacaggaactctgtttgctcttctgtaamacacctgtaagtttcattttgccacacctctagaagaaagtcaaaggatttgagtcgtagataatatacctccccacccctgcccccagcataagcaaac

SEQ ID NO: 242869 - DNA, 201 bp, Homo sapiens
ctagtcagtagtatttattaaccatattaactactgatttaggaagatttcttctttttttccttttaagaatgagaaataaactcgttatccatatatgygcatgacacttgatatgttgaagctaaaataaagacaataatttcaatgtaagttttaaaatcttctaaccaaagtgaatgtagcaaatgtgtttaatat

SEQ ID NO: 242870 - DNA, 201 bp, Homo sapiens
gaactctgtttgctcttctgtaacacacctgtaagtttcattttgccacacctctagaagaaagtcaaaggatttgagtcgtagataatatacctccccamccctgcccccagcataagcaaacaatgcacacacataccctacttatttctgcatcagttgattcatgacataatcaaaatatctctttttcagtttaaa

SEQ ID NO: 242871 - DNA, 201 bp, Homo sapiens
gaaacttggaaatagatggtgttttaaataattagttagcaaaatgaagtgctcgaagggttttgaggcagcaaaaacaagaggcataactaaattaggtsccattttccagtgaccccatactgatagcactgactgaatgattgagtgcagacttaggaaaatataagagattcgagtaatcagcaggtgacaagtcaa

SEQ ID NO: 242872 - DNA, 201 bp, Homo sapiens
cctaaaggatcagttagaacttcctggaacacccttggatttgggtcttgcagctggctcttactcaagaaaacctccactaagtcagggcagaatcgctsctgttgctccccacctggagtagaatgaatggagtaacacattttagtttttctctaaaaccaattgagttcttaaagactctgatctctaagtaaaatg

SEQ ID NO: 242873 - DNA, 201 bp, Homo sapiens
ccagtattccagcttgttttgtctgtttttttgctacctgattttggccactaagctaatacttaagtgttgagcctttgttacagtcccaattcatttcwagttgtcaattcactttctctgttaagctaggctaggagtagtagcacagagaccacaaaataatcagtggataatcacaataatattttatttctcatt

SEQ ID NO: 242874 - DNA, 201 bp, Homo sapiens
actaaggagaaagagcataaacatagctgaggcacgtgtacagcgtgtgcagctgattattgctgaccaatatgcagtaaaaactaccaagtaaatagtgwaacttccttgtcttttctagggctgcccaccacacatcattggatcaaagctctccaccccttagtggaacatctccatcctacaagtacacattaccag

SEQ ID NO: 242875 - DNA, 201 bp, Homo sapiens
tgtcaattcactttctctgttaagctaggctaggagtagtagcacagagaccacaaaataatcagtggataatcacaataatattttatttctcattcacrtaagagtcctggagttataggcatttaggacagcacagcagctctcctgtattcttcagggccctgtagtgatggtagcttcgaaatcagcacatggctt

SEQ ID NO: 242876 - DNA, 201 bp, Homo sapiens
cttggttatgtgaggctatggtttgtatacactaaggagaaagagcataaacatagctgaggcacgtgtacagcgtgtgcagctgattattgctgaccaayatgcagtaaaaactaccaagtaaatagtgaaacttccttgtcttttctagggctgcccaccacacatcattggatcaaagctctccaccccttagtggaa

SEQ ID NO: 242877 - DNA, 201 bp, Homo sapiens
tcatcccagcattttgggaggctgaggcagacggatcacctgaggtcaggagttcaagactagcctggccaacatggtgaaaccccatctctactaaaaayacaaaaattaactcagtgtggtggcgggtgcctgaaatcccatctacttgggaggctgaggcggaagaatggcttgaacccaggaagcagaggttgcagt

SEQ ID NO: 242878 - DNA, 201 bp, Homo sapiens
cctggccaacatggtgaaaccccatctctactaaaaatacaaaaattaactcagtgtggtggcgggtgcctgaaatcccatctacttgggaggctgaggcrgaagaatggcttgaacccaggaagcagaggttgcagtgagccaagatcgagctactgcactccagcctggatgacagagcgagactctgtttaaaaaaaa

SEQ ID NO: 242879 - DNA, 201 bp, Homo sapiens
gtagaccggagctgttcctattcggccatcttggctcctctcgatctttattcttttgttgcaaattcttattttgttcttgatttaaattatcatacttstaaagagcactgaaatcattccaacatatgtatataaacatttcaaaaagtatttatgggatgtctagtatgtatacaaaatggtataacattggagggg

SEQ ID NO: 242880 - DNA, 201 bp, Homo sapiens
tttacatgggaaaaatacttcagttagcatgtttatcccacaagttctcctgattccttgttgccgattttgatgggtgaatttacttgggtcaaaggttrtcattgtgttgtaaaacacatttttgttttttttggtttacttgtttgtttgttcatttctttttgacttacaatgtaataccttctctcccaataccga

SEQ ID NO: 242881 - DNA, 201 bp, Homo sapiens
ctgaggcggaagaatggcttgaacccaggaagcagaggttgcagtgagccaagatcgagctactgcactccagcctggatgacagagcgagactctgtttaaaaaaaaaaaaaaaaagacccaaatatcaaccaaagtgaaggctcaccgaccattttgtcaacttacctgaaacatttttctctctcgtttgctcacatg

SEQ ID NO: 242882 - DNA, 201 bp, Homo sapiens
gtattgagagaatagatttagggtgcatgagaataggtgattaagggatataatggatgtgaatggaaatagaaggcacacagcttttaaatgggtgaagwtgtgtggacgagagaatacgggggcagaagggagtggtccttgtatattagtggtcatatagtttttgtttttcaaagaaaggaaattgacattgacata

SEQ ID NO: 242883 - DNA, 201 bp, Homo sapiens
ttactccacaggacataagtgaaaattagatacatttctgtgcttatttgattcctttatgttttctcctgtaagctccttatgaatagaatctgcatccstttggcttagcattatttttttaatagcagtatattacctgacacaaattaggtactcaagatccattttggtagtaaaagacgagcaaaagttcagaga

SEQ ID NO: 242884 - DNA, 201 bp, Homo sapiens
taagaaggaattcctcaaatttacaggtattcaaattggctatttctcagattctcttacaaaggaacaaaaatattctgaaattgttggcatgtttggtrtattggaaatcataattggaagaataattatctcaaaatggttttattgttttataggacattttagaaagtatgtcaaagacatagaaatagctctaaa

SEQ ID NO: 242885 - DNA, 201 bp, Homo sapiens
tgtgcaactttgggctgtgggagcaaacaggaggacccagagaaagcccgcgcagataaagggagcatgcgcaaactccatatagatagtggcccccggcmgggaattgatttttttcttcatcaaagttataacaaaacaacattatttgaggacatgctgtacatagacagcttcatttggaaatgaaaacctagtaaa

SEQ ID NO: 242886 - DNA, 201 bp, Homo sapiens
tatggctgcttgaggtggtggataacaatggggcaaacagtaggttagccaaaagcatcaaagaaaacctgaggaatgtgcataaggactatgaaaagccmcatcagattcctaagaatctagaaagccacatgtatgatagggctatatgcatactcagatttgtgttcctactcaggaaagacctgaaaaggccctaag

SEQ ID NO: 242887 - DNA, 201 bp, Homo sapiens
gctcttatgtcaaactgattttgaggctctgttcaaacaggaagtgaaggtccaggtagagttgtcagctgcctggctaaatatttaaaatgtgccctaacacacacacacacacacacacacacacacacacacacacacacagagcccctcggcaaaggctgggggagtgctggttttaagcattaaaagaaatatatt

SEQ ID NO: 242888 - DNA, 201 bp, Homo sapiens
attttgttaaaatagtccatatttggctgcaggatttttgcaagattctataatggctatttaaaaatgtggtgttgaagtttccacatatcatgatagatttttttatctttatggaactgttaatttttgctttagatatttaaaaactctgttattaggtacagtaaaattaagactattatatgcttataaatcctt

SEQ ID NO: 242889 - DNA, 201 bp, Homo sapiens
atccattggcacttgttgaaaaattcattctttagaaatggttattttctaaattggtttaacctatggtcagggtgatggagcagcaagggaggtgggaytgcatggggccaggggatggagagacttagggacaagatgagtgtgtcatggagaagctgaggaccacaggaaggcattggcaatggacataatgaagaa

SEQ ID NO: 242890 - DNA, 201 bp, Homo sapiens
tttgagatctttcttttttggtactgtaggcatttattgctataaacttctttcctagaactgcttttgctgcatcccttgttttggcatattgtgtgttyattttcatttagattaattttttatttatgtttgttttcttatttgacccattggtttcccagaaatatgttgcttaattgtcacatatttgtgaatttc

SEQ ID NO: 242891 - DNA, 201 bp, Homo sapiens
agatatttataatgtggataatttttttttttttcagttttaccctggcaactttaattggcttagtggtttctaattctgggcaattttctgtttctttwttaagcaatgtgggagctgttgaataaccatcacatttcataggatcagaataatatttctgatttttctcaaactgggtattatattactgtatagtaa

SEQ ID NO: 242892 - DNA, 201 bp, Homo sapiens
gccactgtgcccagctagctttttaaaaaatagtctttgtgttagatgattttgcccaaatgtaggctaatgtaagttttctgaagaaatttaaggtagastaggcaaagctatgatgttcacagtaggtttggtgtactaaatgtaatttcaacttgctttttttttttttttttttttttttatcagacagggtctcac

SEQ ID NO: 242893 - DNA, 201 bp, Homo sapiens
gagtggtaatttgtgcctacattttatttgccttatcagtctggctagaggtttatcaattttattgatcttctaccagcctttagttttgttaatattcrttactttttttctgtttcctattttactgacttcatcattattatttctcttttttctccagacaatatgttttatttgctcttatttttctagttttca

SEQ ID NO: 242894 - DNA, 201 bp, Homo sapiens
ccacattttcatttcttgtctcaatcctgaggattaatcatgaattccagtccagtttctttccaagcatataactggacatgacagagtatcttagcttytacatcataaagctcaattgttaatactgaaaaaaaaaaagcagggtggtttttttaaaaaaaacaaaaaacaaaaaacaaaaaaaaaaacatctaatga

SEQ ID NO: 242895 - DNA, 201 bp, Homo sapiens
agacattgtttggcttttttgataccagtgttcaaattgtacatatcatacacacttggagaacattagtatttttcacctctgtaattttatatggcagyaaatttcattcacatgtgcatgctcaccccccaccccaacttgctataaaatgaaaaggctggtcaattgctttgatgttctttatatataatgctatta

SEQ ID NO: 242896 - DNA, 201 bp, Homo sapiens
tttgattatctactgcccagtcagcttccttgggcactcaaccaacaggtaacagagattatctttatgcttcaccagtcatatatatgagacccactttyttcacacccctgccaatatattggatattgtcagactgtagatatttttgccaatcttaaagatgaaaatggtagagaattacttttttctgtgaatttt

SEQ ID NO: 242897 - DNA, 201 bp, Homo sapiens
tttgttaggcggctggagaatcataacttcccaagaaaatatttagcatacatagcatacacagtcgtcgttgggttagcaactggctagattcgtgacaygttgttacaaaaaaatagttgtataaggaagtatttcatgaaggtgacacatctattttttaaaaagggagaaacagctaagagctatttttcctcacac

SEQ ID NO: 242898 - DNA, 201 bp, Homo sapiens
gtttggctgttttcattcctggggtaaagaacacaggttctgtatttagccgacctgggtacacatccttagcctgccatttctcagctgtctggctgtgrgcaagttccttcagttctctaaggatcagtttccttctccataaaaagaggaaaataatagtgcatgccctctagggttgctggcacggtcctataaaat

SEQ ID NO: 242899 - DNA, 201 bp, Homo sapiens
tttctgtgtgtgtagtgtgtgtgtgtgtgtgtgtgtgtgtgtgtgtatttcaggggcagtggcaagtacagaagtaaagcagaagcttcaagagttcctaytgagtaaatcagcaacgaaagacactccaactaatggaaaaaatcattccgtgagccgccatcccaagctctggtacacgtatgttcagtgtttggctgt

SEQ ID NO: 242900 - DNA, 201 bp, Homo sapiens
caagattgcaaatctatttattgccttacctttggaattaaataatacattaaatgcaaaactagaaaactaataaacagttttttgttaatgtatgattwtttgaaactttatcgtcagattttaaaataaaatttatattgcagaactttatataagctttatatgagtgatagaaacaacaggtttctggaagaaaaa

SEQ ID NO: 242901 - DNA, 201 bp, Homo sapiens
tatcgtcagattttaaaataaaatttatattgcagaactttatataagctttatatgagtgatagaaacaacaggtttctggaagaaaaattagtgacaawccttattttagctgaaatgataatattgttttattaactttttataagtgaataacaatatctaacattggcaatagatgctgatggggtcatgttttaa

SEQ ID NO: 242902 - DNA, 201 bp, Homo sapiens
aaatttcagtgcattgataagacaacataattaaaaataaatccagtcagtttggtgaaataaaagtttcttgcccatttctaaatttaaagtatcaattwtatgcctgttttgtattatgtaaacattctcctaagtaggtattaaataatagtattaaataaaactctcccaagtaggatacttattttgctaattctc

SEQ ID NO: 242903 - DNA, 201 bp, Homo sapiens
tttcaatgatttacagaaaaagtgggtacaaatatgaactaaatacaaacaagttccaaaagctcataacatttcagttttggtcagtgatgactatgaarcctaaagaaattgcacactctcatgtctttctcttctcgcaagttgcaacaggaacttctagccataaaacagcaacaagaactcctagaaaaggagcag

SEQ ID NO: 242904 - DNA, 201 bp, Homo sapiens
tagtagataacgtagaaaataaaagtacaggtaaacaaaataattactaaaaatcccatgaaacaccagttctaagagatactcacaattcagttttgggmatatatttttaaagaagatattttatattgatattgatgttatatagatccccaaatgggattatttttcatagtgtactgtttaaaaaattgtggatgt

SEQ ID NO: 242905 - DNA, 201 bp, Homo sapiens
gatcttgaagggaaagaacaaaactagtcacatgtatatcacgttttaaacaattgttttgtgagaactaaatttgatgcaaagaaatcttgaatattttyagtttattctatcattttgatgatgccagatttagtgagttgtagccttttgttcctttgcttgtgattctgcttactctggaaaacagaatggtagcta

SEQ ID NO: 242906 - DNA, 201 bp, Homo sapiens
ttttaagaataatgacttttttggagttatcatattatctcctaacatgtgtcattatcttgtactgttactcaatcttgtcctgtatttcccttgtcttraaggaattgcctatgaccccttgatgctgaaacaccagtgcgtttgtggcaattccaccacccaccctgagcatgctggacgaatacagagtatctggtc

SEQ ID NO: 242907 - DNA, 201 bp, Homo sapiens
ttcatcactttacagatttactaaactagggtctgagtactggttaatgcgtaagttcgtgtttttgagtaaatatccagatagacaggtctcaatagttsttatgtgctcctgagaatttgctttgtgatatttcctcctttgttaaatttattttaagaataatgacttttttggagttatcatattatctcctaacat

SEQ ID NO: 242908 - DNA, 201 bp, Homo sapiens
tacaggcgtgagccaccgcgcccggccgagaagtattatttatattgtaaggcctgttacaacaaatatcacacactcattcccccaaaacaaaaacaatmaaaaaaacccaaagagggttcaaccaataacacaaatgcttgaagcagtgattttccagaacaaaattttagtgtaatagaacatttggatcttttttcc

SEQ ID NO: 242909 - DNA, 201 bp, Homo sapiens
cataatttaatttctgtggtcaaaatttgtattcaattgcctagtttttactaaattgatcacatttacttgttggtagctattctactagtgtatagccytggaaaattagagtttaatgcaggaagaacatttacaattagaataatataatcaaaactaaaatcatctatccaaagaacctagacattttgataatag

SEQ ID NO: 242910 - DNA, 201 bp, Homo sapiens
atgtaggctaatgtaagttttctgaagaaatttaaggtagactaggcaaagctatgatgttcacagtaggtttggtgtactaaatgtaatttcaacttgcyttttttttttttttttttttttttatcagacagggtctcactctgttgcctaggctggagtgcagtggcatgttctcacctcactgcatcctccacctcc

SEQ ID NO: 242911 - DNA, 201 bp, Homo sapiens
catgataataatgagagggaaaatttattctgctcaaagaatgatgatttcaggttttgctggtttttgttttttaaaaacttcatgtggtgaaacgtgcytgaacagtatatgagaatgttatgatgcagtatcaaggttttctagcccctgtgttcacttaaaattttgcaagtgtagttccttttagagatcatttaa

SEQ ID NO: 242912 - DNA, 201 bp, Homo sapiens
agtgtcttaaaaacaaaaacaaatcttcttcttccctaatttattttttttttgaagttttgcatacttgggccatatttatatgacaaaaaatatctgatttttttttgatcaatgtgatccaaaaatcagtcatgtttcaaaaaatttggccaattgaattgttgggccttatgtcaaataaaaccactgcttgaaaac

SEQ ID NO: 242913 - DNA, 201 bp, Homo sapiens
ttcctgccctctttgtcatgaacatatgaccaatgagaaaaaatgcctttttaactatgatattaataataaatatgtgtcaattattgatgtattaagtrtatcattcagtacttatagaaattatttgaagtagccacaattattattcttttacaaatgaagaaattgaggcttaaagagttaagtaactgctcaagg

SEQ ID NO: 242914 - DNA, 201 bp, Homo sapiens
gagaagttttttgtttttttttttttgaaatggagtctcgcgctgtcgcccaggctggagtacagtggtgcgatctgggctcactgcaagctccgcctccsgggttcacgccattcttctgcctcagcctcctgagtagctgagactacaggcgcccgccaccacgcctgcctgattttttgtattttttagtagagacgg

SEQ ID NO: 242915 - DNA, 201 bp, Homo sapiens
acaatttattactccggttattatacagaactctttatttaaaggggagaatgataaattacactcttgttgaaataagccttgtagacctttgaagaggrttggaaaccaaaggaaacagacattccagaagtgtgacccattttttttttaataaatcttttcttttgcttaagatctcctaaaatatttccattttta

SEQ ID NO: 242916 - DNA, 201 bp, Homo sapiens
ccagagggagaggaaaaaagctagggtagtagctactcataaatctattttatcatcctttactggccactatatgtcagatactatgtaaatctagcagmtaaaatggtgagcaaaaagtagatgttttggggagtggggaggaggacattaatcgtgtaataaacataataacaacaaatgtattaaataatcacacca

SEQ ID NO: 242917 - DNA, 201 bp, Homo sapiens
taatttatttctttgacaatattaaaagagcttagtttctggtattagaaataccatcaagacagggctttattcataaaatattacaagatgcttaaagyagtggcttaaaagaatagatttaacgaagcactattttcattttctataggtctgtaaaatattatccccacaacatagtgacataaaacacaactaatt

SEQ ID NO: 242918 - DNA, 201 bp, Homo sapiens
cctgggtgacagggcaagaccctgtgaaagaagaagaagaagaagaaggagaaggggaatgggaaggggaagaagaggaagaggaagaggaagaggaagargaagaagaagaagaagaagaagaagaagaagaagaagaagaagaagaagaagaagaagaacaagaaggagaagaagaagaggtggagacaccagagcccg

SEQ ID NO: 242919 - DNA, 201 bp, Homo sapiens
tcttaccctccccactgccacctttctacattgtgccaagttctcatgtctcaagaatgtggtgttttgttccttgttagctgtaaatgtaatactccttmacccatttttatagaaaagttaactttcccctggatgcttgggcttcatcatttaatgtcctcaattgcagatggctatccataagtttgactctgtgtg

SEQ ID NO: 242920 - DNA, 201 bp, Homo sapiens
ggaatgggaaggggaagaagaggaagaggaagaggaagaggaagaggaagaagaagaagaagaagaagaagaagaagaagaagaagaagaagaagaagaasaagaacaagaaggagaagaagaagaggtggagacaccagagcccgctttgtgagtgctcagatgaaaggcacttgagggtggcagagggaagacggctgt

SEQ ID NO: 242921 - DNA, 201 bp, Homo sapiens
cctaatgactacttaatgggaacagtgatgtggaggaaatcaaagctattaaaagggtggcagtcatcaaaccccactctttagaaatatagatgatcccygagttatgatggttcaatttatgattttttgattttatgatggtgcaaaagtgttatacattcagtagaaaccatactttgaatatacagccattctatt

SEQ ID NO: 242922 - DNA, 201 bp, Homo sapiens
ccttctgctgcaggcaggtttgtgaggtatgagagaggaaacagctaccacttgagcagattgtgggagaagcagcgttttgaggtttcagctaaggaaaggggggcactcagaaaatatatggaaaatgtagaggagtttgatattcctgagagcacaatgcgaggtttgggtggatcatgatgactgagaaaaagtttg

SEQ ID NO: 242923 - DNA, 201 bp, Homo sapiens
cccctcttcacttgataggccacagaaaaacccacaaaagcaaggacgagcaggcttttatgataatgtcgtcatcagctcccagcttcaaacgcttctgyggcttttgagttgtcatttataacttggaactgaatcgacccataattcccctgatacacttagagaaattgataacagactctgcgcttcttttatggc

SEQ ID NO: 242924 - DNA, 201 bp, Homo sapiens
tgactgagaaaaagtttgttgattttggcgagaagaagatcattttcaacctaagattaagcagtttcagaaatagtttagcagaatgatggaggttcccrcaaaggattatgaagtgaaaagcagatacttcgttcaaggaatttggctgtaagtgaaaggaggaagagagaattcaagtctttttttttttttttggtt

SEQ ID NO: 242925 - DNA, 201 bp, Homo sapiens
tgattttcttctattcataattgtcaactctggtaggaaaggcctgggagttcataggactaaggacagaagatagtcagaatatccatactcagttgaamcagattcaaattcagtagtctaatgaaacagttctacgagatggccttcttgtctcagctttctttgatgggggcatccaattttttgtttgtttgtttg

SEQ ID NO: 242926 - DNA, 201 bp, Homo sapiens
cagtagtctaatgaaacagttctacgagatggccttcttgtctcagctttctttgatgggggcatccaattttttgtttgtttgtttgagacagggtcttrctctgttgctcaggtgggagtacagtggcacaatcacagctcattgaagcctcaacctcctgggctccaaagatcctcttgcttgagctttgttaagagc

SEQ ID NO: 242927 - DNA, 201 bp, Homo sapiens
tcatcatcttcatcactttacagatttactaaactagggtctgagtactggttaatgcgtaagttcgtgtttttgagtaaatatccagatagacaggtctmaatagttcttatgtgctcctgagaatttgctttgtgatatttcctcctttgttaaatttattttaagaataatgacttttttggagttatcatattatct

SEQ ID NO: 242928 - DNA, 201 bp, Homo sapiens
gtcttaaaatgtcatcatcttcatcactttacagatttactaaactagggtctgagtactggttaatgcgtaagttcgtgtttttgagtaaatatccagawagacaggtctcaatagttcttatgtgctcctgagaatttgctttgtgatatttcctcctttgttaaatttattttaagaataatgacttttttggagtta

SEQ ID NO: 242929 - DNA, 201 bp, Homo sapiens
taacgagtctgaaaagattaatggggaaagtagatttattctcaggtaaagggtgggggtaaatgctgagctactgtttatccttctaagaatgtttagawtctctttctcatagaaggaagtaaagaaaaaggcaggattattagccctgctatacctggggtggtaccaaaccatcaccttcactggctgtcagcagaa

SEQ ID NO: 242930 - DNA, 201 bp, Homo sapiens
attacaatatgtatattttaaaatctgaagtgtcttaaaatgtcatcatcttcatcactttacagatttactaaactagggtctgagtactggttaatgcrtaagttcgtgtttttgagtaaatatccagatagacaggtctcaatagttcttatgtgctcctgagaatttgctttgtgatatttcctcctttgttaaatt

SEQ ID NO: 242931 - DNA, 201 bp, Homo sapiens
tgctttaacttgcaagagtctattggagcctgggagagtaaaagggcaagaattagataactttaattttagacatctctaacgagtctgaaaagattaayggggaaagtagatttattctcaggtaaagggtgggggtaaatgctgagctactgtttatccttctaagaatgtttagaatctctttctcatagaaggaag

SEQ ID NO: 242932 - DNA, 201 bp, Homo sapiens
cccacaatggtcttgatgtacatggattttcttcttatcttagtgcaagtctgggaaggctattagctgtttttcattgctttaacttgcaagagtctatyggagcctgggagagtaaaagggcaagaattagataactttaattttagacatctctaacgagtctgaaaagattaatggggaaagtagatttattctcag

SEQ ID NO: 242933 - DNA, 201 bp, Homo sapiens
aaggaccatttgaacactgataatactaaaaactgtcggttcccttattgtttctttaaaaataaaaccaaaacaaagcaattaactgcaaagggctataktaacccaaagcaaagtttacatatttaaacataggggagtaaggaagtacagaagttaaacaacaagagagataatcttgaaagtggcaaaagtgactta

SEQ ID NO: 242934 - DNA, 201 bp, Homo sapiens
agccaccttaatgaaactgagaatttagtttcatgctgcaaattctgtaaaaagattatgttgcctcagacttcgaaaaaatgcatgaaatattattaaartcagggaattccttctaaattgcaaaggaagtttccagtattgcatagattatgctaattgtgtatactcaataatagttgttgggatgtagacaacact

SEQ ID NO: 242935 - DNA, 201 bp, Homo sapiens
tagggttttattttattagtgatccaggataatgtctcttttactcaagaccctgatggagatccacagtgctatacaaaagtttccctgatacctggtaytgtgggaaaggctatcatctttatttattccttcagatccacttggggtaggaggactcacctcatttaacctttattcataccagactaggctgtggtg

SEQ ID NO: 242936 - DNA, 201 bp, Homo sapiens
tctacattctgagaaggagccagaagagagagggaatttgaagatacatgttgcataacctctataagtatctcatagattaactaaaatgtgtttgatayttatctttgaagttttattttttatttagtattccttccctcaccagcatacttaatctccattctttgaatgtgtgggctctgtgcccttggacgtggt

SEQ ID NO: 242937 - DNA, 201 bp, Homo sapiens
agaacaaatgcgacagcaaaagcttcttgtagctggtaattcattatggcaccatttgcaggtcattttagggttttattttattagtgatccaggataaygtctcttttactcaagaccctgatggagatccacagtgctatacaaaagtttccctgatacctggtactgtgggaaaggctatcatctttatttattcct

SEQ ID NO: 242938 - DNA, 201 bp, Homo sapiens
agacgcagacgcttaggcaaggtgttcctctgcctgggcagtatggaggcagcatcccggcatcttccagccaccctcatgttactttagagggaaagccwcccaacagcagccaccaggctctcctgcagcatttattattgaaagaacaaatgcgacagcaaaagcttcttgtagctggtaattcattatggcaccatt

SEQ ID NO: 242939 - DNA, 201 bp, Homo sapiens
caatggcacatgtctgaatggctaacttgtgtcatctttatatgtccttttctttacaccatatagaagatatggaaatcaattatttcgttaatacttamaagcactatttggagatgtatttttaattttcattgtttcctaatattatttctttctattgtatgacaaggaaacaggaattgatttggttcctgccct

SEQ ID NO: 242940 - DNA, 201 bp, Homo sapiens
aacaaaattattatcgcagacaatttcatccaagtagatatagaaatagttgtaaaatgccagtttgcatctgagatgtatcacaatgacactgttttcakagttgaataagaaataagactattcaacaagtactcatgtcaccatgaaagagaaaaatgcagagctgaaggtggcatgacacattttcccattcacagc

SEQ ID NO: 242941 - DNA, 201 bp, Homo sapiens
actatcttttctgaaagctgcttgacttccagtctttcatattaatgttttgtaagccaagagttaatgatattaactgctttaattaagtgcattagggrcacgagatttggcttctagttccagatttatcactgtgtgctcttggagaatttggcaattcaatggacttctctggatcatgttccttcatctataaaa

SEQ ID NO: 242942 - DNA, 201 bp, Homo sapiens
gatttatcactgtgtgctcttggagaatttggcaattcaatggacttctctggatcatgttccttcatctataaaatggatatgataatatcaaattctcrtaaaagctgaagggataccccagatactcaaagttctttcttaggtctaacatttgtatatcaaagaacatgtcattctgttcgtttgttaatagcaact

SEQ ID NO: 242943 - DNA, 201 bp, Homo sapiens
atttagtggtttgaaactggcattttaaacacaagattgaaagtatcagaatgtataatatgtagaaagagtaagagaagtatcatttcataaaactttartctctttctcgctcttcatacatacacacacaaaacacattcaaatctctctctctctctgaatgtacatacacacacacaaacacacaaaatgtaaaat

SEQ ID NO: 242944 - DNA, 201 bp, Homo sapiens
ttacctatgagatttcatttccattttgtttcttaacatgaactctagagtcaggttgactttcttccataatgctttctaaaatcctttcttctttgttktcatgctttaactcctgcctaggatgccctaaatttttttttcttcctttgtaaacacaacttttctggtaagacccattaacatctacctctcaatatt

SEQ ID NO: 242945 - DNA, 201 bp, Homo sapiens
caatgctgcactacagcctaggtgacagagtgagaccctgtctgaaaaaaaaaaaaaaaaaaaaaaaaaagagtgatgtgctatcaacatcaataatgaastacatgtctcaatagacatctcagtttgtattttctacacactcagttacatatcttgtaaataaaaggggaaaggtagattagtattttttatcccccg

SEQ ID NO: 242946 - DNA, 201 bp, Homo sapiens
ttcttaacatgaactctagagtcaggttgactttcttccataatgctttctaaaatcctttcttctttgttgtcatgctttaactcctgcctaggatgccytaaatttttttttcttcctttgtaaacacaacttttctggtaagacccattaacatctacctctcaatattatctgttatatatattttttccccattag

SEQ ID NO: 242947 - DNA, 201 bp, Homo sapiens
ccaaatacattcattttcttaagcatatgggatgagttgatggtatcctagatacaaaggagtctcattattttattttgccagaacttttttcttccccrcaggtttatagtttcatagttctttatagtatgctacgcccaaaggaggcatgaataccgaaataaaaaagtgccaatgttaagatacatgttttgcacc

SEQ ID NO: 242948 - DNA, 201 bp, Homo sapiens
acccaacagaacctgaatttacttttccctacagaatatagactcaatagtcagatgtgctggaaagaatgctgttgctttggtaaccaattggccacttccccctggttagaaatcatgttgcttgttgtgcaacagtggtattattaaaacaagtcggcatgtcactcttactgaaaagatctccaatctcagatgcca

SEQ ID NO: 242949 - DNA, 201 bp, Homo sapiens
ttgctatgcatttacaaatatacacgttcttttgtgtgtgcgtagatgtagaacatatattccaagtgtcattgagaacaacatatattttcctgcaagakgcattttttgaaaaaaacttggaaatatcaagggctgccttctgtgttaaaagctataaatactttcaacagattatccacagttgtacattatccacaa

SEQ ID NO: 242950 - DNA, 201 bp, Homo sapiens
ctattagttctattgactttttcatttcttatatcaattctggcacgtatctgtatcataaaacagtgagaaaaaagaactgtcaagttttatatcaggctttttttttttttttgagtgggaaagaggactggtgtagggaaaggagaaaagagcaggaagaaggctgtaaagaaagctatgatatgatattaaaattag

SEQ ID NO: 242951 - DNA, 201 bp, Homo sapiens
gtaccttttctttaaagattttatatatgtatggttgtattcaaattgagtattaattattagatttctaacagttattaaattgcatagggaagagaggktaacgtaactattttatggtaaattgaacatttgtaataatttttttatttaaatattccacttttgaaaatggacccattccatcagtttcctttttgg

SEQ ID NO: 242952 - DNA, 201 bp, Homo sapiens
taagtgaatgtagaataataccattgtaaaaacaacaatataataataataacacagtaatatagagtattcgttgaggctttaatttttgctagttgttyatttttttaaaaagcttttcaagtccttgagttaggtgcttttgttttccacaggcagttaccacgcttcttgagcttcggtaggtttcctgatgtcaca

SEQ ID NO: 242953 - DNA, 201 bp, Homo sapiens
gtaagataaagctctcgctcaattaaaagttacttatcctttacttcattgaacagctgtttttcaaccaaatttcaatgtctttgggtcatagagtgaatttttttttttgaaactgagcaattaccctctttttctatgattttacatctaaagtttactactactagacttattgagatgacaaataatgtggaaaaa

SEQ ID NO: 242954 - DNA, 201 bp, Homo sapiens
ttctgatgggcaggactttcagagagtagttcaagtctttgcatgacatcaaacatgtggatgatagactcaattttccatatttcatcccaatgatttgrtgtcatatagatggaacttataaatcaacatctgttttcgtttaggcagaaatttaaacttttctggcactattctagaagggtaatggcttgttcttgt

SEQ ID NO: 242955 - DNA, 201 bp, Homo sapiens
agttctgtatagcagtgacaaaacggactgatacaggtgctctacgttcgtattacctcttagtaattatcgtcttttatttgccttcccatgaaactgcrtttttaattttcaaagagtggacttgaaaggttaagaacacatttgtacgatgtgcttttcctgaaatgttagttagtatagtgatttatattaaatcat

SEQ ID NO: 242956 - DNA, 201 bp, Homo sapiens
tagcaaattttaggaatatatgaagagggtggaggagttagcaccacagaggaagttcaggttcgatgtctataaggagagtgacattgagaagcaagctrttttgctctctgaaactctaatgggtccagagattacaggcggggatgaggttaagggctgagtacataatggtaggttaaaaatgtgtgtaaataacaa

SEQ ID NO: 242957 - DNA, 201 bp, Homo sapiens
tgaacgcatccctttgaactggaagaaatttgtttacagagttgcttcatccatgccatctgaacttgttaagtataggaatcataggaatctgtcctgayattatgaaatctagcacttggcaccttggcattgagattcactgtagatgttcaatgaatgttccaggaataaattaataaatgaaaaaatctatgaaaa

SEQ ID NO: 242958 - DNA, 201 bp, Homo sapiens
agaatcagtaaaaagtggagtttatatatgcaagagctggttcttaaaaataataatgacaaatgtctgaaaatatagctaaaaatgttaagtacagttaktttaaaaatgagtaaagaagtttaaatgaaatataaattataataaaaatagaaattataagctaacacactgtgaaacttggtggcaggaaaaaagtca

SEQ ID NO: 242959 - DNA, 201 bp, Homo sapiens; identical to SEQ ID NO: 47716

SEQ ID NO: 242960 - DNA, 201 bp, Homo sapiens; identical to SEQ ID NO: 47718

SEQ ID NO: 242961 - DNA, 201 bp, Homo sapiens
tgagttttagtaatttgtgtttttcaaataattcatgtgagttttcaaacttgtcagtatagagttattcataatattgctttattatccttctaacatcyacagcatcaatagttatgacccctctttcatttctaatattagttattagtttcttctctcttactttttttttcctgacagcctgactgtagtttcatc

SEQ ID NO: 242962 - DNA, 201 bp, Homo sapiens
tggggcttcccgcagtgccatcccagctcaatgtaagtcattgcacagcatcagccttaatcaacctaagcaatatcttttcacaggggaactctctttcrtgttttatgtatttagactttagaaaaacttgacagagccagcatctccttcactgtttgctatttgctgtgttgttcaaagacattcagtctaatttca

SEQ ID NO: 242963 - DNA, 201 bp, Homo sapiens
caagtttaccattacaagttactagaacagccagagtaaagcaatttgagttccatatagtcaccacaatgtaattattatttttgaaattaattttgccrttttctttttgtttaagaaatgaggtcttactgtgttgcccaggctggtatcaaactccagtgatcaagtggtcctcctacctcagcctcccaaacaggt

SEQ ID NO: 242964 - DNA, 201 bp, Homo sapiens
cattaccttggggcttcccgcagtgccatcccagctcaatgtaagtcattgcacagcatcagccttaatcaacctaagcaatatcttttcacaggggaackctctttcgtgttttatgtatttagactttagaaaaacttgacagagccagcatctccttcactgtttgctatttgctgtgttgttcaaagacattcagtc

SEQ ID NO: 242965 - DNA, 201 bp, Homo sapiens
acttcccaggttttgagggactaactggaacgaggaaggtaacctgagccaagatgagtgagctagaacaccaagatgtattttagtttgaatttattccygccctcagcaattcactccccagtcctgagacatggaatgaagtgtaagttgtttatttgggaggagatcccaggaaactccaataggggaaatgaggca

SEQ ID NO: 242966 - DNA, 201 bp, Homo sapiens
tttacatgccatcctactctttggttgttctggtctcccataaactttccgatattgaatgtttcccagcaagctacttggttcaagatgttttctaatcratcagaaagatggctgaccagaaggccatcattaaatttttcttagtcttcagcatcagaattctgatcttacccacctggaataatttctctaaatcat

SEQ ID NO: 242967 - DNA, 201 bp, Homo sapiens
aacgcatccctttgaactggaagaaatttgtttacagagttgcttcatccatgccatctgaacttgttaagtataggaatcataggaatctgtcctgacaktatgaaatctagcacttggcaccttggcattgagattcactgtagatgttcaatgaatgttccaggaataaattaataaatgaaaaaatctatgaaaaga

SEQ ID NO: 242968 - DNA, 201 bp, Homo sapiens
atctatgaaaagacaaacttgacaaagttgggttcagctattttgttttcaaatgggaatgtgacattcccattttcaatgggaatttgaaaatatttatmtaatatctgctacttgaaaagatttttaaaaacaagctaattttttaaatatgagggtacagtactgatgtactaataactgtggagtattatttggtct

SEQ ID NO: 242969 - DNA, 201 bp, Homo sapiens
ccacaataataccaaaccaatgcaacccatctgttctgctaaattatttctagttccctaaccaaaggcactgctttttcatgcattttatcatgattttwtgccctttattatattttacaaaaggttctgattcctccagggccaatgagaactgattaggacactggcctcaatccaggctttgaacacaggagggaa

SEQ ID NO: 242970 - DNA, 201 bp, Homo sapiens
agatctgctgtttaacattgtacctacaggtaacattgtgttatacccttaacagttgtttaagggggtggatgtcatgttgaggattcttaccacaattaaaaaaaaaaaggaaagaaaaaaaactgagaggattgggagtaaacaaatattttatcacccttgaacctcccaaaatgctctacttacagagacagaaac

SEQ ID NO: 242971 - DNA, 201 bp, Homo sapiens
aaaatactttaaaataagtcgtagtgactgaatcaagcagtattaagacacatgaaaggcacttaacattttgaagattgataatatttttactcatcaaycttccgtccaccaatattttaaccattccgtagtcccaagtgttggtcagtacagtgtcagtatcttgcactcagttatgagcagtaagtatggacagct

SEQ ID NO: 242972 - DNA, 201 bp, Homo sapiens
aacccaaagaggggggcatgggaaccccaaattgaagggaaattcctggactcacaattggggtgtgtgtgtgtgtgtgtgtgtgtgtgtgtgtgtgtgtgtgcggtagggggaagggccttgggagagttgtcttggtctggatctgtgtcccaccaaatctcatgtcaaaatgtaatccttaatgctggaggtggggct

SEQ ID NO: 242973 - DNA, 201 bp, Homo sapiens
tgatctttttgaggaaaggaaggaaggcttttgtaggcgaaatagagaacaaaagagggagatatatgaattgaagctggaaagatggggaggggcctatktatgctggcctggaggaatttcagtctctttagtgaaggccctgaaggatttaaacagaagaggcgactgttgtgtggcaaatggaatagagtgaaagtc

SEQ ID NO: 242974 - DNA, 201 bp, Homo sapiens
acccaaagaggggggcatgggaaccccaaattgaagggaaattcctggactcacaattggggtgtgtgtgtgtgtgtgtgtgtgtgtgtgtgtgtgtgtgtgcggtagggggaagggccttgggagagttgtcttggtctggatctgtgtcccaccaaatctcatgtcaaaatgtaatccttaatgctggaggtggggctt

SEQ ID NO: 242975 - DNA, 201 bp, Homo sapiens
aattcctggactcacaattggggtgtgtgtgtgtgtgtgtgtgtgtgtgtgtgtgtgtgtgtgcggtagggggaagggccttgggagagttgtcttggtcyggatctgtgtcccaccaaatctcatgtcaaaatgtaatccttaatgctggaggtggggcttggtgggaggttgattggatcatgggggtggtttcttatg

SEQ ID NO: 242976 - DNA, 201 bp, Homo sapiens
aagggccttgggagagttgtcttggtctggatctgtgtcccaccaaatctcatgtcaaaatgtaatccttaatgctggaggtggggcttggtgggaggttkattggatcatgggggtggtttcttatggtttagcaccactcacctagtgctgttctcatgatagagttctcatgaaatctggttgtttaaaagtagcacc

SEQ ID NO: 242977 - DNA, 201 bp, Homo sapiens
gggtggtttcttatggtttagcaccactcacctagtgctgttctcatgatagagttctcatgaaatctggttgtttaaaagtagcacctccttcttctctstcttcctcctactctgccatgtttgtaagtttcctgaggcctccccagaagcctagcagatgccagcatcatgcttcctgtacagcctgcataactgtga

SEQ ID NO: 242978 - DNA, 201 bp, Homo sapiens
ttcctgacacaggctcaattggatggagtgtctctcatctcttctgtggtcccatgaacgcatatgcaaagcagtagctttcttttttgggttttttttgttttttttttagtgtgcttccagtcaatttccttattccggaaatttgttagaaacttgtttgatagcaatggtccttaccctctttaattgctataattt

SEQ ID NO: 242979 - DNA, 201 bp, Homo sapiens
tcataggagatgttaactttattcaggtagtgtctgaagttttcttcatttcaaagtttctgttattttcctttttagtaccttggagaagatactttggrattatgcaaatataatgattgacagcaaacttttgtccactaatcttatttattatcattattattgttattactattttttgagacagggtcttgctcc

SEQ ID NO: 242980 - DNA, 201 bp, Homo sapiens
ctggttcataattcttggtttcaaatactaatggaaatgttacttgcaagttaaaccctgaactgagaaacatgcttttctttattcttttataagtggcycttttaattgtagttcttttaaaaaggaagttaacacttaagtatctattaattcttgacaaggaccttattaaacctaagcaacgtgttttcaaaaggg

SEQ ID NO: 242981 - DNA, 201 bp, Homo sapiens
agcttcttaatcttttattttttccaaaatagaaatgtccctattttttcttattataaaaggaattgttaaatgtttaaaagtattgaaacagtactggwcagtatacattaaaaagtgaatgtttcccataatcttaccccctacagatgaccactgattacagtttaacacatgtttttccagaacttgttatttgca

SEQ ID NO: 242982 - DNA, 201 bp, Homo sapiens
aattgcactaattgtaattgcacaattatcgtcattacaatatttatctttctattcaggaaaatagtatgtcttttaattaacttttttagtaaagctgwatagttaacttcatttagatttggggcatgctattgtaggtatattcctgggttaaattttgattgtgctcattattgttcacatgtacgtatgactgca

SEQ ID NO: 242983 - DNA, 201 bp, Homo sapiens
atacatggtgtggtaacgatccatttacccatctaatttgctcattagattctaagctgcagactggctaggatgtcttgcccactgctgtatcttttgtkcctagcacagtgcttagaaaattgtagttgttaaaagtagagtgcagggatgctggagtcacaacaccttcgaacgtattccagcagcaggctcggtgcc

SEQ ID NO: 242984 - DNA, 201 bp, Homo sapiens
tttagagacttcataactacaggcagaaataatccaggaaagcagaaggatgtgttccacataagcaagaatatataacaaattttaaatagtgagaaaartatctttgtcttaagcaaagctcaggcaactaaggttaatggaggtgaaggttggggctagtttataattgggaatggaaagcccactggggacaagctt

SEQ ID NO: 242985 - DNA, 201 bp, Homo sapiens
ttttaaatagtgagaaaagtatctttgtcttaagcaaagctcaggcaactaaggttaatggaggtgaaggttggggctagtttataattgggaatggaaarcccactggggacaagcttagagcgagggaactgctggcagacaaccctttgctgtggtgatacaggctcacttcagaaaatgtaacatatactcttttat

SEQ ID NO: 242986 - DNA, 201 bp, Homo sapiens
ctactactactactactactactactactactactactactactactactactatttcttcctcctctttctcctcctcctcctcttcttcttcttcttcytcctcctcctcctcttcctcttccccttcttccccttcttcgttttttttttttttttttttttttttgaacaagacaggatgtctgttgccctcgctgg

SEQ ID NO: 242987 - DNA, 201 bp, Homo sapiens
agatttatctggaagagtaaaggtcaggaaagaaaagacaaatttgaggagaaagaataaagtgggaagaatggcattataagataactagactactgctrctactactactactactactactactactactactactactactactactatttcttcctcctctttctcctcctcctcctcttcttcttcttcttcttc

SEQ ID NO: 242988 - DNA, 201 bp, Homo sapiens
tgcaggtcagctgcttaataagtaaataattgtttccagctatcttttttccccagtttattttaatcaaaataattttcttggctgtgtgctgtggcccwtgcctataaacctcaggatttggaaggctaaggtgggaggatagcttgaggccaggagtttgagactatccagggcaacatagtgagaccctgtctctac

SEQ ID NO: 242989 - DNA, 201 bp, Homo sapiens
gagtacaaatgacaggctgtagagattcttcaaatttgggttgaccttcggagtctttttgtgttaatgtcttgcttactgcagggcttcaggaagagaawtcttgcaggaaggaataggactggttggtattagaagttgggtgatcagttaggagctttttgccatgtcttacatgggagctgaagaaattatagtaga

SEQ ID NO: 242990 - DNA, 201 bp, Homo sapiens
taaaatgcttttgagttagcaaactgttttatcttacagggtttcagtgaagctcaagtagaacaatacttacttactattaaaaaaaaagaaaggtagcrggtggtgttatttaaatggagtccttacggtatcaaactactcattaacaggaaaaatatttagtaaccccagtcatctaaaacatggccatgtgataaa

SEQ ID NO: 242991 - DNA, 201 bp, Homo sapiens
gtaaggaacaaattaatattagacaagtagttatttgtttcttacttatattgccatattccttctggtagacactggacaggtaggatgctgcttactgrattgtgaaattttatactatgatgtaacatttataaaatgcttttgagttagcaaactgttttatcttacagggtttcagtgaagctcaagtagaacaat

SEQ ID NO: 242992 - DNA, 201 bp, Homo sapiens
atttggtacattttcttcaaagtcctttttttgtatttcatatataaaatatgtatattttttaaaaatttgattcatatcagatgtacaattttgtaaartgattttttttctattgacatgttaacgttgttctgtgttcctaaatgttcctcaaagccatgttttgtggaatagccaaaataccttaaaggaatacct

SEQ ID NO: 242993 - DNA, 201 bp, Homo sapiens
gataacagaattacaatgagaaaaccttgaaaagaatacatttagtttaaattaaatagaaaagaaaagaggaagataaatttagccaagattcaatttargattgtaccagaatatttagttcccttacaaaatacaaagtattgctacttcaaatgaaaatttcttgagaaactctagccctcattaaatgaaatgttt

SEQ ID NO: 242994 - DNA, 201 bp, Homo sapiens
tgaaggtgtaatttaaacttaaaaagacaaaagatgcataggcatattgtatcaatatggtgattttgttatctcttttgtatattcatcataaatttttktattctgttaaaaatcactctgaaacagacagtgggtccatttttcatcagtagatcatattaaattttatttggaatatctcagataatgatttgtatc

SEQ ID NO: 242995 - DNA, 201 bp, Homo sapiens
acaaagaaatcatttgtattccattgttaaaactgatgaaaacatgtgaaatcatacatgaagacatggaaagatacaaactgaaaaatgagttaacattkttgtaatattaaatgggaacaaattaatttccatcgaaggtaaaataatgagtgcatttgtgatttttgttgcttactcatcataattatgagacattat

SEQ ID NO: 242996 - DNA, 201 bp, Homo sapiens
caaaagcacaccaaaaagtgtgacacagcagtgattctggggtctcaaatccacagtatctctccctaactgtgtcaactggctggggcaaccattgagamccaagacttctgactcacaccttattctaaatttgcatttctcaacataattatgttttaagctttgtgcacagtcaatagagggtgatcccatggatat

SEQ ID NO: 242997 - DNA, 201 bp, Homo sapiens
aaatcatttgtattccattgttaaaactgatgaaaacatgtgaaatcatacatgaagacatggaaagatacaaactgaaaaatgagttaacattgttgtartattaaatgggaacaaattaatttccatcgaaggtaaaataatgagtgcatttgtgatttttgttgcttactcatcataattatgagacattatatttaa

SEQ ID NO: 242998 - DNA, 201 bp, Homo sapiens
cgttttcctcattcattcttttattccatctactcatttattattaaccaccttattaataaaaagcagctaacctttatttagctgctcaggcactgagyattatatgtacaactcatttaatatgccatcgttttgcagattaggaatccgaggcatagcatttgaccaacttgataatgagtggaagagactggtgag

SEQ ID NO: 242999 - DNA, 201 bp, Homo sapiens
aacaactcacaaacaaacaaacaaacaaacaaacaaacaataaaactatactgaaaaggctttaatacaccaactgataacttttagatggtttaaaggcrtcttctgatgaactgtgtcctaatgagtgtgaatggatacctttgagcaaggtacccagatttaaaatgacatatctcttaattttaaacgtaagatcaa

SEQ ID NO: 243000 - DNA, 201 bp, Homo sapiens
tgggaacatttggagatggagagaaggaagttaatgaccaggtggtagaggactttgaaagccagaatgtggggtttttgtttcatccatagcttcacatrtcatcttaggaccctctatttgggatccccccagagcttgtgaaaaaagcccctttgggatcctttgcccagagctcttgttcagattcttcttaggggt

SEQ ID NO: 243001 - DNA, 201 bp, Homo sapiens
gagagactgagaaagggggaagagaggcacagacacagataggagaagggcaccggctggagccacttgcaggactgagggtttttgcaacaaaaccctascagcctgaagaactctaagccaggtttaattggtttctttttctcgtgggtagacttaataattttctacgtattctgacaaagaaataaccccgaagca

SEQ ID NO: 243002 - DNA, 201 bp, Homo sapiens
agccagcctaaatttagacaattgcaatgaattaaactttaggactggtaagtgtcaggaactcagatgatttcaaacagttaaggatttgagataaggcycaggagaaaggtgtgggctgcatatgttgatttgtgagcatcttatcaaaggtgatggttgaagcactggagttggtgtagtattcttgcatcagtaggt

SEQ ID NO: 243003 - DNA, 201 bp, Homo sapiens
atattttccattcattatcataatgttaacttttccatagtaaaataagtgatgggcttttcgtgtacagtgtttcttaaatacccattaattaaatccartgaaaaccacttttaaggaagaaagaaatttaccaaaccacagagtgtaactagtcatttgcttatgattaaactttttgcatgctgataaggttggaaa

SEQ ID NO: 243004 - DNA, 201 bp, Homo sapiens
atagataagtaaactgagtctcagagtgagtgcgttgcttgcaaaggcatgtagtaacatcagtcataaccacgtcagattgtcttttagttctttgaccratgaactttccacagtgccataattgctggttgccacacattaacactagcgtagtgggaggttgctccagtatttccccagcgcagtgtagatttcaga

SEQ ID NO: 243005 - DNA, 201 bp, Homo sapiens
gcaagccaagtttcagtgtttcctgacactgaatcgcctgagtaccattgtggttatacatatggtgggatgacgtggccagttgaggtatatgtattaayatgctgaagaaaagagagtagtggcacttgcttcgtgagccaaaaaactgcaatcacttttaaatatatgccacaaggctgtgctgggatatgaaggaag

SEQ ID NO: 243006 - DNA, 201 bp, Homo sapiens
tgcattccaagcttattcagttctagaaaatggaggagggatggaactcagtcctcagttcatactgatgtgacttctcctgggctccttgcttaggcatrtggggccaatttgatttggatgactccactggcagctggtttcactctaggacagctgggaaaattttgcttcatctcccaaaggtttactgcttagtac

SEQ ID NO: 243007 - DNA, 201 bp, Homo sapiens
ctgagataaaagtaaatttattttgagtatgaggtttacaacatactaattaattagctactagttgttgattaaatactgtgcaccagtgtttgtattaracattctaggttttcccagcaacactactattagggatagatggtaatcaccagtacatagataaaaccgaggataacatgccccagattatgaaattag

SEQ ID NO: 243008 - DNA, 201 bp, Homo sapiens
atgaattaagcaaaaaaaaaaaaaaaaaaatcttctcattagatgtagaaaaacatgcaataaaattcagtatacttccagcatagaaactcttattaaamtaaaaaatagaagagggaagtaagtattgttgaccaaaacccattcaccctatctgaaactttatatttaatggtaaaattaaaatacattctctttaat

SEQ ID NO: 243009 - DNA, 201 bp, Homo sapiens
atcttctcattagatgtagaaaaacatgcaataaaattcagtatacttccagcatagaaactcttattaaactaaaaaatagaagagggaagtaagtattrttgaccaaaacccattcaccctatctgaaactttatatttaatggtaaaattaaaatacattctctttaatgtcaggaattgtctttggatgtcctagtc

SEQ ID NO: 243010 - DNA, 201 bp, Homo sapiens
agcgttagagaggaagagaaatgccttatatttgaaatgggaaaagagaatgtagataacataatcatgagtagaaagaaaagatgctggtggaaatcatrtcaaaaatcctgtctctgaaaagcatgaggcaagatcatttgtgcagagttgggttgacaaggtgtaatgatgaggcagctaggaagattttgaaatgag

SEQ ID NO: 243011 - DNA, 201 bp, Homo sapiens
agcagttttatttataataatggaaaactgagggcaatctaactataagtcaatacataatccatactctgaaatacaagtcattaaagttattaagtaaygtctgaagatattaacatagaaggatgagctcaatatattaatgaatgcaaaaaaatgtagaatggtatacagtacatatagcatagtaagctcaactaa

SEQ ID NO: 243012 - DNA, 201 bp, Homo sapiens
tattagcagacttttgctatagttcttgacagaataacaaggccttaaactgaaatgattgtagtcagacatagatggagagatagtgtaaagatcacatwaaaagggcctagtaactaattagatttgcagtaaagagagagtgaggatgactctagggtgatgaaaaaatagagatatgcaggaaacagttaatattaa

SEQ ID NO: 243013 - DNA, 201 bp, Homo sapiens
cagttacctgacacccagagagtaagtacaactagcctagagccttggtctgacaccaagcaagagggtttatgaaagaagatagcccagaaagctggagycctgctctgctgtgtcgacatgtctacagctcagaataaaattgagtttcctgctttagccatagctgggtcttaaaataacctgaagaaattatagttc

SEQ ID NO: 243014 - DNA, 201 bp, Homo sapiens
gaggaaattcctttcaggggtcttggcatgagctgagagtttagagttcaaacatttcttactttggatcgaaatggaagtaaacagtagatttttttttwtgttatgctcatgactgccaagatttttattttagggttggatgttattttagggttgaattttagggaggcatgatgagggtgatcagtactaaagcct

SEQ ID NO: 243015 - DNA, 201 bp, Homo sapiens
ttttggagcagagggacatggtgtgagttatctctgtctgatccttttgcaagagtttgaaagaaaggtttgagagactactgtagtgactcagaaatatkagcagacttttgctatagttcttgacagaataacaaggccttaaactgaaatgattgtagtcagacatagatggagagatagtgtaaagatcacataaaa

SEQ ID NO: 243016 - DNA, 201 bp, Homo sapiens
tattcagatgtaaatggttaaaggcattttcttccatactatgattttattctcacttttattttcgatgtgaaatgtggagtcatattttacttgatggrctatttcttgtcctcagtgtcctccctagtaatatattttttaaactggctttagtaaaaatagctactatttttcattttcagcccatggtaaatgatg

SEQ ID NO: 243017 - DNA, 201 bp, Homo sapiens
ggtttttgttttacattgttcttattcagatgtaaatggttaaaggcattttcttccatactatgattttattctcacttttattttcgatgtgaaatgtrgagtcatattttacttgatgggctatttcttgtcctcagtgtcctccctagtaatatattttttaaactggctttagtaaaaatagctactatttttcat

SEQ ID NO: 243018 - DNA, 201 bp, Homo sapiens
agagccactcagggaacctatgaaatgttcagctgaactttattttaatggtttttgttttacattgttcttattcagatgtaaatggttaaaggcatttycttccatactatgattttattctcacttttattttcgatgtgaaatgtggagtcatattttacttgatgggctatttcttgtcctcagtgtcctccctag

SEQ ID NO: 243019 - DNA, 201 bp, Homo sapiens
tgaagtggatctactgaatgagagagaagaatcatacatcttgaaagacaggtggtaactgtgaatatagttagttgggtaaaatttcttgggagaaattktattaaggacacttacatggtgctcaaaatgttcctctgagagtgaaattccctatccggagaaaagattcccagtaacaatttgccaagtcatttattt

SEQ ID NO: 243020 - DNA, 201 bp, Homo sapiens
gagttgagttgcagcattaaagaaatgtgattaaagaaatcacagaattttaaaaaatgtacacaatattgaagcttgaaaaagagaatcatatcactctwaattacaatgatggctaaaggtcttttgtgtttggctagctgatcataacccatgcctccacgcaggtgaggtagtagaccaggggagacgggttctttt

SEQ ID NO: 243021 - DNA, 201 bp, Homo sapiens
tcattgttcctagagccactcagggaacctatgaaatgttcagctgaactttattttaatggtttttgttttacattgttcttattcagatgtaaatggtwaaaggcattttcttccatactatgattttattctcacttttattttcgatgtgaaatgtggagtcatattttacttgatgggctatttcttgtcctcagt

SEQ ID NO: 243022 - DNA, 201 bp, Homo sapiens
tcagtcctcagttcatactgatgtgacttctcctgggctccttgcttaggcatgtggggccaatttgatttggatgactccactggcagctggtttcactmtaggacagctgggaaaattttgcttcatctcccaaaggtttactgcttagtactaattctttctcccttgcaggctgccagcaggcatccccttgtggta

SEQ ID NO: 243023 - DNA, 201 bp, Homo sapiens
ggctatgctatcaaatgggttcatatgtcttccaacctgtagaattgcaacccctgacttttgtatgtatctggaagctcttagacaccccaagggatggrgccacttctaacactgagacctcctcttctcctccatcttcaaacaaaaactctagctcagtagcctcatgggctgtagtcccagctactcaggaggctg

SEQ ID NO: 243024 - DNA, 201 bp, Homo sapiens
aaaagactgttcactgaggaggatatacaaatatcaagtaagcacacaaaaatgtaataaatatcagtgggtaaatatatatatctctatgataatagctrgaattcaaattataatgtcaaatgctagtgaggatgtggataaattggagcgctcatacattggtattgggaatgtaaaatgatactgctattctggaaa

SEQ ID NO: 243025 - DNA, 201 bp, Homo sapiens
catagagatggtatttaaagctatgagaatgggggaaatcgctgagggattgagtgtgaactgataatgagaagaggccacgtggtgagcactggggcatrttctcctttagtggtgaggggcacagaaaaaaactataaaagaaagaattgaagtaggagaaaaatcatgggtgtgtagtgttttggaagccatgtaatg

SEQ ID NO: 243026 - DNA, 201 bp, Homo sapiens
caagtaagcacacaaaaatgtaataaatatcagtgggtaaatatatatatctctatgataatagctagaattcaaattataatgtcaaatgctagtgaggrtgtggataaattggagcgctcatacattggtattgggaatgtaaaatgatactgctattctggaaaatagtttggctgattctttaaagatataaaaaat

SEQ ID NO: 243027 - DNA, 201 bp, Homo sapiens
actatttggcttatttatctactatgtgccaagtattatgctaaattgtgtggtgcaaagatgagagctagattcattcattcagcgatttattcattcartcaacatttatgcaaaatcatttggattattcaaaaaatatataaagacagtcattatcctgcaacaattgaaaatagagttaaagcttatttttgcttt

SEQ ID NO: 243028 - DNA, 201 bp, Homo sapiens
tggcttggcatgtaccagtcaacacaacagataaaaaaattgctgctcttctaaagcttacattacaagaggaggagacagaaacaaaacagacttaattygtaagtaaattttagaagttagtgagtgctatggaataaagaaagagttaagtaggtgggggatatcaggtgggaatggagggaaagttacaattttcaa

SEQ ID NO: 243029 - DNA, 201 bp, Homo sapiens
catttactgtcccactgggatagtagatagcataatactttctttcttattactatctaagtatttaaatgcagaaatggagatgaaaactttgactcctrctgcatttgaatgtatgaatttacatatataaaaatgtacaataagcatgtgtatagaaaaaatcagttatattttttgtagctcttgctacagagacca

SEQ ID NO: 243030 - DNA, 201 bp, Homo sapiens
ccctagcaatcctgttgagaaagacattggcttattctatactcttagctgtgaaggtagagagaattattattcatattattaacaacaaccacatacaycaaaaaaccctcaggatattttgaagatagagtcaaagggatttcctgatgaatttaatacagattgtgagagaatggaaggggtaaaacatgattccaa

SEQ ID NO: 243031 - DNA, 201 bp, Homo sapiens
tatcacatcaatactgtcattaccttgtataaaatttccatttaatgcatgttctttaactatctgagtgataacaggtgaatgacatttttgtatatgcrtatgtggcttacatatttcccaattctgcaaactaccatgaagttagtattagaaacttactttgttatggttagatgagttaaaggagggaaattagat

SEQ ID NO: 243032 - DNA, 201 bp, Homo sapiens
gatcagtgatactgagctttttttcatatgcttgttggccacatgtgtgtcttcttttgaaaagtgtctgttcatgtcctttgcccatgttttaatggaaytgacaaaccacaatcttgattgcttaatacaataaaggattatttctcaccatgtcaccatccagtttgagttagtattcgtggtaaggggacaggtgtt

SEQ ID NO: 243033 - DNA, 201 bp, Homo sapiens
ggatcctctgcatttggcctggaaacaagggaggaagaagtgtggaggattgtgttgaagggttcatttttcatccagaactggaggtgctagccatcacstctgaccacctttccttagccaaaatttaatcatgtcattccacttaacttaaaggagcctgggaaatgtaatctagccctttgctggggaggaaaagaa

SEQ ID NO: 243034 - DNA, 201 bp, Homo sapiens
ctgaaaaaaaaaaagcagggtggtttttttaaaaaaaacaaaaaacaaaaaacaaaaaaaaaaacatctaatgagcaaacaaaccaaacatgcctctcttrtttcttgtcctgtctattttttatttaagcgctgtaggtgaggtaattgaaatggagcccatgatatgtcttaagaaggattaataacattcagtgacca

SEQ ID NO: 243035 - DNA, 201 bp, Homo sapiens
attttgaaataaaacttagtgacatacacacacacacacacacacacacacacacacacacacattacagataagtatatatatggaaaaatatgtatacrcaaggaaaatactgctgttctaaatgtagtataatgattttaatatactacccaagaaatcttatgagactttaaaatcattttaagatttaataatagt

SEQ ID NO: 243036 - DNA, 201 bp, Homo sapiens
aatactaaaggggtggtattttatgagcaatggaaacttttgttgtagatatttcaactgacactgtgcctttattactactttatacctacatctgaagrtccagactctagtagttgtaatacaatagatgcaaacagtgggaacatctagttcttgtcaatgtgtcaccaaaacatattatcaaagctaatctcataa

SEQ ID NO: 243037 - DNA, 201 bp, Homo sapiens
tacatggagagtctattctatttcacaggtttctctctttttatgtgatattatcagactgtcttaactactgtagttttataaaacgtcttgatatctgstagaacaaatctttctgtttgtttttcttcttcaagacagtcttggctacatttggccccactgcatttttatataaaattttagaatcagcttgggtgg

SEQ ID NO: 243038 - DNA, 201 bp, Homo sapiens
caagtgaagatcaaggactggagaggggaaggggctgtgaaggcaacatcaaaggttttggggctgtgaggggagatggcacagagatcctctgttgagaygctgagtttctaggactttcctgaatctcttttttccaagggaatgtatatatacactaacacatatatatatgcgtgtgtgtgtgtgtgtgtgtgtgtt

SEQ ID NO: 243039 - DNA, 201 bp, Homo sapiens
tttatctctataaatgtgcccattttggacatttgatataaatgaaacgataccaaatatgtggtcgcttctgactgccttcctttactcagcatggtttyaaggtttacccatattgtagcatgtaactcagtacttgtttttattattgctgaataatactccattgtttcgatataccacattttatttatcagtgaa

SEQ ID NO: 243040 - DNA, 201 bp, Homo sapiens
tatgttacttgctaaaattttttgaaaaggataaagtgatcaatttatctgtcaactatcactttgattaaatgatattaatcaaaagtactgtgtattcmcttatactgtgaattatgattgggaaaaatgtgattgatattcagtgtttaaaaataacctacctctttatagaaacagctatatgaaattatagttcat

SEQ ID NO: 243041 - DNA, 201 bp, Homo sapiens
cactataatgtttatatttcttccaagtatcttgtaccacatgcttatgattgacattgggcctctatacctattccttttcgttaagagactacttttgyattaacattttaccattagattttattgaaacactattcaaagtcctcaaaatttcaattttatacctttttatttttctgtaagatgaagcaatgtctt

SEQ ID NO: 243042 - DNA, 201 bp, Homo sapiens
cttaatctattattcattaaaatcctagaagctgatactactatcatcatccctgttttaaagctgagaataaatagtattagagagattcagtagctgtstcaattttttgcagcttccagggctaacctgtggcttcaaactcaggtatctgacaccatgtggaccctaaccacttcactacattgatacttagttaca

SEQ ID NO: 243043 - DNA, 201 bp, Homo sapiens
agaagtcaaatagaatcagaatggagtggttgagatcatggactctggagctggacggtgtgtgttctaattcctgttgtacctgttagtgggtgtgtgascttggccaagctcctctgtggcctccattttcctcatttgtaagtaagaatcccaagcacgtctactccataggttactagatattgcaacctcataatg

SEQ ID NO: 243044 - DNA, 201 bp, Homo sapiens
agatcgagaccatcgtggctaacacggtgaaaccccatctctactaaaaatgcaaaaaaaattagctgggcttggtggcgggcgcctgtagtcccagctayttgggaggctgaggcaggagaatggcatgaacccgggaggcagagcttgcagtgagcagagattgtgccactgcactccagcctaggtgacagagcgaga

SEQ ID NO: 243045 - DNA, 201 bp, Homo sapiens
ttgctgagatgatttcatgattattgttgtttctttagaaaccttgacatctcagcatatctaggacttttcttctctcaatatcttgaagagctaatttygtttgcccccgtttttaggtttccacttcctatttttatgttgcgtatctgagattattatacaatgccccgtattttagggttcctacaaaagatagta

SEQ ID NO: 243046 - DNA, 201 bp, Homo sapiens
ggacttttcttctctcaatatcttgaagagctaattttgtttgcccccgtttttaggtttccacttcctatttttatgttgcgtatctgagattattatayaatgccccgtattttagggttcctacaaaagatagtaatgctgttgcttaagcagaaagtaatattgattctgactacgtggaaagtggggtggtaggtg

SEQ ID NO: 243047 - DNA, 201 bp, Homo sapiens
agttctggtgtaattttcagtaatataacatggagtattcaatcatgaattagccattattatttaaataattcacggtgtgacctatactgggttatccstactgaagcaaacagcatgaatgggtaagttttattttcctcagtgttcacttactccatgttgtcacgtgtcagcacattgaattttaagagatacagt

SEQ ID NO: 243048 - DNA, 201 bp, Homo sapiens
gtcctcacttatcgttatggataggttcttggaatctgcgaccttaagtgaaatgacgtacaaggaaaccactgttaccacaggctaattgatataaacargagttaagctcctatggcatatttctggtcacaaaaatatcaccaaacttctacataaagatcgaaatatttctaatataaaacatcggaataaatgtga

SEQ ID NO: 243049 - DNA, 201 bp, Homo sapiens
gcaatgtacactgtacccagtgtgtagtcttttgtcccttaccccagtcccaccctttttcccaagtccccagagtccattagcaggggcaatttagttgyaaacaagttgagggaaggaaactgcaaggtataaacaaagtgctgtgatggttatttctattctctagattttatacagaagaagaaactagctcagaga

SEQ ID NO: 243050 - DNA, 201 bp, Homo sapiens
ctgacagtggtggccatggcttctgccacactgcttgttttgtgaaacaaccaagtctcctgcctacctttctgacctttcattccacctgtgccttgtaragtccaatcacaagtcatttgcagtttcctttttcttttcctgttcctgtgtacatgctcttctgctctgagttcacgtctctgtgtttttggtggcata

SEQ ID NO: 243051 - DNA, 201 bp, Homo sapiens
tagtcttttgtcccttaccccagtcccaccctttttcccaagtccccagagtccattagcaggggcaatttagttgtaaacaagttgagggaaggaaactrcaaggtataaacaaagtgctgtgatggttatttctattctctagattttatacagaagaagaaactagctcagagaaataacttggtttagattacacag

SEQ ID NO: 243052 - DNA, 201 bp, Homo sapiens
ctacatgatttgggattttggttttattttgaaatgagagctctttcatttacaagttcactaaaaactcaaatgtttcttgaaaatcacaggagcttatraacattaaaaagaaggaataactattgaacaaataagacagacactgtcaagaacgggcaggactttgcaaggtgataattaagactagttaatatttat

SEQ ID NO: 243053 - DNA, 201 bp, Homo sapiens
aagattcctttcttcagttttttttttttttctcattcaaagctcctgtgaccctctctaactggatatctttacttctctagaaactgttgaacactatktagtatgttttgccatgaaaacaaaggaggaataagtggtatgaaaattcagagttactgcagaaatttttagttctttctattttgtgaaatagtgctt

SEQ ID NO: 243054 - DNA, 201 bp, Homo sapiens
aagataaatttagttgtctttttctgctagagctttgtggaatggagttagtgaagtaaaaggcatattccctttgtttttgttgcagaaataaatgggcraggacactttaaagatttcgtgtgtgcattgtggctacttgtcctaaacataaaatcatacaactaaatgaaaatctctctttcaattcattttaacata

SEQ ID NO: 243055 - DNA, 201 bp, Homo sapiens
attttaacatagtgatttgctgcttattagtgcaatctggcaaaaaatgttagccaagcagctaatattttgtttacatttttgccctagcaaagatatawcaaatcccctgatgtacacctcttactcaggtattattgtaaaaatcaacaaggaccatttgaacactgataatactaaaaactgtcggttcccttattg

SEQ ID NO: 243056 - DNA, 201 bp, Homo sapiens
tgaagcctgtggccaaagagtttgatccagacatggtcttagtatctgctggatttgatgcattggaaggccacacccctcctctaggagggtacaaagtkacggcaaaatgtaagtacctctttcaggactttacgaaaggctctgatatcataccatcttttaggtctttatgatagacaccaccttttacatgtgtcc

SEQ ID NO: 243057 - DNA, 201 bp, Homo sapiens
atcttgacagaatcagccaagctttacctataaaaatattggaagagatttgaaatcatatgatctttttgcagaaaaagaaaaggataaagggaattgcwgctgccagtgttggggggagtgaagtgggaagggtcactgttatgtcacattcttagattctttttttttttattatactttaagtttaagggtacatgt

SEQ ID NO: 243058 - DNA, 201 bp, Homo sapiens
gtgacttatctcacttaaaagagtctcaataaggctgacagctgatttctcttcagagaccatggaggttagaagacagtggcatgacatattcaaagtgmtgaaggaaaggctatcaagcaaaagttctatctgtagaaaaactcctccaatttttaaggagaaattaaggcatttccagataaacataacctgagagaa

SEQ ID NO: 243059 - DNA, 201 bp, Homo sapiens
tgtaaaaggaaccaaacatttactgactcaggcacctattcttgatttctgttcacctgttgccttgaacaaactgcctgagctcatatgccttacctccmtaaggagcatgacctttgggaatttaccaggtcctcatccctgtggactcagaatcttgcttggtaagagtttataattgacttttttttttttttgaga

SEQ ID NO: 243060 - DNA, 201 bp, Homo sapiens
agtgctggcccattataactttttcacagatttgggaggggaggaaccatgaagtgagtttcccataaaagtaaatttatttagtttgaaagactatcacyttaagttctaaaaacaaataatgaatgatattgatattaatctgtgaaaccccaaaacatgagaacaagtatagagccatagtttccttttatttattta

SEQ ID NO: 243061 - DNA, 201 bp, Homo sapiens
attttgaatttatattaaatgatgaaaaaataggtcctgcaataatttagagaaaacctgtctcttcagggcaaggacaaatcaatattgagtgtttcaaytgaattgatgcactttcaattataataatcttcatggtagttgaaaggcaggcccaagcaaaaatcatgatatgcacaaaaatattgctggaagcactat

SEQ ID NO: 243062 - DNA, 201 bp, Homo sapiens
tggagccacttgcagaagatattctccaccaaagcccgaatatgaatgctgttatttctttacagaagatcattgaaattcaaagtatgtctttaaagttytcttaaaaattctaagcaggtaaaactaactaaaattatattgaaaattatagtacaaagaaacatttatttagagttatcataatttgcacatgcgttc

SEQ ID NO: 243063 - DNA, 201 bp, Homo sapiens
tttgatgcgtctagtgacatcgcttcccattcgtgccatattatagtttgatcaccagttcttatttgagatgattaaccttaatgtttctaggaaaactmcttttttgttaatccttttgttactattactttatttgctttttgggtcacaatagctggacaactattttatttgcaagggccctagccatgcgctttc

SEQ ID NO: 243064 - DNA, 201 bp, Homo sapiens
tgcaaacagtgggaacatctagttcttgtcaatgtgtcaccaaaacatattatcaaagctaatctcataagggtgtcagaggaaattaaagttgcctttgsctgcatgttataagaactgactgaaattttaaactacctcagtagctgactatatacagcagcaggaagccttcaattaactgcaccagttctatttgta

SEQ ID NO: 243065 - DNA, 201 bp, Homo sapiens
gcaaacagtgggaacatctagttcttgtcaatgtgtcaccaaaacatattatcaaagctaatctcataagggtgtcagaggaaattaaagttgcctttggstgcatgttataagaactgactgaaattttaaactacctcagtagctgactatatacagcagcaggaagccttcaattaactgcaccagttctatttgtag

SEQ ID NO: 243066 - DNA, 201 bp, Homo sapiens
ttagcattcacaatacaaaagtcattctaagaattataattaggagtctgacattttacacagaatttggtagttatttttggtaaataatttttacagargatgtttgatcaaattaaaatgtaaaaattttaaggatcaacctatgattttcttgtattaatatattcacgtgggatctaaatgctgaaaaattgtatt

SEQ ID NO: 243067 - DNA, 201 bp, Homo sapiens
aagggaggctgggttgtatatggtaggaggagagaaacattagtggctggcttgtggtctctgccacaagatgatgggaaggaatttatgtatgtcaagtrtatgcataagcaaaaagaaaatgtttaccttaaagacagttggacttaatgattagatgataagggaccaaaatatggaaaaggaactgtgaactaatca

SEQ ID NO: 243068 - DNA, 201 bp, Homo sapiens
ttccttaggaacttctctaattgtgtagttagggtaaaaattgctttgtatatgcctgtggtttcaaaagactggaatgtgctatttatctttttatttaytgaaggttttcacttacttcttatgtatttcttatactgtattaattctaaagtattaacctatttccaggtgtaatgatgataagtacacaaaggtcag

SEQ ID NO: 243069 - DNA, 201 bp, Homo sapiens
ataatagcagtgttttatatttgaatagcactttaaaatttgcaaagtgttatgttttcagatactttacttggtaatataaataggtcaagtactgtctycacttcctatgtaaggctactgtggctcagaaaatttaaacaagttactctagtttacaaagccagtggagttggaagtcaaacccaagtacttgggttt

SEQ ID NO: 243070 - DNA, 201 bp, Homo sapiens
tatattcttgaaagcaacttagaaacatacatcattataaggtaaaataaaatttatttatttacttttcttattgctcaccatgtgaagaacctgtgaamagcaagaaactttctttaattccctaaagaaaattatcttataccttgttatgcacctgctattttcagcatttatcctaaaaaatgtggcattggataa

SEQ ID NO: 243071 - DNA, 201 bp, Homo sapiens
cagctataaccagaaaacattgaaaccaaaggataaaataaagaagcaaggaaattatttctaaaagaaacagaagaagcttttttacttgctagggagayttaactccttaaaatatttgtgagtttccatctctaaaattttcttgggatagaaatgtaatgacatattacataaatagggtccccagcacattttatt

SEQ ID NO: 243072 - DNA, 201 bp, Homo sapiens
ttttgctgagacatttccttgtagttggtgatttcaataacaatactagaactctagtaaataatacgacattgaactgtttttttccctattcagtattrtctcctggagatataatcctagagttggcaaacctgaatcaaatggtagaaatatgtaacacttcttgatacgtattaccaaattggttttgcataagtt

SEQ ID NO: 243073 - DNA, 201 bp, Homo sapiens
aaatctgcattcatgtttatggtggtagtattataagtgtgctgctagttacaataattggcatgttgcttacataggcactgacttagcagaaaacttarcaactcttgaaaacacagttcaaggtctgcagatgatttggtccacagggccactgtgaaataaaacaaatgaccagtgtgagacaaaataatcttgaga

SEQ ID NO: 243074 - DNA, 201 bp, Homo sapiens
aggaagtatggctccgagtagtttagtaacttgtccggatttcatatctactaatgtcagaacctaaggagaactcaaggtctttagttactcctcagtgygcacatttactatagttcatagatatatatttctcagtctgagtggaaatagacatctcaagatggctattaaaaaagaatgcttcaggctgggcaaggt

SEQ ID NO: 243075 - DNA, 201 bp, Homo sapiens
ccccaaattaatttaatatctcaccattctgtatttgcgttgattatttttacaccattttttaggctaagaatggaagatttcagttgttcatttataaygtgagggactttgtaaaataggcttctgggcagtccctaccttttcctgtttgtatgttcaaagaaaagtcattaagggaactaaagatttaattaaagg

SEQ ID NO: 243076 - DNA, 201 bp, Homo sapiens
attaatttttcaagtttagcattgctttgccaacgggatttgtagtactccatttctacattgaatactgggaaattttaaggaaaagaggccaggacaargaatcacttctagattaaacattgcattgacttactgtgtgactcagacaaaccacttacctctttgtccttcagtttctccattgctgaaaattgcttc

SEQ ID NO: 243077 - DNA, 201 bp, Homo sapiens
aagtaagaggcaccagggtaaacgatggactctctttcctcatcgttagctgatcattattcagaacaaagcctgataaagagtgcggttagactcgtcamaattatctgtgtttaattaaaagcatagattacagacccaactgtaaagttttgacatttacataccagctcacatcattgagtctgcagagcgtctcaa

SEQ ID NO: 243078 - DNA, 201 bp, Homo sapiens
aggcaggcccaagcaaaaatcatgatatgcacaaaaatattgctggaagcactatctgctattagctatctgctcatgctgtttaccttcacggaatttcyaggttcaaaatcagccatttatttagaacgccagagtacccaccaaggaagcatattgtatagttttgttctgacgaagcatgtggctagaaaacaccag

SEQ ID NO: 243079 - DNA, 201 bp, Homo sapiens
tatccacatctcctgactatgccttccttactcctggccaagtaataattgctctctaagtaaagccttgcctccatttagttttggcatactcaaacttkgagaagatttaagacataacacatgcaaaagaactatccacaagagggagacagatccaaataattcccctgtattaggtcagttcaaaatcaggtcgta

SEQ ID NO: 243080 - DNA, 201 bp, Homo sapiens
taatttatgcattatctttcatactactttttttgtggcgagaacacttaggaatatttctcttgcaatattcaatactacaatgcatttttattagctayagtcaccatgacgtacaatagatctcttgaacttattcctcctatctaaccgaaactttatatcttttgaccaagagctccccagtctcttccccacaac

SEQ ID NO: 243081 - DNA, 201 bp, Homo sapiens
ttgcaatattcaatactacaatgcatttttattagctatagtcaccatgacgtacaatagatctcttgaacttattcctcctatctaaccgaaactttatrtcttttgaccaagagctccccagtctcttccccacaacactgttattagtacctacccttctactctctacttctatgagagtaatttttatagaattct

SEQ ID NO: 243082 - DNA, 201 bp, Homo sapiens
atcaattagtattttcattacagctcacttatttaattgatctaatgaaacactaagcctattagaatgtgaagaaatcaaagagaaatgtagaaaatatyttataaaattcatctaacatatccactgtgctgtgtattttgcagctattttcaaaaagtttatgtccatgtccatgttttattgacacacatacagtcg

SEQ ID NO: 243083 - DNA, 201 bp, Homo sapiens
gggtgctatcttaatcttactaaataggaaactatttcccagaagccccacctccagcaggtttccctttgcataccattggccagaaccctgactcacarcctgccccaaactaaacactggccaccaagaatcagattgttagaagtggcttagagtctaagttctagttgaagtatagttcaccttcgggggataagc

SEQ ID NO: 243084 - DNA, 201 bp, Homo sapiens
ttgcatgaccaaagtttgttattagtttgaattttaaattttactttatgggcataagtttatgaactcatttccagctgagtttaagagttttcaagtgycagagaggttgcaagaaccaaattaaaaaaaaaaaagttgttgctgaaaattctctcttaggctcaagagcctcaattttcaaatgtggttgattttaat

SEQ ID NO: 243085 - DNA, 201 bp, Homo sapiens
atttctacaaagtttgtctgtattgcaaacattgcagtgtaatattgattgtttttcactattattccttgtgattatctcatggtaatgctttcttgtaraacgtgtaattggggaagaaaacatagatgttgcaagtgtacagtgtgattttaaaagaattacctgttttcaattagagagataatgtggctatatacc

SEQ ID NO: 243086 - DNA, 201 bp, Homo sapiens
tgtctgtcttatccacaggcatatccccagcaccttgaagagtacaggtatagtagactctcggtaaacatatgtttaataaatgattgaatgaatatgcrcttgtttgttatgttattctgtgtatctataatgtaacaatttaaagaaagcacctggttgagaaagatgccatggttcagtggtagatactaaaaataa

SEQ ID NO: 243087 - DNA, 201 bp, Homo sapiens
gaaagaaagatgaaaattacttgtacctggagtagtaggtgtgcaaggtgggaggaggaggatgacagatgaagctggagaagtaaatttttatttatacrtagaacttatagttcttttcttccattttgatattgtctgcctgactcaagtatcttattttacacccacaactgcaaatatctcccgtcatttgaaaga

SEQ ID NO: 243088 - DNA, 201 bp, Homo sapiens
tagcaaatatttaaggacctacgtcagttatgtttctaggcactggaaataaaatgaatattgaaaaagacaggataggttcgtgagacttatgtataatsaatatttaaagagggaatttgggccaggcacagtggctcacccatgtaatccgagcagtttgggaggccaaggcggaaggattgcttgagcttaggagtt

SEQ ID NO: 243089 - DNA, 201 bp, Homo sapiens
ttttatgaagggactacttaacaaggaagttagtaaggttaaatgaactgcttagggaagtgggggtacccagaaaatagcaatagtgggaggtcattccyacaaagaagagaggggaggaaatttttcctggagtgctggagagctggagccctggaatagtggcttccagagggagatgaagtcaggaagagacatagc

SEQ ID NO: 243090 - DNA, 201 bp, Homo sapiens
accatattcaaccccagtgtcttagttcaggctgctgtatcaaaatacgatagactgatagcttataaacaacagaaatttatttctcacagttctggttrctgtaagtctgagatcagcttgccagcatggtcaggttctggtcagggccttctggaataaagactgccaagtaaagacttggacccttagaaggcaaca

SEQ ID NO: 243091 - DNA, 201 bp, Homo sapiens
taagtggtattattttaaaaatagtgaagctctgtaataagcttcactgtttagaatatgaaataaatggtaacatacatgtgaataatgtgcatttgtaytatggaatatataacctaactcagaaccttcaattcgaagacttagccaccttttctttccagctgatagtatactgcatgtatagaatgtcttatttgc

SEQ ID NO: 243092 - DNA, 201 bp, Homo sapiens
atggaaagtatttccttgggataagaaatattaaatctgaataataaatacaattattttactagagtttatatgtattatccaacattaaatataatcaytaatttagacgaattgaattctaagtttggagttacagacttttttcccaggaaatactattgtatgtaagtaaataaaaatcttaggtttttctaatag

SEQ ID NO: 243093 - DNA, 201 bp, Homo sapiens
ttattgttgatgttcttattattatttataatatgaaatattttaagttcataatactggagccattctgagaaagttcctaaaatagactactgcggaascccattattgccatggacctgatatatttacatctataattttaatgaggatgtcataagattaaaatttgtgatggacatttgtgatctctctcaatga

SEQ ID NO: 243094 - DNA, 201 bp, Homo sapiens
tattgttgatgttcttattattatttataatatgaaatattttaagttcataatactggagccattctgagaaagttcctaaaatagactactgcggaagsccattattgccatggacctgatatatttacatctataattttaatgaggatgtcataagattaaaatttgtgatggacatttgtgatctctctcaatgat

SEQ ID NO: 243095 - DNA, 201 bp, Homo sapiens
tgtttataggatcttgattttcttttattatgtatgcacttatttactgttctcatttattatttttgtattcattgttcttggtagtatttaagtgtgtmagaacctcatgagaaaaaggcatgtgaatattcttagaaaactacttagttcactgtgaatgtgtgttgttattatttattgtatttgttccatgtgatt

SEQ ID NO: 243096 - DNA, 201 bp, Homo sapiens
gcctcagagctttcttttgtagttcaagcctacactgcaacccaggtgcatgacaggttaaaagtgccagagaattaatgccaccaggaagcagcctgcartgaatgactggcagaattgatgtgtaaatatcccagcttccttgccccttggttaagtctaaagtatgtgttgtgcactggtgaccagaggtccctggaa

SEQ ID NO: 243097 - DNA, 201 bp, Homo sapiens
cacacactgacactacagagtctggttcgtgtgttctttctcactatctgaggttgtgtatggccatacacgcctcagatggggttggtttttataaaaaygttaaggctgaatcatatttgttgtattgtgacatttgctgccttgccatcaaagagtaggtgcctttgtgctgacaactctttggcattttgccccagg

SEQ ID NO: 243098 - DNA, 201 bp, Homo sapiens
ggatttatttcttacatttgtttaggattttagtctctatgtttacgaatgagattagtttgtaattttcctatcttgaaattctcttattagagttggcrccaagatatacccacataatgagttattcagtattttctcttttctggaagaacgtggtgttatttcttccttaaagttttgcaacagtttactgataaa

SEQ ID NO: 243099 - DNA, 201 bp, Homo sapiens
tttttaaaaaatttccttcagtttaacttttatttctttttctaagttttgaagtggttggttgcttattgattttgttttcctttatatattgaaaactrtagtttttcctctcagcatattatgctttagtttttcccagttttattatcatccaaataaaataattttttgttttccatttgattccctttttgactt

SEQ ID NO: 243100 - DNA, 201 bp, Homo sapiens
catagagtgttttgatataaccccctctttggtgagttctggacttcaatttatgtcctctaagatttagtagattgtcaaacctttgtttagcctctcarctaccttttctgaaatcactaaactttccaagggtcaatgtgataccaaattttaggcttactcctctgaattccttcttatcctgtatcttatcccttt

SEQ ID NO: 243101 - DNA, 201 bp, Homo sapiens
cgtctgtctgtttcagggaaaccttattcttctcaatctccttatttctaccatttataatttccctccctcttttataaaatatctattcattcttatgmttgactattttctctttctctaagcactcttattttttcaaagagcttcaattactgtctatacaccagtgactttcaaatctgttatctgcccacaaga

SEQ ID NO: 243102 - DNA, 201 bp, Homo sapiens
tcatatttgtaaatgctatttctgggaaataccagatctagtgttattttgggaaactgtgggttgaccttgcaaaactcacattaacgagaaaaaaaagyacattttaaatggtgacacatctaacagggagcttaacagagcaagagaaagtgtgtaggtgttcagtagtaacaacctaatggtaccacattgtatttc

SEQ ID NO: 243103 - DNA, 201 bp, Homo sapiens
ttagaattcttaggaaaataattttgtaagaacaaattaaaattaactttttcttcagcactgtcataaatatcagcaccatgaagccaaaattgtggcartgttacatggctatgtttccaatatttaagaataaaggttaggccagatttatattctcttgcaaaattgaaccaaaatataaataatttatagaatttt

SEQ ID NO: 243104 - DNA, 201 bp, Homo sapiens
agcttttggacttgccagaccccttaatcatgtgagccaattccttataatcagtctccctttctttctctctttctctggagaaccctgactaatacgcrtagtatatggagactgactagatatgggagccacaggagttgagaaaggaattaacaattacttaggaatgggaatggagaaattgaaaagggcagtcaa

SEQ ID NO: 243105 - DNA, 201 bp, Homo sapiens
ggcatacagtgatggcctgaatccaaatggctgcactgtccctgtatttgatatctgggtaatcaagtcctagccatagcctttctgcttttacacaataycttttagtttttatccaatattccacctgtttgcattaattttggggttatgaatgctgcccttaattgtgctgtttcaacattcatggttccaaagcaa

SEQ ID NO: 243106 - DNA, 201 bp, Homo sapiens
ttaaattactgtaagcagctgtagtgaggtaggtagcttgtgtgggtgaggctggatgttgcatctttgaatcatctacaagtagggcaaaagaagttacstgacagaacagagttcacaggtgaatgagagagacaagcataggcaaggatttgactgaggttcttcaggtgggaattatggggctagaggagaaagatg

SEQ ID NO: 243107 - DNA, 201 bp, Homo sapiens
tcagactgctccctgtaatctactcatctctggttctgtccttgattagctgccacccaaacagagtggcccagcatggtcctaaatccaagccataggayaaggatcctagaaagagaatggagttctttcccaatttatgtccccatctcccacatgcgcaacccccggaagctcagtctttgttcctttattgcagtc

SEQ ID NO: 243108 - DNA, 201 bp, Homo sapiens
ctttctattgtttgcaaagttctgctttttaagtttgccccctggaggtctcatgttccatgccaaataggttttcaaagtatttacctaataattcctargaaaacattctgctcctaagaaaaataatacttaccacttacaaatataggaattcacatgcctttggtactgaacaccctctcctcaaagtagacttta

SEQ ID NO: 243109 - DNA, 201 bp, Homo sapiens
agcttctttattgaggacaactaacagttaagagttttcttggggaatagtgtcacagcaagaatcacacatagacttttcagatacaattcttctatctmcaaagtaatgctagaaatattgttgatttacaatagatataatttaaaattatttatttttattttccacagatcccaatttctggatttcttgtgaagt

SEQ ID NO: 243110 - DNA, 201 bp, Homo sapiens
tgggggacagagtaagaccttgtctctgaaacaaaaaacagagagagaaaaaaaataataagatgtatgtattcagaaacataaaaaagcaagagtaaaasttttgtgacaactttgttccatttataagtcacactaatgactgatttgcttcttagtaattttccatttgtaacattttgtacctggatacacaaatgt

SEQ ID NO: 243111 - DNA, 201 bp, Homo sapiens
ctctaaacattttccccaaatcaaactgtatttctgtttggattaaagatagtagtagtttgattataagctaagattttaagcaccctatatattgtccrcattcaaggaagagcaattgggattaaaattagtaatctgcatgaaaaagtatctttctaatccaagttagctccagacaaaactgtgaagtacgtgaac

SEQ ID NO: 243112 - DNA, 201 bp, Homo sapiens
cctcttatataaacctccatttggagccattttagatttgagaggttttttcaatattctatgagttttggctggatccctggaaaacttcactcaaaggytgtatcttccagtgaaagcttcatgttgacttgtgggttctgtgtcagtggaacgtttcagtactttttggcctggctcaaatgtttcttggcattttct

SEQ ID NO: 243113 - DNA, 201 bp, Homo sapiens
atagagacttatagacttgtatcaagttatataatttacacagaggtgaacttaaagtgctaacatataaacattagtgacagtctttaattattatttartgaatttttcatcatgtgccaatagaatatatgatgttaaacatggaatgtgagattctgaaattaaggagtttgctataattatgacctgagcagggat

SEQ ID NO: 243114 - DNA, 201 bp, Homo sapiens
taagaaagtgatgagttgcattgaagttcactttgcatagtttaataatcatattcaaacacttgtatttaatggtatgttgacaatgtcagaaaatcagrtgtttatgaggaacagatttattcttacatgatcctgttcttagttgatattttgtatctgaagatatttgttgggatgcaaaggatttctgtgggaaac

SEQ ID NO: 243115 - DNA, 201 bp, Homo sapiens
tattgccattccccaagtacaatctgtcttaaaatctgaggcaaaataagaaagtgatgagttgcattgaagttcactttgcatagtttaataatcatatkcaaacacttgtatttaatggtatgttgacaatgtcagaaaatcagatgtttatgaggaacagatttattcttacatgatcctgttcttagttgatatttt

SEQ ID NO: 243116 - DNA, 201 bp, Homo sapiens
tccgtaacttctagtcttcaaatgatcaaaactgaggacctggtgaaggtttcaggaaaccacttctttaattgattctctttccatgtaaaatgtatttyaaaggataatagcctacgatttgactccaaagcttcagcgtagaagaggaattcttctggctgaactatatagctaatgctcaattaccttagcttctat

SEQ ID NO: 243117 - DNA, 201 bp, Homo sapiens
gtttttctcatttatttgaatatatgtcaataagcaaaatcttggctaaaaataatcaccttagcactaaatttagtcaagtgtcaaaggcattttaaagwgactaaatttgggatgcatctcagaaaaacatactgcatgatactatgctaatgagattttctttttatgctgggcaactggtaattttgttgttcaccc

SEQ ID NO: 243118 - DNA, 201 bp, Homo sapiens
tagtctgttttcacactgctagaaagaactacttgagactgggcaatttaggaagaaaagaggtttcattgactcacattctgaaggctcaacaggaagcrtgactgggaggcgtcaggaaacttacaatcatggtggaaggcaaagaggaaacaggcagcttcttcacatggtggcaggagggagcaaagggggaagtgc

SEQ ID NO: 243119 - DNA, 201 bp, Homo sapiens
atacaatttttatttcttgagtaacaagaatacagagggaaaagttacggttctcagtatccaaccatttagctatataccaacatagtagcagaccagaygcttctcagtgaagctaatccaagccagcaccttatgttctctgcccaaactctaggaaacttgtacctttaccaaaaaatctcagagactggcttggaa

SEQ ID NO: 243120 - DNA, 201 bp, Homo sapiens
agtattatttagaaaccatgagtaactgattagattttttaactgcaaatcaaacccctaaagtaagaatctatccctaaaaatcaaaatctattttgctrttttggtcactataatgaacagagggagttgaacacatggttatctctccaccactcatggctgctgcatagaaattgcccctaaaggatgttaatatta

SEQ ID NO: 243121 - DNA, 201 bp, Homo sapiens
ttgttataatgtgtctttctctcatgctagactctaaattcattgagagaggaccttgttttattcaccttttaagttttaattaataagcctatagaacstataaaatgagtcagcatttagtagggtcttatgtgtactaatgtgtctgaaggcatgtacacataaatttaactaatttttattttacttatgattctg

SEQ ID NO: 243122 - DNA, 201 bp, Homo sapiens
ttgtgtattacttgattttatgatcatatattgtttgtgtgactttacctttaaagtcaatagaattataaatttaatttggtatttacaacacacatatrcacacacatatgtatatattttttcatcaaacattaggcaaatgatggttacatgaaacatgaaactctgggactacttctgtttcacaggttcagatcc

SEQ ID NO: 243123 - DNA, 201 bp, Homo sapiens
taatacaatattaaaacctgaggaaagcagaatatttaactttgttattatagttgattaaatactttactgtctttttgcatattcaattatctgtagcwtgtgcagtcttgtaagacactggttgtggtactcactcattcattcttaatccattcatctatccaaccaatagttattttccccattaactgtcctctg

SEQ ID NO: 243124 - DNA, 201 bp, Homo sapiens
acacatatttaagaactcaagctctagtcagcatataacttaagagggaaaaggttgaatttcctttcaaaataagcaccgtgcatgaccatgcttcctargaaaaaaagaaaaggtaatatctctaaaaattgtatcatcattattttcataccagttaccatggttcaattagtccctctctatccagtctagtggtac

SEQ ID NO: 243125 - DNA, 201 bp, Homo sapiens
caactttcaatcccaatagatcaccaaaggtttggaagtttcatcaacttggaacctgaaaagtctacactattcacatctatttaagggcagccctagamccaccttccacataggacacataggacagagatactagtgtcaaacagcctggcaggtctttgtatgaatggattcattccctctgggggtgatctattt

SEQ ID NO: 243126 - DNA, 201 bp, Homo sapiens
tgaggctgtactggcccctaagggaagactggaaagtgttttctggatgccgcaatgcttggagagcactactggcatttagtggactgcagtcctgttaygtgagaggactggacccggaagttgtgtcctgcattttcaacaatccctttgggtagtcatataggtgaaacacctgtttataattatttgagcctggaa

SEQ ID NO: 243127 - DNA, 201 bp, Homo sapiens
cctaaggatggtggtaagtctggcttcttagtctttccagggtgcttggggccctagctccttgtgtgactgacttgaggtggtgttcagatatttagcartgggaaagttgtaatcaactttcaatcccaatagatcaccaaaggtttggaagtttcatcaacttggaacctgaaaagtctacactattcacatctattt

SEQ ID NO: 243128 - DNA, 201 bp, Homo sapiens
actaaatatttttagtatctagtcagagactatcataacatcagagcagttcagttgcttttgctgttatcctcttacctctatgtcttttctctcttccscatttcatagattaaagtgtaagctcttttcaaactcattccactcattgacatgggaacccacttgccatctttttttttcaaattcaagtattttctg

SEQ ID NO: 243129 - DNA, 201 bp, Homo sapiens
aatattttagggaaagcagagtttacaataaaggaggcaaatattggattggatctagaataccctatcagttcattgaatcataatttccccacataaawccttgggttcttaatttatcgaattgaccctagtcctttattgtgtcaggacttttttcctaaatcctaattgagtgacaagttctatttgaagaattcc

SEQ ID NO: 243130 - DNA, 201 bp, Homo sapiens
gaatatacattggtcctaaagaggcttacaggcttctagaaagacattacatagaaataagttatgcctagactgagaggatgatgaaatatgctccaggwtttcagagaggggcaagtaggtgtgtttgaatggatgaggaaggcctgtggatgaagccgaggaggtgccaccaaacctagatgcttggggaagctgtta

SEQ ID NO: 243131 - DNA, 201 bp, Homo sapiens
cgtacaggcctctcagaggaagaacctagcgaggtggatttttatccatttgaactgaaaagtgatgaaaaataattgcagtattatagttgaagggtgtkaagcttcactgagcaaacattttttgagcacctgctatattcaagtcattttgcctcacagtagggatataaacatggacaagatatgaactctatgttt

SEQ ID NO: 243132 - DNA, 201 bp, Homo sapiens
cagagaggggcaagtaggtgtgtttgaatggatgaggaaggcctgtggatgaagccgaggaggtgccaccaaacctagatgcttggggaagctgttaagakttttggagaaggggacaatgaagcaaagttctctccctttctttttcacttccccctcttctttttcttctagaactgtgtcttttcttctttctttcct

SEQ ID NO: 243133 - DNA, 201 bp, Homo sapiens
aatataccttccttctagatttcaaaaatttccctcaaataagtttccaagaaacatgagcaaaatatctagatgctgtcgtttgaccattttcagctatytaaagaatagtaattctggcctctacatggtcttcaggtcccgcatctatttcttacttactatcctgttacccctctttatctttttctttatcctttc

SEQ ID NO: 243134 - DNA, 201 bp, Homo sapiens
agacttcaaaaagtctaatcaaacaattaagaacaaacagtacttgtgtgaacttatcattttattctgcacttttcataacatattaggtgttaagcttygaaagattctgctttaattccgggtaactattggtaggggatttaagtcacaattatttaaacataagtttttcacagatcttgaatgtctctgggaatt

SEQ ID NO: 243135 - DNA, 201 bp, Homo sapiens
aatgattaggtctcagtgtccatttcaatgattccttcactctttagctgacagtgcagaccatgatggtatcgactatgataggggatgctggctcctakaaagcacgggtttcttcaggagggtgatggaaaggcatgtgctgacagggtcagagttctgtgtgagagtcccgtggtcttcagaacagcctttctaagc

SEQ ID NO: 243136 - DNA, 201 bp, Homo sapiens
tgtttttacatccagacaccatgtctttatggatgcagaagtccaatggtgtgctttcaatcaccacaaaaatccatcgtgggtgctgccgcgtactgatkccccgaggtagatgtcctggtgcccttcaatatataccatggcccatcatcctacagcttaatgagataatttctcgaagttagaattcccagcaaagcc

SEQ ID NO: 243137 - DNA, 201 bp, Homo sapiens
tgaagttttgcatacttgggccatatttatatgacaaaaaatatctgatttttttttgatcaatgtgatccaaaaatcagtcatgtttcaaaaaatttggycaattgaattgttgggccttatgtcaaataaaaccactgcttgaaaactaaacaaattgctttcaatgggttattattgccttaccaagaccacatcctg

SEQ ID NO: 243138 - DNA, 201 bp, Homo sapiens
atcactgggtcatggtatacagaataattattttggtttaaagttcagcagaattgctgtaccagactactgtcccaccagcatcatatgagagtttttasctttctgaatccctgtggcagttgacattgtccatttttctaattatacccagtgtcccttctggaagacattctcactcttttaattgaaatcagtggc

SEQ ID NO: 243139 - DNA, 201 bp, Homo sapiens
aataaattatagtctttagcatttacttacaaggttttctactgctatatttttacctgaatatttaaaatatagaacaaataaataacataaaatgaaaratatcttccaagtaatttatgtttgtttttatctttgatagtattaaatttgatatctgctggtttatgtatattgcagatgttccttgcttttttgttt

SEQ ID NO: 243140 - DNA, 201 bp, Homo sapiens
agaagtgaatttactttagatcccagaggaagagtattagatctggccacagaagtaactcttttatattattacctatattttctattttaaaacattamaattttgaatcttctcaagatttcatttttaggtacatttatatcaaattgaattttaatctcaaattacaaaataatatggattacaaactaatatata

SEQ ID NO: 243141 - DNA, 201 bp, Homo sapiens
catgtcaaaaaaaaaaaaaaaaatcaggagtaggaaagataatttctatcaattagataataaaagagagaggagtcactatcacttctctgtttctcttrtgtctgcaatgataaaaaaaaatacagggatactggagaaaagaacagtaagagacagctaaagagaatcccagtagtacctgtacatatgagttgcaca

SEQ ID NO: 243142 - DNA, 201 bp, Homo sapiens
gcgttttcatttttcactttgaaggtgctgccaaagctagttaattttagttataccatcatagaatgctggagcctgtaggtgccctagaaatggtttgstacagcctcctcgttttacacataaggggagccaggcccagttccttagttctcacaggaagctacggcactgttaggatggaactcgtgtccgcctcgc

SEQ ID NO: 243143 - DNA, 201 bp, Homo sapiens
ccagaatggagagatgaacaaagcactgatagcaccgaggtgacagtatatttttacctttttcccctatattttctagttctaatgaaagtttgattatsatctaaattgctaatttattatatctacaaaataacttagaaaaatttgattttttaaaatcctataatcttctccctcagggttattgtctgtttcatc

SEQ ID NO: 243144 - DNA, 201 bp, Homo sapiens
tctaattaaattctgtagttttccttaatgttaaatactggttagaaacatttcatgttaaacatacgcatcttatggatattatttgtgacagtctacargtaattcagtgtttgatttatttctttaaagaagcctatattttgggtttaccattcacagggaaaatcggagcccatacttttttatctttctttattg

SEQ ID NO: 243145 - DNA, 201 bp, Homo sapiens
agacacacatgttacctgatagagctgggcagaggtgcttcagtctcaggctgaaggttctgaagtccagggaagttgggtgctgcccagggttacaagcyatgagtgggagagctcaagtataagacacttaggccagacttcgtttcacaagtccaggctgctcctcaccaaaattctgtgtgtatatatatatttttt

SEQ ID NO: 243146 - DNA, 201 bp, Homo sapiens
gaaagggatttttttctcatatattcactgagagaaactggttgggttcctggaagtaaaacccatgaaaatgtaggattcttctgagactgggcccctgsagttttgtttgtttgtttgttttttgagacagagtcttgttctgtcgcccaggctggaatgcagtggcatgatctcggctcactgcaagctccgcctccc

SEQ ID NO: 243147 - DNA, 201 bp, Homo sapiens
atctcttagattgtattcacccaggaaaaagaaaacatttaaaaaaattggtttcatattaaagaatgtgatccccattctttactactgaaactgccccrgaagtcaggagatgggagtccgttggcacaatcctgtcttttcagtaaaaaaggctactctcatgtactcacatgtactatctagcaattttttaaaatg

SEQ ID NO: 243148 - DNA, 201 bp, Homo sapiens
acacataccctacttatttctgcatcagttgattcatgacataatcaaaatatctctttttcagtttaaaagtttatcatatttgaactttagccaaattrttttcttactaggaataaataaaaataaaaatttcgtatctcggaaaatctaactcttctccattagatagggcctctgtaatatctttcattgtcctgt

SEQ ID NO: 243149 - DNA, 201 bp, Homo sapiens
actcagggcaaagaactgataggcaaatcatatatggataataaactaatagataatagtttcatttctttcttagaagtgtttgccaaatgaccatatawttttacacttatatatttttcaatccctcacaccattaaagataggaatagtacttgattactctgttatattaatattgtaagcagcctgggagttcta

SEQ ID NO: 243150 - DNA, 201 bp, Homo sapiens
ttgcatgtgaaaatgacgtgcttctgtagaagtctatatactcatgacttccttctaaaatgattattgtacagtattctatggacatttgatttgattcktctcacaaaattatcgagacatccactagtgtctacttaattgatggcaaacaagaagaaaactgtaatctggagataactaggtaaaccacatattcta

SEQ ID NO: 243151 - DNA, 201 bp, Homo sapiens
atttaaaaatgtttatctccacaactgatctgaaaagatattcatgtaagatagcttggtctattgtatttgactcagatctacttgaagaagtatagatytatttgttttatatatgaaatctgcagagtgaaaatgatttcaaataattatattcattttcccaagcaattttgagaaattaaaatgaatatagattgt

SEQ ID NO: 243152 - DNA, 201 bp, Homo sapiens
gcctggatagaatgacttttgtggttatgtatgcagcaaacacttttgagtgctggtcatttccctaagctctgagaatgcaaaagtgtgccgtgtccatygtgattattgtggtgaatacagagtgttgtgagagtaaataatgtggagggagtgagaaaagcctcctgtgaggacatttagctgagaaggaagggtaag

SEQ ID NO: 243153 - DNA, 201 bp, Homo sapiens
tttcatttttcaacatcctcatatgcctcctttcttggtaacagctttattgagatataatttacatatcatacagttcaaccatttaaagcatacaattyagtggtcgttagtatattcacagagttgtgcacccatcactacaatcaattttagaacaacttcatcgctattctctttagctgtcacccctaaatccct

SEQ ID NO: 243154 - DNA, 201 bp, Homo sapiens
cctacaccattagcaatgtccaaacttcgaagagtttccatattgctaaatgaagtcataaaatttatattaatgaaaagttgtctttctagtttcttatwatcgagtgtttagaaatctttacaaatcaccagttggttatttttctgttgctcaaatttgtgctctttcacctaaaagaattaggaatccaaatgagat

SEQ ID NO: 243155 - DNA, 201 bp, Homo sapiens
caccattagcaatgtccaaacttcgaagagtttccatattgctaaatgaagtcataaaatttatattaatgaaaagttgtctttctagtttcttataatcsagtgtttagaaatctttacaaatcaccagttggttatttttctgttgctcaaatttgtgctctttcacctaaaagaattaggaatccaaatgagattttg

SEQ ID NO: 243156 - DNA, 201 bp, Homo sapiens
ggggcattatctactgaagctgaatgtccgcctagatcctgaaacagcttagtcttctgttgtcttctttgtggttgaaaatgtttgttgcttttaactcyttgattatcaaaaatttcaaacacaagcaaaaatagagtgaatagtatagagatttcccatgcatctatcacatagcttcaacagctatgacttcagagc

SEQ ID NO: 243157 - DNA, 201 bp, Homo sapiens
taaacaggcagaaaatataatttctttaaaattgcattgcattttaacatactgactaatcagttttactgttgactaattgaataaatatatgaagacartaaaagagacatattattttcccaagtggcagtatatttagaaattatcttacttctatctttacataactgtatggtatacaaggaagcagtaataaac

SEQ ID NO: 243158 - DNA, 201 bp, Homo sapiens
caaacgaagtatgaaattagtttttaaaatgtctatgcctgtaggatggattggcaaggagagccatggaaaaaataaaacaaactcaatggctatttgaraaatgcagacacatggctttgaggcttggcaccaagcgcgggggcagtggcaccattagaaagaagtagacatttctgtgactgtctgcctctgtggaga

SEQ ID NO: 243159 - DNA, 201 bp, Homo sapiens
aatatttgggattgtattttccttaaattttcagcctctaactcagttactttaaaatggaagtgttctttgtggcaaagaaattggagagaggagtgggwggggagggggactggcttaagaaccatgttattattaaaagcagcacataataacagtttgacgtgacatgtaagattttttatcaagtgactttatttt

SEQ ID NO: 243160 - DNA, 201 bp, Homo sapiens
cttgagataattttcaaaagtttttactttccagtcaatgaactttctttgtttagcttgtatttgaattgactgttcttaagtcaatttttatgtgacartgttgctacataggacactcttagtcatatagctatagctgtgagttggtttaaatatcccatataaaaagttataaaaacaaatagtaaagctgttatt

SEQ ID NO: 243161 - DNA, 201 bp, Homo sapiens
caccattccacataaacagaccggttatattaaaactagcaaagccgtattttgtctgtgcttgctagaaaataaattttgcatatattctagaagacaargatgattttgtatatgtaattgacaaaaaatacttctaggaaaaatataattattgtattaaaggttatgaaatggcagttgaaacccctaaagtcatgg

SEQ ID NO: 243162 - DNA, 201 bp, Homo sapiens
tgtaaagtttgaacctactttctagaagacgtgaacaaattgactttgccttcatttgtttcagtttcttcatctaaatgtctagtctgtaaggcagtagkaattgtatgatgaagtcattctgtaaagctagaaacaaaccttctagaaggcatagacagtgtctagtctatagtacagtgtttggggcctagggagtgc

SEQ ID NO: 243163 - DNA, 201 bp, Homo sapiens
ttagtagagatggggtttcaccgtgttagccaggatggtctcgatatcctgaccttgtgatctgcccacctcgggctcccaaagtgctgggattaaaggcktgaaccaccgcgcccggccggaatgagactcttacatttacgttgaaaagcataggtgctggagtccatggtaagattattagctgactaccaaatttca

SEQ ID NO: 243164 - DNA, 201 bp, Homo sapiens
cctggaacacaagccagggcagtgctgagagctacagcttcgaaagcacagcagcatatgtttatagaatttattttgtgaatgagtttattttgggaatktaagttactgactctctggtactggcgaatatgtatctggaaaaactctctaagaaaaatattaaactattcccagaagattcaaagtgaatcaattagt

SEQ ID NO: 243165 - DNA, 201 bp, Homo sapiens
cattggatgaataaaccaatgtggtttggattaaagtttcatttttctttgcttccattttggtgtggatgaggccatcacaattaatttttcaagtttarcattgctttgccaacgggatttgtagtactccatttctacattgaatactgggaaattttaaggaaaagaggccaggacaaggaatcacttctagattaa

SEQ ID NO: 243166 - DNA, 201 bp, Homo sapiens
agtcttccatagcagccagaatgatcatttcaaatgcaaaccaaatcatgttatggttaaaacaccctacttgctccctcttgtttgtaggataaaatccraacacttttacatggcctacaaggctgtcatgatctgattcttgcctcctcccttgccttcatcatctcctcccttccctctctctctaggctccagcca

SEQ ID NO: 243167 - DNA, 201 bp, Homo sapiens
tcctttctagctgtctgatactctgttaagatgacttacatgaaaaaaagacaaacagacaaacacaaagctgtaaggtttagaaaatgcttcttatctartgagagatacaatttatcaatttttttaaacagaatttttaggcattatatcatttgcttgctggatacatcaagtttcacaaataatttaaaaattaca

SEQ ID NO: 243168 - DNA, 201 bp, Homo sapiens
gtgtgatggaggacacagtggataattgcaggagtggaagggatccagagtgtaagccaaggggttgactgagataggagtgcagacatttcactcattgmaacagcaggaggggtggatgggatagcttcataaatgtgctggtagcaggaggctgagtttctcttctgatgcttccattttctcaatgaaatgagaagc

SEQ ID NO: 243169 - DNA, 201 bp, Homo sapiens
ggaataactattgaacaaataagacagacactgtcaagaacgggcaggactttgcaaggtgataattaagactagttaatatttatgtggaaaagttctgrctgggcatttggaacataataatatgaacaatataatataataaatatagcatacatttgcatttatttgcaacctcagacaagcaagatgagtccaaat

SEQ ID NO: 243170 - DNA, 201 bp, Homo sapiens
gtcaagaacgggcaggactttgcaaggtgataattaagactagttaatatttatgtggaaaagttctgactgggcatttggaacataataatatgaacaayataatataataaatatagcatacatttgcatttatttgcaacctcagacaagcaagatgagtccaaataaagctagcttcatcatagtcctttcttacat

SEQ ID NO: 243171 - DNA, 201 bp, Homo sapiens
aagcttaagttagccaaattatggactgacttacaactctgaaaagtttcaaacaaataaacacttaaaaactttgggtgaagtaaaaggcgagagtctasctattactaagattttttgttcaggtaccaagacctgtcagctagttgtctggtctatggtgttcccacaccacagtccatttccttctaggatgttagt

SEQ ID NO: 243172 - DNA, 201 bp, Homo sapiens
ataataatatgaacaatataatataataaatatagcatacatttgcatttatttgcaacctcagacaagcaagatgagtccaaataaagctagcttcatcrtagtcctttcttacatgtgtcacaaggtcttgagatcagtttaaaaaacatgttttatttacaactaatgtgaatactaatatttgctgtcatcagattc

SEQ ID NO: 243173 - DNA, 201 bp, Homo sapiens
attttatttgccttatcagtctggctagaggtttatcaattttattgatcttctaccagcctttagttttgttaatattcgttactttttttctgtttccyattttactgacttcatcattattatttctcttttttctccagacaatatgttttatttgctcttatttttctagttttcaaagtggaagctgaggtcata

SEQ ID NO: 243174 - DNA, 201 bp, Homo sapiens
gacaaatgtctatacctgactatcaccacaaattataaaatatttaaatcaccccagaaagttccttcatgtccctggtagtagacctagatcataggcaracactgatctgttttttcatcataatctatttgttcctattatagaactttatataaatggcagtatagagtatgtggtcttttctatgtggcttctttc

SEQ ID NO: 243175 - DNA, 201 bp, Homo sapiens
aaatgtttatctccacaactgatctgaaaagatattcatgtaagatagcttggtctattgtatttgactcagatctacttgaagaagtatagatttatttrttttatatatgaaatctgcagagtgaaaatgatttcaaataattatattcattttcccaagcaattttgagaaattaaaatgaatatagattgtaaaaac

SEQ ID NO: 243176 - DNA, 201 bp, Homo sapiens
aaaataaaatcaattatgaataagaatttattattcgccatctagcatatattgaaggcactaggaaaggatgtttaactattgcaaaacaacctgtggcyttttaatttaaatagcccacatatttttgcatttctactaaaagatgataagtattataaaataccttaatagaaggctatgcaaaggcaaggataattg

SEQ ID NO: 243177 - DNA, 201 bp, Homo sapiens
gtgtaagctattcacactgtaagacctaaactcagatacagcctacttttaggagatgtgaaactatcaattcttccattttcactggtggcaccacttcwtggaaaagcgtatttaagccctggtttcccattacaggaattgaaatattctgtgctttatttcttgagacatgtctaccaggcatcatgtaacagactg

SEQ ID NO: 243178 - DNA, 201 bp, Homo sapiens
tatgaataagaatttattattcgccatctagcatatattgaaggcactaggaaaggatgtttaactattgcaaaacaacctgtggctttttaatttaaatrgcccacatatttttgcatttctactaaaagatgataagtattataaaataccttaatagaaggctatgcaaaggcaaggataattgagttttatgtattg

SEQ ID NO: 243179 - DNA, 201 bp, Homo sapiens
ttatgtttttatttaacaaagtgagataaattcattagtgaatgcagcagggcatacctgcaaattctgtcataggtagcaggaaataaagcaaagcattktttataaaaagacctctttgttatggttctgtccactcaaagcaaactgatgggggcatggaaaagatcttattacttttgactattttggaagagcata

SEQ ID NO: 243180 - DNA, 201 bp, Homo sapiens
taagaatttattattcgccatctagcatatattgaaggcactaggaaaggatgtttaactattgcaaaacaacctgtggctttttaatttaaatagcccamatatttttgcatttctactaaaagatgataagtattataaaataccttaatagaaggctatgcaaaggcaaggataattgagttttatgtattgcatcag

SEQ ID NO: 243181 - DNA, 201 bp, Homo sapiens
aaatggtacttcttgaaagataccataaaataatagaacagtttatacttaagtactatggtatgataatgggcttatgctgtttgttagcaaagagttgrtgttatttgttgtttcttggaaatgaaagggagaaacagataatattcctttctaataaatggattattctattctaccctattctattagacaatttta

SEQ ID NO: 243182 - DNA, 201 bp, Homo sapiens
tttaaatagcccacatatttttgcatttctactaaaagatgataagtattataaaataccttaatagaaggctatgcaaaggcaaggataattgagttttrtgtattgcatcagaattccaccctattatctgcaaatcagagtgtcttataaataaacttttctaggatgaaagaaagcaaaatgtgagcctctatgtta

SEQ ID NO: 243183 - DNA, 201 bp, Homo sapiens
ggtcttagggcagtgaatggcattcaagaatctaaggagttactaaaaggaaagaaaaatatggattccccttatggcaggaggttactgatgagtgatayagttacattcacagagaaagacttctatcctgctgagcacagagcctttgaatatatccttaccactgggagattgaaaactgactgcagaactgataac

SEQ ID NO: 243184 - DNA, 201 bp, Homo sapiens
acttaacaactattatattttcttttcattaatccttgtactatatttgcatgagtagaattttgtaaggttgtaagctctaggttactggaagaaacagragtccgattgatttgttctgagaaaaatgactggataacaaagctaggcatatagagttgaatttaaatccttgagatgatctaacctgataatgtaaca

SEQ ID NO: 243185 - DNA, 201 bp, Homo sapiens
ccctggtcttttctagaggtattttttctgtatttgatcagtatttcatgtttcttccttttatgttgaaaatctgatatttatgaagtgtctggctgttratctgtaaaaccaaacattttcaagcatcgtagcaataaagttcttgaacagccattaatactttagtatctctatagaggtttcaaaatattccttaat

SEQ ID NO: 243186 - DNA, 201 bp, Homo sapiens
caaagagttggtgttatttgttgtttcttggaaatgaaagggagaaacagataatattcctttctaataaatggattattctattctaccctattctattrgacaattttatatccaaacaattactgaactctatttttcatatttcacagagttgtacgcaagatctagatttgaatatgaaatctgatacctccgtgg

SEQ ID NO: 243187 - DNA, 201 bp, Homo sapiens
tgctttctatactctatctaaaatacttagagatgcccttcattaattacaaaataggtggaacactcagcttttataaatataatccatttggtgtattyccaattccattatgagaaaatttagacatatatttgcactaaaagaataacactgaaatgttgtcaaataatttttacttcaatgtttattgtatttcag

SEQ ID NO: 243188 - DNA, 201 bp, Homo sapiens
gtaaagaacacatacgtacccaaatctcttccagtgatttctcaaaaggtgagctctctgctttaaaaatagaacattgatgattcagtgcccaatatttrttagtatgaacttaaaaaatattgattgattgataactaatagcaaaatttggttgttgggtagatatctgcagtctgctgaaaatcaaaatgttatggt

SEQ ID NO: 243189 - DNA, 201 bp, Homo sapiens
aatggattattctattctaccctattctattagacaattttatatccaaacaattactgaactctatttttcatatttcacagagttgtacgcaagatctrgatttgaatatgaaatctgatacctccgtgggccagtcgaaaaaagcattttgatatcattagatgagagacattatagacatattagttctagagaaag

SEQ ID NO: 243190 - DNA, 201 bp, Homo sapiens
tcccaattccattatgagaaaatttagacatatatttgcactaaaagaataacactgaaatgttgtcaaataatttttacttcaatgtttattgtatttcrgtgactcaaaagtatttacaaacaaagcgaacaataaaattttaccataataaaacatatgtgatgattggggaaactgtttaagatagcttgtgtaaag

SEQ ID NO: 243191 - DNA, 201 bp, Homo sapiens
ctattgactggaggccttagttcctcactggctattggcaaaagatgttggtttttttgccatgtgggccacttcttgctgcagagtgagtgatccaagayagagtaaagtggaagctacaatgtcttttatgaactactttcagaagttacatactggctgggtgcagtgacttgtgcctataattctagcagtttggga

SEQ ID NO: 243192 - DNA, 201 bp, Homo sapiens
gtgatcacttgtctgtgaaatccatttccttctaaactcttaatgagtaccccacccagcttggagcattactgatgatccaataatgccataatttctcragaccaatatgtgttggttcagcggtatatttattttcgatgtttctcttaaaaatatcaaatatttaaatgtctgttagctctggttgctaaattagag

SEQ ID NO: 243193 - DNA, 201 bp, Homo sapiens
tatgggactttttttcattgccagaggaaagagtgaacttaaaccagatttggatcgctctgtctctttctttctttaatccagtgatttggtttgttcartagtgactttagataattgaattctcagttactagaaattattagtaagatttctggcttgatttattatatcttttaaaattataactgtagccctggt

SEQ ID NO: 243194 - DNA, 201 bp, Homo sapiens
tccttccactttttactatcccatctaaatttggcattttatgggactttttttcattgccagaggaaagagtgaacttaaaccagatttggatcgctctstctctttctttctttaatccagtgatttggtttgttcagtagtgactttagataattgaattctcagttactagaaattattagtaagatttctggcttg

SEQ ID NO: 243195 - DNA, 201 bp, Homo sapiens
tagacaatttttaaaacaaccaggctacatgtaggattctttagtagtagatgtggtgtttgattaatgcctcattctaaaatatttcctaaaattaaagsttaagttaccaaatctcttttaaaaagtatctgacacggctgggcatggtagcttacgcctgtaattccagcactttgggaggcaaaggctggtggatca

SEQ ID NO: 243196 - DNA, 201 bp, Homo sapiens
gctgatagacaatttttaaaacaaccaggctacatgtaggattctttagtagtagatgtggtgtttgattaatgcctcattctaaaatatttcctaaaatwaaaggttaagttaccaaatctcttttaaaaagtatctgacacggctgggcatggtagcttacgcctgtaattccagcactttgggaggcaaaggctggtg

SEQ ID NO: 243197 - DNA, 201 bp, Homo sapiens
caacagaagagtctttttacttggtgggtgatatttgtggcttcctcttagttattgaatatttcctgtagtgtcagacatccagaagctagctaggttcmaagtcgcgccctccctccccctcaccccccagtaagcagggacttccgacatagcatttcctggacactggctctctggctaatctttcatccggtactc

SEQ ID NO: 243198 - DNA, 201 bp, Homo sapiens
ttgcagcactgactgatagtctctgtccctctctctctctgaataatgagcggatgtttgttacccagtgtccttattcctggcatcccagccaaaactasgaatttttctttaatatcttgctcgtttctatgctgttgcatattctttcttaaacagccaattaaatgggttcctacaactttgtagtcaaaatttagg

SEQ ID NO: 243199 - DNA, 201 bp, Homo sapiens
tgggacatcaaataagtaaaatcttaacatgaaatgaatcttcagaatatgttcataaatttacattttaaacataaccagataatatatatctttacccrttattaaggtgatactttaatgaaaatttttcatttgcatgaaataaacctttttggctacagatgaaaggactttatggtagcgacaatggttctgtga

SEQ ID NO: 243200 - DNA, 201 bp, Homo sapiens
ttaatatcttgctcgtttctatgctgttgcatattctttcttaaacagccaattaaatgggttcctacaactttgtagtcaaaatttaggactataatatkgtctcttttctccagaatctcagtagtgtccaaagtactatgtattaaagaaaagaagagctgattagtattcagaattgggacaaaagtcctgcaaata

SEQ ID NO: 243201 - DNA, 201 bp, Homo sapiens
ctgttattgaaaatttacaaattcaaaagatggggcaactgaggctttaaggaattaagtaacttatctgtcatcgtcattgctcctcattgccccaaagkagagagaacatctcaattcaacaaatcatattgattccaccttctaaatatctcaggggtccaccttcctctctccaacccactgctgcaactctggttc

SEQ ID NO: 243202 - DNA, 201 bp, Homo sapiens
actcatcttctgaatatcttctgcaggtgtagtaataattttcagtatgtctggatgcctagaatatgtttagcagtgtcctaagtattttaagtggatcmtctcatttaatttcgacaacaatctctatgcagtagatactactgttattgaaaatttacaaattcaaaagatggggcaactgaggctttaaggaattaa

SEQ ID NO: 243203 - DNA, 201 bp, Homo sapiens
agtttgtggccagaaagacttgagcctttttcatttggtgtgttatatttatttggacttgaacttcttccccacacatctctcactcctcaccctcaccyccatctttgaacatgattttctacttatattggccacaatgtcttttttaaaaacattgttcaaaaaggatactagatattctatagcagatatatcata

SEQ ID NO: 243204 - DNA, 201 bp, Homo sapiens
atgttttacaaactgtaatctgacatgccaaaaagacatttcaaaattctcatgtccaatacagacattgattctgttgtggcgtctgatttaaaaaaaamcaaaacaaacaaaaaaaaaaaacacaactgtactatagtaccacagtacaccagtactatgaaactcaactggttagtcttaacatgtattttcagataa

SEQ ID NO: 243205 - DNA, 201 bp, Homo sapiens
tatagttcatttataaattattttcccattttcattaaagtgacacataaagtaccatcaatgcaaacttctggtcaatccatggcaaaataaccaatgtragcaacccaagattgatatcagtctgcatgcacaggcacaggcacatgcacatggacattcaactcagatgaccagcaaggacatttaagtatatgaagc

SEQ ID NO: 243206 - DNA, 201 bp, Homo sapiens
taacatacaattgctgtctaatttaatctaaattaaatggttgcttgtaacttacaattcggagggttcctgaacctcgacttatggcaggaaaaataagragtcatcagttttgcccagagggtagatacttatcttttaaaatcaggtattttggtcttgaaattaaaaaccctggtcatttgggaaatgcaattccaa

SEQ ID NO: 243207 - DNA, 201 bp, Homo sapiens
tgcgtagcttttctaccaaatggatgcgacatattttgctgagacatttccttgtagttggtgatttcaataacaatactagaactctagtaaataatacracattgaactgtttttttccctattcagtattatctcctggagatataatcctagagttggcaaacctgaatcaaatggtagaaatatgtaacacttctt

SEQ ID NO: 243208 - DNA, 201 bp, Homo sapiens
atgactgataccagtaaacaattgaagtcacctgtttgtaaaaggaaattgtggaggattcatggcagagtgcaaattgctgaatgaaaattagcctatgscccatttatcaaaactaatgtacaaatgactttatatcatcattgtaaagaaatggctagagtcattggcataaaatttgttgtacagggtcttatactt

SEQ ID NO: 243209 - DNA, 201 bp, Homo sapiens
aaggaaatggagaggttatggaattaaaaacaacaacaataacaaaaaacaaagaaagaaaggaaaacacaagattttattgagctcctgtgcataattcrgagtattcttcccatctcaaagtctttaatctcaatcacatctgcaaagtcttttttgctatttaaggtaacattcacagattctgggagttagtatgtg

SEQ ID NO: 243210 - DNA, 201 bp, Homo sapiens
tttctattgctatccaatattgtactgcaagcctagttagagaaattagacaagaaaaagaagtgaaaggcatccaaattagaaagaaagtagtaaaattrtctctgtttgaatacgacatagttctatgtatagaaaaccctaaagactcaccaaaatactgttagaactaataaatttgggaaagttataggatacaaa

SEQ ID NO: 243211 - DNA, 201 bp, Homo sapiens
gatgaatgagttgacagatgttgcagtcagattgctttcacataccaatctttctattgctatccaatattgtactgcaagcctagttagagaaattagayaagaaaaagaagtgaaaggcatccaaattagaaagaaagtagtaaaattgtctctgtttgaatacgacatagttctatgtatagaaaaccctaaagactc

SEQ ID NO: 243212 - DNA, 201 bp, Homo sapiens
gcttaggcttataacgatatttgctcaaaatcttattcaagattgacgaacactggagcatttttatatagcttagtactctatcttggttacattgtttygactaaacttgtcaaagtttatttttattgaaatatacttcttttaatgaatcttatactagttttctcagaattgagaagtaatatggccattgtaatt

SEQ ID NO: 243213 - DNA, 201 bp, Homo sapiens
tgactgataccagtaaacaattgaagtcacctgtttgtaaaaggaaattgtggaggattcatggcagagtgcaaattgctgaatgaaaattagcctatggsccatttatcaaaactaatgtacaaatgactttatatcatcattgtaaagaaatggctagagtcattggcataaaatttgttgtacagggtcttatacttt

SEQ ID NO: 243214 - DNA, 201 bp, Homo sapiens
cacacataccacttggaaatttgggtcctcaatcttgagcgattaatttaacctctctaggccacgattccctcatctgtcaaatgaggataataattgcrcttggtttgcacagttatttttagaattcaattaaataatgcatgtaaagcacttaggatcatacctaggatttaaggagtgcttactcttgactgtatg

SEQ ID NO: 243215 - DNA, 201 bp, Homo sapiens
taacttcctatcctaattttagattctctcctacgtgattttgttcatttgccccatctgctctccaccaagaagaagcatgagcctagaagacccatttyatatttcatttctgaagagtctacatgtactatttgtgagaaagggtaaattagtcaccttatatgaagagagctgtttttaaaaaacaaacatggtgta

SEQ ID NO: 243216 - DNA, 201 bp, Homo sapiens
ataatacacccaaacctcattaacactgtttacagttaattatgatttagtatctctctctgtctgatataacccaatgggatttagttaatcaagtaccraagatgacttcattaccaggcagtctttacctgtgaatcagtagattcacagattggagagtacagccatagtgaatttaagaaaaacaaaaacaaaaac

SEQ ID NO: 243217 - DNA, 201 bp, Homo sapiens
ctgggactttaactgggattatgctgaatctaaaggtcaagttgagaatagccatctgaacaatactgagtttttctatccatgaatacgaataattcttycatttagattttctttgatttctttcatcaaagttttctagtttttctcatttacatcctctacataatttgtttgatttatactttcctaatttttttg

SEQ ID NO: 243218 - DNA, 201 bp, Homo sapiens
tttgatttatactttcctaatttttttggtattgatgtaaatgttactgtgttttaaatttcaaattcaaatggttcattgctggcatataggaaagcagytgacttttgtatattaactttctatcttgccaattggtataacagcttattcattgccagagttgtttgttgtcattggttctttgggattttctgcata

SEQ ID NO: 243219 - DNA, 201 bp, Homo sapiens
ttttagggcatgccaatttattttaccagtttcttaacattattttataattgggttgttttgagcatttgactattataaattataatatttcttgtctrcaaatccttgagcacatctcctgccatttacctaaaatagattcctagaaatgttactcctgggtcaaggcatgtaaacattttaaggctttttacacat

SEQ ID NO: 243220 - DNA, 201 bp, Homo sapiens
ctagtattttgtggaagattttaaaatctatattcaggagagataattgatcaatggctatctattcctataatgtctgtatctgattttggcagtatggwaatgctgtcctcatagaaagagttaggaagtagtcctcctattttctggaagagattagagtattgataccatttacactttaagtatttggtaaaattt

SEQ ID NO: 243221 - DNA, 201 bp, Homo sapiens
ctattataaattataatatttcttgtctacaaatccttgagcacatctcctgccatttacctaaaatagattcctagaaatgttactcctgggtcaaggcrtgtaaacattttaaggctttttacacataatgtcaaaatattctgcagaaatttgtacccaaatttatactagtattgccataacaaaatgatgcctaac

SEQ ID NO: 243222 - DNA, 201 bp, Homo sapiens
ttaccagtacactcaaagagaaattttaaaaacagaatcccgatcagctggtctgatatgctcaattagtttttggatagtaggcagttatattatacatraaacatttttctctgtatgattttttattttgttatagtttcctaaaatagttatatttataaaacttaagtaaaaatctaatatttgatcaactacttt

SEQ ID NO: 243223 - DNA, 201 bp, Homo sapiens
gttttatttagagtcatgttatttaatttctaattacttgagtatttgctagctgtctttctgttatttattttaatctttctgttattgatttctattgkgggctgagaaaatactgtgtacacattctgttcctttagatttgttgaggtacatcttatgcctcagaatgtattctgttttggtcagtagtactaaagt

SEQ ID NO: 243224 - DNA, 201 bp, Homo sapiens
tcttcatagtgaggcacatgtaataggttcctaatagattgattgatactttaattcagcagttgaacagttgaaccaccgtacttcttgaggaactactrtttcatattttcagattataggcattcttgagtgaaagcaaagatccaagccacccgaggaatatagctgggaaaagacattaagatgttattattatta

SEQ ID NO: 243225 - DNA, 201 bp, Homo sapiens
aagtgtctggctgttgatctgtaaaaccaaacattttcaagcatcgtagcaataaagttcttgaacagccattaatactttagtatctctatagaggtttyaaaatattccttaattcaattccaattgtctgtttaagaaaaataagatgtaattaaatacagatgctttctatactctatctaaaatacttagagatgc

SEQ ID NO: 243226 - DNA, 201 bp, Homo sapiens
agattaattttttatttatgtttgttttcttatttgacccattggtttcccagaaatatgttgcttaattgtcacatatttgtgaatttccaattttcctctggttattgattcctagtttcatactcttgtggtcagaaaagatacttggtgtgatttcagtcttcataaatctgttaagacttgttttgtgacctaatg

SEQ ID NO: 243227 - DNA, 201 bp, Homo sapiens
ccttgcagtttgatctcagactgctgagctagcagtcagcgagattctgtgggcgtaggaccctccgagccatgtgcgggatataatctcctggtgcgccrttttttaagcccgtaggaaaagcgcagtatttgggtgggagtgacctgattttccaggtgccgtctgtcacccctttgactaggaaagagaactccctgg

SEQ ID NO: 243228 - DNA, 201 bp, Homo sapiens
aagtgtttgacctaaaatgtcaccgccttacccgaaatactctatctttaccattatgaaggttttatagcattttatataagttggatattgggcttcamtcacaagtagaccatggcttaagatgaaagacctctggcataataaaggaaagactcccttttcatgtcccacacctccaacttggaaaggtaggaaaat

SEQ ID NO: 243229 - DNA, 201 bp, Homo sapiens
ggtatatctcccaatgctatccctacccccccaaccccacaacagaccccagagtgcgatgttccccttcctgtgtccatgtgttctcattgttcaattcscacctatgagtgagaatatgcggtgtttggttttttgttcttgcgatagtttactgagaatgatgttttccaatttcatccatgtccatacaaaggacat

SEQ ID NO: 243230 - DNA, 201 bp, Homo sapiens
caatgaatttgaagttggaaattattaggatgagttacacaactcttttgacacatggtgataatgataaaagctttattcctttaatagtcactatgaawttcttttgtcacctattattaattaggtaattttgaacacccagttgctattattttctgaagctataatacttgtgattgggataagtgaaatgctgat

SEQ ID NO: 243231 - DNA, 201 bp, Homo sapiens
tctccagcaaccatttgctgcttttactgtgtcctttcattggacaaagtaaataagtacatttttttcatgtattcaccttaactttgggtgttactatmcccgatttattgaagaagaaagggagactcagggaaattaaaaatatgtctgagatgacactgatgaccgtgagagagatgaaattcaggcccccaaatc

SEQ ID NO: 243232 - DNA, 201 bp, Homo sapiens
tagtaaacatgagctgaaatgctttcaaagctcgcaaatatgaaatcatcttatgttacttaggaaagagcaaggagaaggtccaagcactgatctctccrctcagacactgtcatggtttttgcagtcagtcatgagggagaactcaggatcaagcatgggcactgcacaattgaagcatccctctggacctctggatat

SEQ ID NO: 243233 - DNA, 201 bp, Homo sapiens; identical to SEQ ID NO: 47713

SEQ ID NO: 243234 - DNA, 201 bp, Homo sapiens; identical to SEQ ID NO: 47715

SEQ ID NO: 243235 - DNA, 201 bp, Homo sapiens
aaatttaaggtacatttttgtctttatgccaagagaactggttactttaagagctaaaccctatattgctatggcttttatcaaaaagattccatttactrtattgctctggattttcctgttcctttcttgttttcagaaaaccgcaacaaactattttttttttaagttgaataaaataaaagtagaatgcctcacttt

SEQ ID NO: 243236 - DNA, 201 bp, Homo sapiens
cctaactttgctcaacttaaaaaattatttttaaaaagcttaacacaatcccttgaacataacaagcactcaataaatattaaaatgaataatattccaartgtcgtaataattatgtctattacagtgagatcttgaaatacaagtagaaagtgacagcacataaatttaaagagaaaatagtaattaaatgatctcccc

SEQ ID NO: 243237 - DNA, 201 bp, Homo sapiens
caatagacataagtaacccccatagcacaaataatagcaaatatagtaaaataattcagaaataatgaatttggggtacataatgcctttgtttctaatayaatttttaagttgtaagtttatataatttaacatttataatggtgtttaaaccaggctcacaaatttctgaagatttagctgtcagttcttgcaagtcag

SEQ ID NO: 243238 - DNA, 201 bp, Homo sapiens
atatgagaaatacgtctttgttgtttgtaagctacccagtttatggtattttgttacagcagcccagacagacgaaggcattccacccggctattcattcrtttcaggttttcaatgtggaagtaactagcacagctgagacaagacatgcaacagcaatccatagtccagtatttcaactctatctgtacaatagacata

SEQ ID NO: 243239 - DNA, 201 bp, Homo sapiens
gagaagttaaaaccctagaagataagaatttaaaaagataatatattgactagcagtgaatggattaaaaaacagttggaagttaaggatgaagcatccaygattcaatataagtactcattgtaaattgtaaattagctctttcaataattctggtacagaagacaattagtaatttgcaggtaaatatttaaaaagtag

SEQ ID NO: 243240 - DNA, 201 bp, Homo sapiens
gagaaaggggaagaaagaatatttgaagaaattacggctgaatatttcccaaattcaataaaaacattaatcaacatattcatgaagctcagtgctccaamtaggataaactcagagatccatacctagacgcaccataatgaaaccattgaaatccaatgatgagaaaaaaatcttaaaaacagcaaaagagaagcaact

SEQ ID NO: 243241 - DNA, 201 bp, Homo sapiens
ttttcagtaaataccacaattttatttttaggtgtatgcagcatgaaatgtatgtgtgtatgtgtgtgcctgcgtgtctgtgtgtgtgtgtgtgtgtgtgwgagagagagagagagagacagagagagtttgagagatagaacagagagattgattaattggttgattgattagttggttagttggagcttttcccagaaa

SEQ ID NO: 243242 - DNA, 201 bp, Homo sapiens
ttccatgaaagaacttaaaaaatgagctatgctttattgttcttttctttttatggtctcttcttttctacatcgtatgaaaagaacaatgtccaaacccyagcgtttcccagtctaaacaatttataaaagctagagacctgacagacgttgacattttatttggtattttaacagtgctatttaaaggtacgccatgtg

SEQ ID NO: 243243 - DNA, 201 bp, Homo sapiens
ttggaagagcatactgttggtattattttcatttgcagctataaaatggtacttcttgaaagataccataaaataatagaacagtttatacttaagtactrtggtatgataatgggcttatgctgtttgttagcaaagagttggtgttatttgttgtttcttggaaatgaaagggagaaacagataatattcctttctaat

SEQ ID NO: 243244 - DNA, 201 bp, Homo sapiens
atggatgtattgcaggacccaaacaggggtggtgtttggagtttagatagtttagccacagtaaagccctgcaaagaacagtatcactataggattctttkgttctcatccttaattcattccctcgacaaaatttgttaagcatctattatgtgtcagaccttgaagaaagagcagtaaagacagacacccataacccta

SEQ ID NO: 243245 - DNA, 201 bp, Homo sapiens
gggttttatgtgcagtaatgctctccctccaaattttgacaataacccagagcaagcctaggctcaccttttcacagtttaacaacgatagcaaaaacaarcactctttccccggtcattctgataaattcccaggaccatctcattcggacagcttatctcacttgcgccctctagacgtttagatggagtttgcagttt

SEQ ID NO: 243246 - DNA, 201 bp, Homo sapiens
gaagttagtctccctcagaggaatccaacttgattttttctgagggatataatatctagtcacagggctgttcctttgcttcctgaggaagtgaaattcaytaaattgggtagtgaccttccatatttaaagatacagttacagcttgctttagtaaaaatgttaacaaccttggaaaatgcaaaatatctgatctcaaga

SEQ ID NO: 243247 - DNA, 201 bp, Homo sapiens
tttggaagagcatactgttggtattattttcatttgcagctataaaatggtacttcttgaaagataccataaaataatagaacagtttatacttaagtacwatggtatgataatgggcttatgctgtttgttagcaaagagttggtgttatttgttgtttcttggaaatgaaagggagaaacagataatattcctttctaa

SEQ ID NO: 243248 - DNA, 201 bp, Homo sapiens
ttcctttaatttgcctttgctgctgtgctattcccatgtacacattgcacctccataataatcaagtttattcagaagcaggatttgtgttttattttggrggcctcaacagtgcaaatgatatattctttcctattacattctttcctgtttatttaaaaaccgctgctaacaacacaatagagtcatgtgaaatccttc

SEQ ID NO: 243249 - DNA, 201 bp, Homo sapiens
gctccttagtgtcaaaatatataaaatctaattcataacattaaaggttcattttatcccagccagaagaggcatacattgtattatttattgtagtatgycaagtagtacttttgaaaatatgtaccttttgtataattatgaaacttttaattagagtaacctgtgtattttgattaactagactggaggatctactgt

SEQ ID NO: 243250 - DNA, 201 bp, Homo sapiens
caccctcactactgagattttaatatctctcatgacccaaaacctgaaatacaggcagaaggttttgctagaaacattaagtaggggcctttctttagagragttgtatactgtatattttgttaacataaatctatgttgtgctttacagtatgtcagagattccttattttcaaaaccttatgtcctcagatcatcaca

SEQ ID NO: 243251 - DNA, 201 bp, Homo sapiens
aggtttaatgatataaagtaattcatccaggcatctatttgactccaggcacaatgaaggtatcatcttagttggtctgtgtgaatgaactgatgttcagyaagactgtgaattattcaaggttactgattttagtaggtggtagatacaagactaaaacccagttctcattcctcttctggtgtttgcttttttatgttg

SEQ ID NO: 243252 - DNA, 201 bp, Homo sapiens
tgcagactgaattcacatccctcaatgaaaatgcatggtcttttctagtccacccactgccttttgaagtgatcaattgatttactccctatggactgccmgtttgcagcatttaatccattaggttgcattataaaatcatatctccatctaagttctgagaatctatgatttcctatggttattagcaaggctacagag

SEQ ID NO: 243253 - DNA, 201 bp, Homo sapiens
ccacgaactcctcatccaatttaagaattgaactttgctcacaatattaaaattctctcagtacttatctcattcctatattttaaaaccagatagtcatwaatctattatatttttttaaattatggccctgcgcagtggttcatgcctgtaatcccagcactttgggaggctgaggcgggtggatgacttgaggtctgg

SEQ ID NO: 243254 - DNA, 201 bp, Homo sapiens
cacagagatgcaatccaatgtttccattcttctaaagtataattattttgaaataagtggtattattttaaaaatagtgaagctctgtaataagcttcacwgtttagaatatgaaataaatggtaacatacatgtgaataatgtgcatttgtattatggaatatataacctaactcagaaccttcaattcgaagacttagc

SEQ ID NO: 243255 - DNA, 201 bp, Homo sapiens
gataaacaggatgatgaataatacaactatggagatttaaattagaagaaaaaatcttctttatctttttttattgtaagatttattaatacaaatctgtrttgttattcagttctagaatgttctaatatgcttcttccatccaaagttatgattacttctttacctcatataatattattacattttcttacaataaaa

SEQ ID NO: 243256 - DNA, 201 bp, Homo sapiens
ttcttgaaaggaaattatattgaaaactcacaagtagttcaataaaccttgctatgcattcaccaactgtgttaaacaggaaatgaatgaaaaaacagaastatgtgtcaatcaaggcataactagggaacaccaaagctcaccttattcttttcaggaacaggcagtccattttgggaatgccaaccaggagaatataat

SEQ ID NO: 243257 - DNA, 201 bp, Homo sapiens
aaatcacttttgccatgtaaggtaacatattcacacgttccaaggattaggaagtggatagctttggggactattattcttcctaccacagaaacaaacaygaacaatcaactataataaatgacaagtctttgataagattgaaatagggtcctgcaaaatgaaaaaaaaagcaaaacaaaacgccttataggccaagga

SEQ ID NO: 243258 - DNA, 201 bp, Homo sapiens
aaaaatttcaaacttattaaccatacaattaagttttcaagattataggcaattctatcaaaaagcctaaagtatttagaccccgttgaaacaaaaaatayatttttcataagaatatcagtatattgtatcagtgagtgatagagctacaaaactgattaacatgtgtgatattcagcaggaataataattctgcttgtg

SEQ ID NO: 243259 - DNA, 201 bp, Homo sapiens
  misc_feature (1)...(201): n = A,T,C or G
tctttatatgtgattatattatctgcaagcagggagtttgactttctcctttcccatgtgaatgccttttatgtttttctcttgcctaattgctctgactnggacttctagtactaggttgaataagaatggtgaaagttagcatccttgtatcattccagttcttacagaaaaagctttcagcattcagtatagtattca

SEQ ID NO: 243260 - DNA, 201 bp, Homo sapiens
tggcaccagagtccctgttctcaacctttaccattgtgctgtgttggtgcaacgattctttatatctgcccgatatgcttacttctgtccaatttattcarttgtttctctctctctcctcattagcatttaccaaactgtcttgatcaataatctttttttaatagcttctataaattgtgagattagtgattagtactc

SEQ ID NO: 243261 - DNA, 201 bp, Homo sapiens
ctatctacctgtaattttgtatctattaaccaaccttttcctatttctccctctctccactcacttcccaacttctggtaaacactattctactctctacwtccatgacatcaactcttttggcttccacatgtaagtgagattgtgcggtatttattttttttgtgcctgcattattttacttaacataatgttctcttg

SEQ ID NO: 243262 - DNA, 201 bp, Homo sapiens
ttgcctattgtggatatttcatataaatgaagtcatgcattatgtggccttttgtgcctggcttctttccttatgcagaagattttcagggttcatccacrgcatcagtacttcattccttcttatggctgagtaatattcccttgtatggctatacaacattttgcttattcattcatcagttgaacacacagttttcac

SEQ ID NO: 243263 - DNA, 201 bp, Homo sapiens
tttcaaaaaagacagcatgttccttcaactaagtttattcagaaaatggcctgtattcattaaaagaccttggctgagttctttggacctgtgaggccttrgttttattgtcagtaaaataaagagttgggcctagattggtttttagtaaggtgattggtgcaagaccttttcaaatgatattgtttctttatatcagaa

SEQ ID NO: 243264 - DNA, 201 bp, Homo sapiens
ttgtaaaacgctagaaggtattcctcctatctacctgtaattttgtatctattaaccaaccttttcctatttctccctctctccactcacttcccaacttytggtaaacactattctactctctacttccatgacatcaactcttttggcttccacatgtaagtgagattgtgcggtatttattttttttgtgcctgcatt

SEQ ID NO: 243265 - DNA, 201 bp, Homo sapiens
ttacgttgccttcttagagtttcattaatataaatttagcacttaacattaggtctttgatccattttgtgtcatacacattgtttttaaatattcttctrtgcatttaaattattttcaaagagatatgaacttcatgattattggacttcattttctcatactttatcttcattttccttattatatgagttgatgcaa

SEQ ID NO: 243266 - DNA, 201 bp, Homo sapiens
atgccaccatgctggctaattgttttgtatttttagtagagacagggtttcactatgttggccagacttgtctcgaacttctgacctcaggcaatctgcaygccttgggctcccaaagtgctgggatgacaggcgtgagccactgcacccggcccccctctttctaaggtggcttatctattcattgaacaacaaacattg

SEQ ID NO: 243267 - DNA, 201 bp, Homo sapiens
tacagtgttgtaaaacgctagaaggtattcctcctatctacctgtaattttgtatctattaaccaaccttttcctatttctccctctctccactcacttcscaacttctggtaaacactattctactctctacttccatgacatcaactcttttggcttccacatgtaagtgagattgtgcggtatttattttttttgtgc

SEQ ID NO: 243268 - DNA, 201 bp, Homo sapiens
tactctttaaaaaaaattttaattgacacataattgtacatggttatatggtacagagtaatattttgatacatctctacagtgtgtaatgattaaatcartgtgtgattattaaattaacatatccatcacctcaagcgcttatcatttctttgtgatgggaacattcaaaatcccttcttctagctattggaaaacaga

SEQ ID NO: 243269 - DNA, 201 bp, Homo sapiens
tagaaaaacactttatatggaccatttttaaatgtcacatggaatagttagttaatttgagacatgaaatgtctcaaattatgcatattctttaaaaacawtaatattctagaaataagcataatatagaagctcccagccacatcaattatagtgcctttatgtattcagagcttaatttttttattctttgtactcttt

SEQ ID NO: 243270 - DNA, 201 bp, Homo sapiens
tttgtgggtgtgcttatgtgggggaatctgggcgtgtgtgaaaaaaatatattgcagctgaaagggggctggaagggtcttttttcccatggtgaagctgmctaaactttgtgctgtgtgcctgcattttgactggaactcatcacatgaggtcaggtatggaattctccacttgtggcatcatgtcagtgctcaaactat

SEQ ID NO: 243271 - DNA, 201 bp, Homo sapiens
atgacacaagggagtaaatgccagaaggtgcggatcattgggccatcttgaaagctatccaccacacacagaaggacatagaagttacgcttaggtccacyattcagtccctgtggatcttccaggtttttgttttcccttccattgcagcagaccataaacatttcttatattatgaaatagtgttctaaaatgagattt

SEQ ID NO: 243272 - DNA, 201 bp, Homo sapiens
ctcactacaacatagtattataaggtatatatttttattctgttttgcagataaggatgtcactattaatataacatttttatattaatagagtataattsttctagaattatcactagaatgatgattattcaacatcatacagaaagtattacagccagaatttgaagctactcttgtattaatggtgtgtctggctca

SEQ ID NO: 243273 - DNA, 201 bp, Homo sapiens
tgaggtctttctctgcctccaaaatggcactttgttgctgcagccacctgaggggagggacactgtgtccttacagggtagaaggcgaaagggcaagcccrccaaaggctgcaagaagcctattttataatggccttatccgatttatgataggaaatgctctcatgacctcatcgctgcttaaaggccctaccatttaat

SEQ ID NO: 243274 - DNA, 201 bp, Homo sapiens
aggcaaagggagggagtgggtaagtggaagacatcccacatagaactaggagcataggcagagccttgtggctgcaggaaccaaaaggccagtgtggctgsggtggagaaagcaagatggatggtggtacaaaataaaactgatgcagcgggaaaaggaagatcaactgtttttctgtatattcacaattaacatagaaca

SEQ ID NO: 243275 - DNA, 201 bp, Homo sapiens
gtaagtggaagacatcccacatagaactaggagcataggcagagccttgtggctgcaggaaccaaaaggccagtgtggctgcggtggagaaagcaagatgratggtggtacaaaataaaactgatgcagcgggaaaaggaagatcaactgtttttctgtatattcacaattaacatagaacacttcagacaccatatgtat

SEQ ID NO: 243276 - DNA, 201 bp, Homo sapiens
atttcaaaagataataatttgttatcaacattcttaggtgcagataaagagcctggaaccatgtctgataaaacccttcccaatttacaccagaaagtctktggcaaaggtaatcttgtgctgcttagctgaaggcccttcagtatcaactaataatgtagcctgctgcctgctgtcattttttcactattagaaatatta

SEQ ID NO: 243277 - DNA, 201 bp, Homo sapiens
aaaaattcactttttggaggggtgcatcatgctttttgaggacacactgaaattttgttggtaatcccagttccaagcctttcaagttagtttaagtgtasgaagaggagtggcagcaactggataataaatttagtacaaatgtttattttatttcatttatgtattgcctcattcaaaaaatgattcgagatatctttt

SEQ ID NO: 243278 - DNA, 201 bp, Homo sapiens
agagctagctagaggaggtctctgagatcacagaggatgaggacctaaaagataagaaatgtgcacaaaaaaagaaaatgccagaaaaaattgtatgactkggaaattttgtttgatgctgaacttgaccatggctaacctcctaacttttgataggtcctttcctttcttcccccaggggatattgatgagctgaaggaa

SEQ ID NO: 243279 - DNA, 201 bp, Homo sapiens
gaaaagacttgagcattttgttattcatttttctgcatctacattcagttctcacatattctatcccattctcccagtaaatcaacatttaattaaataamattggcatgttacgataccacatcgtatgagattgcactaatttttcttggaaaatagagtaaaattaagagctttatttgaaatatgatgtgcctggat

SEQ ID NO: 243280 - DNA, 201 bp, Homo sapiens
gaagacatcccacatagaactaggagcataggcagagccttgtggctgcaggaaccaaaaggccagtgtggctgcggtggagaaagcaagatggatggtgrtacaaaataaaactgatgcagcgggaaaaggaagatcaactgtttttctgtatattcacaattaacatagaacacttcagacaccatatgtatgtgtttt

SEQ ID NO: 243281 - DNA, 201 bp, Homo sapiens
tcttatgtttgataaacatatttctgcaatatgttgtttttttattttaccatgactattacttttcttagtgttaaagctcaaactgttgtaaaagttayattattttgtttcttttattgactctaggtttaaaaagttgtcatctttcaaaaaaatattcaattctattttatgctaatgtttagtgaactaatttat

SEQ ID NO: 243282 - DNA, 201 bp, Homo sapiens
gaatgtggaattacaaatgcaaaattagtgaaaagatctcggaaggggcctatgcaaggaaagggccctgtacttaaacttcattaattcacaataaattyacttctaacctcatacataaacctgtatctaataagttaaattgtgaattgataatacagctaaatattttaaaatgagattgaatgtcacattcttgag

SEQ ID NO: 243283 - DNA, 201 bp, Homo sapiens
gaagttatccatttaaaatagccagttccaaacaatgtgtcaacaacacatagtatgggcatgctgaccaccagctgtagtaacatcaggtatttatattragaacaacgattggtacaaatttcttcccttcctctggttaaggaatcagcaggcatggtttaaaaagaaaagaaaacagtaaaaaaaaaaaaaaaaaaa

SEQ ID NO: 243284 - DNA, 201 bp, Homo sapiens
tgcggtggagaaagcaagatggatggtggtacaaaataaaactgatgcagcgggaaaaggaagatcaactgtttttctgtatattcacaattaacatagarcacttcagacaccatatgtatgtgttttttcctacagccagcaattctccaattatctgcagacactgactggatgtcctacagtttaactcaattctga

SEQ ID NO: 243285 - DNA, 201 bp, Homo sapiens
cctatttgaatctgccttttttttttttttttttggaattatttactcagtttaaaatttctggcctgatgttattaggttaaaggctttgcatatctttrtaagtcaaaggatgtagattttaacaaatggcttttcaagtgctttgccaaattgctttctaatataaatatataaattgttaacaataatgtatgggtt

SEQ ID NO: 243286 - DNA, 201 bp, Homo sapiens
tggcagaaatcagccaggccacaatattataattttaaagattatgctggcacagctctttgataacaaagataattattatgttagctttcacaatttcyaattgttttaagtttgtgtaagtttaagcaataattcagaaaccttctcaagtagaatgcccacgtgtttcagtcatcagaagcatcattattagcttca

SEQ ID NO: 243287 - DNA, 201 bp, Homo sapiens
agcttctttagtggactaatgaggttggaggagaaattagaggttgataactgaagcagacatgaggaaaaggagaaagtaggacagaccaccttttcaaraatgttgactattaaaaggagaagaagaaaaacgtgggagctggagggattgatgggattaaggacaaagattttatatatatataaattataaaaaata

SEQ ID NO: 243288 - DNA, 201 bp, Homo sapiens
tggcacaccagttgtgtctcaacacagcggctgatctggtagagttgtgtgaacacctgtgattgtggcagaacaaattttctccttttggttacatttawcgaaagtaaaagtagaaggagcactgtattttggaggtaatgtagagatataggggatagcctaccttttctccaaagctatgtatgagctttcaatgtt

SEQ ID NO: 243289 - DNA, 201 bp, Homo sapiens
agaggaaaggaatcagcctgtggagaggttttggctatctcccagtagaacttgaggaaaaattcttcctatttgagtgcttgtgttgtacttgcaccacygcaataaattaacactttaaaataaaatttgaacatcttattttaaaaagaatccaaatggcagaaatcagccaggccacaatattataattttaaagat

SEQ ID NO: 243290 - DNA, 201 bp, Homo sapiens
cctagtttgtttctggcacaccagttgtgtctcaacacagcggctgatctggtagagttgtgtgaacacctgtgattgtggcagaacaaattttctccttytggttacatttaacgaaagtaaaagtagaaggagcactgtattttggaggtaatgtagagatataggggatagcctaccttttctccaaagctatgtatg

SEQ ID NO: 243291 - DNA, 201 bp, Homo sapiens
  misc_feature (1)...(201): n = A,T,C or G
aaaaataaaataacccacattaaaccttccttcgtatatattatactatgtatattattaatactaacacttcaaaaatttacatgataaagtctttttgnttccactaaatatttataacaaaatgttaaagactatctaatagtccatggtatttggttttccctattataaataagacactatcttttacataattgc

SEQ ID NO: 243292 - DNA, 201 bp, Homo sapiens
attttggtaaaagtgtaacactgataataaaatcatttggttttgcattgatatacaaatctaaagttcggtggaacatcttatagagcaggaatgtactyagcattacgtatggagcacacaatttttataaatagcttaagatttaattatgaagttaatgacatttaataactcttaaaaacctaaacaagcttgata

SEQ ID NO: 243293 - DNA, 201 bp, Homo sapiens
aaaagttttaggattgtgtataaaacagcattaacatgctcttttgagcatgttacttgaaccatagttgagtgaaaggtggtgtgaaccatgtgataaaygattacttcacgtcaaacaacccaacttttctgagcatgctggctttgcaaggatttatagttccctgccttcatgccggagttacttcagctttccgtg

SEQ ID NO: 243294 - DNA, 201 bp, Homo sapiens
tggttttattttgaaatgagagctctttcatttacaagttcactaaaaactcaaatgtttcttgaaaatcacaggagcttatgaacattaaaaagaaggartaactattgaacaaataagacagacactgtcaagaacgggcaggactttgcaaggtgataattaagactagttaatatttatgtggaaaagttctgactg

SEQ ID NO: 243295 - DNA, 201 bp, Homo sapiens
ccctgagaaacctccttgaattaagctttgatggttaccacacaaggaatcaactcaactagttctgctgagactttttttttttttttttgcctttcccrctttagaattttcaaactttgtgtgaaaataaatcaccctgggtagcagaagttatgcactgccaggccagaagccatattcaacacatacatagatttc

SEQ ID NO: 243296 - DNA, 201 bp, Homo sapiens
tgtcaggaggtagttcatacacttggccgaattaagactcatgatgtacggctgtgggggtgggggcgacaaagcttttgaaatggcatgctgtggcaaartatgatccacgtgagttttccttggcctttggcaccatggactctggccccctaccccatggccttgacttccctgacctgattgtgcttagtgcttctc

SEQ ID NO: 243297 - DNA, 201 bp, Homo sapiens
gagatttagccacagtcagttctggaagctcagtgccaaagtacaagaagccatggagctgtgcgtccacttttgagccccttataaacttgtaaaatacwtctaatcagaaaaaaatgcaaggattggcagaatttcaaatccctgccctgttgagtttaaagccctgactgttgtcaggtgggagctgctatttgtcat

SEQ ID NO: 243298 - DNA, 201 bp, Homo sapiens
tggcagattctgcttagttgcctgtggtttctagctgggtttcctgcaattgcctggcagttcctctctgttctgaccagatttctgggtaactggcctcycttcccctctgggattcatgaatcctgtctaccaggagttatcacacaaacagttagttttagaccaatcattggttgtaaatatatgttttaaatataa

SEQ ID NO: 243299 - DNA, 201 bp, Homo sapiens
aaatattgcttggaaactgggtgttccctttctctgagggacatacgttatatgagccaggcttggaccttataggtgggattcggcctgcaatgaaatgraaagaaaggaggatacaaaagcatgaactggaaaagtatttggcatgaaaggagaataggtgatttaatttgactgagtgtagagtacagaaagggcaat

SEQ ID NO: 243300 - DNA, 201 bp, Homo sapiens
atttaagtaggtaccatttaaataaatcttctactcaatgcactggccatgccagatccctttatgtgtatttgcttgcaaaaccacaaactagtttactmttcttgaaataacagatattcaaaggtgtatgatataatttacaacaatatttttatgttataattgatactatcatagaaccctcattgatgggaaata

SEQ ID NO: 243301 - DNA, 201 bp, Homo sapiens
ttgcgtgaataacggtgacaatgcgactgccattctagaatttagtttcccagaagtaactgaggtagttggtctgtttatcaagatacgcttgggagtgrggctatctctcacctctgtgtgttggtaacagttttcagtcactctgagcctttgctagatttatatttacatttttggaggaacagtattgagttggca

SEQ ID NO: 243302 - DNA, 201 bp, Homo sapiens
catacccttgcagaaaatgttgacagctttcttatctttgtgtcagctatttacgcccatttactcctcactatctttctgacaaacattctcatttattytacctacatcctaaagtaagccctgataaaatgaagcttcaattccactcctaagatctcttctctctttcattgttagtcaccgttagtcgagaatgta

SEQ ID NO: 243303 - DNA, 201 bp, Homo sapiens
ccagaagtaactgaggtagttggtctgtttatcaagatacgcttgggagtggggctatctctcacctctgtgtgttggtaacagttttcagtcactctgarcctttgctagatttatatttacatttttggaggaacagtattgagttggcaaccttttgctctgtaacaaatcagcccaaaacataatgaaaacaataaa

SEQ ID NO: 243304 - DNA, 201 bp, Homo sapiens
caagggctgtggaactaaataaacctgcatttgggtcctgacttggcccttctaagcaataacatgactttaggcaagttgttaatttttttaaatcccakttttctcatttgtaaaacatagatgacaactgcattttattcatagtttacgtaaaatacttgtgtggcgcctaagcaatggtgttagaccaaaatcagg

SEQ ID NO: 243305 - DNA, 201 bp, Homo sapiens
ggagttttatatccactagaattcttccacagatcctagactgagaatatctgttcaagataaatctatccaattcatgtgtcttaaatagaaatgatttrtgttacttgtcatgtctctcgttatgatattttatatccagactctaattatcaaaagggaggaataaaggaaatgctcaagagatccatcttattcaaa

SEQ ID NO: 243306 - DNA, 201 bp, Homo sapiens
agcccacgagtttgaggctacattgagctatgatcatgccacggtgctgtagcctgagtgacaaaacaacagcatgtctttaaaaaaattatgtcgaactratgttcatgtcttagctttgatcttcatgcctctgttgacagaatttctggagaaagaaccctaaatttgctctgtccaaactagtagccacatgtacct

SEQ ID NO: 243307 - DNA, 201 bp, Homo sapiens
ttttcttgtagtgcttagatttgaagtgagctcctatgtggtaactagtaattagtaggactgagtttactcacctgatgtactggtataatttttttttyccctgaaagttacttgctctccctatagccaaacatgaacttgatgtcttcttttttattatcttttctgagattgatgaagaatctgacaacctaggct

SEQ ID NO: 243308 - DNA, 201 bp, Homo sapiens
aattcttccacagatcctagactgagaatatctgttcaagataaatctatccaattcatgtgtcttaaatagaaatgatttatgttacttgtcatgtctcycgttatgatattttatatccagactctaattatcaaaagggaggaataaaggaaatgctcaagagatccatcttattcaaacgaaacctctttttcccct

SEQ ID NO: 243309 - DNA, 201 bp, Homo sapiens
atatatattaagtcatataacatcattaaaattaatcttacctgttttactttttaaatgtggctattcgaaaagaatatacatggtttgcatttgtgacycacatatttttatttgtatttatgtttctgctttagatcgtcttcatctcattttgtattttgttaattgatagatctcatcacatcaatttgaaaatag

SEQ ID NO: 243310 - DNA, 201 bp, Homo sapiens
ctacataatattttaagaattggagtctacttaaagattttatttgctactcattatatgtgtagaatgagtataatgaagttttaaaagtggttataaarcaaatgttatgttttctctatctaattgctcttttaaaatatggttacttaaaaaaaaaaaaaaaaatccctccatttcagctaagggtctttgccacca

SEQ ID NO: 243311 - DNA, 201 bp, Homo sapiens
acatgcagtaatcagggtaatgttaatttccctcctattaatgttcaactcaaacctggcttgcaatcagtacttcatttcctccactgttgctatcaaaraggtatcacaaactttttccctccagcacaataaaaggatccaccctgatttagaatctctcttttttatatctcctcttcctaactgtatctggatttt

SEQ ID NO: 243312 - DNA, 201 bp, Homo sapiens
tgggctataaaacttgaacagatgaatttttgctcttgccagtatctttctgttgctcttaattaacatagaggcataaaatgttagtgttagcagagatmtgaggcatctgaatggtttaagggtttaaagatccttctcctttaccttaaagacaaccgaaagtctgccaaatgttttattaccaatattagttgtaag

SEQ ID NO: 243313 - DNA, 201 bp, Homo sapiens
ctgtctattctcttgtaaggttagacagttggagttcgcatttgatctgaggctttaagcttcttgttatactcaatttccaagagtttcctgtttagagwcttgaaatgcagcttagtaacaataagtcattatttaatcatgattaaccactttttaaatggacatatttccaaaagggagaggtagcagtttcttagg

SEQ ID NO: 243314 - DNA, 201 bp, Homo sapiens
ggttttttacataaattttctagaatggtactaattactatgtgctattaatcttggctcagggaaagaacatttctaagcattagggatcaaaattttgygttacttcttttctgaatgtttatcattctttttattgtcatcccggtaataaggtagtttagtgtggacagcctcattcctaagtggcctgggtaaaag

SEQ ID NO: 243315 - DNA, 201 bp, Homo sapiens
ccattcacagctagcagcttccacaatggacattgcagatatagaacatttgcatcgtcactgaaagttcttttggggagcattgtctagtggttaaagcytaagcaaaataagtaagcaaacatagagtacattaggagttcatgaataaaatgaacgcagggaaagggtcagattttgctgggacaagggaggtttgtg

SEQ ID NO: 243316 - DNA, 201 bp, Homo sapiens
aagaaaagaaagtgactaattcaattcacaggtatacatcaggcatctagtgctggagctacatcagtctgaagaagtcaaaactccctgtttgcatgtgrcttatatttaaactgtgctgtctaaaatggtactccctggccatatggttatttaaatttaacttaatgaaactatgtatttcaactgcccaatagccat

SEQ ID NO: 243317 - DNA, 201 bp, Homo sapiens
aagcaaaaacaaacatctgttaagggctgtgctacatgctattagtacttactgttactatctccaagttacggatgagggaacagaggcctagggaaatkaataacatcttcaatgttacacacatgaaagagtcaaataagcatttagattatagaacagaatttgaaaactggtacatgtaaagactgaagcattttg

SEQ ID NO: 243318 - DNA, 201 bp, Homo sapiens
tgaagttcaatgtcaccaggtgttagtgaagatacggagcagtaggaaatttcataattctgaggaatgtaaattggtgacacctgggagaaaatttcacmtatatatgtagtaaagtttcatattttataaggacccagaaattctatgggaagtataatccctagggataccttctcatatgtatacaaagggacatgt

SEQ ID NO: 243319 - DNA, 201 bp, Homo sapiens
cagttagacgcaatcatttctgttgggatagcaggttaagaagtcaaattaccctttgaggtttacaataactgtttcagagacttgtaggactttttttsttatctttttaaaaaagcttttttagaggtttgatgtttgtagttcatggataacaagaatgccagcaagaagagactccagggtctcttgaatttttac

SEQ ID NO: 243320 - DNA, 201 bp, Homo sapiens
tgccaggaaaataattagaacaacagattatgttgaatgcctaaaaaaatgtgtttaacaacttttaattttctttcctcccacacaccacttcctagttkgtttctggcacaccagttgtgtctcaacacagcggctgatctggtagagttgtgtgaacacctgtgattgtggcagaacaaattttctccttttggttac

SEQ ID NO: 243321 - DNA, 201 bp, Homo sapiens
aacccagagcaagcctaggctcaccttttcacagtttaacaacgatagcaaaaacaagcactctttccccggtcattctgataaattcccaggaccatctsattcggacagcttatctcacttgcgccctctagacgtttagatggagtttgcagtttacctctcaaataacctggactaagagcaaaaccctaaccagca

SEQ ID NO: 243322 - DNA, 201 bp, Homo sapiens
aggggagccaggcccagttccttagttctcacaggaagctacggcactgttaggatggaactcgtgtccgcctcgcaacagaacgggtctctgcaagtctrtccggctgctgaaagatccactccccattcccagtctcagattttgtacctctgggtagttttcctcttttccttaaagctttttaaatgtagctcccca

SEQ ID NO: 243323 - DNA, 201 bp, Homo sapiens
taaattaagagatagaaaataaatgatgaaatatttgggattgtattttccttaaattttcagcctctaactcagttactttaaaatggaagtgttctttrtggcaaagaaattggagagaggagtgggaggggagggggactggcttaagaaccatgttattattaaaagcagcacataataacagtttgacgtgacatg

SEQ ID NO: 243324 - DNA, 201 bp, Homo sapiens
aaaaacaatctcggaagcgtatgagacttcagttttgtgtgtgtgtgcctgaggcactgttgtgcctggagatccaagcaatccctctcctaccctctccrttatatctgaccattgaaaacctgtcttgttttcacagaatgggtttgctgttgtgaggccccctggccatcacgctgaagaatccacagccatgtaagt

SEQ ID NO: 243325 - DNA, 201 bp, Homo sapiens
tccagtgaaagcttcatgttgacttgtgggttctgtgtcagtggaacgtttcagtactttttggcctggctcaaatgtttcttggcattttctgtggagtwtggcccaaccaatctatagtatcacattggactccagataaaccctaaaagccgtaattcatccgcaagctaatatgggactttattggggtttggtagt

SEQ ID NO: 243326 - DNA, 201 bp, Homo sapiens
acctaatgaagtaaattaagagatagaaaataaatgatgaaatatttgggattgtattttccttaaattttcagcctctaactcagttactttaaaatggragtgttctttgtggcaaagaaattggagagaggagtgggaggggagggggactggcttaagaaccatgttattattaaaagcagcacataataacagttt

SEQ ID NO: 243327 - DNA, 201 bp, Homo sapiens
gaagcattcctgcaagcactttggagagaagagtattgaaacctaactatccatgtattttccatacacgcctgagtctcaatgtcaggcatagctcaccrttaaagaaatgtgttgaaggcctagatatactacagcagcaagatgttacaattttacaaaaatcaagacatcagtacccattttctcatttatatgcaa

SEQ ID NO: 243328 - DNA, 201 bp, Homo sapiens
tattctatgagttttggctggatccctggaaaacttcactcaaaggctgtatcttccagtgaaagcttcatgttgacttgtgggttctgtgtcagtggaaygtttcagtactttttggcctggctcaaatgtttcttggcattttctgtggagtttggcccaaccaatctatagtatcacattggactccagataaaccct

SEQ ID NO: 243329 - DNA, 201 bp, Homo sapiens
tcatgcgttgttttagatattaattaacattataattgtcttctcactttctggtatgcaggggtactctccatgaccaatctttgtcatttatcacctayagtgtaaaatttccatcaggaaacaatcttctgccttgaactaccaaagtgctgattttgctttttgtcattaagttttttgtttgtttgtttgtttgtt

SEQ ID NO: 243330 - DNA, 201 bp, Homo sapiens
atgatgtatgtctttagctgaaacaactttctgggatgatgtgtatgtgccccaacattatgatttcttaattttggatatgtgtaccattcaaaaagggraaaggattattgtatgtctacaccgtggatggcaagatcaatgcaggttttcagaattcaccaaaagaaggctatgatagtgtctagtgaaggagtactg

SEQ ID NO: 243331 - DNA, 201 bp, Homo sapiens
aaaaagaaaaaaatataagcagcatttttcttttaatatcaacaccatagagaaattttggttcttatggaaattttattctattacaaatcttccaactstaaaatcttctcttagagttgattatgtaattgaaaacaaagggaagaatcagtggctcaaatggtcctgtgtttaccatacttcattcaaaattctctt

SEQ ID NO: 243332 - DNA, 201 bp, Homo sapiens
tatcttgctaatataaagtaagtatatagttacaagttttaaaacttttaaataacagaaccggaaactatgtatgtttaaagtatagcagtaatattctrttgaatacaaatatataaattatccacttttggagtggctcttttttttttggtcagaagatattatgaagcatattaattgaggtgttttttttttaca

SEQ ID NO: 243333 - DNA, 201 bp, Homo sapiens
ttgttgtagggttagaaagctaagaattgtgttaaataaaattgttaaaagatcacaagttctgaggaggtgcaaatgtcttgtttttttttttttttttktgtgtgtgtgtgtgtgtgtgtgtgtgtgtgcgcgcatgtgtctctgtgtgtgtgttttaaatagagttttgttcttgttgcccaggctggagtgcaatgg

SEQ ID NO: 243334 - DNA, 201 bp, Homo sapiens
aagcagctgtagtgaggtaggtagcttgtgtgggtgaggctggatgttgcatctttgaatcatctacaagtagggcaaaagaagttacgtgacagaacagmgttcacaggtgaatgagagagacaagcataggcaaggatttgactgaggttcttcaggtgggaattatggggctagaggagaaagatgagccagtgtata

SEQ ID NO: 243335 - DNA, 201 bp, Homo sapiens
attctacccacattctggaatgtgtactttgggaaaaaatatacacaaagatatccacaatgttgtagaaaaaaatggctggaataaaattttctaccgtmaacttgggttgattgtgaagatattttgctttaattaggagcaaaataaaaaattatgttaaaaaacagaagttttaatgttatgaattctctttttcaa

SEQ ID NO: 243336 - DNA, 201 bp, Homo sapiens
atttaaatcagtagactgagtagagcagattgccccctttaatggggatgggcctcatgcaattggttgaaggcctgagtagagcaaaaggctgacccccyttatgtaagagagaattctcttgcctgacagtctttaaactgggacattgaccattactggttctgcagtagccttctggcttctgactcaaaactggga

SEQ ID NO: 243337 - DNA, 201 bp, Homo sapiens
ctgactgggcagagagagtgaactgtgaaatgcatggagccatgaaatgatctttctgtattggctcaaggacatgaggtgggattggtagaaagaaaatraatcatattttgtaaactcttatgcaggcaaaggatagcccatctatatatgtatatactcctttgtcaatttgggcttagtcagatagactgccaaata

SEQ ID NO: 243338 - DNA, 201 bp, Homo sapiens
ataaggacctgaaccgagaagacagtaatgagactggagaaaagggtgtgaaacttttgaaaagtaaaaccatagtgtgatagttaatttcttgtgtcaastggagtgggctacaggttgcccagatacttggtcaaacactacttagggtgatactgtgagggtgattttagatgaggctgacatttaaatcagtagact

SEQ ID NO: 243339 - DNA, 201 bp, Homo sapiens
cttgatctgggttctttagatgcaaacaagttctaattttaaatatcatcttttcatgtcagtatgttgtagtatgtagctaccttaattaatatttgttrttgatgcatattttcaatagacagtgaatctgtacatatcagctcttcagggaagttcatctcaggggaaaactctgacccagaaggactctcttgcact

SEQ ID NO: 243340 - DNA, 201 bp, Homo sapiens
aaacaattaaattattctctccctttgcttgtggtgtacagggagatttactgaagtaaaagggggtttcgtttgtcaaagatgaaagagatgtagcgccrtgctatataacacaatatgctacttggaaatctgttatgccttatctagaaatgttcctaatatcttgaactccacctttcactcattaggaagtcctgc

SEQ ID NO: 243341 - DNA, 201 bp, Homo sapiens
ttctgttcctgatgctgagtctttaatataagaatcatggcttccggggattcctcccctgcttgtgacaaaaatgtagaaagggcatttaactcaagtgyagaatgaaataaaaccttttattgtcatatccacactgcaagtgctccttggacaagtcaataatggtcagcctagagatttcttagaatggttgggttt

SEQ ID NO: 243342 - DNA, 201 bp, Homo sapiens
agagagagagagagagagagagagagagactgaggatctgatgaatctcttggtgttcaacgtgttggcacagtaagcatttcccaccaataaatgatctstatagtgattgtgataaactgagtttttgaaggatactctatggaggaaccatggttaatgtctcaatttgagaagagaaggacctgcagataagtgtga

SEQ ID NO: 243343 - DNA, 201 bp, Homo sapiens
gatatctccaagccacttctccttgtgtcttctcctcatctgacatagtaagagagcctatcaaattaaacccttggttctttttttccttttaataaccratctaattacaacggggatataaatgttttcatctttgttaaaagaaatattcttcttatgtatgcatttagattttgtggaaaggatatgtaatagaac

SEQ ID NO: 243344 - DNA, 201 bp, Homo sapiens
aaaagcaatacatatgaatttattgctagtgtgaaccacaattattcactgtccagattccattctctattttccgtatgttgagatgtttcaaaaagttytatcaaagcgggtcacaagaaaaaaaatccataggaataaatttgagaaagctgtcagctctatctgcttttcagcttcaaaaataaatatagtttaagg

SEQ ID NO: 243345 - DNA, 201 bp, Homo sapiens
tgccagcaggcatccccttgtggtatcgtcacatcagaggctatgctatcaaatgggttcatatgtcttccaacctgtagaattgcaacccctgacttttstatgtatctggaagctcttagacaccccaagggatggggccacttctaacactgagacctcctcttctcctccatcttcaaacaaaaactctagctcagt

SEQ ID NO: 243346 - DNA, 201 bp, Homo sapiens
tacataaaacacattaaagaatggagagttcttctcactttcattgacaatataatttataatccaaggcctggttttctgtatttttttccaggtcaaaratcattatgactacactgaagttttaaattttattcttttagaaaagtaatatataaggcgtattacatgtacttcaccattttttaaaaagtgcatata

SEQ ID NO: 243347 - DNA, 201 bp, Homo sapiens
ctcaacataattatgttttaagctttgtgcacagtcaatagagggtgatcccatggatatctttccatggcttagacaggaactttgggtaataggtaacrtttccaaaccttctctgtgccttagaatcttaaaagcacagagagcagtgtgggcaggggagtctgtaggtgtgtctgtgtgtgtgtgcgtgtacgtgtg

SEQ ID NO: 243348 - DNA, 201 bp, Homo sapiens
agagatggaattcacaggtggtctggcatcagagctagtggaatatactttctgtctacatttatatcagaaattgaccttcaaaacaaagagaggcagtstctctccctctctgtccttaccgctattctttcttctctcctggaaggtcatattgtttatggagagcataactcttccactgtaaggtcttgagccctg

SEQ ID NO: 243349 - DNA, 201 bp, Homo sapiens
ctatttaagggcagccctagacccaccttccacataggacacataggacagagatactagtgtcaaacagcctggcaggtctttgtatgaatggattcatyccctctgggggtgatctatttgattagatccagcttatctatttgatgacacccatgtaggtaaaaaataaaaataaaaaataaatcttggagagtaaaa

SEQ ID NO: 243350 - DNA, 201 bp, Homo sapiens
atccattgtggtcgattaccttttgaaaagcagattttttaaactaaaaaggaaattcactacagtgtaacatagaagtattaatatttactttggggctrtaacatagaaacttatctttgatggcaccgtaatataaactttaagcgaaagtagaaaatagatgaaaggataggtggagctagtgatgaaaagacaaag

SEQ ID NO: 243351 - DNA, 201 bp, Homo sapiens
ttcaaaatcagagcgagtgctgggagcatggagaggccaggcagcgacagcaggcacttccaagcctgtggggagcagaggacctaccaggtccccgactktgcgcagggatgcctgggtccatagctgcagctgcaccccggagggtggggcttctgcccctcaactcgaaagcgggtgaggctcccgcctgttcccagc

SEQ ID NO: 243352 - DNA, 201 bp, Homo sapiens
atagccaagcacacgtagatagtacaggtttaataatatttgggacatttagcaaacttcttcatttagtaagcatttccataaacatttcaaagattttyatatgtgggaaagaagagtttatgctgctcaagataaatacaaagaatgaaacagagggaacgtttctgttgatgattggaattataccacatccattgt

SEQ ID NO: 243353 - DNA, 201 bp, Homo sapiens
gttttgataacagcatataactatctgacttttaaatgcttcaaaccacctaacagatgaaaactgctgtaatgagcaaccaccaaaagtctacaatacaygagtcatagagttttggagatttgttttggagagttttggagatctgcccataggatgactctcccagacatctatgtaacaaggagtcagttttgatag

SEQ ID NO: 243354 - DNA, 201 bp, Homo sapiens
caattttgctgagaatcttctcttatctctggagtgcatattttctattgtaaggcttttgtcacaaacatacctctactgtgagccaggtcccaaaaggracccttactttagcaaagtcccacaacttttctgtctgggtattcatccacatcactctctgttccaacactgctactcctccaactcactaaacaggtt

SEQ ID NO: 243355 - DNA, 201 bp, Homo sapiens
ctgtgtgttgttaactactatgtgtccccaggggctaaaatatcacctcagctattgtctaggctccagaaatatttattgactttcatgtatggagtgayttaaaaaaaaatgatctatttaaaaatatatttaaagtcaatctctttattttttcttttacttgaaaagtttgctgcatgggtgtttattcaagatatt

SEQ ID NO: 243356 - DNA, 201 bp, Homo sapiens
tacaaacctatgatctgcatagattttgcattttgtttaagggcaagtaaacaatcaataacaaagagaacattgtgctttttctcttctaatgctttctrtcatcatttcttctgtgtaattgtacttaaaacttcaatcattgtatccattttgggattcattattgtaatttatagttctttgtgtatgattaatttt

SEQ ID NO: 243357 - DNA, 201 bp, Homo sapiens
ctcctgaccttgtgatctgcccacctcggcctccgaaagtgctgggattacaggtgtgagccaccatgcctggctgcccctggagtttttaactctcaagstggttcacattcagcctccagcaattcatgcctccaacacctcattaaaattacctcatttaaatatttcttcgttactgactccattggcttctgctca

SEQ ID NO: 243358 - DNA, 201 bp, Homo sapiens
ctattagcaatgacatctgcagttgtagcttgggttgccactcaagttagaaaagaatattatgttatgtctattcagggactctttgggggagggaacaygagataatgctcaaggagggaatattggaatcatgtgggaatgttgtgtttccctatctttcctacgatgctaattatttaacaaataatatcaacataa

SEQ ID NO: 243359 - DNA, 201 bp, Homo sapiens
ttgtctagtcatatataacaatagagtctatagataaggtctttattccatgctgttttcctcttttctctgccttggtgaaatttgtctataagctacakaaattacctatttcagaaattattttaccaaacaattgactatctgtggcgtatcattcctctgctttatattcttttcctgcaactacaataatgtaca

SEQ ID NO: 243360 - DNA, 201 bp, Homo sapiens
aatataagtaacacagtggaagacgggacaaataagaatagttaatcctaaaatgaaacccaaatgtctactaagcagccaagacaaggattagggaaatrcaaatcaaaactacactgttatacaattttacgcatctatcatattgacaaaattgtgaagttcaatgtcaccaggtgttagtgaagatacggagcagta

SEQ ID NO: 243361 - DNA, 201 bp, Homo sapiens
tcccaaagtgctgggattacaggcgtgagccaccgcgcccggataagaccttttttaaatttctactgctgtgcttttgatctccagcattcccttttcartctttcctagagtttccatttctctgtttatattatccatctgttgttgcatgttgccaactttccattagaacccttaacatactacttttagttcctt

SEQ ID NO: 243362 - DNA, 201 bp, Homo sapiens
catcctggctaacacggtgaaaccccgtctctactaaaaataaaaaaataaaattagccaggcgtggtggcgggcgcctgtagtcccagctactcgggagsctgaggcaggaaaatggcgtgaacccgggaggcggagcttgcagtgagccgagagcgtgtcactgcactccagcctgggcgacagagcgagactccgtct

SEQ ID NO: 243363 - DNA, 201 bp, Homo sapiens
cccagtagtgagcgccttagttgccttgcttcatcttttgatgtgtttttacactgtttgtcatgccagcatttcttgtgagcaccctccccaagacacayacacacacacacacacacacacacacacacacacacacacacacaccacattcttaacctatggacatttgctgctgtaaattcattatatatggtgcat

SEQ ID NO: 243364 - DNA, 201 bp, Homo sapiens
aatgaaaattagcctatggcccatttatcaaaactaatgtacaaatgactttatatcatcattgtaaagaaatggctagagtcattggcataaaatttgtygtacagggtcttatactttttatttgtttccaaatcaatgtgctaatttccaatcttctattaccctcccccaccccatttccctttttttctggttctt

SEQ ID NO: 243365 - DNA, 201 bp, Homo sapiens
tgtttcaaatatccaaggaaccgtgtttttttttttttttttttttttttttctgattgaaaatacaactggttataacatttgtttttttctggaagcaratagcctttgccatgccttccagttggcaccttgccccttgctaatatgcatggatgggtgccttttgctttgcagcctgccagtagaacgtgaccttgg

SEQ ID NO: 243366 - DNA, 201 bp, Homo sapiens
acgttaatttctttgttttaacaaatgtcttatggttatctaagatggtaacatggaaaactgggtgaaaggtatatgggaacttatactatcttgaaaayttttctgaaaatctgaaattattccaaacaaaaagtttgttgttgttgttgttgttgttgttgtttaaactgaaaaggaaaaacatttggtaggtaacag

SEQ ID NO: 243367 - DNA, 201 bp, Homo sapiens
taattgtgattgtacagtattgcttgatgcaaaagtcaactcatttttcaccagggattcctgtccattcctggaaatgaggtaggatgaacccggccggrgggcgggggggtgtcacagtagaaggtggtggtttaggaaaatctacaagtgacggtaaatactattctagaaagttaatttttttttatttcagggagc

SEQ ID NO: 243368 - DNA, 201 bp, Homo sapiens
ttttcttcatagttctagtgaatattttagaatttgcttcatttactggtaagataaagctctcgctcaattaaaagttacttatcctttacttcattgarcagctgtttttcaaccaaatttcaatgtctttgggtcatagagtgaatttttttttttgaaactgagcaattaccctctttttctatgattttacatcta

SEQ ID NO: 243369 - DNA, 201 bp, Homo sapiens
gctgaggcaggagggctgtttgagaccagcctggacaacacggtgtgaccctgtttctacaaaacaacaacaacaacaaattagccaggcatggcagtgcmtgcctgtagttcctgctactttggaggctgaggcaggaggattacttgagccttagaggtcaaggctgaagtgagctatgattgtgccactgcacttcag

SEQ ID NO: 243370 - DNA, 201 bp, Homo sapiens
tatacctatgtgacaaacctgcacattctgtacatgtatcctgtttttgtttgtttgtttgtttgttttagaagaaataaagaaaaaaaagaatcacgtgkggcttattagtatgtgagttcccagaccccacttgaccatactgagccagaatctgcaaggatttacagagccttgtggggcatggtaagactggtgttc

SEQ ID NO: 243371 - DNA, 201 bp, Homo sapiens
atttacaaaagcttgaaaatatttaatcactagaggcaggggggcaacggtgttttaattagcaggtcctcgggccattggctgactagaggctttctcaracaaccacacaaatgcactgaatagctgtttgccagccttagggtcaggcctgagatgaaacagataagataattggctctaatgaaatccagaaggcct

SEQ ID NO: 243372 - DNA, 201 bp, Homo sapiens
ctaatgaaatccagaaggccttggctttcttgtttgagcttggatttgaaaagtgcgtgtggaagtgaggcttaattcaaaccagaactgagctaggcccrtttctcagtgactttgatattgtttgaagttctaaaagtgttcgccacaccactagcctgctgggctgggcctccctggtacccttaattactaagcttt

SEQ ID NO: 243373 - DNA, 201 bp, Homo sapiens
actctactatttcatttgatcattgttttacaatttccgaatgaaaatcagcttttttcatgcactacatgagagggaggaggctaaaatgcaataaatgrtcttagaggattggtctgtaaaagtcttctcaccaaggctgtgggaaggaacgtttcctccaagaactatttggcttatttatctactatgtgccaagta

SEQ ID NO: 243374 - DNA, 201 bp, Homo sapiens
gagagttgtcctgacaccctgaggaataaagacgcctcaggagactctacaaaattaaatcccagcttctagagtctctcacaaagtggttacacaaaagkgctcccaaaccagtttgaagccaagaagcaaaaacgaggaagtctccccctgaggggtcagctgtggtgttactgaggattccatcctccccattctggc

SEQ ID NO: 243375 - DNA, 201 bp, Homo sapiens
caaataagataatgtactgtaaaaactctaaataaagcataaggtggttttgaaaactgttaatgttaataaaagcagatttttattttctaattggaagwctttatctctttaacatgcagaataaaagtaaaacaatatttactctacagaactacttaaattagaatgcctgtgtggtatacttggactgacttttac

SEQ ID NO: 243376 - DNA, 201 bp, Homo sapiens
aaatgcaataaatggtcttagaggattggtctgtaaaagtcttctcaccaaggctgtgggaaggaacgtttcctccaagaactatttggcttatttatctrctatgtgccaagtattatgctaaattgtgtggtgcaaagatgagagctagattcattcattcagcgatttattcattcaatcaacatttatgcaaaatca

SEQ ID NO: 243377 - DNA, 201 bp, Homo sapiens
aaattggtaatattttacagtcatatattttttgtttcagctgagtatattttgtttcagcttaagtatgggcacatatctcccacacttttttagatcasatatgacacataaaaaagatggctttggttttttaaaaactcttacaattagcaactaatggcagtgtgaacatataattggttttataggtaaatcaat

SEQ ID NO: 243378 - DNA, 201 bp, Homo sapiens
ccaaagcccataagactctgccccactcttcactaccaaatcttagggaaaacttcgggtagggagaaaatagaagagagctcttctggattaacatgaaktggcttgaggaatgtcaggagtgggaagccaggaaaatttgtggtcagaagaccttaattaaattcctggctctgctcttcatgccctgaaagtcactca

SEQ ID NO: 243379 - DNA, 201 bp, Homo sapiens
cagagcagtaataggacatgtctctatcacacaaccaatgaatgtcacaggctggttttaagacttccagctcaggacttgctttacactaaattacgtgmagcagacattttccaaatatacaccccctaaagatctatcgcgacctagcgtagtgttattacagagaagggagttggaaagattgactgattgattagt

SEQ ID NO: 243380 - DNA, 201 bp, Homo sapiens
atttattgagtgttcattgtatttcaggttctaagtgtattaagtactttatatgtgatatctcattttatcagattgaaaacactatggagtaaggactrttttctaaaatcctattttgaagatggaaaaccaagccttagagacttgcctagctaggttaacatgtctaaagttatatttcttgttatcgactgggcc

SEQ ID NO: 243381 - DNA, 201 bp, Homo sapiens
aatgtcacaggctggttttaagacttccagctcaggacttgctttacactaaattacgtgcagcagacattttccaaatatacaccccctaaagatctatygcgacctagcgtagtgttattacagagaagggagttggaaagattgactgattgattagtggccattctctgtaaacctgacataaatgcacatttcctc

SEQ ID NO: 243382 - DNA, 201 bp, Homo sapiens
gctttggcctcccaaagtgttgtgattacagacatgggccatcacacctggccattttaaacagtttgtaaactaaggtattaaagtaacaatacataaayggtaaagtatcctgggctgttgagtgtctttctcctcccctcctcttcgagtgccctgaaacttttttcattctaccattctcacaatgagtatgcataa

SEQ ID NO: 243383 - DNA, 201 bp, Homo sapiens
caaaataattgtaagcattacagccttttactctaatgaccttgactctgcactgggatagatgtctaattacaaagaattcagcacagaccacattagcraggctggtgtttgctttgcacacagacccaacatctgttggatctttggagcagagatttagtcatgggagatgaatcctgctgttctcttaaaatgcat

SEQ ID NO: 243384 - DNA, 201 bp, Homo sapiens
tacgtgtgtttgtgtgtgtgtgtacgtgtgtgtcgaaataatgtagaatactagcaaaacctgtgaggcaatttaatatgtttccaatcagaattccttartgcaaataagaagtgtaagaagtataaaatcagtacagaagaacatgacaacgaactttagaggttcttgtatatcatacaattccatctatttatttat

SEQ ID NO: 243385 - DNA, 201 bp, Homo sapiens
aatattttggtcctgagagatacggcatcataggttcacgctaaggctcacagcccctaagaaattatgagtaactgattagatttttataactgcagatsaagtccctaaaataagaatctattcttatcttagaaactatgagtattatttagaaaccatgagtaactgattagattttttaactgcaaatcaaacccc

SEQ ID NO: 243386 - DNA, 201 bp, Homo sapiens
atgtacaagctgtatttcctgccagtggtgtgctagatctagcttatgctgccttgagagagctggattgttaaattttcaggaattatgcaagctggttkttaaaatagccattagtaaaaattaaagtatgtacacttacaattaaattgtattagaatagatgtagtaaaaatattaaagctcatcctccctaattat

SEQ ID NO: 243387 - DNA, 201 bp, Homo sapiens
tctgaacatgttttccctgctatagtgaacaccctcccaattactcctaggaatgttcattgtctgttatttggtctacatttcttgatttttcctaaatrgctcttagaaatctactttatatattaagatattccccattgattccagtttatgctaatttgtcttgtattttatatgcattttaatactactgaggat

SEQ ID NO: 243388 - DNA, 201 bp, Homo sapiens
tttctctatgtgtcatagttttggtaattttatgactaaaacatgcttttccttttgtctggaagtatttattttctttcactgaataattgcttctcttyttttatttttttttaactgtgttgcagcacataaaaagtttatgaaatcaattcagagggtcaagattggcattttaatagaatgtaatagaagataaaa

SEQ ID NO: 243389 - DNA, 201 bp, Homo sapiens
cattaattaaattgtaataagatctttatgttaatgtaactttttgctcacatcaattttatattgatattatttgtttacctctcagttctggagagagrtgatgatgatgatgatgatgatgacaaaaataggttactgtttttataacaaggattctgcagttaacatttagaggtcttacacagtaccaaacagtgt

SEQ ID NO: 243390 - DNA, 201 bp, Homo sapiens
catttcttgatttttcctaaatggctcttagaaatctactttatatattaagatattccccattgattccagtttatgctaatttgtcttgtattttataygcattttaatactactgaggattaagactagaaaatagaaatctcctctaattccataaaatcttttactatttggtacattttcttcaaagtccttttt

SEQ ID NO: 243391 - DNA, 201 bp, Homo sapiens
atcgtcttaacttgaccaaccctttaacccctcactgccccctgtggccttttgcgtgaataacggtgacaatgcgactgccattctagaatttagtttcycagaagtaactgaggtagttggtctgtttatcaagatacgcttgggagtggggctatctctcacctctgtgtgttggtaacagttttcagtcactctgag

SEQ ID NO: 243392 - DNA, 201 bp, Homo sapiens
agcccaaaacataatgaaaacaataaacacgcattattacccaggaatctactgatcagctggtggttcttctgttctgagtctactctgctaggtctagrctggccttgctcacacgtctgggaaagcttgcctggctgagaatgctagggcctctctccacatggttgtcatctccaggagactagccttagtgtgctc

SEQ ID NO: 243393 - DNA, 201 bp, Homo sapiens
tatttaggagaataataaatgcatgttttacaaactgtaatctgacatgccaaaaagacatttcaaaattctcatgtccaatacagacattgattctgttrtggcgtctgatttaaaaaaaaacaaaacaaacaaaaaaaaaaaacacaactgtactatagtaccacagtacaccagtactatgaaactcaactggttagt

SEQ ID NO: 243394 - DNA, 201 bp, Homo sapiens
ggcacttcacaacttggcattcttagattgagaaaaagacccaatcataacagttaagaaaccaaattacaactgtgtataacatggggaattttaacttmacaactgctctgagttggacgtatgtgagtattctgattattactgctgtaattacaattcttatgaagtatgatggatgtttttcctaggcaagtattg

SEQ ID NO: 243395 - DNA, 201 bp, Homo sapiens
aagtcacctaactgttacttggtaaagcgccataaattcttcctgatctgtcagtattaatagaaagagctctatagaaatgagctttcactgggccgggygcggtggctcccgcctgtaatcccagcactttgggaggccgaggcaggcggatcacgaggtgaggagatcgagaccatcctggctaacacggtgaaaccc

SEQ ID NO: 243396 - DNA, 201 bp, Homo sapiens
tgaactccctcatttatcttatcccaagtcacctaactgttacttggtaaagcgccataaattcttcctgatctgtcagtattaatagaaagagctctatrgaaatgagctttcactgggccgggtgcggtggctcccgcctgtaatcccagcactttgggaggccgaggcaggcggatcacgaggtgaggagatcgagac

SEQ ID NO: 243397 - DNA, 201 bp, Homo sapiens
ccatatagaggctattacaaaagggatctttcgtttgtagtacagttataagaaaacaatgaatatatctccagcttttataaaatgttttttaaagacayatcaattgtgtttgccactaccactacatatacatatgtagaaaatcatttctctttggatttattactaggataatatttatctttttttaagaattaa

SEQ ID NO: 243398 - DNA, 201 bp, Homo sapiens
ggcctgacatctccataaccgtagattttgaccctttattatgatgattgctataagtaaaataattggcttatgattcatcttacaaatcaaatcaatayggaaaagaatcagttggtcaaatcctttgttaagtaatgtcatggcctggtgccagcagtgttaagtgtatggaatagcatgtgaccaagaatcagctat

SEQ ID NO: 243399 - DNA, 201 bp, Homo sapiens
tttaatataagctcaatgagttgattatgtaagccctctgctacttttctccccctacaccaaatgcctaaataaactttatttttcaagttgaaaggacygttctaaaattcgtcattcttaatgctctaaaacgcccgggttcagaaaattaaattacgccatttttatccgtttgagatcagttctgtttcctccttt

SEQ ID NO: 243400 - DNA, 201 bp, Homo sapiens
atatgtaagcagagtttgccccagaggaagatgccaactgcagctaatgtgtactgtattccattaatactaagatatactttttcatattttgacatatstgaaattggaatgtctctcacacttgatggtgtttcatcatgagattgaggctgtttttttaattttcatagtggtatataaaataatggttacatttat

SEQ ID NO: 243401 - DNA, 201 bp, Homo sapiens
ctgtgtcattggaagagtgaatggctttcatttttccccttgaaacttccagttcctggcatctgtaaagaattattccaagtggtattttgctgccttgyggccactgccctgtccaatggaagtgacttttcccagaaaggtcacagtggtctgtaataggtggatattgcattcagggaggaggcaactctgatttct

SEQ ID NO: 243402 - DNA, 201 bp, Homo sapiens
agtacaagcacattgatagagggttgatacagataactgatgttactagtatgtaattttaccacattaatatgacagtttctaaggaagtaaaaatgctrtcttcttctctatattacttggtttacaagatgtttcttaatcctaaaagaactttattatcgtatattcctaaaaaggctctttgacaagtgatataaa

SEQ ID NO: 243403 - DNA, 201 bp, Homo sapiens
tctaagatatttataatgtggataatttttttttttttcagttttaccctggcaactttaattggcttagtggtttctaattctgggcaattttctgtttytttattaagcaatgtgggagctgttgaataaccatcacatttcataggatcagaataatatttctgatttttctcaaactgggtattatattactgtata

SEQ ID NO: 243404 - DNA, 201 bp, Homo sapiens
atttgagaatgattttatttttaaattacaatcaaaagatttattcaagtgaatgagtgctccatgttcgctcttactctgcattcacttccttgctcaaytgcctatttcctcataccacatgataactcagataccaaattgtagaagaatattttccacctgcactgtttagttactgatgtcatgaaacaatcctta

SEQ ID NO: 243405 - DNA, 201 bp, Homo sapiens
ggtggttattgatttacccaaagaagtcaatgaaggccaacagcagttgccttttgcatgagatatactttctgataaagactaaaaaagtaaatcacacrcacatacacacaatttttaggtggggagggaatagctttggcagtagaggaagccttgggaatcactgttttacctccctggttttatttgttttataca

SEQ ID NO: 243406 - DNA, 201 bp, Homo sapiens
tttctcctttattttataaattccactctgtcttttttttttttttttttctggaagattgcctgtttctagcagaaccttttcctcctttctattttttyttccctagtctgctgccaacgaactttttagaatttttttctgagataaaagtaaatttattttgagtatgaggtttacaacatactaattaattagcta

SEQ ID NO: 243407 - DNA, 201 bp, Homo sapiens
accattttgaggtgttttcaagcaatacgttgggaattacaatttaaatagaaaagatgactttctgctcgaaacattctgcttaagttatcaaggactgyggagggcaatgtggtcgtaagggtgaaagcacagcctggtcgtccagcagaaaacatcataattctggcctgggccatcagaattatcccaggaatgcca

SEQ ID NO: 243408 - DNA, 201 bp, Homo sapiens
attagctgtaatctattacacatcatataccaactttgttattctcttgtcagtcacatatcttttctcaacactgatttgaacatttgtccatctttcaraacacgatgttgcaggtagaagagtacaagttaagacaggatgccttaattaaagaagaggcctttactcctgttttcttccattctcacccctctgttt

SEQ ID NO: 243409 - DNA, 201 bp, Homo sapiens
ttcaagtttaatccaaactttaggggaaaagcaggtcaaaagtcatgcagtagatatgtaaaataccattttgaggtgttttcaagcaatacgttgggaaytacaatttaaatagaaaagatgactttctgctcgaaacattctgcttaagttatcaaggactgcggagggcaatgtggtcgtaagggtgaaagcacagcc

SEQ ID NO: 243410 - DNA, 201 bp, Homo sapiens
cacccacacaacaaatctctcctcctctctttactgtttaatactctgtatatcacacctcttcggttccagttaaaactggcagaaagggtggttctgtrtactgatattcttcaagtttaatccaaactttaggggaaaagcaggtcaaaagtcatgcagtagatatgtaaaataccattttgaggtgttttcaagcaa

SEQ ID NO: 243411 - DNA, 201 bp, Homo sapiens
tgtgaggatgagaaaacagaggcctggagaaactgagcagtgtggtcgtgatcactaaattagtaaatggttatgttttgactaagtatttcttgttatcrtgtaatactatctatctcctttaaatagttataaaactcagagtttacaacttctggtcttaacattaaaaaaaaatcatctggaaattatgactatcat

SEQ ID NO: 243412 - DNA, 201 bp, Homo sapiens
tgtgtaagacctgaaattgtaacattaatagaagaaaacatagaaaagatttatggctatagttactattataaacaatgttgaagtgaacatccttttamaagtctccctctgcatgtgtgttaaagttaccttaggctgatgtttttagtcagttggggcttctgtttcttctttagtatgtagcacttgaaaacatga

SEQ ID NO: 243413 - DNA, 201 bp, Homo sapiens
accttaattgtcaggcaaaagagatgaagcaaactgtagaccatcagttgaaaggttttagagactttaatgtagcagtgatgcagggtctctgtcgtagytcagatgtgggatgcactcttaaagtgagctcagtaagtcaggaagaaagcaatcagattccaaacactggaaccataatttctcacttatttcctactc

SEQ ID NO: 243414 - DNA, 201 bp, Homo sapiens
atttctattcctttttttttttttgtgacggagtttcactctttttgcccaggctggagtacagtggtgcaatctgggcttactgcaacctcctccgcctsccaggttcaagcgattctcctgcctcaacctccagagtagccgagattacaggggcccgccgccatgcctggctaattgtgtatttttagtagagatggg

SEQ ID NO: 243415 - DNA, 201 bp, Homo sapiens
ggggttttaccatgttgtccaggctggtctcgaactcctgacctcaggtgatccgcccacctcagcctcgcaaagtgctgggattacaggcacgagcccarttgtattcctttcttggaggtgtttcctatgacttatcctggctacagacctgctggaaagggagtagcatttatgaaactcctacattgtattatgcat

SEQ ID NO: 243416 - DNA, 201 bp, Homo sapiens
acattaaaaagtgaatgtttcccataatcttaccccctacagatgaccactgattacagtttaacacatgtttttccagaacttgttatttgcaaatgtawacctctattgctgtctacatatttaaaacattttaaatgggattgattgtactacatgtactattctttattttgctttttcttattgaaaattgttgtt

SEQ ID NO: 243417 - DNA, 201 bp, Homo sapiens
gcatctttcacttaaaagatagtttggaggagaaaaaattcactgacaggtttttctattatatgatttatattttcctgttggatttcatgataaagttrcagtttcattttatcaaagggaaaacttgttccttgatttttaaataggaagtcatattcagagatacattagtccttttaaaataacatatttaaacat

SEQ ID NO: 243418 - DNA, 201 bp, Homo sapiens
atttgaagggtttcaaatagagcgatgacagaatcagatttatgttttgaggggacaatcattctaactgtaatttggagggaagcaaagctagagagagraagatctattagtggtatgcaaggaaaggaggtttgtgggaggggacgtgtagattagtatagttttataaattttgcccttgaagagcaagacattcaa

SEQ ID NO: 243419 - DNA, 201 bp, Homo sapiens
cctgggttcacgccattctcctgcctcagcttcccgagtagctgggactacaggtgcctgccaccacacccggctaattttttgtatttttagtagagacrgggtttcaccgtgttagccaggatggtcttgatcttctgacctcgtgatccgcccgcctcggcctcccaaagtgctgggattacaggcgtgagccacggc

SEQ ID NO: 243420 - DNA, 201 bp, Homo sapiens
taattttatgactaaaacatgcttttccttttgtctggaagtatttattttctttcactgaataattgcttctctttttttatttttttttaactgtgttrcagcacataaaaagtttatgaaatcaattcagagggtcaagattggcattttaatagaatgtaatagaagataaaagagtgtcacatattgtttcacaaa

SEQ ID NO: 243421 - DNA, 201 bp, Homo sapiens
tagaattagtgggagtgagacatattgatggaaaagatagctagcatttgttgagtttttctcacaagccaggggctttcactgcattttctttatgtcartgaattattttcataagccttgaggtaggtactattcttatcccattttacagacgggaaattgagactttgaggggttagttatcttgctctatcaagg

SEQ ID NO: 243422 - DNA, 201 bp, Homo sapiens
atttaaaattagcattggcttcttaagcactaaagcaatataaacttactaaatgtcatatttgaaactctaattaaaagaatacactttctggaccaggwatatatgtgagtgtacacacacacgcatattcctaattatgatatattgcgttacattatgatgtatatgtgctatttgtttgtagcttccttattctca

SEQ ID NO: 243423 - DNA, 201 bp, Homo sapiens
ggaggttgttattcagctactaaacgcctgaaataatatctgaagtcatgctggcttggcttgtaattgctattcatttcattcatttgttcattcaccaracttttatttcatgcctaatatgtgccagacactgttctaggcaataggaataacccactgatcatgcctttagtaaattcattatattgttggtgagat

SEQ ID NO: 243424 - DNA, 201 bp, Homo sapiens
ggagagatttggaaccagctggacaagagaggaaaggacgattttctgatgtttgcatttaaagcaaaggctcataaacagtgaagccacagtagaaatgkgaatggcctttcactaaaagagggattttacatacatttgtgaaacgtgcagaggctgaggaagagtgaggcaccaagaaaatctgacctccaaacacga

SEQ ID NO: 243425 - DNA, 201 bp, Homo sapiens
gtttcttatctcttctagcatctggtggctgctggcattctttggtttgtgactgtatcactccagtctttgcctttggggtcacattgccttcttttgcrtgtgtgtcaaatctcctcctccttcactcttatatgcatatgtgtgattgtattttgggaccacctggataatctgagataatctccccatctcagaacc

SEQ ID NO: 243426 - DNA, 201 bp, Homo sapiens
tacaagtgttccaatttcttcatattaaacaacttaagtgtccctggatggatgaatggataaagaaaatgtggtatatagatacaatagaatattattcrgccttgcaaatgaagggatcctgccatatgtaacaacatggatgaacccagagacattatgctgagtgaaataaggcagaatcaggacaaatactgcatg

SEQ ID NO: 243427 - DNA, 201 bp, Homo sapiens
gaaaatggggagttgctcaaaggatataaagtttcagttatgtaggatgatgaagttctagagatctgctgtttaacattgtacctacaggtaacattgtrttatacccttaacagttgtttaagggggtggatgtcatgttgaggattcttaccacaattaaaaaaaaaaaggaaagaaaaaaaactgagaggattggga

SEQ ID NO: 243428 - DNA, 201 bp, Homo sapiens
ttccttttagtaacttgaacttctccctgtttcaatgcttataaaccacctctctcccaaaacaaatatgtattgtggttaagaatagtggaaagagtgamatgatttttaattgtggttgagcaggaaattgttttaagttagtttagaattcattgatccaacattctttatacttttaaaaagtaatacagttttgca

SEQ ID NO: 243429 - DNA, 201 bp, Homo sapiens
tttttagtagagacagggtttcactatgttggccagacttgtctcgaacttctgacctcaggcaatctgcatgccttgggctcccaaagtgctgggatgayaggcgtgagccactgcacccggcccccctctttctaaggtggcttatctattcattgaacaacaaacattgcaatagggtagtcattgtttgcaagactt

SEQ ID NO: 243430 - DNA, 201 bp, Homo sapiens
aggtaacattgtgttatacccttaacagttgtttaagggggtggatgtcatgttgaggattcttaccacaattaaaaaaaaaaaggaaagaaaaaaaactragaggattgggagtaaacaaatattttatcacccttgaacctcccaaaatgctctacttacagagacagaaactggaatggtggttgccaggggcttgga

SEQ ID NO: 243431 - DNA, 201 bp, Homo sapiens
agcaattcccttgcctcagcatcccgagtagctgggattacaggcacatgccaccatgctggctaattgttttgtatttttagtagagacagggtttcacyatgttggccagacttgtctcgaacttctgacctcaggcaatctgcatgccttgggctcccaaagtgctgggatgacaggcgtgagccactgcacccggcc

SEQ ID NO: 243432 - DNA, 201 bp, Homo sapiens
aaaaaaaaaaaggaaagaaaaaaaactgagaggattgggagtaaacaaatattttatcacccttgaacctcccaaaatgctctacttacagagacagaaaytggaatggtggttgccaggggcttggaggaaggggaaatgggaagttattgagttactgtttgacggttacagagtttccctggaaagatgaaaaagttc

SEQ ID NO: 243433 - DNA, 201 bp, Homo sapiens
tgaacctcccaaaatgctctacttacagagacagaaactggaatggtggttgccaggggcttggaggaaggggaaatgggaagttattgagttactgtttsacggttacagagtttccctggaaagatgaaaaagttctggagttggaacggtggtgatggttgcacaacagtgagaatatatttaatgctgccaaagtta

SEQ ID NO: 243434 - DNA, 201 bp, Homo sapiens
cctgtgttgtgtgaggcactgggggctgttctgcagcactagcagccacaacagctgcctggaatctgtatagacagttctttgatgtgctgccttcaccrctttgggagcctcttttccttgtacttcatgcacaaacataggtgaatgcatgaaaaaatgtgcagtctataatgtgcatttttgtttttgccagaaaaa

SEQ ID NO: 243435 - DNA, 201 bp, Homo sapiens
ttagagattctgccaagaagaaaaacatcaactcattgaacccatggaattagacgtcttagtattgcttcctacaaatagagcaccttacataaattttmtattaaaaaaagctgaaaggtgagatgataaacaagagaatgagatgagaaaggagatatagatctcaggaaatgaatcaagaatggaaaatcataatga

SEQ ID NO: 243436 - DNA, 201 bp, Homo sapiens
ttctaataatctctcttttcttttcttcccttacccttctccagcttctttgggaatctctgacagatattattttctttagtcatcccagagcagtacarttattaacagctgccattgactgattgcctgtcccagggtttctcatacttcgcactattaacatttgggtaaagataatactttgtcatgggatgctgt

SEQ ID NO: 243437 - DNA, 201 bp, Homo sapiens
gcagaatcaacccaaaaatttgtgtggaaccacaaaagaccctgaatagcctaagcaatcttgatcaaaaaacacaaagctggaggtaccatactttccartgttaacagctactgtgaaactgtagcaatcataaaagcatgacagtggcataaaaacagacacatagaccaatggaacagaatagaggacccagaaata

SEQ ID NO: 243438 - DNA, 201 bp, Homo sapiens
aatctctgtcaaattcccaatgacatttttcacagaaatagcagaatcaacccaaaaatttgtgtggaaccacaaaagaccctgaatagcctaagcaatcytgatcaaaaaacacaaagctggaggtaccatactttccaatgttaacagctactgtgaaactgtagcaatcataaaagcatgacagtggcataaaaacag

SEQ ID NO: 243439 - DNA, 201 bp, Homo sapiens
actcctgtttgaagaaaatggaaggaggatgggcagacatctttggaagcaatgcaggattttaggtaaatagtaagtgtattgtccatttaattaaaagycagtttagcaaaataagtgcctgcatttcacatttctatatctgtttgtattcctactttataataaatccagagacaattgaaaaagtggtaatgtttt

SEQ ID NO: 243440 - DNA, 201 bp, Homo sapiens
aagatcactgtgcttgctctgaagacaggagattagcagggcttatagtcaaatatgagctgtttaattcagaagtagaattggtataatatggtaattamctgacagggagaggattaataatgtctgggttttctggcttggaaaactgagatgatggtggtgatcagctcccacgataggaaattgtgaagaaagaaa

SEQ ID NO: 243441 - DNA, 201 bp, Homo sapiens
gggagatgatagggtcctttaattattaaactggaaataaacagtaagaattaaaggagagtaaacaatagctaattttggtattggaaaatatttgttcrgatctcaaatatgtttctcactaattttgtaatcaagttagtttcctaatcagccaaaaaaaaaaaaagtgggtggggaagggagataataattttacct

SEQ ID NO: 243442 - DNA, 201 bp, Homo sapiens
gctgccaatatacaactatttaaaggctggactatttcaaaagataataatttgttatcaacattcttaggtgcagataaagagcctggaaccatgtctgrtaaaacccttcccaatttacaccagaaagtctttggcaaaggtaatcttgtgctgcttagctgaaggcccttcagtatcaactaataatgtagcctgctg

SEQ ID NO: 243443 - DNA, 201 bp, Homo sapiens
atccagctaccatcagattaacctctttcatctgcttctgtgccgtgtttcaaaaactggccaagtgcctggaacatagtctaaatagcatttttaaaaaygagtaaggctaaaaagaatccatgatttttttaaagtaagtcagatgatttcttccactatattcgatgtttcttgaaataggagttcataatttttttt

SEQ ID NO: 243444 - DNA, 201 bp, Homo sapiens
aaatagttattaaattgtttggacttgacaactcaagaaactcaattattaggtatatcttttggcctagggggtgtagtaaaaaattatggatatgccaygggcaccataaagcagaaggcttgaaactgctgggcttgactttaagttccttgggaataggcattgtgtattagtactttatatctgcagcacccaaaa

SEQ ID NO: 243445 - DNA, 201 bp, Homo sapiens
ccaggtaccacttcatgaagggtcaaccttaaacttgaagggcttcagttcttttagattagggtgaacacaggggaatactatgcagcattaattcttcraagtattgtcttatccagctaccatcagattaacctctttcatctgcttctgtgccgtgtttcaaaaactggccaagtgcctggaacatagtctaaatag

SEQ ID NO: 243446 - DNA, 201 bp, Homo sapiens
caactgtctctctaatacattctttccttaattttatgtttttctctggttggaatttcctaatgtctaaaatattccattctgtgttactcagcaacgaycttatttgcttgcaagcattgtggtgacaaacataataattaattatgtggaattttgtttagaaatatttttgttggaacagaaacaggaattctatat

SEQ ID NO: 243447 - DNA, 201 bp, Homo sapiens
gatactcaataaaaggtcatatatgggtatgtagctcaaataccctccacttttccatttcttgtgtccacagagttgaatatagattgagccagaactargtgtgttttggtgaagttgactgctttttttcttgttcttttttactaatgactttttactaatgactctatacctatcttaaaatgtccatggctctcc

SEQ ID NO: 243448 - DNA, 201 bp, Homo sapiens
ctgttaatagtttcaagtcagcaacagcagagcattgaaccaagtgtggggctcttctaagcttggggcacatgttacgtgcccacgaagctagcccttawagatgcctttgcgtggttcctgagagctgctgtcaaagaccgtattcaccatgtaacctggtgaattgcaaagaaaaattcacatgataaattcctcttt

SEQ ID NO: 243449 - DNA, 201 bp, Homo sapiens
ttaaccaaatctttgcatttttaccatttggctttgattttgttttacaaaaaaggatgacatttggccttggggaagtgaaaaagaaatattgagtagaygaagaagagctgttgctttctatggcttaatacaggattgagatgattatcattttataatcaggaagttttagttttctactattttgttggtaaaaac

SEQ ID NO: 243450 - DNA, 201 bp, Homo sapiens
tagtgatggttatttaactttcccagctggaaatagcattaagtgtttcaaatatccaaggaaccgtgtttttttttttttttttttttttttttctgatkgaaaatacaactggttataacatttgtttttttctggaagcagatagcctttgccatgccttccagttggcaccttgccccttgctaatatgcatggatg

SEQ ID NO: 243451 - DNA, 201 bp, Homo sapiens
aatccttttttggaagtagagacagtacgtaagtaaacaaaactcttaaaagtagttttaaaagttgattttaaaagcctatcatcaacattattcactgrtggcagtaatagctctattaatgagattaatgcgttccaacaacataattattttttagagacttcataactacaggcagaaataatccaggaaagcaga

SEQ ID NO: 243452 - DNA, 201 bp, Homo sapiens
cccccagagcttgtgaaaaaagcccctttgggatcctttgcccagagctcttgttcagattcttcttaggggtagggctctgaaatttgcattttaatcargcaccctagatgattgttatcccatttgatgtggaaaatcactgctgcagataaaggagtacatatggtaaaacaccatatttgtttatattttaatatg

SEQ ID NO: 243453 - DNA, 201 bp, Homo sapiens
gtatttcttgctgatttggaaatatctagtcacatgtaactgacatagtaatttaataaattaccaactgcaatttattaaagcttggaaacatcttgctktggagtgacttcaattaaggaaaatcactttgagtggaatttgaaaacttggcatggtactggggtattggttatttcgaataaatgggtgatacctgaa

SEQ ID NO: 243454 - DNA, 201 bp, Homo sapiens
ataaccacgtcagattgtcttttagttctttgaccgatgaactttccacagtgccataattgctggttgccacacattaacactagcgtagtgggaggttsctccagtatttccccagcgcagtgtagatttcagaagcttttgatgacatgccttcattaatcagagaaagatagaccctctatatatagaagttttgat

SEQ ID NO: 243455 - DNA, 201 bp, Homo sapiens
taatttcgtcatgggaatacagaactttgaataattagtagataaaatcatctgtcaatgtcatgcctaattcacacatgaagtgaacagggaacatccaktacatgtccaaagacaccctagattcccacatatctgtgatgtcttgtacatatgatttcccataaattcacctggagagagtgtagactaaggatcttc

SEQ ID NO: 243456 - DNA, 201 bp, Homo sapiens
ggggccataggtttcgttttgatgtacataaaagctgaccaaggactttgtgaaaactttgggctgccttcctgaccaccttggtttttttccttcacccrtagatcagcgtcattgacaactgcattcttttcaagtggcaaaaagaagttaaaaataaaattctattttagatgtacctttgattttcttcaaaaacat

SEQ ID NO: 243457 - DNA, 201 bp, Homo sapiens
gttagtacctgcatttaaattctgtgaagttgcttgaagacggatggatctgtgtctgagcttcctgattagcaagtctgttgtctatggtgcgattaatmtcttctcagcctaactctgatatagtcactgccctgtataagaaatgtcagtggctctctatcacatctatttaaggtatataagaacccgtaccctttt

SEQ ID NO: 243458 - DNA, 201 bp, Homo sapiens
gttaatagttcctggaattttaatccccttttatcacaatactgggtaaaagttccaaggtaagtaggcaaataatacttaaaggaatattgcatgaaatstaagaggtgacgtatttaaaagaagtatccttgtacagctcgcctttcctgtgataggtgctgcatgttttttttttttttttttctggataatttgtcc

SEQ ID NO: 243459 - DNA, 201 bp, Homo sapiens
ggaaatgaagggaaattgggtacaccctgttagtacctgcatttaaattctgtgaagttgcttgaagacggatggatctgtgtctgagcttcctgattagsaagtctgttgtctatggtgcgattaatctcttctcagcctaactctgatatagtcactgccctgtataagaaatgtcagtggctctctatcacatctatt

SEQ ID NO: 243460 - DNA, 201 bp, Homo sapiens
tcctcttccctctcccaatccacaatcaatctatctttgaatcctatctgctccacctctaccataatcctgctgatcctggcctccaccatggctcttgrattattacagtaaccttctcattgatctccttggttttgtccttaatccccttcccctccacctctcatcgcccaccctggacacagtttctttcttctt

SEQ ID NO: 243461 - DNA, 201 bp, Homo sapiens
aaaaatttattttcagttcagaggtacatgtgcagatttgttatacaggtaaactgtgtgtcacagggctttggtgtacagattatttcatcatgtttggrtaatttttatgttattttttaatgcatttttatccttttgtctgtattattgtgcttccttttttattaaagaagagttggatgtatcttactttggctt

SEQ ID NO: 243462 - DNA, 201 bp, Homo sapiens
tagacagttctttgatgtgctgccttcaccactttgggagcctcttttccttgtacttcatgcacaaacataggtgaatgcatgaaaaaatgtgcagtctrtaatgtgcatttttgtttttgccagaaaaacctaaaagaaataaaagttcttgtaccatttgaaaaggtataattttataatatgatgctttcatgcaat

SEQ ID NO: 243463 - DNA, 201 bp, Homo sapiens
tgttatcttgaacctctgtttttgaaatctctgtctgataaggaaaaaaatattgcaagtcattgtagttacttgtttggtttgtcactggaattccaaayatttgcttggtggttcatggacatgtaaattttgggatatgttactattgtttagggtatactgtctgtaaaataagttattaacccagtgactgttaac

SEQ ID NO: 243464 - DNA, 201 bp, Homo sapiens
tcagaatctgctgtctcagaggtgacatataagatcatataactgcctactcaaaacttttgagtttccactcttgttcagaatgaaatccagtgtcctcrcagtggcctacgagatgctacatgaactggctttatgccacctttctcatcccatttccaaccatctttcctttcattcactttgtgtgagccacagtga

SEQ ID NO: 243465 - DNA, 201 bp, Homo sapiens
aggggacgtttaagtctgcagaagtttctattgctttttgttcagctataccctgcccctagaggtggagtctacagaggcagcgggccttgctgagctgyggtgggctccacctaattctagcttcctgagcactttgtttatctactcaagcgtcagcagtggcggacacccctcccccctgccaggctgctgccttgc

SEQ ID NO: 243466 - DNA, 201 bp, Homo sapiens
acatgaactggctttatgccacctttctcatcccatttccaaccatctttcctttcattcactttgtgtgagccacagtgacattcttttgatgccctgartatgtggaagacccttccactgcagggctatgtccacctcagaatggccttctctaggtacccctgtctcaacgtgcaccacccccgtgactttctgtac

SEQ ID NO: 243467 - DNA, 201 bp, Homo sapiens
tttgatgccctgaatatgtggaagacccttccactgcagggctatgtccacctcagaatggccttctctaggtacccctgtctcaacgtgcaccacccccrtgactttctgtacaatttgtttttcaccttagtccttattacatgcttacttgtttatttatatagtgtcttgccatgaaggcaagagatcagggacttt

SEQ ID NO: 243468 - DNA, 201 bp, Homo sapiens
tattctcctacgatggcatatccactacttggtcccatgcctcattctttctttgatgcactttcttgctttgcaaaagtacattgtcaagtaagttattyggaaagggagcattgaacataaatttctgagccctaaaatgttttaaagtatttaagtcacatacttaaatactagtatgtgatagctgcaagcagcatt

SEQ ID NO: 243469 - DNA, 201 bp, Homo sapiens
tccagcatttctttgaaattattatgtttgttgtctgaactttatctgtttcgttaagagtcttctatgtatatgtttgttttaatctttttttttcttgsatacaacatggtcttcttatatgccaggtaatccctgattttccactcatatttaagaaagtagctagtaccagctttccctgtggttgtataaatgggt

SEQ ID NO: 243470 - DNA, 201 bp, Homo sapiens
tatgtttgttttaatctttttttttcttgcatacaacatggtcttcttatatgccaggtaatccctgattttccactcatatttaagaaagtagctagtaycagctttccctgtggttgtataaatgggtcaattgagtgtgtgtggactgtcaaaccccactttagtgttagcattctagaagatagcagctcttggtct

SEQ ID NO: 243471 - DNA, 201 bp, Homo sapiens
gatttgctgcttattagtgcaatctggcaaaaaatgttagccaagcagctaatattttgtttacatttttgccctagcaaagatataacaaatcccctgaygtacacctcttactcaggtattattgtaaaaatcaacaaggaccatttgaacactgataatactaaaaactgtcggttcccttattgtttctttaaaaat

SEQ ID NO: 243472 - DNA, 201 bp, Homo sapiens
atacaacatggtcttcttatatgccaggtaatccctgattttccactcatatttaagaaagtagctagtaccagctttccctgtggttgtataaatgggtsaattgagtgtgtgtggactgtcaaaccccactttagtgttagcattctagaagatagcagctcttggtctctggatccccataaatgacaaaataaggag

SEQ ID NO: 243473 - DNA, 201 bp, Homo sapiens
acaacatggtcttcttatatgccaggtaatccctgattttccactcatatttaagaaagtagctagtaccagctttccctgtggttgtataaatgggtcarttgagtgtgtgtggactgtcaaaccccactttagtgttagcattctagaagatagcagctcttggtctctggatccccataaatgacaaaataaggagga

SEQ ID NO: 243474 - DNA, 201 bp, Homo sapiens
attcctctctgaattcctactgtagtttagggttatggctatgttttcgcaggcttacaaatggaattctagtattaattgagaaaatccataataaaaargctactgtattaggaaagtctttaaaaggaatttgcatttttattaccccaaacagcatccttatatttttgaaatatagtagtatatttaatatacagg

SEQ ID NO: 243475 - DNA, 201 bp, Homo sapiens
tccatatgaaaccaaaaaaagagcccaaatagctaaggcaatcctaagcgaaaagagcatagctggaggcatcatgttacccaacttcaaactatacttcmaggctacagtagccaaaacagcatggtactggtacaaaaacaggcacatagactaatggaacagaatagagaacccagaaataaggccacacacctatga

SEQ ID NO: 243476 - DNA, 201 bp, Homo sapiens
aagggcatccaaataggaagagaggaagtcaaactccctgtttgcagacaacatgattctatagttagaaaaccccacagtcttggcccaaaagctccttyggctgacaaacaacttcatcaaagtttcaagatgcaaaattaatgcacaaaagtcagtagcattcctacacaccaacaacagttaagcctagagccaaat

SEQ ID NO: 243477 - DNA, 201 bp, Homo sapiens
tcctcatgattcttcctatttgggtattgatgaaggccttaatcaaccatagctgtttagaattttgagtgtagattgtaatttgggatattttctactgrggtcctggatttgcattgtgttctgatttcttaccctatactgcattttcccctatggaaaaagtaccttccttgtattggaattttttaaaagattgca

SEQ ID NO: 243478 - DNA, 201 bp, Homo sapiens
aagaaaagggtagtaaagtgaacaatagaaagtattcgttttattttaaatttttagtccataatttttctttacccatttttttttggagaatttctgtytgtttctcttagtatcatcataatcttaatatagcacttttggaacactagattgtgatttagtttcttcactctcttggtaaatatataatgtagtttg

SEQ ID NO: 243479 - DNA, 201 bp, Homo sapiens
actcctattcaacacactttagaaatcctagccagagcaatcaggcaagagaaggaaataaagggcatccaaataggaagagaggaagtcaaactccctgkttgcagacaacatgattctatagttagaaaaccccacagtcttggcccaaaagctcctttggctgacaaacaacttcatcaaagtttcaagatgcaaaat

SEQ ID NO: 243480 - DNA, 201 bp, Homo sapiens
ttctataagtgatatgcacctcaaatctttctggcctcatctgtaaaaaccctcttccttgttcattctactccacactggccttcttgctggttcttgcmtacagcaaacacagacctacttcagggcttttgcatttccctttatctcttctcccagaaatttgcattatttgcctctcctcctttctttcaggtctct

SEQ ID NO: 243481 - DNA, 201 bp, Homo sapiens
caaagcatttatgagttaaatgttagagcactaggatgcaccattccatagaacaatagtaaaactggcagaactgtttttcatatgtcaattaagactgmactccggagaccattaaggaaaaggatgctgctattccccgcagttaaaggaaatctattgtgtttcctttggtctagatatataagttctgcagaaaat

SEQ ID NO: 243482 - DNA, 201 bp, Homo sapiens
aggcacaccaccattcctggctagtttttaaaaatttttgtggagacagggtctccctatgttgttcaggctggtttcaaattcctgggctcaagcaatcytcctgcctcagcctcccaaagtgctaggcttacaggtgtaaggcaccgtacctggccaaaaatatattttcaaaatgaggtggatgttatactttttgtt

SEQ ID NO: 243483 - DNA, 201 bp, Homo sapiens
ataacaactctaaataaactaggtattgaaggaacatatctcaaaataataagacccatctatgccaaacccacagccaacattatactgaatgggcaaargttggaagcattccccttgaaaactggcataagacaaagatgccttctctctaccactcctattcaacacactttagaaatcctagccagagcaatcagg

SEQ ID NO: 243484 - DNA, 201 bp, Homo sapiens
aattgttactccacaaaacaaagtatatactgaaaattcataaagcctatctttttgcaaatgaaaatgtgatctaatggtctctttgtgaattccttctkggaaatgctccattattgtcatagttggtttatagccttccttggtgttaaaaagagaaaagatgttttctctttccattattgggagctcttttctttc

SEQ ID NO: 243485 - DNA, 201 bp, Homo sapiens
tacaaaaaaatagttgtataaggaagtatttcatgaaggtgacacatctattttttaaaaagggagaaacagctaagagctatttttcctcacacattatrctttgtgaatagggaacaatggtggatacacagagtaggttggacaaacatttttgagggactgacacattatctcacatgcttgatgcctcatggggtt

SEQ ID NO: 243486 - DNA, 201 bp, Homo sapiens
tggctttatagtgttgttaacatttttttttaaaaaaaagcttctttggtttaaattcgttttgccacaacatatattttttcttccctttcaacacatayatgcgttcactgcttttgttggtgtcaggcagtgaattcatatattcaaattgcttttgtcatgtgaacaagaatatgtttttcctttggaattatgcaa

SEQ ID NO: 243487 - DNA, 201 bp, Homo sapiens
gctttagatgatggctctgaactgctggtttccaaccactagggtgctctacctgtgtcagattttcctggatcccatgcatttccccagtccatggtaarggaatcactgggtatctgcttgtcattccccaatacacagcattctaccacattctgacttagaatttccttaccactattttccccccactagcctctg

SEQ ID NO: 243488 - DNA, 201 bp, Homo sapiens
aaacttttggcattggtttctgctgaagttttaatcaacaatctgaattacttacttagtatcagtgctgctctttaaggaccaaggctaaatcccaaccygaaatgactaaatagctttttaacctgccctaaacccagcatcaaactgtaccttgaagttatcagtttatctttctaaatatgctgattcagatatagt

SEQ ID NO: 243489 - DNA, 201 bp, Homo sapiens
atcactgggtatctgcttgtcattccccaatacacagcattctaccacattctgacttagaatttccttaccactattttccccccactagcctctgaggrgctttctgaacatatagcccaactccttgtatatgtaaggcatttgttacactttgatggagaaatgaaattgtgtgacttaacaactattatattttct

SEQ ID NO: 243490 - DNA, 201 bp, Homo sapiens
accactattttccccccactagcctctgaggagctttctgaacatatagcccaactccttgtatatgtaaggcatttgttacactttgatggagaaatgarattgtgtgacttaacaactattatattttcttttcattaatccttgtactatatttgcatgagtagaattttgtaaggttgtaagctctaggttactgga

SEQ ID NO: 243491 - DNA, 201 bp, Homo sapiens
ttttaaaataaaacgagtaacttcccaaatacgaacaagtgaacagctgagcaagggtaaaagaaaatccaatagtgcaggagggtgaggggttggagggrtggggatgggattctttttatgcaacaaaaactggagttctagtcatatgagaaaaaaatttcagggccaaacacaaaaacaaaacccccctactatgca

SEQ ID NO: 243492 - DNA, 201 bp, Homo sapiens
ttagcctctgggggagcccaccaagatagaacttcttttcaacttaatcactcaaaaaggctaacttcaaggacactgagattaccttcaatgttactttytgggagatgtgagaatgagaaacaatagctttcatttctcttcattgaagctaaatttgagaagaataagattaagttaaattctcaggagcttattctg

SEQ ID NO: 243493 - DNA, 201 bp, Homo sapiens
atgtgagaatgagaaacaatagctttcatttctcttcattgaagctaaatttgagaagaataagattaagttaaattctcaggagcttattctgccacccygaattctccacaaagtccctcctgtacttaagaagagggagttttgtgctcgtttgttcaccattgaatccctaacattcagcaaacctcttggctcagg

SEQ ID NO: 243494 - DNA, 201 bp, Homo sapiens
aattttagtaagattttgaatctaggaccaagagaatttgctgtaggcttggatttgggatgagacagaaaggagttaaggattctccagttgttctaacstgagcaactggaaggatgtagttgccattaactgagacagggaagctatggctggagcaggcttgcaggggaatatagggaatgctgttttgggcaggtt

SEQ ID NO: 243495 - DNA, 201 bp, Homo sapiens
tgtggttgtataaatgggtcaattgagtgtgtgtggactgtcaaaccccactttagtgttagcattctagaagatagcagctcttggtctctggatccccmtaaatgacaaaataaggaggactgtgtgttagagtcccagtatctacattagaagtcttagctttgttcacacacatacatacttttctttaagaaagag

SEQ ID NO: 243496 - DNA, 201 bp, Homo sapiens
acatacatacttttctttaagaaagaggcaatctgagtgtgttgcttggttgctggcatcaaggaaaggtaattaaggcgttgggatgtagtctgatgttyttaaccgactgacacttttttaatttcttgttttaagtcctgcctgttttctgtcaccatacccatttcctcagtggagtatatggtgttaggacataca

SEQ ID NO: 243497 - DNA, 201 bp, Homo sapiens
tcctctgtacagcagtatggatactatttctagtaatgtaatttttatcagaattgccaaatctcagaaggaaggattttaggacttatctagcattttcmaaacatgtcagatagtaaaaatctcctgagacttgttaaaaatacagatttccagactcctccctgaaagagtatcgtgtggtagcctgggggaaggata

SEQ ID NO: 243498 - DNA, 201 bp, Homo sapiens
tatacattgccctttttaaatctaccaggtcagtcactcctcctggaagaataagtgtcacgctagtagtgctccttccataaaaaaaactaaaggagtgrggaagaatcattccctcccatagcaataatgatgtgtgtaagacagagttgatgaaaaaggaagtatggaatatggtgggaacatagcctagcctagggg

SEQ ID NO: 243499 - DNA, 201 bp, Homo sapiens
tcctactctttggttgttctggtctcccataaactttccgatattgaatgtttcccagcaagctacttggttcaagatgttttctaatcaatcagaaagayggctgaccagaaggccatcattaaatttttcttagtcttcagcatcagaattctgatcttacccacctggaataatttctctaaatcatacttttatttt

SEQ ID NO: 243500 - DNA, 201 bp, Homo sapiens
ctgcataactgtgagccaattaaagctcttttctttataaattacccagtctcaggtatttcttcatagcagtgcaagaacagactaataaagagactgartcctcaacttgtgggatctacactatctccaggtagatagcgctgaaactgaattggaggacacccagcagacatccactgcttggcgtgtggagaaaag

SEQ ID NO: 243501 - DNA, 201 bp, Homo sapiens
gtaagtcattcatttcaaaaaccatcattgaacacatattatatgctgggcactgtggtaagcacttggaattcagagctgttgttactttcagggatcakaatatatgtcatacgtattattctagagaacagaagcgctcagagcagataaaatgattaacttgtcctcaatggtttcaggaaaggtttcatcaagtat

SEQ ID NO: 243502 - DNA, 201 bp, Homo sapiens
aaattaaaggtaattcttttcactagtgatgtttttctttcttcctcttttctcctctcctttctttatatattaagtgttttctgttatgaaactacaaracttttggcattggtttctgctgaagttttaatcaacaatctgaattacttacttagtatcagtgctgctctttaaggaccaaggctaaatcccaacccg

SEQ ID NO: 243503 - DNA, 201 bp, Homo sapiens
tttagtagagacagggtttcatcatgttggtcaggctggtctcgaactcctgacctcaggtgatgcacctgccttggcctcccaaagtgctgggattacargcatgagccaccacacccagttgagaatagagaatttcgatgcacactacagagaacatattagtgcccatgacccttaatcccccaaacttagtctatg

SEQ ID NO: 243504 - DNA, 201 bp, Homo sapiens
tttaaacagaagaggcgactgttgtgtggcaaatggaatagagtgaaagtcaggttctgcattacaaggcaatctcagaagtccagattagagataataamaccttggattgtgtatggttttggcagtggagataaggagaatgaataattcaagatctgttttggagggaaaacagacactgctttggttctttggagg

SEQ ID NO: 243505 - DNA, 201 bp, Homo sapiens
tttaccttttgcgtatttgcagtttaataaggaaaaatatatacaatgagaagagaagtccttagagtctaaacagattgtagttgaaactcttcacatakcttatagatgaggaaactaatttattttaaaatctgaaataactggggttaaaatcaaagttcttatcctgaatcagtagttaggtgaaattgcatgagg

SEQ ID NO: 243506 - DNA, 201 bp, Homo sapiens
actacaacacactgagatctcattcctctctgaattcctactgtagtttagggttatggctatgttttcgcaggcttacaaatggaattctagtattaatkgagaaaatccataataaaaaggctactgtattaggaaagtctttaaaaggaatttgcatttttattaccccaaacagcatccttatatttttgaaatata

SEQ ID NO: 243507 - DNA, 201 bp, Homo sapiens
aaatattttcttctcttgagtaacatttctttaacacaataatgtaagccaaaaggagaataaaatgtactttattaaacttcttttacagcataaattamtggtgcttatctattcctgaagattttttttggttgttgttgtaaaacttcttataatgggtgttctccccatctacaaatatacttcgatggtcattta

SEQ ID NO: 243508 - DNA, 201 bp, Homo sapiens
ttttggccattaggtataggagacgtgggttctaccacttctaggtttagtagagtataatagcatcttcaatatattctttacccatttacatatatctrttcattggagaggaagctcttcattgtgttccatctcagaatcagtttgtctagaatgcctccaactcccctcccctcgttcccagtccctccatacccc

SEQ ID NO: 243509 - DNA, 201 bp, Homo sapiens
tgtgcttctctgccctactttttcactgggcccagtgtatgtcccacctcttctgtgatgcttcccctgattactacaacacactgagatctcattcctcyctgaattcctactgtagtttagggttatggctatgttttcgcaggcttacaaatggaattctagtattaattgagaaaatccataataaaaaggctactg

SEQ ID NO: 243510 - DNA, 201 bp, Homo sapiens
ccagcctgaccaatatggagtaaccccatctctactaaaaatacaaaattagcgaggcgtggtggcacatgtctgtaatcaatcccagctactcgggaggmtgaggcaggagaatcccttgaacccaggaggtggaggttgcagtgagctgagatcgcgccattgcattccagcctggacaacaagagcaaaactctgtct

SEQ ID NO: 243511 - DNA, 201 bp, Homo sapiens
ttttaatgtaaaaatgaaatatatcattaactgccattgcttttggttggaattatgccaagtcttttagttaatattcaaaatctcatgttactccagakccttgactaaaagttctacattgggtgctacaattaagagatcttacaggccatcattctaatttgcatctgaacttgtcatgattaatttctttccttt

SEQ ID NO: 243512 - DNA, 201 bp, Homo sapiens
gaagagaggagtgtctatgtttagtctttctccttgccacagggaaaggttgtaacaagactcttcgtcagaactagttaaagggattgatcattttgttmccttgtgtcttcatttttggccaagtcaagttcaaatctcaaatgttaccttgaaaatagtcgcatggtttcttttggccattaggtataggagacgtgg

SEQ ID NO: 243513 - DNA, 201 bp, Homo sapiens
ggtctgtaaaagtcttctcaccaaggctgtgggaaggaacgtttcctccaagaactatttggcttatttatctactatgtgccaagtattatgctaaattstgtggtgcaaagatgagagctagattcattcattcagcgatttattcattcaatcaacatttatgcaaaatcatttggattattcaaaaaatatataaag

SEQ ID NO: 243514 - DNA, 201 bp, Homo sapiens
ggattgaaatgattcaagtgtggtcttttatgttatctaggaatattttatgcttccttttatttctgtgttataacaccttggagtctcaatcctacatrgagtgttttgatataaccccctctttggtgagttctggacttcaatttatgtcctctaagatttagtagattgtcaaacctttgtttagcctctcaacta

SEQ ID NO: 243515 - DNA, 201 bp, Homo sapiens
agttttaaaaaaattctttattttctgtataactcttttggccatgacagtgtctacaggaaggcaatatagaggaagactgtggaagtggtggtagaaaygtgtatttaggttctaatgcaacctgaaagtttggccgataatttttggaaaataatatttagtctcctattcaatctggacaactttatatgcttatct

SEQ ID NO: 243516 - DNA, 201 bp, Homo sapiens
tgagcctttgtcacccacaatgcaattaatgttaaaaatagaaagaatggctatgatatgattatgattaggcagagatgagctattgtccaagtaacagraactaatctagcaggccaaagatgacctacacagaaccatcagtgtgctgattgccatttctctctgagtttgatgaaatattcatgcctttgctctcct

SEQ ID NO: 243517 - DNA, 201 bp, Homo sapiens
tttggattattcaaaaaatatataaagacagtcattatcctgcaacaattgaaaatagagttaaagcttatttttgctttgtaatttaatcaaataaacarctatgctacttgctctaacttacttttctggctttttaagtcttgagttcaaactactttcagctggaatcttagggatacagttgaggacagtgctatt

SEQ ID NO: 243518 - DNA, 201 bp, Homo sapiens
aataaccatcacatttcataggatcagaataatatttctgatttttctcaaactgggtattatattactgtatagtaaaaactttttaagtgaggaaaatrtctattcttgttttgctaagtaacattacaaaaagtagatatttttgtgcattccacccccttaagaagcaactattgtagaaagtggtgttttcattga

SEQ ID NO: 243519 - DNA, 201 bp, Homo sapiens
tagagaggtgtttgctgagattaaatgtctgtatggcctttttaaaaaattgttattattatccatggaactcaactcaatggaagtcagtctttccatcrcagataaacctcacttgtgggtcagaactggtaaacagttgtctaaataaacaaagacaaagagagtttgtacatcaagttgagataaacccaaaaaaat

SEQ ID NO: 243520 - DNA, 201 bp, Homo sapiens
agagaacaccaattaaatagttaggtaatttggtacctaatgtctttaacatttcttattaataccttatgaattataatattataatcttccttttaatkaataggttatactcccctgcaggtggaacacttagatgagaagttgtaaatatctttaaaataagggtttaattaattataaatatgcctgctaatttta

SEQ ID NO: 243521 - DNA, 201 bp, Homo sapiens
actcgtcttctgttgtgttgcaaagttggactttttggctgtgttccttagcaactggacaccacatgaagaaataaattttatgttacagtgcatttgartaatacaacctaatggaatctggctagaaagaggatttctttaaaaataattcccttgctctctgagtgggaaaaaaggtatatatatatagctcacata

SEQ ID NO: 243522 - DNA, 201 bp, Homo sapiens
tttgtttggtggacatgacagcacatttcagaaatcgtatgcttttcaggagacctgttttacatttaaaggcagaaatgatagggcttctgtttaaaatrtgctgcatgacttgagaggtcatgagtctagaaaagctactgtgcttttccagggagaatggaagttccattgtacatgggataaaaataactatttctt

SEQ ID NO: 243523 - DNA, 201 bp, Homo sapiens
gattcttggagaatgggaaaaatttagtcatgtgacagccataagtcagacagggagcatggtatgagcaagacaaagggaggagctgtttgatttgcctrgagaattaaataagtacaagaatattggaaaattattcagctcggaaacataggttgtggccagactgtggataaccttaaaagcccacagctttatgga

SEQ ID NO: 243524 - DNA, 201 bp, Homo sapiens
atgtgattaaggaagcattgaaagcacagtttaaaaagccttaattgctgagatgatttcatgattattgttgtttctttagaaaccttgacatctcagcmtatctaggacttttcttctctcaatatcttgaagagctaattttgtttgcccccgtttttaggtttccacttcctatttttatgttgcgtatctgagatt

SEQ ID NO: 243525 - DNA, 201 bp, Homo sapiens
gcattgctttagcataattcattgtcatcagtaatgggaacaatcataaggaatttttgaagctgaatcttttaaaaagtaattgtgttaataaaaatttyagttgctttatagtttttgcaacagataatggtggaatgtttaggaactgtggtgggtatattttctgtttcttaaaagttgaacaattccgttctttta

SEQ ID NO: 243526 - DNA, 201 bp, Homo sapiens
aattagtaaaagaatgtagaaagtaaaagaatggaggaagatatgccatgcaaacagtgactgaaagagagctgactacactaatatcagtatgttgtgtrtcagacacaatagattttttttaaataataaaaccgcatttttatgttacaagaagattttatataatatctgcatgatataccaattttctcataatct

SEQ ID NO: 243527 - DNA, 201 bp, Homo sapiens
agaaacgttctccatccatattcaaatatggttgatatgaaatacaaaatgccgccgtcttaatcatgcattcagtcaaacaataagtgctgatttttgtrtataaaatttactagtttttattttaattttgctgcccagttctgttcaaagttagagccttgggtattgcttttgggcactgaggatcctgaatggagg

SEQ ID NO: 243528 - DNA, 201 bp, Homo sapiens
aaaagaatgtagaaagtaaaagaatggaggaagatatgccatgcaaacagtgactgaaagagagctgactacactaatatcagtatgttgtgtgtcagacmcaatagattttttttaaataataaaaccgcatttttatgttacaagaagattttatataatatctgcatgatataccaattttctcataatctcttctgt

SEQ ID NO: 243529 - DNA, 201 bp, Homo sapiens
cacaaacataaaaaaaaattttctcctgttattagcctgcatcttagggtgccgtatatattctgagaaataacctgattgtttgatttagaaaaaaataygtttttcttacatcttttttccccactatctaaaaagagaattaaattggtcttatgcaatcatcatccatttattttgcttttgttccacaaatggctc

SEQ ID NO: 243530 - DNA, 201 bp, Homo sapiens
ttatgcctgttagctctgagtctttattgcctagtggttctcaaactttagcatgcattgacatcactcggagagtttgttaaaacaagccctattctcakagtttttgatttcgtaagtctagagtggggcacaggaattgtgatttttacaagttcccttgacaatgctgttgctgcttggggaccacactttgggaat

SEQ ID NO: 243531 - DNA, 201 bp, Homo sapiens
actgaattggaggacacccagcagacatccactgcttggcgtgtggagaaaagcacccacctttgatcacagacatcttctgtattgaagattattgtggkggtgtgagagcagagaaaaaaacaccggtttagagagttttcctgacacaggctcaattggatggagtgtctctcatctcttctgtggtcccatgaacgc

SEQ ID NO: 243532 - DNA, 201 bp, Homo sapiens
ttcttaagtttgacattccagtaaactcttaggaaaatgtccttccagttgcttttcctctaagtgtctagaagtggaagtacattaaaattaaaagcagraagtcccttaaattccttttaagaagtccatcctgttagtctgactcctagaaaggctatggttgctattactttgggctggaacaagattacaaaagac

SEQ ID NO: 243533 - DNA, 201 bp, Homo sapiens
ttgaaaatactgatgtttcactgtatcagcatatacgatgttagtggctatggatttcaaagacccatagaaggaggagctcgaagccctcttatttcatrgtgttcattattctgccagaattggttgccacattctgttttccaatgccctgctcagtccaattttagatgactcaaaccatggacttaccattattta

SEQ ID NO: 243534 - DNA, 201 bp, Homo sapiens
agcaattctcctgccttggcttctcaaagtgctgggattgtagccatgagctgcaatgcctggctccactaattttggtatccatccttgaatcttgcctrcatcagttatttctgccttgttccaatggtaattatatattttcctcaattcttctacatttattagatgatatttttctgtaagaaagagctgttttct

SEQ ID NO: 243535 - DNA, 201 bp, Homo sapiens
tcaatgaaagtttatgatagtcatcaaaacatgggtctgatcattagctgcagagctgacattgttgaaaatactgatgtttcactgtatcagcatatacratgttagtggctatggatttcaaagacccatagaaggaggagctcgaagccctcttatttcatagtgttcattattctgccagaattggttgccacattc

SEQ ID NO: 243536 - DNA, 201 bp, Homo sapiens
ttaatgctgacaataggaaaataaataatattcagttcaaaattgagcacatctttagaccaagacggtgtttgcaacatagtagacactgaatatatacktgttgaaatgaatgaatgaaccttaccaatgtcaccctccataaccatctgttgctatgtagttcttcaatgtaatggaaaacacacagcatgcattgca

SEQ ID NO: 243537 - DNA, 201 bp, Homo sapiens
ctgaatagctgggattacaggcgcccaccaccatgcctggctaattttttgtatttttagtagagatggggtttcacaatcttggccaggctggtctcaamctcctgacctcaagtgatgcacccaccttggtctcccaaagggtgatattattattatagtaaatatcacattgaacaatttttatctaaaactaatgtc

SEQ ID NO: 243538 - DNA, 201 bp, Homo sapiens
ctgttagattaagtcaatgctagatagctgggccaaatgagctgtctttactgttagttgactgatcttacacaaggggatgaccgattcagcaggtttcktcttatcaggggtccccaaaccctgggccacggaccactactggtccatggcctgtaaggaaccaggctgcacagcaggaggtgagtggcaggtgagtga

SEQ ID NO: 243539 - DNA, 201 bp, Homo sapiens
ggaaaacacacagcatgcattgcagcatgatgcctctgttctcatcatacttcactaattgattcagcaaacagcttccacccagacataattctaggcawgtatatttttaagtgaaaggattctatcaggtgatgtatcctttttctaaatttcccatctttttcttactttttggaatgagttcagatatataggatt

SEQ ID NO: 243540 - DNA, 201 bp, Homo sapiens
aacatgtgcactatgtttgtgggctgttctctagcaaccaaagaagcagaaggtgattgccaagaataagtacttccttatatttagtgaaattatttttwaaaaatacttttaataataataataagagccagtgtaaaatagttgcttagagtcaaaagaaagaataaggagaaggagaaaaagataaatcaaagtgaa

SEQ ID NO: 243541 - DNA, 201 bp, Homo sapiens
taaatttcccatctttttcttactttttggaatgagttcagatatataggattaggcctataaggtgaaggaatttgaaaacccacaggaaattagaaaasacattgtgtttgtgaattcagaagtgacctacatagcaaatgtgcaatttgcttcagatagaaaccagtagattccgtatattcagagatatgtggcata

SEQ ID NO: 243542 - DNA, 201 bp, Homo sapiens
aattcaaggtgggagatgcagaaaaggtaatagtatcctttgcagacagagacacaaaagcatggacacgcgaatgatactgtgcaggaatagtcaggacycatagtcagctgatatgttttagtaaggctccaccagtgcttatacaggtgttcattctgagtagcctgtgcctcggtagtagctaataatgttgaacat

SEQ ID NO: 243543 - DNA, 201 bp, Homo sapiens
caagtgaatcaaatatttggagatgggaaagtaacagaagtaagcattaacctgagaaacaaagatgacactaactcacaagtgtcgtacataattttcamaaattattaaaagcgtttattattttgaagttgtcacaggataggaatatgagctgtgaaaaattctcttatttttcaattatgattaagcttataagaa

SEQ ID NO: 243544 - DNA, 201 bp, Homo sapiens
aagatacattattattgtctaacatatgtgatgttattatgggtatggtacaagatacagtggaaacagagatgagaaagctgatcttttacttggagtgkttggctaagaattctcatttcagtatggctttaaagaattcaagatacggctgggtgtggtggctcacacctgtaatcccagcactttgtgaggctgagg

SEQ ID NO: 243545 - DNA, 201 bp, Homo sapiens
ttttaaaatgtaagcacagagactgtgtgttagatgtgtggccttctgggtgacatgttctgctcctagatactctaagggtgaagtcagcaaacctttgkcagtgcaggtggggagtgaaaccaatagtcttgcatagataactccccagagtccagaatgagccaaaagtaattgatatgccagtctttgccagcatgt

SEQ ID NO: 243546 - DNA, 201 bp, Homo sapiens
tggatttgtttctttaaagggtggataatatattctatgttacaagggaaattaattggtttttaaaaacatcaaaacattggtagtgtcttatggatcgytcagtagttgagattgtgaatgaatataccacaacaccatgtacagatttagtctcacaagttttattatatatttatggtagaattatcaaacagtttt

SEQ ID NO: 243547 - DNA, 201 bp, Homo sapiens
  misc_feature (1)...(201): n = A,T,C or G
tttgctttgtgatatttcctcctttgttaaatttattttaagaataatgacttttttggagttatcatattatctcctaacatgtgtcattatcttgtacngttactcaatcttgtcctgtatttcccttgtcttaaaggaattgcctatgaccccttgatgctgaaacaccagtgcgtttgtggcaattccaccacccac

SEQ ID NO: 243548 - DNA, 201 bp, Homo sapiens
ttgttattaccaaccttctgaagcctacttttgtcaacttgacaaatcattctccatccagccttgttccattgctggcaaggggctgaaatgctttgcargagaagaggcactcaggcttttagaattttcagcttttctgctctggtttctccccatctttgtggttttatctacctttggtctttgatgttggtgacc

SEQ ID NO: 243549 - DNA, 201 bp, Homo sapiens
agctgctattcgatttagttgctataaatgtccattgttgtctgaaatccagtaacattctgcatttgaatctaaggcatttttaaaagaaaaatgccctycatgggttttctcacattattttaacatttactaattatttcttttactgggtctctgttaggttctaaacatgattcaagtactggaattataaaattt

SEQ ID NO: 243550 - DNA, 201 bp, Homo sapiens
tttgatatgattcacactggtctaaaaattagaaagtctattatcatccttttctggttagtcttctttttcaattgcttatatacattacattattttcrttctttattatttgaaaccatacaattcagtttgtatagcactaaccgacgtaatatcaaacacaagttgagatgtcagaaacactatcatacaactatg

SEQ ID NO: 243551 - DNA, 201 bp, Homo sapiens
cacccatattagcgaagaaagtattgcccatataaatttatttactttatgaaattatgagatgctaacctaaaccaaacatgaaatggaacttctaaaastgctaaaaattaattcacttttaagatacctaggactttaatggcagatggacatctgcccatgtgtgaatgatattagaaaaattcaaaattaaatttt

SEQ ID NO: 243552 - DNA, 201 bp, Homo sapiens
gtttccccatctcagtaaatagtttttgaaatttgaatttttatgatggcatactggtcttcaagcctatgttaaaaattttataaagcccagttgcattmattagtcattctttctcaaagctagcaatgatgagaaaggggtttcggagccctgaagttgagaagggaagtgttgaagtgtctgactggggccagcagg

SEQ ID NO: 243553 - DNA, 201 bp, Homo sapiens
caacagcatgcaaagtatattctccaactacaatggaatgaaattagaaattaaaaaaaataagaatttagtaaattctcaaatatatgggaattaaacartatactcccaaataaccaataggtcaaagaacaaagcagggtaaacatacatgtatatccatattaatgaattaatttaaagaatttttagtcacattat

SEQ ID NO: 243554 - DNA, 201 bp, Homo sapiens
gaaattagaaattaaaaaaaataagaatttagtaaattctcaaatatatgggaattaaacaatatactcccaaataaccaataggtcaaagaacaaagcarggtaaacatacatgtatatccatattaatgaattaatttaaagaatttttagtcacattatggcttaaaaataatttttcagtattgtccaaataaagta

SEQ ID NO: 243555 - DNA, 201 bp, Homo sapiens
tgttaagttcagagcacatgtgtttaggagtctcaatgctggctgaagaatggaaaggacttttattacaaatagtggattttatttaattttgaatttayattaaatgatgaaaaaataggtcctgcaataatttagagaaaacctgtctcttcagggcaaggacaaatcaatattgagtgtttcaattgaattgatgca

SEQ ID NO: 243556 - DNA, 201 bp, Homo sapiens
gacagctggattttcatatctgcttctgcatgcaatctgtagcaatatgtgtttcaggttgagaatatgtggaaaatttggccttccacagataatattgytcaaagaggaagaagtattttaagaatctttgcagacaattatggagattattctataataccacaccgaaacttcaaaagtagtagttttctaaaggtt

SEQ ID NO: 243557 - DNA, 201 bp, Homo sapiens
gttttccttgaaagttctaattttattagcaacaattactctcagttattttccttaccgtgacaggcactttgggttcatttttgataagttataggccmaatactcaggtctgaataatcagttaattgaatcattcaagtaaaaatgttttttctgtttttaagaaaacagctagtttggcttgcaactcaaacaatt

SEQ ID NO: 243558 - DNA, 201 bp, Homo sapiens
tatattatttcttggtgaaaaaagagtaggaggaaaaatgctaaattattagtcatggttgcttttggtagtatgattacattttatgtgcaccttctgastaattattgagaagatgccttctttttctttggtcttctgacaagctaaataaaaccaatagaaaaccagccaagtctgagtgaattttatatcatcatt

SEQ ID NO: 243559 - DNA, 201 bp, Homo sapiens
atactcccagctgtcttgcctaagcacacattagatacatacattttagaaggatccataacttagaacattagtggttcccagttttcctcctcaccatsgtgttggactgaacagcccaagtggtatatgtattcagcctgccatatgtttcagtaagagcaaacatctggtaccagtttcccccttgcttttcttgat

SEQ ID NO: 243560 - DNA, 201 bp, Homo sapiens
ctcaggcatctaacaaagtgcccagaacattgatagcatttagtaaatgatgaatgaatgcatccataaatgaaggaaggaatctgttccaacatctttgrgaggaaagagtcagaagcatcaaaaattaattctcaaataatagagattagtacaatatttgttgaacaataacagccattgaaagcgcattcatcacca

SEQ ID NO: 243561 - DNA, 201 bp, Homo sapiens
ttaccagttgtgcataggtgctttcctatttgaaagcagcgcatcattcagcctcctgaatgtatttagaccttgtaagtataattaactctttcttgacrggggcatatttaagattttttaaaaaatacatatatagtgtgttgcagcaaaacctttctaagaaggagtcagtaggatgtagggataatttttttctac

SEQ ID NO: 243562 - DNA, 201 bp, Homo sapiens
aggcagctttcctgaacttcaggcatgtatatccagatgatctggtagccttctagaatggccagactgaattgctagcatttcagcaaaattgctctacrcacagtgtttcccatatcaattaatgacacttacttctaattgctcaggccagaaatttttgaaaaatcattgaatgttgtcttttcctcatgccctaaa

SEQ ID NO: 243563 - DNA, 201 bp, Homo sapiens
ctatccctgtggattcaccgagtttttgctcaaaaccagatacatgatacagaggaataattttttgcatgtagaaagagcaatagcctttaagaattacytactctctattctttctcctgaaagtgtcttttattcaaccctaatatttcagaaaatacagagtaacaaccattctatcaaaataactgtttccattga

SEQ ID NO: 243564 - DNA, 201 bp, Homo sapiens
atcaacaggtgcatgagttttttggaaatgaaaatccctgcaacattctttagcagtgttcctcaatctctactcttaccttctgcccagtcactaggaarttgatgatgcttggcttcctcatttgactccaaagagtaccctttaaccagtttgtttttttgtttgtttgttttatttcactgttttcttctggttccc

SEQ ID NO: 243565 - DNA, 201 bp, Homo sapiens
aaaattaaacatcactttcttaaacaaaatttccctgaacctcttcaacaggtttttcttaaaagtttttcatatcatcccgaatttttcctgtatagcaytcactgtatttataattacattgttgtacgaacatcatagagtatacctacacagacctagatggtatagcctactatgtacctaggccatatatgatag

SEQ ID NO: 243566 - DNA, 201 bp, Homo sapiens
tttgttgccaacccacaacatccttaatctcctttgctgtctgtacagtgcagcacaaggactgttgccttttggttgagcaatagatattggatgaacakttataagtaaggaacaaattaatattagacaagtagttatttgtttcttacttatattgccatattccttctggtagacactggacaggtaggatgctgc

SEQ ID NO: 243567 - DNA, 201 bp, Homo sapiens
tagtaaaaaaaaaaaatgtgttaccaaacgtatttttatgctcttttcttttttttttttcttttcttctttttttgagacagagtttcgctctgtcactsaggctggagtccagtggcctgatcgtggctcactgcagtctcagcctgctgcattcaagtgatcctcccacctcagcctcctgggactacaggcatttga

SEQ ID NO: 243568 - DNA, 201 bp, Homo sapiens
ttggcattcatacctaggagttgaaagtacatcaaatgctccttgatgagctaagcaaagtgaaaatgtacgtgctattcccctaacaaggaaagccgctkaagtttaaataacagaaaagagcacatggatagagaaaaagttaatgcagaacattttgttgctttattattcagtgacagagattagccagtggggaat

SEQ ID NO: 243569 - DNA, 201 bp, Homo sapiens
tacagaaacacacatatatgcatacacacatacatacgtatatatatacacacatacatattctggtaaaaaaaatttcacgcataatcaaagcccaaagraggttaaatattcagaatattagctcattaacattcagcacattggggataatgtctatgttaatggtatccgttcatctaacagagggttggcattcat

SEQ ID NO: 243570 - DNA, 201 bp, Homo sapiens
ataaaccacaaagtctagaaaatgtgtgtcaactgaatcacatatcttaaagtacaagggtaatgtatcatttccaaagattatttctttagtaagtaatytgcaatatacgtaattcttttaagctgagaattttataattgagctttttggtattttcatgtctactggaaggtgggtggaggacagcagagtgcagag

SEQ ID NO: 243571 - DNA, 201 bp, Homo sapiens
tttatttactttatgaaattatgagatgctaacctaaaccaaacatgaaatggaacttctaaaactgctaaaaattaattcacttttaagatacctaggamtttaatggcagatggacatctgcccatgtgtgaatgatattagaaaaattcaaaattaaattttagaaagtattaactaaacaaatgttacccttgtgta

SEQ ID NO: 243572 - DNA, 201 bp, Homo sapiens
tacaataccgagtacaaaatatacatcccctgtcttcaagaaggttactatatggtgtgatcagcaggcattaattagacaatcatacaaataaatacacrattacaaatttcaaaggggttttgagtcattcattttatattgctgtgattttgaagactcttattgattgtgcttgagcaagaaaaaaatgaggaagat

SEQ ID NO: 243573 - DNA, 201 bp, Homo sapiens
ggttttgagtcattcattttatattgctgtgattttgaagactcttattgattgtgcttgagcaagaaaaaaatgaggaagattgtggtcagctgcctctrtagtcttgacagcatcagtggggccctgtgaccaagagacagaggaggtaatgttacatgtgagagtgtgaaaaggaaaatatcctagatcttgtgatga

SEQ ID NO: 243574 - DNA, 201 bp, Homo sapiens
ctggttgagaaagatgccatggttcagtggtagatactaaaaataattgcaatcatagtatacatttttatcagattttatatctattcttatactatagyttgactccatttttaacctgtatgaaactaggaatggaattaatggtaggccaggtgtgcacattgaataggtagctcagagtaatgaaggaaaaggcaa

SEQ ID NO: 243575 - DNA, 201 bp, Homo sapiens
ttatgtctcctgacatgccatttctcagcttgacagagcacctctagagggcataggctttaataagatagaatatgtgacttttttttacttccatagayagtgagtggtgttacattttataatgaaataatgaatagctgaagtgacagcttacccaatttgcctttcttcgtgagccaaatataaaactagaaataa

SEQ ID NO: 243576 - DNA, 201 bp, Homo sapiens
tgatgcagttatttcttaaactttttttttgttttaaattgactaaaatatcaggaattttctgtgctgaagtcaatgccccaggacattgtgaatttatrcatatgaagggagacataatctcttatgcaccccacatttgattttaaaagatcactttgaaaagtatgaagaggtgtttagtaattcaaggaagaaaaa

SEQ ID NO: 243577 - DNA, 201 bp, Homo sapiens
tttgactgtagcaaactgctttttattaaacgtacttgacacaacacaaggagatggcagtgtgctttccgactttcagatttttgttgtcccaatgttasttcatctcacagcctgcctggcttttccaccaccaattttatccttgttcttactaaagagtaaatttgtaggcaagtttgattgttatgagataagaat

SEQ ID NO: 243578 - DNA, 201 bp, Homo sapiens
aggaggaaaaaactaaatactgtttattgctagtagttacagtaattgtatttaccaggttttgactgtctacaatgtgttagtcactgtgcaaggccctrtatataataaaccttatttaatattcacagcaattctatggaataggtattataaatcccgttttgtaaatgagaaataaagtccagaaagtttaataac

SEQ ID NO: 243579 - DNA, 201 bp, Homo sapiens
ataccaagtcataatgtatatttttctatcccctttcttactcagtattgttcattttttagtgttattcagtattttcagtatcatgatttgtagaaatktttataataatgacataattataccataatttcttttactattttccttatattgggaatatacaccatttgcagttattcagtgacactttaaagtagc

SEQ ID NO: 243580 - DNA, 201 bp, Homo sapiens
ttcatttacataaatcactatccacatccttgattttttttcttttgaaatgattcctagaaatagaatcactcttaaggagtgtgaacgttttaaaagaytcttgatatagtgtgacatttttttccctgggaaaggtgtaccaatttacactcctaccagcagtgtttttcacatcatgtgcttgtcattatctattag

SEQ ID NO: 243581 - DNA, 201 bp, Homo sapiens
ccctgggaaaggtgtaccaatttacactcctaccagcagtgtttttcacatcatgtgcttgtcattatctattagcatcaatgatatatgaaaatgttaakgtttcataatttacatttacttgcttaccagtgaagttgagtgttatgtcttatgtttactagagaagacaggcacactggaatgctccttcttttcagc

SEQ ID NO: 243582 - DNA, 201 bp, Homo sapiens
ttctttttatgctgggcaactggtaattttgttgttcaccctgagttccccaacaatgttgaactagcaattttcaaacctgtaaacatttgcttttgtartcaaaattgaaagatacaattgaaaggaaagatttagttcacaaactgtataatcttctgattctgcagaattgaaatgaataaacttgaacacatattt

SEQ ID NO: 243583 - DNA, 201 bp, Homo sapiens
cacgtggctgaagaggcctcacaatcatggtggaaggcaaagaggagcaaagtcacgtcttaggtggcagcaggcaaaagagcatgtgcaggggaactgcsctatataaaaccatcagatctcatgagacttattcactatcatgagaacagcatggaagaaacccacccccatgattcagttaactctccccaagtccca

SEQ ID NO: 243584 - DNA, 201 bp, Homo sapiens
attatccaacaatctcattttattgataacaaatgctagaaaaagaaagtatcagaaatggctttgaaacaacgtttgcattgaatctacaaacatttttytggggatagcccataaaggcattaagcaaaaaaaaaaaaaaaaaaaaaaaaaaatttacttctatttcataaccaagtacaacagcttttgaaatttaca

SEQ ID NO: 243585 - DNA, 201 bp, Homo sapiens
catgctgctgataaaaagacatacccgagactgggtaatttataaagaaaaacaggtttaatggacttaaagttccacgtggctgaagaggcctcacaatyatggtggaaggcaaagaggagcaaagtcacgtcttaggtggcagcaggcaaaagagcatgtgcaggggaactgcgctatataaaaccatcagatctcatg

SEQ ID NO: 243586 - DNA, 201 bp, Homo sapiens
taaagggtgctgctaaacatcttacaatatataggacagagcccaacaacaaataattatttggactagaatgtcaagagtgctgagtttcagaaagcttkggaagaggaggataaatcaaccgatgacagcttaatggaaagtgatgtatgccttgatagagttaggtcgagggtgccttgagagctcacaaaaggaaaa

SEQ ID NO: 243587 - DNA, 201 bp, Homo sapiens
agctgcttgggaggatgaggcaggagaatcgcttgaacctgggaggtggaggctgcagtgagccgagatggcaccattgcactccagcccaggcgacagasagagactctgtctcaaaaaaaaaaataaaataaaataaaataaaagaaatggttcagacccataggcattatgatatgtttcacaagaacaaaacaagaa

SEQ ID NO: 243588 - DNA, 201 bp, Homo sapiens
tatgatggatgtttttcctaggcaagtattggaagtcagtaaggatggtggctgtgccaaggggctgtgctctggctggtgctcagttgcaagaggagacrgagaccgtttctgccctggcctccctaacagtggatgtggaacagccctttgctcaggaagacagcaggtatgaatccaacgtgcgggaataatccgggt

SEQ ID NO: 243589 - DNA, 201 bp, Homo sapiens
ttaacagcgtccctgactcctccttactaagtgctagtaacacccttcttccctacctcacacccattgagataatgagaaatgtctctagacattgtcaratgtactctgtggtgcaaaattctcctccactccccacccgagccacacactgggatagagtgtggagcaggatctcacccgtttgctcacacctggtga

SEQ ID NO: 243590 - DNA, 201 bp, Homo sapiens
cattaaatggggattgactgatgtacctgcgggacttctggatccttaacttgctaatttgtgttgtgcatctatcaacaggttagagtaggatttctcarcctaagcactaatgacactactgacttgccaaaatgtcagccccttgattccccattgcgggagctcttctgttcattgtggtattttaacagcgtccct

SEQ ID NO: 243591 - DNA, 201 bp, Homo sapiens
tctctctgtgtctctctttttgctgaaaattatcttgctgtttggaaagacagtaaatatttcttcctttgggtaacatctgaagctttttgtcccactcmcttttcaactgtaataccacctatgttaagactgtttaagatggctaatcttttagacactgatattcctaaagtgttcaaatggctcttatcccttgag

SEQ ID NO: 243592 - DNA, 201 bp, Homo sapiens
ttctaaatctcaacgttgtttgccaaatatagttctttagagacagtagtaaatttaaaaatgtttatctccacaactgatctgaaaagatattcatgtargatagcttggtctattgtatttgactcagatctacttgaagaagtatagatttatttgttttatatatgaaatctgcagagtgaaaatgatttcaaataa

SEQ ID NO: 243593 - DNA, 201 bp, Homo sapiens
ctagagaagagtgtctcagtttttcagttttctcacacatttttatttattttctggctagtattttgaatataatggacctagatgcagttttgtcacaygtttttatttattttctggctagtattttgaatataatggacctagatggtaaaaagttttatgtaactatttcacatatgactattttccaaagtgaac

SEQ ID NO: 243594 - DNA, 201 bp, Homo sapiens
ccagaatgggacttagcaagaaatcattaaagaatgaatagtttacttggtaatctctctggtgttttcaaaatgttgccaaggttagagatacaggattyagtttgaccttgatgtcaggtttgtgttccttggtattctaaattgagaatgaacgggtggtttatgagtgtccaacaggagcttatcctcacctgaact

SEQ ID NO: 243595 - DNA, 201 bp, Homo sapiens
ttttttcagtaaataccacaattttatttttaggtgtatgcagcatgaaatgtatgtgtgtatgtgtgtgcctgcgtgtctgtgtgtgtgtgtgtgtgtgwgagagagagagagagagagacagagagagtttgagagatagaacagagagattgattaattggttgattgattagttggttagttggagcttttcccaga

SEQ ID NO: 243596 - DNA, 201 bp, Homo sapiens
agtctagaaaatgtgtgtcaactgaatcacatatcttaaagtacaagggtaatgtatcatttccaaagattatttctttagtaagtaatttgcaatatacrtaattcttttaagctgagaattttataattgagctttttggtattttcatgtctactggaaggtgggtggaggacagcagagtgcagaggaagaggcaat

SEQ ID NO: 243597 - DNA, 201 bp, Homo sapiens
acacgcctgtaatcccagttactcagaaggctgaggcataagaaccacttgaacctgggagatggagattgtagtgagctgagatcacatcactgcactcyagcctgggagacagggagagactctgtctcaaaataaataaataaataaataaatttaaaaagaagtgacatactgttccttctactgtattccattgac

SEQ ID NO: 243598 - DNA, 201 bp, Homo sapiens
tattttaacactttatttttcaagaaaacacatactttgaaaaatcgtataattataattccacagtgacaatttctataatattttgcatttctattcctttttttttttttgtgacggagtttcactctttttgcccaggctggagtacagtggtgcaatctgggcttactgcaacctcctccgcctcccaggttcaag

SEQ ID NO: 243599 - DNA, 201 bp, Homo sapiens
ttttttggcctgacgtggcactgtttttaataagttgaggcagttagtagtccttcatgccaataccacttaattttttcccctactgaatcattcatacktagtttagtgattctgttgggagcaaagagcaaaaccagcagctttcttatcaccatgagaaatggatctggaggggttatttggtgtcctcttcagaaa

SEQ ID NO: 243600 - DNA, 201 bp, Homo sapiens
agtggtgcaatctgggcttactgcaacctcctccgcctcccaggttcaagcgattctcctgcctcaacctccagagtagccgagattacaggggcccgccrccatgcctggctaattgtgtatttttagtagagatggggttttaccatgttgtccaggctggtctcgaactcctgacctcaggtgatccgcccacctcag

SEQ ID NO: 243601 - DNA, 201 bp, Homo sapiens
acagtgctgaaatgtttaactcgtttattcaagtgccaacacaaagtaattacaaaacaattctgggacgcaaaaccaagctactgttgtcccttcagggwcttctcggcagttccaatgagaaaagtggagagcaagtttagtgcagaatcttatgatgccaagaagcagggattccagcatatcttcttgcacacatag

SEQ ID NO: 243602 - DNA, 201 bp, Homo sapiens
cctccagagtagccgagattacaggggcccgccgccatgcctggctaattgtgtatttttagtagagatggggttttaccatgttgtccaggctggtctcraactcctgacctcaggtgatccgcccacctcagcctcgcaaagtgctgggattacaggcacgagcccaattgtattcctttcttggaggtgtttcctatg

SEQ ID NO: 243603 - DNA, 201 bp, Homo sapiens
tgattttaaaagcctatcatcaacattattcactgatggcagtaatagctctattaatgagattaatgcgttccaacaacataattattttttagagactycataactacaggcagaaataatccaggaaagcagaaggatgtgttccacataagcaagaatatataacaaattttaaatagtgagaaaagtatctttgtc

SEQ ID NO: 243604 - DNA, 201 bp, Homo sapiens
acataggtgactgtaaaatacctctttgttttaaatcaaatctaagtaaggaaatacattcatctgtggtgaaacactttggaatgtgcaggttttctgayatcaagactgcaaagcgctgaaaactgcaagttaatggaaattcaattagacatttgttttatagagtagtctaactagatggcagcacgtaacagtgta

SEQ ID NO: 243605 - DNA, 201 bp, Homo sapiens
ttccccaatcatcccacaagaattaaattggattgccctttaagcagggctgccatgttcagttgtggaagattttccattgcatagactcattgggtaawaggcagtggcatctgcgtttctccccactttacggcgatcaagctgcatcccctctcatggggctgtgctccccactacaccagtcccaagaagaggcac

SEQ ID NO: 243606 - DNA, 201 bp, Homo sapiens
aataactgccctagctggggtcgtctccctccttgattccatcgggcttggctgccttccctcaatatgtgttgagtgactactgtgtgccacgtttgttmctagaggatccaaaacccaaaccagaagctcccagggttgcagtgtaattaatatggggtgtaattatagccttttatgatagtctgtttctttccttgt

SEQ ID NO: 243607 - DNA, 201 bp, Homo sapiens
tgaagcactggagttggtgtagtattcttgcatcagtaggtaggtgatcatcagaagcagacagctgagttgagtaatgtcaatggccataaatcttttgyttggtccttaatacatttggtgctatgaaattaacatttattcaggattttattgtggttccttccatgctattttagcagtgaaatttcagtgaaccaa

SEQ ID NO: 243608 - DNA, 201 bp, Homo sapiens
gtcatgactatgaagtattgatttcaggtgtttgttctcaccttaaactcagaccaaatataaaaatatgaccttgggggcttagaattgtgcagtttttrttcttcaagagaaactattggagagatctcagagcaaggcattgcttgtatttcccttcagtgtagtacttagattttcattttcttagatctaattata

SEQ ID NO: 243609 - DNA, 201 bp, Homo sapiens
tgatttcaggtgtttgttctcaccttaaactcagaccaaatataaaaatatgaccttgggggcttagaattgtgcagtttttattcttcaagagaaactaytggagagatctcagagcaaggcattgcttgtatttcccttcagtgtagtacttagattttcattttcttagatctaattataaaagagacttaggaggtg

SEQ ID NO: 243610 - DNA, 201 bp, Homo sapiens
ttcttagatctaattataaaagagacttaggaggtggaaaataaattcaataagtcttcaaagtttttcctttctttattttataagctaagtatcactgmattgggggtatactaagaagggtatcaatgacagaattgctagtttcctcaacctgcctcagcttaccaaatttaactctttttgtgaaactattaccac

SEQ ID NO: 243611 - DNA, 201 bp, Homo sapiens
aatcgcttgaacctgggaggtggaggctgcagtgagccgagatggcaccattgcactccagcccaggcgacagagagagactctgtctcaaaaaaaaaaawaaaataaaataaaataaaagaaatggttcagacccataggcattatgatatgtttcacaagaacaaaacaagaacatatattcaggacctaaattaatcc

SEQ ID NO: 243612 - DNA, 201 bp, Homo sapiens
agtcttcaaagtttttcctttctttattttataagctaagtatcactgcattgggggtatactaagaagggtatcaatgacagaattgctagtttcctcarcctgcctcagcttaccaaatttaactctttttgtgaaactattaccacatgtaaatatattttaaaaattagaatttctttgaagaaacattttcctagc

SEQ ID NO: 243613 - DNA, 201 bp, Homo sapiens
tttataagctaagtatcactgcattgggggtatactaagaagggtatcaatgacagaattgctagtttcctcaacctgcctcagcttaccaaatttaactstttttgtgaaactattaccacatgtaaatatattttaaaaattagaatttctttgaagaaacattttcctagccaatcaaaagcaagagctagtgaggct

SEQ ID NO: 243614 - DNA, 201 bp, Homo sapiens
tctgaacagcagcttcacttgttctttggatggacttgaaagggcattaaagattccttaaacgtaaccgctgtgattctagagttacagtaaaccacgaytggaagaaactgcttccagcatgcttttaatatgctgggtgacccactcctagacaccaagtttgaactagaaacattcagtacagcactagatattgtt

SEQ ID NO: 243615 - DNA, 201 bp, Homo sapiens
aaatctatttctccatcttttccttggttgtctctcttttctctctctttcctagaaacaatcactgttgtctctttcttgtgtagccttccagaatgctrtgctgtgtgtgtctgtgtgagtatctgtagtaaacattaaaatattactacacattttctgtgccttgaatttattcctcttattttatgtttcagattt

SEQ ID NO: 243616 - DNA, 201 bp, Homo sapiens
attaatagttacgtttgatatgagatgcctggaaatgtggcagtaaattggagtgaggttttatttcaggtaataactttccttttatctctgttggtgcrttggcaagaaaatctagaagagttttaggaggactggatgctataaccttcattgttcttatatgttcagtgtcatacgcaggcttttacttattgaaga

SEQ ID NO: 243617 - DNA, 201 bp, Homo sapiens
cctttagtccttaacatctcatgaggtgggcatgttatgatcgtccctttagaatatataaaggaactgaggcacagcgtggctcattagctgctcaaggycacagagctcataacttatgaaaccaggctggtaaaacaagctgcaggacttgtgagtcaacactcttaacctctgtgctttatactttctctcatttca

SEQ ID NO: 243618 - DNA, 201 bp, Homo sapiens
agtgaggtagctatcagatttccatttataagctaactgaaaacatggaaactccacaaacagcccatataacctgaaaattgagcaaaatgactatatayacacacacacacttatatatgagctatgtctatatgtgtgtgtattatttagaatactatttttctatacatcagtttgttctactccattactctttta

SEQ ID NO: 243619 - DNA, 201 bp, Homo sapiens
catagttatagtaaaacactatgtttaaaagaatggttggaatcctctcaccttcatatgtaaaaatcctcataaaataattcaactaatctaacataaascttcatttctttaattgcttatcacacatcagaatgtgcaaggcattattttaaatattggacatggtcccgcctggctccaataagcttataacctgat

SEQ ID NO: 243620 - DNA, 201 bp, Homo sapiens
gctcttaattaacatagaggcataaaatgttagtgttagcagagatatgaggcatctgaatggtttaagggtttaaagatccttctcctttaccttaaagrcaaccgaaagtctgccaaatgttttattaccaatattagttgtaaggagaattcacttaccgctccattctcatctcaaagttagtaaattcatgcataa

SEQ ID NO: 243621 - DNA, 201 bp, Homo sapiens
aatttgagcaaacacaaaggaaatttggaatgtgacttttcagtcatgccaacaacatatctatgtaggcttaaaaacgtttatattcttgttgttacatstaattttataataacatctttgaggctataaactgtgtttaggcaatgcaacttttggggatcattttgatttagaaaaagatgtttacttttatctatt

SEQ ID NO: 243622 - DNA, 201 bp, Homo sapiens
aactgtagaaaactataaaagtatccaataagtgggtataagtattaatattaaatttgttttctttatcaataaataagaaacatttgaaaatatgttaygcattgaattaccactttctctgaaaattagcctaatttagttgctctcaaatggaggtgattttgctttcctggggattatttggcagtatctagagac

SEQ ID NO: 243623 - DNA, 201 bp, Homo sapiens
gttgaaaaggaattcagacactaaaccttttgttgaaacctagtacttaacagatagatatatatagagtattgtttttaatttggtgtttcattgtgttkttttcaataattgaagtgtacaattttgaatcgctgtaatatgtataaattgtaggtgtgtgattgaaggtttacaatgataaatagtttgaggtctcca

SEQ ID NO: 243624 - DNA, 201 bp, Homo sapiens
aacagaagagtctttttacttggtgggtgatatttgtggcttcctcttagttattgaatatttcctgtagtgtcagacatccagaagctagctaggttccwagtcgcgccctccctccccctcaccccccagtaagcagggacttccgacatagcatttcctggacactggctctctggctaatctttcatccggtactca

SEQ ID NO: 243625 - DNA, 201 bp, Homo sapiens
taactagaaaagtggaatagggttgctaggcagcactgagaccccattggagggtgtagtcatgaatttggagaacactcagcatgatcgtaatttgtttrtttgtttcctagctcattcagctgcttgggtttggcagagatttagtattgaccaaggttagaagtcttatttgtccagtaaaacccatattgaaaggag

SEQ ID NO: 243626 - DNA, 201 bp, Homo sapiens
tggcacacggtgtgttttacagatgaggcctcagcagagattcacacaggcttgcacatttatctgtcccacagatgtttcgtcttctgttatctagccarcaaggcaacagctcgactttgctaggggatcacctccagatgttcaaccaaagagagaccctgccaccccactgagagtaagcagacatctcctcactac

SEQ ID NO: 243627 - DNA, 201 bp, Homo sapiens
tcagacgagtggcacacggtgtgttttacagatgaggcctcagcagagattcacacaggcttgcacatttatctgtcccacagatgtttcgtcttctgttwtctagccaacaaggcaacagctcgactttgctaggggatcacctccagatgttcaaccaaagagagaccctgccaccccactgagagtaagcagacatct

SEQ ID NO: 243628 - DNA, 201 bp, Homo sapiens
taaagatttttcaccggctttacacttacgattggaaattgtctagtttgtcactatacttctgagtgtcagagtacacatcttatttttgtttttttttyccccctaaaagacaatgttcaaaatacaaggtgatagaatatccctggcacactggagaaaaactgagatcatgtgcaaacagaaggatacatcctttta

SEQ ID NO: 243629 - DNA, 201 bp, Homo sapiens
caaataatacttaaaggaatattgcatgaaatctaagaggtgacgtatttaaaagaagtatccttgtacagctcgcctttcctgtgataggtgctgcatgttttttttttttttttttctggataatttgtcctggactttgtccaggacagaaaacttcggtgtttctaaagtttatttagtcggtctcatctccttaac

SEQ ID NO: 243630 - DNA, 201 bp, Homo sapiens
tgcggctaggcgtgctggctcatgcctataatcccagcactttgggaggccagggcgggtggattacaaggtcaggagttcgagaccatccttgctaacayggtgaaaccctatctctactaaaaatacaaaaaattatctgggcgtggtggcgggcgcctgtagtcccagctactcgggagcctgaggcgggagaatggc

SEQ ID NO: 243631 - DNA, 201 bp, Homo sapiens
ttcagaaaatgggatatttcagtggaaattcttgcctggtatgtcaccactttgaaaatgattaaagaaaatggagttttccccagtggaggcaggtactytgacttgtcaaatttaagttggacattttctcttagtttggaactgccacaaaatgagccctttcatgtccacaataataccaaaccaatgcaacccatc

SEQ ID NO: 243632 - DNA, 201 bp, Homo sapiens
atgtcactcagtctgaggattcctccttcctgatatatatctatatctgtatctgtatatggacataacatatatatacatctctctattatctaatctgyctctatctatctatctatctatctatctatctatctatctatctattgatgcattccaagcttattcagttctagaaaatggaggagggatggaactcag

SEQ ID NO: 243633 - DNA, 201 bp, Homo sapiens
gtcactcagtctgaggattcctccttcctgatatatatctatatctgtatctgtatatggacataacatatatatacatctctctattatctaatctgccwctatctatctatctatctatctatctatctatctatctatctattgatgcattccaagcttattcagttctagaaaatggaggagggatggaactcagtc

SEQ ID NO: 243634 - DNA, 201 bp, Homo sapiens
ggattcctccttcctgatatatatctatatctgtatctgtatatggacataacatatatatacatctctctattatctaatctgcctctatctatctatctatctatctatctatctatctatctatctattgatgcattccaagcttattcagttctagaaaatggaggagggatggaactcagtcctcagttcatactg

SEQ ID NO: 243635 - DNA, 201 bp, Homo sapiens
tcacccaggtattaagcctagtccccattagctatttcttcgtgaccgtctccctcttccatcctccaccccagtgtgtgttgttcccctctatctgtccrtgtgttctcctcatttagctcccacttacaagtgagaacatacaataattggttttctgttcctgcattagtttgctaaggataatggcctccagctcta

SEQ ID NO: 243636 - DNA, 201 bp, Homo sapiens
attattgggttgaatggtatttctgtttttaggtatttgaggaattgccacactgttttccagagtggtcaaactaatttaccaccactaccaatagtgtwtaagcattcctttttctccaaaacgttgccaacacttgttattttttaactttttataatagccattcttaatggtatgagatggtatctcattgtggtt

SEQ ID NO: 243637 - DNA, 201 bp, Homo sapiens
tgcaatgtagggggttcagttgcataaaggattgtgaaaattgagcagttagactaagggataacatttttttcttgctttctggtgaggacagtgatttraaataggtggaagtaaaacttaaaaaaatagagagtatatatgctcgtcaccatttcagagctttattattgaactgggatttgctgttttctgaagtgc

SEQ ID NO: 243638 - DNA, 201 bp, Homo sapiens
taaagggacaggtaaggtgccctagattaggctgggcaatagagaatcctgcaaaacataccctcctgattctcacagaaccaagagggctgattcacagmctcacagcagagactagccattctttacacaaaccttccaatgataacctgcctcaatctcttttaaatcccaaataatcccagaggttttattgctaaa

SEQ ID NO: 243639 - DNA, 201 bp, Homo sapiens
ttttttttttttttggagatggagtctcgccctgttgcccaggcgggcgcgcggtgacgtgatttcggctcactgcaccctctgcctccaggtttcaagcractctcctgcctcagcctcctaggtagctgggattacaggcacgcaccatcacgcccagctaatttttgtattttgggtagagacggggtttcaccatgt

SEQ ID NO: 243640 - DNA, 201 bp, Homo sapiens
aatcaagaaaaaaaacttggctaaattttttaggattatgctttaaccattttagcaaaataataattctcgactttgaccccagtggtattcagaggatygaccttaatgatgggattatccatcaagtaaagggacaggtaaggtgccctagattaggctgggcaatagagaatcctgcaaaacataccctcctgattc

SEQ ID NO: 243641 - DNA, 201 bp, Homo sapiens
aatcccagcactttgggagggcaaggtagggggattgcttgagcccgagagtttgagaccagactgggcaacatagtaaggccacatctctacaaaaagtaaaaaaaaataaccaggcatggtggtgcatatctgaggtcccagctacttgggaaactgaggtgggaggattgcttgagcctgggaggttgaagctagagt

SEQ ID NO: 243642 - DNA, 201 bp, Homo sapiens
atggtcattttaaataactttagtcaaactcccaacctgaatatagactgtttagggttctgaactaaacatgatcatattcctaaccacagagtaagtgytcagtgagcatagctccttttcagactctcagggaagaaactaagtgcacgtcacagggaacgataaggtaacaatgaacacagtcctacatcacaaatt

SEQ ID NO: 243643 - DNA, 201 bp, Homo sapiens
ctgcatattagttaacacctctctgctgtaagcctaaatagatgtccaatttgcactaggaaaatacaggctttaggctaggatcagagacttgaaatttrtttctgtagaaaaggatgagttattttgatgtaagtattcacagcactacataatttaagtgattaaattcatccccctttggtgaggttggggggagtt

SEQ ID NO: 243644 - DNA, 201 bp, Homo sapiens
aagcaaaggtgttggacaagcatagagtgcatggtatgcaaatttacatgactagtgtatgaacacatcaagatatacttaatggtatttaatgttatacyggaagtaaaaatttaatttatagatgaaacgaatctttatagacatgaagaaaggaggaaaaaatcaatgaaagtttatgatagtcatcaaaacatgggt

SEQ ID NO: 243645 - DNA, 201 bp, Homo sapiens
aatcttaaaacggacttttgaaaatataggaagaaaaactgtataggaatatcccgtcacttgtaatgttgacaaaaatagtagaacctatgactcacgtrtgtatttcccaaacgtgagttgagtaactggctccagttgttactgatggcatgccgtgcttgtgccatatctgtgttctctgataactgctaaatcaac

SEQ ID NO: 243646 - DNA, 201 bp, Homo sapiens
tcatactaactagagtagtttctgttgctggtgaagatttgtttggggttcagtaaaactttcaaaatcgcctttcagatcttaagtatcttttagttatmtccttctttttgtgtttatgcatttaaacataaactataaagccaaaatgcagtttaaaattaggcacaatgtatctacaaataaaagctcatctagcaa

SEQ ID NO: 243647 - DNA, 201 bp, Homo sapiens
ctcagcatcctcaatattaaatgaatagaatcaagaaaaaaaacttggctaaattttttaggattatgctttaaccattttagcaaaataataattctcgrctttgaccccagtggtattcagaggattgaccttaatgatgggattatccatcaagtaaagggacaggtaaggtgccctagattaggctgggcaatagag

SEQ ID NO: 243648 - DNA, 201 bp, Homo sapiens
ataggtgatatgcctttatgttgctgaagatactccattttaaccacagaatcattttatatgctttttaaaaaaatgtttgtgttattgtggaattacargaataagaaaattacatgggaaagtggttgatttagttcagaaattgtacatattggtgaggtttggaaagactgttcctttatatactgtgcctttttg

SEQ ID NO: 243649 - DNA, 201 bp, Homo sapiens
ctttctttcttttattttgtagagatgtggtctcactacgttgctctggctagtctcaaactccctgcctcaagcaatcctgccaccttggcctcccaaamtgctaggattagaggcctgaaccactgtgcctggcaaattctcattccaagagctaggaagcgcagtatccagcatcaatccacaactccattaatagca

SEQ ID NO: 243650 - DNA, 201 bp, Homo sapiens
ttttgatataccgcgtcccttatcttctacttagcaagagattattatttccatattgaaaggatctaattctatagacagacgcagaatgttttttgttkgtttccacctctacagtatgctggtgaggatcatgctgattgccgattggcaggggcatccaaggtggttttcttgttaggtgcacaggagaagaaagca

SEQ ID NO: 243651 - DNA, 201 bp, Homo sapiens
gtacagtggcacaatcacagctcattgaagcctcaacctcctgggctccaaagatcctcttgcttgagctttgttaagagctaggaggtaggaatacaggkacacaccaccacacatatttggctttctttcttttattttgtagagatgtggtctcactacgttgctctggctagtctcaaactccctgcctcaagcaat

SEQ ID NO: 243652 - DNA, 201 bp, Homo sapiens
gaaaagaactccattactaaagggtggatgccattttaaataatgtcaacctcaaggatggttggcccacttctggaatgaatagcatcaaaggtttatgwgttatttatcctttcttaaggcctcctcatgttagaaagtagcaaacctactcttctagatgctcaggcccataaccttggagttatctttgaacccgtt

SEQ ID NO: 243653 - DNA, 201 bp, Homo sapiens
gaaagctccagtcctcactatctctcatgaagcccaaagtcagggcttctcacctgggggcacattagaatcctcaggggatttttatagacatgctgatrtctaggctttaacaaatttgaatccctggaagtggagcctagaggcattgtatcttttaaaagctcccatgtcctaagttttggggatcaacaatgaata

SEQ ID NO: 243654 - DNA, 201 bp, Homo sapiens
tctaagcagagagctacatctgtttatgcacattgggaacaattgaccaacaagtacgagttgaatccgttgcctgaaataaaaggcacaagaagtactaraagttaataaaaaaagacccaatagttttgtctatgagatgaagtagactatctagagaaagatcaaggttaagataagcatgtgaatataaatattagt

SEQ ID NO: 243655 - DNA, 201 bp, Homo sapiens
gtcatttaatgttcatgactaagttatgaactagaaattatctggattttatggatgggagctttgaggaatgatgagtgtaaattactttcccaaaggtytagagctggtactgatagagccaggtttttaaaaagctcagactaccagacttcagagctcatactctcaagcaataccagtagctcttagcaaagtctt

SEQ ID NO: 243656 - DNA, 201 bp, Homo sapiens
caaaattttcaagtttggggatatttaacttcagttcgtggtaaaaatcacatggtctagtgtaatctaagcaaaaaaaaataataaaataagtgtttctrtcactggctgtaaataatggtacagtcatgtgatagaccatatatatgattataatatcatgtttttaaagtaccttttctatgtttaaatacataaata

SEQ ID NO: 243657 - DNA, 201 bp, Homo sapiens
cttagcattatttttttaatagcagtatattacctgacacaaattaggtactcaagatccattttggtagtaaaagacgagcaaaagttcagagagtatawgagtgcaaactttgggaaaggaaaggactctcggggcagttgggggtgccacagagttgagtaagctggctgggtagaaagggatcatggcacaaaattt

SEQ ID NO: 243658 - DNA, 201 bp, Homo sapiens
ctaacatgtggtcttgaggtgcatgtgaagtctgacttagaacattagggatgttctaatcctccaatgcccagttatgtattttggggttcagttctgtrttatttacaaaacagtgtttactttgaaaaaagaaacaaaattgaatagaaacgtatataaaataagatgcataatttagcttcccatctcatctttttc

SEQ ID NO: 243659 - DNA, 201 bp, Homo sapiens
ttctttttctttaatattccaacttcattttcttaaagttaatgattcaagtagcaatgtttaacagtacgattccattcatgttctctgtaagagtgctscctcctggtctcttgtgggtttcccagggagcgtgaagcccggagtttgcttacttagttgcagagacagctgtcagtctgagggtgagttcagtaggcc

SEQ ID NO: 243660 - DNA, 201 bp, Homo sapiens
ttgcaaaacaacctgtggctttttaatttaaatagcccacatatttttgcatttctactaaaagatgataagtattataaaataccttaatagaaggctaygcaaaggcaaggataattgagttttatgtattgcatcagaattccaccctattatctgcaaatcagagtgtcttataaataaacttttctaggatgaaag

SEQ ID NO: 243661 - DNA, 201 bp, Homo sapiens
atgcgccaccatgcccagctaatttttgtatttttagtagagatggggtttcaccatgttggccaggctggcttgaactcctggcctcaagtgatccaccygccttggcctcccaaagtgctgggattacaggtgtgagtcacagtgcccagccaagggattaaattttgccaaaataaacagtgccatgattgcagtccc

SEQ ID NO: 243662 - DNA, 201 bp, Homo sapiens
tcatatgccttacctccataaggagcatgacctttgggaatttaccaggtcctcatccctgtggactcagaatcttgcttggtaagagtttataattgacttttttttttttttgagaccgagtcttgctctgtcacctaggctggagtgcagtggtgtgatctcagctcactgcaacctccacctcccaagccccagcaa

SEQ ID NO: 243663 - DNA, 201 bp, Homo sapiens
ttttgagaactagtgctttatttatatttatgatggagccatccaattttagagatgcaaaaacattaggtacataggttttaagaattttcaaactgagaaaaaaaattacaaaaatcacatatttaggttttaacctgacttctgtgctgttcagctgtgaaaataaaaccatgttattaatataaattgtgaggggac

SEQ ID NO: 243664 - DNA, 201 bp, Homo sapiens
cattttgctaaatcaaggtcatatctaaaagacatggctttattatgatagtgtagtttagaaacattaaaacttatttctaaatttattttaattgactwtataatgtataatatgttgttttgaaacatgtatacattgtggtgcagctaagttgagataattaatttatgcattatctttcatactactttttttgtg

SEQ ID NO: 243665 - DNA, 201 bp, Homo sapiens
tattttataaaattcatctaacatatccactgtgctgtgtattttgcagctattttcaaaaagtttatgtccatgtccatgttttattgacacacatacartcgatacatacattgcttgagatgatagtttctttgatggctatatcttatttctcatatacctgtaatatttagcacatagaatttgcatgaccaaagt

SEQ ID NO: 243666 - DNA, 201 bp, Homo sapiens
tagcaagtggtattggttctcggtcatctgtgtatcctcagtgggatatcttgaaagggcctggcatggagttgcttctcaataaatgtttgtagaaattaaaaaaaaaaaaaactgtgacttagaaaagaaaggggatttcttttcctgttaccttctctgccactgatttcctgttattggtagaacaggcatagaata

SEQ ID NO: 243667 - DNA, 201 bp, Homo sapiens
ttttctatacctaaatttttcttgcatccttttatatgagcaaattgcctctaatcttgaaacatatagtttattaatttgatttgaaatttattttgatrttatttttaccagtcattcagtaatcatagatagttacattgttaaaaaaaacaaaacaaaacaaaaaacaaaaaaacaggcacaaagctagatgaatga

SEQ ID NO: 243668 - DNA, 201 bp, Homo sapiens
tgaggcaggagaatcactggaacctgggaggcggaggttgcattgagccaagatcgctccattgcactccagcctgggtgacagagcgagactctgtctcaaaaaaaaaaaacaaaaaacaaaaaaaatagctggcgtgttggcctgcacttatagtcccagctactcaggaggctgagacaggaggatagcctgagccca

SEQ ID NO: 243669 - DNA, 201 bp, Homo sapiens
ctcagttgaaccagattcaaattcagtagtctaatgaaacagttctacgagatggccttcttgtctcagctttctttgatgggggcatccaattttttgtytgtttgtttgagacagggtcttgctctgttgctcaggtgggagtacagtggcacaatcacagctcattgaagcctcaacctcctgggctccaaagatcct

SEQ ID NO: 243670 - DNA, 201 bp, Homo sapiens
tgagacaggaggatagcctgagcccaggaggtcaaggtgacagtgagccatgattgttccactgtattccagcctgggtgacagaatgagaccctgtctcaaaaaaaaaaaaataaataaataaaaaagaggggatttggataataaaataacttattgagatggtctaatattgttatgacttcttcttccatttaatca

SEQ ID NO: 243671 - DNA, 201 bp, Homo sapiens
atggagaacaacagtttttttttcaaaattcaaaaccaaaataaattagctcactgaatgcttgagccataagcaggcagttcacagcagaatccctaggrtttaatcattccccaactcaagaaaaacccatagcttctgagttttagactagcagtatcattattgctatagagtgtcttaactttaaataaaaaataa

SEQ ID NO: 243672 - DNA, 201 bp, Homo sapiens
aggatagcctgagcccaggaggtcaaggtgacagtgagccatgattgttccactgtattccagcctgggtgacagaatgagaccctgtctcaaaaaaaaawaaataaataaataaaaaagaggggatttggataataaaataacttattgagatggtctaatattgttatgacttcttcttccatttaatcatttatttag

SEQ ID NO: 243673 - DNA, 201 bp, Homo sapiens
atgcaattgatactagcaagaacaccccatggcacctggcaaaattaaaactgataagccaccttaatgaaactgagaatttagtttcatgctgcaaattmtgtaaaaagattatgttgcctcagacttcgaaaaaatgcatgaaatattattaaagtcagggaattccttctaaattgcaaaggaagtttccagtattgc

SEQ ID NO: 243674 - DNA, 201 bp, Homo sapiens
tgccataacttctgagctcagaatgaaggatctgattaggaaaagcaacatgttaacagtgtacatgctccatctataactgtgatgaatgtatactttgkatttatcatcacttttaaattattgagatttttaaaaactctattagtgctagctaagacttgtttactgcatgggctatgttgttttggtgcacatcta

SEQ ID NO: 243675 - DNA, 201 bp, Homo sapiens
ttagaaggccactttggtaagtgtcggcttaagagtgaatggaataattgtcgattagtaaacaaaagaaatgtcatctctccaaaaaaaaaaaaaacagygaatggaatgaactgtataattcaatgtttgatgatactggtctctgatattctgtgctctctgattcacaaaagtgatgtgcctgtcaggggatcagat

SEQ ID NO: 243676 - DNA, 201 bp, Homo sapiens
aatgtttgatgatactggtctctgatattctgtgctctctgattcacaaaagtgatgtgcctgtcaggggatcagattgctcaagaacatgggccagagtrtaattcctgttgatggcacttggatccagattatgtcttttgaagccttctgtttctttcctccatttcacattacactctccttgctgccttttatgca

SEQ ID NO: 243677 - DNA, 201 bp, Homo sapiens
ccttgctgccttttatgcattttatgtaggcttactaacccagctctctagcttagtgcctggcccccagaagtactgaagaaatgtttaactaccgtttrgctagccacaacattcttactagttttgctttgggaatagtgtatattttacttctaaggtactttgggtctattttattgctgcattctaaggcttgtg

SEQ ID NO: 243678 - DNA, 201 bp, Homo sapiens
acacagatttgcagcagaattccattttcaatagaatcacattgagtacgcacatacattatattcctggtgaaaatggcataaacttcacaaagtgcttygcattatgggacattttgtttgtgaaccccttggggacatttttgtcttcaataattaaggaagccttttgactcaacatatttagaccacatttcaagg

SEQ ID NO: 243679 - DNA, 201 bp, Homo sapiens
tatttctatacctcaggagggaaaaaaaaaacaaccaaaaactatttcccctctactccctccctgttttctaaaaataagtcacttttggtttgttaccytataacacatgccaaaatttatcccagagtgaatttttgtagccaacttagaaccccaaaatagaaactgctgacagttccttaaatacagtaacactgg

SEQ ID NO: 243680 - DNA, 201 bp, Homo sapiens
ttcagttaaaattagaatagctctaataatatcagacaaaaatgtagctgaggaatatagcactaccttttattagttgtgtagtaaaatgtaactttttkaccctgtagtatcgcttgcagaatgtaacagaaatgtttaacttttcttgtttttgttttcatcaacctcaagttactcccaaagaagttcaaaatgtat

SEQ ID NO: 243681 - DNA, 201 bp, Homo sapiens
tgttcatctgcttcactatatagccattttactatctctctatatcccatgtcatcaggatataaacctcaaatacacaccatgaaatgtgtttttaaaamacttgcaatcataggttatttagaaaatagtaacaccattaagggaataaacaaaatggtgcaccttatgaggtgcagccaaagctgttctcatggcaaa

SEQ ID NO: 243682 - DNA, 201 bp, Homo sapiens
gatgaggttaagggctgagtacataatggtaggttaaaaatgtgtgtaaataacaaatcaccagatcacttctctcccctctttggctcactaccctgcayacttaggagacaacttttctttttgtccggcagggttttagaagttgattattagaagaaattaatccatagattttgagactttcagacacctgaaata

SEQ ID NO: 243683 - DNA, 201 bp, Homo sapiens
attttcagatgataaatcaatcttgcattattgggataaatcctacttggtcaaggtatataatgctttttatatagtgttgtattctatttaaataacaktggtctataattttcttttcttgtaatgtgtccctcagattttggtatcagggtaattctgatcccatataataaattgagaaagagtccttagtcttta

SEQ ID NO: 243684 - DNA, 201 bp, Homo sapiens
tcgacatgtggaaaagccttagcttctacaaaatgttagtttttggattcattgacagaattgttattgtttggttcaaattaaaaactttatgattctcrgactttggtcagaataagggatcacagcaagttaaatagtaatggacacctatgtcagatggtcttgttggcatggggaacagatggggagacttagtat

SEQ ID NO: 243685 - DNA, 201 bp, Homo sapiens
cgttcaaggtcactgtgggcattttacacacagaattgtaattcttaactaacagggctgtctcaactggaccatgcatttcttggtgttagggaagcatytttgtgtcctcgacatgtggaaaagccttagcttctacaaaatgttagtttttggattcattgacagaattgttattgtttggttcaaattaaaaacttt

SEQ ID NO: 243686 - DNA, 201 bp, Homo sapiens
taccttgctgccattctatgaccttttgactgggagaactctggccattttagtacacgtgcttttcgtggagatgaaatacactgcttttgtagagcaawtagtgactttaaaattgatggcatgagccgagatcccgccactgcactccagcctgggcgacagagcgagactccgtctcaaaaaaaaaaaaaaaaaaaa

SEQ ID NO: 243687 - DNA, 201 bp, Homo sapiens
caaagtttgtcggtcagaaatctaactaacccaggtctcactgagctaaaagcaatgtattggcaaggctgccttcatttgtggaggctctggggaaaaaytggtttccttgccttttccatcttctggaggttgcctgcattccttggctcatgaccccttcttccatctttaaagccagcaacttcacatctatctgac

SEQ ID NO: 243688 - DNA, 201 bp, Homo sapiens
atttggaaaggcaatcaagacttcaagatgatcaactgttaggtttttaggagcacatttgcactctagaatgcctaacttggtgactttgtgtgtgtgtkttttttttttaactaacacaaaaaccaaacaaacttgaaagttagatttgcagttgtcattttgacctgtaaatcgtgttacatttttttttaacaaaat

SEQ ID NO: 243689 - DNA, 201 bp, Homo sapiens
ggtgcagaaatggtacacctctgttctggctgcttgatcagtgtctcaatttagcctttggtgctttgaggtatctttcatgtgcgtaaagctgccttacragtagctgactttctcccatgtgcttaactgagctagttgctgtggagaaaaatgcagaagcatgtaacagtcggggctgggagtgagaatcactacaag

SEQ ID NO: 243690 - DNA, 201 bp, Homo sapiens
cactgctagaaagaactacttgagactgggcaatttaggaagaaaagaggtttcattgactcacattctgaaggctcaacaggaagcatgactgggaggcstcaggaaacttacaatcatggtggaaggcaaagaggaaacaggcagcttcttcacatggtggcaggagggagcaaagggggaagtgccacacactttcaa

SEQ ID NO: 243691 - DNA, 201 bp, Homo sapiens
attttaaaaattagaatttctttgaagaaacattttcctagccaatcaaaagcaagagctagtgaggcttcaggatgatttggttttcagactttttttttctaatgccacaatccttagatatggtgggaaaggcacttcaaagtgagtactccagatttaattcaaatgcacccatttaagtagctcagaaaattgcat

SEQ ID NO: 243692 - DNA, 201 bp, Homo sapiens
attgttattatttattttcacaagtacttttctgatccatatttatctaacctttataaacataacattagaaatgtaagacctacatttttatgtttttyttttttttttttattatactttaagttttagggtacatgtgcacattgtgcaggttagttacatatgtgtacatgtgccatgctggtgcgctacacccag

SEQ ID NO: 243693 - DNA, 201 bp, Homo sapiens
gtttttcttttttttttttattatactttaagttttagggtacatgtgcacattgtgcaggttagttacatatgtgtacatgtgccatgctggtgcgctayacccagtaactcgtcatctagcattaggtatatcttccaatgctatccctccccgctccccaccccaccacagtccccagagtgtgatattccccttcct

SEQ ID NO: 243694 - DNA, 201 bp, Homo sapiens
catttacgttgaaaagcataggtgctggagtccatggtaagattattagctgactaccaaatttcattccttctttttccatggaaacagtgcctaagcaygtggctggccagctaggcactatgacttccagttcccatttgagataggtgtggccatgtggctgagttcttatgaatagaatgtgagtgatttggcaat

SEQ ID NO: 243695 - DNA, 201 bp, Homo sapiens
ctttgggagtgtgaggcgggcagatcacctgaggtcaggagttgtgggccaggctgaccaacatggtgaaaccctgcctctattaaaaatacaaaaattakccaggtatggtggtacatacatgtagccccagctactcgggaggctgagacaggagaatcccttgagcccaggaggcagaggttgcagtgagccaaaatt

SEQ ID NO: 243696 - DNA, 201 bp, Homo sapiens
tcattaattaaattgtaataagatctttatgttaatgtaactttttgctcacatcaattttatattgatattatttgtttacctctcagttctggagagargtgatgatgatgatgatgatgatgacaaaaataggttactgtttttataacaaggattctgcagttaacatttagaggtcttacacagtaccaaacagtg

SEQ ID NO: 243697 - DNA, 201 bp, Homo sapiens
acctctctacctccactcttctttctaactttaacaatttcctgcccagtctagggtgtgcatatttggaattatacctatttacaaaggaaccacataartaaaaaacatgagataaaatggctattttagccatcagagtttttctggggtatttgtattacatttctgttttcttgcttgatgtctttatccttctgt

SEQ ID NO: 243698 - DNA, 201 bp, Homo sapiens
gccacaacattcttactagttttgctttgggaatagtgtatattttacttctaaggtactttgggtctattttattgctgcattctaaggcttgtgtgtatgtgtgtgtgtgtgtgtgtgtgtgttccatgtgtgtgagaataatgggaaggtatgatacccacctctcataccttgatgctttgggaaaataaaaatttt

SEQ ID NO: 243699 - DNA, 201 bp, Homo sapiens
ccacaacattcttactagttttgctttgggaatagtgtatattttacttctaaggtactttgggtctattttattgctgcattctaaggcttgtgtgtatgtgtgtgtgtgtgtgtgtgtgtgttccatgtgtgtgagaataatgggaaggtatgatacccacctctcataccttgatgctttgggaaaataaaaattttc

SEQ ID NO: 243700 - DNA, 201 bp, Homo sapiens
tgtttagccagagttcccctaagagccttcctcattccacctcaaagaccattttttagtttttccaagtgtctgtgaattgtggctgtgcatgcgcacatgtgtgtgtgtgtgtgtgtgtgtgtgtgagagagagagagagagagatttttactttaaaaaattctcatcacttaagcttgactgttgcttttcttcttg

SEQ ID NO: 243701 - DNA, 201 bp, Homo sapiens
gttttcctttcctgggccacaatctggaagctggactagtcatagagcccaggtcatcagtttcccatttcttagggttcacctcgtgtgttttctgtttstcaaggattattgcattgtgtccagtgtcttgaaaactattgcttcatattttgtacagaacttttattttcttaggcagggggataattccaatccctc

SEQ ID NO: 243702 - DNA, 201 bp, Homo sapiens
ttgccaccaataaagggaatttccgaaagaaagtttcagagaaagagagagaaagaacgtaagagagaaagagaaaaagaagaaagaaagatagaaagaargaaggaaagaaggaaggaaggaaaaaaagaaagaaagaaagaaagaaagaaagaaaggatgtcctgactttcttctccatgagaatttgtaataaagttt

SEQ ID NO: 243703 - DNA, 201 bp, Homo sapiens
attttagcagcaatctgcagattttgatatgttttcattttcattgtttaaaatatttttaaaaaattaaaaaagaatgtactatgtgaagtaatagataygataatttgcatagtagcttcattgtgtatatgtagttcaaaactttatattgtacaccttacagttatacactaaaacataaaaataacatatttccta

SEQ ID NO: 243704 - DNA, 201 bp, Homo sapiens
ttccttttggggatagttaattttcaaacataacacatacttttctgggggcaaaagacttgatcaaaaaaatgattgatgggtcaacaaaacaaaacaayacaaaaaatcttgaagggatccaagttatatagtcaaagaaaattaaatatatacgtctggtcacatatagcatactacttagaagcaagaagttttctt

SEQ ID NO: 243705 - DNA, 201 bp, Homo sapiens
gtttagccagagttcccctaagagccttcctcattccacctcaaagaccattttttagtttttccaagtgtctgtgaattgtggctgtgcatgcgcacatgtgtgtgtgtgtgtgtgtgtgtgtgtgagagagagagagagagagatttttactttaaaaaattctcatcacttaagcttgactgttgcttttcttcttgc

SEQ ID NO: 243706 - DNA, 201 bp, Homo sapiens
atgcttttacattttctcttaagaaaattaagaatttaccttctctagtcagaatggctgagatcaaatttttactcaaatgcttgctagatatcaggtcytggacaagtattttaacctcttgtgcctcagtttttccatttacaagatagaaattaatagcacatagcatatcttgtatcaggtcaaacagatgttatt

SEQ ID NO: 243707 - DNA, 201 bp, Homo sapiens
cattttcattgtttaaaatatttttaaaaaattaaaaaagaatgtactatgtgaagtaatagatacgataatttgcatagtagcttcattgtgtatatgtrgttcaaaactttatattgtacaccttacagttatacactaaaacataaaaataacatatttcctattttttaattcttttatctgtagattatttagaaa

SEQ ID NO: 243708 - DNA, 201 bp, Homo sapiens
aaacaaagggatcttagaccaagttgataaactgcaacatgttcttatttattttattttatcttacgttattttattttattttttagacagagtctcastctgttgcccaagctggaatgcaatctcggctcactgtaacctctgcctcccagattcaagtgattctcctgcttcaggctcccgagtagctggactaca

SEQ ID NO: 243709 - DNA, 201 bp, Homo sapiens
gaccaagttgataaactgcaacatgttcttatttattttattttatcttacgttattttattttattttttagacagagtctcactctgttgcccaagctrgaatgcaatctcggctcactgtaacctctgcctcccagattcaagtgattctcctgcttcaggctcccgagtagctggactacaaggtgtatgccaccac

SEQ ID NO: 243710 - DNA, 201 bp, Homo sapiens
tgtaacacgttaggtcatacatttggcaaagacaaattcttcctgcctgtactttttcctttcagtttttaataggtggcgccattattctttgtagcctytagagggcagcacataggtttttttttttttttttttttttttttttttaaagacaacaaacttgtaactcccaagcatcaagaatgcccagttgtttca

SEQ ID NO: 243711 - DNA, 201 bp, Homo sapiens
agacttggagtcaaaagacttgagttttttagcctcattttgtaattttaataattatttttactattcactatattctaactttttactagtatcaataaattaatatctcccccattatttttacaagtacttaggttaaatatctaattatagagtgcttttcatatttttaaaaatatcaactgtcaaccacaaaaa

SEQ ID NO: 243712 - DNA, 201 bp, Homo sapiens
gacttggagtcaaaagacttgagttttttagcctcattttgtaattttaataattatttttactattcactatattctaactttttactagtatcaataaattaatatctcccccattatttttacaagtacttaggttaaatatctaattatagagtgcttttcatatttttaaaaatatcaactgtcaaccacaaaaag

SEQ ID NO: 243713 - DNA, 201 bp, Homo sapiens
acttggagtcaaaagacttgagttttttagcctcattttgtaattttaataattatttttactattcactatattctaactttttactagtatcaataaattaatatctcccccattatttttacaagtacttaggttaaatatctaattatagagtgcttttcatatttttaaaaatatcaactgtcaaccacaaaaaga

SEQ ID NO: 243714 - DNA, 201 bp, Homo sapiens
cttggagtcaaaagacttgagttttttagcctcattttgtaattttaataattatttttactattcactatattctaactttttactagtatcaataaattaatatctcccccattatttttacaagtacttaggttaaatatctaattatagagtgcttttcatatttttaaaaatatcaactgtcaaccacaaaaagaa

SEQ ID NO: 243715 - DNA, 201 bp, Homo sapiens
agggcttggagaagaataatcccacttccatttcaccccattcaatatatcagtgcattattaactttctattgctgctataacaaattaccccaaatttrgtggcttaaaacaatgcaaatttattcttttcagtcctggaagtcttttgacaggactcaatgggccaaatcaagatgtcagcaggactacattccttcc

SEQ ID NO: 243716 - DNA, 201 bp, Homo sapiens
gacctacctatccaactaatagtctaccattagaatcaaggcactgcagggagacaaataaagggagggaggacattgctttcagaaatcccagtgattasgcatctaggcagagagccttcatttaggaactctggaatctggattcaaatctttacgttgtcactgctccaaaagcgctttttcaactctaaagtgcag

SEQ ID NO: 243717 - DNA, 201 bp, Homo sapiens
acactgaaaagtctctgtccttggaccaaaccactgtgggatgagatagagagaatctcatttcacacacctactgagtcagagttaattttattaagctrcactctgtaggaatgaggctctaatgtgcactgtccagtgaataaaaagattggcatattttgaagcaccctttacacagtgtggacatcagattaaatg

SEQ ID NO: 243718 - DNA, 201 bp, Homo sapiens
attccaactgaagtagtactcctagccaagccagtggtatagcaccattgctcatctttagaattttagaaataactaaggcagtatgtacttttaaaaaycttttatttcagtggcaaaataaatgattaaataataatatcagttggtatagggataagcgaataaaacatctcatttcttgatattttttatatgaat

SEQ ID NO: 243719 - DNA, 201 bp, Homo sapiens
tcccagctactagggagactgaggtgggagagttgcttgaacccgggaagtggaagttgcaatgagccaagattgtgccattgcactccagcctgggcaayagagtgagactccatctcaaagaacaaagttcagccaggcgcggtggctcatgcctgtaatcctagcactttgggaggctgaggtgagcagatcacctga

SEQ ID NO: 243720 - DNA, 201 bp, Homo sapiens
gcctcaaaatagccccaatttagatgaaaaattacctggtcactcaatttatgcaccaattttcaatgtgtctttatttttgcatttaaacaatgttttgratcatgccaaagttctctatttaactaaaaaatttatcttaaaaacgtattaagttttagaaaatccatagacctccttgtaagccccaggtgttaataa

SEQ ID NO: 243721 - DNA, 201 bp, Homo sapiens
gtgtgctgtgaaccttcaggtacatgattatacattctctttctatctctgtctctgtcactctctctctctctctgtctctctctctctctctctctctsacacacacacacacacacacacacacacacacacactgtctatatctaatctctgtctctctagatagatggatagatagatggatagatagatagatag

SEQ ID NO: 243722 - DNA, 201 bp, Homo sapiens
tctctctctctctctcacacacacacacacacacacacacacacacacacactgtctatatctaatctctgtctctctagatagatggatagatagatggdtagatagatagatagatagatagatagatagatagatagacagatattcttaatgggtgatgctaatgatgttaaaatccgttactggtaaatataggta

SEQ ID NO: 243723 - DNA, 201 bp, Homo sapiens
tgggctgtgggagcaaacaggaggacccagagaaagcccgcgcagataaagggagcatgcgcaaactccatatagatagtggcccccggcagggaattgatttttttcttcatcaaagttataacaaaacaacattatttgaggacatgctgtacatagacagcttcatttggaaatgaaaacctagtaaactttccctag

SEQ ID NO: 243724 - DNA, 201 bp, Homo sapiens
gtggtgcgatctcagctcactgcaagctccgcctcccgggtttacgccattttcctgcctcagcctcccgagtagctgggactacaggtgcctgccaccaygcccggctaattttttgtatttttagtagagacggggtttcaccgtgttaggatggtctcaatctcctgacctcgtgatccacccgccttggccttccaa

SEQ ID NO: 243725 - DNA, 201 bp, Homo sapiens
agtgatatgaattagctttaactaagaaaagggtagtaaagtgaacaatagaaagtattcgttttattttaaatttttagtccataatttttctttacccrtttttttttggagaatttctgtttgtttctcttagtatcatcataatcttaatatagcacttttggaacactagattgtgatttagtttcttcactctct

SEQ ID NO: 243726 - DNA, 201 bp, Homo sapiens
agaaaagggagaaagagaaagaaagaaagaatgaaaaaatgaaaagaaagaaaaggaaaaggaagaaaagaaagaaatagaataaaacagaaagaacacarttatttttatgtctggaaagatacagggaactttttcccaaatgaggtaactttgaagctgggagacagattcacacgttcataaagtgaaacttccagg

SEQ ID NO: 243727 - DNA, 201 bp, Homo sapiens
tttcccctggatgcttgggcttcatcatttaatgtcctcaattgcagatggctatccataagtttgactctgtgtgtgtgtatttgtgtgtgtgtgtgtckgtgtgtgtgtgtgtgtatgtattttaaacttgtctttaccttttagtgtttgcagtaaaaacaaaggagattatagattacgtgtttttggtaaaatttt

SEQ ID NO: 243728 - DNA, 201 bp, Homo sapiens
cctgggtgatgaaatcatctgtacaccaaacccccaagacatgcaatttacctatgtaacaaacctgcacatgtaccccggaactgaaaagtatgaaaaasaaaaagtctatggctatatagactatggtaactagggtcaattaagtaatatttgtactatactagtagcaaaactttcgagagagagaaggtattggaa

SEQ ID NO: 243729 - DNA, 201 bp, Homo sapiens
cggttagactcgtcaaaattatctgtgtttaattaaaagcatagattacagacccaactgtaaagttttgacatttacataccagctcacatcattgagtstgcagagcgtctcaagaagcaaacgtaacattatctggcaaaggtgctgatttctgttgttttgaaccttaaaaataatgtaattctaaagcagtctaat

SEQ ID NO: 243730 - DNA, 201 bp, Homo sapiens
gactagccattctttacacaaaccttccaatgataacctgcctcaatctcttttaaatcccaaataatcccagaggttttattgctaaagatgcaattgargtttcctattctacagaaaaggaaacaaaggctcagagaggtgagtatcttgttcaggtcatagaattagtaggccatggagcagagagggcctgattcc

SEQ ID NO: 243731 - DNA, 201 bp, Homo sapiens
agtggtggggaagcaaggaaagttcaggaggtggagaggaggcttgccaagactgctcagagtttggggaccccatctcactctcactgttaaagatctgkgtgtctagaggtagggttgttctattcagaacacacagagcttctggtcttccttctgacaactggattgaggtgtggcaatagatgatgagagggcaag

SEQ ID NO: 243732 - DNA, 201 bp, Homo sapiens
tgttactattatttctcctggggaggcttattagcctgtcacaaaagatgtaagaaaaatccaacattccttttggaatatgatgagcctttgtcacccayaatgcaattaatgttaaaaatagaaagaatggctatgatatgattatgattaggcagagatgagctattgtccaagtaacaggaactaatctagcaggcc

SEQ ID NO: 243733 - DNA, 201 bp, Homo sapiens
gctccaaagatcctcttgcttgagctttgttaagagctaggaggtaggaatacaggtacacaccaccacacatatttggctttctttcttttattttgtakagatgtggtctcactacgttgctctggctagtctcaaactccctgcctcaagcaatcctgccaccttggcctcccaaactgctaggattagaggcctgaa

SEQ ID NO: 243734 - DNA, 201 bp, Homo sapiens
agaaaagtcaagatgagagagagagaaataagtacatttcagtttttcacttcctgcatccagtcattcttaagtctcgttctatagctgattttttccamggatatgttatgtgagcaatgaattatccataaattgagtttctgcctcttgcaatggaaagagaaccgtgtagcataggtttctataagtgatcatctc

SEQ ID NO: 243735 - DNA, 201 bp, Homo sapiens
ccagtctggccttgaactcctggcctcaagtgatcttcctgcctcagcctcccaaagtgctcaggcatgagccacagtgcccagcctggatctatcattamatacaaagatttctgctagggtttttttctttatttgagggcaaataattcatatacttattcaaattactgctttaaatatttcccaatggccctaaag

SEQ ID NO: 243736 - DNA, 201 bp, Homo sapiens
ccttttcctgtttgtatgttcaaagaaaagtcattaagggaactaaagatttaattaaaggaaatgggaagacctgagtgaatttaacagttagttttgawagggatgcacagataatggagctacctaaaacttgcctgttgatgacgttaagaccttcactgcattagttgcttgtccttagatttcaatgatttacag

SEQ ID NO: 243737 - DNA, 201 bp, Homo sapiens
ttgttccttgccattaaatccaagaatctcactcagaagagaggagtgtctatgtttagtctttctccttgccacagggaaaggttgtaacaagactcttygtcagaactagttaaagggattgatcattttgttcccttgtgtcttcatttttggccaagtcaagttcaaatctcaaatgttaccttgaaaatagtcgca

SEQ ID NO: 243738 - DNA, 201 bp, Homo sapiens
agttcttatcctgaatcagtagttaggtgaaattgcatgaggcattttctgtattttttccattaaaaagaaaatgtttcataaaatggatgagaatagattttttttttttttttaagacagagtttcactcttgttgtccaggctggagcacagtgggatgatctcggctcactacaacctctgcctcccgggtttaag

SEQ ID NO: 243739 - DNA, 201 bp, Homo sapiens
tcctcagcaaactaatgccagaatgtaaaaccaaatactgtgtgttctcactttcaactgggagctaaatgatgaacttctgaacacagagaaggaaatamcagatactggggtctacttgagagaggagggtggaaggaggaagaagaacttaaaagataactattgggcttaattcctaagtgatgaaataatctgtac

SEQ ID NO: 243740 - DNA, 201 bp, Homo sapiens
catgtacccccaaatgtaaaagttaaaaaaaaaattaagtgatttaaaaaagaatagttaatagttgccggggggggggaaccaaataacaaagcttagcrtcttgaattaccatctttttttttaacagaaaattgtatttcttttcagtatcttctgattctctttcccccaccgagtgcctgtttagcaatgagaaag

SEQ ID NO: 243741 - DNA, 201 bp, Homo sapiens
taaaagttaaaaaaaaaattaagtgatttaaaaaagaatagttaatagttgccggggggggggaaccaaataacaaagcttagcatcttgaattaccatctttttttttaacagaaaattgtatttcttttcagtatcttctgattctctttcccccaccgagtgcctgtttagcaatgagaaagcataatttgggggaag

SEQ ID NO: 243742 - DNA, 201 bp, Homo sapiens
aaaaaaaaaattaagtgatttaaaaaagaatagttaatagttgccggggggggggaaccaaataacaaagcttagcatcttgaattaccatcttttttttwaacagaaaattgtatttcttttcagtatcttctgattctctttcccccaccgagtgcctgtttagcaatgagaaagcataatttgggggaagatacctgt

SEQ ID NO: 243743 - DNA, 201 bp, Homo sapiens
taacaaacctgcacatgtaccccggaactgaaaagtatgaaaaagaaaaagtctatggctatatagactatggtaactagggtcaattaagtaatatttgyactatactagtagcaaaactttcgagagagagaaggtattggaaaactttgctactagtatagtgcaaatattattcatttgaccctagttaccatagtc

SEQ ID NO: 243744 - DNA, 201 bp, Homo sapiens
gagagtaaacaatagctaattttggtattggaaaatatttgttcggatctcaaatatgtttctcactaattttgtaatcaagttagtttcctaatcagccaaaaaaaaaaaaagtgggtggggaagggagataataattttacctacaacctatgtaataaatgattaggttgtgaattaatagttttgaattttattgtt

SEQ ID NO: 243745 - DNA, 201 bp, Homo sapiens
caacagaaattataaattatctttgcctgcattacagtgatgatgctaacagttaagggcatcagagaagtgaaaattattttcgaacactgcatagtacmaaacaatgtgtgtgcatactgtggatatgacatcatccttagtatttgtacttccatataatgtatattagatgtaactttggatgagtgtgagtaccct

SEQ ID NO: 243746 - DNA, 201 bp, Homo sapiens
tctaccagaaacagatcctgatacacaaggagtcatgtacaagtaatttatttgcaggtgcaggcatagggagaaaaggaagaggaatagtgaagtgtgaygagaaaagaaatgaagtgtcatttgttcaactatccttgtaggtatctagagtttaattcctctggggaaattctgagagctgatgtaaaacacatagct

SEQ ID NO: 243747 - DNA, 201 bp, Homo sapiens
taccttaggctgatgtttttagtcagttggggcttctgtttcttctttagtatgtagcacttgaaaacatgaagggaggcaggaaaataaggaaagaatgycttcgaccttccttacctattcctcaaacttcagtccacatccctgtttctcaatacacatgcacacacccacacaacaaatctctcctcctctctttac

SEQ ID NO: 243748 - DNA, 201 bp, Homo sapiens
tgtgttgttaactactatgtgtccccaggggctaaaatatcacctcagctattgtctaggctccagaaatatttattgactttcatgtatggagtgatttaaaaaaaaatgatctatttaaaaatatatttaaagtcaatctctttattttttcttttacttgaaaagtttgctgcatgggtgtttattcaagatattttc

SEQ ID NO: 243749 - DNA, 201 bp, Homo sapiens
agtcccagctacttgggagcctgagataggagaattgcttgaacctgggagaaggaggttgcagtaagccatgatcatgccaatgctgcactacagcctargtgacagagtgagaccctgtctgaaaaaaaaaaaaaaaaaaaaaaaaaagagtgatgtgctatcaacatcaataatgaagtacatgtctcaatagacatc

SEQ ID NO: 243750 - DNA, 201 bp, Homo sapiens
gttacttgttgcttctcatatttggccttccttctgcagctgtgttgagagcttatacagtgtttcaagtaggtaataggccgaaaaaaaaaaaaaaaaaraaaagaaaagaaaagaaccctaagtgcttttgtcattacagcagtgagaagaacagacatgcaaacaccttcatatctagagctctctcactgtacccct

SEQ ID NO: 243751 - DNA, 201 bp, Homo sapiens
taaatggctatttccaaatacattcattttcttaagcatatgggatgagttgatggtatcctagatacaaaggagtctcattattttattttgccagaacttttttcttccccacaggtttatagtttcatagttctttatagtatgctacgcccaaaggaggcatgaataccgaaataaaaaagtgccaatgttaagata

SEQ ID NO: 243752 - DNA, 201 bp, Homo sapiens
aaaatatgtttcacctattattctgtttttgccatttttcatgacattaaatatttccaactgaaatacgttctaacaaaggtgttaacaaatgaaacaartatctcaaaagatcatgctacctctattaaatatttgagttgaggctgcatggccacttatgggagaagtaagtggactcagactaagatatcaatgcct

SEQ ID NO: 243753 - DNA, 201 bp, Homo sapiens
agaactgtgagaagtaagtttctgttgtttataaattacccagtctaagatatttttgttatagcaggctgaatggaccaagacacatgtatatgtgcgtktgtgtgtgtgtgtgtgtgtgtgtgtgtgtgtgtatatatgtgtgtgtgtgtgtatatatatgtgtgtgtgtgtgtgtgtatatgtatatatatatgcata

SEQ ID NO: 243754 - DNA, 201 bp, Homo sapiens
aattacccagtctaagatatttttgttatagcaggctgaatggaccaagacacatgtatatgtgcgtgtgtgtgtgtgtgtgtgtgtgtgtgtgtgtgtgwatatatgtgtgtgtgtgtgtatatatatgtgtgtgtgtgtgtgtgtatatgtatatatatatgcatacatataggtgagtatattggattacattagata

SEQ ID NO: 243755 - DNA, 201 bp, Homo sapiens
atattctatgaaccaagaagataaaacaattcaaactttttgtgtctaagacagcatgaaaacatattaagtatacatggaaagaaccaaatgaaaaaatwggcaaaaccacaatcatcataacaaattttagtacacgtctctcagtaactgataaaccatgaagaaaataaaagtgaagggtgatgtggaagatttaaa

SEQ ID NO: 243756 - DNA, 201 bp, Homo sapiens
gcttactttccccacaaagtccttcactgtgatccttcattatatattcattattaagaaagaggaaatacattagagagtctgatttctgtggaggtggktggggtttgtgaattttgcagctttcatttataattttttaaagagcagaatgtaaacaatacaaatgcactctcttttttctgggctgctagtttctgc

SEQ ID NO: 243757 - DNA, 201 bp, Homo sapiens
tctttgtaagtaaatttgtggccttgtacctaagaatataacatgttgctcttatgcaaaatatataatctcactttgtttcctggaaggacagtaatacrgtggaaagaacatgaactcaagatctagactttgtttccctattctcttacatcacagtgcttttaattttttttggatttttaatttttgctacactgt

SEQ ID NO: 243758 - DNA, 201 bp, Homo sapiens
ggtggattgcttgagctcaggaggaggatcgcttgagctcaggaggtggaggtcgcaataagctgtgattgcgctactgcactccagcctggatgacacartgagaccaccctgtctctctgactctctctctctctctctctctctgtctctcccacacacacacacacacacacacacacacacacacaaaaagaaaaa

SEQ ID NO: 243759 - DNA, 201 bp, Homo sapiens
actcgctttagccaacttgagctgagagagactgagaaagggggaagagaggcacagacacagataggagaagggcaccggctggagccacttgcaggacwgagggtttttgcaacaaaaccctagcagcctgaagaactctaagccaggtttaattggtttctttttctcgtgggtagacttaataattttctacgtatt

SEQ ID NO: 243760 - DNA, 201 bp, Homo sapiens
cttattaggtgagtgtactcctcctttgaatatgagtgttatctttttatgaaagaagaaagttttgacttgatactttcagttaatgctgagatttaaamataaaaaacagcagggcagcatgtttcccttagcatcgaacagctctctttggctgtctattctcttgtaaggttagacagttggagttcgcatttgatc

SEQ ID NO: 243761 - DNA, 201 bp, Homo sapiens
gaagttttaaggtgccacgtggccttgagacatccgttctccctggctgacaggtctattctgcaagttagcaatgaaaaagccaatagatggcttttccrtagccaaaaaaaaaacaacaaaaagttattcctgcaaatccaaagtcattaatgttagctggggggtgtgaactaactccacaaattacagcgccaatag

SEQ ID NO: 243762 - DNA, 201 bp, Homo sapiens
cattatatgtgtagaatgagtataatgaagttttaaaagtggttataaaacaaatgttatgttttctctatctaattgctcttttaaaatatggttacttaaaaaaaaaaaaaaaaatccctccatttcagctaagggtctttgccaccagggaaccatgcatggatccaatgcttttaaatatcgtgtccatgtgtgatc

SEQ ID NO: 243763 - DNA, 201 bp, Homo sapiens
atgagtataatgaagttttaaaagtggttataaaacaaatgttatgttttctctatctaattgctcttttaaaatatggttacttaaaaaaaaaaaaaaaratccctccatttcagctaagggtctttgccaccagggaaccatgcatggatccaatgcttttaaatatcgtgtccatgtgtgatctttctagacacagtt

SEQ ID NO: 243764 - DNA, 201 bp, Homo sapiens
ggctccaatactgcaacagatcagactctctttctctctctgtatatatactatatatacatatatatatatatacacacacacacacacacacacacacatatatacatatacatatatatatatataaaattgtatgaataatatattttgttcctgtgattctttgactctctgctgggacagaattaaaatatctca

SEQ ID NO: 243765 - DNA, 201 bp, Homo sapiens
gctccaatactgcaacagatcagactctctttctctctctgtatatatactatatatacatatatatatatatacacacacacacacacacacacacacatatatacatatacatatatatatatataaaattgtatgaataatatattttgttcctgtgattctttgactctctgctgggacagaattaaaatatctcag

SEQ ID NO: 243766 - DNA, 201 bp, Homo sapiens
ttgcattggcttatttatcatctgagtttcctacttgctagatcctcagcataagttaatggggaaccctctaccctccccatttcttttttttttttttttttttttttagatggagtctcgctgtctcccaggctgaagtgcagtgacgcgatccgctcactgcaagctccgcctcccgggttcacgccattctcctgc

SEQ ID NO: 243767 - DNA, 201 bp, Homo sapiens
cttttttttttttttttttctggaagattgcctgtttctagcagaaccttttcctcctttctatttttttttccctagtctgctgccaacgaactttttaraatttttttctgagataaaagtaaatttattttgagtatgaggtttacaacatactaattaattagctactagttgttgattaaatactgtgcaccagtg

SEQ ID NO: 243768 - DNA, 201 bp, Homo sapiens
gtgtacctgcaatttcagctgcttgagaggttgagacaggagaatcacttcagcctaggagtttgagcccagcctgggcaacatagtaagacctggactcmccaaaaaaaaaaaaaaaaaaaaaaaaaaaaaaaaaaaaattctccttggctgccacgtctcagggattttttttaaaaactattttccccttatgtggat

SEQ ID NO: 243769 - DNA, 201 bp, Homo sapiens
ctttcttttccttcttttctttcttttccttcttttctttcttttctttctcatctttcttttctttctcctctttctttccttcattccttccttccttmcttctctccttccttccttctctctctctctttattttttctttctttttgctttctttctctctctcttttctatcctttcttttctctccttttgctt

SEQ ID NO: 243770 - DNA, 201 bp, Homo sapiens
accatgcctggctaatttttgtatttttagtagagacagggtttcaccatgttgggcaagctggtcttaaactccttacctcaggtgatccacctgcctcrgcctcccaaagtgctgggattacagacgtgagccatgttgccaaatgtctttttctaaatacagatataaatgtctttttctaagtacagatagttcctc

SEQ ID NO: 243771 - DNA, 201 bp, Homo sapiens
ctaagggaatcaagctcactgactgcaggcaaatgcatatagttttattgctttaacaatagtttgaggaatgtgaggttgggagaagaggtaacatcaadgagtgagtgagtgagtgagtgagtgagtgagtggaggagcagcagttattggtgagtaatttgcagcatactacaattgtagagcacaaattcggtattt

SEQ ID NO: 243772 - DNA, 201 bp, Homo sapiens
ctctgtatcataccaccaataatgcacaatcagataattctggaaagaaaacaaaactcaccaaagggcaaacttgagagagcatgagccattcttacagtttactttacttttgttagggtagtgacatcttgagagtaattcttagaatgtctggtcatttgtagcattatccatatgcagaagtttgaaacggagcca

SEQ ID NO: 243773 - DNA, 201 bp, Homo sapiens
atccagagcctatttttgtatattctttttagggaaagccattactacagtgacatggattaatttatcagattaatgctgaacttggaagctggacatckgggctttaagagaatattggccaagaaagggtagtatgggaaatcggaaaacacctgaaaagtggcatgctgaatgcaggtagcttagatttaagacggc

SEQ ID NO: 243774 - DNA, 201 bp, Homo sapiens
tcaaatcatcaaattgtacacctgaaatataaagaatcttgatttgtcaaatataccgcaatttaaaaaatgttctttacataaatgttttgtagaataawaaaaaaaaaagttcttcaaaagaaatctcaaatctccaaatggaaacaggtaaaagtggagctcccctggttccacggagaaccttttttgaggaaactt

SEQ ID NO: 243775 - DNA, 201 bp, Homo sapiens
tctgtatcataccaccaataatgcacaatcagataattctggaaagaaaacaaaactcaccaaagggcaaacttgagagagcatgagccattcttacagtttactttacttttgttagggtagtgacatcttgagagtaattcttagaatgtctggtcatttgtagcattatccatatgcagaagtttgaaacggagccac

SEQ ID NO: 243776 - DNA, 201 bp, Homo sapiens
aggaaattaaatgatatatatggtttggagaatggagaaatttcaaaaaggaggtaaagcttcagacaaacctgggcaaatggatgagattgggatggaayaggcaaagaagaatgtacagtgctttcagagaagggagtatgttgaggagcgaattggcattggtggctgaacaagatatttaagctattgccaaactat

SEQ ID NO: 243777 - DNA, 201 bp, Homo sapiens
agtgattgtcctgcctcagcctcccaagtagctgggattacaggcatgtgccaccatgcctgactaatttttgtagttttagtagagatggggtttcgccrtattggccaggctggtctcgaactcctgacctcaagtgatctgcccgccttggcctcccaaactgctgggattataggcatgagccgctgcgcccagcct

SEQ ID NO: 243778 - DNA, 201 bp, Homo sapiens
tattgaaattttttaatctaaattattgttgtaaagaatattcacaacctaggattaagagtgaacagaggccgggtacagtggctcacatctgtaatccyagcactttgggaggccaaggcaagcagaacgcttgagcccaggaatttgagaccagcttggacaatgtggcaaaaccccatctgtataaaaaatacaaaa

SEQ ID NO: 243779 - DNA, 201 bp, Homo sapiens
ttgtagttttagtagagatggggtttcgccatattggccaggctggtctcgaactcctgacctcaagtgatctgcccgccttggcctcccaaactgctggrattataggcatgagccgctgcgcccagcctagttccaattttagaggtcagtgattgtaagcatatttttttcaaaaatttttatgtcattcttttatta

SEQ ID NO: 243780 - DNA, 201 bp, Homo sapiens
tgtttatcaagatacgcttgggagtggggctatctctcacctctgtgtgttggtaacagttttcagtcactctgagcctttgctagatttatatttacatytttggaggaacagtattgagttggcaaccttttgctctgtaacaaatcagcccaaaacataatgaaaacaataaacacgcattattacccaggaatctac

SEQ ID NO: 243781 - DNA, 201 bp, Homo sapiens
ctggaaagataaagaagtcatcaggctgggcgcagtggctcacgcctgtaatcccagtgctttgggaggccaaggcgggcagatcacgaggtcagatctaraccatcctggctaacacggtgaaaccctgtctctactaaaaatacaaaaaattagccaggtgtggtggcaggcacctgtagtcccagccgctcaggaggc

SEQ ID NO: 243782 - DNA, 201 bp, Homo sapiens
gtgatctgcccgccttggcctcccaaactgctgggattataggcatgagccgctgcgcccagcctagttccaattttagaggtcagtgattgtaagcatatttttttcaaaaatttttatgtcattcttttattattgacacaatggctaatgtttcaaaagtttctctgtgtatcacttgatcatttaatcctcaccaca

SEQ ID NO: 243783 - DNA, 201 bp, Homo sapiens
taaaagtaaaaaagtaagccaggtgtggtggcacatgggaagctgaggtgggaggattggggaggtcgagggtgcttctgtagaagttttccatgaagtatttttttttttttaaattaggtcgaattaatttgcttatttttcagaaaatagattttggagctggtaagaagaaatgagaaatactaatatagcatatta

SEQ ID NO: 243784 - DNA, 201 bp, Homo sapiens
tgatttcaaattctgtggcagagctataataatcagaacagtatgatcctggcataaaaatgaacatatagaccaatggaatagaatggagagcccagcartaaaatccacctaaatgtggttagctaatcttcaataagggtatcaagaatacaaaatggggaaaggataatctcttcaacaaatgaattgggaaaactg

SEQ ID NO: 243785 - DNA, 201 bp, Homo sapiens
tcccagcaccttgggagactgaggcgggtggatcacctgaggtcaggagttcgagaccagcctggccaacatgttgaaaccgcatccctactaaaaatacaaaaaaaaaaaaaaaaaaaaatagccaggaattgtggtgggtgcctgtaatcccagctactcagaaggctgaggcaggagaatcacttgaacccgggaagc

SEQ ID NO: 243786 - DNA, 201 bp, Homo sapiens
atacataaaacatttttctctgtatgattttttattttgttatagtttcctaaaatagttatatttataaaacttaagtaaaaatctaatatttgatcaastactttcaacaaagaaacacaatcatctcatctcttgtcagtttataaatgtcacatagacttactattctctgcactgcagctatacctttaccaagaa

SEQ ID NO: 243787 - DNA, 201 bp, Homo sapiens
aagatgagagaagcagtcatcactacatcatggatgtattgcaggacccaaacaggggtggtgtttggagtttagatagtttagccacagtaaagccctgyaaagaacagtatcactataggattcttttgttctcatccttaattcattccctcgacaaaatttgttaagcatctattatgtgtcagaccttgaagaaag

SEQ ID NO: 243788 - DNA, 201 bp, Homo sapiens
ttcttgtttccttgtgttaaaattctactacatatgtatgtatccccaaacgaagtatgaaattagtttttaaaatgtctatgcctgtaggatggattggmaaggagagccatggaaaaaataaaacaaactcaatggctatttgagaaatgcagacacatggctttgaggcttggcaccaagcgcgggggcagtggcacc

SEQ ID NO: 243789 - DNA, 201 bp, Homo sapiens
actggcttccttatgcaaagttagttcctatgctgaagtgcattttagagaagtttcagtattaaaacatactttaaacatttaatagattaattttcttwaaacctgtaaagatctacgtctttaaaaataataaattttattttctcttgattataacataattcatatagctcatatttgtgtgtgtgtgtgtgtgta

SEQ ID NO: 243790 - DNA, 201 bp, Homo sapiens
gctttattcatggtgaatagagagttggagtcaagcccagtgtccattattgggagaatgaatagttaaaatgtggtggatgcactgtatggagatgccaygtagaagttaccagcttcaaactagataaatataagtgcatgacagatctagtaaatacagtactgagtgagaaaattatgcacatgtgtataaagttaa

SEQ ID NO: 243791 - DNA, 201 bp, Homo sapiens
ctgtatcataccaccaataatgcacaatcagataattctggaaagaaaacaaaactcaccaaagggcaaacttgagagagcatgagccattcttacagtttactttacttttgttagggtagtgacatcttgagagtaattcttagaatgtctggtcatttgtagcattatccatatgcagaagtttgaaacggagccact

SEQ ID NO: 243792 - DNA, 201 bp, Homo sapiens
tgtatcataccaccaataatgcacaatcagataattctggaaagaaaacaaaactcaccaaagggcaaacttgagagagcatgagccattcttacagtttactttacttttgttagggtagtgacatcttgagagtaattcttagaatgtctggtcatttgtagcattatccatatgcagaagtttgaaacggagccactc

SEQ ID NO: 243793 - DNA, 201 bp, Homo sapiens
gtatcataccaccaataatgcacaatcagataattctggaaagaaaacaaaactcaccaaagggcaaacttgagagagcatgagccattcttacagtttactttacttttgttagggtagtgacatcttgagagtaattcttagaatgtctggtcatttgtagcattatccatatgcagaagtttgaaacggagccactcc

SEQ ID NO: 243794 - DNA, 201 bp, Homo sapiens
tcattaaagctttgagaggtggttcagtagatgtgaaaatgcagtttcattctaggcagaagagaagttaaaaccctagaagataagaatttaaaaagathatatattgactagcagtgaatggattaaaaaacagttggaagttaaggatgaagcatccacgattcaatataagtactcattgtaaattgtaaattagct

SEQ ID NO: 243795 - DNA, 201 bp, Homo sapiens
cagcccagaaattaaaacgaaataaatatgccattttaactccaattttttccctaacaacaacaacaacaacaacaaaatcactttttctctatttatgktttttttgttaactttaaaattgtgttcctttggatattttctcatttaccaattatgggactgggcccttagagtgcagagttcccgtagacttcagag

SEQ ID NO: 243796 - DNA, 201 bp, Homo sapiens
tagtgtgtcattagcgttgacagacattaaggtttcacaatcttgattacctattggccaaagtagtgacatcaggaggagaaaccgaggatgacggatartggataatatttaaacacattcaattaaaatcaagtcgatgtgcaaagaaatgcatttctggccatttctgattggagataagggctagaaaaggcgaac

SEQ ID NO: 243797 - DNA, 201 bp, Homo sapiens
atagccaggaattgtggtgggtgcctgtaatcccagctactcagaaggctgaggcaggagaatcacttgaacccgggaagcggaggttgcagtgagccgakatctcaccactgcactccagcctgggcaacaatagtgaaactccatctcaaaaaaaaaaaaaaaaaaaaggttgggtgggaaagtttatagacagtgtaa

SEQ ID NO: 243798 - DNA, 201 bp, Homo sapiens
cggtggaattaatgagagttctcctgtttaaaaacttagttttaatcctaggggcctgaacaattgttttgtgttgagaatcacggcctctcatatttagytctctggttggttcaatagagcccaagttgcttttgtttagtaatattacatgtttcagatcccctgtgcaaatcaagtctttgcccttttaagtcgttg

SEQ ID NO: 243799 - DNA, 201 bp, Homo sapiens
tgatacctaaactatttatttactatttttggaaggttttcttcatgttggcatgtaactgtttatacttcatcataaagctaaccaatatgatggtaacmagtttggtgttaaatgtgagtaaatagtttcctttaggactatattttgtgagagccaggacacaagtccacttaagcaatcttcctagagaagaaaaaa

SEQ ID NO: 243800 - DNA, 201 bp, Homo sapiens
ggactcgttcagtgtattttaggaaaaaaaaaaaaaaaagaaaagtggcttacaaggttgagactagcagaagtgcagcaagaaatgtgaccaggaagacmccaagatgctgtatgataaagtcctgaggccactgtaagatctttggattttaatttaagtgtgtagaataacatgatcttatttacgtagtaaaatact

SEQ ID NO: 243801 - DNA, 201 bp, Homo sapiens
ttccagtttttgtccattcagtaagatattggctgtgggtttgtcatagatagctcttattattttgagatatgtcccatcaatacctaatttattgagcrtttttagcatgaagcgttgttgaattttgtcaaaggccttttctgcatctattgagataatcatgtggtttttgtctttggttctgtttatatgctggat

SEQ ID NO: 243802 - DNA, 201 bp, Homo sapiens
taacaaaggatgagttcatgtcctttgtagggacatggatgaagctggaaaccatcattctcagcaaactctcacaaggacaaaaaaccaaacaccgcatrttctcactcataggttggaactgcataatgagaacacatggacacaggaaggggaacatcacacactggggcctgttgtggggtggggggaggggggaag

SEQ ID NO: 243803 - DNA, 201 bp, Homo sapiens
agaaaccccagacccattagcatcaattcccattctcttttccatactaccagccataattaatcactaatctatttttttatctctataaatgtgcccattttggacatttgatataaatgaaacgataccaaatatgtggtcgcttctgactgccttcctttactcagcatggtttcaaggtttacccatattgtagca

SEQ ID NO: 243804 - DNA, 201 bp, Homo sapiens
accatctctagttatctattcaaatcatcagtatttgcccatatcatactctatatctttggtatgttttcttgccatcaattccctcagaaccacccaaccccccccatgaacttagattatttttttttattatactttaagttctagggtacatgtgcacaacatgcaggtttgttacataggtatacatgtaccatg

SEQ ID NO: 243805 - DNA, 201 bp, Homo sapiens
caggctggagtgcagtggcacaatttggctcaccgcaacctctgcctcccgggttcaagggattctcctgccttggccttccgagtagcttggattacagscatgcgccaccacacccagctaattttgtatttttagtacagacggggtttctccacgttggtcaggctgatctcaaactgccaacctcaggtggtccgc

SEQ ID NO: 243806 - DNA, 201 bp, Homo sapiens
ttatttatataagcctttgcaagtaatgaaatctttttatgttaaccaaaaaaagaaagaaagaaagaaaagtattctaagatatttataatgtggataatttttttttttttcagttttaccctggcaactttaattggcttagtggtttctaattctgggcaattttctgtttctttattaagcaatgtgggagctgtt

SEQ ID NO: 243807 - DNA, 201 bp, Homo sapiens
tcccaccatttgatgtgtcccgagttcttgtttcatacccaggaagaatgaggtatgcggacagctggaggctgagcaaagcgaagaggagcttcactgaytggcagaacagttctcaagagacccaaagtgggcagctcctttctgcaagcaggtcatcctgacgagtgtccagctctcagtggagaggagacccacagt

SEQ ID NO: 243808 - DNA, 201 bp, Homo sapiens
gttgttaaacatgctttcaatttttatagcacctttttcagtggaaaacttaactaaataattggcatataccaatttgtgttgagagtttttccatgccbgtgtgtgtgtgtgtgtatgtgtgtgtgtgaaaacctattattttgaactctactgctttgagaagggccatatggttgtatatgcacaaaattgcgcatt

SEQ ID NO: 243809 - DNA, 201 bp, Homo sapiens
gtgcagtagcgagatctcggctcactgcaagctccgcctcccaggttcacgccattctcctgcctcagctgggactacaggcacccgccaccacacccggstaattttttgtatttttagtagagaaggggtttcaccgtgttggccaggatggtctcgatctcctgacctcgtgatctgcctgccttggcctcccaaagt

SEQ ID NO: 243810 - DNA, 201 bp, Homo sapiens
tgtgagtcattccccgttttaaatactcaaagggaacgtaaaggtgaaaacaaactctttttcgttatgatggttagcatgctagattcagggaaaatgaygggaaataggacttaccatatagagttagtgaatctcggtgtgcaaataaggagctggctgatgtttgtttttttccccccttttccccactttggttca

SEQ ID NO: 243811 - DNA, 201 bp, Homo sapiens
tttttgagtcctcttgaatacatggtgttttagttttaccctgtgtaaaactaaatcaatgaaattttgtataagttaaatttttttagttaaatacatctttttttttccatacacctatgtaagcaagagtttgtggccagaaagacttgagcctttttcatttggtgtgttatatttatttggacttgaacttcttcc

SEQ ID NO: 243812 - DNA, 201 bp, Homo sapiens
atatatcataagagcataacatttttcatgttttacttgctcttctttacttttcctcaaaaaattgctctctggtatcactatgggccttagtttcctcrtccacttcttaaaacgatagaattggagtatataaacttgcaattatatctagatctgtaattgttaaatgaaaagctttcattaaaagtataaatactg

SEQ ID NO: 243813 - DNA, 201 bp, Homo sapiens
atgtcctgaaaaataataccttcacctgggtagccacactcggctggcatttttaatgtttctaatatgtacagtaacagtggacacagcagaattcaggwtaataaaattaaaaaaaaatactgaattgcttattttgatttgaagaaagggcatgggccttgtagaactttccttacatcacttgaatgttttgtgcat

SEQ ID NO: 243814 - DNA, 201 bp, Homo sapiens
acattcagtccattgcaccaagcttcaaatatttttcacatataaagttacaatgaatacaagctcaaagtactccacaaattaaataaattaataaaagttttttaaaaaggggataattaaggcagcatgaacatgaatcagcagaaacaacagagagcaaactaaaccaaaagatttcaaatgtcagttacagaatat

SEQ ID NO: 243815 - DNA, 201 bp, Homo sapiens
accccattcatgaacatactcaaaaaaatcttaaagcattagcaaaacaaatccaggtgtgtactaaaaagataatacattatgaccaagcttattttacttcctaaatgcaatgatggcttcatatttgaaatattaattaatgtaactaacagcactgtgaaattatggggaaaagtctatctgtgtaaagaaataatt

SEQ ID NO: 243816 - DNA, 201 bp, Homo sapiens
tgataagtattataaaataccttaatagaaggctatgcaaaggcaaggataattgagttttatgtattgcatcagaattccaccctattatctgcaaatcagagtgtcttataaataaacttttctaggatgaaagaaagcaaaatgtgagcctctatgttatttctaaaacatgagtatagtttatgaaaagtgatccat

SEQ ID NO: 243817 - DNA, 201 bp, Homo sapiens
attcttactcattttgcttaagagatttatccatgttattgcagctagctatatttgattcatttccattcacatatagtattccattctataaaaataayttttagggaaatgtcacagtttatttacatattctgcttttgacagataaagggaatttttccagtttgggggctattgtatctaatgttgtgatggaca

SEQ ID NO: 243818 - DNA, 201 bp, Homo sapiens
gataagtattataaaataccttaatagaaggctatgcaaaggcaaggataattgagttttatgtattgcatcagaattccaccctattatctgcaaatcagagtgtcttataaataaacttttctaggatgaaagaaagcaaaatgtgagcctctatgttatttctaaaacatgagtatagtttatgaaaagtgatccata

SEQ ID NO: 243819 - DNA, 201 bp, Homo sapiens
tattgtattttttactttctatattatttaattctgaaagggagtgcctgtcaaaattatgaagggaaacattggaaactaatatttttcaatatcaaatrttcaatattttttccttagcttatttttgaattcccttaacagcttattgaaatacataatggcgttctgcttttaaacatcagtaagttgagattcagg

SEQ ID NO: 243820 - DNA, 201 bp, Homo sapiens
aaagaccatccattcagccaggcacagtggctcatgcctgtaatcccagcactttgggaggccaaggtgggcgaatcacgaggtcagaagtttgagaccakcctaaccaacatggtgaaaccccatctctactaaaaatacaaaaattagctgggcgtggtggtgcgcacctgtattcccagctactcaggaggctgaggc

SEQ ID NO: 243821 - DNA, 201 bp, Homo sapiens
tagtttatattaaggtttactctgtgttgtaagattctatgagatttaacaaatgtgtcatatcatgtcatatatccaccattacagaatgatatagaatrgttttaccaccctaaaaatctcctgtgccccacctattcatcctccccccacccaacttttggtaaccactaatttttttattgtctctatagttttgcc

SEQ ID NO: 243822 - DNA, 201 bp, Homo sapiens
gaaattattcttttaaatcgaaaacaagacgaagatactcttactgcttcatttcagcattgttcagggaatcctagacagtgcgatattgtaaaaaaaagaaaaagatatcagtattggagaaaaataaataaatctttcactatttacagatgatttgtaattgagtatgaagaaaatctattaaaagatgttcattta

SEQ ID NO: 243823 - DNA, 201 bp, Homo sapiens
caaactgtcttccaaagtggctgtactattttgcatgaccactagcaatataacagagttcctgttgctccacatacttgttagcactttgtattttaagtttttttttttttaattttagccattctaatacgtatgtagtggtttctcattgtggttttaatttgtaattccctaatgacaagtggtgccaagcatctt

SEQ ID NO: 243824 - DNA, 201 bp, Homo sapiens
ttcatcagttgatctttcaaaggaccagttttttgttttgttgagttttctctcttgatttcctggttataattgtcttgaatttcccattaatttttacttttttttttctgcctactttaagcttagattgttatttttcctctattttttttaaagtggaagctcagattattcaatttttatcttttcttctaatat

SEQ ID NO: 243825 - DNA, 201 bp, Homo sapiens
ttggctcactgcaagctctgcctcctgggttcacgccattctcctgcctcagcctcccgagaagctgggaccaccaccacgcccagctaattttttttttwaatttttagtagagacgggtttcaccatgttagccaggatggtcttgatctcctgacctcatgatccgcctgtctcggcttcccaaagtgctgggattac

SEQ ID NO: 243826 - DNA, 201 bp, Homo sapiens
tcttagtaaaagcattctaagtcacatcacctaaagaagatacagtgtctaaacagaattatattttcagaactcgttaattttttaaatatatatatatwtttattttactttaagttgtagggtacatgtgcacaacgtgcaggtttgttacatatgtatacatgtgccatgttggtgtgctgcacccattaacttgtc

SEQ ID NO: 243827 - DNA, 201 bp, Homo sapiens
gtatacatgtgccatgttggtgtgctgcacccattaacttgtcatttacattaagtatttctcctaatgctatccctcccccctcccccaactccgtgacrggccccggtgtgtgatgttccgtttcctgtgtccaagtgttctcattgttcagttcccacctatgagtgagaacatgcggtgtttgggtttttgtccttg

SEQ ID NO: 243828 - DNA, 201 bp, Homo sapiens
catgaactcatcattttttatggctgctggaagacagtgtggcgattcctcaaggatctagaactagaaataccatttgacccagccatcccattactggrtatgtacccaaagggtaataaatcatgctgctataaagacacacgcacacatatgtttattgcggcactattcacaatagcaaagacttggaaccaaccc

SEQ ID NO: 243829 - DNA, 201 bp, Homo sapiens
aatccatttgtaagtttacctttaccacctaatgtgatacagtcacaaattctggggaatagaacatggacatctttggagtggggcattattctgcctacccccaagtgcttagagttttcgttaagatggtgttttctgcagtgtactttgacttactacccctttactattttatgtgaaatttgtttgcgatgcctt

SEQ ID NO: 243830 - DNA, 201 bp, Homo sapiens
atgtacatatgaaataaaacacaaagacatgcttcagaatgataaattcagaatttcagaacagattatttgtggggagggatgcaatgaagcttcaagtmtatttgtaatatatttcttagggatgggggctgtgaatgccatttacgtgacagtagccccaaatttgtatgtctagcccaggcagctttcctgaacttc

SEQ ID NO: 243831 - DNA, 201 bp, Homo sapiens
ttggtgttaaatgtgagtaaatagtttcctttaggactatattttgtgagagccaggacacaagtccacttaagcaatcttcctagagaagaaaaaatgtygtatcattctagaattaacaagcagttacataagtcttacaatgttaggcacttttctatgagttttgcaagtattagtatttaaatgttgagatgtgtc

SEQ ID NO: 243832 - DNA, 201 bp, Homo sapiens
agtactagaacaaaggctgtataagtatatataaataatgcaaacttttcaacacgtggctaatttccacggttgaactttctccagttcttatccaaatmtcttccacatcccttctggataaaaatatcttaattcgccatgtctaaaatctgtttgtattcaagacagtcactcaagtcagaataatagaatttaaac

SEQ ID NO: 243833 - DNA, 201 bp, Homo sapiens
tctgaaaccataaacattcacgtttcactttcatggtgttaactgcaatttaatgagaagaaggcgcagatcagggcaacttttatgatccttaaatgaaytgatacttccacagttaaaataacccaacagaacctgaatttacttttccctacagaatatagactcaatagtcagatgtgctggaaagaatgctgttgc

SEQ ID NO: 243834 - DNA, 201 bp, Homo sapiens
acgcctgttatttgtctgcattgctgacattagggaaaagaaaagctaggtttgatatttcaactgcatcaattgaacacgtaatatagtggagactttayaactgtttgtttctggtaagcctgtttgttattattaccagtcaactgggagaatccaatgcctgtaggggatcccacccccaacaaatgaatctctatg

SEQ ID NO: 243835 - DNA, 201 bp, Homo sapiens
gaattctaaatttaaatctggtcctctaggtcattgtgaaggtatattttttcaaggcaggagggtaaaatgtattttatttgacaggtaataggttgatwtatactttttaaaaatttagaaacatgatttctgggcttccatttgtactcttgctctatgtcgtacaagtattaggagcaggcttctgtgggggaaata

SEQ ID NO: 243836 - DNA, 201 bp, Homo sapiens
atgggaataataacagctgattcggtataacccaaagggctgttgtgaagatcagaagagatactccatgtgcaatttctttgtgacatataaagctctgytgacttgtgatgctattactattgagaaggccacataggtggaatggttaaaggacctatggaagaccactacgtatgatgttaaggacagtaataggct

SEQ ID NO: 243837 - DNA, 201 bp, Homo sapiens
tagaggtgtttgtagtattctctgatggtagtttgtatttctgtgggatcggtggtgatatcctctttatcattttttatcgcatctatttgattcttctcccttttcttctttattagtcttgctagcggtctagcaattttgttgatcctttcaaaaaaccagctcctggattcattaattttttgaagggttttttgt

SEQ ID NO: 243838 - DNA, 201 bp, Homo sapiens
gttttttgaaggattcttgaccttttgggtcttgatgttgatggttttgagtctttttcagtctggtttgatttttgtgcaattttggctggagtatcttrtatagatttcttcactgagctttttcttcatcttcctcacccttgtcatcgtcatcttcattgtcatcatcattatcttcattagcagcaagtttttact

SEQ ID NO: 243839 - DNA, 201 bp, Homo sapiens
ttttgtgcaattttggctggagtatcttatatagatttcttcactgagctttttcttcatcttcctcacccttgtcatcgtcatcttcattgtcatcatcattatcttcattagcagcaagtttttactttttttctgtggaacctcactaccacctctagaggcagctcgctttccagatatacttaagagctttgcatc

SEQ ID NO: 243840 - DNA, 201 bp, Homo sapiens
tttgtgcaattttggctggagtatcttatatagatttcttcactgagctttttcttcatcttcctcacccttgtcatcgtcatcttcattgtcatcatcattatcttcattagcagcaagtttttactttttttctgtggaacctcactaccacctctagaggcagctcgctttccagatatacttaagagctttgcatcc

SEQ ID NO: 243841 - DNA, 201 bp, Homo sapiens
ttgtgcaattttggctggagtatcttatatagatttcttcactgagctttttcttcatcttcctcacccttgtcatcgtcatcttcattgtcatcatcattatcttcattagcagcaagtttttactttttttctgtggaacctcactaccacctctagaggcagctcgctttccagatatacttaagagctttgcatcct

SEQ ID NO: 243842 - DNA, 201 bp, Homo sapiens
ctgtacagacattttcaaagttgccagtgttacttttatttggactgcgtttatatttcattgcttctgcttcaacgatgtgcaattcatcataggtaccrgctcctgaactggccattcttaaagaaaactggtgctcattttcatcatcatccacattaaagtgataatatttgtcagctttagttcacaattaaaaag

SEQ ID NO: 243843 - DNA, 201 bp, Homo sapiens
gaagatacaatttgaaataccacattttaaaaaatgattttaacaagttttaagagtttatttcagaaccttgtactgccacagagcggtggtggtgatgtttttttttttttttcctctcaccaaactgtattgcaaataaaccttttgatgtttaaaagtttttctttggcagctaagaaaaacactctggaaagttat

SEQ ID NO: 243844 - DNA, 201 bp, Homo sapiens
tttaccattatgatcactaagcatttacccagaaccatgaaataaatgcagaaattgtgattttgtaatccaatcttaatgaagggtagttatctcctaawgatgttggaattcagcaatcatttactgattcatatgtgtcaagagaggaaaaaaaaattaatgagaaagcctctgtatgggaaaatccaacttaacaaa

SEQ ID NO: 243845 - DNA, 201 bp, Homo sapiens
aagtcatagactttttttattatccaactcccttcacacacatacatacacataagcacacatgggtgcacacacatgctgaaatcaagcacaaactaacrtgaagattagcatgaagaggaaaaccaaagggcactattaggtgtccaggaggaacaggaaaacccttaggtttgctactgtcttgtagaagcatttatt

SEQ ID NO: 243846 - DNA, 201 bp, Homo sapiens
aggagcaatttccatgtttcttgtatataaaatttgtgagtatagctaatcctctgttgttttaaacacacacacacacacacacacacacacacacacasagtattatttagggcaatgagaagtgaatttataatcctcagaatttatccaacttttgaggacaatttgaaaatggacatgatttcctttgttgcaggg

SEQ ID NO: 243847 - DNA, 201 bp, Homo sapiens
tcaaacagaaaaatcactaaattctaatgattattctatatttttcattcaatttatggaatcaaagcaaaatttttgtaaataaagttgccccccccccmaaaaaaaaaaagcagggtgttattgtgaaagctatttgttataaattttggtaaaagtgtaacactgataataaaatcatttggttttgcattgatatac

SEQ ID NO: 243848 - DNA, 201 bp, Homo sapiens
ttttgaaaactttatatatgaattacatactgttaagtggttataattagaaatagttacattagaaattttgctccttagtgtcaaaatatataaaatcyaattcataacattaaaggttcattttatcccagccagaagaggcatacattgtattatttattgtagtatgccaagtagtacttttgaaaatatgtacct

SEQ ID NO: 243849 - DNA, 201 bp, Homo sapiens
tgcgctttctgctgcaacatgccaaactaatcaccacagcattctgagggatgtgttatcagacttaggcctgacagataggctctgtaaattatttaaarcttctcttcatttcttgcaaagcaatgcttgctgagcttctccatgaaaaattagtgtaattccagaagattatgatagatttgcaaggtaggagtttgg

SEQ ID NO: 243850 - DNA, 201 bp, Homo sapiens
ttgttatatatgctctaatctaacacacacatacacacaaacacacacacacacacgtacacatgccactgaaacctttaatatgtcctgaaaaataatamcttcacctgggtagccacactcggctggcatttttaatgtttctaatatgtacagtaacagtggacacagcagaattcaggataataaaattaaaaaaaa

SEQ ID NO: 243851 - DNA, 201 bp, Homo sapiens
tatcaggcaaagcctgtcctagggtagtttttaattagataaagctttcttcagagttcctgctttcaattctctatcatttcttatctggtagggatccygcttgcttcctagtacctctccctttctttacatcagaatctattatgtatggtggttattgatttacccaaagaagtcaatgaaggccaacagcagttg

SEQ ID NO: 243852 - DNA, 201 bp, Homo sapiens
gaactcattatctgggatttcacttttacaaataacaaaatgtagtaaagcttgaacttaaaacattggcagaacccgctttagtttctcaacactgaacwtgcaattgaactcccattagaaaggtcaagaggggcctttctgagggcctctgctctttgtcagatgtatttattcatgtgcagaggattagaattcata

SEQ ID NO: 243853 - DNA, 201 bp, Homo sapiens
tctcattcaatcagtatttattgagtccttgaaagctgtattttttaaatgaggctgcttgtttatctgtttttgttgttgttgatttcttagtctaagarttaccaggtatttccttcttctgagataccttaatgctctattccaactggtcatcactggggaaaattctcttacaagcccaatgcaaatgttacctaa

SEQ ID NO: 243854 - DNA, 201 bp, Homo sapiens
accaggggaagactgtcagctacgattttctctagcctcaagaagactgagaccgagccaaactcctggccaacgtgctttgtggattcacagtgtagctygagaaaaatggttagtggtgacttgttttttcccccgagtgattatctcattcaatcagtatttattgagtccttgaaagctgtattttttaaatgaggc

SEQ ID NO: 243855 - DNA, 201 bp, Homo sapiens
aatggtcataggctgcccgtggcatgcttagtgttcggcccaattgctatacagtagcacagagaatagagagacagcctgacagatgagtatgagcacamacaaaaggcaaaggagaagctgtgcagctgccctcttcttcatctctgctgggttccccactgaagtaactcacctggtgtcagacgagtggcacacggt

SEQ ID NO: 243856 - DNA, 201 bp, Homo sapiens
tcagaaacccaaaagaaggggagcagagtatcttcgccagctgaagttagaagtcttagaacattttctcataaacacaatattgcacactttttaaaggrgtatgaaatacagtattcatcacacaggcatttactgtgtacctacaacgtgccaggtatttaattcaggtagatcatgggtcaaatcacacctttgtta

SEQ ID NO: 243857 - DNA, 201 bp, Homo sapiens
ctgccctagctggggtcgtctccctccttgattccatcgggcttggctgccttccctcaatatgtgttgagtgactactgtgtgccacgtttgttcctagwggatccaaaacccaaaccagaagctcccagggttgcagtgtaattaatatggggtgtaattatagccttttatgatagtctgtttctttccttgttactg

SEQ ID NO: 243858 - DNA, 201 bp, Homo sapiens
gtgtagaaggtggtagggaattaattagagctgaataaataatttgccaaagcttgataagatgacttctctagctatatttctaggaaatggaaatttayatttttgattaaatgttttaataaatgcattagtttctgcataagttgaggtacatgtgaatttcatatctgaagaggaaaggatgggttaaataaagaa

SEQ ID NO: 243859 - DNA, 201 bp, Homo sapiens
aatgagtgaagtgtagaaggtggtagggaattaattagagctgaataaataatttgccaaagcttgataagatgacttctctagctatatttctaggaaayggaaatttatatttttgattaaatgttttaataaatgcattagtttctgcataagttgaggtacatgtgaatttcatatctgaagaggaaaggatgggtt

SEQ ID NO: 243860 - DNA, 201 bp, Homo sapiens
catgtgagtgtttagattgctaaaatttccagtaagtgctaactgaaatgattatttttggctatattgactattgaacttactaattaatatgtatgtcytatggtaaatttgagttagttattatgatgccctaaataccagcttgtcccttttggttggtggtcttcagttgcataagcacaacctaaaattttttca

SEQ ID NO: 243861 - DNA, 201 bp, Homo sapiens
gttctcatttcttaacccccatattggtttaagtttttttgttcatgtaatgctataagcatgttttgagtgaagtgcatattttaaatgaaatcaaatgyctgaagtttttgaatattatgtctgctgagtgttttctccctagcttttgaaggggatagcattaacttatgtttgtggattccctgttaattagccctt

SEQ ID NO: 243862 - DNA, 201 bp, Homo sapiens
gagaaagcccgcgcagataaagggagcatgcgcaaactccatatagatagtggcccccggcagggaattgatttttttcttcatcaaagttataacaaaayaacattatttgaggacatgctgtacatagacagcttcatttggaaatgaaaacctagtaaactttccctagctctcccttaaaacagagctgcttcagac

SEQ ID NO: 243863 - DNA, 201 bp, Homo sapiens
aagaatattatgtatagaggttgtttgtataaactatgagctttgtgttaggttagtaaaagcggcattacaaaatacttgtttttaaaagtgaagctttstgcttgagcagcttaatgctctaggtgaccatcgagaatatacattggtcctaaagaggcttacaggcttctagaaagacattacatagaaataagttat

SEQ ID NO: 243864 - DNA, 201 bp, Homo sapiens
ttccttcttcttcttcttcttccttcttcttcttccttcttcttcttcttcttcctcttcttcttcttccttcttccttcttccttctcctccgtctcctycttcttcttttttttttgagatggagtctcactctgtcacccaggctagaatgcagtggtgtgatctcagctcactgcaacctccacctcccgggttcaa

SEQ ID NO: 243865 - DNA, 201 bp, Homo sapiens
cctcttcttcttcttccttcttccttcttccttctcctccgtctcctccttcttcttttttttttgagatggagtctcactctgtcacccaggctagaatrcagtggtgtgatctcagctcactgcaacctccacctcccgggttcaagcaattctcttgcctcagcctctcgagtatctgggactacaggcacgtgccac

SEQ ID NO: 243866 - DNA, 201 bp, Homo sapiens
gcagtggtgtgatctcagctcactgcaacctccacctcccgggttcaagcaattctcttgcctcagcctctcgagtatctgggactacaggcacgtgccascatggccagctaattttttttgtatttttagtagagatggggttttaccgtgttagtcagatggtctcaatctcctgacctcatgatcagcccacttctg

SEQ ID NO: 243867 - DNA, 201 bp, Homo sapiens
gtcggtcagaaatctaactaacccaggtctcactgagctaaaagcaatgtattggcaaggctgccttcatttgtggaggctctggggaaaaattggtttcyttgccttttccatcttctggaggttgcctgcattccttggctcatgaccccttcttccatctttaaagccagcaacttcacatctatctgacctttcttc

SEQ ID NO: 243868 - DNA, 201 bp, Homo sapiens
cttgtgatatgagggaatatattcccaatcacacatttaggtgtagaattgttacacaggaagtctgtactgagaatatttctggatctttattttttttwaattctttttctatttatttattattattatactttaagttttagggtacatgtgcacaatgtgcaggttagttacatatgtatacatgtgccatgctgg

SEQ ID NO: 243869 - DNA, 201 bp, Homo sapiens
tacaaaggacatgaactcatcattttttatggctgcatggtattccatggtgcatatgtgccacattttcttaatccagtctatcattgttggacatttgrgttggttccaagtctttcctattgtgaatagtgccgcaataaacgtacgtgtgcgtgtgtctttagagcagcatgatttatagtcctttgggtatatacc

SEQ ID NO: 243870 - DNA, 201 bp, Homo sapiens
tttcttaatccagtctatcattgttggacatttgggttggttccaagtctttcctattgtgaatagtgccgcaataaacgtacgtgtgcgtgtgtctttakagcagcatgatttatagtcctttgggtatatacccagtaatgggatggctgggtcaaatggtatttctagttctagatccctgaggaatcgccacactga

SEQ ID NO: 243871 - DNA, 201 bp, Homo sapiens
tgatttgcatttctctgatggccagtgatggtgagcattttttcatgtgttttttggctgcataaatgtcttcttttgagaagtgtctgttcatgtccttygcccactttttgatggggttgtttgtttttttcttgtaaatttgtttgagttcattgtagattctggatattagccctttgtcagatgagtaggttgtga

SEQ ID NO: 243872 - DNA, 201 bp, Homo sapiens
ctctgatggccagtgatggtgagcattttttcatgtgttttttggctgcataaatgtcttcttttgagaagtgtctgttcatgtccttcgcccactttttsatggggttgtttgtttttttcttgtaaatttgtttgagttcattgtagattctggatattagccctttgtcagatgagtaggttgtgaaaattttctccc

SEQ ID NO: 243873 - DNA, 201 bp, Homo sapiens
ttcttttgctgtgcagaagctctttagtttaattagatcccatttgtcaattttggcttttgttgccattgcttttggtgttttagacatgaagtccttgyccatgcctatgtcctgaatggtaatgcctaggttttcttctagggtttttatggttttaggtctaacgtttaagtctttaatccatcttgaattgatttt

SEQ ID NO: 243874 - DNA, 201 bp, Homo sapiens
caagtggtattggttctcggtcatctgtgtatcctcagtgggatatcttgaaagggcctggcatggagttgcttctcaataaatgtttgtagaaattaaamaaaaaaaaaactgtgacttagaaaagaaaggggatttcttttcctgttaccttctctgccactgatttcctgttattggtagaacaggcatagaataaaa

SEQ ID NO: 243875 - DNA, 201 bp, Homo sapiens
tatacatacacatatatggaatatgtaacgtggaatatatataaataaaactctaaactttgaaaaattatagttcctcaaccaggaattctagtgatttrtatcacttggctactctagggctttggaaaaaatgagaagtgggtgtttaaatgttttaagaggtaattttccaagcaattgagcaggtagttaaaaata

SEQ ID NO: 243876 - DNA, 201 bp, Homo sapiens
gaaagggaatttaattggagaccagaacgcagaaagaatgacaatgatgtcacctgatttaaagtgtgagacctgtgccttttctctatatgtttagaaakaccaggcttgagaaagagaaaggaataaaggtattgctggacaatattaaacctgaccatgtgagtgtttagattgctaaaatttccagtaagtgctaac

SEQ ID NO: 243877 - DNA, 201 bp, Homo sapiens
tattaagaattagcaaaagaaaaagatggtgaattatgcattatatagtatatgcattatatacagtaaattacgctttatatactacaaagaaagaagaragatgcagaaaataatatggaagctaatggataagaaatatgtgcttaagttggggcaagaaagtcaacttttgatttctgtgaaagaaaacaaaggctt

SEQ ID NO: 243878 - DNA, 201 bp, Homo sapiens
cattgggatgagaggtctggtctatttgtgtcagagtcctgtgtgcttctacacaagatagtttgtgtgcctgtctgcatgcatgtgtatacaaaaatcaygccccgcaattatgtacacagtcacacatatcaatctcttagtaaaatgacaagtctgggcagtgtcactcactgtaccttggaatcctaattttttaac

SEQ ID NO: 243879 - DNA, 201 bp, Homo sapiens
atcttctaatcagaattttccttaggaacttctctaattgtgtagttagggtaaaaattgctttgtatatgcctgtggtttcaaaagactggaatgtgctrtttatctttttatttactgaaggttttcacttacttcttatgtatttcttatactgtattaattctaaagtattaacctatttccaggtgtaatgatgat

SEQ ID NO: 243880 - DNA, 201 bp, Homo sapiens
ttaatccatcttgaattgatttttgtataaggtgtaaggaagggatccagtttcagctttctacatatggctagccagttttcccagcaccatttattaartagggaatcctttccccattgcttgtttttctcaggtttgtcaaagatcagatagttgtagatatgtggcattatttctgagggctctgttctgttccat

SEQ ID NO: 243881 - DNA, 201 bp, Homo sapiens
attccaacgatctgaatgtggagtgtgcttggccaatgatgatgtggctgaaatatgcaatatttatgaggcacagacccttgtacttcttgttcgaggaraggcagaagtgtgacaatgtccttccaaaaatgaaagcgtaggggaggattcttccctggaataaacctacagaatgctttcttctgtggaccattagta

SEQ ID NO: 243882 - DNA, 201 bp, Homo sapiens
gagtatccaccatgtgctagactttagcttgtccaacccatggcccatgggccacatggggcccaggacggctttgaacgtggcccaggatggctttgaaygtggcccaacacaaattcgtaaactttcttaaaacataatgtttttgtttttggattttattttttagttcatcagctattgttagtgtcagtgtatttt

SEQ ID NO: 243883 - DNA, 201 bp, Homo sapiens
ctggggtaaaaaataaatgttcaaaagtaaccactgtagaagaggatagatatagtcataaaagctacagagtgttatcaaagtacagaggaggggtcttycataggggtcaagaaaagtggcaaggatacttacgatgaaccttgaataccacatgaacaatagagatattccaggcagagagaagtaatgtgcagaggc

SEQ ID NO: 243884 - DNA, 201 bp, Homo sapiens
tacttccaagtatgtggtcaattttggaataggtgtggtgtggtgctgaaaaaaatgtatattctgttgatttggggtggagagttctgtagatgtctatsaggtccgcttggtgcagagctgagttcaattcctgagtatccttgtttactttctgtctcattgatctgtctaatgttgacagtggggtgttaaagtctc

SEQ ID NO: 243885 - DNA, 201 bp, Homo sapiens
aagtttaattaagactgagtaatataggggtagtttggaattgaccaatagattctgaagccttctacacatacttttggtctctctccaagtggtgctaytcgtgctgctggtaattacttttcttcaacgccttttgatccaggcattttcttgcttacgatctttggatggatattcatgctggcaggattaagtctt

SEQ ID NO: 243886 - DNA, 201 bp, Homo sapiens
tgagctgtggtgggctccacccagtttgagcttccaggctgctttgtttacctaagcaaggctgggcaatggcgggcgcccctcccccagcctggctgccrccttgcagtttgatctcagactgctgagctagcagtcagcgagattctgtgggcgtaggaccctccgagccatgtgcgggatataatctcctggtgcgcc

SEQ ID NO: 243887 - DNA, 201 bp, Homo sapiens
ttttcttatgttattaaatttattgtgtgtttatatcttggcccttcagctacaggagggcagttcttgtgtgtgtgtgtgtgtgtgtgtgtgtgtgtgtktgtgtttgtataggaggaggcaagagtatcttttttaaagccatacctctcaagttcaaatcctggcttcctcatttatgagctttgagtccgtgggcaa

SEQ ID NO: 243888 - DNA, 201 bp, Homo sapiens
gccgccttgcagtttgatctcagactgctgagctagcagtcagcgagattctgtgggcgtaggaccctccgagccatgtgcgggatataatctcctggtgygccattttttaagcccgtaggaaaagcgcagtatttgggtgggagtgacctgattttccaggtgccgtctgtcacccctttgactaggaaagagaactcc

SEQ ID NO: 243889 - DNA, 201 bp, Homo sapiens
atatgcaccaatggttctccatctgactagatatactttccaggaaatgaaaatacttggaagcttttcaaaaagttctagaagaaaaaccatttctgatmcctacaaatatacatgtatatgaaagtgttacaaatataaaaatacatgttttcaaactcaaatgtaattttaagaactttgccttaatttatattgcca

SEQ ID NO: 243890 - DNA, 201 bp, Homo sapiens
gcataattgtgagtttactgagactttgaccagaagtattgtaaagctgagcttgttctatggcgtttgggaggagttgaaataaatcatttcaaggacartgaaatgttcagcccaaggtacactcgtccttggtttaaacacccatttcctttaaggactttctaatgagaccttgtggattttccaaaaaatataccg

SEQ ID NO: 243891 - DNA, 201 bp, Homo sapiens
caaggacaatgaaatgttcagcccaaggtacactcgtccttggtttaaacacccatttcctttaaggactttctaatgagaccttgtggattttccaaaawatataccgtgccagtggcagcttattcaccttacttacatagttcgaggaactgcttgtttaaatttagatactgtctctgatgaaatgttttgacaaag

SEQ ID NO: 243892 - DNA, 201 bp, Homo sapiens
gttccccaaaataacatccttccattctccctgaggagagaaaggcctctattcagtcatagattacagtatgtgtgctgagtatgttaagaattcacacwgtttaaacaagagggaacatttggggactgtttccaaacagggaacatttattgttctataagcaaaccgaacctaaagaactttcgggaacatttgttg

SEQ ID NO: 243893 - DNA, 201 bp, Homo sapiens
cgaaataaaaaagtgccaatgttaagatacatgttttgcaccagaatataaattttcgcattggttgactgataacactgttgtattgtcatttttctcaragtaaggtcttactaagcctgttcttgaccattaccatcaagtaccattaccatcaagctatttataatctttgtatttagtttctatgtactagcaata

SEQ ID NO: 243894 - DNA, 201 bp, Homo sapiens
agcctttaaacaagtttccttagtgtcaaaagttaaaaataaaggacatttatttctgagataaaaagtaacttactaaatataagtaggttatcctcctwcctcctaaaattcgatttcaacatataactcaaacacctaaacatattgaggtagaatatctcacagtatttaatatctgacaatgcttttgaaagagtt

SEQ ID NO: 243895 - DNA, 201 bp, Homo sapiens
cctagtcagctccttcatattctactactgtcaaggagggatgaaccaaatggggaatgtttttctcccaaatatggggacaatatagtgacagcctcaamttttctaaatagaaggatttagagatgaaggaatggagactggctgtagactggcgttagagctacttttccatttgaaggcatccttttatttaggatg

SEQ ID NO: 243896 - DNA, 201 bp, Homo sapiens
aataaaaggggaaaggtagattagtattttttatcccccgaccactgtatatcccatactcatcttagtacttaaatggctatttccaaatacattcattwtcttaagcatatgggatgagttgatggtatcctagatacaaaggagtctcattattttattttgccagaacttttttcttccccacaggtttatagtttc

SEQ ID NO: 243897 - DNA, 201 bp, Homo sapiens
cccatataacctgaaaattgagcaaaatgactatatatacacacacacacttatatatgagctatgtctatatgtgtgtgtattatttagaatactatttwtctatacatcagtttgttctactccattactcttttagttttcaacaagtggaataaaaaataggatttcaaaagcaatatcataaagaataatattctc

SEQ ID NO: 243898 - DNA, 201 bp, Homo sapiens
catgcagccatctcccctggtcatctgagccagcaggctgagatctcacttctctcgtggacctcattccacagttaacattgtgacatgtattctatctrttaatgtgaagttaattttttcttatgttattaaatttattgtgtgtttatatcttggcccttcagctacaggagggcagttcttgtgtgtgtgtgtgtg

SEQ ID NO: 243899 - DNA, 201 bp, Homo sapiens
tgacccctctttcatttctaatattagttattagtttcttctctcttactttttttttcctgacagcctgactgtagtttcatcagttgatctttcaaagraccagttttttgttttgttgagttttctctcttgatttcctggttataattgtcttgaatttcccattaatttttacttttttttttctgcctactttaa

SEQ ID NO: 243900 - DNA, 201 bp, Homo sapiens
gtttgtgatattaaacaaatgtgttgaagcaatgtggtagggcagtggtcctcaaagtgtgattcctggaccattagaaatgcaaattctaggctttctgrttcagacactggtgcagcccagccatctagatttttaactcgtgttcctgatcattcagatgcacactttagcttgataagtgcccagatagtgtagaga

SEQ ID NO: 243901 - DNA, 201 bp, Homo sapiens
attcacaaaatacgaactaatatatgaattagttatatataaaatcagtttgtgaatactggaaagataaagaagtcatcaggctgggcgcagtggctcaygcctgtaatcccagtgctttgggaggccaaggcgggcagatcacgaggtcagatctaaaccatcctggctaacacggtgaaaccctgtctctactaaaaa

SEQ ID NO: 243902 - DNA, 201 bp, Homo sapiens
aggaagaggagtagaagtaagaaataagaattaaattaaatcagtaaaatgagaaaatgttttactacgtaacagtgttaatataaattaaacaaatgctrtttttaaaaccacaagaaataagatttaagagagaatacaagaatttaatttaatactacatcttgtctcaagtgaaattacttccttttttttttactt

SEQ ID NO: 243903 - DNA, 201 bp, Homo sapiens
gagagctgaaaaatcagctttgattatgcatgaaaatctacaatgtcattgtgtactcttatgccgtattctgattgcctgtttatttttacagaactgckggtgagcctatggaagaggagccagccttgtgaagtgccaagtccccctctgatatttcctgtgtgtgacatcattgtgtatccccccaccccagtaccc

SEQ ID NO: 243904 - DNA, 201 bp, Homo sapiens
accacagaaacaaacatgaacaatcaactataataaatgacaagtctttgataagattgaaatagggtcctgcaaaatgaaaaaaaaagcaaaacaaaacrccttataggccaaggactggggagcaaatcacagaaccagggagaagagaatcagggtggaagaatgtgtagatttcacacagtaaataggacaaaaggc

SEQ ID NO: 243905 - DNA, 201 bp, Homo sapiens
tgtccatatagatatattataaaatatttataaatgaatacttacattgatttttatttgagctggttttacatttgacttattatttattggactatttmatttagtaaggaaacacctctttttcatttttaattagtgcatggaaggcttataagattaaaaatagttgtgtttagggaaataagcttatttcttatg

SEQ ID NO: 243906 - DNA, 201 bp, Homo sapiens
ttcttcttacctttcatcattcattccttcctttagaaaaactgaagattacccataatctcctcttattacttgagggccttgactatttagtttatttygtttactttacaggttaacacagttgttttgtctgattgcattttattaactgtgaagccgttgaaatgaatatcacttaagcaacgttgctaaatttct

SEQ ID NO: 243907 - DNA, 201 bp, Homo sapiens
tttctttttcacatatagaatctattttagttactctagcaggtttttgttgttgttgatgaccaattttcaggtccaaatgttaaccttaacaattcacraggggtggtgggaactaaagattttttttcactctctagtccaacttacttcagcacctgctagtcactataggcagcctgacttttaacaggctcatca

SEQ ID NO: 243908 - DNA, 201 bp, Homo sapiens
aagcacagtttaaaaagccttaattgctgagatgatttcatgattattgttgtttctttagaaaccttgacatctcagcatatctaggacttttcttctcycaatatcttgaagagctaattttgtttgcccccgtttttaggtttccacttcctatttttatgttgcgtatctgagattattatacaatgccccgtattt

SEQ ID NO: 243909 - DNA, 201 bp, Homo sapiens
cctgctctgcctgtggccagctgtgtgacctcaagcagtcccataaactttttaggagaactttccaattgtccactttccagcacatttatctaagtcayggtttagaggaagagagaagagagagataattaaggaaataactagtattgagaataaaaatatttgtcttaggttgaacatatgcaatcgccatttttg

SEQ ID NO: 243910 - DNA, 201 bp, Homo sapiens
cacaggcaagaatgaggaatggacagtgcctgcaatttcaccatatgttcttgtcaaatgtgttttacataaatacaggagcaatttccatgtttcttgtwtataaaatttgtgagtatagctaatcctctgttgttttaaacacacacacacacacacacacacacacacacacagagtattatttagggcaatgagaag

SEQ ID NO: 243911 - DNA, 201 bp, Homo sapiens
tttggcatattgtaggtacttcataatgttaactttctacaatagctaattaggcatttctctcaaagaaaagtaaaggaaatagcttttaaatggcttayggtttttcttgggtgctgtatacccttgctactcacaatgtggtcctcacaccagcacgggcagcagttggcagaaattgcaatgcctcactcagggccc

SEQ ID NO: 243912 - DNA, 201 bp, Homo sapiens
agtttccttaatttttgatgctcagcgcttttcaaaagaaaaccctattttttaaatataacagcaatgaataaaacaaaaagaagtcttcaatttccccrgttgacattatgatcaaaatatcaatttaataattatcctccttttaataggactgatttcatcttgtcaagtttaccattacaagttactagaacagcc

SEQ ID NO: 243913 - DNA, 201 bp, Homo sapiens
agagtgcccgttatgtgttggggctggactcacagtttctagggtgtagatcttagccatggagatccagacacttacggggttaggatattgggagtagwgctcttatgcagggacaggcttgcattaaccaaactcaccagatattagtgtataaccaaaatgcaaatttattggtttacaataagaattctttgcact

SEQ ID NO: 243914 - DNA, 201 bp, Homo sapiens
gtttataataactcatatctaatagaagtatcagaattatgtataaaactgtggcacagagtaggtattttgtaaataatagttgatttgtagttggatcrtagatggatggagggatgggtgaatggatggatggatggattgatggataactaaagttccagtcaatcattcttgccatttattttctcaggaatttct

SEQ ID NO: 243915 - DNA, 201 bp, Homo sapiens
acaactatgctacttgctctaacttacttttctggctttttaagtcttgagttcaaactactttcagctggaatcttagggatacagttgaggacagtgcyattataccagttttcccaaagctcataaaaaaatcctaattaatctttaacttatattctttacattttcatattttggtatatattttcttaaaacaag

SEQ ID NO: 243916 - DNA, 201 bp, Homo sapiens
aacttttcttgtttttgttttcatcaacctcaagttactcccaaagaagttcaaaatgtatcccagaacttaaagtataataaaaaaattttaaaaaaagragtacaaaatgtctattgtgtacacaggaaaaatatattagaataatgattatcttaagtatactacctaccttattcgaggtgatgaagtagtggactg

SEQ ID NO: 243917 - DNA, 201 bp, Homo sapiens
taagggctagaaaaggcgaacaggaagaaaaggagatttcagtctttggttcagtgataatgggtataactgtgacaatgaaaacattcactgatgaaccrtgtttgcagagggagaatggagtgctgaggccagtctctgaggagtacccatgtttctcaggtggaaggaggtagaggagctggcagcttgacatggggg

SEQ ID NO: 243918 - DNA, 201 bp, Homo sapiens
gtgatgaagtagtggactgctacaagtttgttggagagagggactagaactgtccttttaaatgctatattctatatcatagcatttttgtctggcacttrgtagatcctcaatagagattgcttgaaataataaacaatatcacctccaaactcaggttcacaaaatttgagttcagtggcacagtggtgatcacatgtg

SEQ ID NO: 243919 - DNA, 201 bp, Homo sapiens
tagatcctcaatagagattgcttgaaataataaacaatatcacctccaaactcaggttcacaaaatttgagttcagtggcacagtggtgatcacatgtgcrgagcctcttaggaaaaggaggcctagagaagtattgagttagatgctcaggttccagagccaggactggaacacagatactggacttctgtcaagcacaa

SEQ ID NO: 243920 - DNA, 201 bp, Homo sapiens
gcacacaggtgcacacacactaatgcacctatgcatactatcattatttagaaatcaaagataaataaatttaaaatatgtctcattaggactgggaaaastctagggtgcttcttcatgctttctaagcatgaaatgtacttgatcctgggatgctgtgaaaacgatgatttagcccactgaagaacagatggcccttaa

SEQ ID NO: 243921 - DNA, 201 bp, Homo sapiens
caaaatttatgtttatgtcatgccaaatatagttgctgatattgttaggtattaatttgtgtgccaaaagatactctttatactgtattctctgatcacartgtaataaagcagaaattagtaagaaaaaacagtaatacaaaataaacaacgatttggaaggaacaagccattaaaaactactgagtcagaggcagtttt

SEQ ID NO: 243922 - DNA, 201 bp, Homo sapiens
gtgatactcttaatttcaagtctacaaaaacaactcaaatctatacatgcgcacacaggtgcacacacactaatgcacctatgcatactatcattatttaraaatcaaagataaataaatttaaaatatgtctcattaggactgggaaaactctagggtgcttcttcatgctttctaagcatgaaatgtacttgatcctgg

SEQ ID NO: 243923 - DNA, 201 bp, Homo sapiens
aggtgcagccaaagctgttctcatggcaaatatattagtattaaataatttcactatgaaacaacaaacaacaacaaaaaaccccagcaaatcatttaggwattttttaaggtaaaatttaaacataatctagcaatgttaaggagaatgaggtatgataaaatataaagttaaagaatcagtaaaaagtggagtttatat

SEQ ID NO: 243924 - DNA, 201 bp, Homo sapiens
taggagttttcagtctgtttcattctctctctctttctctgtgactacaaagtgtttccctattctgcttttttcttcatctcttttctcattgtctctamttctaaaaacggttttctataaatactggaagcgcattgtaatttgacttcccaatagcaatgataaactttgaaatgcttaatattgtttaaatcaaga

SEQ ID NO: 243925 - DNA, 201 bp, Homo sapiens
tttcgcttctgatcatcccagagaatcaaaatgaaaaggttgccacatgtaggagttttcagtctgtttcattctctctctctttctctgtgactacaaartgtttccctattctgcttttttcttcatctcttttctcattgtctctaattctaaaaacggttttctataaatactggaagcgcattgtaatttgacttc

SEQ ID NO: 243926 - DNA, 201 bp, Homo sapiens
atttgccccatctgctctccaccaagaagaagcatgagcctagaagacccattttatatttcatttctgaagagtctacatgtactatttgtgagaaaggrtaaattagtcaccttatatgaagagagctgtttttaaaaaacaaacatggtgtataagtagatgttctgagtatgtccgactcttccttatagaaaagat

SEQ ID NO: 243927 - DNA, 201 bp, Homo sapiens
gccctgaatgtcataatgtctcacatatattgagcagtatgctaagtattttaaatatattatcactcatccctagtgaccctgcaagtaactattagagycagcaacttaccagtgaggaaactgaaggtcagaatggtaaataatttgcctgtgaaaatacggcaattggaatttgcattaaggtcagccagactccaa

SEQ ID NO: 243928 - DNA, 201 bp, Homo sapiens
ctttaagtgagacatgtttccctaaatacagggcaatactgataagttactgctttagatacttcttttcatttatattgctgcctttgatagctataaarttaatataaattgtttagaaagaaatttattgcttaattttactcaaaaggtaatagtagcaagtagataattaattgttcatttggcacaagcaaaaca

SEQ ID NO: 243929 - DNA, 201 bp, Homo sapiens
ggctggaagggtcttttttcccatggtgaagctgactaaactttgtgctgtgtgcctgcattttgactggaactcatcacatgaggtcaggtatggaattytccacttgtggcatcatgtcagtgctcaaactatttcagatgctggagcatttaggattttggattttcagattagggatgcccaacctataataataat

SEQ ID NO: 243930 - DNA, 201 bp, Homo sapiens
aggcatcgcagagaacagcagcttcctcctctcagaggcaaagatagaggacgagaaagtaagaggcaccagggtaaacgatggactctctttcctcatcrttagctgatcattattcagaacaaagcctgataaagagtgcggttagactcgtcaaaattatctgtgtttaattaaaagcatagattacagacccaactg

SEQ ID NO: 243931 - DNA, 201 bp, Homo sapiens
tatttgtttttgtcccagacataaaatgcaattaaatctaccccatgtaagactgatgaaacttctttcttgatagagagatgtgatttatattctagcawtaattaatactgagtttaaggaacttaagtttatgtcagatcatttttttttcctcccaggttgttacttgttgcttctcatatttggccttccttctgc

SEQ ID NO: 243932 - DNA, 201 bp, Homo sapiens
cactgcctagcacatagcagggatgcaataaatatttgattctcaaacattgaattgggggacatatctgatattctttatgttagtaattttataatttycacagcattagaacttcatatgtgatatcttggtggttaccctaatattgtctttgttaagtatacttttctaaacaaagttcctgacaaaaaaaaaaat

SEQ ID NO: 243933 - DNA, 201 bp, Homo sapiens
aaattcagaatttcccgtacatgatattaatttacttctctaatttgaagtatgacactaaatgtaacacgttaggtcatacatttggcaaagacaaattyttcctgcctgtactttttcctttcagtttttaataggtggcgccattattctttgtagcctctagagggcagcacataggtttttttttttttttttttt

SEQ ID NO: 243934 - DNA, 201 bp, Homo sapiens
aaaattaggggctcaagtctatttcattaagaatctaggttggcagggaaatgcccagggacatcgctcacatcacagtgtaagaaattgagaaaaaatgytctcctgaagtcattcaattaatcaggggcaaggatggaatgcaaagccaagtctctcaattcagagtactggattctctttattataccttcctggcac

SEQ ID NO: 243935 - DNA, 201 bp, Homo sapiens
cctggacttcttatgacactttattttatcctgtggcaccaagtaattatgatgctttacttataatctatacacactacgtttgctattccttttttccstgtcagggaaaagtaaagtggcaagttttacaaactgttttgtaatatgttggactgtatgagacacctctagtaggctgaataatggcaccccataaaa

SEQ ID NO: 243936 - DNA, 201 bp, Homo sapiens
ttggagatttgttttggagagttttggagatctgcccataggatgactctcccagacatctatgtaacaaggagtcagttttgatagccaagcacacgtaratagtacaggtttaataatatttgggacatttagcaaacttcttcatttagtaagcatttccataaacatttcaaagattttcatatgtgggaaagaaga

SEQ ID NO: 243937 - DNA, 201 bp, Homo sapiens
tgtcaacttacttcccacctgcccaccatctttcagaagattttccaaccctaaggagataaataaaaccttgaaaataggaagaagtgaaaaaatggaamttggaagaaatacatgtaatgcagggcacaggagaaaaattaaaacaatttagcaatagctgcagagagataaaaatactgatctttatgccaccaacaa

SEQ ID NO: 243938 - DNA, 201 bp, Homo sapiens
gctggaatcaaccacttctccaaggatctctgggtccttttattggaaattgatatgagaaagcaagatctgggtattaactctgctccttgtcactgggrtgccattgcttttaggaaatatatactaacccatggatacagtcatctaaatgattcatctattatatattaagaaccatgagttcgtatgtatcttcct

SEQ ID NO: 243939 - DNA, 201 bp, Homo sapiens
aatagcacatagcatatcttgtatcaggtcaaacagatgttattgttaatgttgttgttattattataagcattttggcctagcctcattttaaatccttsatgagatgttgcccagatctggttatccatgtgctatatcctaacctctctctttgtgtcccatgttttcacattcaaccactgacccaaatgcagtcca

SEQ ID NO: 243940 - DNA, 201 bp, Homo sapiens
aggcacaggtttttgtctctttttccttaatgttttcttagatccaaggattaggctcaaggtacgtagcaggtacttaataaatatttggcagtattacwgagtgaatatcacttactttgacataaacaaaaagtttacacctattttcatgtcatcaagaatgcatttagtatttcctacttctactgaaaagtcatg

SEQ ID NO: 243941 - DNA, 201 bp, Homo sapiens
ttattaagaaggctaattacctctctgcctcaattccctcatctaaaaattagaattatagttgtgcctactttcggagtggctgataaattttactgatrtaatggtataaatcactgaatagacacattgcaaacacccaataaattacttattttatcactattttatattacaaatcacatgaaacagtctttcatt

SEQ ID NO: 243942 - DNA, 201 bp, Homo sapiens
aatcacttttgatttatagtaacctgggtgagatgcttccaaaactccatcccctgctgcttcatcacctaaatgtgacactagggcaaagatctcccccygcttttgtaaactggcctatcctgtgcacctacgcctattgtcaaattaataaatctctataatggcatatttgtattttgtagcaattgctgatagtaa

SEQ ID NO: 243943 - DNA, 201 bp, Homo sapiens
ggaaagtggaatagccaatccaccactttgttttctaggtctaaaatgatctgttcagtctttcctaattcatgggtgtggcattcataggagaggctggyggcacaaaggaaataagacatctatgcatcaatttctttatattgtaccatgggatgggggttttaaaagttgttcatatttgttttctgcaccatactg

SEQ ID NO: 243944 - DNA, 201 bp, Homo sapiens
aattaaactttaggactggtaagtgtcaggaactcagatgatttcaaacagttaaggatttgagataaggcccaggagaaaggtgtgggctgcatatgttsatttgtgagcatcttatcaaaggtgatggttgaagcactggagttggtgtagtattcttgcatcagtaggtaggtgatcatcagaagcagacagctgagt

SEQ ID NO: 243945 - DNA, 201 bp, Homo sapiens
ttatcttacgttattttattttattttttagacagagtctcactctgttgcccaagctggaatgcaatctcggctcactgtaacctctgcctcccagattyaagtgattctcctgcttcaggctcccgagtagctggactacaaggtgtatgccaccacgcccggctaattttttgtatttttagtagagatggggttctc

SEQ ID NO: 243946 - DNA, 201 bp, Homo sapiens
aaacaaaaaaagacagctatattaaaagtatcaactttattttaaatcttattaatgctttttataatgggagggaagatatatatatttaaatgaccatktaaagcaaagtgaggaagttaggaaccaggacgctgaagctaaactgaagttgaatctcagctctatcatgtcccagctctgtgattttgttaatctctc

SEQ ID NO: 243947 - DNA, 201 bp, Homo sapiens
ggatttgtgaaatggacaattgtcttgcataaatagcaagtaaaaaatcaagcctgtccttcataaaaattttattctggggtgtgcttgttttccaaaastacctctgctaaatctcctgttagtcctgaaactagaaggcagaaaagcttctagtgctacagccaactgcagtgtagcctgagaaacaggcaacaaaaa

SEQ ID NO: 243948 - DNA, 201 bp, Homo sapiens
ctcttttcctggccaactcatatctgactcatttaccactagtgaataagggataaaatgctcctggctaagaaccattgtaagtattttttgttcgtttytcttggatgggggaggggatgacaacacagtgcagatagtcatttcgtttttataactacattgatgggccttgaagaataaattactaggaaaaggctg

SEQ ID NO: 243949 - DNA, 201 bp, Homo sapiens
tcagaaaagattattttaatgtgtttaagggatttaatatggatctaatccctcaagataacttgattattaaaatacagtgttttgttcctctgcagtawtttttaaacttaaaaaagttgattttgggaattccctctttgcaaaagtaattaaagaaatagctgaaagtcttttgaaaatttgcaatttaagtagtat

SEQ ID NO: 243950 - DNA, 201 bp, Homo sapiens
tgatgaaatatactgacacctaaaataacccccatgtgaagaaatatttcacactttattttaatatattttttatattttacagaaacacttatatatcrcttaccacaattatggtcactaatattaacctttttcatttaccatttttttacttcagagataaaaataaaaccaataaagttatgctgcttataaaac

SEQ ID NO: 243951 - DNA, 201 bp, Homo sapiens
tatgtgctgtgaccagcgattttacttcttaatctttgtcaaatattctagaggcatgagaggacaaaactcaccatcaacatctgtttctgtgtgtgtadtgtgtgtgtgtgtgtgtgtgtgtgtgtgtgtatttcaggggcagtggcaagtacagaagtaaagcagaagcttcaagagttcctactgagtaaatcagca

SEQ ID NO: 243952 - DNA, 201 bp, Homo sapiens
ttctttgatgaatgaataactgacaaatgtgaggtgggcaaagaaatttgtattttgcatttttccattctcaactggtgcatttggtatctatatagtartttcaaaaggtttagcagattgtgattttattacacttgacttggtgtaagatggaggtcagagctattttcaaaaatctagtagaattttgtctcaaat

SEQ ID NO: 243953 - DNA, 201 bp, Homo sapiens
ttttcaattacttttaaacatttatggcaaaactcatatctgccaccaagtggatggacttcctttgtgccatcatttttctagtttacataagtgaaatkttcaagtttttcctctgtactgtcgtactccttcagtcatttagacccaatgtcctttggtaatatttttcagtatcttctccttattttattttccttt

SEQ ID NO: 243954 - DNA, 201 bp, Homo sapiens
ttattaaaatagtaaactcactaataagcatttttgtattttggattgattaaagaatgtttatgtcaagaaaagcatattttgaaagtaattacaaccaytagttataattaattcggtttatcttttttaaggaaggctaggatttaataaggtgggttttcctaaagcctttaatccatggcttttattttcaccacg

SEQ ID NO: 243955 - DNA, 201 bp, Homo sapiens
attggtagctgatgttttgatagggttagaaccactttggtgagtgagatagaactagagttgtaaataaattttagatctagtgtgaactctgataggtmggagctgcatggaatattgtgttgagaaggcttctgaggccaacataatattaacagataagagctatgtatgtcatgagcagttcctggcattataatt

SEQ ID NO: 243956 - DNA, 201 bp, Homo sapiens
gcaaagatctccccccgcttttgtaaactggcctatcctgtgcacctacgcctattgtcaaattaataaatctctataatggcatatttgtattttgtagsaattgctgatagtaattcttttcagaacctggaagaacattcttcaaagaaatcaggaaattaagttatattacttgttaattcttaccacacaactgac

SEQ ID NO: 243957 - DNA, 201 bp, Homo sapiens
aaaattagttttctcaggcttaaaagaaagagaccttggttttttaagacattgaataagctttagttcagcaacaacgggctgcagaaacaatgcttttracttttatttgtgtcatatatttaagttacacattattttcgattctttttgtatttattttttccttctagcgaaaacaatttggttccagtattttaa

SEQ ID NO: 243958 - DNA, 201 bp, Homo sapiens
ggaccttctttatcctttagcacatagaatcaatagcagggaatagtaacttcctatcctaattttagattctctcctacgtgattttgttcatttgcccyatctgctctccaccaagaagaagcatgagcctagaagacccattttatatttcatttctgaagagtctacatgtactatttgtgagaaagggtaaattag

SEQ ID NO: 243959 - DNA, 201 bp, Homo sapiens
ctttcgatgctatcactaacacaggaccgtgatctgagacaaccaggttcagttcttgatatgtaaaggaatttgggaaaatatcatctctcaccacaaawtctgtatttttatgtatatttaagcaaaatcctgttttggtcatcattttctttacctttcttctatatccatcctaatctccctttcagctcatgtact

SEQ ID NO: 243960 - DNA, 201 bp, Homo sapiens
aactatttaggagtaggggccagtcgggctgactcatccctgtaatcccagcactttgggaggcagaggtgggaggatcacttgaggtcaggagttcaaawccagcttggcaaatgtagtaaaaccccatctccactaaaaatacaaaaattagccaggcatgctggtgcacacctgtagtcccagctactcgggaggctg

SEQ ID NO: 243961 - DNA, 201 bp, Homo sapiens
tgctttaataaaacaggcagcagtggcagagagaccttgatggcttcaaaaactatttaggagtaggggccagtcgggctgactcatccctgtaatcccakcactttgggaggcagaggtgggaggatcacttgaggtcaggagttcaaaaccagcttggcaaatgtagtaaaaccccatctccactaaaaatacaaaaat

SEQ ID NO: 243962 - DNA, 201 bp, Homo sapiens
tcagcctccccaaattctgggattacaggtgtaatctaaagtgctcagccataatcccattactaattcttgttggttatttgcattcccatatttttccyagtgtgatttgtctttgcactttattagggttttttttttttttttaagtgcacaaatattttaattcaaagtcggcacgttctgccatttcctacttga

SEQ ID NO: 243963 - DNA, 201 bp, Homo sapiens
taatagcttctaaaggttttctcctaatattttgagaacttttgtttgcattcttgatttgaaacagtgtgacctgttagtgcctatcggatgaattataytctttgaatgtctctttttctaagccgctgtgctaatacactttttattcattttcccctgtgttataataactatgtttaagtctcatggcaatcttct

SEQ ID NO: 243964 - DNA, 201 bp, Homo sapiens
ctttttattctttgtggaggttccatcacatgggcaagattgatcaaattattggcccttgataatcaactctacctccagcctctctctcctccccagasgttgggctgtggggataaatatttcaatcttctaatcatattgttggttcctctggaaaggagccaccatcctgaggctatccaggagcccccagccccc

SEQ ID NO: 243965 - DNA, 201 bp, Homo sapiens
tctgcagactttattatatggtggccacagtttagtgtagacatgacttcaaaaagtcccaaatattggctgaatgcggtggttcacacctgtcatcccakcattttgggaggctgaggcagacggatcacctgaggtcaggagttcaagactagcctggccaacatggtgaaaccccatctctactaaaaatacaaaaat

SEQ ID NO: 243966 - DNA, 201 bp, Homo sapiens
aggtaagttctttggaaaggggccaaataaccagtggcctaatcaattgcaagggattctggagaaacctagtagaaaagagggtcacagatgtgttagcrgtgaaaagaattggaccaaacgcacagacaaagcaaggaaagaataaagtgacaacagcagagatttgctgaaaatgaaagtacactccacggggtggga

SEQ ID NO: 243967 - DNA, 201 bp, Homo sapiens
attgattctgttcagtagacagaattatttggacaaattcagggaaaggacactgattaaagttatttttggttgtataccaaaaaaaaaaatcatgcatygtaggatgcgtagtggcattcctggctctatgcactagaagccagtagcacacctcccttactcagtcatgacaacaaaaaatgtctccagaaagtgcca

SEQ ID NO: 243968 - DNA, 201 bp, Homo sapiens
tagtatgaacccaacattctcatgaacaacagtttctcaaaaacttggcttttaataggtagcaattgcttgtgtgtgtgtgtgtgtgtgtgttgtgtgtytgtgtgtgcatgtgtgtgttttgtatagactcataaattatatgatgttccttgaccctttattttgccaatgatattatataattatttctttttgaaa

SEQ ID NO: 243969 - DNA, 201 bp, Homo sapiens
tcagaccttgaagaaagagcagtaaagacagacacccataaccctatgcctaggacacttgcactagcccatcgtgttctaaagaatcaacaacatagaayatctttttaaagttcacatctgtatttggctagctagggctgtcataacacaataccacagattgggtggcttaagcaacaggaattaattttctcacag

SEQ ID NO: 243970 - DNA, 201 bp, Homo sapiens
atgtgtcagaccttgaagaaagagcagtaaagacagacacccataaccctatgcctaggacacttgcactagcccatcgtgttctaaagaatcaacaacayagaacatctttttaaagttcacatctgtatttggctagctagggctgtcataacacaataccacagattgggtggcttaagcaacaggaattaattttct

SEQ ID NO: 243971 - DNA, 201 bp, Homo sapiens
acaaaatttgttaagcatctattatgtgtcagaccttgaagaaagagcagtaaagacagacacccataaccctatgcctaggacacttgcactagcccatygtgttctaaagaatcaacaacatagaacatctttttaaagttcacatctgtatttggctagctagggctgtcataacacaataccacagattgggtggct

SEQ ID NO: 243972 - DNA, 201 bp, Homo sapiens
tgagaaattaaaatgaatatagattgtaaaaacacatgccgaagctattttttgtcatataatttacctgtggcataatgaagattttaaaataaaatcarttatgaataagaatttattattcgccatctagcatatattgaaggcactaggaaaggatgtttaactattgcaaaacaacctgtggctttttaatttaaa

SEQ ID NO: 243973 - DNA, 201 bp, Homo sapiens
tattcaagattgacgaacactggagcatttttatatagcttagtactctatcttggttacattgttttgactaaacttgtcaaagtttatttttattgaartatacttcttttaatgaatcttatactagttttctcagaattgagaagtaatatggccattgtaattcaggctttgaatccacacataccacttggaaat

SEQ ID NO: 243974 - DNA, 201 bp, Homo sapiens
ggtatccaaaagaagcagcaggctgcatgcctatagtcctagcgactcaggaggctgaggagggaggattgcttggcccaggaatttgagtccaacctggrtaacatagggagaccctgtctcttaacaaataaaataaaaagcggagcagcaggcttgtttttgttgttcatcgtaggaggaagtctgattgatgttctg

SEQ ID NO: 243975 - DNA, 201 bp, Homo sapiens
cgactcaggaggctgaggagggaggattgcttggcccaggaatttgagtccaacctgggtaacatagggagaccctgtctcttaacaaataaaataaaaarcggagcagcaggcttgtttttgttgttcatcgtaggaggaagtctgattgatgttctgtgctcactagggccagagttttaatttctgctgttaacttca

SEQ ID NO: 243976 - DNA, 201 bp, Homo sapiens
tctgtgctcactagggccagagttttaatttctgctgttaacttcatttttaaagtagcagactttaattttaagaaaagttttatatttacagaaaaatygagcagatattgttgagttcccatattgttgcctcctcctaacccctaggtttctgctttttaaatatcttgcatcaatgtggtacatttgttgcaatta

SEQ ID NO: 243977 - DNA, 201 bp, Homo sapiens
attttgtaattttaataattatttttactattcactatattctaactttttactagtatcaataaattaatatctcccccattatttttacaagtacttargttaaatatctaattatagagtgcttttcatatttttaaaaatatcaactgtcaaccacaaaaagaactggagtcacaagtataagtctactgtaagtat

SEQ ID NO: 243978 - DNA, 201 bp, Homo sapiens
tgtattgtgtcaggaagaaaacctttgagatataattcttagaaatatgaagggaatattgccattgtttttgcaagattttatttcaaggaacagggtcrttcattaagtattgagtatctgccatatggcagttacttttctaagccctggagatcaaactgtgcacaggacaggcaaggcctgcgcccatggagtgta

SEQ ID NO: 243979 - DNA, 201 bp, Homo sapiens
gaggtcattacaggcattctctaagagctggaagaaaaaatttcctagcataggacctgctcagtatgttatagagtggacgatatttaatttcactgagytcctttccttcttcccagtttgcttgtcaaaaaaaaaactcacattccatatacccaaaactacctttcaagctgtttttaatgtttaacgcactctttg

SEQ ID NO: 243980 - DNA, 201 bp, Homo sapiens
ataacagcattgattctgttcagtagacagaattatttggacaaattcagggaaaggacactgattaaagttatttttggttgtataccaaaaaaaaaaaycatgcattgtaggatgcgtagtggcattcctggctctatgcactagaagccagtagcacacctcccttactcagtcatgacaacaaaaaatgtctccaga

SEQ ID NO: 243981 - DNA, 201 bp, Homo sapiens
atatggaaaatctctgagaccctggagtgcataacatgtttaaggaactgaaaaatcagtgtggcttgagtgagtggaggacaggtattattgaggctggraatatacagagaaagcacactatggagaaacaggccagccatgttagagacggaggctccactgatgagtgttagccaggaacgtaacagaagtgcttta

SEQ ID NO: 243982 - DNA, 201 bp, Homo sapiens
ccaaatgagaaatgtactcttgaaaaaaactttaagttttgaaaaccttataaaaatataaaaagtcatttttcccctatgattaaagaaaatcaagttartgcatgacctatatgttgctccttgacagtctttaatagacaaaatactggatttcctataaataagaaaatggaaaggaaaaaatcctctgttcctttc

SEQ ID NO: 243983 - DNA, 201 bp, Homo sapiens
ccattacttatccataaaaactagatttaatttctactgtaattatttttttaaaatacacatttagtgctttaagaatggaataattacaggtcgggcayggtggttcacttccgtaatcccagcaatttgggggggtgtggcaggaggatcacttgaacccaagttcaagtggagtttgagaccaggctgggcaacaaa

SEQ ID NO: 243984 - DNA, 201 bp, Homo sapiens
ctttagttgttttagaattaagaaaatgcattcatacattgttgaggaaagagtcttgaactcattggattcaccaatgtttaaaatctttattgcaccartttttttaaatctttattggttttcattgatctgatgtggttcatgattttccatgacattcactcttttaaaatgaatcataaaatccagcattttgct

SEQ ID NO: 243985 - DNA, 201 bp, Homo sapiens
tattgattcattttctttcattagatataggcctatttaaattatgtttttctccacttgtgagttttagtaatttgtgtttttcaaataattcatgtgasttttcaaacttgtcagtatagagttattcataatattgctttattatccttctaacatccacagcatcaatagttatgacccctctttcatttctaatat

SEQ ID NO: 243986 - DNA, 201 bp, Homo sapiens
tggccccagctggcaagcactttttaagtgtctgcttctgttactcctgctattatctcattggtcaaatcacatcccacggccaagctcagggttatcakgggagggagctacttaaaagcttgtgtgtagagaggaatgcttcactgggtacctgtactgctacctttactgccactttcttcctagtttctgaaatcc

SEQ ID NO: 243987 - DNA, 201 bp, Homo sapiens
acaggctgtcgcttgtgccagacccatctttctatggttgtttgctcctctctccaatttccctgcatctgctttttggagacctgctatatttccgtgcktactgacaaccaaattgttctgcctctagtgcttattatcatacttcaaggaaaaggcacttgggggccgtaaggagaacttaaggcacaaaagccaaaa

SEQ ID NO: 243988 - DNA, 201 bp, Homo sapiens
tgctcactagggccagagttttaatttctgctgttaacttcatttttaaagtagcagactttaattttaagaaaagttttatatttacagaaaaatcgagsagatattgttgagttcccatattgttgcctcctcctaacccctaggtttctgctttttaaatatcttgcatcaatgtggtacatttgttgcaattaagga

SEQ ID NO: 243989 - DNA, 201 bp, Homo sapiens
ttaatgcagtccatagtttatattaaggtttactctgtgttgtaagattctatgagatttaacaaatgtgtcatatcatgtcatatatccaccattacagmatgatatagaatggttttaccaccctaaaaatctcctgtgccccacctattcatcctccccccacccaacttttggtaaccactaatttttttattgtct

SEQ ID NO: 243990 - DNA, 201 bp, Homo sapiens
tggacgatatttaatttcactgagttcctttccttcttcccagtttgcttgtcaaaaaaaaaactcacattccatatacccaaaactacctttcaagctgyttttaatgtttaacgcactctttgtttctgcaaagatttagcatttagtatttagatgattatacttattcattttctatttcttctgatcattgtgctt

SEQ ID NO: 243991 - DNA, 201 bp, Homo sapiens
ctatttcttctgatcattgtgcttttgatttcctgatatatctgtctaccccatttctctctggtgaaagccattcaggctcagcttaactcatcaatgargctctccccgatccccaactctgaactcccatagattgcttgtttgcacctctgacaccatgtaccttgtatagatcttttcataagttaactttctggc

SEQ ID NO: 243992 - DNA, 201 bp, Homo sapiens
aacccctggaaacatgtttataatggaaaatgcaacttgaccttaactagaggaacccaaatgcaccttacaaaaaggctcattttttttttgaaacataygaaatccctttctcccagaggtggtgtcacaggagaaaggtgtataataatagttgtatttaccataaatacctaacatattttatgatgatttgattgt

SEQ ID NO: 243993 - DNA, 201 bp, Homo sapiens
atgtgggtaggcacttaataacattacaatgcagtttgaattcttgaaaccctgcaaagcatttatgagttaaatgttagagcactaggatgcaccattcsatagaacaatagtaaaactggcagaactgtttttcatatgtcaattaagactgcactccggagaccattaaggaaaaggatgctgctattccccgcagtt

SEQ ID NO: 243994 - DNA, 201 bp, Homo sapiens
atttccttatttttaaaggatatattgtgtcaggaaagaagaatcatcaactcttttgacccagtgagatttaagaaggtgggaatagagacttttataaragtttctgcctaaatatttttttaaattgtgtatgtactccaaatgatattcttatcaagtcttatgattaatatagctttacaaataattcaccatttt

SEQ ID NO: 243995 - DNA, 201 bp, Homo sapiens
ggtagcctgggggaaggatactggattgtagaatgtatattgctctttgctatgacttggcaaagtgtagaaatgctcttagtccattcaacagcactagygtttcatatttggagactataaacacaaaaacacatcataaagtcttatctcaagtaaatgtttctcttgtgagcaaaactatgctaattcagttatttt

SEQ ID NO: 243996 - DNA, 201 bp, Homo sapiens
cagttttcttagttcaactgtgaggtaaaaattatgtaaaaattagaagaaaaggccgtctagcaaaggaagactcttcatctaatgaaaacttgaaaaarttaaaacaatagtgtaatgaaatggattatttattttttaaaattcaaaattaaatgaatattgattttaaaaactttagaaattagtggaatatgaaac

SEQ ID NO: 243997 - DNA, 201 bp, Homo sapiens
atctttagggacaatggcacatgtctgaatggctaacttgtgtcatctttatatgtccttttctttacaccatatagaagatatggaaatcaattatttcrttaatacttacaagcactatttggagatgtatttttaattttcattgtttcctaatattatttctttctattgtatgacaaggaaacaggaattgatttg

SEQ ID NO: 243998 - DNA, 201 bp, Homo sapiens
tagggtatcataaacagaaagagaattaatagtagtctctgccctgatacaaatccacttccactgaattgaaacaaactcagtaatcataaactagccargaatggtgaagacctactttgacctaaattggcttattgacttgagtttttttttctgaagaaaatacctcttattgcttatgattataaatttccacag

SEQ ID NO: 243999 - DNA, 201 bp, Homo sapiens
gactctgggtcctttttgttaagggtacaaatctaatttacgaggactctacctaatctggattaaagagtgccaacttctccttggatccttagaaggcracaagagagctagaggactctctctggggtcccttttgtaagggtactgatctcattcatgaagactctacataattatcaaaggctgcctctcaaaaac

SEQ ID NO: 244000 - DNA, 201 bp, Homo sapiens
ctatgacaattaaaagatcattggttgccaggagttgaggggcagagagggaggatgaataggtaaatcacaggaaattttcagggcagtcattgattctstctgatagtataatggtggatgcgtgacattatgcatttgtcaaaacccacagaatgtacaacacaaagtgtgaacctcaactatactttagttaataat

SEQ ID NO: 244001 - DNA, 201 bp, Homo sapiens
tagaaaatttcatcatataatgcatttatatgtatgtggtatatgtgggtaggcaaattccatcatgaaaggaataatgaaggaacagttttggggcaacytaaagttttactttagtttgtataataattaactcagctgcataaatgccaggaaaataattagaacaacagattatgttgaatgcctaaaaaaatgtgt

SEQ ID NO: 244002 - DNA, 201 bp, Homo sapiens
cacgtgtgtatgtgtgcgtatgtgtacacacacacgtgtgcgtatgtgtacacacacacgtgtgcgtatgtgtatacacacgtgtgtatgtatgtgtatayacacgtgtatgtgtgtgtatgtgtatatacacatgtgtatgtgtgtgtatgtgtatatacacatgtgtatgtgtgtatatatgtatatatacagatatac

SEQ ID NO: 244003 - DNA, 201 bp, Homo sapiens
cgtatgtgtacacacacgtgtgtttgtgtgcgtatgtgtacacacacgtgtgtatgtgtgcgtatgtgtacacacacgtgtgtatgtgtgcgtatgtgtayacacacacgtgtgcgtatgtgtacacacacacgtgtgcgtatgtgtatacacacgtgtgtatgtatgtgtatacacacgtgtatgtgtgtgtatgtgtat

SEQ ID NO: 244004 - DNA, 201 bp, Homo sapiens
acacacacgtgtatgtgtgcgtatgtgtacacacacgtgtgtttgtgtgcgtatgtgtacacacacgtgtgtatgtgtgcgtatgtgtacacacacgtgtrtatgtgtgcgtatgtgtacacacacacgtgtgcgtatgtgtacacacacacgtgtgcgtatgtgtatacacacgtgtgtatgtatgtgtatacacacgtg

SEQ ID NO: 244005 - DNA, 201 bp, Homo sapiens
taaattgggctacatcaaccctaacatgatttttaaatttgatgaatctattttttgtaattaattttgatgaaaacgcatccaaaggaattttccaagcrtagaacacaatgtgcctgttgcccttagaattgtgcaatgctctggccttgtgggcttctaggtaaagtggccaaagctgtgttgcaaagtcctgtaaca

SEQ ID NO: 244006 - DNA, 201 bp, Homo sapiens
gtaaaatcttaacatgaaatgaatcttcagaatatgttcataaatttacattttaaacataaccagataatatatatctttacccgttattaaggtgatahtttaatgaaaatttttcatttgcatgaaataaacctttttggctacagatgaaaggactttatggtagcgacaatggttctgtgagttaaatgatcccaa

SEQ ID NO: 244007 - DNA, 201 bp, Homo sapiens
acacacacacgtgtatgtgtgcgtatgtgtacacacacgtgtatgtgtgcgtatgtgtacacacacgtgtgtttgtgtgcgtatgtgtacacacacgtgtrtatgtgtgcgtatgtgtacacacacgtgtgtatgtgtgcgtatgtgtacacacacacgtgtgcgtatgtgtacacacacacgtgtgcgtatgtgtataca

SEQ ID NO: 244008 - DNA, 201 bp, Homo sapiens
gagagctgctgtttttctaatggctaccctttgccccggacagcttctaactggtttgtgcttcttcagttcatgtattctaaggtcattgtgcatctccrcatcaagctggtgggagggaaattgaagaggtgcattgagtgtgagaggtttccaaaggtacatcacttttgttcacatttcgttgagtggaatttagcc

SEQ ID NO: 244009 - DNA, 201 bp, Homo sapiens
cacacacgtgtatatgtgtgcatatgtgtatatatacacacacacgtgtatatgtgtgcgtatgtgtatacacacacacgtgtatgtgtgcgtatgtgtayacacacacacgtgtatgtgtgcgtatgtgtacacacacgtgtatgtgtgcgtatgtgtacacacacgtgtgtttgtgtgcgtatgtgtacacacacgtgt

SEQ ID NO: 244010 - DNA, 201 bp, Homo sapiens
cacacgtgtatatgtgtgcatatgtgtatatacacacacgtgtatatgtgtgcatatgtgtatatatacacacacacgtgtatatgtgtgcgtatgtgtayacacacacacgtgtatgtgtgcgtatgtgtacacacacacacgtgtatgtgtgcgtatgtgtacacacacgtgtatgtgtgcgtatgtgtacacacacgt

SEQ ID NO: 244011 - DNA, 201 bp, Homo sapiens
tataatgtatatacacacacgtgtatatatgtgcatgtgtatatacacacacgtgtatatgtgtgcatatgtgtatatacacacacgtgtatatgtgtgcrtatgtgtatatatacacacacacgtgtatatgtgtgcgtatgtgtatacacacacacgtgtatgtgtgcgtatgtgtacacacacacacgtgtatgtgtg

SEQ ID NO: 244012 - DNA, 201 bp, Homo sapiens
gtatgtatgtgtatatatgtgtatataatgtatatacacacacgtgtatatatgtgcatgtgtatatacacacacgtgtatatgtgtgcatatgtgtatayacacacacgtgtatatgtgtgcatatgtgtatatatacacacacacgtgtatatgtgtgcgtatgtgtatacacacacacgtgtatgtgtgcgtatgtgt

SEQ ID NO: 244013 - DNA, 201 bp, Homo sapiens
atatatacactgtatgtatgtgtatatatgtgtatataatgtatatacacacacgtgtatatatgtgcatgtgtatatacacacacgtgtatatgtgtgcrtatgtgtatatacacacacgtgtatatgtgtgcatatgtgtatatatacacacacacgtgtatatgtgtgcgtatgtgtatacacacacacgtgtatgtg

SEQ ID NO: 244014 - DNA, 201 bp, Homo sapiens
tttggtggtgtctttttagatattttacattttttaaattggtttttttctcattgttgagatttaataattatttgtgtattttgggtacaaattctttwtttgctgtttgtcttacaaatatttttcctcaatcagtggtttatcttttaattcttgtatcattgtctttcacagaacagaagattctaattttattaa

SEQ ID NO: 244015 - DNA, 201 bp, Homo sapiens
gataattgatcaatggctatctattcctataatgtctgtatctgattttggcagtatggtaatgctgtcctcatagaaagagttaggaagtagtcctcctrttttctggaagagattagagtattgataccatttacactttaagtatttggtaaaatttactagtgaaaccatttggacctggtgctttcctttttggaa

SEQ ID NO: 244016 - DNA, 201 bp, Homo sapiens
aaggaaggacaattgaatctgttggggggaaaatgaagaaaatccctccaacatccccattttaacatgagaaatcgaggtttaatgatataaagtaattyatccaggcatctatttgactccaggcacaatgaaggtatcatcttagttggtctgtgtgaatgaactgatgttcagcaagactgtgaattattcaaggtt

SEQ ID NO: 244017 - DNA, 201 bp, Homo sapiens
actgctgtgcttttgatctccagcattcccttttcagtctttcctagagtttccatttctctgtttatattatccatctgttgttgcatgttgccaacttyccattagaacccttaacatactacttttagttcctttaagttccctttctgttaattccaaaatttgtgtcataactgagtctggtctgatgtttgcttt

SEQ ID NO: 244018 - DNA, 201 bp, Homo sapiens
cttaattctttggccaccagcctgtcctgccagtagattaagcccaagtgaaatccaaccagcaaagaactagagtgttgcagctccaggattcagccccyatgggcttagagaaggaaggacaattgaatctgttggggggaaaatgaagaaaatccctccaacatccccattttaacatgagaaatcgaggtttaatga

SEQ ID NO: 244019 - DNA, 201 bp, Homo sapiens
ttaatctggctggggctgggctttgtttaatatctgttgtagtggtaaatgtcagagtcttcagttttctctagtttcctttgatttttttccttctcctrttgctttggggtttccctaagagctccttcttaaatagaatttgtgtcctgtagctccctcagttttaattcactgttataatacagaacctggttgatg

SEQ ID NO: 244020 - DNA, 201 bp, Homo sapiens
ttttgtggcctttcagcacaacttaaaattattaggtattcttgaaaaattgtccactgtttagtgcaagaaatgtatgtgggagggaagattagggatcktatttttttgccatatagtgttttgatctagaattaggtttgtttataaaaccagtattagatagtagatagacttttctgctatgcttggttctatttc

SEQ ID NO: 244021 - DNA, 201 bp, Homo sapiens
ttttgtcatattttgagaatgtcaacgtatagcagttttctccatttataattcactgcctctaacttgttgtagggttagaaagctaagaattgtgttamataaaattgttaaaagatcacaagttctgaggaggtgcaaatgtcttgtttttttttttttttttttgtgtgtgtgtgtgtgtgtgtgtgtgtgtgcgcg

SEQ ID NO: 244022 - DNA, 201 bp, Homo sapiens
aaatccaagtatcatctacctgagctttgaatggcttatcaatagttccaatgacatcaaaaaccccattttcctgaatcttaagatttatatagaaatayagaccattattaaatatacattcatatctaatgtacttagaaacatgattttcctcaaatagcccatcccaatgggattgtgtctccaaaggcttctaga

SEQ ID NO: 244023 - DNA, 201 bp, Homo sapiens
tattggtcagattttaattttaaaaaacaaaaatgagacaactgtaaattgcataaatcgcaaggattctaacaaaaaattagagtaatcccctattactyagaagtttgggtaagacagatttgtgttaaacttacagaaggtttgagaggtaggtattataatttcaccaagaatatgctcatgcaccttgaaatgtat

SEQ ID NO: 244024 - DNA, 201 bp, Homo sapiens
ggtgcctgccaccacacccggctaattttttgtatttttagtagagacggggtttcaccgtgttagccaggatggtcttgatcttctgacctcgtgatccrcccgcctcggcctcccaaagtgctgggattacaggcgtgagccacggcgcccagccatggtttgtttttttaaaaaaagcccttgaatatttaagtaagc

SEQ ID NO: 244025 - DNA, 201 bp, Homo sapiens
tgttaaataaaattgttaaaagatcacaagttctgaggaggtgcaaatgtcttgtttttttttttttttttttgtgtgtgtgtgtgtgtgtgtgtgtgtgygcgcgcatgtgtctctgtgtgtgtgttttaaatagagttttgttcttgttgcccaggctggagtgcaatggcatgatcttggctcactgcaacctccgcc

SEQ ID NO: 244026 - DNA, 201 bp, Homo sapiens
aatctgtatacattttcagttcctcttatttaaagtgatagactaataaatattttaatataatggttgaagtctttattaagattaaattaggatcttaractttctgtgtgtctccattaaagatgtgtttttggcttcattatttgacagtgttgtggtatggcatttaatggagaacaagatctcttactttggaat

SEQ ID NO: 244027 - DNA, 201 bp, Homo sapiens
ataataatttactttttaagcattcattttgatagatgtaatcatttagattatgaaaagttggcaatttcaaaagaacatatttagttgattttaagatrctcattttttaaactaacatatctgaaatctgaattgctctcatggatgtttatagtttagtagtgctttctggtggcagggagttagtggtatacaagg

SEQ ID NO: 244028 - DNA, 201 bp, Homo sapiens
aacatcttcctcctttatttgacaaaccacactttgtgctgggcctggacataaatattaaataaaccagtataagtaaaaaaggatttctgacattaagkagctcacagtcttcatagtgaggcacatgtaataggttcctaatagattgattgatactttaattcagcagttgaacagttgaaccaccgtacttcttga

SEQ ID NO: 244029 - DNA, 201 bp, Homo sapiens
agggaagacggctgtctgcaagccgcaaagagagctctcaccagggaacaaaccctgctggagctgatctgggacttccagtatccagaactgtgagagakgcatgtctgtgtgcaagccacctaacctatggcaacctgagcagaatacacaaaggaagtatgctggtgggagaaagagacaagatgactaagtgtatat

SEQ ID NO: 244030 - DNA, 201 bp, Homo sapiens
cattcttgagtgaaagcaaagatccaagccacccgaggaatatagctgggaaaagacattaagatgttattattattatttttttggttgtaagccttcartatctttatttcaaaatgcatattttaatgtcattatatatattttgaagtaggtaatacagaggtaattaagagaaattcttggagagaatgcattagc

SEQ ID NO: 244031 - DNA, 201 bp, Homo sapiens
atgcatttatttttacttctaagtaaagcttaattccaataaattgaagttaggaaggaagcattcaactttcatattattgttgccataatataaatcaygtggaactatttttcatcacagagattagtgtagctaaagaggaagactttagaacacatcaaggatccatagttactattgaacagcaactttgaatgt

SEQ ID NO: 244032 - DNA, 201 bp, Homo sapiens
gttattggaagtatgagttccagtcttgcctcttctgggttttatgtgcagtaatgctctccctccaaattttgacaataacccagagcaagcctaggctyaccttttcacagtttaacaacgatagcaaaaacaagcactctttccccggtcattctgataaattcccaggaccatctcattcggacagcttatctcact

SEQ ID NO: 244033 - DNA, 201 bp, Homo sapiens
taaatctacatcagcaatatgtattagcaagcaagatttacgagagtaaaactggaatcagagttagaaaagtcctaatgatcttacattgattgagatasccctaggatgtcccttaagcagtgagcacaatttgaaacctctcttgaccttttaggaccttccccagacagtgataacccgggaacagttaactacaga

SEQ ID NO: 244034 - DNA, 201 bp, Homo sapiens
aagtttattcagaagcaggatttgtgttttattttgggggcctcaacagtgcaaatgatatattctttcctattacattctttcctgtttatttaaaaacygctgctaacaacacaatagagtcatgtgaaatccttcgttttttgaaacattataataggtgatcatgtaagatttatgagatgaaagctgtattttcca

SEQ ID NO: 244035 - DNA, 201 bp, Homo sapiens
tttagacaccacactgtgtttttccatagtaaaacactgataagggaacagcacattactttagggtattatttggtcaggaataaatgggtaatcagtgkattctgagatcacaactagcaagaataatatatatttgttcaataataattttgaagaaaattaatgttaacagacttatatagtagaatagataacttt

SEQ ID NO: 244036 - DNA, 201 bp, Homo sapiens
gtattattgtgcttccttttttattaaagaagagttggatgtatcttactttggctttatgtttaaagtgaaacagtaaattgaaagattttaacaggtcrtggtatgtcaatgaaagaacctagaaattagcagaaaaatgcaggaagccaactatagatattggaaaaataatacataccataacttgagttaggtaat

SEQ ID NO: 244037 - DNA, 201 bp, Homo sapiens
aagaaatgtcagtggctctctatcacatctatttaaggtatataagaacccgtacccttttcaggcttatcttatttttctcctcaatgaaccccactctkttcaacatgtagagctgcttaccttccccaggtccagttttcttgcttggaggcctttgaatgacccttcctcaccactgggagtgtcctgtttacttat

SEQ ID NO: 244038 - DNA, 201 bp, Homo sapiens
ctaattctagcttcctgagcactttgtttatctactcaagcgtcagcagtggcggacacccctcccccctgccaggctgctgccttgcaggtccatctcakattgccacgctagcagtgagcaaggttctgtgggtgtgggacctgccaagccaggagtgggatataatcttttggtgtgccatttgctaagactattgga

SEQ ID NO: 244039 - DNA, 201 bp, Homo sapiens
cagcctgccagaccagtacttggcagtggttcaaaaagcaggctccacagtatatacacctttataggaccaacacatgggtctgccacttttcttctttgttttgtcgttgagatagtgtcttgctctgtcacccaggctgaagtgcagtggtgcaattatggttcattgcagcctttagctcctgggctcaagtgatcc

SEQ ID NO: 244040 - DNA, 201 bp, Homo sapiens
ttttcctgcaactacaataatgtacacctcttaccacacgtgatgtctatgtactctctaccctactctatgctcctctgccaacccttttttcactattytgcagcctggaaaatctttctgtctctctaacagaccaggctcacatcagggtctttgcatgaaaagatcctattcaaaggatctcttctttagtgataa

SEQ ID NO: 244041 - DNA, 201 bp, Homo sapiens
acatacgtggtacctcccttctagacatttacagtccaaaattctaaggtaatgacatagcaatacacaatttgttccacccacctttaaacaaataataygcgtaattttctttctgtttcctttggactccatgtgcctgaccctgtgccagaaaataagaggacgcttatagcagccttcctaattaatattgacatc

SEQ ID NO: 244042 - DNA, 201 bp, Homo sapiens
taagccaccacgtgggcctggctgacacaatagattttaaaggacaataattttactacagacaaaaaaggacatgttgcaatgataaaaggctcaaaccwtgaagaagacataggaattgtaaacatttatgcacccaaaatgtatgacacaaaattgacagaataaaatggagaaatagaaaatttaacaataatagtt

SEQ ID NO: 244043 - DNA, 201 bp, Homo sapiens
aaatcatatctccatctaagttctgagaatctatgatttcctatggttattagcaaggctacagaggataccaatgtagttagcacctagggattcatggktctttatttttcctttctaggttttagataaatatatttattatctataactttttggaggcaagatcaatatttttgaagtaatttaaaaatacatgtg

SEQ ID NO: 244044 - DNA, 201 bp, Homo sapiens
tcttcaaacctgtttcattttattctttcctgaaactttaaagccaatcaaaaaaaacagatacactgagtatatatattgttgccttataaaagaaacaygattcttatttttaatgtttcttctatataaaacaatactttgaatgtttcatttctgaacaggtgctcaaaggaaacaaaaaaattaatgatattatgg

SEQ ID NO: 244045 - DNA, 201 bp, Homo sapiens
tcttctatataaaacaatactttgaatgtttcatttctgaacaggtgctcaaaggaaacaaaaaaattaatgatattatggtattttgtaagttgtaattwtatccctgacttcctattttcatcaaattattatagatattcatatatcaaaaagcacagtttccccaaataattaattttttaaattaaataaaatata

SEQ ID NO: 244046 - DNA, 201 bp, Homo sapiens
tttgaatgtttcatttctgaacaggtgctcaaaggaaacaaaaaaattaatgatattatggtattttgtaagttgtaattatatccctgacttcctatttycatcaaattattatagatattcatatatcaaaaagcacagtttccccaaataattaattttttaaattaaataaaatatatcaaaagtagcaataagggt

SEQ ID NO: 244047 - DNA, 201 bp, Homo sapiens
aacaatacctaactaccagaactatcttgcatgaagcacaaaatttctgtagtggtttgactacagatctattactagggtgatagccaaacttgtagtaktattattgcagctttgaggtgtataagatgtttctttaaaacctcaaggttttaaaacattcagaataaactatatcaacccacacattaacaaacattt

SEQ ID NO: 244048 - DNA, 201 bp, Homo sapiens
ctgagtgatcctctttccctttctcataaagatttatgtgttaaggcaaaacaactatctacaatctttagtagacatatgcatttatttttacttctaartaaagcttaattccaataaattgaagttaggaaggaagcattcaactttcatattattgttgccataatataaatcacgtggaactatttttcatcacag

SEQ ID NO: 244049 - DNA, 201 bp, Homo sapiens
taagggaaatagataaacttacaggcccataaataatagacatactttaattacatgggtttaaatattccatatagaggctattacaaaagggatctttygtttgtagtacagttataagaaaacaatgaatatatctccagcttttataaaatgttttttaaagacacatcaattgtgtttgccactaccactacatat

SEQ ID NO: 244050 - DNA, 201 bp, Homo sapiens
gcctattttagttacttataatctcctgtgtttctcaacccctttctaccctattagatagacaggactctgggagtgtgggttgggagagaatctcaatragagattctgtgctacttcagattgtgcctcctcctctgatgactaaatctttcttatgggccaagctcctgtgactctcaccctaaagtggggttctac

SEQ ID NO: 244051 - DNA, 201 bp, Homo sapiens
tatatgattgagtttagaataacttttattgagcatttattctaaagtagttattatgctaggttatgatgttataaaaatgtgtatcatctgattcagcrtttggtctcttctaaatcagtgttctgaaacaataccagggactcccaaatcctgaaatctgtgcatttttctcaggcttcctttttctctgtggctttt

SEQ ID NO: 244052 - DNA, 201 bp, Homo sapiens
ttctatgaggtttatagagaaacagaaaatgtgcttccttccctcttttaaggtcataatttttcaaattgataccaaagtgttctacgtaattctcatgyttttagagggtttaaaatgctttgcctattttagttacttataatctcctgtgtttctcaacccctttctaccctattagatagacaggactctgggagt

SEQ ID NO: 244053 - DNA, 201 bp, Homo sapiens
ttaaaaagtaatacagttttgcatactgtataattagcagtaacttttaaatatactacgtttctgaggaccttcagtaaaatacatagaaaggaaaacawccggcttaaaatttgtgacttttcaatctgtatacattttcagttcctcttatttaaagtgatagactaataaatattttaatataatggttgaagtctt

SEQ ID NO: 244054 - DNA, 201 bp, Homo sapiens
taatggttgaagtctttattaagattaaattaggatcttaaactttctgtgtgtctccattaaagatgtgtttttggcttcattatttgacagtgttgtgktatggcatttaatggagaacaagatctcttactttggaatgtatctggtcaaatggagttcctttcatatttgcccaggaagcttatttttctaaagatt

SEQ ID NO: 244055 - DNA, 201 bp, Homo sapiens
tatgccatccttttcaaattacatgtcagctccttactttatcctacccccagtagtgagcgccttagttgccttgcttcatcttttgatgtgtttttacmctgtttgtcatgccagcatttcttgtgagcaccctccccaagacacatacacacacacacacacacacacacacacacacacacacacacacaccacatt

SEQ ID NO: 244056 - DNA, 201 bp, Homo sapiens
aacctgtcaggatataaaaacacaaatttgagaatgattttatttttaaattacaatcaaaagatttattcaagtgaatgagtgctccatgttcgctcttactctgcattcacttccttgctcaattgcctatttcctcataccacatgataactcagataccaaattgtagaagaatattttccacctgcactgtttagt

SEQ ID NO: 244057 - DNA, 201 bp, Homo sapiens
ctgtttgtcatgccagcatttcttgtgagcaccctccccaagacacatacacacacacacacacacacacacacacacacacacacacacacaccacattyttaacctatggacatttgctgctgtaaattcattatatatggtgcattgaaaatgtttgctctgtgtttctttctggaccttgtgctagcaactttgttt

SEQ ID NO: 244058 - DNA, 201 bp, Homo sapiens
ccttctaggaaatgaggtaaaaaagtaaaagtacaaaggggcaggggtaaagaatcagggatgtatgcatgcatatttttaaactaaaaaaaaattctgcrtactcagaaagcttaacattgctcttaccattaagaaagaaggtaagccttagataagtttacatgttctcgtatactacaatgttatcccaggtacaga

SEQ ID NO: 244059 - DNA, 201 bp, Homo sapiens
cacacacacacacacacacaccacattcttaacctatggacatttgctgctgtaaattcattatatatggtgcattgaaaatgtttgctctgtgtttcttyctggaccttgtgctagcaactttgttttgtcatttttgtcaagtgattttcttttttcttttttttttccaaatcagctaagtcactgataagattgatg

SEQ ID NO: 244060 - DNA, 201 bp, Homo sapiens
aatgttgttattattatttgcatttggtactgtgctatgtaaataaatcagtggcatctaagttagacttgattttgaagtgctgttattgattcactaasaaccactaagtttctccatctgcttcctatttacaaaatggagatgttttctgtttctaatttgcccctcagaagtgcagtgttataaggattaattaga

SEQ ID NO: 244061 - DNA, 201 bp, Homo sapiens
tttagactattggattaattctttgtatgtctccttttgcacagttctggagcacaagccaccagcatgcctcagtacttgtaaatcatttcagtaactayaaggattatgtgtagtgtagcctgtggaccagaaagtattttacagaggtcaaagcacgcatcagcttaaattcaattcaggtgtatatattgagtacaa

SEQ ID NO: 244062 - DNA, 201 bp, Homo sapiens
ctgagcttcctgattagcaagtctgttgtctatggtgcgattaatctcttctcagcctaactctgatatagtcactgccctgtataagaaatgtcagtggstctctatcacatctatttaaggtatataagaacccgtacccttttcaggcttatcttatttttctcctcaatgaaccccactctgttcaacatgtagagc

SEQ ID NO: 244063 - DNA, 201 bp, Homo sapiens
atgtggcatctctgccattcctggactagaggaggagggtggcttggagaaaaatggtatcaaaaacagctcttaaaaacaagaagtacactctgctactrccatgtaactggcatttgctagattctcttgagggcccacaaatgttcttggtataatcaggacccagtggcacccaggcactctggcctgcctgcaaaa

SEQ ID NO: 244064 - DNA, 201 bp, Homo sapiens
ggagaaaaatggtatcaaaaacagctcttaaaaacaagaagtacactctgctactaccatgtaactggcatttgctagattctcttgagggcccacaaatrttcttggtataatcaggacccagtggcacccaggcactctggcctgcctgcaaaacatagccttagccagatttaatttgtgacacccaaaagaagaaag

SEQ ID NO: 244065 - DNA, 201 bp, Homo sapiens
gttgtagggttagaaagctaagaattgtgttaaataaaattgttaaaagatcacaagttctgaggaggtgcaaatgtcttgtttttttttttttttttttktgtgtgtgtgtgtgtgtgtgtgtgtgtgcgcgcatgtgtctctgtgtgtgtgttttaaatagagttttgttcttgttgcccaggctggagtgcaatggca

SEQ ID NO: 244066 - DNA, 201 bp, Homo sapiens
cagatttgtgtcctaggagacctagatactgacccacagacgtgaatcctttccccagtctttcccacatgaatagaaaatgtcccatctttcttgccttmatgctaaccaggtcgtttgtttacatgtggtaaaattttgatcctctctgaaagttttccttttttttttttttttttttttttgctttattctccctga

SEQ ID NO: 244067 - DNA, 201 bp, Homo sapiens
gtgtggtggcacatgggaagctgaggtgggaggattggggaggtcgagggtgcttctgtagaagttttccatgaagtatttttttttttttaaattaggtsgaattaatttgcttatttttcagaaaatagattttggagctggtaagaagaaatgagaaatactaatatagcatattagaacaaataacattttatataa

SEQ ID NO: 244068 - DNA, 201 bp, Homo sapiens
gttaagcagtgcagggcgtcatgtgcttacaggaattgatatcttttaagagtccgtcattgtgactgcctcatttcacggcttgccacctgactctgttyttacaaacgataaaagttcaaataatacattatgaaaatgcgttctgaggatgttttatttacttgctactttccacttgtagtttcatgtcaagtatgg

SEQ ID NO: 244069 - DNA, 201 bp, Homo sapiens
ttcttgtgaccatttatttgttaattcatttattcatacttcactcagtagtcgtttgactttcttctttctatgaacatcacagatattttcttagccasctgtggttaaaaccatggcaccatctttaaaactcttaactctattcccctccacatcaaatctgttccaatcttgacaaaccttgtcttccatttttgt

SEQ ID NO: 244070 - DNA, 201 bp, Homo sapiens
ggaaatgattctttatttgacatcatttatgtgctggacactggacaggattctgggcaaaactgataaacaaagaactcctgcccttggcaaagctcacrgttgagcgcagtagttctcaacctgggaggactttgtcctgagagacatctagtcatgtctagagacatttttaattatcacagttggggtgggttgcta

SEQ ID NO: 244071 - DNA, 201 bp, Homo sapiens
tggacaggattctgggcaaaactgataaacaaagaactcctgcccttggcaaagctcacagttgagcgcagtagttctcaacctgggaggactttgtcctragagacatctagtcatgtctagagacatttttaattatcacagttggggtgggttgctactggcatctagtgggtagaggtaaagggtgctgctaaacat

SEQ ID NO: 244072 - DNA, 201 bp, Homo sapiens
tcctacttcttattcattctaaccagtagtcgtttctgatagtagggtttaacccagctttctcatctataaaatgaataggttgatcaggactgccttcwttttttttcctctaagttcttttatttgggatctaactccacatctctaaacttcaaccttttcatagacttcaggctaacatttccaaggtatcttgca

SEQ ID NO: 244073 - DNA, 201 bp, Homo sapiens
tttctctttcatcagcggcaacaaccttctctaccaaccttgcttcaaactccatgttctagagaagggatgggctctagcatgtgggactattgcatgayaaacaaacagcagtgcatagagctattgtagaatgccatagtcacttattctgcaagtttacaataattcctgtttcagtgtcaatttataaatagctac

SEQ ID NO: 244074 - DNA, 201 bp, Homo sapiens
gcaggaagcaaagtggtatttgaactggggagaggacagtctcctgttggccagaagtcactgctgaccccttgtcagtggtgctgctgatccatggtacmtgaatgtatctgaggggctgtgaagagttgaatagacttagaggttacacctaaagacttaaaattatattgtgagagataacaattattagtaacagta

SEQ ID NO: 244075 - DNA, 201 bp, Homo sapiens
gtgctctgcactttctctgcaaaattaaggtgatggaaaagatcatattctgcttgttctggcaagaagggaagaggtctgaactgaaaacaggggcccamccatggaccctcatgtgccctgtcacactgttaaagagtatccctggctgctgagcatagtggtgtgtacctgcaatttcagctgcttgagaggttgaga

SEQ ID NO: 244076 - DNA, 201 bp, Homo sapiens
acgtgcatctctttattaagctgaacaatgtgattccctaaagaaataaatggaaccatgttctgtccagaaatctcagaaccacaccaggtgcctagttytcctttatttcatccagtactaacttctgttattgcttgctgttaaatctcccctttcttatcatgcctactgttttagttcattccctattttgttcag

SEQ ID NO: 244077 - DNA, 201 bp, Homo sapiens
gtccagaaatctcagaaccacaccaggtgcctagttctcctttatttcatccagtactaacttctgttattgcttgctgttaaatctcccctttcttatcrtgcctactgttttagttcattccctattttgttcagcctccattccagttattaaccactgattccatcatactcctgtccagtcaatcctttgactttc

SEQ ID NO: 244078 - DNA, 201 bp, Homo sapiens
gcctactgttttagttcattccctattttgttcagcctccattccagttattaaccactgattccatcatactcctgtccagtcaatcctttgactttctraagtttaagtctagtcttcctaccctctaaaagagccatttactgcctcttctgttatgtacaaggctaaagctcctccatcgcaagcatgatctctgtc

SEQ ID NO: 244079 - DNA, 201 bp, Homo sapiens
ccaccagcatgcctcagtacttgtaaatcatttcagtaactataaggattatgtgtagtgtagcctgtggaccagaaagtattttacagaggtcaaagcaygcatcagcttaaattcaattcaggtgtatatattgagtacaaaaataaagtttagacctccaccacaattatacaatttttgtcaaccctggctgcacat

SEQ ID NO: 244080 - DNA, 201 bp, Homo sapiens
aatagcaggcctttacaaactactcatacctgtccccctaccccaccttgtgcttggttctaggtggagcccaggggtcctttaaaaaaatcttattagcrgattcttacatgctgagggcattgaacagagagaacctgtggtctgaagaataggaaaaccaaatacaagggtactgatacaaatgcaagtcaaaatact

SEQ ID NO: 244081 - DNA, 201 bp, Homo sapiens
caatttgtgtgaataatgaaccaatatttagaaaatctttcttctcttgttatttaattttggttcatctgattacttccctaaaatacacagaagcaaartgacatggagtattattttggcttgaggttggagttctactccaagtagacctctcaatttgaaagccctccaagctctgcatgttgttttttgagaaca

SEQ ID NO: 244082 - DNA, 201 bp, Homo sapiens
gttgccaagatattacagtccccatatattactcattctttttgccttatgtgttgttaatatctcatatcactatattacgtttattacaaccagagaasccacgttggcacattactgttgcccaaactccacagtttatttggattttaatagttttccccttgtgtcctcttcctgttccggtattccatctggtat

SEQ ID NO: 244083 - DNA, 201 bp, Homo sapiens
atatcatttttccccaataccatggaagaaccttttcaaaaaatcaagagtttctttataccagcatcaagggaagactgatgcttttgccagtacacctkgcttttctgattggaggaaaaaagagtttctaaagtagaacttccctcaaatacaaaatatcaaacaaaaagtaataaggtattggtaattttctcctgg

SEQ ID NO: 244084 - DNA, 201 bp, Homo sapiens
gattttatgttctcagagcatttaaagcatgtttgaaatagataatgattattttatgtgtttatcttgagctgagattcatattctatggtttcagggtrttagtgaactacttcttaataaacacagcatcaaacctgaaagtcagagacacaaaaacagtgaaatttaaaaccgtctccatagcaagaatctggaaaa

SEQ ID NO: 244085 - DNA, 201 bp, Homo sapiens
ccctgactcccagttgcactcctttattcctgccatgagcttcagagcctgagtttgcttcctcttctcctccaaagccaccaccattctccctacttttstgtggttcccctgtcttccagcagtggctgcagagtcatactccctgtagcagcagctgtcaacaaatctcatagccttggtcagtttaaaggttttgtt

SEQ ID NO: 244086 - DNA, 201 bp, Homo sapiens
atcctcataaggatgtagggcatttatgcaagaagatttattaatataaaaatattagtaaattataataaaaatatatgtaagaaaaatcaacatgtgcrtaattctgcataaggagctaaatgatcatggaggctgagaagcaccatagtagatggttaatgaagtggttaaagactgttaaacaatatctagttgtga

SEQ ID NO: 244087 - DNA, 201 bp, Homo sapiens
cactgtgacattgacttgctggagggaagcttatgtctttcaattcgttaaaccattatactaaaatttatctttgctgggttgattttatagttatctcygaacttactgtcttcagctccctgcatgtctttccttcccccagcttgtgtctttgttaatcaaggtgaagtagacatgtatctagggatggctgaagtg

SEQ ID NO: 244088 - DNA, 201 bp, Homo sapiens
taggcttgagagtcagcctccttagatagggtgcaagtactgcatggcctccacaattctattcattccccagaatctccataaccagcagtcttatggartcttacgaataagggctattcacccttatgaatagccatgctgacctgcacctgctctgtggcatttaccaggtgccctgtcacgagagtgactttccac

SEQ ID NO: 244089 - DNA, 201 bp, Homo sapiens
tatctgctggatttgatgcattggaaggccacacccctcctctaggagggtacaaagtgacggcaaaatgtaagtacctctttcaggactttacgaaaggstctgatatcataccatcttttaggtctttatgatagacaccaccttttacatgtgtccagtaaacttgggtgagacatttgaaaatgattcaggtggtgt

SEQ ID NO: 244090 - DNA, 201 bp, Homo sapiens
tagacatgcttggtaatttatacacaagcaattgggtctagacgccagtgatgaaaaatgtgattctcctaatgttatgtttagtaagatgttttcttggratgagagggtataaagattaatgtctgatcctgaaagaattgggatcctacttacttgacccagcatgtgatatgtctgaacccatgggttttaaaaaat

SEQ ID NO: 244091 - DNA, 201 bp, Homo sapiens
tactatacttattgtagtcaatgtattccatttattacttctgaactctttaaggtcaggaatggctgttattgtccacatttgcaggcaagaaaattgargcacagcgacattaaatattttactcagatgttatggtggtagagtcaagactggaaaacaactccagactcttaggagggtaacaagatgaggttcatg

SEQ ID NO: 244092 - DNA, 201 bp, Homo sapiens
tttaccattttttttaattacagttttaatataggtaatatgcagaaaacttggaaacgacatgaaagttcaaaggaaaaataatcctcaaatcactggamcttttctcacattatctcttggctccaacacaaaataattttaggatttcgtcccttggtaatcattttgtctggactctatttctcatattttttttct

SEQ ID NO: 244093 - DNA, 201 bp, Homo sapiens
cctctttgccatgactgaaaagaagcctgtatatcctgcagtttctgggcattgtgagtctccttttaaactcaaattggtgataatggtgactgtgactmcctattgtccaaggaggggagttgcagatagggccttcaaagatgatccaataaaaatcagtgcagtaagactttttgataaaatgatctttatgatgta

SEQ ID NO: 244094 - DNA, 201 bp, Homo sapiens
tatccttcccaaaatagagggaccttaaggtctattgaaattcccaagccaatctgttaaaacatattcaagttctgtatagaaagatctatacaatatcmggggaatagacttcatgcttcccttcacatttctataaaatgatacttgtttctaacttacagtttttttttctattcgaatgtttttctttctattaac

SEQ ID NO: 244095 - DNA, 201 bp, Homo sapiens
actaaaaaccagtgttactactgagtggtactttttttttttttttaatactagaacaaacaggaaaaaatagcaaatttgtacattcattcattcactcygtaaacttttactgagtttcacctgagccagccgagtgccaggcactcttgaggcacattggtgaggaggaggaaaagtgctgctcttagagggaactga

SEQ ID NO: 244096 - DNA, 201 bp, Homo sapiens
ttcttaaaaatctcaaatatgtatgacttacataatcggaagcaagcaataaaatttattataaaattagcacttttcaaaagatcatattgtaaattgaktaacatttacaaatatggattttgaaaaatggtaatcttaacaagtagacaaaattggtatatttgcaataagagaatggatagatgcagtagtatttct

SEQ ID NO: 244097 - DNA, 201 bp, Homo sapiens
gtatttttagtagagacagggtttcactgtgttagccaggatggtctcgatctcctgaccttgtgatctgcccgccttggcctcccaaagtgctgggattrcaggcataagccactgcgcccagcccagtttttcatttttttaaatttgtggaaatggcgtcttgctatttttgcccaggctgatcttgaactcctggtc

SEQ ID NO: 244098 - DNA, 201 bp, Homo sapiens
ccccacctcagcctcctgagtagctgggattacaggcgctcgccaccacgcccagctaattttttttgtatttttagtagagatgggatttcaccatgttrgccaggctggtctcgaactcctgacctcaggtgatcctccctcattggcctcccaaagtgctgggattacaggtgtgagccaccacatctggcctctccc

SEQ ID NO: 244099 - DNA, 201 bp, Homo sapiens
acaagtttaagttttccagtttaggaggaaaagcattcaaatcagaaaaccccctcatttttaacatttttcccaagaagcagaacagtcattttttaatmctctcataatgccctgggggcgttagacagacattgtcccttaaaaaagagaaaaataggaattgcatcatgtttgatagaagtataagtaacaagggaa

SEQ ID NO: 244100 - DNA, 201 bp, Homo sapiens
tacaatatttgttgaacaataacagccattgaaagcgcattcatcaccaatgtactgatttggaaatgtgaagttttggaaatgtgaattttagtaatatsatagattattatggaatggcagtatttcaaatgtttatgttttacaggatgagtgctaactctaccagcaattatagtattaacagtttcatcaaatatt

SEQ ID NO: 244101 - DNA, 201 bp, Homo sapiens
tcttcccacagttcatggaaagtgaaggcttctgaactgcttgttgttcctcattctttgttcctgattactgtaactggaaccttcttctggtccaccaratcagaaaccttcggggttatcttggacttcccctttcactcaccctgtcatcttttggccctgtgggtcctacctctgtggatttccctgcccattccc

SEQ ID NO: 244102 - DNA, 201 bp, Homo sapiens
agaaaaaaagcctaaatcgacatggatcacctggtagtgtcacagtcttctctattgctggatctatttatgcaaaaaacataaaatcttcataccctcaygtctatctacatgtcacacctggttttgattttaatgactttcagactcttcagtgggaaggaaataaataataaaagcagtgttattgaaaaattctgg

SEQ ID NO: 244103 - DNA, 201 bp, Homo sapiens
agaataaggctgatgaagagtagttgaattcaaagacaggaatttaagaatcatcagaagagaggtcacagtcaaaaacttgggtagtcagcaagcatcascttatcaattaaaaaacggaagaaagagagaagagtagagggacaagactaaatgtcactgaagctttcagggcagtatcttatacctgtttatggctgc

SEQ ID NO: 244104 - DNA, 201 bp, Homo sapiens
agagaaaaacaaccccattaaaacgtggggaaaggacatgaacagacatttttcaaaagaagacatatatgcagccaacaagcatatgaaaaaaggctcartatcactgatcattagagaaatgcgatcaaagccacaatgagataccatctcacacaggtcagaatggctattaagaaaaagtcaaaaaataacaggtgc

SEQ ID NO: 244105 - DNA, 201 bp, Homo sapiens
gaatagtgtatattttacttctaaggtactttgggtctattttattgctgcattctaaggcttgtgtgtatgtgtgtgtgtgtgtgtgtgtgtgttccatrtgtgtgagaataatgggaaggtatgatacccacctctcataccttgatgctttgggaaaataaaaattttctgattatattattttgcagatgttctagt

SEQ ID NO: 244106 - DNA, 201 bp, Homo sapiens
tcctgggctgttgagtgtctttctcctcccctcctcttcgagtgccctgaaacttttttcattctaccattctcacaatgagtatgcataaaaagtcactrttaaataatccaggaaaataaaactattgcctttaaaatatataaattatacatttttttgttacctgttattgcatgttgagtattcctcatctgacat

SEQ ID NO: 244107 - DNA, 201 bp, Homo sapiens
acatcattgtgtatccccccaccccagtaccctcagacatgtcttgtctgctgcctgggtggcacagattcaatggaacataaacactgggcacaaaattytgaacagcagcttcacttgttctttggatggacttgaaagggcattaaagattccttaaacgtaaccgctgtgattctagagttacagtaaaccacgatt

SEQ ID NO: 244108 - DNA, 201 bp, Homo sapiens
gcacagcaaaagaaactatgaacagggttaacagacagcctacagcatgggagtaaatttttgcaaactatgcatctgacaaaggtctaatattcagcatytataaggaacttaaacaaatttacaagagaaaaacaaccccattaaaacgtggggaaaggacatgaacagacatttttcaaaagaagacatatatgcagc

SEQ ID NO: 244109 - DNA, 201 bp, Homo sapiens
tggaaattggaggatatttgtgtgatatagggaaggacagtagtttataaacaacattttaaaaagcactaatctcaaaggaagggattataattatgaayaaaaatgatgaacattaaatataacaaagaattagcattcagaataccaaaaataatataagtaacacagtggaagacgggacaaataagaatagttaat

SEQ ID NO: 244110 - DNA, 201 bp, Homo sapiens
agaaaatttcttaacctttctgtgtctcagtttcctcacctaaaaatgaatacaatagcactgatctcctgagcatgagggatgatgaaccagtgcatgcsaagactcagaaaattgctgggaacatagagtgctcactgtttgttagccctacaactgttggtcaaaattattagagtgatggtagggttgtgatttgtc

SEQ ID NO: 244111 - DNA, 201 bp, Homo sapiens
tatgtttcatacataccatatgcaaatagcctgaaggtaattttattcaatattttaaataattttgtgcacgaaacaaaatttgtatacctgaggtaagrtgaggaatttccacgtgtggcatcatgttggtgttcaaaaagtttcagattttggaatattttggatttcagattttcaaaataggtatattcaacttat

SEQ ID NO: 244112 - DNA, 201 bp, Homo sapiens
atttgtatacctgaggtaaggtgaggaatttccacgtgtggcatcatgttggtgttcaaaaagtttcagattttggaatattttggatttcagattttcaraataggtatattcaacttatattaaccagatcaaatgttctatgcttgtcttgttctcttgaccctcggattatttcacaatcagaatccagcatattca

SEQ ID NO: 244113 - DNA, 201 bp, Homo sapiens
ttgatagctattttaacggtagccaagctgctggtttatttctagttgaacattagtggctgtctctgctatgctattttttaaaataaattttccagcasatacaaatgcttttaaaaaaggattctaataataaggttaagtgttctaaaatcatctgtaatgtcacttgttttgccccaatctcacatgactcatctg

SEQ ID NO: 244114 - DNA, 201 bp, Homo sapiens
attaaattattctctccctttgcttgtggtgtacagggagatttactgaagtaaaagggggtttcgtttgtcaaagatgaaagagatgtagcgccatgctwtataacacaatatgctacttggaaatctgttatgccttatctagaaatgttcctaatatcttgaactccacctttcactcattaggaagtcctgcaatat

SEQ ID NO: 244115 - DNA, 201 bp, Homo sapiens
atattgtatatgattaggaaaagaaataatgaatcaacttttattatatctaataacttgtgagtttttattcccttccattttattatgtttaatttcakttttaaaagtccagttgagattcagaaaattgatttcattactcacattaatagtcacagcctgcagaataaaaaattgtgctatcagatagataatatt

SEQ ID NO: 244116 - DNA, 201 bp, Homo sapiens
tctgaccacttctgttccatttcttctatttcctacatatgctcagtcccagaactcagattgttggagctacttgctttactcatttgtaaacttggttrgggagctgaaacctcaggggtttctatttccaactccagtcaaggatgtctttacctatctagttactttattgttaatactgtgggcctgtgggttcaa

SEQ ID NO: 244117 - DNA, 201 bp, Homo sapiens
aaccggctaccttgtcatcattggtcaagttgtcagacttcccctgacccccagattcctgatctaggagaaggtagtaccgtaatacctacactagcagstttgttttaaggaatcagtgtttggaaggcaggtggtaaattgtgaagttcggaacaagttcattttttgttgttattatcagcgctgactcctggtagg

SEQ ID NO: 244118 - DNA, 201 bp, Homo sapiens
agcagccctgtgcactggtgaagagccagattggtgccagtcttggttgtgatacttcttagctgtgggatcttgggctttgggtcccttatctgtaaaayagagataataataggacctaatccataaagttattttaagtattggatgagttagcacacagaaaatgcttagtaatgacttactcaaaatacatgctca

SEQ ID NO: 244119 - DNA, 201 bp, Homo sapiens
gaaaagcagccctgtgcactggtgaagagccagattggtgccagtcttggttgtgatacttcttagctgtgggatcttgggctttgggtcccttatctgtraaatagagataataataggacctaatccataaagttattttaagtattggatgagttagcacacagaaaatgcttagtaatgacttactcaaaatacatg

SEQ ID NO: 244120 - DNA, 201 bp, Homo sapiens
atattccttctggtagacactggacaggtaggatgctgcttactgaattgtgaaattttatactatgatgtaacatttataaaatgcttttgagttagcaractgttttatcttacagggtttcagtgaagctcaagtagaacaatacttacttactattaaaaaaaaagaaaggtagcgggtggtgttatttaaatggag

SEQ ID NO: 244121 - DNA, 201 bp, Homo sapiens
ctgtagacatcataaacactgtacacttaggctacactaaattattaaaaataaagtaattgtgctatgacattaggaaggctcatacgtcagtaggtgaragggatttttgtgttccattataatcttctgggcccagtgtcatatatgtggtctatccttgaccaaaatgttgttatggaatgcatggctgtctttagt

SEQ ID NO: 244122 - DNA, 201 bp, Homo sapiens
tagtaacctgggtgagatgcttccaaaactccatcccctgctgcttcatcacctaaatgtgacactagggcaaagatctccccccgcttttgtaaactggyctatcctgtgcacctacgcctattgtcaaattaataaatctctataatggcatatttgtattttgtagcaattgctgatagtaattcttttcagaacctg

SEQ ID NO: 244123 - DNA, 201 bp, Homo sapiens
atttacaaatatggattttgaaaaatggtaatcttaacaagtagacaaaattggtatatttgcaataagagaatggatagatgcagtagtatttctcaaaracaaatagtattataatgtctttaggaaattgcattcatgtattaccatacatgtgcctagaaattcccccaaaattattttttgaaaactttatatatg

SEQ ID NO: 244124 - DNA, 201 bp, Homo sapiens
cttcaccactctgtgtgtagatgagttatttttctgtctcctagagagtatagagcaaggctacaaagagcctgtaccccaagggtctcctgcattttccsatgcccctaagcatattttaggtgatatagaaaggattagacatgtcttaatttggcccaaataagtaacttaatttggcccaatgaaacaacccttgaa

SEQ ID NO: 244125 - DNA, 201 bp, Homo sapiens
tttaaaaagaaaaatgatcccagaagtagataaccttttttttttttaataaagcagataaacttactgaaaatgacgtataaaactcaatttttctggtrggtacatactcttttgattaaaagttatcttaaacgccacatacctgaaaacacagttttacccattcaacaatcttgatgttcactgtcactgtgataa

SEQ ID NO: 244126 - DNA, 201 bp, Homo sapiens
tagcagttctagtaatcttccatttctaaacttggtagtcaggtaatcagatgtgttaaaattttcttttaaatgattcattctagacagtggaaagtatscttaagaatattaaatatttaattttattgggtatcaccatcatataattataatctggacttttttttttttttttttttttgagacaggctcttgctc

SEQ ID NO: 244127 - DNA, 201 bp, Homo sapiens
gagacttaggagctaagtctggtagctttggcatcagcttatttttagcagtgtgtgatgtctgtttttcctggttattatccctgggctcaattttgcarttataggatgcacatgttattcagcagatatgaacgttttcacttagcaaactgtgtacgtgaacacctttttaaatgacttaatgggctcgagttttgt

SEQ ID NO: 244128 - DNA, 201 bp, Homo sapiens
ttaaagtgcagcgggtgatcacagcttattgcagcctccaacttctgggctcaaatgatcttcctgcctcagcctcctgagtagctgaaaccgcaggcacrtactaccacacctggctttgattgaagtttttagcctcctttttgtgggatccaaaaacattcctttctgcattatgtggaagaaattaataattttcaa

SEQ ID NO: 244129 - DNA, 201 bp, Homo sapiens
aacttaaaaaatattgattgattgataactaatagcaaaatttggttgttgggtagatatctgcagtctgctgaaaatcaaaatgttatggttaaagaackagtttagtagcactaatcagaattccttggtttcttgggaaattagggggttgctgctttactaccaaagaaaaggaattaagaagtattaataatcttc

SEQ ID NO: 244130 - DNA, 201 bp, Homo sapiens
gccttggaatagaagcaggggatctggaaaggctgttccccaaggtctctgcagtcagccatgcacttagatttgactacagacaaaacagatgtattcamaaaattgaatggcatgttttacctaaatggtaggggttagggaagatagcttcttaatgggtctttgtgccatgtctctttattccttatgattagtaca

SEQ ID NO: 244131 - DNA, 201 bp, Homo sapiens
tttctttttcatctcaccatgactaaagaagctaaggtgtgggcattataacctacaactgatcccaaaggaatgggctgtcattcatgtcttccttccartgttgaacaaaagagagaatgcatgtgggttcacccacccattgttatcataaatccatcccagctccatttcaagactctcagggtttcagcagaacat

SEQ ID NO: 244132 - DNA, 201 bp, Homo sapiens
agctgattttttttttctctgactacctgagaattgaggcagcagggccaagggggccgacttgccacgtgaggttttgtctttcccaccttgttaggctkcttctttgcctttctgcctggcaattcctgaaggtggtgttctgttttatctcttttttgtttttaaagtgtttgtgcaaagcatattattctgttttta

SEQ ID NO: 244133 - DNA, 201 bp, Homo sapiens
cgagctgagattctgcatttctcatagcactcagggatggcattgctactcatccgtggaccacattttgagtggtaagatcctgtaagaccatggactcwcaaatcattgaaatgactgggcctcagttccttcacctatgaagtaaggtgataaatgaaatgtgatttattgtcttctctggggatcaaatatgtcatt

SEQ ID NO: 244134 - DNA, 201 bp, Homo sapiens
ttggttatttttcttttagactattctgttttgttattgatttataagaccttttttctatcctattgaaattaatcattttcattgtggttaaattttaycattttaacatattttgagtgtgcactttagtggcattaagtacattcacaccatttgccaccctcaccgttgtcccatctccagaaatttcccgttatc

SEQ ID NO: 244135 - DNA, 201 bp, Homo sapiens
ggtggaaagaaccttggttgctgaggtcctgccaacctgaagtgttacacaagaaagaaacttctctgttgtttacaacactgtattaattggtttctttkttacagcagcttagtataaaccctgcttgatagagagtcccatagaatttcgttgacctgggctctgcccagcattagcaaagtgttttgaatctccaag

SEQ ID NO: 244136 - DNA, 201 bp, Homo sapiens
agagatcagatagcaggctcccattagcttgtcactggggatcttgttgacttaagtcttacacagtctgtctcccttgggaaaatagtgagtggggaagyttctgtgagagacaggggtgatgcatgacaacagagatccagggcactggggacatcacagttgttgtcggatgattcagtgaagaagcatcattgtagg

SEQ ID NO: 244137 - DNA, 201 bp, Homo sapiens
ctaaatggattgctcatggactctgaaaccttttttggacaatagacctctttgtgtatctgacagattctgtggaacctcaaaacctaaggttcccatayttttatctaaaaccctagttgagatgcattttggagtcaagaatttatcagattttaaaaaggtagtatgatttaaaaaatgtattgggttttcaaaagt

SEQ ID NO: 244138 - DNA, 201 bp, Homo sapiens
gtctcccttgggaaaatagtgagtggggaagtttctgtgagagacaggggtgatgcatgacaacagagatccagggcactggggacatcacagttgttgtyggatgattcagtgaagaagcatcattgtaggatgatgcaccaaaggaagcacccaatgctggcaagcaagagctagtaggctatacctggtgcagactga

SEQ ID NO: 244139 - DNA, 201 bp, Homo sapiens
ggaagcacccaatgctggcaagcaagagctagtaggctatacctggtgcagactgaagatgagagaagcagtcatcactacatcatggatgtattgcaggrcccaaacaggggtggtgtttggagtttagatagtttagccacagtaaagccctgcaaagaacagtatcactataggattcttttgttctcatccttaatt

SEQ ID NO: 244140 - DNA, 201 bp, Homo sapiens
ctagcccatcgtgttctaaagaatcaacaacatagaacatctttttaaagttcacatctgtatttggctagctagggctgtcataacacaataccacagaytgggtggcttaagcaacaggaattaattttctcacagttctggagcctagaagttcaatatcaaaatgttggcagatttgatttctcctaaggcttctct

SEQ ID NO: 244141 - DNA, 201 bp, Homo sapiens
ttctttgttgagtctggtgtctgtcaataggtttccaggggcatctgatcattatttaagcttaaactcaattattcagaaaatgccctgtggccctagcrtcagcataaaatagcagcaagaccttactaaactgctcagaactgggtgaagagtttcatttcccaactttcagggtgaaatgttcaaggcatctgagga

SEQ ID NO: 244142 - DNA, 201 bp, Homo sapiens
taggataaagtagaggaggatttgcccaaagcttgcttccttttaatgtctgtttaaaagtatatttaaagcctaacaatttctcgaaatcctggggttawaccagtctgtaggtaccaaattttggtgtatgactcaaacaaattattggtagtcattctctcttggtacaatttatgttgataggtgtaacttattaat

SEQ ID NO: 244143 - DNA, 201 bp, Homo sapiens
gagatcctgcaaacactaagctgacaccccagaggcctgtatctatgttacattgattagttgactgcccctcttactgctgtgtcccctgccagcccccmctgccctgggctgtctgatgtggaacagagcagagggcagatcctctctctcagatgtcgtaaccacaagctagtccttgtgtagatctgtagcccaaat

SEQ ID NO: 244144 - DNA, 201 bp, Homo sapiens
aaacagttgtctaaataaacaaagacaaagagagtttgtacatcaagttgagataaacccaaaaaaatacaaaatacctagcgaagaaagaaggaactctsgaaaagttgttccttgccattaaatccaagaatctcactcagaagagaggagtgtctatgtttagtctttctccttgccacagggaaaggttgtaacaag

SEQ ID NO: 244145 - DNA, 201 bp, Homo sapiens
ataggagatcctgcaaacactaagctgacaccccagaggcctgtatctatgttacattgattagttgactgcccctcttactgctgtgtcccctgccagcmccccctgccctgggctgtctgatgtggaacagagcagagggcagatcctctctctcagatgtcgtaaccacaagctagtccttgtgtagatctgtagccc

SEQ ID NO: 244146 - DNA, 201 bp, Homo sapiens
tcatggacttagcattttcactgttacagacatttttgcttctggagttctgcacctgtcacttttttgatgaatttaatcctcttttttgcagccatatygtatatgggctctcattctttatactcaatatgtttgccgttatgtataaatgtttcatcataacgtgaacacatatattatgttcatcatcatccctat

SEQ ID NO: 244147 - DNA, 201 bp, Homo sapiens
tagaaggggagcacctagtctagcaggaaggttaaggcaaggccttaactaaggagaagtaatgtctgcctcaagtcttgaaagaacaaatgctagtcagrtaggaagcagaagcagaagagcacacacatttataaaattactagaattagacgtttaaaaatactttggtaacatttggagcaacagtttctttatcca

SEQ ID NO: 244148 - DNA, 201 bp, Homo sapiens
gagtttggcctgtgcttacacacagacatctgcatagttatgaataaagtagaagttaaatgaaactgtacagttattttacatttggttatttgaacccyttctctactactttattcaatggcctttgaataaaagcagctgtgtctcatggctttctatcgtgaagtgttcaaatgtataaggtggttggatgtaaaa

SEQ ID NO: 244149 - DNA, 201 bp, Homo sapiens
tatataggataaaataagagaggggaaaagaataaagcttgactttcttattctttggcctgtgaatctctagactaaaatttcttgagtttggtgcaagyttacttcctcagattacattattttttcccaatacaaatttctattctcacttatattatgcatattgacaaaactgtgatcttattctgcaggaatatg

SEQ ID NO: 244150 - DNA, 201 bp, Homo sapiens
gagaagtaatgtctgcctcaagtcttgaaagaacaaatgctagtcaggtaggaagcagaagcagaagagcacacacatttataaaattactagaattagaygtttaaaaatactttggtaacatttggagcaacagtttctttatccatggcaagagagtattatgttttttaccactgttcagctatttttcacattcgt

SEQ ID NO: 244151 - DNA, 201 bp, Homo sapiens
gttatcagacttaggcctgacagataggctctgtaaattatttaaagcttctcttcatttcttgcaaagcaatgcttgctgagcttctccatgaaaaattmgtgtaattccagaagattatgatagatttgcaaggtaggagtttggcctgtgcttacacacagacatctgcatagttatgaataaagtagaagttaaatg

SEQ ID NO: 244152 - DNA, 201 bp, Homo sapiens
cccaggttcaagtgattctcctgcctcagcctcctgagtagctgagattacaggcacactctacgacacctggctaattttttatatttttggtaaagatrgggtttcaccatgttagccaggctggtcttgaactcctaacctcaaatgatctgcctgctgcagcctcccagtgtgctgggattacaggcgtgagccacc

SEQ ID NO: 244153 - DNA, 201 bp, Homo sapiens
actattttatttgcaagggccctagccatgcgctttctgctgcaacatgccaaactaatcaccacagcattctgagggatgtgttatcagacttaggcctracagataggctctgtaaattatttaaagcttctcttcatttcttgcaaagcaatgcttgctgagcttctccatgaaaaattagtgtaattccagaagatt

SEQ ID NO: 244154 - DNA, 201 bp, Homo sapiens
attgctttttaaaatagacacaacccttttgcatctaactgaagattctaaattgggggtttaggggtgtttgtattttactctcaatactctgaatcacrtatgctttctgtataacctgagtctttaaaatagcccagacctcagtgtgcaagagaccagaagttagatgttttacatatatgatctgcctatagcttt

SEQ ID NO: 244155 - DNA, 201 bp, Homo sapiens
gaccttttgggtcttgatgttgatggttttgagtctttttcagtctggtttgatttttgtgcaattttggctggagtatcttatatagatttcttcactgrgctttttcttcatcttcctcacccttgtcatcgtcatcttcattgtcatcatcattatcttcattagcagcaagtttttactttttttctgtggaacctc

SEQ ID NO: 244156 - DNA, 201 bp, Homo sapiens
ataaaagtttaagaatacactggttttatgtaaccagttatcgttaagggaaactgggtgaagagtacatgggaattttgtacaatgtttgaaactttctrtaaatataaaattacttcaaaaaacattttaataatgagtttatttcacacacacatttttgtatccccaccatttccgtgtctgaccactactatacta

SEQ ID NO: 244157 - DNA, 201 bp, Homo sapiens
taccaaattttggtgtatgactcaaacaaattattggtagtcattctctcttggtacaatttatgttgataggtgtaacttattaatacaaattcctaaarcatttctaattttacttctggcttcaccttttctttctatccttttatccaaatagaactctttctttaaacagtttgcaaagaaaagcatttctctatg

SEQ ID NO: 244158 - DNA, 201 bp, Homo sapiens
ccttttctttctatccttttatccaaatagaactctttctttaaacagtttgcaaagaaaagcatttctctatgaagttaatgcttctcaaattattatgyggtaaggggcaaggttttgtttacttacatttcatttcctatatctgttgtgaagaaatacttgtatatgaggcaataaatacaaattactaaaagtgag

SEQ ID NO: 244159 - DNA, 201 bp, Homo sapiens
ttcggttttgccccctacccctcatgccgaggtaagacccttattattttgtttcttttaaaaactgaatttctgattagctacctaatacaaagtgatayttctgagttgaccttcaatatccaaatgatatttatgaattgaagtttactcagttccacatattgtaaaccaattgaaaaaaattgatatttactaact

SEQ ID NO: 244160 - DNA, 201 bp, Homo sapiens
actttggactcacttaacattgtagtctggattctattaagggaactttgtgtttctcctttgcaagagtcaccccctaccatgataaatatttaaaaatgtttttttttttttaagttgggaaagcaaacttttcccaaaagaaatttatagttcaaatttacaccaagttctcactaactggagcaagccgggttttca

SEQ ID NO: 244161 - DNA, 201 bp, Homo sapiens
gatagaaaaattgcacctaagaatacaatatttagggctactaataaataccatgctatcatttccttaagacaaaaattgtttggaactgtgtagccatkgtccttttagctgggacacaaacactccagtcaaccatagttccaaccagagaacctgtccctcatccccagttacctgacattatgtctatgtccccat

SEQ ID NO: 244162 - DNA, 201 bp, Homo sapiens
tatgaagtattgatttcaggtgtttgttctcaccttaaactcagaccaaatataaaaatatgaccttgggggcttagaattgtgcagtttttattcttcargagaaactattggagagatctcagagcaaggcattgcttgtatttcccttcagtgtagtacttagattttcattttcttagatctaattataaaagagac

SEQ ID NO: 244163 - DNA, 201 bp, Homo sapiens
agacggatcacctgaggtcaggagttcaagactagcctggccaacatggtgaaaccccatctctactaaaaatacaaaaattaactcagtgtggtggcggrtgcctgaaatcccatctacttgggaggctgaggcggaagaatggcttgaacccaggaagcagaggttgcagtgagccaagatcgagctactgcactccag

SEQ ID NO: 244164 - DNA, 201 bp, Homo sapiens
atgcctggttgtcacaggtagaaggggtctctactctgaatcattcagagaagaaataatcatattctttcgatgctatcactaacacaggaccgtgatcygagacaaccaggttcagttcttgatatgtaaaggaatttgggaaaatatcatctctcaccacaaaatctgtatttttatgtatatttaagcaaaatcctg

SEQ ID NO: 244165 - DNA, 201 bp, Homo sapiens
tgtataatttcaggtaaaattgttctttgctttggaaggtttactgtgcattgttcaccatttggaaaaccatgttgctgacaacaaggtggctcatggtrtttgaataaccaacacagtgcagctccatcagtgctcatttgtagcacccttgttcaatacaacaaaaagcaaaattaacactcctttaacattttttat

SEQ ID NO: 244166 - DNA, 201 bp, Homo sapiens
tctctactttcatcattattgcattgccatttcagccccttaatcctgcatatctgtatgcattccaagcaaatccttctttcccttttttcttcccctcmagctccaaaatatcttattctatgcaaggaaccactatcagttgatgaactcaactgttttctcttacctatagttttttcctactgtcaagatgttctt

SEQ ID NO: 244167 - DNA, 201 bp, Homo sapiens
gccaagctccgctggctgcggttggcatggatggattagagaaacaccgtctcgtctccaggactcactcttcccctgctgcctctgttttacctcacccrgcaatggaccgccccctccagcctggctctgcaactggtaggaatccctaaagactctctctaataggcaggctaaatgccccgttcttgtaggattaac

SEQ ID NO: 244168 - DNA, 201 bp, Homo sapiens
aaaacgaatttatatgtaccttccccaaaggctcttttgagttctctgatttattttaaaatccattttcaggattcagagcttgtttttgtggcttctgkgacctcatgcaagccttcgtgcttggaaaagttaaatctattttctaaaaccatattcccaagccttgatattatctttagtttaaaaattaatgaatga

SEQ ID NO: 244169 - DNA, 201 bp, Homo sapiens
ttaataggcattcaataaacattttagttgaatcaatgaatattaatttcataataaacacgaatttactagttcaaatttgaatacactgaaagtaaaarttacattgtaactattgttccgctaaaggatagctaagttatttacaagttacaataactaagaggaatatttgttagctcatttgaacttacaagaatg

SEQ ID NO: 244170 - DNA, 201 bp, Homo sapiens
acaagaaaatattaaaataaactttacgtaaacatttcaaaaacttatgaaatggaatatattaaatggaaaaattataataaaaatgcaaccttgcaagrctgaataaaaatacagcaaatgtgagtggttctttaattacttacaaaactgggtttttaaaactaaatttaccaggagaaaacacaaaacccatatagc

SEQ ID NO: 244171 - DNA, 201 bp, Homo sapiens
taagtagtaaaattgatcgaactctagtaagactgaccaacaaagaaaaagcatgcatgcccagcactgggaaagaaaaggagacttcactacagattttratgttattaaaaggatgacaagaaaatattaaaataaactttacgtaaacatttcaaaaacttatgaaatggaatatattaaatggaaaaattataataa

SEQ ID NO: 244172 - DNA, 201 bp, Homo sapiens
tcttttttttttcttttctttccctccctgcctccctcccgttattcttcacttcctcactcccttcaaccctctctccctttctccctccctctctccastttctttttaataactgctatctcctgttgagtatgctcagctgcttctatttgacttgaatttcacaaacagtggctaaacttagtgattgtgttggtt

SEQ ID NO: 244173 - DNA, 201 bp, Homo sapiens
gcaagaaattgaagtgaatatttaaatgagaagaatcattaagttgcttggaaaggcattagggatacttgtgtcaataaccacatagtttttagaattcrtaatagaaacatctgtgaggttcccagaaaatctgattttggtaatctgtatttgagctgattggcaaacagtgtcacagttgctttaaggccaaatttg

SEQ ID NO: 244174 - DNA, 201 bp, Homo sapiens
gctactaagaagttatttaacacaaaagtcacataattttcaatgcacatcatttaaaccttcaccatccatgtgcatcctccacagcccactggattagscacacaactccctttttgacaagaacaaaaaatgttccaagggagaaatattatctgagtttagtcagttttggaaagatgctgtcttcattctatttcc

SEQ ID NO: 244175 - DNA, 201 bp, Homo sapiens
gcaattagaactcattatctgggatttcacttttacaaataacaaaatgtagtaaagcttgaacttaaaacattggcagaacccgctttagtttctcaacrctgaacatgcaattgaactcccattagaaaggtcaagaggggcctttctgagggcctctgctctttgtcagatgtatttattcatgtgcagaggattaga

SEQ ID NO: 244176 - DNA, 201 bp, Homo sapiens
aacctctattaaaatatgtttatacttatttttcaatcaatactttttactctataagcttctctttaatagaataaagaaaagtgatttgtatttgtatrcatatctatgtgcatgtgtgtatgtgtctatctgaaagtatgtgtgtatatttgtatgtgtgtatatacagtgtatatatgtgtatatatgtgtatatac

SEQ ID NO: 244177 - DNA, 201 bp, Homo sapiens
tgatctcccctatgatctctttctttaagaaatgattatgtttcagaacagattcaactgtgtggagttacatgtttttcttaatttatctgtgtttactrtaaagcaaagtgtgttttgtaccttgctgccattctatgaccttttgactgggagaactctggccattttagtacacgtgcttttcgtggagatgaaata

SEQ ID NO: 244178 - DNA, 201 bp, Homo sapiens
tggagataagacatattttgttatcttgttaatttaaaaaaatcatctttgtgataaacatttgcaattacttatcaatgcacaaatttttttctacttayggaaatatcctcaattagtcctatttcacgtataccttgttttattacattttactttaaaaatttaaggtttgtggcaatcctgaattgagtaagtcta

SEQ ID NO: 244179 - DNA, 201 bp, Homo sapiens
  misc_feature (1)...(201): n = A,T,C or G
gagtttaccttgttaacacctgctgaagagtattcagtttttttatccagatacatacagaccatgttatgaaaagcagccctgtgcactggtgaagagcnagattggtgccagtcttggttgtgatacttcttagctgtgggatcttgggctttgggtcccttatctgtaaaatagagataataataggacctaatccat

SEQ ID NO: 244180 - DNA, 201 bp, Homo sapiens
tacattacattagataatgtaaatattatattagataatgtaaatttgtaatatatagcaatttggggcatagaaaactttctataataaaggccattgakagcgacaggaagcatatggtaagcaaatggaagagtttaccttgttaacacctgctgaagagtattcagtttttttatccagatacatacagaccatgtt

SEQ ID NO: 244181 - DNA, 201 bp, Homo sapiens
actaatatagggaaattggttggagagattgacaaccaatgagagggacaaagagggaggaaaaatatttttaccattgagaatattggaaagtggatatrgatgttcttctagtgacacagattatagcataattcatgagttatgtatcctgttttatcattgaagttcttatgaaactgtaacatggaaaatacatgt

SEQ ID NO: 244182 - DNA, 201 bp, Homo sapiens
atgaactgaagagtgtgccctcaaaatttatgtactgaagctcaaatcgctaatctgattatatttgactaccttttgaaagtaattaagattaaattagstcataaggtactgtgtgctaatccaataggactgatatccttacatgaagaggaactttagtacaaggaaagggcatgtgaggatgtagcagaaaggtgg

SEQ ID NO: 244183 - DNA, 201 bp, Homo sapiens
ttcaaagcctccagaattgtgagaaataaaatttcttttgtttaagctacctaccccttggtattttgttatggcaacctgaatggacaaagacaaacttktttgtaaattcagaattaagtacaattacctatttatgaacagattatatccacaaaacttgaccattaccgtttataagcatttataaactaaatgtag

SEQ ID NO: 244184 - DNA, 201 bp, Homo sapiens
gaatggacaaagacaaacttgtttgtaaattcagaattaagtacaattacctatttatgaacagattatatccacaaaacttgaccattaccgtttataarcatttataaactaaatgtaggtaaaacataggttgaggtggtattgagataaatattgtttttgtttaaatataaataaattaatggatgataaatccca

SEQ ID NO: 244185 - DNA, 201 bp, Homo sapiens
gtatgaaaatgatccatgctgccctggacgttcacatatgcccccacccccacctctgctgtccccaactagtgaatccttcctaacacatccagatgccrtggtccctgattttattggaatagggtaaaaagtttaagaactggaaattctaaattgtgtttctttataggataagaaatcagttttttgctcacacac

SEQ ID NO: 244186 - DNA, 201 bp, Homo sapiens
gtttgtaaattcagaattaagtacaattacctatttatgaacagattatatccacaaaacttgaccattaccgtttataagcatttataaactaaatgtargtaaaacataggttgaggtggtattgagataaatattgtttttgtttaaatataaataaattaatggatgataaatcccatagtttcctaaagagaactt

SEQ ID NO: 244187 - DNA, 201 bp, Homo sapiens
tgataaatcccatagtttcctaaagagaacttctttagggataagcctaaacattggttatgagtcaaaatatcaatcatccactggatacctatgtgctyaacattctttatgatcaataaacatagctttattataaaagtaacccccacccggcaactcacagtaggtactcaatgaatgttaactgaattaaaacaa

SEQ ID NO: 244188 - DNA, 201 bp, Homo sapiens
tgcatgaaaaaatgtgcagtctataatgtgcatttttgtttttgccagaaaaacctaaaagaaataaaagttcttgtaccatttgaaaaggtataattttataatatgatgctttcatgcaatgacatacaattagactatagagaaaaaaggtaggcttggattttcacctataatttacatttgcatgattataatatg

SEQ ID NO: 244189 - DNA, 201 bp, Homo sapiens
tgtgcagcaaactatatcagcaaattggtatattttttggcacagcatagacctgctcagtggagctcagtgaaaatcatggggactttcagactttccargtttttaaacaatacatttttaaaaatacataagaaggaattcctcaaatttacaggtattcaaattggctatttctcagattctcttacaaaggaacaa

SEQ ID NO: 244190 - DNA, 201 bp, Homo sapiens
ttttataggacattttagaaagtatgtcaaagacatagaaatagctctaaaaggtgaacattttgtaatcataaataaaaaaggattgatacttattgaartttaatataaagattcactttggtgttcttttgacaatgctaccatgtcttcataaaatagtcaaagttgcttttagcttctggacatatttatcaaaac

SEQ ID NO: 244191 - DNA, 201 bp, Homo sapiens
aaacaaaaaaaatcctaaacacctggttatctgagtgatggatgaatttgagcatatactgaatgaatatgagtttgagtgtgtattatgatgtcatgttrctaataataactgctactcattgagtgccttctgtaggcagccagtttatatgtaatttactattattctcacaatgtacccttgaagtaagtacaggat

SEQ ID NO: 244192 - DNA, 201 bp, Homo sapiens
aagtatcttgaagtacttgaagttttgaaagggaagtgatatctgcagtgaagagctatttaaagtagatcaaatgctacaacttacttcttcttattgtktttaaaaggtcggatcagctataaaaattttaagacaatattttttctctgccttaaaatggttctaaagccaaaaattttctggaatctgtatagcaat

SEQ ID NO: 244193 - DNA, 201 bp, Homo sapiens
aaaaatgtcgtatcattctagaattaacaagcagttacataagtcttacaatgttaggcacttttctatgagttttgcaagtattagtatttaaatgttgrgatgtgtctcccaaatctacagccacctgataaaaacaacccattgatgtaaattcattgtttcaaagaagatttcacagggattaaagggaagaagaaa

SEQ ID NO: 244194 - DNA, 201 bp, Homo sapiens
tcttagtttttaattgtttctggactcttacaagtatcttttgaaggaaaatctctctccctgtgaagctacatttatagtgggatgtaagatcgctgctyattttactagccaaaatttgtcacatatattgccttcatggtttctattatgtgctttttctatagcaaaaaaatcatagacaaaccaaagatttcacat

SEQ ID NO: 244195 - DNA, 201 bp, Homo sapiens
aaccaatattttcaaagccataatgtgtgccatcagataaggcatgaagggcaggaagaataagataaggcttgttgttgatgactagacaaggtgcagcrtgcaaaaacgaatgagcaatgagacaagaccactgctctcaatctcaattgctcacagcctagccattgggctggttcagaaaaatgctaagctatgaga

SEQ ID NO: 244196 - DNA, 201 bp, Homo sapiens
ataccttggaaatattgcagattcagttccagagcaacacagtaaagcaaatagcacaataaagtgagtcacacaaatgttttgtttctcagtgtatactraacttatgtttatactgtcctgtagtctattaagtttacagtagcattatatctttaaaaatgtacataattttaaaactatgtttaaaaatcctaatga

SEQ ID NO: 244197 - DNA, 201 bp, Homo sapiens
gagatgtggtctcactacgttgctctggctagtctcaaactccctgcctcaagcaatcctgccaccttggcctcccaaactgctaggattagaggcctgarccactgtgcctggcaaattctcattccaagagctaggaagcgcagtatccagcatcaatccacaactccattaatagcaaatgtggaagaagttcaaaga

SEQ ID NO: 244198 - DNA, 201 bp, Homo sapiens
caaagaagatataaataaaatgataaaatagaaaacaagcatatatgtaagatttttaaagtcagaggttgattctttgaaataagtagtaaaattgatcraactctagtaagactgaccaacaaagaaaaagcatgcatgcccagcactgggaaagaaaaggagacttcactacagattttaatgttattaaaaggatga

SEQ ID NO: 244199 - DNA, 201 bp, Homo sapiens
atgagctaacaaaatacatgaaaatagcaagttgcaaaagtgtaaaaccatttttataaagttgaaaaacaaggaaatttagaaaaggaaagcaatggaaktataaactcaggatcctgatctcccacaaggaggaggatagctactgtcagagaaaggcacatgggggttgaaaaagtgttgctaacttaattttcctta

SEQ ID NO: 244200 - DNA, 201 bp, Homo sapiens
gctggtaccagttgtttctttccatgtttagtgcttccttcaggagctcttgtaaggcaggcctggtattgacaacattactcagcatttgcttatgtatmatggattttatttctccttcacttataaagcttagtttggctggatatgaaattctgggttgaaaattcttttctttgagaatgttgaatattggcctcc

SEQ ID NO: 244201 - DNA, 201 bp, Homo sapiens
aataggtcctagaaggtagtgtcccagatatccagcaaaagcaaacaatatcacacttgagccagacttgaatgacagataccatattcaaccccagtgtmttagttcaggctgctgtatcaaaatacgatagactgatagcttataaacaacagaaatttatttctcacagttctggttgctgtaagtctgagatcagct

SEQ ID NO: 244202 - DNA, 201 bp, Homo sapiens
ggcatctataccaaaatctccaatcggtcggagttggaacattaataatctactgcatattgcaaaagagggtcagaggcttgggcctaagaaggggaggsaatttaactggagaccagaataaagaaagaatgacaaatggccaacactttggaagagaataaataggagaaaagaaaatactcctaaataaaacatcat

SEQ ID NO: 244203 - DNA, 201 bp, Homo sapiens
atgaattatgaaaaattcaattgatttaaaaattaaaattttttgctgtaagttcacaaagcatataaaaaatgaaatgttctactgaaacacgtgttttyatttatttttatttaccgtaccttttggcaattgcccctgaaattggacaggtcggatgccatgataattttttctaaatgttgaatgagaaacattcaa

SEQ ID NO: 244204 - DNA, 201 bp, Homo sapiens
gtgacattatgcatttgtcaaaacccacagaatgtacaacacaaagtgtgaacctcaactatactttagttaataataatgcatcggtactggcttatcartcataacaaatgtaccaaaatgatgcaaaatgttaatatggaaagaaagagactggatatggaacttgctgtacttcctgctcagtttttctgtaaatac

SEQ ID NO: 244205 - DNA, 201 bp, Homo sapiens
atttaataatatgattaacagaaatgtgtccttacctattaggttttttacataaattttctagaatggtactaattactatgtgctattaatcttggctyagggaaagaacatttctaagcattagggatcaaaattttgcgttacttcttttctgaatgtttatcattctttttattgtcatcccggtaataaggtagt

SEQ ID NO: 244206 - DNA, 201 bp, Homo sapiens
agtgttttatatgttgaaatcttttggagtgggattgaaacagcaaaatcattttatttcattaaaatcggtctcagcctcttctttttcctctcattcamcgcaggcctttccatctaagaaacaattcatagctgcttcttcagaggatgtctaattttccctcattcagagggacacatttggtactttgccctgtgt

SEQ ID NO: 244207 - DNA, 201 bp, Homo sapiens
tttgtaaactcttatgcaggcaaaggatagcccatctatatatgtatatactcctttgtcaatttgggcttagtcagatagactgccaaataatttttaaygtagtattattttctaagcttatccttaatacacttcttgtttcctagtattgaaccagaagatctttctggcatctgtgtgtgggtgcaggaaatggag

SEQ ID NO: 244208 - DNA, 201 bp, Homo sapiens
atgctgttttctataaagaattctcaagagtttagtttttaaaatgtcttatttccattatctccttttttgagccattagtgtattaaatgtgtattttkaaatttccaaacgtatgagtgttttagtcacaatttttgttattgactcaatttaaatataagacattcataaaatttgatctgtatcatactagttcct

SEQ ID NO: 244209 - DNA, 201 bp, Homo sapiens
aatttgatctgtatcatactagttcctggaagtttatgagacccgctttattgacaagtgttcttgctatttgtaaaatgttctttgtgtgcttaaatagwatcggcatccacatattattgagtgtaatattttatatgtccattagcacaagcttattaattattttgttaaaatagtccatatttggctgcaggattt

SEQ ID NO: 244210 - DNA, 201 bp, Homo sapiens
ctttatggaactgttaatttttgctttagatatttaaaaactctgttattaggtacagtaaaattaagactattatatgcttataaatcctttattaatayttaataattatcttaagtaaatatttttatcctcaattatatttatgatattaatatagcaaaaacagctttttttcttttctagtattttcctggctta

SEQ ID NO: 244211 - DNA, 201 bp, Homo sapiens
ccaccacatctggcctctcccttccactttttagaatccttgtgaatgcgttgggccattctgaataatccaggataatcttatgattttaggtcattttrttagcaacctaaattctacctgcaaccttaattccccttggcatatgaggtaatataatcaaaggttctggggatatggtcatgaatatctttgcagggg

SEQ ID NO: 244212 - DNA, 201 bp, Homo sapiens
tctatacttgctcgctatttaccatttttcttatcaccatttatgattgtatctgaaacctctgttctgggattgttttctttcttccaggacattttttmggattttccttactgacggtttctcagtttttatttatctatgatgtcttttaccctcattcttgaaagacagctttgctaagtacacagttcaaagttg

SEQ ID NO: 244213 - DNA, 201 bp, Homo sapiens
gatccagacagggaaattaggtttcctgctgaagagcaatgataaagagataaacaaatggacatatgatacaagttcatgtgaaaatgtgttatggatawaagtaaaggatgaaagagagctagaggaaggctgagcaagaaggctagctctgttagcttatcagaaagctttactgataaggagagatttgtgctgagt

SEQ ID NO: 244214 - DNA, 201 bp, Homo sapiens
aagagagctagaggaaggctgagcaagaaggctagctctgttagcttatcagaaagctttactgataaggagagatttgtgctgagtgaattaagggaagmattatgtagatatgtggggaaagaatattccacacaggaaaaaagcaaatacagaagctctctcagggtggggcaaataagcaggtcttgacatgtttaa

SEQ ID NO: 244215 - DNA, 201 bp, Homo sapiens
gtggtgtgaaccatgtgataaatgattacttcacgtcaaacaacccaacttttctgagcatgctggctttgcaaggatttatagttccctgccttcatgcyggagttacttcagctttccgtgatgcattccaactaatctggaggttaaggcatttcttgatcatggatagatctgcttgcttctcagccctggaattct

SEQ ID NO: 244216 - DNA, 201 bp, Homo sapiens
caacctctgcttcccaggcttaagtgattctccagcctcagccccctgagtagctgggactacaggtgcctgccatcacgcctggctaattttttgtattytttgaagagatggtgttttgccacgttgcccaggctggtcttgaactcctgagctcaaaaagatctgcctgcctcggcctcccgaagtgctgggattaca

SEQ ID NO: 244217 - DNA, 201 bp, Homo sapiens
gaaattagaggttgataactgaagcagacatgaggaaaaggagaaagtaggacagaccaccttttcaagaatgttgactattaaaaggagaagaagaaaarcgtgggagctggagggattgatgggattaaggacaaagattttatatatatataaattataaaaaatatatatttgtatgtaattataaaaatatataat

SEQ ID NO: 244218 - DNA, 201 bp, Homo sapiens
gttctattcagaacacacagagcttctggtcttccttctgacaactggattgaggtgtggcaatagatgatgagagggcaagttgaatttctaggcacacsctgagatgctgacatttctcttcagagctggctatggaggtatagagaaggttgggggtgggggcacacttactcaggcactcaaagatctgggactcag

SEQ ID NO: 244219 - DNA, 201 bp, Homo sapiens
tattttagaagtatcctgcccagcctgagtctgagaaaccagcaatgcaaaggctctgttaattattatttcacttatctgagacttggtttctttatctrtgaaatagggctaagcaaggctcccacatggtattattgtgaggatcaaatgtgataatgtaggttatcactggcagctatatgtggtaatgagcactgc

SEQ ID NO: 244220 - DNA, 201 bp, Homo sapiens
atcaaggcactgcagggagacaaataaagggagggaggacattgctttcagaaatcccagtgattacgcatctaggcagagagccttcatttaggaactcyggaatctggattcaaatctttacgttgtcactgctccaaaagcgctttttcaactctaaagtgcagattccaattcagcaggaccaaatgcgagctgaga

SEQ ID NO: 244221 - DNA, 201 bp, Homo sapiens
agtataatgtaaacataacttttacaagcataagcaaaccaaaaaactcatgtgacttgctttattgtgatatttgctttattcggatgatttggaatctraccagcaatatgtcccaggtattcctgtatttggttagtcagatttcctcctcaggagcaattacaactttttatttggttattttttttttctgaccac

SEQ ID NO: 244222 - DNA, 201 bp, Homo sapiens
taacagacactcatatagtgttagttggaaggcttatgttgggaatttcttctacccacttcctttctagctgtctgatactctgttaagatgacttacawgaaaaaaagacaaacagacaaacacaaagctgtaaggtttagaaaatgcttcttatctagtgagagatacaatttatcaatttttttaaacagaattttt

SEQ ID NO: 244223 - DNA, 201 bp, Homo sapiens
attgcctttcttcaacttcctttgggtttcatgtgcttctctttttctagtttcgtaaagtggaagctgaagcaattggcttaagatctttcttcttttcwactataggcacttaatgctataaattttcccctaagttctattttagcagcaatctgcagattttgatatgttttcattttcattgtttaaaatattttt

SEQ ID NO: 244224 - DNA, 201 bp, Homo sapiens
aggcattatatcatttgcttgctggatacatcaagtttcacaaataatttaaaaattacactgtttggtactttgagttctgtgttcttgttaaaaaatgytgcagatagttatcacaccactacactccagcctgggcaacagagtgagactgcgtctcaaaaaaaaaaaaaaattgcagatagtaaaatataaactgca

SEQ ID NO: 244225 - DNA, 201 bp, Homo sapiens
gtttccttctgcttgaaggacttccttaaacatttgttgaagtccaagtctgctggtgatgaattctttcagtttttgtatgtttgaagaagtcttttccrttttctgtaagatattttggctgggtatagaatcccaagttgacttttttttttcttttagtattttgaaaatgttggctccactatcttcttggttaca

SEQ ID NO: 244226 - DNA, 201 bp, Homo sapiens
aggaaccacataagtaaaaaacatgagataaaatggctattttagccatcagagtttttctggggtatttgtattacatttctgttttcttgcttgatgtytttatccttctgtcatgtgaatctctttattcccaaacatttgtctgggtattaaaccttttttcttatatgactcaatgttaagagagcctcaaacagc

SEQ ID NO: 244227 - DNA, 201 bp, Homo sapiens
ttaacacagttataacatatttgacagagtttaatggaaacaatattaggcatatttcaaatcatcatagaattcagattatctacagaaaatgttgcctrgtgtatggtgtgttcagctctgctgtgtctctacagaatattgagaaagggaagaaggagcgattttttaaactcaaaattaaaacagaaatttaagcat

SEQ ID NO: 244228 - DNA, 201 bp, Homo sapiens
aaaatataaaacatagaaataaatttctaccttggatctaactagagagctcttttgccttctctacttttcttggattcagtaaaaataacaaccatttycgcatagattttatgggtactgaactgcattttctcaagaaaacattattttcttagtaaattcgcctttatatatgtatttacttctaacaaaaagaat

SEQ ID NO: 244229 - DNA, 201 bp, Homo sapiens
aattttttctagagagactaaagtagaccaatgctaatttagaaaatatagaaacaacattctgaatttttgaatgctaaatgtaattggtttaattacaratcattttgctaaagaaaagttatgttatggcccataatgaagaaagtttctttctccttcctaggatagcagtaattgtgctgcaaaaaacccaaaatg

SEQ ID NO: 244230 - DNA, 201 bp, Homo sapiens
gaaaggatatttcaggcattgactcagactaaataaatgtgctaaatttgatacagtgagtgggaaatttttctcaccacatggaaccactaatgagcttrggaagtaaacatagttaagtaggcatagttgcctttttgttacaatcattctgaattggtccattagcctgaataacatttcaatgaacttcacatttgt

SEQ ID NO: 244231 - DNA, 201 bp, Homo sapiens
atctgaggaaagtggaatagccaatccaccactttgttttctaggtctaaaatgatctgttcagtctttcctaattcatgggtgtggcattcataggagasgctggtggcacaaaggaaataagacatctatgcatcaatttctttatattgtaccatgggatgggggttttaaaagttgttcatatttgttttctgcacc

SEQ ID NO: 244232 - DNA, 201 bp, Homo sapiens
ctctagcctcacaaattttttctttagcagagttttcaaaagtgtcatatttttacatctcacttttactactagtttttttttttttttttttttgagayggagtttcgctcttgttacccaggctggagtgcaacagcactcccaggttcaagcgatcctcctgcctcagcctcctgagtagctgggattgcaggcata

SEQ ID NO: 244233 - DNA, 201 bp, Homo sapiens
gcacacacacaggttattacaattttatcaagaaattattagccttgtcttaaatctcaaaaaatttgaattgacggtgaatatgtggaaagtgacaatayacaaggttatccactattggaaggtgtgtgtggaacagaacagaactagatcacatagctgtggagaacaaaagctcaagaagaaaaaaattcaaaatga

SEQ ID NO: 244234 - DNA, 201 bp, Homo sapiens
agttatctctgaggatcctcaggtttcttaaggtttccttaggctgtctgtttaatctgatttttctgaaaaatgtacatgaataaataggccctccaacyaaaaatattaatatttaacatttagccaaagaggtagcaaatattattttcaaacaaaatgaagtaagatagaagagctgagacaatataatattctgct

SEQ ID NO: 244235 - DNA, 201 bp, Homo sapiens
atgatccttgtttttgtctctgtcttactctaaaatacaaatctgtatcttctaagaaaatcttttaacagcctcaccatatagggtgttgcagaaggtcrgctcggcggccagcaaaatatcttccagtaccttaacaaatcagcaaaatattttgagaaatgctttacttttatgaacaaataccctgctagttattgg

SEQ ID NO: 244236 - DNA, 201 bp, Homo sapiens
gagatatcttgcttgcttttgcaccctgggaaaactccttgctcttgctttcccccaccagctctgaattaattctctctacaaacaaaagttatctgagsttgtcttgcccaccctctcactttgaggatgagggagtagagattggtctaagctcacagagcaaggagtagatctaatggaaaagaccctgtcatgggc

SEQ ID NO: 244237 - DNA, 201 bp, Homo sapiens
tctctacaaacaaaagttatctgagcttgtcttgcccaccctctcactttgaggatgagggagtagagattggtctaagctcacagagcaaggagtagatstaatggaaaagaccctgtcatgggcttcatggactcctctaatgtctgtttggaggggcgctgcagttgggtttaggcaacactgttgggccttagaggc

SEQ ID NO: 244238 - DNA, 201 bp, Homo sapiens
aaaaataagccagcctaaatttagacaattgcaatgaattaaactttaggactggtaagtgtcaggaactcagatgatttcaaacagttaaggatttgagwtaaggcccaggagaaaggtgtgggctgcatatgttgatttgtgagcatcttatcaaaggtgatggttgaagcactggagttggtgtagtattcttgcatc

SEQ ID NO: 244239 - DNA, 201 bp, Homo sapiens
cggcctcccgaagtgctgggattacaggcatgagcccctgcgcctggcccagtggaagattcttaaaaggaatttaagtattctgactatcctgctcagtycccttcctaagctttggtcccacttaaactaaatgtgcaagagaaggggaaggacagtaaggaaatcactcatgtccacaaacaggaggagtagcttttc

SEQ ID NO: 244240 - DNA, 201 bp, Homo sapiens
gcctggtttgggtatcagagtaatgcttccctcataaaattagttagaaatgctcccttcttttttaatttttgaaagggtttgagaagtatttgcattamttctttaaatgtttggtagaatttaccaatgaagctttttggtcctgggttttactttgttgggatttttaaatttttgattcaatctccttgctgttgc

SEQ ID NO: 244241 - DNA, 201 bp, Homo sapiens
attatattaaactaaaaagcctctgcatagcaaagaaaacaatcgacaaaattaaaaggcaacctgtgtaatgggagaaaatagttacaaaccatatataygataagaggttaatgtccacattatataagaaattcatacaactcaatggcaaaaacaaaaacaaaataacctgatgaaaaggcatgcaaagaacttgaa

SEQ ID NO: 244242 - DNA, 201 bp, Homo sapiens
tgaataaacatttcttaaagaagttatacagacatatatctggccagataaaagaaggcatatatctggccaacagatacatgaaaagatactcaacatcrctaattatcagggaaatgtaaatgaaaatgaaaatgatgtacctcacacctgttgggatggctgtaatttaaaacaaaacacaagtgttagcaaaattgt

SEQ ID NO: 244243 - DNA, 201 bp, Homo sapiens
aatagataatgatgatagtgactactgtctagtaaacatttactactgggtagaaaagtcaccagattctccacaggagaagattttgctcccttgggacrtttggcaatgtctggagacatcacaacagaagggaggagtgctactggcatctagtgggcagaggccaggggtgctgctcaatatcttacattgcacagg

SEQ ID NO: 244244 - DNA, 201 bp, Homo sapiens
aagtatattatttagtgtctgattacttgggcattttttcagctatctctctttaattgatacataatttaattccactggggtcagaaaacattttctgyagagctttaattcttttacatttattgatatttataatggtataattttttatctcttcctacagtttgtattactttattgtatatttacttttatgca

SEQ ID NO: 244245 - DNA, 201 bp, Homo sapiens
ttttgaaaattagaaatcggctgtcatgcttgttgaaaagatgtatattttttctctggttctttttaagagtctttatgtagtttaatgattaggtagawttcctctttttttttccggttgaagtacattgagcttaatgtgtggcttgctgtttttaataacaattggaggacttttagctaatatttcttcaaacac

SEQ ID NO: 244246 - DNA, 201 bp, Homo sapiens
tgaagagatcttgaggaaaagatgaacttttctatgtcatatccaaccttgatttgaatcggaattattattttgtgtttctttttcaaccttttatgaartgaaggcattcttgtatttcttcaacatgccagttccccagaaaccaacttcaagatccatggtatcagcagaatttaagtacaagtaacagtaattata

SEQ ID NO: 244247 - DNA, 201 bp, Homo sapiens
gatgttccttgaccctttattttgccaatgatattatataattatttctttttgaaatcatcagataaaattgcagtactttcctttggcgtattaaggastggtaaggtgagaatgaagcaaaggaatgggaagaactatgaagagtttttactggttctgtcactaacatttgtgacacttaagaaaccaagggcagaa

SEQ ID NO: 244248 - DNA, 201 bp, Homo sapiens
aacagaaaatgtgcttccttccctcttttaaggtcataatttttcaaattgataccaaagtgttctacgtaattctcatgtttttagagggtttaaaatgytttgcctattttagttacttataatctcctgtgtttctcaacccctttctaccctattagatagacaggactctgggagtgtgggttgggagagaatctc

SEQ ID NO: 244249 - DNA, 201 bp, Homo sapiens
tcagcacagcactagccatgtgtgtgtctggtttaatcaaggaagcaaacgcattagagagacatccttagcggaattcttcttagacctcattggccacycttggctacaatagagtttgggaatgtgaatatttagctttcccacatctatattgggagacagcaaaggagaaattggtagagaatgactgttgttagc

SEQ ID NO: 244250 - DNA, 201 bp, Homo sapiens
aagtaagacatgggatatttgatgtctcaggagtaaagtaatattgggatttttttttttcctctgcaagctgtttgagagctttcagcagggggataccrtatttaaaggtagcctaagatctcataactccatgtgtcacaaaaactgtgtaggttatgaaagacttttctcgtgagcaaaacaactgtgctttttagc

SEQ ID NO: 244251 - DNA, 201 bp, Homo sapiens
ctaatatatatgtgaaaaagggtagacatcaatcagtattaagaaacaatgagaaatgcctgaacagacctttaagctgtgatttaaaaaaatcgtatttrggtgatcctagcagttaaattgactttttctttccttctgtcgtctctgttctccttttttttcctcagtaaactttgattgcttgctaattgtgtgcta

SEQ ID NO: 244252 - DNA, 201 bp, Homo sapiens
tttttcctcagtaaactttgattgcttgctaattgtgtgctaggccttgtttggttgtttattgagagaaagaaataaaggagaagggagagaacacaaayacaatttctgcccttgtggaattatagccagtataggagacagacaaaacagtatataaacaaaaaataacaatacataattacagattgaaatcaattc

SEQ ID NO: 244253 - DNA, 201 bp, Homo sapiens
tccatataatttccctccttactttttcttaatgtcagatgaggtatatatatcttttgtaacttcctggtgtctgatcttagatacttctaaagctgatkgtgaggattaatggacagggattctatccagtaattgtgggttttagaagaaacatactcatcctagagaaagaactggcacacatttgcccatttttgt

SEQ ID NO: 244254 - DNA, 201 bp, Homo sapiens
attcatgaataatgagctggagatctggagatctgccccatacaaaaaggaccaacccaggaaagggcgaaagagaagtgaatggtgatttatgagccccrttttcagtttgcctccagttctcaaggaggtgtaataggttgtctgacaaagcatagacaggaaatgaaccctggcatccaaaccgaacctggtacatct

SEQ ID NO: 244255 - DNA, 201 bp, Homo sapiens
catcagcctcactggcaagaaaagtcagaacctgatttttgggaagagagagtattgacgggggacagtaatggagtgttcactccagaggcagccagtartggtcagagatcatattctgggtgtcgggatgtctatttctctcatcagctctgcttctttggccgaacttacaggtatcaaagtgaacagaaggtttat

SEQ ID NO: 244256 - DNA, 201 bp, Homo sapiens
aaataaataacataaaatgaaagatatcttccaagtaatttatgtttgtttttatctttgatagtattaaatttgatatctgctggtttatgtatattgcrgatgttccttgcttttttgtttcaatctctgcaaaagacattgtttggcttttttgataccagtgttcaaattgtacatatcatacacacttggagaaca

SEQ ID NO: 244257 - DNA, 201 bp, Homo sapiens
taactttctggacatatggaatagattcataataactgttttaatgaccttgtttgcaaattctaatgtcttttttagttcttggtcaattttgtttgatwgactttttatccttgctattggttatattttcctatatctttgcatgcctagtaatttttgatggatgccagacatcgtgaattgtagggtgctggatat

SEQ ID NO: 244258 - DNA, 201 bp, Homo sapiens
atttgatatctgctggtttatgtatattgcagatgttccttgcttttttgtttcaatctctgcaaaagacattgtttggcttttttgataccagtgttcarattgtacatatcatacacacttggagaacattagtatttttcacctctgtaattttatatggcagtaaatttcattcacatgtgcatgctcaccccccac

SEQ ID NO: 244259 - DNA, 201 bp, Homo sapiens
ttgggccttatgtcaaataaaaccactgcttgaaaactaaacaaattgctttcaatgggttattattgccttaccaagaccacatcctgatgatttccccygtcacaacaagactttcttcatagtggatccattgttattattttcataaaaggctcaacttaaattacatgcaatagaagcaccatcatcaggtgccct

SEQ ID NO: 244260 - DNA, 201 bp, Homo sapiens
ccattggatggggtgaagttggagagaggaaatggggagatttaggccaaagaatacaaaatagcacatgtgttggattactaattaagagatctcatgtrcaacatgaggattaaagttaataaaattgtacagtattagggatttttgttaagtagattttagctgctcttgtcacacacaaatagtaactatgtgaga

SEQ ID NO: 244261 - DNA, 201 bp, Homo sapiens
aaggtcttttgtaaggctgaagttagctgggtttaggggctatgttagcatattcggaaatattatgcatatggtaaaccatagcaatacaatacaaaggyaatacaaataactgagcttgatttactaatttgaatgtcaataccaatagttcagatatgaagagatgcctattgactgagtgatcctctttccctttct

SEQ ID NO: 244262 - DNA, 201 bp, Homo sapiens
tcttccctttaaactaaggagaaacatccataacaccaatctaaacaacagcaagaaagtaggaatgtgagtattcagtccttgaaagattaattgtcacktttggtgacattaaaatactgccaaagttctattattagtcatgttcatgcctgaagagaaagtaaaacttgagaagaaatgttacaaatcagtttatta

SEQ ID NO: 244263 - DNA, 201 bp, Homo sapiens
aaaaaaatctaaattgtattgcataatatggcatttgtgggttttactacaacaatctaagatgctcataagtttaaaaaggttaaatatgaatatattcscttcaaagttcgagaaacagatttgttttcataaaatgaaaaaattttctatttttattaccattaaatgagaaaataagaaattaagtcactgaattct

SEQ ID NO: 244264 - DNA, 201 bp, Homo sapiens
aaaaacagtaaattaattatttaaaaaacttgttgagaaattctcattgaagagagacatgttcttgagccaaggagaaacttggttctagtataatatasaacacatctttatgtcagaaaaatactatacaaattccctgttaggagactcagaattcggtgagaaaagcagatactgtaagaatagtaatcttatttt

SEQ ID NO: 244265 - DNA, 201 bp, Homo sapiens
ctcagaaatcggggttggcaaatctctaagggcatattatagagtgtcttagtccatttgtactgctgtaacaaaataccacagatgcagtaatgtatgayaagcagaaatgtatttactcacagttctggaggctgggatcaagtccaagatcaaggtgccagcagatttgattgtcttgtgaggtctttctctgcctcc

SEQ ID NO: 244266 - DNA, 201 bp, Homo sapiens
tacttataatctcctgtgtttctcaacccctttctaccctattagatagacaggactctgggagtgtgggttgggagagaatctcaatgagagattctgtrctacttcagattgtgcctcctcctctgatgactaaatctttcttatgggccaagctcctgtgactctcaccctaaagtggggttctactcaatctcaccg

SEQ ID NO: 244267 - DNA, 201 bp, Homo sapiens
gccacagtgtactcattcaatcaacacgtaggcctctactatgtgccaggctttacaaaacaggtataacagtagctgaaatggtagtagctagcttttgyttaccacttagtcatttaatcctcactaaaatcgtatgcagatggtactttaaaaagttggtattttcacagataaaggaaccaaggcacagagccatta

SEQ ID NO: 244268 - DNA, 201 bp, Homo sapiens
gaaggctgagcaagaaggctagctctgttagcttatcagaaagctttactgataaggagagatttgtgctgagtgaattaagggaagcattatgtagatakgtggggaaagaatattccacacaggaaaaaagcaaatacagaagctctctcagggtggggcaaataagcaggtcttgacatgtttaagaaacttcaaggc

SEQ ID NO: 244269 - DNA, 201 bp, Homo sapiens
tagcaatacaatacaaaggcaatacaaataactgagcttgatttactaatttgaatgtcaataccaatagttcagatatgaagagatgcctattgactgartgatcctctttccctttctcataaagatttatgtgttaaggcaaaacaactatctacaatctttagtagacatatgcatttatttttacttctaagtaaa

SEQ ID NO: 244270 - DNA, 201 bp, Homo sapiens
acaaggtcaacaaaaccaagggaggtgatgcaggaggaaagacttcgttttctctctctgctcctaaattggtttctggtcatctaaatcccccaatccawtaccagagagtgagagcaggggaaggcagtattcattcattccaattttcatgcatgatctaactcaacaatttttaacgtaccagtgacttcaacaaag

SEQ ID NO: 244271 - DNA, 201 bp, Homo sapiens
aaatggggaatatctctgaagcaaataatggcatcagtgctataatgcacaagaaatcttaagatccgcatcaaagggatatgaatttgatagatactaamgagttttgatctttgtccactcctgggttcaggaggaagccagtaaaattccttcctggaggaatgtatttctaatttagaccctcaatatatgcagaga

SEQ ID NO: 244272 - DNA, 201 bp, Homo sapiens
ggagtacaagcactggaaagtcttattcaccattttgctgacatccagatcctataaactttcttgaggggaaaaattccgtttaatcctattcttgcacktcacatgtagtaagaacctactatgttgagggctctgtgctgatctttggaaataaaaagtgaatgactaacacttccaaataaattatgtagatactct

SEQ ID NO: 244273 - DNA, 201 bp, Homo sapiens
tgccatacgagggtgtcacagtggggactagagggaacggaggacgggggcgttccctgagcgcctagcaggctgcgtttgtttggctttgaagccgttayccccttgtccgcaatgagaggtgctggtgtcaggcctgtgtgtctgtgatgtgacagagcgggactgagctctctccagatccgaggcgcggttgtcagg

SEQ ID NO: 244274 - DNA, 201 bp, Homo sapiens
aggcctggatgttttctgatgccccagaaatctttctaatcctgtaattaaaaacagcacagaataagttgcatttaagaaatcagcaatcatgtttaaargatatcttttgaccttctttttcgtacttttgatttttattatggaaattattgtgactgaaaatttgttgtttaatatatttgccttttaccacagata

SEQ ID NO: 244275 - DNA, 201 bp, Homo sapiens
ttaaactagctaatgtatactttattttcattatgcttttgttctgtcatcaggtaagagacgtgtacacatggcaagcaagatgattgggaggttagaawgggcacttgctggcaaacctatttttgacggagaaaaactgtactatcccagcatagtcatagaaactgcaggttctggctgctttcaacccttcttttt

SEQ ID NO: 244276 - DNA, 201 bp, Homo sapiens
tcattttgccacacctctagaagaaagtcaaaggatttgagtcgtagataatatacctccccacccctgcccccagcataagcaaacaatgcacacacatrccctacttatttctgcatcagttgattcatgacataatcaaaatatctctttttcagtttaaaagtttatcatatttgaactttagccaaattattttct

SEQ ID NO: 244277 - DNA, 201 bp, Homo sapiens
cagaccaatattgaatgaccatcttagttttaaaaattatttttcttttatgttcatataatttcctttaaaattctaactagtagaaaaaagatttgttsagtgtttaagaaaatgtcaagtgaatgctgatttactatttttgaactagaattggcaaatagatttcctcctaaggggggtggggtgagatggaagaaa

SEQ ID NO: 244278 - DNA, 201 bp, Homo sapiens
atctttactacaaaatggacacggttagatgcacataaggttgtgcagaaggaagttaaggagttttaaattaaataccagtttatgggtaggagacagatttttttttttaaccttgatcttcctgtttctttctttctgcagttcagcctgttgggctggcctttattggagagtcagaccagcactctgactagagag

SEQ ID NO: 244279 - DNA, 201 bp, Homo sapiens
ctgtatgtagcatctgtaccttctcattagtgaaatattgtagttatggacattttttgttattacatccaaatgtggctttttatttttgcttcattggtttttttttgtttgttttaaaatacaatttgtattactgtttaagttggtgggggctcttactgcttgaagccttttgctttcaatagacatcatacttaa

SEQ ID NO: 244280 - DNA, 201 bp, Homo sapiens
tgtatgtagcatctgtaccttctcattagtgaaatattgtagttatggacattttttgttattacatccaaatgtggctttttatttttgcttcattggtttttttttgtttgttttaaaatacaatttgtattactgtttaagttggtgggggctcttactgcttgaagccttttgctttcaatagacatcatacttaat

SEQ ID NO: 244281 - DNA, 201 bp, Homo sapiens
gtatgtagcatctgtaccttctcattagtgaaatattgtagttatggacattttttgttattacatccaaatgtggctttttatttttgcttcattggtttttttttgtttgttttaaaatacaatttgtattactgtttaagttggtgggggctcttactgcttgaagccttttgctttcaatagacatcatacttaatt

SEQ ID NO: 244282 - DNA, 201 bp, Homo sapiens
aatggaaatatacgtttctgttgcccatgggacaatcttaatgaatgcagcaagtaaaatgatcatattaatttgcactttcttattttctgtacctatcmttgccatagcaatagacttagtttatatgaaattaaaaaaaaaaatgtctagccaggtacagtggctcatgcctgtaatgccagcactttaggagactga

SEQ ID NO: 244283 - DNA, 201 bp, Homo sapiens
acagttatcactaattaaaaaatatttttccttctctatttcctgtctcttctaatgataagtaaataccaacccaaaaacttcttatgacacatgaatargcattttatttttacttatttttgtatgttctaagccactcctctcaataactcacacatggaccacttttaatgtggtcagggaaaattttttcccaaa

SEQ ID NO: 244284 - DNA, 201 bp, Homo sapiens
gcatctgtaccttctcattagtgaaatattgtagttatggacattttttgttattacatccaaatgtggctttttatttttgcttcattggtttttttttgtttgttttaaaatacaatttgtattactgtttaagttggtgggggctcttactgcttgaagccttttgctttcaatagacatcatacttaatttttattg

SEQ ID NO: 244285 - DNA, 201 bp, Homo sapiens
actttcttattttctgtacctatccttgccatagcaatagacttagtttatatgaaattaaaaaaaaaaatgtctagccaggtacagtggctcatgcctgyaatgccagcactttaggagactgaggtgggtggatcacttgaagtcaggagttcaagaccagcctggccaacatggcaaaactctgtctctactaaaaat

SEQ ID NO: 244286 - DNA, 201 bp, Homo sapiens
gttcacttgccccaccatctattttggtatttcatcatttccttattaggctagaggcctgacaccgctttaccaaataagttttatgtacacttttaccttttttttttttttttaatgacccaggttatcttgcgtttgcttgtctttctgttttagtccttttttcccctaataaaccatttaaacttggattatcta

SEQ ID NO: 244287 - DNA, 201 bp, Homo sapiens
gttttagtccttttttcccctaataaaccatttaaacttggattatctatatcattattatcatttttagagacaaggtcttgctctgtcacacaggctakaatgcagcagtgtgatcatagctcactgcagccttgaactcctgggctcagctgatcctcctgcctcagcttcccaaggagctgggactacaggcatata

SEQ ID NO: 244288 - DNA, 201 bp, Homo sapiens
tatttcctgtattttaattatgagagcaagctgctcctgtgtcttatgataacttcataaatttatgtatttctagatttttaaagtggtcatctttatayatgtgcagatcagattttaaatcagtcaatatagtcataaggggatggatcatactgttggcctgttgatgggagagaaccatgactctaatagctactg

SEQ ID NO: 244289 - DNA, 201 bp, Homo sapiens
atgtatttctagatttttaaagtggtcatctttatacatgtgcagatcagattttaaatcagtcaatatagtcataaggggatggatcatactgttggccwgttgatgggagagaaccatgactctaatagctactgctgaaataaacaaagaagcacacacacctctgcagaatatttgttcttgcaatcaatccatagt

SEQ ID NO: 244290 - DNA, 201 bp, Homo sapiens
aaatacaaattagtttagtttaaaaagtgggaggtgtttggagggggtcatttaaatgaattttcctagtgtccagctgcttagatgatgttatcaattcrgtgtatttaaactttgttattggaagtatgagttccagtcttgcctcttctgggttttatgtgcagtaatgctctccctccaaattttgacaataaccca

SEQ ID NO: 244291 - DNA, 201 bp, Homo sapiens
gctgacatgcatgtttgccagctagctgcacctccccaaatcctgcccttcccccgactcggagccttcttttgggacatgatctgagaaaatgtgatcayatgtgttgtttctcttcattctatgactggcaatgggggaacaaaaacaatctcggaagcgtatgagacttcagttttgtgtgtgtgtgcctgaggcact

SEQ ID NO: 244292 - DNA, 201 bp, Homo sapiens
gacatttttactttattattttattttattttatattcgggggatacatatgcaagtttgttacaagggtatattgtgtgatgctgaggtttgggcatctrtcgatcccatcactcaaatagtgaacatagtacccaataggaggtttttcagccctttgcgccatctctctggctcctcccttttggagtccccggtgcc

SEQ ID NO: 244293 - DNA, 201 bp, Homo sapiens
gcttcccaaatactctgggcatcccttgctaccctaaatggtaaatatccgtttctttttctgtctctccatctagactgggagctgcttagtgataactsctttgtctttcattaaaaaaatctttacaactaaattccagtaattctccatagaaagtgtttggtaagttttgaacaaatgattagacatcctttgtgg

SEQ ID NO: 244294 - DNA, 201 bp, Homo sapiens
ttttaaaacagcttttctttttcatgtcagcaaattcatgagttaacattcatgtactaacattaactcccattttggacttgctcattatgcagtggtaratagtggctggttaatgttttctctttcaaaaatgtgattatacttagttatttataagtaattcccccttttttacctttcatttttaaaactagaaat

SEQ ID NO: 244295 - DNA, 201 bp, Homo sapiens
tggtaagtggcaactatgcagttgagttggagtgaggaaagacgggggccaggagcttgggaggctattacagcggtccagccaacggggagtctaaactraggtagtaattgtgatgatggggaagacaaaatggatatgatagatatttaaaagatgaggaacggagatgataaggggagtctgggattctttcacatg

SEQ ID NO: 244296 - DNA, 201 bp, Homo sapiens
aaagaagttgctctcaatattgatgagtaagagaagttccgatatacacagtcattgtttcactttcttcttacttattaatgcaaaagaaaatattattwgtgtcagaacctaccaggtttggtaagtattaatgaaagcattttgtaagaaacagttggctatatggaattttcagtaaaggatattatatgttttatt

SEQ ID NO: 244297 - DNA, 201 bp, Homo sapiens
ttgtaagaaacagttggctatatggaattttcagtaaaggatattatatgttttattattatttgtcaattgtgtgctgtatctcctttattttagtacartttataatgaacatatatatgtgtgtatatacacttttattttgatgagagccagttgttaacatttatcagcacacagtggctatatatatgggatgtg

SEQ ID NO: 244298 - DNA, 201 bp, Homo sapiens
gaaataggaagaaataagatatagactattgtgggaaaattaaccttgaacacaggaaggacccctattcctgtaaggatgaggaaatgataaacataagwtgtgataaattaagtacacgtacattaaaatcacgtacatcagtgaattgtaatttaagaaataagaaggatgaggtcaggaaaagaagctcagaaagat

SEQ ID NO: 244299 - DNA, 201 bp, Homo sapiens
gcctactactttgggtcacagccaaattcagcagcgttgagtattttaggcaagaatgattctagttgatctgtggagctcatttattccatgttcctttytgaggcagatcccaaacatattcagactagtgtggacagggagcaggtgtacttgcttttcaacttgcaagagactgaccattgtgtttaggggattaac

SEQ ID NO: 244300 - DNA, 201 bp, Homo sapiens
ccatctttctgctttggcccaaatgatttaagagctaatgagctcatgctcctgcgtcttcgactcttgtgttaccgttttatcaaaatgaagtatgaagkttttttgcatctggcttctcttttgaagtgattctaactgcggagggattgctaactgaactgaacgcttcaagaaagccaatttattcagctggttgca

SEQ ID NO: 244301 - DNA, 201 bp, Homo sapiens
catccacgttttgaaattcaagaaaagccttctcatgtttctcaatggtttcatgctgagataattttcctgtgttagatcaaatttgctagcaattttcstggtgtatgttaatgaaaatttgatatgcattgctttgtttcttgcatatataaccataatttagattagttcattttttaggtaattgaatttttgaga

SEQ ID NO: 244302 - DNA, 201 bp, Homo sapiens
aataaatggaatttgatatgattcacactggtctaaaaattagaaagtctattatcatccttttctggttagtcttctttttcaattgcttatatacattrcattattttcattctttattatttgaaaccatacaattcagtttgtatagcactaaccgacgtaatatcaaacacaagttgagatgtcagaaacactatc

SEQ ID NO: 244303 - DNA, 201 bp, Homo sapiens
tgtttatgaaaggaacagagtacagaaataaatggaatttgatatgattcacactggtctaaaaattagaaagtctattatcatccttttctggttagtcwtctttttcaattgcttatatacattacattattttcattctttattatttgaaaccatacaattcagtttgtatagcactaaccgacgtaatatcaaaca

SEQ ID NO: 244304 - DNA, 201 bp, Homo sapiens
ttaacatatgtatcacataaaatatatatgttttggttaacatacgtatcaaataacatatgtatcaaataaaataataaaaatttatttttttattaacraataatagagttgatttaataaatcaactctattattctaggcagatttcatagcctaactccccttcaccaaattcagtgctgtatttcatagtgattg

SEQ ID NO: 244305 - DNA, 201 bp, Homo sapiens
aacctgggaggcggagcttgcagtgagccgagatcgcgccactgcactccagcctgggcaacagagcgagactctgtctcaaaaaataaaataaaaaattaaaaaaaaaaaaaagagaagagatagagagactgagatccccgcagggaaaacaccatgtgacatcagaggtggagactgggatgatgcagcattgaattg

SEQ ID NO: 244306 - DNA, 201 bp, Homo sapiens
aagaattaatatacttacttattgttattacagtgatgttatgagtcctctagaagtgaaagatgactgtcagatagagaaggggtggggaaggacagatratatgcatattaatgttagagaattagagaactgaggagtctcactgaagactccagggttggaaaagaagatgagtagacacagaattcaatgatgaag

SEQ ID NO: 244307 - DNA, 201 bp, Homo sapiens
aaaggcaacttctattttgtgcctttgttttcccatcacaaagtgagcggtggatgagatttttttctaaagaacctctttgaacacaaccattccattamataatgtaaacgcagatattaagtgcacatattgttttgtgatttaaatggtaaatgaatgaagtactcctgaatggggttgacgattctcagaatggcg

SEQ ID NO: 244308 - DNA, 201 bp, Homo sapiens
ctgggtgttcattctgtcaattggtaggtttaataaagagagaaaggacaggacatgtagctaatacagccaaggtaaggtgagcaccataagaatatgcaaaaaaaaaaaaaaaccattgaaattatctataaaggagttgaaaaaacagcttttaatcaacattcaataattgaaccttttaagggagcagtacacaga

SEQ ID NO: 244309 - DNA, 201 bp, Homo sapiens
aagaatgaattccagcttttcaacgtgaatttcaaagcatcaggaacactgaggcctaaaccttactgtcttatactaacaagagtcttactgttttatartaactacattctttttacaggcattactaatgattgcaatttatttttagataaaaaaggttattattgagagtaggattagacactctgaaactcttaa

SEQ ID NO: 244310 - DNA, 201 bp, Homo sapiens
acattaaagcagaaagagtgtgttcttgagtctgtaatactgaggtattatcttcttatatttttgataaatagccagatttgatgatgaggagggagaarggtgtgttggaggaagttgactggtggctgagaacagctgcagcagtcctggggaatgagggtacccccccatcttttaccctttgtctcagccatatca

SEQ ID NO: 244311 - DNA, 201 bp, Homo sapiens
tgtcagtggctgatcatagccttcgaatgccttgttagatagtggtattcctaaatcctattacctgaaggagaactgtttatgaaaggaacagagtacasaaataaatggaatttgatatgattcacactggtctaaaaattagaaagtctattatcatccttttctggttagtcttctttttcaattgcttatatacat

SEQ ID NO: 244312 - DNA, 201 bp, Homo sapiens
tcttgagtctgtaatactgaggtattatcttcttatatttttgataaatagccagatttgatgatgaggagggagaagggtgtgttggaggaagttgactsgtggctgagaacagctgcagcagtcctggggaatgagggtacccccccatcttttaccctttgtctcagccatatcaattcctgccacccgggacactgc

SEQ ID NO: 244313 - DNA, 201 bp, Homo sapiens
aatatgttttaccaaaacttttctgagaggttggtgggtcactttgtattgctctttctgatcttatattcatttaagtaccaaagagtagagggactttmgtaagcagtataaaactaaattatatgttgatttttccgtgggctgttaatgtcttgttaccgtgaggtggaaagggctgcttcgtggtttctggcttgg

SEQ ID NO: 244314 - DNA, 201 bp, Homo sapiens
tggcacagagatcctctgttgagacgctgagtttctaggactttcctgaatctcttttttccaagggaatgtatatatacactaacacatatatatatgcktgtgtgtgtgtgtgtgtgtgtgttaaatggagcaacaagatgaggactggctcatgatatatatgatttgtttcttaagtgatgataaaataaattctga

SEQ ID NO: 244315 - DNA, 201 bp, Homo sapiens
aatggtaaatgaatgaagtactcctgaatggggttgacgattctcagaatggcgccttctctttgcctggaaggtggacactttatattagcaaacttttytaagcttcccagtgtatctccattacttgagtttcattagagaagtggcattatctagctgggatgcagaaatgtaaatttctggctttcaatgtccata

SEQ ID NO: 244316 - DNA, 201 bp, Homo sapiens
ttattctttgtggaggttccatcacatgggcaagattgatcaaattattggcccttgataatcaactctacctccagcctctctctcctccccagaggttrggctgtggggataaatatttcaatcttctaatcatattgttggttcctctggaaaggagccaccatcctgaggctatccaggagcccccagcccccagtc

SEQ ID NO: 244317 - DNA, 201 bp, Homo sapiens
ggcacagagatcctctgttgagacgctgagtttctaggactttcctgaatctcttttttccaagggaatgtatatatacactaacacatatatatatgcgtgtgtgtgtgtgtgtgtgtgtgttaaatggagcaacaagatgaggactggctcatgatatatatgatttgtttcttaagtgatgataaaataaattctgaa

SEQ ID NO: 244318 - DNA, 201 bp, Homo sapiens
tttgcctggaaggtggacactttatattagcaaacttttctaagcttcccagtgtatctccattacttgagtttcattagagaagtggcattatctagctrggatgcagaaatgtaaatttctggctttcaatgtccatatttatttaagaaccagatttaattcataagactcctgccattttgaactatggcctgtctg

SEQ ID NO: 244319 - DNA, 201 bp, Homo sapiens
ttatgctaggataacttccagaactcaggaaatcagtttacctactagattactgttttactatgagagacacaactcaggaacagccagatggaagagaygcatgggaagaggtatggaggaggggcacaaagcttccattgcctctccaagtgtgccacccttgcagtttctccacatgttcaccagcctggaaactct

SEQ ID NO: 244320 - DNA, 201 bp, Homo sapiens
tttttagtaaggtgattggtgcaagaccttttcaaatgatattgtttctttatatcagaatcccaatgtgccctgctcccccttccctaaataaagtgacttattttttatttgattttacttttgtatagcaccctaaggttaacagtctttcaaaataactctcagaattaaatcaactggctgtgaactttgggccct

SEQ ID NO: 244321 - DNA, 201 bp, Homo sapiens
tttaaaatgtaatgaagtaggaaatgtcttactattttgacaaaaatacaaaatcctcttaggaagataattgtgtttgtttgcaaaaatttctttctttyttttttttttttaaaaaggtagtatttaccatattcttttttttttcttttttttattatactttaagttttaggatacatgtgcacattgtgcaggtta

SEQ ID NO: 244322 - DNA, 201 bp, Homo sapiens
ttgatgtgctgctggattcgttttgccagtattttattgagaatttttgcatcaatgttcatcaaggatattggtctaaaattctcttttttggttgtgtmtctgcccggctttggaatcagaatgatgctggcctcataaaatgagttaggaaggattccctctttttctattgatcggaatagtttcagaaggaatggt

SEQ ID NO: 244323 - DNA, 201 bp, Homo sapiens
gcctcataaaatgagttaggaaggattccctctttttctattgatcggaatagtttcagaaggaatggtaccagttcctccttgtacctctggtagaattyggctgtgaatccatctggtcctggactctttttggttggtaagctattgattattgccacaatttcagatcctgttattggtctattcagagattcaact

SEQ ID NO: 244324 - DNA, 201 bp, Homo sapiens
caacttatactgccttactcttttaatttaatatgaaatagaactgtcattaactgaaagggaaattgcttcagtgaatatatttgtgaagaaataaaatygcttcagtgaatatatttgtgaagaaataaaattcatgagatattataaatttgatttgccttcaaaattttaatttaacttttaaaattagttacaaaa

SEQ ID NO: 244325 - DNA, 201 bp, Homo sapiens
accagttcctccttgtacctctggtagaatttggctgtgaatccatctggtcctggactctttttggttggtaagctattgattattgccacaatttcagmtcctgttattggtctattcagagattcaacttcttcctggtttagtcttgggagagtgtatgtgttgaggaagttatgcattagtactagattttctagt

SEQ ID NO: 244326 - DNA, 201 bp, Homo sapiens
acttcttcctggtttagtcttgggagagtgtatgtgttgaggaagttatgcattagtactagattttctagtttatttgcatagaggtgtttgtagtattytgtgatggtagtttgtatttctgtgggatcggtgatgatatcccctttatcattttttattgcatctatttgattcttctctctttttttctttattagt

SEQ ID NO: 244327 - DNA, 201 bp, Homo sapiens
ttcttcctggtttagtcttgggagagtgtatgtgttgaggaagttatgcattagtactagattttctagtttatttgcatagaggtgtttgtagtattctstgatggtagtttgtatttctgtgggatcggtgatgatatcccctttatcattttttattgcatctatttgattcttctctctttttttctttattagtct

SEQ ID NO: 244328 - DNA, 201 bp, Homo sapiens
actggtgacataaagcaataagaagtacgaataccacccctaccctgggaaaaacaacatgtgaacagtctagtgtatagataccactggatgcccttttstcatgctaataagagccacaactttcccaacatttttctgttaaatagattaaatatacttgggaagaaatggatggaccccgccccttactccatttgc

SEQ ID NO: 244329 - DNA, 201 bp, Homo sapiens
ccagttttccacagaaatgtttgagacaagcaaagaaacaagaaagaatgccccacacagaggaaaaacaaatcagtcaataataactgtccctgagttasctcagttatcagacttactagacaaaaactaagctagatatttttaataatttaaagaagtaagttaagccatgtctaaagattgtatgaggatgtatga

SEQ ID NO: 244330 - DNA, 201 bp, Homo sapiens
ggagaattgcttgaactcaggaggcaggaggcggaggttgcagtgagccacgatcgcaccattacactctagcctgggtgacagagcgagactccatctcaaaaaaaaaaaaaagagtgtctctttttattttacctattaatttggtgcacagtatggctgtgcatgatgtattcttagtgtaggcattatacaaaaatc

SEQ ID NO: 244331 - DNA, 201 bp, Homo sapiens
tcttatgtcaaactgattttgaggctctgttcaaacaggaagtgaaggtccaggtagagttgtcagctgcctggctaaatatttaaaatgtgccctaacasacacacacacacacacacacacacacacacacacacacacagagcccctcggcaaaggctgggggagtgctggttttaagcattaaaagaaatatattta

SEQ ID NO: 244332 - DNA, 201 bp, Homo sapiens
taatctaaagtgctcagccataatcccattactaattcttgttggttatttgcattcccatatttttcccagtgtgatttgtctttgcactttattagggttttttttttttttttaagtgcacaaatattttaattcaaagtcggcacgttctgccatttcctacttgaagtaagatatccctcttcatttttaaataaa

SEQ ID NO: 244333 - DNA, 201 bp, Homo sapiens
tggtattttaacagtgctatttaaaggtacgccatgtgcgtcttgaatgcagttaccccaataaactttgttggtgctaacacggccttttaatgcactarttcacacacttcatgacgcaatctgggtcgtgattgattcggtatttttagcaattgcggggcttagggaaatatattatgaccaataacatatgcactg

SEQ ID NO: 244334 - DNA, 201 bp, Homo sapiens
aatctaaagtgctcagccataatcccattactaattcttgttggttatttgcattcccatatttttcccagtgtgatttgtctttgcactttattagggttttttttttttttttaagtgcacaaatattttaattcaaagtcggcacgttctgccatttcctacttgaagtaagatatccctcttcatttttaaataaag

SEQ ID NO: 244335 - DNA, 201 bp, Homo sapiens
gggattctggagaaacctagtagaaaagagggtcacagatgtgttagcggtgaaaagaattggaccaaacgcacagacaaagcaaggaaagaataaagtgwcaacagcagagatttgctgaaaatgaaagtacactccacggggtgggagtggcctgagcataggggctcaagagccctgttatggaattttctggggtca

SEQ ID NO: 244336 - DNA, 201 bp, Homo sapiens
tggaccaaacgcacagacaaagcaaggaaagaataaagtgacaacagcagagatttgctgaaaatgaaagtacactccacggggtgggagtggcctgagcmtaggggctcaagagccctgttatggaattttctggggtcaaataccctctagaggtttcccattggttacttgatatacaccctatgtaaatgaagtagc

SEQ ID NO: 244337 - DNA, 201 bp, Homo sapiens
tgacaacagcagagatttgctgaaaatgaaagtacactccacggggtgggagtggcctgagcataggggctcaagagccctgttatggaattttctggggtcaaataccctctagaggtttcccattggttacttgatatacaccctatgtaaatgaagtagcagcccacgaccagtctgattggttgcagaaagtgacca

SEQ ID NO: 244338 - DNA, 201 bp, Homo sapiens
ggcgcccaccaccatgcctggctaattttttgtatttttagtagagatggggtttcacaatcttggccaggctggtctcaaactcctgacctcaagtgatscacccaccttggtctcccaaagggtgatattattattatagtaaatatcacattgaacaatttttatctaaaactaatgtcagaatgtccatttcttgat

SEQ ID NO: 244339 - DNA, 201 bp, Homo sapiens
tgttggaatctatttttaggagccactgcatatccttgtgttttcttgctgtgcctaaatgtagatccttctattctacttttactccatttattttccaratgatataaagaggacatattctcacatctggaagttaatgccttggttctagtttattctccctccaagcacactaaagactttttcatttcctagcat

SEQ ID NO: 244340 - DNA, 201 bp, Homo sapiens
atgttatttattttttctcccaattatagtgatcctctccataattaataatctatcagcctcttccagtttgaataacttcctttcagtttagaaatactgtcttttcaagatcaccttattattggacttaatgtctttaggtaattgcttagcctctcagattcctctttgaagatggcatttgggcacctgagggag

SEQ ID NO: 244341 - DNA, 201 bp, Homo sapiens
ttgggcttttagctctgacatcagtcataaaaattttgtctcccaaattggttgccaagaacctatagttctttgtttcaacaaagaatgttttctgagcrtgacaattgtgtgcatataattgtatatgataataagtatatatacacacactatttacatgttatatacatacatacactgataatgtactatatttta

SEQ ID NO: 244342 - DNA, 201 bp, Homo sapiens
tgctctcagggccttcttctgcctgagaacactctgcagtcagggcccaccggtgtgcatgtaagagcacagagataataagcaaagctatggttcaggtwaaaaatacctttagtatatacatgtctgtcatgccatcctgagattctcttttgaggcaattttaaaaatatgattactgagaagtgtgtataagctcag

SEQ ID NO: 244343 - DNA, 201 bp, Homo sapiens
gactcaaaccatggacttaccattatttatcttgagggattctccaccccctgaaatctcacagttaaaacgtttccctttaatgttgccttcgaattttctcatgcttatttagtctctttacatgccatcctactctttggttgttctggtctcccataaactttccgatattgaatgtttcccagcaagctacttggt

SEQ ID NO: 244344 - DNA, 201 bp, Homo sapiens
gcttcctggcctttgattatgtatttgctccattatccaatcagaaaggatactgatttcccaacaggctgtagtagacgagaagtttttgtttcaaattmtctaaatatatggagttctgtccaaagggttgcctctgagatcaccaccagcccacatattcttactttcaagtcttccaaattctgcagctgcagggct

SEQ ID NO: 244345 - DNA, 201 bp, Homo sapiens
ggacattaaaacattttatatccacaataaaattacttttcatgccatttctatttgaatggtatataaaagatatatctagtacagaattttgtatatatatatatatatatatatatatatatatatgtaggaattcgtttgttacagaaagattcatagcagaataattacacagaattttagagtgaacaggacttg

SEQ ID NO: 244346 - DNA, 201 bp, Homo sapiens
gacattaaaacattttatatccacaataaaattacttttcatgccatttctatttgaatggtatataaaagatatatctagtacagaattttgtatatatatatatatatatatatatatatatatatgtaggaattcgtttgttacagaaagattcatagcagaataattacacagaattttagagtgaacaggacttgt

SEQ ID NO: 244347 - DNA, 201 bp, Homo sapiens
acattaaaacattttatatccacaataaaattacttttcatgccatttctatttgaatggtatataaaagatatatctagtacagaattttgtatatatatatatatatatatatatatatatatatgtaggaattcgtttgttacagaaagattcatagcagaataattacacagaattttagagtgaacaggacttgtt

SEQ ID NO: 244348 - DNA, 201 bp, Homo sapiens
cattaaaacattttatatccacaataaaattacttttcatgccatttctatttgaatggtatataaaagatatatctagtacagaattttgtatatatatatatatatatatatatatatatatatgtaggaattcgtttgttacagaaagattcatagcagaataattacacagaattttagagtgaacaggacttgttt

SEQ ID NO: 244349 - DNA, 201 bp, Homo sapiens
tggacgtggttatttcctctgcatagaactgcacttctcccacctttacctgtcaacatctcactaagccctggaggatcctctttcaaagcaaatgaatstctgcctttcagccacaacactctgcttatacctatcacgtggcactgatcccagttagtatattattcattcttgagaccatgagcacctaggagaaaa

SEQ ID NO: 244350 - DNA, 201 bp, Homo sapiens
gatgggttttcaccatgttggacaggctggtctcaaattcctgacttcatgatctgcccgccttggcctcccagagtgctgggattacgggtgtgagccamcgtgcccggcctaaagaaacatttattaatctagtactcaatcttggttaataattaatcatcttaatatatgaaatatgttaaaatatttatataatat

SEQ ID NO: 244351 - DNA, 201 bp, Homo sapiens
ggtggcacgcccctataatcccagctacttgggaggctgaggcagaattgcttgaacccaggagggggaggttacagtgagccaagatcacggcactgcaytccagcatgggcgacagagcaagactccattgcagggggggtaaaaaaagcattgggatgagaggtctggtctatttgtgtcagagtcctgtgtgcttct

SEQ ID NO: 244352 - DNA, 201 bp, Homo sapiens
acaaattagttttttgatgtttgttgtagcagaagttgatcacagggtatggtattaatgggaaacactgtatgttaaagttattaactattgttttggatttttttttttttttactactttaacttcacagttaagtgattcattcttttgccatttgtaagtcaaaacttctcaatctgatattcaagtttgaaacat

SEQ ID NO: 244353 - DNA, 201 bp, Homo sapiens
gctgcaagatatgtgggactggctgggtgcagtggctcacacctgtaatcccagcactttgggaggccgaggcgagtggatcacctgaggtcaggagttcragaccatcctggccaacatggtgaaaccctgtctttactaagaatacaaaattagccaggcatggtggcacatgcctgtagtctcagctacctgggaggc

SEQ ID NO: 244354 - DNA, 201 bp, Homo sapiens
caaatgaagcattttattcattctctagtttttgaaggacagtgctttaataagtgaggcataaaccttttctgaaaatgttcagtataaatttgttttgaacatttatttgtttttatatttgcttttcacaattaattttggtgggtaattcaacttatataattttcattattgtaacactacaaacaaactccataa

SEQ ID NO: 244355 - DNA, 201 bp, Homo sapiens
ttttagcagaaattgttctgagcttaccaggtagcaccatagttgtagagactatttctcaatgaaaaatattgcagtatcttgagaaggataaattaaaratgctaaaaatttcaaacttattaaccatacaattaagttttcaagattataggcaattctatcaaaaagcctaaagtatttagaccccgttgaaacaaa

SEQ ID NO: 244356 - DNA, 201 bp, Homo sapiens
ctctaacttgttgtagggttagaaagctaagaattgtgttaaataaaattgttaaaagatcacaagttctgaggaggtgcaaatgtcttgttttttttttkttttttttgtgtgtgtgtgtgtgtgtgtgtgtgtgtgcgcgcatgtgtctctgtgtgtgtgttttaaatagagttttgttcttgttgcccaggctggagt

SEQ ID NO: 244357 - DNA, 201 bp, Homo sapiens
ggcatgtgaatattcttagaaaactacttagttcactgtgaatgtgtgttgttattatttattgtatttgttccatgtgattaggccccttgcatttaatkctctttttttttttaaaaaaaaaaaaaaagctttgttttatgcagaatttctcccctttgatccatttgggaagtcttgctatttacagtcacaaacttt

SEQ ID NO: 244358 - DNA, 201 bp, Homo sapiens
tcattctaaaagtttgccttaaagcaccctgaaagggttactaaattaaggttaaatctcaagtataaattttcaagcaattagttttggttttgcctgcrcagaataccctgcagatgatgccgaataaaaactatttacacactaccatagtgcatttcttgtaaaaatattgggtctgtagcaacaatttgctaatca

SEQ ID NO: 244359 - DNA, 201 bp, Homo sapiens
agagtttgaagttacagtgggccttgatcgcaccactgcactgcagcctgggcgacagagcaagatcctgtcttaaaaaaaaaaaaaaaaaaaaaaaaaarggaaaagtaggtaattatttacataactagtataactagcattctgtcaagggctatcattgacttttttgtcttcttaagagtaagaaaagtatttgtt

SEQ ID NO: 244360 - DNA, 201 bp, Homo sapiens
ctaacttgttgtagggttagaaagctaagaattgtgttaaataaaattgttaaaagatcacaagttctgaggaggtgcaaatgtcttgttttttttttttkttttttgtgtgtgtgtgtgtgtgtgtgtgtgtgtgcgcgcatgtgtctctgtgtgtgtgttttaaatagagttttgttcttgttgcccaggctggagtgc

SEQ ID NO: 244361 - DNA, 201 bp, Homo sapiens
caaagcttatgatgtactccaaagttgagtaaaaagggcttaggaattttacatggttcttgagtcaccgaatacatcttttggaatttatttattttatytttttgcttgcttccccagtaacttaaattctgattaatgcaggcttttctttggtactagtagctctgtagtggtgggaaaactgactaaaacctatat

SEQ ID NO: 244362 - DNA, 201 bp, Homo sapiens
taccacatccttaggagctctcctgctgaggcaactacaaagaaacagtgattgcagcataatatcagacaggccagtaaaggattttctatgaattcgtaagcaaaatgatattaaagaacctggtctggacagtttttccactactttttgctgtggtaggcttaaaaaagcaccatcttctcattcctggaaaattcc

SEQ ID NO: 244363 - DNA, 201 bp, Homo sapiens
agggttagaaagctaagaattgtgttaaataaaattgttaaaagatcacaagttctgaggaggtgcaaatgtcttgtttttttttttttttttttgtgtgwgtgtgtgtgtgtgtgtgtgtgtgcgcgcatgtgtctctgtgtgtgtgttttaaatagagttttgttcttgttgcccaggctggagtgcaatggcatgatc

SEQ ID NO: 244364 - DNA, 201 bp, Homo sapiens
gttaaataaaattgttaaaagatcacaagttctgaggaggtgcaaatgtcttgtttttttttttttttttttgtgtgtgtgtgtgtgtgtgtgtgtgtgtscgcgcatgtgtctctgtgtgtgtgttttaaatagagttttgttcttgttgcccaggctggagtgcaatggcatgatcttggctcactgcaacctccgcct

SEQ ID NO: 244365 - DNA, 201 bp, Homo sapiens
tcctctccagcatttgttgtttcctgactctttaatgattgccattctaactggtgtgagatggtatctcattgtggttttgatttgcatttctctgatgrccagtgatgatgagcattttttcgtgtgtctattggcttcataaaagtcttcttttgagaagtgtctgttcatatcctttgcacactttttgatgggctg

SEQ ID NO: 244366 - DNA, 201 bp, Homo sapiens
tctattttggcttttgttgttgttgctttcggtgttttagtcatgaagtccttgcccatgcctatgtcctgaatggtattgcctaggttttcttctagggttttttttatggttttaggtctaacatttaagtctttaatccatcttgaattaatttttatataaggtgtaaggaagggatccagtttcagctttctacat

SEQ ID NO: 244367 - DNA, 201 bp, Homo sapiens
gaaggaatggtaccagttcctctttgtacttctggtagaattcggctgtgaattcgtctggttctggactttttttggttggtaggctgttaattattgcytcaatttcagagcctgttattggtctattcagaggttcaacttcttccttgtttagtcttgggagggtgtatgtgtctaggaatttatccatttctttta

SEQ ID NO: 244368 - DNA, 201 bp, Homo sapiens
cggtttagctttaatacaacctgctaaaatggcacagaatcaatactgcaatgaaaaacctctgtttctttgttgagtctggtgtctgtcaataggtttcyaggggcatctgatcattatttaagcttaaactcaattattcagaaaatgccctgtggccctagcatcagcataaaatagcagcaagaccttactaaactg

SEQ ID NO: 244369 - DNA, 201 bp, Homo sapiens
gaccttctgaagcctgcttctgtcagctcatcaaagtcattctccgtccagctttgttccattgctggcgaggagctgcgatcctttggaggagaagaggmgctctggattttagaattttcaacttttctgctctggtttctccctatctttgtggttttatctacctttggtctttgatgttggtgacctacagatggg

SEQ ID NO: 244370 - DNA, 201 bp, Homo sapiens
gcctcataaaatcagttacggagaattccctctttttctatttattggaatagtttcagaaggaatggtatcagctcctctttgtaactctggtagaattygggtgtgaatccatctggtattggactttttttggttggtaggctattaattattgcctcaatttcggagcctgttattggtctgttcatagattcaact

SEQ ID NO: 244371 - DNA, 201 bp, Homo sapiens
ttaacacctgctgaagagtattcagtttttttatccagatacatacagaccatgttatgaaaagcagccctgtgcactggtgaagagccagattggtgccrgtcttggttgtgatacttcttagctgtgggatcttgggctttgggtcccttatctgtaaaatagagataataataggacctaatccataaagttatttta

SEQ ID NO: 244372 - DNA, 201 bp, Homo sapiens
cttctagaaattgttatatattgttttatgctcctttttttcaaaggatgttgaaaaggaattcagacactaaaccttttgttgaaacctagtacttaacagatagatatatatagagtattgtttttaatttggtgtttcattgtgtttttttcaataattgaagtgtacaattttgaatcgctgtaatatgtataaatt

SEQ ID NO: 244373 - DNA, 201 bp, Homo sapiens
ttctagaaattgttatatattgttttatgctcctttttttcaaaggatgttgaaaaggaattcagacactaaaccttttgttgaaacctagtacttaacagatagatatatatagagtattgtttttaatttggtgtttcattgtgtttttttcaataattgaagtgtacaattttgaatcgctgtaatatgtataaattg

SEQ ID NO: 244374 - DNA, 201 bp, Homo sapiens
tctagaaattgttatatattgttttatgctcctttttttcaaaggatgttgaaaaggaattcagacactaaaccttttgttgaaacctagtacttaacagatagatatatatagagtattgtttttaatttggtgtttcattgtgtttttttcaataattgaagtgtacaattttgaatcgctgtaatatgtataaattgt

SEQ ID NO: 244375 - DNA, 201 bp, Homo sapiens
ctagaaattgttatatattgttttatgctcctttttttcaaaggatgttgaaaaggaattcagacactaaaccttttgttgaaacctagtacttaacagatagatatatatagagtattgtttttaatttggtgtttcattgtgtttttttcaataattgaagtgtacaattttgaatcgctgtaatatgtataaattgta

SEQ ID NO: 244376 - DNA, 201 bp, Homo sapiens
tagtaactttgttctccttggtaggagctgaccttacactcaatatcaatctttaataatgaataattttctcttctgtaatcaaaaaaaattatagtacrgtacttcccacctttttcatgtcctagcacacatagaaaatggcaatatgtatacggcccaggtcactgcaggaggctgctcagcctctcctccctgccc

SEQ ID NO: 244377 - DNA, 201 bp, Homo sapiens
tttaaagaatgttcacttgaaacattcaaggcttgtgttaaagttttgtttgtgcaagtctatcataacctttacactcaacttggtttctctcttgctcmctaatttgtgagttctctggagcatttaacaggggtggatgacaccagggaataatcaatcttagcctaggaccctggtgcaggaatgaagatggagaga

SEQ ID NO: 244378 - DNA, 201 bp, Homo sapiens
cttgggaggctgaggcaggagaattgcatgaacctaggaagcggaggttgcagtgaactgatatcataccattacactccagcctgggagatagagggagactctgcctcaacaacaacaaaaaaaatttaaagacaatttatttgttagccaaacataaggccctagaatataggtattaaaatggtacaaccttgtttc

SEQ ID NO: 244379 - DNA, 201 bp, Homo sapiens
ccttctgaagcctgcttctgtcagctcatcaaagtcattctccgtccagctttgttccattgctggcgaggagctgcgatcctttggaggagaagaggtgytctggattttagaattttcaacttttctgctctggtttctccctatctttgtggttttatctacctttggtctttgatgttggtgacctacagatgggat

SEQ ID NO: 244380 - DNA, 201 bp, Homo sapiens
gcaggtctgttggaggttgctggaggtcctctccagacgccgtttgcctgggtatcaccagtggaggctgcagaacagcaaatattgctgcctgatccttyctctggaaacttcatcccagatgggcacctgcctgtatgaggtgtcattctgcccctgctgggagatgtctcccagttaggctacatggcggccagggac

SEQ ID NO: 244381 - DNA, 201 bp, Homo sapiens
gggacctgtgaggaaattcctttcaggggtcttggcatgagctgagagtttagagttcaaacatttcttactttggatcgaaatggaagtaaacagtagatttttttttttgttatgctcatgactgccaagatttttattttagggttggatgttattttagggttgaattttagggaggcatgatgagggtgatcagta

SEQ ID NO: 244382 - DNA, 201 bp, Homo sapiens
aaccaggcatctcagttggaaatgcagaaatctcctgtcttctgtgttgatcacgatgggagctgcagactggagctgttcctatttggccatcttggaayggaccagtccatagttttataatgcatgcctatgtgttgatttgtgttgctttggagttgctttaatatccaaatgaaagactcatgaccatattattgg

SEQ ID NO: 244383 - DNA, 201 bp, Homo sapiens
ctcctgtaagctccttatgaatagaatctgcatccctttggcttagcattatttttttaatagcagtatattacctgacacaaattaggtactcaagatcyattttggtagtaaaagacgagcaaaagttcagagagtatatgagtgcaaactttgggaaaggaaaggactctcggggcagttgggggtgccacagagttg

SEQ ID NO: 244384 - DNA, 201 bp, Homo sapiens
gaccaaattaaaaagttttcatgactgttgctgcaaaatttatgtttctgcaaaattcatattagaatcaataaacctgaatacatagaaacttgttcataaaaaaaaaaaaccttgccactgtgaggtttttttcctcttaagcaaaacaaaacaaacaaacaagaaaacaactctccgagataagtgaatcttctccca

SEQ ID NO: 244385 - DNA, 201 bp, Homo sapiens
ccactaacccccaaattagatcaggtcctccatgctttctcatgtctcccttacacttctgcattactccacaggacataagtgaaaattagatacatttstgtgcttatttgattcctttatgttttctcctgtaagctccttatgaatagaatctgcatccctttggcttagcattatttttttaatagcagtatatta

SEQ ID NO: 244386 - DNA, 201 bp, Homo sapiens
ccatcagatctcatgagacttattcactatcatgagaacagcatggaagaaacccacccccatgattcagttaactctccccaagtcccacccatgacacrtgggaattatgagagctacaattcaaggtgagatttgggtggggacacagctaaaccatatcagtcagggaagaaggattttggttatctgtgatcacaa

SEQ ID NO: 244387 - DNA, 201 bp, Homo sapiens
ctcccctctcctctttgacagagtcttgctctgtcacccaggctggagtgcagtggcacaatcttggcttactggaacctccacctccctagttcaagcarttcccttgcctcagcatcccgagtagctgggattacaggcacatgccaccatgctggctaattgttttgtatttttagtagagacagggtttcactatgt

SEQ ID NO: 244388 - DNA, 201 bp, Homo sapiens
atcacaaagctgccttgtactcctcaaaacgttcacatacctttttacagcagcagtagaatactgcaaatttaatggcttaaaacacacaaagtttgtcrgtcagaaatctaactaacccaggtctcactgagctaaaagcaatgtattggcaaggctgccttcatttgtggaggctctggggaaaaattggtttccttg

SEQ ID NO: 244389 - DNA, 201 bp, Homo sapiens
tgctggagtgcagtggcgcaatctcggctcactgcaagctccgcctcctgggttcacgccattctcctgcctcagcttcccgagtagctgggactacaggygcctgccaccacacccggctaattttttgtatttttagtagagacggggtttcaccgtgttagccaggatggtcttgatcttctgacctcgtgatccgcc

SEQ ID NO: 244390 - DNA, 201 bp, Homo sapiens
agtagctgggactacaggtgcctgccaccacacccggctaattttttgtatttttagtagagacggggtttcaccgtgttagccaggatggtcttgatctyctgacctcgtgatccgcccgcctcggcctcccaaagtgctgggattacaggcgtgagccacggcgcccagccatggtttgtttttttaaaaaaagccctt

SEQ ID NO: 244391 - DNA, 201 bp, Homo sapiens
tgggcaggaacatttatccaaactatattagcaggcaaatttttcaatataaattttgtttttaattttcatccagtgtcaacaaagccttagctgaaaaytgaggtgagatttggaagctcctggtaaaaagaaaaatctgccccctcttcatttatctttcctcctcttcccagggccatcattttatctctattttcc

SEQ ID NO: 244392 - DNA, 201 bp, Homo sapiens
ccaccacacccggctaattttttgtatttttagtagagacggggtttcaccgtgttagccaggatggtcttgatcttctgacctcgtgatccgcccgcctyggcctcccaaagtgctgggattacaggcgtgagccacggcgcccagccatggtttgtttttttaaaaaaagcccttgaatatttaagtaagcaaatgaac

SEQ ID NO: 244393 - DNA, 201 bp, Homo sapiens
accttatacaaaaattaattcaagatggattaaagacttaaatgtaaaacctcacaccataaaaaccctagaagaaaacctaggcagtttcattcaggacrtaggcatgagcaaagacttcatgacaaaaacgccaaaagcaattgcaacaaaagccaaaattgacaaatgggatctaattaaactaaagagcttctgcac

SEQ ID NO: 244394 - DNA, 201 bp, Homo sapiens
tttggaaaggcaatcaagacttcaagatgatcaactgttaggtttttaggagcacatttgcactctagaatgcctaacttggtgactttgtgtgtgtgtgktttttttttaactaacacaaaaaccaaacaaacttgaaagttagatttgcagttgtcattttgacctgtaaatcgtgttacatttttttttaacaaaatc

SEQ ID NO: 244395 - DNA, 201 bp, Homo sapiens
ggcctcataaaatcagttacggagaattccctctttttctatttattggaatagtttcagaaggaatggtatcagctcctctttgtaactctggtagaatwcgggtgtgaatccatctggtattggactttttttggttggtaggctattaattattgcctcaatttcggagcctgttattggtctgttcatagattcaac

SEQ ID NO: 244396 - DNA, 201 bp, Homo sapiens
atctgacaaaggtctaatatccagaatttacagggaacttaaacatatttacaagaaaaagacaaccctatcaaaaagtgggcaaaggatatgaacagacrcttctcaaaagaagacgtttacatagccagcgaacatgtgaaaaaatctcaacatcactgatcatcagagaaatgcaaatcaaaaccacaatgagatact

SEQ ID NO: 244397 - DNA, 201 bp, Homo sapiens
aaccccctgccgttcccagctaagaactgaaccaagttcataatccaaaggtgttgcaattattccgaaggccaaaaacagttagttgtctgtcatctgasagccataaaactgaggaaactaacatctgttagtgttggatataaaaggagcatagctattctttagaatttaatatagaaaaacgaagctaaattccaa

SEQ ID NO: 244398 - DNA, 201 bp, Homo sapiens
tgatttgtgtatgttgaaccagccttgcatcccagcgatgaagctgacttgatcgtggtggataaactttttgatatgctgctggattcggtttgccaggmttttattgaggatattcacattgatgttcatcagggatattggtctaaaattctctttttttgttgtgtctctgccaggctttggtatcaggatgaagct

SEQ ID NO: 244399 - DNA, 201 bp, Homo sapiens
actttatatgaatatctagagcataagggaaaacttactttacatctttgataataagaactaaccccctgccgttcccagctaagaactgaaccaagttyataatccaaaggtgttgcaattattccgaaggccaaaaacagttagttgtctgtcatctgagagccataaaactgaggaaactaacatctgttagtgttg

SEQ ID NO: 244400 - DNA, 201 bp, Homo sapiens
taggtgtaacttattaatacaaattcctaaagcatttctaattttacttctggcttcaccttttctttctatccttttatccaaatagaactctttctttmaacagtttgcaaagaaaagcatttctctatgaagttaatgcttctcaaattattatgcggtaaggggcaaggttttgtttacttacatttcatttcctat

SEQ ID NO: 244401 - DNA, 201 bp, Homo sapiens
ccacagtgacaagttttcattctatttaagacattttcttacatgctatgagttgagctgtgtgcttcctcaaacacttatctattttaaggggaaagtgttttttttttttaaagcggatacttctgtttaaatgccaaaataaatacatgttaaacaatattctctctgtcttatttttatttttaaaattttttgtta

SEQ ID NO: 244402 - DNA, 201 bp, Homo sapiens
ttttgtactgcagaaaaatatctattgatttaaagtggtcattttccaagaatgcttcaaggcagttgaattttaaacatttctaaagcaactagttttcatatatatatatataaatgcatagtgcaaccaaattagtaatttattttctcctggaacctttatgtctgaggataccagaagcaatttaaatattctgta

SEQ ID NO: 244403 - DNA, 201 bp, Homo sapiens
tttgtactgcagaaaaatatctattgatttaaagtggtcattttccaagaatgcttcaaggcagttgaattttaaacatttctaaagcaactagttttcatatatatatatataaatgcatagtgcaaccaaattagtaatttattttctcctggaacctttatgtctgaggataccagaagcaatttaaatattctgtat

SEQ ID NO: 244404 - DNA, 201 bp, Homo sapiens
cctaggcaaccactagtccactttttgcctccataaatttgtgtgttctgcatattttatgtaaatcgtattgtatggtatgtgtttttttgtttgttttkttgtttttgagatggagtcgcgctctgtcccccaggctggagtgcaatggcgcgatgttggctcactgcaatctccgccttccaggttcaagcaattctc

SEQ ID NO: 244405 - DNA, 201 bp, Homo sapiens
aaacgtatttttatgctcttttcttttttttttttcttttcttctttttttgagacagagtttcgctctgtcactcaggctggagtccagtggcctgatcrtggctcactgcagtctcagcctgctgcattcaagtgatcctcccacctcagcctcctgggactacaggcatttgacaacacgccaactaatttttttgtt

SEQ ID NO: 244406 - DNA, 201 bp, Homo sapiens
ggtatatgcccaaaggaatataaatcattctgctataaagacaaatgtacatgtatgtttattgcagcactatttacaatagcaaagacatggaaccaacycaaatgcccatcaatgatagactggctaaagaaaatgtggtacatatacaccatggaatactgtgcatccataaaaaggaatgagatcatgtcctttgca

SEQ ID NO: 244407 - DNA, 201 bp, Homo sapiens
aatatgtgatattaatttgcaaattttggaaataaaaatttttcatatattcttttgctttttttcactcaccatatttgcgatagtttatagtaaatataaactatttgtactaaatgttcgtgaattcttctttaaagtgttaaaacaatttactctcctccaagtagtctatgagtgtctcttgctctgtattttcag

SEQ ID NO: 244408 - DNA, 201 bp, Homo sapiens
caaagaagtgtttttctcacatttttaagagcatgagatatttttatgtgagcacaatgtgaaacacataaaaagatttaacttgtaaataacttgtgtgtgtgtgtgtgtgtgtgtgtgtgtgtgtgtgtacgtttgagacagagttttgctcttgttgcccaggctggagtacagtggcacgatctcagctcactgcaa

SEQ ID NO: 244409 - DNA, 201 bp, Homo sapiens
caacaactggataaagggggaagttgcctgcaaaggagacaagagactgtgtgtaaaggactgtgtgaacttggggctgattttatttcattttgggatargacagaattggttttaatgtatcttcttatgaatatagatttctggagaaaaaatacagtgaaactaagatttgattcacttgttctctttttaaggaat

SEQ ID NO: 244410 - DNA, 201 bp, Homo sapiens
tttccactggttgttttaccagtgggagcaggagtagaggatagtagatattaagactgtagtctctggagccaaactgtttggggtcaaatttggttctrtcacaatccagtatccttaagaaaatttcttaacctttctgtgtctcagtttcctcacctaaaaatgaatacaatagcactgatctcctgagcatgaggg

SEQ ID NO: 244411 - DNA, 201 bp, Homo sapiens
atgctttaggctatcgagaattcattgcttcattcttcatgtgaaatgcagagctggagcatgtggttgcagttcacagagaaatagaggggatgagatadatggtgagaaaaatcacgccttatcagataattgagtgcagatcgttatggaaagagctgcttgtgggcttaactccttttcctagttatctctgttttt

SEQ ID NO: 244412 - DNA, 201 bp, Homo sapiens
cttccaggagcatagcaaaactgcccagatattccggaaaacccaggaacactgcccagtgttagtggcagccttttgaatcaatcatgcctggtgctatscctgtggattcaccgagtttttgctcaaaaccagatacatgatacagaggaataattttttgcatgtagaaagagcaatagcctttaagaattacttact

SEQ ID NO: 244413 - DNA, 201 bp, Homo sapiens
aagaagtgtttttctcacatttttaagagcatgagatatttttatgtgagcacaatgtgaaacacataaaaagatttaacttgtaaataacttgtgtgtgkgtgtgtgtgtgtgtgtgtgtgtgtgtgtacgtttgagacagagttttgctcttgttgcccaggctggagtacagtggcacgatctcagctcactgcaacc

SEQ ID NO: 244414 - DNA, 201 bp, Homo sapiens
cctccctatatccctatataatacttaatattaatatcttcattttatagaaaaggaaactaaggtgcagagaagctaagctacttacccagctcataagrgacagccaggattttgttccaagtctgtctgacttcttagagcgtttgtccacaagaaataggtttgttcaaacatgtgcactcgaaatgcatccgtggt

SEQ ID NO: 244415 - DNA, 201 bp, Homo sapiens
  misc_feature (1)...(201): n = A,T,C or G
tgagttcagtaggccatggattattcctcactttattgctgtgtaagcaagagggagactcagcttgggaatatgggcacttcacaacttggcattcttanattgagaaaaagacccaatcataacagttaagaaaccaaattacaactgtgtataacatggggaattttaacttaacaactgctctgagttggacgtatg

SEQ ID NO: 244416 - DNA, 201 bp, Homo sapiens
acacacgtgtatatgtgtgcgtatgtgtatacacacacacgtgtatgtgtgcgtatgtgtacacacacacacgtgtatgtgtgcgtatgtgtacacacacktgtatgtgtgcgtatgtgtacacacacgtgtgtttgtgtgcgtatgtgtacacacacgtgtgtatgtgtgcgtatgtgtacacacacgtgtgtatgtgtg

SEQ ID NO: 244417 - DNA, 201 bp, Homo sapiens
cagatttggtagtagtcatgcaccctgggaaaatcactggcaaagcagtggagtggaaaggaatcatgggtatttactgtgaggagaagggaaggtaaagrtgttgtaggggttatatcatttcactcaggaatttgcttttggaaatgtcattaaggatatagtatttggggatggtaggtatttttagaatgtttctaa

SEQ ID NO: 244418 - DNA, 201 bp, Homo sapiens
taaattaaccatgcttcagtggtggattttgtttttaaggccatttgtctctcttgagtttttgtagaggagggtgaaatatatctaagtcagtttttgaraacatggagtgctgttgtaaaacaaatgataaacattgatgcgctgcagaaataaaaattggctgaatcttctgggaggtgctgaagagaactgggacat

SEQ ID NO: 244419 - DNA, 201 bp, Homo sapiens
tctcatgaaatgaccttctattttcctctctttctcctttcctgcctcaaaaaaagaaacatcagtatgacatatggatgggctccaacatcagccagtayatatattaaagttttaagtcaattattgttctagtacacaccctgaggttgagaaagaaagaacatccaggactaacaaacctgattgttctggcaaagt

SEQ ID NO: 244420 - DNA, 201 bp, Homo sapiens
ttgtttgaagcagttacagcatcagggaatagtcccaaatggcacgatgagcctgatttttcctgatggctgtcactgtggaaagggacacccatgaggtmggtccaagccaaagaaaggagatgtataagtacagcctaatcttattagtgggtctagaaaaactgcttctttattaactgtcagtcttttaaatctttg

SEQ ID NO: 244421 - DNA, 201 bp, Homo sapiens
tttgtctctcttgagtttttgtagaggagggtgaaatatatctaagtcagtttttgagaacatggagtgctgttgtaaaacaaatgataaacattgatgcrctgcagaaataaaaattggctgaatcttctgggaggtgctgaagagaactgggacatgcacagtcagacattttagaaacctggaattgacttgaagtgc

SEQ ID NO: 244422 - DNA, 201 bp, Homo sapiens
aaaatgccccctgatcatcctcaggttgaagtccaggatcatcagagtgtcattcaagagtgtgtattaattagcccttgcctaccatagcagtctcatcyatcccactccagactcttcctatgttctagtcattcccagcagttgacggtcacccagtaaaacacagagactccagtctctgtatatttgtatgtgctg

SEQ ID NO: 244423 - DNA, 201 bp, Homo sapiens
aatctgtagtttacttaatcattcctatggtgttacagacagatttataaagttttgctattacaaattatggcaccacaaatacctatttgaatctgccttttttttttttttttttggaattatttactcagtttaaaatttctggcctgatgttattaggttaaaggctttgcatatctttataagtcaaaggatgta

SEQ ID NO: 244424 - DNA, 201 bp, Homo sapiens
aggcctcccatcctcagctgctttctctcctgctcaccactgccctggcctctccccttctcactgcagacctgggaacacactcatccaggggttggcayactaaggcaaccggccagtctcctgctttggtaagtcaagtttcattgggacacaacacactcattgccttctgagttgtctacagccgcctttgagcta

SEQ ID NO: 244425 - DNA, 201 bp, Homo sapiens
tgctcaccactgccctggcctctccccttctcactgcagacctgggaacacactcatccaggggttggcatactaaggcaaccggccagtctcctgctttkgtaagtcaagtttcattgggacacaacacactcattgccttctgagttgtctacagccgcctttgagctacaatagcagaatcgtgttttgcaacagaga

SEQ ID NO: 244426 - DNA, 201 bp, Homo sapiens
caagaggacaccaattttcttccaggcagtaggaaggcaagctggagaggccaagctcccaagtaaactgaggcacctccactggcccctttgtgaggcamgcttgacctgggttttatggaaagaaagtgccctcaccaaagggtgctaaacaaggccccaggctccacacttgatcccatgtgcccccctctgccctgc

SEQ ID NO: 244427 - DNA, 201 bp, Homo sapiens
aggatctgtggacctgtgggtcccctggggtgtctcacggggctaaggagggacctttgtgcagatccacacaccctaaggtgtgcccctgggtaagctgsggtggtgtgggagggcgtccctgcaccctcatattgagtccaggggatgataagacagtaagtcccacggagaaaaggaatgagtcagtcttgtttgctg

SEQ ID NO: 244428 - DNA, 201 bp, Homo sapiens
ttgctgttgtaaccttagcacccagcaacaatattagagaaaggaagcccaggcctcgatggcaggggtggcctggtgctgctgatgtggccgggcacccsaacctttgggagcctgcaggccttgccatggcaggagaagcctgtcctgggtcctgggcctgctctgtggcctctcacaggcttttttcctgctctttca

SEQ ID NO: 244429 - DNA, 201 bp, Homo sapiens
gctctgtggcctctcacaggcttttttcctgctctttcagtttagaacctgaggaaccagccacggagccgtcggccttcatggagcgggatgctgggagygggctggtgatgtgtctctgcgagtggccagccctgctggtcagcagcacaggctggacaggtctgcacgacccctggaacacttgggcttggtgtgacg

SEQ ID NO: 244430 - DNA, 201 bp, Homo sapiens
gacaggtctgcacgacccctggaacacttgggcttggtgtgacgggcacctggccaatctgtattctcctcacccctgccagtcctgcatgcccccacccygccacagtctcaatgagaaggggagggcgtgtgagctggaagaggggtgtctagaaacaggcccctgacattcaattctcttctcatagaggacgaagac

SEQ ID NO: 244431 - DNA, 201 bp, Homo sapiens
gtccatggcagtatctgctcttctctgtgaaggcaaagggcctctgacggagtattacagctgcctcatccaccagaagcatttccagcacatccaggtcwgcaccccttggctggaggccgaggactagcccctgcttctaggtgagaggccagcaggaggctcagggaggaggcggggccttaagcagggggaacagag

SEQ ID NO: 244432 - DNA, 201 bp, Homo sapiens
ggccggagtccaatggcatcatctcggctcaccgcaacatccgcctcctgggtacaagcaagtcttctgcttcagctgggattataggcaagcaccaccaygccccggtaattttgtatttttagtagagatggggtttctccatgttggtcaggctggtctcaaactcccaacctcaggtgatccacccacctctgccac

SEQ ID NO: 244433 - DNA, 201 bp, Homo sapiens
ggccactgagctgtgagctgcttgcctggcctgcagcatgttcctgtcccgggccactgggtggggcagcctggggacagcggaggtggtggaggtgggcygccctgaatccccagttgggtcattgagtgaccaggccctcaggctgaaatgcctcctccaggagagtatctcacagaggctggtggcctccccacaaga

SEQ ID NO: 244434 - DNA, 201 bp, Homo sapiens
cctggccccagctagtcttcagaaatataagctgtttcgctttgttttcacactgacagctggtttgtggtgggtgtgctgtggtttattattattactgwtattattattattattattttgagacagagtttcgctcttgtagcccaggctggagtgcaatggcacgatcttggctcactgcaacctctgccttccagg

SEQ ID NO: 244435 - DNA, 201 bp, Homo sapiens
cacggtttttgccattaaagatggcaattacttttgcaccaacctaatatgaaaaaaaagcatcttaaatactagaactccactcggggcttttgctcctrgagtagaattggcgggaattgcctgcaggcttacatggtcttctttgtttctttctctcccaccatgtcccttttggccaagctcacgtggtgggtttga

SEQ ID NO: 244436 - DNA, 201 bp, Homo sapiens
tttggaagggcactgttagaggagattctagaagcagtagccccagcacaagctgagcccttggcccctgctcaggagccggctcatggatgggattcagsgatgtgagcccctcctgtgagctgagctcagggaatgtcgggatcaaatctggtgccctagaaaagtcatcttttatgtgctgagccagtccccagggtg

SEQ ID NO: 244437 - DNA, 201 bp, Homo sapiens
aggtacaaaccccccttaaggctccctcctcaaatcggtttggccacttagatgtgcacccccccaggcctttatacccttcagatgccaaatctaagaaygagctcccggaaaccacaccccctgttccaacccccagcctggcttgagcatggggttgggggggtggagcccaggtgggcaccccaggggtctggtgtc

SEQ ID NO: 244438 - DNA, 201 bp, Homo sapiens; identical to SEQ ID NO: 47770

SEQ ID NO: 244439 - DNA, 201 bp, Homo sapiens
tggacacataactcctgggccagaggctaaaaccccgggacccctgctgtccttcccgcagcttcttctcggagtctcagggcaaaccctttcgagcagcrcctcccagtggccagaaggtgaaatgatggcagtggtgccgcctggtgaatgaattggttctgtgacccgggaagctgtgcttggctctgatttcttttc

SEQ ID NO: 244440 - DNA, 201 bp, Homo sapiens
ccattcagtcctcttccttcctgcaggagggctgggcctggggttggggcactgttgcccaggtgtgggagggcagtggctttgggaggtacagggacgakgtgtcaaacagcgtcgcttctcccagtgagatggttctcctttgcctccgtctctttccccgattgatttttccaaatggggagtcgtggcttggtcctg

SEQ ID NO: 244441 - DNA, 201 bp, Homo sapiens
gagagtattaaatgaattgatatgtgctagctattaataacttcatttctaccccaagtcgaaagccttccatgagtggaactggatcttactcatctttrtgttcagtacacccagcacaggatgcttggctgttgcgagatgcagccagcattttctggagccctcccacttccccttccccagtacctcaggcccctg

SEQ ID NO: 244442 - DNA, 201 bp, Homo sapiens
ctgtgtatttctaacatcctgaaggaggagaatggaaatgttacttacatgaaaaatagttgtcactaaaggatcctaaaatactgtggggtgtgcagatygtcagaatttcagattggcctagagatcaaaaaggttttctgagaaaagttcaaggatggtccttaccacacgtgattctggatttggtcgcttgaaaaa

SEQ ID NO: 244443 - DNA, 201 bp, Homo sapiens
ttttggagtttctggtgcctgtggacattccctgcagtgattttttttttttgagatggagttttgctcttgtcgcccaggctggagtgcagtgagtggckcaatctcagcttgctgcaacctctgcttcccagtttcaagcaattctggtgcctcggcctcccaggtagctgggattacaggtgcaagccagcacacttg

SEQ ID NO: 244444 - DNA, 201 bp, Homo sapiens
tccccagaagtcctggtgtccattttggagtttctggtgcctgtggacattccctgcagtgattttttttttttgagatggagttttgctcttgtcgcccrggctggagtgcagtgagtggctcaatctcagcttgctgcaacctctgcttcccagtttcaagcaattctggtgcctcggcctcccaggtagctgggatta

SEQ ID NO: 244445 - DNA, 201 bp, Homo sapiens
agtggggctctgcacgatcttggtttctactgagtggattcactccattctgtgattttttttccttagggtcctgcctcagttggcggaatggcggccaygggagccaatgcagagaaagctgaaagtcacaagtaaggctccatttcattccaggttgggttgggtggggttggggttgtttatagagcatatgttgtg

SEQ ID NO: 244446 - DNA, 201 bp, Homo sapiens
acggagagtgggcaccggccgggggcaggcaggtccggcccctgggggtcagagtgcagcgccggtttgaggcagttcggccacttagctgcgactcgaartgaatgagtcacttcccctcctcgggcgagctcctggctttgccccagcaagcgggaactcccaggatcaggaaggtcccagagaaactccccagggggg

SEQ ID NO: 244447 - DNA, 201 bp, Homo sapiens
gctaagttatttatgcaagtaacttaccaatctgatttgagtttaacgggttaaaactaaaaaaaaaaatcaaaaacatcttcagttttttttttttttttaagtaagatggatctggctggtaataggtagagagccccaggtgatcaccgaaaagactcttccttggggagccaaatcctaagccaggtttaggatttc

SEQ ID NO: 244448 - DNA, 201 bp, Homo sapiens
cactcacacccaggaggggggatcctgcaggtactaagattgcaaagggaaagagagagtgaggctggtcctggagcccactaggaaggagccagcggaargcagtgactggacaagggaactgatttctctgctgatgtggccttggtttctctggttcagagtaaagaaaagcaaccaaacctagagagaaacatcctt

SEQ ID NO: 244449 - DNA, 201 bp, Homo sapiens
ggaactgatttctctgctgatgtggccttggtttctctggttcagagtaaagaaaagcaaccaaacctagagagaaacatccttactctacaaggccagaygggaagttctgtctttggcttggtttccttttccacaaacggggttggattctctctggagagctttccgggggccactcagcagtctctgattcagtgg

SEQ ID NO: 244450 - DNA, 201 bp, Homo sapiens
ctctggttcagagtaaagaaaagcaaccaaacctagagagaaacatccttactctacaaggccagatgggaagttctgtctttggcttggtttccttttcyacaaacggggttggattctctctggagagctttccgggggccactcagcagtctctgattcagtgggatgttctcagctgctggcccaagggagctcacc

SEQ ID NO: 244451 - DNA, 201 bp, Homo sapiens
gtaaaaatggaaagagcaactagggagcaaaaccaaaaaccactggacacagttgataataaaaggtgatgtgctatcctcacaaaccccaaagtatgaaygggtggagacaaaaagcctcaggatctggttgtgttggcagctgctcagggggaagctcaaggcgatggacagacctgagaacaagagtcccaggcactc

SEQ ID NO: 244452 - DNA, 201 bp, Homo sapiens
tttgtcgccggtgtcgcagtgcgaggatggcgccgcgggtgtagcggctctctgcgcaggccgagtggtgagtcgcccgcggcccggctcccgccgttctstcttcccaggggtctagcccgtcccctgccttggccacgtgcccatttacctgtaggggcggtgacggaggctctggtgcaccttggctgtgagctgcag

SEQ ID NO: 244453 - DNA, 201 bp, Homo sapiens; identical to SEQ ID NO: 47791

SEQ ID NO: 244454 - DNA, 201 bp, Homo sapiens
aagggaaccccttttgttgagatgtgcacccctacctctccagtcagctgaggacactagctatgtcaaccaactagaacatatcagggagccaagacatkactaggttactgataatctgcgcaagcctttcctgtgtgtaaggctccgtgaccgattctagcagggatgcctccactgtatggctctgccacaggaaca

SEQ ID NO: 244455 - DNA, 201 bp, Homo sapiens
ttcctcgggtccaccccgtgcctacctctcccacgtcccggcgacggagcgcgcggggctctgggcggggagcccaccgggccgaggcgcagcgagggtgraggcagagccggcagggtcaggtcccgcagggcgcaggcgggcgcttctcgcagcccaaacccgggcggggagtgcgggaacccctagaactatgctggg

SEQ ID NO: 244456 - DNA, 201 bp, Homo sapiens
tttatatggcaacctgttcttggacctggcagggcccagagaagcgaggaactccgcagctcgtcgacacgtctcgtctcctgtcccaattcagggcttgktgaggtgactcgcggtcgcgggtgactcgccggcaggacactgcctggaacgcctggagcgcctcccactgcagacgtctgtccgcctccagccgctctc

SEQ ID NO: 244457 - DNA, 201 bp, Homo sapiens; identical to SEQ ID NO: 47790

SEQ ID NO: 244458 - DNA, 201 bp, Homo sapiens
caattcagggcttggtgaggtgactcgcggtcgcgggtgactcgccggcaggacactgcctggaacgcctggagcgcctcccactgcagacgtctgtccgyctccagccgctctcctctgacggtcagtttcaaagaaacacagtctgggatccggagtagaaagaggccgtttcccgtgaaggccatagaggcagtttcc

SEQ ID NO: 244459 - DNA, 201 bp, Homo sapiens
ctcgggtccaccccgtgcctacctctcccacgtcccggcgacggagcgcgcggggctctgggcggggagcccaccgggccgaggcgcagcgagggtggagscagagccggcagggtcaggtcccgcagggcgcaggcgggcgcttctcgcagcccaaacccgggcggggagtgcgggaacccctagaactatgctgggagc

SEQ ID NO: 244460 - DNA, 201 bp, Homo sapiens
tttttagtagagatggggtttcaccatgttggccaggctggtctcaaactcctgacctcaagtgatccacccgcctcagtctcccaaagtgctgggattaygggcgtgagccactgtggcctgcctcagtgattattttttaattgaactaatagtattcctggtattttcagtcattgacagccaaaaatgccttgtccc

SEQ ID NO: 244461 - DNA, 201 bp, Homo sapiens; identical to SEQ ID NO: 47805

SEQ ID NO: 244462 - DNA, 201 bp, Homo sapiens; identical to SEQ ID NO: 47806

SEQ ID NO: 244463 - DNA, 201 bp, Homo sapiens; identical to SEQ ID NO: 47807

SEQ ID NO: 244464 - DNA, 201 bp, Homo sapiens; identical to SEQ ID NO: 47808

SEQ ID NO: 244465 - DNA, 201 bp, Homo sapiens; identical to SEQ ID NO: 47809

SEQ ID NO: 244466 - DNA, 201 bp, Homo sapiens; identical to SEQ ID NO: 47810

SEQ ID NO: 244467 - DNA, 201 bp, Homo sapiens; identical to SEQ ID NO: 47811

SEQ ID NO: 244468 - DNA, 201 bp, Homo sapiens
tcaagtgatgtctcatacacttttagtgacctggaccaagaatcaattaagttcaacctccaccaacttcatttaccttgaaagcttttctaaggggggggtccaaggcttgtagtcaaatgtatgtatacactgatatgtatacattctcatcttctaagtgtgcctagtttctctagtaatctacgaaaggcatagttt

SEQ ID NO: 244469 - DNA, 201 bp, Homo sapiens; identical to SEQ ID NO: 47812

SEQ ID NO: 244470 - DNA, 201 bp, Homo sapiens
acgttactgcgtagccgccagctcggccgcacgtcagggcgcgggagcgcggagcgagtttggttgcacttacaccggtacttaagcgcggaccggcgtgyccttggacttagagagtggggacgtccggcttcggagcgggagtgttcgttgtgccagcgactaaaaagaggtgagagcgggtcgcggaggccgcacctg

SEQ ID NO: 244471 - DNA, 201 bp, Homo sapiens
agcaatggattggtaattaagtggctagagtggtcattcatttacactgtatttgttacctgaggaaaaatttactaagttgaagctttcgtttttagaaktaaatatgggtgatgttgagaaaggcaagaagatttttattatgaagtgttcccagtgccacaccgttgaaaagggaggcaagcacaagactgggccaaa

SEQ ID NO: 244472 - DNA, 201 bp, Homo sapiens
acagtggtcactgcaagccttggaccagacccagtgctatgttggcatcaggtctctcctagcacagtcacagtggaggcagccacaagggtgcttgtgtcacctctcccctagctccagacagctcagtgcagagactccatttgtttgggtgaaagtaagataagagaacagagtctctgcctggtaatccaggtaatt

SEQ ID NO: 244473 - DNA, 201 bp, Homo sapiens; identical to SEQ ID NO: 47814

SEQ ID NO: 244474 - DNA, 201 bp, Homo sapiens
gggcacgcacgccgtacaccctaacatgctcgccagcatgcgcgcgcaggtccttggcgcaggcattgggactggagccaatgaggtgcggcgacgttacygcgtagccgccagctcggccgcacgtcagggcgcgggagcgcggagcgagtttggttgcacttacaccggtacttaagcgcggaccggcgtgtccttgga

SEQ ID NO: 244475 - DNA, 201 bp, Homo sapiens
caaatggtcaaatggcatctactagtctcatatgaccgctgcctctctggcctcgcccttctgctgaggtcagcatgacctggaactgtccgctggtcccyttcagtaatctgaagctttcaccgtagacgtgccgtattgcccagaagccactgtgtcgctggtcggggtcctgcggaggctggctgcctaccgggagca

SEQ ID NO: 244476 - DNA, 201 bp, Homo sapiens
tgaagctttcaccgtagacgtgccgtattgcccagaagccactgtgtcgctggtcggggtcctgcggaggctggctgcctaccgggagcaccaacgggctyctcaagtctatgtggcccttaccgtccgcaaccaagagacgtgccagctgttcaccaccgagctagctgagcccccacgcccacccgggcctgcatggtc

SEQ ID NO: 244477 - DNA, 201 bp, Homo sapiens
tctctgttgcaaaacacgattctgctattgtagctcaaaggcggctgtagacaactcagaaggcaatgagtgtgttgtgtcccaatgaaacttgacttacmaaagcaggagactggccggttgccttagtatgccaacccctggatgagtgtgttcccaggtctgcagtgagaaggggagaggccagggcagtggtgagca

SEQ ID NO: 244478 - DNA, 201 bp, Homo sapiens
ggtccttggtcccagccctgaaaaccacaggtccagcagtggccagggacacaggcacacccctgcaagccagcagacaaatcggcagacgcctgaaacamgaagttcatggcagggtcaggctttgtgtcattcacagccctctagataggccgagaaccagagctcgttttttaaggaacaccagtgagtctggagatt

SEQ ID NO: 244479 - DNA, 201 bp, Homo sapiens
cttgcggcaggaggagggcagctcagcacagggagggaggatctgagcccagcagccctactgtgtgcttcagagcaagattccctaagcccttgggcctyggtttcctcatctataaaatggaggtggcgggaggggcagtcatggtcagggctggacaccgctgtggcctgcaggacgctggagcacaggctgtacagg

SEQ ID NO: 244480 - DNA, 201 bp, Homo sapiens
gtgggctcatggcgtgggggacttgcggcaggaggagggcagctcagcacagggagggaggatctgagcccagcagccctactgtgtgcttcagagcaagrttccctaagcccttgggcctcggtttcctcatctataaaatggaggtggcgggaggggcagtcatggtcagggctggacaccgctgtggcctgcaggacg

SEQ ID NO: 244481 - DNA, 201 bp, Homo sapiens
aagccccacactcccacaccatgcggggaactagggcagaggccggtgagcagggtgggctcatggcgtgggggacttgcggcaggaggagggcagctcakcacagggagggaggatctgagcccagcagccctactgtgtgcttcagagcaagattccctaagcccttgggcctcggtttcctcatctataaaatggagg

SEQ ID NO: 244482 - DNA, 201 bp, Homo sapiens
cagcacactcagtctcctctcgggtcgaacagagctctgcctgtggtccttggtcccagccctgaaaaccacaggtccagcagtggccagggacacaggcmcacccctgcaagccagcagacaaatcggcagacgcctgaaacaagaagttcatggcagggtcaggctttgtgtcattcacagccctctagataggccgag

SEQ ID NO: 244483 - DNA, 201 bp, Homo sapiens
ggttctcctttttcacccaagtaattgcctttccatctaatggcccaaatggtcaaatggcatctactagtctcatatgaccgctgcctctctggcctcgmccttctgctgaggtcagcatgacctggaactgtccgctggtccccttcagtaatctgaagctttcaccgtagacgtgccgtattgcccagaagccactgt

SEQ ID NO: 244484 - DNA, 201 bp, Homo sapiens
cgtcacaccaagcccaagtgttccaggggtcgtgcagacctgtccagcctgtgctgctgaccagcagggctggccactcgcagagacacatcaccagcccrctcccagcatcccgctccatgaaggccgacggctccgtggctggttcctcaggttctaaactgaaagagcaggaaaaaagcctgtgagaggccacagagc

SEQ ID NO: 244485 - DNA, 201 bp, Homo sapiens
gagggcagggtaaaagctaggaagccccacactcccacaccatgcggggaactagggcagaggccggtgagcagggtgggctcatggcgtgggggacttgmggcaggaggagggcagctcagcacagggagggaggatctgagcccagcagccctactgtgtgcttcagagcaagattccctaagcccttgggcctcggtt

SEQ ID NO: 244486 - DNA, 201 bp, Homo sapiens
ctaagcgtgtgggtgctccctttctgccagcagttctggttctgaagaaaatcgccatcaatcagacatgaaaactctggctccaaaaacagcattttctytgtgcaaataaaaagtgtgtatcaagtatgatgttcccccaacgtggacacactctgttccccacaaagccaagcccgctgcagctgccacatccctgga

SEQ ID NO: 244487 - DNA, 201 bp, Homo sapiens
agagccatgcctgtgtctttcagagaccacaggaggaaaacaaccacttctgggatgaggacagggcccttgagagaaggtggtgtttggctgggccaccraaaacccctcgcccctgccagcacactcagtctcctctcgggtcgaacagagctctgcctgtggtccttggtcccagccctgaaaaccacaggtccagca

SEQ ID NO: 244488 - DNA, 201 bp, Homo sapiens; identical to SEQ ID NO: 47844

SEQ ID NO: 244489 - DNA, 201 bp, Homo sapiens
tcgcccttctgctgaggtcagcatgacctggaactgtccgctggtccccttcagtaatctgaagctttcaccgtagacgtgccgtattgcccagaagccaytgtgtcgctggtcggggtcctgcggaggctggctgcctaccgggagcaccaacgggctcctcaagtctatgtggcccttaccgtccgcaaccaagagacg

SEQ ID NO: 244490 - DNA, 201 bp, Homo sapiens
ctggaatgtgctctttcctgactgatacaggatggattttattttttacttatttatttttttgagacagagtctcactgtgttgcccaggctggattacygtggcacagtctcggctccctgaaacctctgcctcctgggttcaagcaactctcgtacctagcctcctaagaagctgggactacaggcacatgccaccat

SEQ ID NO: 244491 - DNA, 201 bp, Homo sapiens
tcaaacccaccacgtgagcttggccaaaagggacatggtgggagagaaagaaacaaagaagaccatgtaagcctgcaggcaattcccgccaattctactcyaggagcaaaagccccgagtggagttctagtatttaagatgcttttttttcatattaggttggtgcaaaagtaattgccatctttaatggcaaaaaccgtg

SEQ ID NO: 244492 - DNA, 201 bp, Homo sapiens
atcaatcagacatgaaaactctggctccaaaaacagcattttctttgtgcaaataaaaagtgtgtatcaagtatgatgttcccccaacgtggacacactckgttccccacaaagccaagcccgctgcagctgccacatccctggacacactcggttcctcacaaagccaagcccgctgcagctgccacatccgtggacaca

SEQ ID NO: 244493 - DNA, 201 bp, Homo sapiens
ttaagacgggctctcgagcaaccaacgttctgtcctttgcggtagactgtgaagcatcctgtgtgtgtgaagcaccggccgtcagtcaagtatgcccggtkctttctctcagaactcatcaaaaaggtcagttatggggagtgtccgcccagtagccagacagcatagccacctgcgtgctggagcccccgtccttcccag

SEQ ID NO: 244494 - DNA, 201 bp, Homo sapiens
caccctggggactggctcagcacataaaagatgacttttctagggcaccagatttgatcccgacattccctgagctcagctcacaggaggggctcacatcsctgaatcccatccatgagccggctcctgagcaggggccaagggctcagcttgtgctggggctactgcttctagaatctcctctaacagtgcccttccaaa

SEQ ID NO: 244495 - DNA, 201 bp, Homo sapiens
gccaagattgtgccactgactccagcctggggaacagagctcaaaaaaaataagataaaacatagatacagaaaaccacaaaggaaaaacatagcatattraatcatcacaaggcagccaccccttcatagccacacccggcccctggccaccactgacctgtgctctatcaccagaattccgttgtctcaggaatgttca

SEQ ID NO: 244496 - DNA, 201 bp, Homo sapiens
gacaccagacccctggggtgcccacctgggctccacccccccaaccccatgctcaagccaggctgggggttggaacagggggtgtggtttccgggagctcrttcttagatttggcatctgaagggtataaaggcctgggggggtgcacatctaagtggccaaaccgatttgaggagggagccttaaggggggtttgtacct

SEQ ID NO: 244497 - DNA, 201 bp, Homo sapiens; identical to SEQ ID NO: 47835

SEQ ID NO: 244498 - DNA, 201 bp, Homo sapiens; identical to SEQ ID NO: 47836

SEQ ID NO: 244499 - DNA, 201 bp, Homo sapiens
ggagggaggatctgagcccagcagccctactgtgtgcttcagagcaagattccctaagcccttgggcctcggtttcctcatctataaaatggaggtggcgrgaggggcagtcatggtcagggctggacaccgctgtggcctgcaggacgctggagcacaggctgtacaggcggatccaccatgccactgtcctgagcaccc

SEQ ID NO: 244500 - DNA, 201 bp, Homo sapiens; identical to SEQ ID NO: 47837

SEQ ID NO: 244501 - DNA, 201 bp, Homo sapiens
taatgcccagccccgggcaccctgtgcaggcggtgtccttgcagctctacccagctctgggctctgggaaaagggaacgatggacgctgttgggcatggayatgatggggcttccagaagagttactctgggcctccagggtgacatcaaaggacaggggtgcctcttaaggtgaccttacagccacagccctctttttgg

SEQ ID NO: 244502 - DNA, 201 bp, Homo sapiens
tcagagcaagattccctaagcccttgggcctcggtttcctcatctataaaatggaggtggcgggaggggcagtcatggtcagggctggacaccgctgtggmctgcaggacgctggagcacaggctgtacaggcggatccaccatgccactgtcctgagcacccagttgatggaagacgagcagggtgactatagagtaggg

SEQ ID NO: 244503 - DNA, 201 bp, Homo sapiens
cttttagcaagtaaacaatcccctgcttctccaatacctgctttctccctaatcctccccaaaagggtgcatctgtagtcaccagcaggtctgccctgtgycaccaggagagggcagcagtcacccagtgtatcttgctgctgccctgtgaatcttaggatggggccagccgtggagaagcagcctgctgacagccacagc

SEQ ID NO: 244504 - DNA, 201 bp, Homo sapiens; identical to SEQ ID NO: 47853

SEQ ID NO: 244505 - DNA, 201 bp, Homo sapiens
gagcccagcagccctactgtgtgcttcagagcaagattccctaagcccttgggcctcggtttcctcatctataaaatggaggtggcgggaggggcagtcakggtcagggctggacaccgctgtggcctgcaggacgctggagcacaggctgtacaggcggatccaccatgccactgtcctgagcacccagttgatggaaga

SEQ ID NO: 244506 - DNA, 201 bp, Homo sapiens
tcattttctgatagtttaaaaatacttatataaccttagagtggaggacattctgtgtataacaccaaaggaaactcattaaatgagaaaaaaaatctatrtattctactaactagaacaactttttgaattaataaggttgtcttctagttatttaaaatcacattatttatatgtacattttgctagcatatttataaa

SEQ ID NO: 244507 - DNA, 201 bp, Homo sapiens
actgttacagaaacattcaaatggctctcaagcattatcagtagcccttttgtattgtttcttcattctgccaacgagaagagttctagttgcacaagaarcacaattccattcttattgattgattagtgtgcagtactactttttggcaacacatactcactagtgaattatttgtctgttagtttctagtgccaaact

SEQ ID NO: 244508 - DNA, 201 bp, Homo sapiens
tttaatttgtatttatttatttttttgagacagggtctcactctgtctctcaggctggagtgcactggcacgatctcggctcactgcaacctccatctccsgggttgaagcgattctccttgcctcaacctcccctcaaggctcttaggaataaccctagctacttaactgtgtgagtagctgggactgcaggcacgtgcc

SEQ ID NO: 244509 - DNA, 201 bp, Homo sapiens
agccctgatcccatgaaatttacattctgatgggataaaggtagatagtagactgggcatggtggctcattcctgtaatcccagtactttgggaggccgargcgggcagatcatgaggtcaggagttcgagaccagcctggccaacatggtgaaaccccgtctctactaaaaatacaaaaaaaatgagccaggcatggtgg

SEQ ID NO: 244510 - DNA, 201 bp, Homo sapiens
atcccatgaaatttacattctgatgggataaaggtagatagtagactgggcatggtggctcattcctgtaatcccagtactttgggaggccgaagcgggcrgatcatgaggtcaggagttcgagaccagcctggccaacatggtgaaaccccgtctctactaaaaatacaaaaaaaatgagccaggcatggtggtgcgcac

SEQ ID NO: 244511 - DNA, 201 bp, Homo sapiens
atgaagtgggaaattttagtttttcagattcttgtttttttgtaaccctcagccatcctatagtcatctggtcaaagaccttatatgtatcctgagtttttctttcatggtgccaatgctctagttcagataagctcactatcttaaatctaacccccagagcttccaaagttatttttccaaaatgcaattctcatcact

SEQ ID NO: 244512 - DNA, 201 bp, Homo sapiens
cattactctatttacctatcattttacttgaaacataaaaactcaattgtttggaaatagaatctaaaaaattttaaaaaagaaataacaaaaaagaaacttaagagaatttagtaaatcctatgaaaattctcatgaaatgttgttgaattatacttaaatgattgaaataaggcatttttttttcaaggttggctgttg

SEQ ID NO: 244513 - DNA, 201 bp, Homo sapiens
ctaaattttaaactcactgagagcaaagagcatattttatatggcttttatatttctagtgtttaatatattacctgaaaatatgcctagtgtgtgtgtgkatatatatatatatatacatatatatacacacatatatatatacacatatatatacacacacatatatatacacacatatatacacacatatatatacac

SEQ ID NO: 244514 - DNA, 201 bp, Homo sapiens
attactctatttacctatcattttacttgaaacataaaaactcaattgtttggaaatagaatctaaaaaattttaaaaaagaaataacaaaaaagaaacttaagagaatttagtaaatcctatgaaaattctcatgaaatgttgttgaattatacttaaatgattgaaataaggcatttttttttcaaggttggctgttga

SEQ ID NO: 244515 - DNA, 201 bp, Homo sapiens
agtcattcatacttcatcatttatgattgtctcatgctctttgtacattttttattggtttgtttagtttttttctcactaattcctaagagctcttattkttttctctcagttaatcattagcctttttattttttaatttgtatttatttatttttttgagacagggtctcactctgtctctcaggctggagtgcactg

SEQ ID NO: 244516 - DNA, 201 bp, Homo sapiens
agttggtcactgtttcctcctccttgaaattcttccttgaagttttcttttggttttcctcaccccttttcatagttcctgcctgctgtccagactgttastcctggggttacctaggttctgccccctatgcagtaggcctttcctgagtgggtacctgtcacagcatggctggctttcagtttactctcaagctttgct

SEQ ID NO: 244517 - DNA, 201 bp, Homo sapiens
cttcccaccccatgtagactgtgaattttattttgtcttgtctggatagagatttttgttgttgttgagacagagtctcgctctgttgcccagactggtgrcttgttttcatataaatttgatttttaagattatagactcagacttggttgctcttcgtcttaggtactcccaatggcttaaattggggtactttcctaa

SEQ ID NO: 244518 - DNA, 201 bp, Homo sapiens
cacgctcctcacttcctagacgggatggcggccaggaagaggcgctcctcacttcccagactgggcggccgggcagaggggctcctcacatcccagacgaygggcggccaggcagagacgctcctcacttcccagacggggtggcggctgggcacaggctgcaatctcggcactttgggaggccaaggcaggcggctggga

SEQ ID NO: 244519 - DNA, 201 bp, Homo sapiens
ctgggctcaaacgatcctcccaccttagcctccctagtagttgggagtacaggtgtgtgccgcgacacctagctaattttttatttttatttatttatttatttattttaagacagagtcttactgtcacccaggttggagtgcagtggcgctatctcggctcactgcaacctctccctcccagtttcaaatgattcttgt

SEQ ID NO: 244520 - DNA, 201 bp, Homo sapiens
tttttgcaaatatctcaagagattttatgcacattagtttgagaactgttggtagaaactgaattggttatttggggtcctagtgtgctctgtcagagttyatttttctagctagctagctaaaatattccttttttttttttttttttgagaaaaggtcttgttctgtcacccaaggctagagtgcagtggcaagatcat

SEQ ID NO: 244521 - DNA, 201 bp, Homo sapiens
tgaattgcaaaatcagaatttatctctgccttttttttttttttaaacaactttcctttccttcctacttacttttatatttctcttaggtagagttttartttcatcagtaggtaccaggttgtctgttttttttttccttttttcttttttaaatgttgcccaggccagtggctgttcacaggtgctatcctagtgtac

SEQ ID NO: 244522 - DNA, 201 bp, Homo sapiens
tagtaccaagttagaggataaagaatttgataaagtcagaatataaggaatatgagagcaatgggcttgagttggagagaggaggagatttatttagcacrcacaccaagtgatggaaagattatctataataagattatatggattcagatgctagtagtgagcagatatagtagaacacaaaagttttcttctggttgc

SEQ ID NO: 244523 - DNA, 201 bp, Homo sapiens
aagagtagtgtctgttataattttgacatttttactctttcagaataaaatattttccaggggcttgattttgccttctttttctatttgataagtttaamaaatttttttctgtgtgtgtgtaggttaatgtggaacaagattttgtgtttctgctttaaaatgttactggtaatagtagtgggaaaaaaaatcatgtcc

SEQ ID NO: 244524 - DNA, 201 bp, Homo sapiens
tttgtggcttgacttctcatttctttttatcactaaatactcacttattataaaggctccttggttacttcagttttttacaattgtgaaaaacattgctrtatacatttgtgtgcaggctcttacgtgaatataagtcttcaattcagttggattgaggagtgagactggtgggttgtatttttaaagtatgtttacttt

SEQ ID NO: 244525 - DNA, 201 bp, Homo sapiens
tttgaagactgttcagtatgtttttgatattcagtaaaatcgattatctgctgcaaagtgagcaaggatgagcttggagagaaataggttagagagaagakgggataaaggtgtggctgattttcaaaagatttgttggctaaccaggagagtgacgtgatgacctggtttatatttttaaaacaatgctcaggctgctct

SEQ ID NO: 244526 - DNA, 201 bp, Homo sapiens
agaactgaaaagtaattaaaactttaatataaaacatgtcatatctttgttcattactctatttacctatcattttacttgaaacataaaaactcaattgyttggaaatagaatctaaaaaattttaaaaaagaaataacaaaaaagaaacttaagagaatttagtaaatcctatgaaaattctcatgaaatgttgttgaa

SEQ ID NO: 244527 - DNA, 201 bp, Homo sapiens
acatgttgggaattaagttgaaatcctggtctttttattcaagagcgtatgttcctccctgtgtttgtctatttatggaagtattcagaattagaaacatsgaaagaagcaattcagtaattacattaaaatagatggatctttttgataatgagtcttttattttttgagatggagtctcactctgttgcccaggctaga

SEQ ID NO: 244528 - DNA, 201 bp, Homo sapiens
acctgagaaaaatttttattttctgatagttggttatgaggttctgttgatgttattaaatcctgcttgttcattattattttttttgtctgcttgacttrtgattaattgggatgtgttgaaatcacccacaacaatggccaatttgtcaatttcttcctgtagtttttactgtattttgaggcttcccaccccatgtag

SEQ ID NO: 244529 - DNA, 201 bp, Homo sapiens
ggccctttgcttggtatgggaatctcactccttccccttgtagcaggcccagtgctttgtctgttcctgtagcaggcatatccagggcaacattctaatgyttatttttatttttgcttactactcaccattttttctgttatttcaactaactttagggttttcttttaatgggatggtaataggcttgataattttcat

SEQ ID NO: 244530 - DNA, 201 bp, Homo sapiens
gaatggtgtgaacccgggaggcggagcttacatgagccaagattgcgccactgcattccagcctgggggacagagcgagacgccatctcaaaaaaaaaaawttttttttgaaaatataaatttaccatattaacaaataatcgggaaaagctatttgatcctctctcaaaattttgcagatggggaagggaggtagaagga

SEQ ID NO: 244531 - DNA, 201 bp, Homo sapiens
cagaatgtcaactgttgtagctattgaaactgcacttctagatgtctctacactattgtcttcattttgttacctcagtcactatgttagtgtacgttggttttttttttggaattgtttttttttttctcagtgccctttactggctcgtctgatgttgtccactgcttaattacggtttcagcctttggtcttcctttg

SEQ ID NO: 244532 - DNA, 201 bp, Homo sapiens
agggatgtagtggcagtagaaatgatgaggaggagcctgggcaacatgacaaaacttcgtctctacaaaaaaaaatacaaaagttagctggccatggtggyatgcgcctgtactcccagccactccagtgactgaggtgggaggagggaggattgcttcagcctgggaggtcgaggttgcagtgagccgagacagtagcct

SEQ ID NO: 244533 - DNA, 201 bp, Homo sapiens
ctgactctgacatgggagggtcaagggcacatggaaagtggtgacagtggtaagaaggcacctggataatctctagaaaccttccacatgggaaaatgaargtacagaagggttctgacttactcagggctatctcactagtcactgctactgtagggaccaaaaccctgaacacccgaatcctaatctagctactcagtg

SEQ ID NO: 244534 - DNA, 201 bp, Homo sapiens
ttaataccagaatggaattgagtatggcaagattgaaaaagtgtcattttagaagagtttatatatgtggttagattatttgaaaagacaaagaaacatayatatttgttaattgactgtctctaccccagaatgtaaattccatgaagacagggattttagttttcttcactgtatcactagcttatcagttatataaaa

SEQ ID NO: 244535 - DNA, 201 bp, Homo sapiens
cttgagggcagtgggatctaacaaagtacaggacccaagagtccatgctgcttggaagtagtgatttacccgatctcgtgaattggaacagacagcatccyatgcagaaaatgggccacagatgggcagagatcgattccctctgcccttgtgattggatttgagacctaggggagaagggtttcttgactatcactctgg

SEQ ID NO: 244536 - DNA, 201 bp, Homo sapiens
ctggccgggcgggggctgccccccacctcctggacggggcggctgccgggcggagacgctcctcacttcccggacggggcggctgccaggcggaggggctrctcacttctcagacggggcagcccggcagagacgctcctcacctcccagaaggggtggcggtctggcagagacactcctcagatcccagacggggtcgca

SEQ ID NO: 244537 - DNA, 201 bp, Homo sapiens
aaattgacaaattatagttgtatatatttatggggtatggagtgatgttatgatcaattaatacaatgtggaataattaaaccaaacttattaacatatcwcacctcaaatacttattttttttgtgatgagaacatttagaattttagcaattttgaaatgtacaacacattatttactatgtacattacattgtgcaat

SEQ ID NO: 244538 - DNA, 201 bp, Homo sapiens
tcacttactgaatgctttgtttacttgtgaagtctcatgatttttcttttatcattgttctctaagaaattgttattttgcaaattttaaataaaattttwcatttttctttgcaggcactatttcatggaaagtttatcgatactggtttctctttaccattctacaagcgtatgttaagtaaaaaacttactattaagg

SEQ ID NO: 244539 - DNA, 201 bp, Homo sapiens
tgaggttgtttgacaatttcacatagtagaatattcctagagaatattattctggataaattattaataggaggttagtatatttttttattttcaaatayataagatagcatagatttttaaaaatgagaaccagaaataggtttggaactaatgaatttggatagccagtttgggggagatctatctgtctgtctgtct

SEQ ID NO: 244540 - DNA, 201 bp, Homo sapiens
atgatgtgttgatagctgcagcaaacgaccatggcacatgtatacctgtgtaacaaacctgcacgttctacacatgtatcccagaacttaaagtaaaattwaaaaaaaaagaaaataagcaaactcttgtagtgcaggactaaacattacagtgattaaaggaaaaaaaagatattagtggtagaatgggaaggtaattta

SEQ ID NO: 244541 - DNA, 201 bp, Homo sapiens
ttttctgctaaaccagtcatctctgagtgagagaagttaccaataactgattttcttcctttatacttttgtactctgttaggtatttttgttttgctttrttctacagtgtgcatttattacgctagttggaaaaaaacagtaacactatattttgaggaaaatatattcatcaaaagatcatgcataaggcactggact

SEQ ID NO: 244542 - DNA, 201 bp, Homo sapiens
aacactagaatgtccagaagtagatccacacctacattgtcaattgattttcaacaaaagtactaagatatttcaacgtggaaagggaatatcttttcaayaaatgatgttgaatcaactagatatccatatggaagaaaattaactataagcctacctcagtccatatttaaaattaactttgaccttacctctgcccat

SEQ ID NO: 244543 - DNA, 201 bp, Homo sapiens
aaaacatgattttcagcttagattagaaaatcctaggtaacccaccaaaaaactactagaaataatagtgaatttaataaggcatgggtacaatgttaatwctttaaaaatcaatcgtatttttatgtattagcaacagacacttaaaatttagattttggtttcatttgtgaaagcatcaaaaaatgagcaaatttaacc

SEQ ID NO: 244544 - DNA, 201 bp, Homo sapiens
tgtctttaaggctataaatttgcctctaagtataacttttcccacacatttttatatgtggtatttttgtttttcagttcttagtttgtttttttttttttgtaatttccaacatggtttcttttgattcactaaatatttagaagtgtttttaaattctatttatagttttcaaatttatcttttgttactgatttttaa

SEQ ID NO: 244545 - DNA, 201 bp, Homo sapiens
aacatctgttattttttaatgttttaacaaaagccattctgactggtatgagatggtgtttcattgtggttttgatttgtatttctctgatgattagtgawgttgagcattttttcatatattttgttggctgcttatatgtcttttcttttcttttcttttcttttctttttttttttttttttttgagacaagagtctt

SEQ ID NO: 244546 - DNA, 201 bp, Homo sapiens
gtagtgctgtggggaacatacactgcttgtgtcctttggtagcacaatttattttcctctggatatctatacccagtaatgggattgctgattctcatggkggttcaactcttagttcattgagaaatttccaacctgcttttcaaagtggctgaactaatttacattctgaacaaagtatatgtctcttttttttctgaa

SEQ ID NO: 244547 - DNA, 201 bp, Homo sapiens
tgatttcattctttttttggctgaatagtatttcatggtgcttacagtccaccattgatgggcacctggatttattctaggtctttcctattgtgagtagygctgtggggaacatacactgcttgtgtcctttggtagcacaatttattttcctctggatatctatacccagtaatgggattgctgattctcatgggggtt

SEQ ID NO: 244548 - DNA, 201 bp, Homo sapiens
tagaatagtctgccataccaatagcagatttaatgatgctgagcttttggctaatagccagagaagggagctgagcttgaactcctctagtctacactctygggcgtaccatcaaaccactgtaaaattaggacgtatcatcaaaccactggtaaaaattagcttaaaattagtttaagctaacgtcagagaataaacata

SEQ ID NO: 244549 - DNA, 201 bp, Homo sapiens
gaacacataatgaaataaagaaatataggcgagaataggaaatattggaagatgttaaatgtagtaagaataagcattgtttcctgaaagtttgtttttctgtgtgtgtgtgtgtgtgtgtatgtgtgtgtatgtaagtaaaatcagtagataaatagcaatctggtatacacagagatatttatataaaacacacttctt

SEQ ID NO: 244550 - DNA, 201 bp, Homo sapiens
tgatgtgcagtaggggtccagtttcattttttttccatatggataattccaggtttctttaagtgtccctcttttctcatggatctgcattgctacatctyttatgtgggtttgtccttatatgcattggtctgttttagggcttcctattttgtttcatttttttccccttcgttagtcttatcagacatttatttatct

SEQ ID NO: 244551 - DNA, 201 bp, Homo sapiens
aacacataatgaaataaagaaatataggcgagaataggaaatattggaagatgttaaatgtagtaagaataagcattgtttcctgaaagtttgtttttctgtgtgtgtgtgtgtgtgtgtatgtgtgtgtatgtaagtaaaatcagtagataaatagcaatctggtatacacagagatatttatataaaacacacttctta

SEQ ID NO: 244552 - DNA, 201 bp, Homo sapiens
aaaggactattgattggatggagcagtgaatgcaaaggctcctttgcagcattcagggtaattaggttgaggaatgtcaggaatagataaagaggagaagraagaggtggggcaacagatcacataggcatttatgagtttggatttattgtagttaaaatgagagaacgttggaaacagagttaccttcatgtatcctgc

SEQ ID NO: 244553 - DNA, 201 bp, Homo sapiens
aatagagatttttgactgaaatgtgtcaaatttggaatttggtcttttgactagaaagtaggttggttgggggcatgatgtgtctcttatagggaaaagcytttgcttagggtaagggcgttgacttggaaagtcatgagaaaaggtttgaattttaaattaatgaaagaaacaaaacaaatttcaagctaatctctaact

SEQ ID NO: 244554 - DNA, 201 bp, Homo sapiens
agaacgttggaaacagagttaccttcatgtatcctgctttagaaggatcactgtgctgggtagaggatggatctaggttgggagtgaagagtggggcaggragaccatttagcaagctgtgcttagtttggatgagaaattatgggcttggagataagagttgtagtggtagtgatggtaagaagtaattggcctaggcag

SEQ ID NO: 244555 - DNA, 201 bp, Homo sapiens
agtaggttggttgggggcatgatgtgtctcttatagggaaaagcttttgcttagggtaagggcgttgacttggaaagtcatgagaaaaggtttgaattttraattaatgaaagaaacaaaacaaatttcaagctaatctctaactgttatttagggccaaagtgatgacacctacgggctacttcacttaaaccctcctca

SEQ ID NO: 244556 - DNA, 201 bp, Homo sapiens
ctgtctcttaagaaatccttccatcctgagaggacacaaaacaatagttttctgctgtaatttattctaaaagttctactgtttccctttcatatttatgycattggtccatcttgaattggttttatatatgatgtgcagtaggggtccagtttcattttttttccatatggataattccaggtttctttaagtgtccct

SEQ ID NO: 244557 - DNA, 201 bp, Homo sapiens
agtgaatgcatttcattttaagaatttaggttattagtgcatagctgcgaagcatttttgaagcatttcatgtacactaaaaaacgggcccctgcatcctratgcaaatctctttgcaaatttctgaaaatagtacattggctgttgcggggaggagtttggtaattggatgtactgagaaacatgatttatagaaatagg

SEQ ID NO: 244558 - DNA, 201 bp, Homo sapiens
ctgttcagtatactcataaatctgattgactgggctgggtggaagctgactgttgagtcctgacttgaaattaggatactgtggttacacattagccccarcttgccaagatgtcctactttttgtctgtgtttagttagactggggaggagaattagttaaatgaacctgttttgtataaagtaggatattctttacctt

SEQ ID NO: 244559 - DNA, 201 bp, Homo sapiens
atatacagtacagtcagaaagtatatatggacacgtgctttccaacacagtttacagtgatcagaatgtcaactgttgtagctattgaaactgcacttctrgatgtctctacactattgtcttcattttgttacctcagtcactatgttagtgtacgttggttttttttttggaattgtttttttttttctcagtgccctt

SEQ ID NO: 244560 - DNA, 201 bp, Homo sapiens
tcgtgatccgcccgtctcggcctcccaaagtgctgggattacaggcgtgagccaccgcgcccggcctaatttttgtatttttttagtagagacaggttttygccgtgttggccaggcgggtcttgaactcctgacctcaggtgatccacccgccttggcctgccaaagtgctgggattacaggagtgaatattcacacttt

SEQ ID NO: 244561 - DNA, 201 bp, Homo sapiens
ttcatacagtaatattcctatgtaggatttagccttctggcaagtctgactaacctaggaagtacagtcatctctcggtatctgtgggagattggttctgyagggcacctgtggacaccacaatccatggacactcaagtccttacaattacattatataataggatagtatttgcatataacctacacacttctccctta

SEQ ID NO: 244562 - DNA, 201 bp, Homo sapiens
ggctgaatagtatttcatggtgcttacagtccaccattgatgggcacctggatttattctaggtctttcctattgtgagtagtgctgtggggaacatacastgcttgtgtcctttggtagcacaatttattttcctctggatatctatacccagtaatgggattgctgattctcatgggggttcaactcttagttcattga

SEQ ID NO: 244563 - DNA, 201 bp, Homo sapiens
ggggtttcaccatgttggccgggctggtctcgaactcctaacctcaggtgatccgccaacctcggcctccccaagtgctgggattacaggcgtgagccacygcgcccagcagctgcttatgtatcttcttttgagaagtgtctgtttatgcttgcccagtttttaatgggtttttttttcttgttgatttgcttacattcc

SEQ ID NO: 244564 - DNA, 201 bp, Homo sapiens
aatccattttttttttcccaagatagagtcttgctgtgttacctatgttagagtgcagtggcacagacacaactcactgcagcctcaacctcctgggttcmagcaatcctcctgccatagcctcctcagtagctgggaccaccagtgcacgccactatgcctggctaattttttaattttttgtagggacaaagttttgct

SEQ ID NO: 244565 - DNA, 201 bp, Homo sapiens
tgttcagtagaaatacaggaaaatggtgatgccttacatgaaaatggagagccttcagcaaggacaactgccaggtagaatattttatttgaatatgggtrgcgacatgatgtggaacatatttcctgaataagaagttttatattttaccttagtttagaatttgccacacagtttagaagcttatgtctaagcatgtca

SEQ ID NO: 244566 - DNA, 201 bp, Homo sapiens
ttaacttaattgtattacggacagaaacttagaacattttttgaaatttagtgagattttcattatatttcagtgtattttttttgtttgtcactcatgtytcatgaatacctgagaaaaatttttattttctgatagttggttatgaggttctgttgatgttattaaatcctgcttgttcattattattttttttgtctg

SEQ ID NO: 244567 - DNA, 201 bp, Homo sapiens
ttttgaatacctaattcagcagacttattccagaaatagaatttcttttagattcatactatggcatatttgttgcaacaagcctcaaaggtagatgccctccaaaactatattatttattcagtaaatatttattgaacctatgctggatgaagagaagatatagcctctgtaatggtgggagaatttgggcttttgaat

SEQ ID NO: 244568 - DNA, 201 bp, Homo sapiens
ggtcccattttcccacttctctcccttgccctgtaggttcacatttttattagttttgctttatccttctgttgcttctttttgaaaatataagcagatamatgtgcagtatacgtatctcatctctcctcttaatctcctaattcttgcatacttctctgtgctttgctttttttaactttacagtattattctggagtt

SEQ ID NO: 244569 - DNA, 201 bp, Homo sapiens
ttttaaaaacagtaagtactcagattaagacccctctaatattgcagtctggctgtttattgtctgtaaaccgaggttctctgccctaagccaattttttwtttttatttttagcatatttactcttatcctcatttctgttcttaacccttatctgattggcagcaacatgtaagaataagagcattgatcatggaacgc

SEQ ID NO: 244570 - DNA, 201 bp, Homo sapiens
gccatactttcttgatttccctctgcgtttctgttcttctatctttattttgtcgagtcctcctttttttcctaagcctctttttttttttttttttttgktaactacattcattctcttgatgcatcttactcagtattatgcttttaaaacatgtgcctgctaatgactcacaaatttagctcagacttctcacttgaa

SEQ ID NO: 244571 - DNA, 201 bp, Homo sapiens
catagtctaggcaagaagaaagagaaagaggaattgaaagggcagatggctctgttgttgcaagcccttgccttttttacttagcgaaggatgccctcacyatggccttctgcctatacctcattggccagaattggtcactctaccaactcagctgcagggaagggggaatggaatgatctttatggccacgtttctacc

SEQ ID NO: 244572 - DNA, 201 bp, Homo sapiens
gggcgttgacttggaaagtcatgagaaaaggtttgaattttaaattaatgaaagaaacaaaacaaatttcaagctaatctctaactgttatttagggccamagtgatgacacctacgggctacttcacttaaaccctcctcagtcctgtgaccagcaggatccaaaatctgatcctgtcatcagaagagtagatctttttt

SEQ ID NO: 244573 - DNA, 201 bp, Homo sapiens
tagtgtgatcacagttcactgtagcctccacctcctgggctcaagtgatcctcccacttcagccttccaagtagctgggactttaggcatgtgccaacacrtctggctaattaaaaaaaaatttttttttatagagacaggatcttccaggctggtcttgaactcctgggcttaagtaatcctcccaccttgccctcccaa

SEQ ID NO: 244574 - DNA, 201 bp, Homo sapiens
gtcagtatttttcagggagagaatggaggccacatcagtgtttattgagtgattgaattgtagtcttatggtgcagacaggtccaggagaaagtaggtgtraggtggccactgtttggccttggaaggggaacagaaatatttcagtagagtggtgagggcagcaaccaaattgcaagggtagaagaatcggtgacaagct

SEQ ID NO: 244575 - DNA, 201 bp, Homo sapiens
cctgaatgctttcccagaatacgtggaaattatgtgttaaacatgatctctaacagcttacctactccattgtttatgtgcttatacttttacacacttawctttttacgattaattgttctttctcttttaaccttaaggaaaggtattttcaaaggctagcttaacagcccacaaaaccacctgacgtaagctttagtt

SEQ ID NO: 244576 - DNA, 201 bp, Homo sapiens
ttcaatgttagctgcagaaaatgacccttatggacctttgccaccaggctggggtaagctgtttttgctaatgatctataagggagatatatatctctccwtatatatatatatatatatatatatatatgttccttattttatatatatatatctcccttatatatgtcccttaacatatatatatcccttataatatat

SEQ ID NO: 244577 - DNA, 201 bp, Homo sapiens
gacataatagagtaacgatgccaaagaaagccctatgtttttgtctgtcttttaaaggtccatagctgcttaggttaaaaattggaatagttgctgctaartttgatgaatacattgtcttttctttctaatgttttctagtaaacatagtaactgatatcctttcctgcaatggaggaaagctgtcaatttcattttggg

SEQ ID NO: 244578 - DNA, 201 bp, Homo sapiens
tgttccatttttcttcaggaacatcagtcatgggtatgtggaatctcctttgtcagtcttacatgtctgtcatcttttctctgatcatttttatctttgcrcttttccattttattttgatttttctcaagcctatcctcatgtcactgtttgcagtactgccctacgttttgctgcttctaatgtgatttttcttcatta

SEQ ID NO: 244579 - DNA, 201 bp, Homo sapiens
tcaatgttagctgcagaaaatgacccttatggacctttgccaccaggctggggtaagctgtttttgctaatgatctataagggagatatatatctctccatatatatatatatatatatatatatatatgttccttattttatatatatatatctcccttatatatgtcccttaacatatatatatcccttataatatata

SEQ ID NO: 244580 - DNA, 201 bp, Homo sapiens
tcttctgcctcttgctagttaggaatttttcttccttttctgctagcatcagaggaaaagagtagatgccatgttttagccattcttcttttgaattgatkgagttttctctgggcttttgtttgctaaaaattatctgaagcatctggagggtttattcctagttttatatatgtgtctaaacacactctcacaagacct

SEQ ID NO: 244581 - DNA, 201 bp, Homo sapiens
tagatactgtattccatttgagaattcctttaataactttattttcacctttatgtttctgtttaaatgtgatctcagagagaccttctctgagcctactrttttaagatggcagtccttctcttctccctcacagtcacattccagccatttatggtgctttattctttttcataaccacccaacatagtgtattttgtc

SEQ ID NO: 244582 - DNA, 201 bp, Homo sapiens
gttaggaatttttcttccttttctgctagcatcagaggaaaagagtagatgccatgttttagccattcttcttttgaattgatggagttttctctgggctkttgtttgctaaaaattatctgaagcatctggagggtttattcctagttttatatatgtgtctaaacacactctcacaagacctgctccatcctcttacct

SEQ ID NO: 244583 - DNA, 201 bp, Homo sapiens
ctattggtttactgctgttctgcctagtacgtagaatagtgcctttgcacatagagggtattcaataaatatttgatgaacaaataaatgaatgcagtatytcttcctttcatgagtcatctgcagaatatttaaggataaataatccaaatactgtattgtcagtttttgcccaatgaagtggagaatttttcataatga

SEQ ID NO: 244584 - DNA, 201 bp, Homo sapiens
tcatagagggaagtcacttggttcaactactactatgttacaactggacttagttttaataattggtgtttactatttctagttgattttgttgaggactyccttctctacccttcaggcagtatcagtgattgtgttttataacctttagaaaaacgtttattaacaggctgccaggccagatgtagcctacatagaggt

SEQ ID NO: 244585 - DNA, 201 bp, Homo sapiens
tactttgtacaagccaaaatggagtaatgatactctgagccccaagagaatttcaaaccatagcttaattttacgattggactttgggcatgatacttaarctattatcaagttgattttttttttttgagttaataaattcttagcaaactaagtgtaaataggtcaactttttctaaactctggattgattttagtaaa

SEQ ID NO: 244586 - DNA, 201 bp, Homo sapiens
ggcatgagccactgcacccagcctgtgcagtctttcttaatcttctagtctatgataggaatttaaaaattacaatgcctgaaatttttcctaataatttrtaactttctggattatttaggaagatatttcaaaaatattttagaggtcagaacttttactgagcaagtgcttatatgagagctagattcttaagctttg

SEQ ID NO: 244587 - DNA, 201 bp, Homo sapiens
ttagcacaaatcaaggcagtggcaccaaactgctacctctattcttcaacaccatacccttgaggtttaaagaaaaaaaaaaaaaagaaaaaggcaagttygttgaagttctttatgaagcagtaaaaattactaactttattaaatcttgatgcttgagtatatgtttttttaacatttgtgtgacaaaataggaagtct

SEQ ID NO: 244588 - DNA, 201 bp, Homo sapiens
atcccagcactttgggaggccgaggtgggccgatcacttgaggtcaggagttcaagaccagcctggccaacatggtgaaaccccgtctctacgaaaaatamacaaattagccgggtgtgggcacctgtggccccagctactcaggaggctgaggcaggagaatcacttgaacctgggaggcagaggttgcagtgagccgag

SEQ ID NO: 244589 - DNA, 201 bp, Homo sapiens
aatctttgtggcgttgatgattttgcaaaaaggtagagggctgttcttcttaaaaaaaaaaaaaaaaaaaaaagccaggagatgagggggttggggtaaaraaaacctcatgaaacagaattagaatagtctgccataccaatagcagatttaatgatgctgagcttttggctaatagccagagaagggagctgagcttga

SEQ ID NO: 244590 - DNA, 201 bp, Homo sapiens
aatctgtgtgtattatacaagcaaaatgcaccttttaaagaagaaagtcgttcttttattgtgtgacttgtttttagccatcaagtagtaaattagctgcractagaaatgatcatttttcataaatggttagtattttaaaaaatggaaagtgtagtggccaagtattgggagctactcagattgagaattgtaaagtat

SEQ ID NO: 244591 - DNA, 201 bp, Homo sapiens
cacattgaccaaatatttaatcgacaaatatttattaaactccttgtctgtgtggcaggctctgtgctaggtgctgttagtatactgatttgcaaaacagwtgaaggcccaaactttgtggagcgtatggtctaatatataggtctcccttaattcttttgaatggtttgtagcgtttccttgtgtattatttattgctat

SEQ ID NO: 244592 - DNA, 201 bp, Homo sapiens
ttcacatttttattagttttgctttatccttctgttgcttctttttgaaaatataagcagatacatgtgcagtatacgtatctcatctctcctcttaatcycctaattcttgcatacttctctgtgctttgctttttttaactttacagtattattctggagtttgtttcataacagaatattctttttcatcattgcgcc

SEQ ID NO: 244593 - DNA, 201 bp, Homo sapiens
tgtacatctgaattcatggtagactttattttgctttttaccctgtcttgggaagaatcatggtctatttgatgtatagcactgagcccacgactgcctcyaaggaggcatgctggtgagctgtgctccaacccagacttgccagtcttggctctggtcctgacatatgtgtggaatgtaatttatttctatccaaagtaa

SEQ ID NO: 244594 - DNA, 201 bp, Homo sapiens
tcattgcgccatatcctgttgaatagatgtaaaaaagctaactagtctccttttgctggacattggcgttccactgtttgctattaccaatagtgctgcarcaaataacttcatacaaaagtcgtttcttatgtctgctcatgtatcaataggataggatcctagaatgagattgctgggtcaaagggtagacacatgtaa

SEQ ID NO: 244595 - DNA, 201 bp, Homo sapiens
gtcctgagtagctgagactgcaggcgcccaccaccacgcctggctaatttttgtattttttttttttttttttttttttgagacggagtttcgctctgtcrcccaggctggagtgcagtggcgcgatctcgactcactgcaagctccgcctcccgggttcacgccattctcctgcctcagcctcccgtgtagctgggacta

SEQ ID NO: 244596 - DNA, 201 bp, Homo sapiens
aagcaattctccctccctcagcgtcctgagtagctgagactgcaggcgcccaccaccacgcctggctaatttttgtattttttttttttttttttttttttgagacggagtttcgctctgtcgcccaggctggagtgcagtggcgcgatctcgactcactgcaagctccgcctcccgggttcacgccattctcctgcctca

SEQ ID NO: 244597 - DNA, 201 bp, Homo sapiens
ctttttcttagatatattcatggtattgcttatagctatattcattctttttttttttttttttttttttttttgagacagagtctttctctgttgcccakgctggagtgcagtggcaagatcttagctcactgcaacctctgcctcccgggtttaagtaattctcctgcctcagcctcctgagtagctgggattacaggc

SEQ ID NO: 244598 - DNA, 201 bp, Homo sapiens; identical to SEQ ID NO: 47862

SEQ ID NO: 244599 - DNA, 201 bp, Homo sapiens; identical to SEQ ID NO: 47863

SEQ ID NO: 244600 - DNA, 201 bp, Homo sapiens
ttatggacctttgccaccaggctggggtaagctgtttttgctaatgatctataagggagatatatatctctccatatatatatatatatatatatatatawatgttccttattttatatatatatatctcccttatatatgtcccttaacatatatatatcccttataatatataatatatttaatatggattatatattc

SEQ ID NO: 244601 - DNA, 201 bp, Homo sapiens
gtgaattaatattttttaaacttctgttttaacttctaatccagtaaatatcagtagctataattcatataaataaaagctctttgcagttggaaatccattttttttttcccaagatagagtcttgctgtgttacctatgttagagtgcagtggcacagacacaactcactgcagcctcaacctcctgggttcaagcaat

SEQ ID NO: 244602 - DNA, 201 bp, Homo sapiens
aagggtttatatagaataaagagaaaaatagattgggggtggggatcagggtacagagaaagtttcatgtagtaaagtgaatagttttttacctgattggyactgttccccagtttgcacagtattgtaaacttttaagattcttctcaaataagtaatctatgcctcttgcctttattctcagtagttatctttctgttt

SEQ ID NO: 244603 - DNA, 201 bp, Homo sapiens
ctaggcatatatatatacactaggcatatgtatatatatactaggcatatatatatacaaggcatatatatatatatatatatatatatatatatatataactggaaaacttcattcaaaaaattgttaaaatgcctaatgcctagtttctttgattattgatcacctttttttttttcacatggtaaattgatatactag

SEQ ID NO: 244604 - DNA, 201 bp, Homo sapiens
gtgtatatatatatatatatacatatatatacacacatatatatatacacatatatatacacacacatatatatacacacatatatacacacatatatatwcacatatatacacacatatatatatacactaggcatatatatatacactaggcatatgtatatatatactaggcatatatatatacaaggcatatatata

SEQ ID NO: 244605 - DNA, 201 bp, Homo sapiens
tatgacaatcggaaaaatagtgataatagctcatatttgtgccctgcatgttctaaatagtatatatccattaactgatttatctctctcacagtaactcyttgaaataggtggtagtatttttccttttctctgatgaaggaactgaggcactgagagggcacagctaggaagtagaagaactgtaattgacattccgct

SEQ ID NO: 244606 - DNA, 201 bp, Homo sapiens
attttatatggcttttatatttctagtgtttaatatattacctgaaaatatgcctagtgtgtgtgtgtatatatatatatatatacatatatatacacacatatatatatacacatatatatacacacacatatatatacacacatatatacacacatatatatacacatatatacacacatatatatatacactaggcat

SEQ ID NO: 244607 - DNA, 201 bp, Homo sapiens
tattttatatggcttttatatttctagtgtttaatatattacctgaaaatatgcctagtgtgtgtgtgtatatatatatatatatacatatatatacacacatatatatatacacatatatatacacacacatatatatacacacatatatacacacatatatatacacatatatacacacatatatatatacactaggca

SEQ ID NO: 244608 - DNA, 201 bp, Homo sapiens
tctcaacctctgggctcgaacgatctacccacctcggcctcgtaaaatgctgggattacaggcttgagccactgcatctggcctgagtgcccattttaatyatagttacactaaaccttcccatatactgagtgattatcatttgcaaaacaccggcatcttacatttctcattttatttcattcgtcctcacagcatccc

SEQ ID NO: 244609 - DNA, 201 bp, Homo sapiens
ttcacatttcaccatttctacctgtgtgtgtatgtgtgtgtgtgtgtttctatacagttttgtcacacatatggcttcatgtaccaccagttcaatccagrtacagaactgtagcatcaccagaagactccctcatgatgtaccctctttaaagctacatccactctcaagtgtgaactgaatgttaaagaaacttgctgt

SEQ ID NO: 244610 - DNA, 201 bp, Homo sapiens
cctttgctaggagaccagttggcccgtcagctctcagcagcattcactctgtgtagctgtaaaactcttctaggttctttggggaatttcaaagttgagtrgaaaatctattcttgcccacgaggaactagcaattcaataaattttgccaaagccaaaatctagaggcaatgagactaaaacaaacaaagcacaacaata

SEQ ID NO: 244611 - DNA, 201 bp, Homo sapiens
ccttgtaattaataggtcacccatccaaaagacactttcccttttgcctctctagtttcctcttatgaaagcagttttaagagaggcatttttctgagtgygtaaagactttatatcagagctgctgccttgaaatttagttttgaagatcattgtgggtgatctttattaagtctttcaggcctgtaagttactgttcta

SEQ ID NO: 244612 - DNA, 201 bp, Homo sapiens
agacagtgagaggaagttttacaagagagctgctcaaacctgtcaaggttcaaattacaatgtcaattttgttttgaaagtgtgttttttgcatatctgasgtgaatgctgttgcctttttttattttgtcactgtaatgaaaaataaaccaattatgttgaacaagctttattgaagtcatttaaagtgtgaattaatag

SEQ ID NO: 244613 - DNA, 201 bp, Homo sapiens
gtctaagcatttgagagggtcacatgtacgttttctttgagacaaagaaatggctttatctacaatcatgccttcagccaaccctctctgtgtaggtgggmtggtccactatctgggtgaaacactcaaataatggtaatcccactgcttgacaatgggtgtctcaaatatcaagttatctttgatgagcaacagacagca

SEQ ID NO: 244614 - DNA, 201 bp, Homo sapiens
tgctgtaattaaaaattgattgcaggcatctagtgaggcacagtaggtggatgccttcacaagagagtagatcctgtgggctcaaaagcttgttactgccrtgctgtctagtgattttcctaaaaccttgaccagagagtgattaggctggcgggggctgaaggtttatggatggggagcacaaagcggtctttatataac

SEQ ID NO: 244615 - DNA, 201 bp, Homo sapiens
catttgcttctagactttctcattgtccccttcctcacttcttctttttttgaagaccttatgtctcatctcatagtttagctgcatgattgcacatttayatttaaaaaggcacatccttaaagggacctcagtgctagatgttggggataatagtaacgatagtgacaacataaataactgatcattattcaccattta

SEQ ID NO: 244616 - DNA, 201 bp, Homo sapiens
ccttaacacttcctctcctctaatcccctccagtgctgagcctattgaaactcttttaagggtcttcagagtctacaaaaattgacacacatatgaagaastttgggatattgggacaacatacattttatggccattttctccttgtctgccactctgacctaggtgagatggtcagagcagatgttactagcttcatgt

SEQ ID NO: 244617 - DNA, 201 bp, Homo sapiens
gtgttacccagtttggggggccctagaaggtctttggaagtgatgtttcagttgagaactgaaggatgagtagggctcagtcaggcctcaccaatcttgcycattcaaaataatctgagagttggatcttgagtaatttttatgagttgcattttctcttgtgctttaagagctgacctccaaactccattgtaagatgat

SEQ ID NO: 244618 - DNA, 201 bp, Homo sapiens
tgatcaatttttgggtaaatgcattcatgaattcaataacaacatattgagcagttgccatgacaaggaagaaacactagcagatgtcaggtaagccatcrttctttccataagaataacagatcatgaccatgagcagtcataagtgcaatgtggtgggtaagctctggccactatgggacacacagaaggagtgttacc

SEQ ID NO: 244619 - DNA, 201 bp, Homo sapiens
ttggttaattatttagctaaagaacttttagtattagaatttttgtgttaatgaaattgttagttatgttcaaatcatgatgtatatgatgactaaattaycataatttttcttctaatggtcattttctgcttctgtccctttaactgtgttatagaccatatacctgattatgaaggattatttagtttaacagttctt

SEQ ID NO: 244620 - DNA, 201 bp, Homo sapiens
ttgcttagtagaaggaaaaagaataaaaagaaagcatttttgatcaatttttgggtaaatgcattcatgaattcaataacaacatattgagcagttgccawgacaaggaagaaacactagcagatgtcaggtaagccatcattctttccataagaataacagatcatgaccatgagcagtcataagtgcaatgtggtgggt

SEQ ID NO: 244621 - DNA, 201 bp, Homo sapiens
cctttgatgatgctcctatttcagaatctgcctgtcaggatgtgaccagctgcctgtaaatggaccgaagccgttgaggggggttttggggttcatgtccyctgttgtgcacaagtgcacgcacacacacacatgcatcatttaatacttcttgggtaatccacagttccattgaaacattccggacataaacagacatta

SEQ ID NO: 244622 - DNA, 201 bp, Homo sapiens
taaacatacaaaatcaattctattcctgtataaaaataaaatcatatttacaacatataacaaggtgaaatatgtagatgtaaatctaacaacatttgtakgtacaagacttgtatgctgaaaactatgcagtgccatgagagaaatcaaataacatctaaataagtggagatgcatactgtgttcatggattggaagatg

SEQ ID NO: 244623 - DNA, 201 bp, Homo sapiens
ttctccctataattatatgcagatttaacacaatttctatcaagatcccagcaagattttttatatagatgagagtattctaaaatgtatacagaaaatcrtaggaagtagaacagttaaaccatttttaaaaagaaaaaaaagtgtgaggagtctatctactcgatttcaaggcctatataactacattgatcaagatga

SEQ ID NO: 244624 - DNA, 201 bp, Homo sapiens
aggctggcttgatttcacaactgtgcttatttcctgaaataagcaacagtctaccatttcccttaaaaagtaagcagtaaatgagaggtgggaaaagaaakcagtttagagcaataataagaaagcctaatggtggttcgggactatattacagcagcctaattaaaatgatttataactgcacagaaagtctctttcact

SEQ ID NO: 244625 - DNA, 201 bp, Homo sapiens
ttccagaagacatcctggtgttgctgtagctgtgggtaaagctccagttcagagcaacctagagggcttaaaaagcatgcattaagagtgtgggggctcaytgagggaagaatgaactagaaggaactagtttgactacagtgctcaagatccttgagtccatctctggcttcattaaaatagggaaaagccagtatttgg

SEQ ID NO: 244626 - DNA, 201 bp, Homo sapiens
cttccattagtaagactggtaagaaaatatccaacacttgaaaataaggctgggtgaagaggcccctgaccttttcatgtaatactggcatattgttgaayacacatgcccagggattattaaattattttagatagggatgcagcactgttatactgtaaagaaccagagagaaaatatttctggctttgcctgtctctt

SEQ ID NO: 244627 - DNA, 201 bp, Homo sapiens
ttcagtggcataatgacccattcttatcgaggcctttgttccatattttatttgtgccaatctttcttaggttatgagccctaatagtttatggcagcagrcaagagactcatttctaacccattaaattcaaatggactttcttccactgtccatttcatttttggagctgttataaactaccgaaaacatttgacagga

SEQ ID NO: 244628 - DNA, 201 bp, Homo sapiens
tcccttagtgtacagcacagtttttgctctcacagggtttttctctttaggatgcgtagcaccctatgcattaaatacatagcatcctaaagacaccctactcaccatgagtctgtaggctctttcctgatgagggcactggccatatatgaatggaaaactcaactcatctcctcagctttagatgttgctgctgttcag

SEQ ID NO: 244629 - DNA, 201 bp, Homo sapiens
gattatgtttgaaggagaaagcataaaagttgtacctaccacaataaggtatgttctcatcagggttgaaagaaataatagaggcagcatcagttgtcccyagtgagaattaaaaataattccctgtgggaaactaaattatcagagatccccaatgcagaagcaaccaataaaagtcagtgactcttggattcttgctct

SEQ ID NO: 244630 - DNA, 201 bp, Homo sapiens
ggggctgtgcctgtgtctgatatgactctgcccccaactgtcccctccccacatgcctagcacagtgcccggtacacagtgagcaagccagaagtactgartgaatgagtggttgtgtcttcaggaagatgagtaagggtcggcataggaaagagtttctgaaaatgttccaagtatatcagttcttctgttactgagccc

SEQ ID NO: 244631 - DNA, 201 bp, Homo sapiens
atgtatctgcattttgattctaagccctttacttccataggactgtgccctgaatttatgcttaggtctgagaatgtctgtgagttctagaggggctgtgyctgtgtctgatatgactctgcccccaactgtcccctccccacatgcctagcacagtgcccggtacacagtgagcaagccagaagtactgaatgaatgagt

SEQ ID NO: 244632 - DNA, 201 bp, Homo sapiens
tgggatgtttatacctgtaaagatctaaagacaagaaggagcatggcccctctgagaaaatgaaagaaggccaagtggctgcagcgcagactggaaggagrcgaaggctccagacacagctggagaggagccaggtccgacttcatccaccagggggcctcagcaaggggaagccattatcagtaggcatggatgtgagaa

SEQ ID NO: 244633 - DNA, 201 bp, Homo sapiens
aagtgaaaagttggtattttttccactgtagatttctcagtcctattctccaaagaaaaatcaccataaacgttttcttctgtattctttaagaatgcttrttcacatgctggcatatatgcctatccattcttttacagagtgtgattgtattatgtacaattctatgccttgttttttcacttggtgtttttgctgtct

SEQ ID NO: 244634 - DNA, 201 bp, Homo sapiens
ggcaacatgggattactcaattaacatttactgagtgtctattaggtgccagtcagtttgctaagccctgggtttgcaaaagtaggtaagatacttacttractttcagcaatttgaaggctagtggcagagactgatatgagtacctggaggtgatgaatatagttccagggggatgcgaaggaagctacgtctacctgg

SEQ ID NO: 244635 - DNA, 201 bp, Homo sapiens
taaaaacttaaggcatacaaaagtgcagtaagtgaaaagttggtattttttccactgtagatttctcagtcctattctccaaagaaaaatcaccataaacrttttcttctgtattctttaagaatgcttgttcacatgctggcatatatgcctatccattcttttacagagtgtgattgtattatgtacaattctatgcct

SEQ ID NO: 244636 - DNA, 201 bp, Homo sapiens
agtgcctacgcttccacccggtatacagtaatacatatttgaaacatagagctgttttacatatttctctaagaaagaattaggaataactcttagcattrtagcatcatcagcatactaacagtgcatcaaatattggagatgtgagttttaaacactctatcttagctgggattatagacacctgcaagcccaggtgtc

SEQ ID NO: 244637 - DNA, 201 bp, Homo sapiens
ataacttgcccaaggtcatgtggaggagactaccttcaactaggtgatatcttgtcagccatcagcccgccagctccatggtgcctcctgctttggctggktagcaggactctcctgcgtgtgctccctgtagatatttatgaatgtgtttcttttttttactcgcttcatgtttgtaatccatgaacatgtgtgtgtgcc

SEQ ID NO: 244638 - DNA, 201 bp, Homo sapiens
accacttcttcttcttcttctttttaaacataacagcagtgctagaataaatagctaaagactctggaaaccaaagcacacactcttttatacaacttggwataacatttttgcagtccacaacttggaataacactttgccgtccacaaaatagaaacccttaggggaaggaagggtgtgtgcatatttgtccacacaac

SEQ ID NO: 244639 - DNA, 201 bp, Homo sapiens
tcagtgaactgctggtcactccagtcaggagcttgagggatagctgtatattcacagcttgctcctcagtcactgggcaggtcccaaagacaccttccatkactactagatactactttcatcagtcatttggcatcagatatctagtgtggtttaaaaatatggcttttctccaagcatattctctagacattctgtttc

SEQ ID NO: 244640 - DNA, 201 bp, Homo sapiens
accacacagttgcatctgaggacaaatgtgattgcactatacagaaacagaataaggtttgtgattaatgcactcttggagctcacaatctcaccatctaytcgcagagatattgaagtagtagttacttcactcacagaattctatcatagttcctggaaatgagctagagtttcccttgtcaattcctttatgggtgct

SEQ ID NO: 244641 - DNA, 201 bp, Homo sapiens
ctgaatttcattcacttcattgggttctgtctgtttttgggtactgaggagaggtgacctgaaaatacatggtattttctgtaaaaatatttcatcatcartgaactgctggtcactccagtcaggagcttgagggatagctgtatattcacagcttgctcctcagtcactgggcaggtcccaaagacaccttccattact

SEQ ID NO: 244642 - DNA, 201 bp, Homo sapiens
gaggcaagaggggtcagagagacagttttagaaatcagaaaggtgttagtcacctttcttttgcataggtttcctattttgaatttctgaaacaatgaacmtctaaatgagagatcagtctggttagcttcaatcaagacttagagtttaagaagccatctgctcctaattctcctattttgttcagatctcatatagata

SEQ ID NO: 244643 - DNA, 201 bp, Homo sapiens
gcttaatgttaccattgcctagtaataataccttaactcagtgaaaatatatgcgcctccataaaccttaaaaggctgcctttaatggggcgacttcagakttacctggcaggtgagtaggtaagtcgtttttcatcaaacaggtcttttgtcttaccttgagttactaccttctctgctagaatgcatggggccagccaa

SEQ ID NO: 244644 - DNA, 201 bp, Homo sapiens
  misc_feature (1)...(201): n = A,T,C or G
gttttagaaatcagaaaggtgttagtcacctttcttttgcataggtttcctattttgaatttctgaaacaatgaacctctaaatgagagatcagtctggtnagcttcaatcaagacttagagtttaagaagccatctgctcctaattctcctattttgttcagatctcatatagatatctttttcttctctattctaatgt

SEQ ID NO: 244645 - DNA, 201 bp, Homo sapiens
ataaaaatatttttgcctaaatgtatcactttatagatgtggaaaatgggactctgtgagggggatgtatttgtataggataaggtaatcagccataactyaaactctggtcttttctagttcagttttctctctagttggtctaggaagcctcctggtgcttcagttttcttactgtaaaatggggatgataataatagt

SEQ ID NO: 244646 - DNA, 201 bp, Homo sapiens
aaacaacataaaaatatttttgcctaaatgtatcactttatagatgtggaaaatgggactctgtgagggggatgtatttgtataggataaggtaatcagcyataactcaaactctggtcttttctagttcagttttctctctagttggtctaggaagcctcctggtgcttcagttttcttactgtaaaatggggatgataa

SEQ ID NO: 244647 - DNA, 201 bp, Homo sapiens
caagagaatggctgatcattccagcattttctctttctgttccgtgtcacattcacagacacaccacacaaaacgtttgtggattgcaggacaccctaccygttaccatgtttctgtgcctcttttcatgcagtgccctctctctggaatcacctgcctccacccacctttcatgcaaacaatttctactccacctacttt

SEQ ID NO: 244648 - DNA, 201 bp, Homo sapiens
aggaggagtatgtctttactgcctctgatcaaagttgaagcatcacaataaccaagaagcaggcaggagtttgagatatatatatatatatatatatatayacacacacacacacacacacacacacacacacacacacacacatatatgtatatatatgttttatatgtaatcaagaaagctttttaaggctgagcatag

SEQ ID NO: 244649 - DNA, 201 bp, Homo sapiens
agacctgtccaaaccaattcagcataaaacaaggttgtcctctctgagttatgtgtgttacaaataaagcacagttgctcaggatgcagattcaaattgcygaatattagaatctaccatcttttgatcttcataatatctacgaatcaatgcatgataaaatgcagcagacctgcaagcctcctgacatgattcccttta

SEQ ID NO: 244650 - DNA, 201 bp, Homo sapiens
gatattgatttggcaccgtgcttagcagcagctcggccaaatggggcctcctcaccactgcagggctccggccgccttggcggactaggcagattagaaargcccggccccaaatacttgcggttgccaagcgaggtgggctcagccagcagatctgtatttcaggcagcacaaaaggattcggtgtgaggctgttaccaa

SEQ ID NO: 244651 - DNA, 201 bp, Homo sapiens
agacgtcagagggagaagcagggtaacagtgtcgccaaagaggcccctttccccacaaaggaagccagtgagagagaacagcctctgttgacagaacattrtgggggccgcctcacatctggtgtgggcggggaggaggggctgctgtgcctggtggtgctacttctgatgtcctaaatgtgtctccagaatttccccctc

SEQ ID NO: 244652 - DNA, 201 bp, Homo sapiens
agatccatggtgcaaaactggagtattttaattgaccattgtatacctagtatcacagagtgtgcagcacatagtaggcactcagccaatgtttgttgaaygaatgaatgaatttaaaaggttccagcatttatttgttttgtgagatcatttccctccagatacagagaaaagaatctgtaaatcttcacctttggtggc

SEQ ID NO: 244653 - DNA, 201 bp, Homo sapiens
aaagtgacaaccctcgtgggaaaaattccaaagccgagaagtcatcaggagaacagcaacagaatggtgagtagacttacactggtgaagggctcttttcrcggcattaatgacataatgaatggaaactggtgaacaaccctactgatggggtcagctcacagggcaaggcttccctgctcacccagttccttctgatcc

SEQ ID NO: 244654 - DNA, 201 bp, Homo sapiens
ggagggaaagtattaaatgaaatatttcttaaaaagagactcattgattcagaagtctctgttggctctgcccatagtgaaggcagaatggtttctaacakggtcttaattgacttgatgggagctgttttcaaggactcagcactctttcctttcaatgctttcattaaaattcccaagtgcttcctaaatcccattgag

SEQ ID NO: 244655 - DNA, 201 bp, Homo sapiens
ggagtctgggggcgcagaagggggagcgcgccgagaaagtgccgggcaaacgcgcgccgcgcctggctgggcatcgcgagctgggcgaggagacggggagkggacagcccaaactatctcagcttcaccgccagtggtcacctacctgcagctatggagtcgccaaccaaggagattgaagaatttgagagcaactctctg

SEQ ID NO: 244656 - DNA, 201 bp, Homo sapiens
atcaataaatccttaaccaagttagatttcactatggaaggcagaggggtttgaaaaggtcatgcattaaaatttcctctcttaaccaactaattccaccwcattgtttgagatgatgaatctggcaataaatgaagagaaaaagtggtcaaaagtcccaggtaatagcagcatccttaggaattgctgagcattgatctg

SEQ ID NO: 244657 - DNA, 201 bp, Homo sapiens
cctgaggttaccagcagtcaatgaccagccctctatcaataaatccttaaccaagttagatttcactatggaaggcagaggggtttgaaaaggtcatgcaytaaaatttcctctcttaaccaactaattccacctcattgtttgagatgatgaatctggcaataaatgaagagaaaaagtggtcaaaagtcccaggtaata

SEQ ID NO: 244658 - DNA, 201 bp, Homo sapiens
tacctcagatggaaatgcagaaatcacccatcttctgcgtcgctcactctgggagctgtagaccggagctgttcctatttggctgtcttctgaatttttcyccacattttcattttgatatgaatgttgcttctaaaagccatggttattaaataaatctcctgaggttaccagcagtcaatgaccagccctctatcaata

SEQ ID NO: 244659 - DNA, 201 bp, Homo sapiens
gcacccactgtcctgcacccactatctggcactccctagtgagatgaacctggtacctcagatggaaatgcagaaatcacccatcttctgcgtcgctcackctgggagctgtagaccggagctgttcctatttggctgtcttctgaatttttctccacattttcattttgatatgaatgttgcttctaaaagccatggtta

SEQ ID NO: 244660 - DNA, 201 bp, Homo sapiens
tgcgctgcacccactgtcctgcacccactatctggcactccctagtgagatgaacctggtacctcagatggaaatgcagaaatcacccatcttctgcgtcrctcactctgggagctgtagaccggagctgttcctatttggctgtcttctgaatttttctccacattttcattttgatatgaatgttgcttctaaaagcca

SEQ ID NO: 244661 - DNA, 201 bp, Homo sapiens
gctcgcgcatggtgcgctgcacccactgtcctgcacccactatctggcactccctagtgagatgaacctggtacctcagatggaaatgcagaaatcacccrtcttctgcgtcgctcactctgggagctgtagaccggagctgttcctatttggctgtcttctgaatttttctccacattttcattttgatatgaatgttgc

SEQ ID NO: 244662 - DNA, 201 bp, Homo sapiens
acctaatggtaaatctttacttctaaccatttgaaatgttccttgcttcttttggcccaacattttagcgctttagatgtttttggttttgctttaaaaawttttttttaagacatggaaatctcagtctatcacccaggctggagtgcaatggtgagatcatagctcactgcagcctcgaactcctgggctcaagtggtc

SEQ ID NO: 244663 - DNA, 201 bp, Homo sapiens
aaagggaactccctgaccccttgcacttctggagtgaggcaatgcctcgccctgctttggctcgcgcatggtgcgctgcacccactgtcctgcacccactrtctggcactccctagtgagatgaacctggtacctcagatggaaatgcagaaatcacccatcttctgcgtcgctcactctgggagctgtagaccggagctg

SEQ ID NO: 244664 - DNA, 201 bp, Homo sapiens
atttcctccaaaatagcttctcccactttctctgtttctgttaatgatgctatctaatatcacctgaggggtttattagccactcagtgaggctaggagtkttgaggtcatctaacatattgttctccttaactgcaacctcatctggtcctcctaccacttccaaaattcagataattgctaagtcatatggcttctacc

SEQ ID NO: 244665 - DNA, 201 bp, Homo sapiens
ttctgagaggccccagggttctgtaggtcaatgacaggctttagttcaaatccacttctactacctactatatgaccttgattgagttacttaaagcttcwatgtgaggattttctaggatatcatgcttgtaaaaaaaatagtacatacaacataccaaaaataaatagtactatacttctattactactactgcatgtg

SEQ ID NO: 244666 - DNA, 201 bp, Homo sapiens
agagggctttgagtcagagggctgtttgttgatcagacacagagctagcctctcaactcacaccaaaatacctacttctgagaggccccagggttctgtargtcaatgacaggctttagttcaaatccacttctactacctactatatgaccttgattgagttacttaaagcttcaatgtgaggattttctaggatatcat

SEQ ID NO: 244667 - DNA, 201 bp, Homo sapiens
gcataattctatgctctgatttgggaagcctgtgaaaagaagggagataaatgtaggagtgttgttattttactatttttttatttatgttattaacagtmaggctgctggctcacttagctccatgcattattttcagctgtgtagtatttaatccaagctcccttgtcttcatttccatgcattgtatcaggaaaacat

SEQ ID NO: 244668 - DNA, 201 bp, Homo sapiens
agccctttaggcactcagcataattctatgctctgatttgggaagcctgtgaaaagaagggagataaatgtaggagtgttgttattttactatttttttakttatgttattaacagtaaggctgctggctcacttagctccatgcattattttcagctgtgtagtatttaatccaagctcccttgtcttcatttccatgca

SEQ ID NO: 244669 - DNA, 201 bp, Homo sapiens
gcagaatcgacatcacctgggggctttttagaaccatgaagcctcagtcccccgaccaccccttcagacctattgagtcagaatttgtattttaacacatytacaggggatgcctgttcacattagagtttgagaagtgctgtgctaggactatcctttcaatctttcaatgaatgttttatgaagataaagtgaggagag

SEQ ID NO: 244670 - DNA, 201 bp, Homo sapiens
tatgcatttagtgatgtttgaccatgtaatgtttcctaaacagttttactgaaaaatctgggttaggaagaaacaaaggaaattaaactgtaaagcaaagwtgtgagtggctttgtgttttcttagaccttttgtttccaggtctatttgcatctgtttctttttgcttgcctctgagcagaatgctagtagaaattgtgg

SEQ ID NO: 244671 - DNA, 201 bp, Homo sapiens
cttgctcccatgtagataaaaccacccctgagatggctgggaaggcagcataagaaatgtcagcacaggtgttaggaatgcctcattaatctagggtgagyacagatcacagagggcagagccctttaggcactcagcataattctatgctctgatttgggaagcctgtgaaaagaagggagataaatgtaggagtgttgt

SEQ ID NO: 244672 - DNA, 201 bp, Homo sapiens
tggaaactctgaaataatgattaattccagagtggaagatggtttttggctgatattggtgctgaggcccctgcttcctgggtggtgagaagaaagcccgygcatgtcaaggtcattgccttctaagtccctggtactgctggaatttagaggcttgctcccatgtagataaaaccacccctgagatggctgggaaggcag

SEQ ID NO: 244673 - DNA, 201 bp, Homo sapiens
cctatgtacagacagtggtactgaacagaaaatggcaagcaatggactctgacacagccagataaatttgtctttaagatctatttgggtcctaatagagktagttaaactaatttgataaaaaataggttgctgatggaattccaaatttcatactcacttatttagtcatggtgcatgtacttaaatgtcataaaaatt

SEQ ID NO: 244674 - DNA, 201 bp, Homo sapiens
tgacttactcttctgctcacttgctcaccttctttgaggcttggctcccatctcaccttcttgatgaggccaactctaaccaccctgatgaatattgcaaygtgtccttcctgctccatatactccaagtccctgaccttactttgcattttttcccacagctctggtcgccaatgtagcacattatttggttacctatta

SEQ ID NO: 244675 - DNA, 201 bp, Homo sapiens
ggaggtgtccttcagttcatggttaatttgaaccagattttcatgtgtcttcaagttggtgacctatgaaatagtgttgtggtttaaatccctgaacccartagtagggaccaaggtggacctggcaggtgcacttgtactcgagtgtagttcatcagagactggacctcgagttcctttgtctacccaaggaagacatgt

SEQ ID NO: 244676 - DNA, 201 bp, Homo sapiens
cagcccaggctggaaatcactagcctataggatttttatgtgtgacatattgactggaggtgtccttcagttcatggttaatttgaaccagattttcatgkgtcttcaagttggtgacctatgaaatagtgttgtggtttaaatccctgaacccagtagtagggaccaaggtggacctggcaggtgcacttgtactcgagt

SEQ ID NO: 244677 - DNA, 201 bp, Homo sapiens
tgtggcctgatgtccagtgttttgaaagccattgttttatgtatttgtatgtttttagattgtttcttatgggaggataaatctagtcactgattcttcaytttgggcagaatctgccatattttcccccataatcttgcattattctgtatcttggttaagagtctagtcatcattatctaacttggaggaatctatagc

SEQ ID NO: 244678 - DNA, 201 bp, Homo sapiens
aagaggggctgcagtggctctctcccttcctcttctcttctcactgtaattttaggaaccctttgggcagtagctacacctatagttaaagggaatacagraagtactcaggggaaacaaaaaactgcctttctgaataaaaatatggaagagaagaaatgtccaaaatagcatctggaaacaaacatttttatgaaacta

SEQ ID NO: 244679 - DNA, 201 bp, Homo sapiens
acagtaattctccgccagatagctgaaaggtgcagctaatcagataattgaaaattaaccctttatgcactgaaaggtaactctggtcagtgctttttgcstttccctgagtagctccacatcttcaggtctagtagaacactcaagtttgtgtccatgtctgaggtttgctctttgagtataatgtatgtgctaggaatc

SEQ ID NO: 244680 - DNA, 201 bp, Homo sapiens
caggcactgtggtaggcagtttttagatatgcttgatatgtgaagattggaaattacaagacagataaatcaaggctggatattcagattgcaaaaggcarctttgcaaaagaattagtcatagagtgtctgtaaatagagtactctcaactgcaatttgaattgctcaatttacaaaaataatcagtttacagagagttg

SEQ ID NO: 244681 - DNA, 201 bp, Homo sapiens
tattggcctaagcatggggtcgatgttgggacttggcacctgttgagactggagaggagctagatgtgggggacctcacatcattctgtaagtcgactgcytattctgcaggcagtgttcagttaggtctagtttggggtaaaggcctggacagtatattcacatcgcgtaaggatagtcaatgtgtgaggcaccctgttt

SEQ ID NO: 244682 - DNA, 201 bp, Homo sapiens
gtttgtcttcaaagggtttgcagtctaattagggagacagaagtgactactacaatacagcatgtggaaggaaatgctagcaattggtaggaggagctggragagtcagaacggggacgcttcagccagcctggtgtggaggtgaattcaagggagtcctcctggagaaagtgagcattagctgaggcttgagggtctgaa

SEQ ID NO: 244683 - DNA, 201 bp, Homo sapiens
ctaattctagagggacccaaagggaagcctcccaggctgcacatctcatgtgatgggcagaagtgaagatccagggtgtgctggggagattagcagggggwttagtaacaggtgctaccttctttggagactagctaacggaatgaggtttgctcagttttggtggctaatacagaatgctgtagtaaatgtgaggagggg

SEQ ID NO: 244684 - DNA, 201 bp, Homo sapiens
cttctgcctctgtagagtaaccctttttgccctcgaaccaatggatttaacttatgatttaaaaaattaacacactgaaaataccacctgcctgaagcagsacaacagagaatatgaaagctcctgtaatgctttggatagaaagctatggggtggtgattctccaatgggcaatgggagagtgaactcaattttgcttcc

SEQ ID NO: 244685 - DNA, 201 bp, Homo sapiens
catgaagcaaactgagtgcagaagctctctaacttttctataaatgtgttctgctctttcacagttgtcacacatattttgatagcagttcttttagtgastgtccaaagcattaaacttaggttctacagaaataacaactccaattttgtgtccatattttattggtttgtgtcatatttaattacataattataataa

SEQ ID NO: 244686 - DNA, 201 bp, Homo sapiens
ctgtaggggctacagcatcacgggagaccctctagtagtggagtgtggcattgggtatgtttgtagggaaatcacgctggtggcgaggttcaaattccttytggatagaggaaactctcctggtgtcccactggtctggatcctgattcttgcctttcctggcgtgacttggatctgggtcagcaattcccatccttggat

SEQ ID NO: 244687 - DNA, 201 bp, Homo sapiens
tctgcatttgaggctggttcctatgccagcctctaatgatccggctgttgccccttcctgacttactcttctgctcacttgctcaccttctttgaggcttkgctcccatctcaccttcttgatgaggccaactctaaccaccctgatgaatattgcaatgtgtccttcctgctccatatactccaagtccctgaccttact

SEQ ID NO: 244688 - DNA, 201 bp, Homo sapiens
catgcctttgcagtgactggagaggtaatggtttttgcttagcctccattttctctccagcgtcatttcttattactctccactggctcttccaactccasctacattagccaccttgcttcttgaaccaccagccatacttctgcatttgaggctggttcctatgccagcctctaatgatccggctgttgccccttcctg

SEQ ID NO: 244689 - DNA, 201 bp, Homo sapiens
gtaatttctgctttaacctcccatagactatcttcctggctgagcagtgggatctggaagggacctccagattcactcttgattgtgttcagagctgatgrctcaacatgttcctggcagcctaggctagccagaaatgcctgtgttttttatgtagaggtcgggggacaggagagaggagccctggcctctcaatcttgg

SEQ ID NO: 244690 - DNA, 201 bp, Homo sapiens
gacttcctgtttcccaggagtaatctaaccaatatggaaagtcttggagttctccgttgcctctgaaattttctccatcctgagcctgatgagataaatayctagtagtgatttgcgtcttcactgggttataaccaatttaaatataaagactacaactaaatatgtatttctagatatggagagtggtactgttaacct

SEQ ID NO: 244691 - DNA, 201 bp, Homo sapiens
tagattcagcaagacagtgctggtaagaatactcaacatagtgccttgcacacagtggatgtgcaatacatttttttccttacaaaactatagtttttgtrccatcttggcttttccattttagtattttaaaaggcaagccctgaaagcaagtaagtgggagacttatcctctgtaaaaacctttggtaatttctgcttt

SEQ ID NO: 244692 - DNA, 201 bp, Homo sapiens
ctatggcaaccacagggctccctgtctttgtttcgcatatctccagtgcaaaccttcattgcctgttccttgtggcctgatgtccagtgttttgaaagccrttgttttatgtatttgtatgtttttagattgtttcttatgggaggataaatctagtcactgattcttcactttgggcagaatctgccatattttccccca

SEQ ID NO: 244693 - DNA, 201 bp, Homo sapiens
agacatctgtactgactagtggatcactttgggccaattgcttgcctttctaaactttccttaggaaaaaaaaagtaataatgctgaattcacaactacawgttgtgtagattcagcaagacagtgctggtaagaatactcaacatagtgccttgcacacagtggatgtgcaatacatttttttccttacaaaactatagt

SEQ ID NO: 244694 - DNA, 201 bp, Homo sapiens
ccacctgggttacttgtgttggactgagccctggaaaccttcccaaggcagtaagctatggcaaccacagggctccctgtctttgtttcgcatatctccartgcaaaccttcattgcctgttccttgtggcctgatgtccagtgttttgaaagccattgttttatgtatttgtatgtttttagattgtttcttatgggagg

SEQ ID NO: 244695 - DNA, 201 bp, Homo sapiens
tagctggatactcaagtgggattctttgcagatctctctatttagctctctttatgtagctctttttttctctggtatgctgtcctgtgaattctaacttycttggtcttcctggaaccccaactccatctcctgactcagagagttcactgggctccacctgggttacttgtgttggactgagccctggaaaccttccca

SEQ ID NO: 244696 - DNA, 201 bp, Homo sapiens
cttcctgtgctcctggcctgtggagagaagtgtagagagggcccatctgataaagagctctccttgccagcactgtcccagagcacacagcagctttcagygaggggttctggcccctggcacagctgggctagctgctcaaagccacagggtccatggcaacacttcaactgttttggcttattttttgcaactagtttc

SEQ ID NO: 244697 - DNA, 201 bp, Homo sapiens
tcccttttgggtattatccctgagattgagaggtgatccagagggttgttccttcctgtgctcctggcctgtggagagaagtgtagagagggcccatctgrtaaagagctctccttgccagcactgtcccagagcacacagcagctttcagcgaggggttctggcccctggcacagctgggctagctgctcaaagccacag

SEQ ID NO: 244698 - DNA, 201 bp, Homo sapiens
aaaaattagccaggcatagtggtgggcacctgtagtcccagctacttgggaggctgaggcaggagaatggcgtgaacccgggaggtggaacttgcagtgarctgagattgcaccactgcactccagcctgggcaacagagcgagacttcttctcaaaaaaaaaaaaattgttaatttatttaaaactgaattttaagtctt

SEQ ID NO: 244699 - DNA, 201 bp, Homo sapiens
gggggacacttgcgagagtaagacagtgataggcagagtggctcacacattcctgctggagaaggaggagccctttaccatctattcctgggtcagtgackcattcaaccttctctcccttttgggtattatccctgagattgagaggtgatccagagggttgttccttcctgtgctcctggcctgtggagagaagtgtag

SEQ ID NO: 244700 - DNA, 201 bp, Homo sapiens
tttattaaatgtgcattgattttatgaataaatcagattgggatccttcatatatttctatcatgggtcagaactaacgtcatagttactaggtggaactstgggtaaataagtttggattgtgactcatactttcaaatggctttgcagttcactgcatactcccacacgtagactctcatttgaccctcacactggccg

SEQ ID NO: 244701 - DNA, 201 bp, Homo sapiens
gacctgtgctaacattcttaggtatctgctagccacaataaataaatcaatgtactttgtgtccttagctcccacaatttagccaaaatatttgccctggygtgcttataccagtccaagcaagcattaggtcatagcctgttcctttccttatttggagatgtttttacctttctcagcattccacaagttacttcgtcc

SEQ ID NO: 244702 - DNA, 201 bp, Homo sapiens
ccagttgttagacatttaccagcacacctatgccatgggggacacttgcgagagtaagacagtgataggcagagtggctcacacattcctgctggagaagsaggagccctttaccatctattcctgggtcagtgacgcattcaaccttctctcccttttgggtattatccctgagattgagaggtgatccagagggttgtt

SEQ ID NO: 244703 - DNA, 201 bp, Homo sapiens
ctctgtgtttcctctactcaagccattaatcctggaggtgcttagtacagtatcagatgtatttgctcagggtggatcattctgaatatttgatattcagktatctgtgtggttgtgcatcatttggctgtttggcggtgttttgccaaaatggttttgagagtaagtttcttagattgcctaataagaccgaagtgcatt

SEQ ID NO: 244704 - DNA, 201 bp, Homo sapiens
acagggataactcattagggctttctttgtcttctttcttgagggtctaagctaagcagcacatatgtaaaagagctttaagttgaaattcttttgagagktgtgtgtattttttaaaactggaaatgcagttttaccaactgcagttgaggaaggcccacatgtaaaaagtaaagtagaggttcctcttcaaagagactt

SEQ ID NO: 244705 - DNA, 201 bp, Homo sapiens
gcctgtttaccaattattgcagtgcattgcacttttttctgggtctggtctttcagctacatattgtgaaggtgctatcccgaccagtctctttgcataamcccacagggccacccacgtggtctatgggacagggataactcattagggctttctttgtcttctttcttgagggtctaagctaagcagcacatatgtaaa

SEQ ID NO: 244706 - DNA, 201 bp, Homo sapiens
ggaaaatacttgtgtgtcttgcctgtttaccaattattgcagtgcattgcacttttttctgggtctggtctttcagctacatattgtgaaggtgctatccygaccagtctctttgcataaccccacagggccacccacgtggtctatgggacagggataactcattagggctttctttgtcttctttcttgagggtctaag

SEQ ID NO: 244707 - DNA, 201 bp, Homo sapiens
ataaagaagcctaatgtattgtcttagtctgttttctattgctataacagaattacacagaatgggtaatctataaagaaaagaagtttatttagctcacrattctggaggctgggaagtccaaggccatgacactggcatctggcgaggaccttcttgctgcatcatcatatgttggagggcatcaaatgctgagagggc

SEQ ID NO: 244708 - DNA, 201 bp, Homo sapiens
tatttgtcttgctttagtcatggggaataataagctgtagcctatatgctgctctggttctatctaacaatcttaaaagcaagacataaaagggatcaaartgtctcaaagtaatttaactgcatcccagaataaagctcaaggatatacatagagtacaaaaatatccagcacccaacaaggtgaaattcacaatgtttg

SEQ ID NO: 244709 - DNA, 201 bp, Homo sapiens
ctcattccccttgtgtgctgagtcacatgaaaagtaacatttcacttatctggagggtgcaaggaacagtaattctccgccagatagctgaaaggtgcagytaatcagataattgaaaattaaccctttatgcactgaaaggtaactctggtcagtgctttttgcctttccctgagtagctccacatcttcaggtctagta

SEQ ID NO: 244710 - DNA, 201 bp, Homo sapiens
gttaaatgccacactttcttacattaaattctaaagtttacttctgttcttcctttcttcaattctaatccatgtatgtgtctgatttgtcctacattagyataacattattgtatttactatagctttttaatgtacatattattatccgattgggtaagtttcttttcattgctgtccttttctttttcctagaaacaa

SEQ ID NO: 244711 - DNA, 201 bp, Homo sapiens
aacacatatgattacttccttaaaataaattcctagatggataattaccttatcaaagacctcttcttgcactagtagtacattgatgttaggccattgayaaattgtcccccaaagctgtgatacccgtttacgttgttactagtagtttatgagatagtccatgttccacctcatttaggccgagatcattaaaacaaa

SEQ ID NO: 244712 - DNA, 201 bp, Homo sapiens
tgtgactaaagataaggggttgagttcttggtgtgggtttttgagaggaggtgggctggaggcagctctggagaggacagcatcttttccttactctttgkggcatctcttccctactctgtattcagtgccatcatgttggtagcttggaattggctacagtgggccacaggtatcagtaaatgctacaaataagagttt

SEQ ID NO: 244713 - DNA, 201 bp, Homo sapiens
ccccaaagcactcgcatgacttcccaggctctgggaatccaacccttagggaaaagacaagtctgtcttcctcttgttgcatcagtgtccagcttgtcctyctcttgctcaatctctcctaaaacattgtcctgttaaagcttcctttagggtaacagaaaccagccctcaaggatgcagatcccagctggctccctcttg

SEQ ID NO: 244714 - DNA, 201 bp, Homo sapiens
taactgctgcttctctttcacagcagtttgtcaagttgctctgaaatcatatatgtgaacttgtttagcagtaaagggagaaagtacttaaagtagtaaamatccacataccctccgctacagtcaagcaaaatatcatgtgcttcctcatgtttttacaagcacaaaatttccctcctccctcattcaataatcagaaga

SEQ ID NO: 244715 - DNA, 201 bp, Homo sapiens
gtgatgctcacaggatccttccccactgactgcatatttaaccatggcgatgccatgtaaccctccactctctccttagccctttttccccaaagcactcrcatgacttcccaggctctgggaatccaacccttagggaaaagacaagtctgtcttcctcttgttgcatcagtgtccagcttgtcctcctcttgctcaatc

SEQ ID NO: 244716 - DNA, 201 bp, Homo sapiens
tagagcttgggactcagatttagttgtttggttggcactctcttagccactctctgaggctgtttgcttatctgttcaacaataactgctgcttctctttyacagcagtttgtcaagttgctctgaaatcatatatgtgaacttgtttagcagtaaagggagaaagtacttaaagtagtaaaaatccacataccctccgct

SEQ ID NO: 244717 - DNA, 201 bp, Homo sapiens
  misc_feature (1)...(201): n = A,T,C or G
ctgctcctaattctcctattttgttcagatctcatatagatatctttttcttctctattctaatgttcgctatttgtttatgtatgttctgtacatacttnacctacttctaacaggaaatggggcagtttacgtaaaggcccagatgacacataaaggaaaagaataaggacagtgaggattagagtgtttttgttgaca

SEQ ID NO: 244718 - DNA, 201 bp, Homo sapiens
aacaacacatactggggcctgtcggaaggtggagggcaaggggagggagagcccctaatgcatgcggggctgaaaacctagatgacaggttgataggtgcrgcaaaccaccatggcacatgtatacctgtgtaacaaacctgcatgttctgcacatgtatcccagaacttaaaataaataaaaaaaaagacatatatttct

SEQ ID NO: 244719 - DNA, 201 bp, Homo sapiens
tcttctgagatgatggtaaattgtcggtaaacagaaattccctgaagcagacatcatcaaaactaaaagttgtggcccttggtactatcaacagaaaaatwtggaaatttgtatgatttggaaagcttacattcctttgttcatatgtgcatttgtgactactgagcatgtcctccatgatcggtacattctacattatca

SEQ ID NO: 244720 - DNA, 201 bp, Homo sapiens
gatactagtccctcattaaatatagggattgcaaatgttatctcccattctgtgtgctttttctttttactttcttgatggtatcatttaaagcacaaaaygttttaattttgatatagacccgtttatcaagtttttcttttgtggcttgtgcttttggtgtcatatctaagaaactaatgcctaatctaaggtcatgta

SEQ ID NO: 244721 - DNA, 201 bp, Homo sapiens
  misc_feature (1)...(201): n = A,T,C or G
tttaaaaagaaaaaataaataaactacatgcatatgtttatcctcatatgacttttgggttcagactattttaatatgcggaatgaaaactgctccaggcnactgaggaagcatccttcggatagccactgctgtgaattcctctgtggagggtgattttgattgcgcccttgctggtgggtctcagcggcatgggagaga

SEQ ID NO: 244722 - DNA, 201 bp, Homo sapiens; identical to SEQ ID NO: 47884

SEQ ID NO: 244723 - DNA, 201 bp, Homo sapiens
agtactcattccctattttcccctcctactctcccataactctacacaaccactaatctactgtctgtctgtgtagattcacctattctggacatttcatrtaaatgggacaatacaatttctgatcttttgcgtttggcttctttcacttagaaagatttcaagattcatccatgttgtagtacatatcagttctttact

SEQ ID NO: 244724 - DNA, 201 bp, Homo sapiens
ttcctattaagagtaccataggatgaaggcttactttcgttaatctcattaattgaggttttagtgcttctagcaactacgcttttctgtttacctacccrtttcccagtgtgagtctcagttacacatttttatcagtgttggctgaggctagctgggaggcttcatcattttttcttttaaaatgcaccaacaaggtaa

SEQ ID NO: 244725 - DNA, 201 bp, Homo sapiens
ccctcttgagtagcgtgtgatattgatctgaagaaacttacctcctcactattggtatattttctccttttcttccgcacaagagagagagatgggggtgrgggggtgaaagggagggagggagggaatgagggaggagagagagcgcgagcgagagagcccctttagcaagaaaacatcaagagtttttgagtgtggtgt

SEQ ID NO: 244726 - DNA, 201 bp, Homo sapiens
agtgaagggcaccatcatccagttgctaatgccacaaacccgggagtcacccttccctccccttgtttccctatcctatatacagtcaatcacaaagttgkgtccgttcaacatgtaaaatagttcttgaatctagctgcctccctacacccacaccattaatagcatggttcaaactatcatttctttcccagtggcctc

SEQ ID NO: 244727 - DNA, 201 bp, Homo sapiens
tgttgatttccttcattcttccctcccttcctttcttctatactgtcaataaaaactgaaaagttgccatgcactacctgtgctatgctagacactgggcrtgggatggagtctaagggactcttctctgacacagattcacttgctgtggggataagcatattaccaaaaaatgctttttttcaatgtgagtgcagtgga

SEQ ID NO: 244728 - DNA, 201 bp, Homo sapiens
tgtcttacgattcatgccctgaaggatgtttggggagtttccaatttgaggctgttaataaggctgctatgaacatttgtgtacaagttcctgtgttaaaragagattaagttctcgtgatgtatgtcttaaaattcatttgcgcttaagtatgaaaaaaagtcatcagattgtagagggagtttgacagctatagagaga

SEQ ID NO: 244729 - DNA, 201 bp, Homo sapiens
catcaaagagaaattcaggagcaggaaaacaggtgtgtacatatctgtgtgtatgcacatgtgtgtgtataggtacacgtggtcatctcatgcattgcctyagataccatttgatgttttgggctgatttattgggcattcttattgtggtaagtaggtgggttatgaatgagtcagtctaagttaaaggggaaggctgat

SEQ ID NO: 244730 - DNA, 201 bp, Homo sapiens
cctcactcatttcatggttatttgtgacattttatctcagtccactttcccatgagtgaaacacatgtgatctgtactcatgagaacctgtagttaactayacgagccttgctgtgcattttgtttttatctgagcctgtctttcaatgtcctatcccttgagagaactgagggctgagaaccaagctttccgaagcggtc

SEQ ID NO: 244731 - DNA, 201 bp, Homo sapiens
taaagtttccatttccttaaaaaatctctttcctctcagtttctcccctttcccacttctctctatctctgtctctctctaatctccatctatttcattaygtattttttgtcagatgtctggcgtttcctgactgctcatatttaagagaaggacactagaactctagttgtaaagctgggcatagtggcttgcacctat

SEQ ID NO: 244732 - DNA, 201 bp, Homo sapiens
gtctgaaatctacctgttcttcaaatcccacctcaagtcttacctcctctgttgacttgcttctgatttctcctagctagaaatttcatacctctcttcgratttcctccaacattgtgtctgtggccctttaatactttctactttatattgtagttatttatgtccatttaacattcttgctactctgttgttaatttc

SEQ ID NO: 244733 - DNA, 201 bp, Homo sapiens
  misc_feature (1)...(201): n = A,T,C or G
gatcggagtccgctctaagtcggagtctgggggcgcagaagggggagcgcgccgagaaagtgccgggcaaacgcgcgccgcgcctggctgggcatcgcganctgggcgaggagacggggaggggacagcccaaactatctcagcttcaccgccagtggtcacctacctgcagctatggagtcgccaaccaaggagattgaa

SEQ ID NO: 244734 - DNA, 201 bp, Homo sapiens
ttgggttctgatccctgcctataataagctatgcaacgtggccaagatctttatacttttgtgccttcattccctcatatgatcaaaaaaggaactggctsttaacacttctgtgatttcacaataccctgattccaccctattctctcctttctctgaagggttgcccttgaagcagtgtagaggtgtcatctagacctg

SEQ ID NO: 244735 - DNA, 201 bp, Homo sapiens
gaatgtctctggttgtaggggagtttatcttggggcaggcatgtctctggttgtggaggcgtttgtcttagggttggaatgcttctggttggagatgtcayttgtagtttatggtcatgctgacattagccattaggctgatgtcctttgggttggatttcggtggcttttgatcaaggggaactttaaaatgttggtgct

SEQ ID NO: 244736 - DNA, 201 bp, Homo sapiens
aaaaaaggaaatctttatgggaaatcaattacccaaagcaaggtgagtcacctagaggtgaatatgatgttgttattgtcctcccttagtgtacagcacartttttgctctcacagggtttttctctttaggatgcgtagcaccctatgcattaaatacatagcatcctaaagacaccctactcaccatgagtctgtaggc

SEQ ID NO: 244737 - DNA, 201 bp, Homo sapiens
gccaaggccagattttactttttaaggtttcctctctctcaccaaagacactagtgggcacagaggtgacactagagttagaatgttaccagagtcatttrcattagacagtttatctgatcatgaacatgttcccagggagattagaaaaatgggaagcaggcctctaaagatcctccttggacatttgtaaaaaggctg

SEQ ID NO: 244738 - DNA, 201 bp, Homo sapiens
tagcatcagctcgtcagatgccaagcgatcaggtgtcaagacctctggttcagagggaagtgccccgatcaacaattctgtcatctccgttgactataagrgctttaaagctacttggacggaagtggtgcacatcaatcgggagagatggagggccaaggtacccaaaggtaacatgccacagacctgtccaaaccaatt

SEQ ID NO: 244739 - DNA, 201 bp, Homo sapiens
agagactccttaaatggggtctgcggcttggagttcttttagctaaatcccctgttattatacaggagccctgttgatgtggtggtaaagtatggagggtrgtagtttttttaaagtttccatttccttaaaaaatctctttcctctcagtttctcccctttcccacttctctctatctctgtctctctctaatctccatc

SEQ ID NO: 244740 - DNA, 201 bp, Homo sapiens
tgttcttgtttctgtctctctggttgtttttgagttttcctagagactccttaaatggggtctgcggcttggagttcttttagctaaatcccctgttattrtacaggagccctgttgatgtggtggtaaagtatggagggtagtagtttttttaaagtttccatttccttaaaaaatctctttcctctcagtttctcccct

SEQ ID NO: 244741 - DNA, 201 bp, Homo sapiens
ctgctacagcctccgaagcccctgccttctgccggggaatgggatggaagagagagataaggttcttggtcccgaagtgacacacatcacttccactcaakaattagtcccatgccctcacctcaatgcaaaggggttgggaatgtagcccccatttgggcagccaattcccagcaacaagtccccactatggaagaggga

SEQ ID NO: 244742 - DNA, 201 bp, Homo sapiens
gtttattttggagaataaacctgagaggggcttctggccaatttggtcaggagcactctctcttacagactaagagtatttaggggttcagagtgagagartttatcacaggctcggaatgtttctgtgtggaggagaagtttattgtggggttggaatgtctctggttgtaggggagtttatcttggggcaggcatgtct

SEQ ID NO: 244743 - DNA, 201 bp, Homo sapiens
tctggcactgcttgcctgcctgggtctgtaggcatggaccaggccagagggcacttgggcttatatctggcaatgtgaaattcaggaggaaaccatggctrgattttccaaatcatgaacattcatgcagtgcaccttacacacttattagaacaaggaaggaacaatttcatacgggttttgtgtcaaatgttggtcttt

SEQ ID NO: 244744 - DNA, 201 bp, Homo sapiens; identical to SEQ ID NO: 47885

SEQ ID NO: 244745 - DNA, 201 bp, Homo sapiens
gaatactatgagcagatagttcatttttatcaccgcttttgttatctgagtcccagtccctgctctggcttgagtgaggtttgtatgcaagagaagggaargattgctatgctgtgggtatccttgtgggtgaggggcaactccctgccttaattaccttatcgtgaactagattatcactcccctaagggctgcaagcaa

SEQ ID NO: 244746 - DNA, 201 bp, Homo sapiens
ttcttgcctctgatgacagttctcttcagaatctgtctgtatagttttcattctttctttcctcagagagctggggacaaagaagagaagctaaaagggcraaggaattggggaatgaagtctcctacatttataattgtatcccataatgattaaactgttacactattgtcgaccaactatttggcagattgtctaaag

SEQ ID NO: 244747 - DNA, 201 bp, Homo sapiens
acaaagcctaaccatatcacatacaaatgacttaatgtgtatgagatcatagggacttttgtagcaccattggttagaaaaatcacacattatccaattarcgttaaaaagacatggatgaaactggaagccatcattctcagccaactgacacaggaacagaaaaccaaacactgcatgttctcactcataagtgggagt

SEQ ID NO: 244748 - DNA, 201 bp, Homo sapiens
tgtattttactagtcctgaaaagcacaaaatcacaggtcttaaatgaaacactttggtattgttgcacattgttacctaggaggcaataaaacaaaatatrtttactgggaaatgaagttccatcccttacttgtgggggtagagacagtaaattataatagtgatttcagtgaaaattagtaggtacaaagcaaatcaca

SEQ ID NO: 244749 - DNA, 201 bp, Homo sapiens
atgccagcagcctagtcacttctgttgagagaatctggataccttgcttgctggtgcaggatttacacgctattatggttctttttgatgggagcctctgrttgcagctgcttctagtcggtcatctctcattatgttttgagttgccaaccacctgaaactttcagtgtttggaaagtttaccagccttgctgtaattta

SEQ ID NO: 244750 - DNA, 201 bp, Homo sapiens
ggtggaagtcttgggtcatctaagggaacaggtaggaagcagacaggtcttgttcttcaggggctctgtgaggcagagtctggatcttatttactaaagcrtggaatcagccttaacaagggattggtgactgtcttttggggcacatggaataggacttaaagaagattggggtaggtggggcaggagatcaagctacgt

SEQ ID NO: 244751 - DNA, 201 bp, Homo sapiens
atttcttcctggtttagtcttgggagggtgtatgtgtccaggaatttatctatttcttctagattttctagtttatttgtgtcgaggtatttatagtattytctgatggtagtttgtatttctgtgggtcagtggtgatatccccgtcatcattttttattgtgtctattttattcttgtctcttttcttctttattagtc

SEQ ID NO: 244752 - DNA, 201 bp, Homo sapiens
tttttgtttttgtttttaatggagtctttctccattgcccaggctggagtgcagaggcaagatctcagctcactgcaacctctgcctccccagttcaagcrattctcctgtctcagcttcctgagtagctgagattacaggtgcatgccatcatgcccagctacttcttgtatttttaatagagacggggttttactatgt

SEQ ID NO: 244753 - DNA, 201 bp, Homo sapiens
cctttggctttatagttttttttgtctgttttctgtttttgtttttgtttttaatggagtctttctccattgcccaggctggagtgcagaggcaagatctyagctcactgcaacctctgcctccccagttcaagcgattctcctgtctcagcttcctgagtagctgagattacaggtgcatgccatcatgcccagctactt

SEQ ID NO: 244754 - DNA, 201 bp, Homo sapiens
gggagttcaaggagaattgtagtttcttctcaggcaattaaagtcatcttccaataagctcagttgttacttcccacctgcctctgatctcagaattcaaygctcagaaaacaccacccatctctgtggcttaatcagagggaagtctctgaaaggctgctaggttggtggcagaagtaccatcttgagggatgatgattc

SEQ ID NO: 244755 - DNA, 201 bp, Homo sapiens
taagagaaaggcatgtgtacaggttcttgtagagaaaccatgaagagatccataacctgtgggaaagttccagcactctttggtggaatgtgtcagtctcrattcacatagatttatcctgacctccttaacttgaagggacctaaagggaacatgaaacagggtgtagagcacaaaatgcccagtaaaagttagtaataa

SEQ ID NO: 244756 - DNA, 201 bp, Homo sapiens
tgctgtttaactgaatcaccagaaaagaacaaagctgccagttagcacagagatcactgggcaggtgacatagtctgtaccccatatatattgtcctttarcccctagccagattatccttggtttacaatacttctaaattcacttaattaatgagaagtaatcatgggacattaaaagtattgctaaagcacaaacttt

SEQ ID NO: 244757 - DNA, 201 bp, Homo sapiens
tgaaggggtcatccagacatttgggctaaatttatacactggttcagggtccttcctcactccctggcagcagtggatgccccaggattttcccctggttmcttcagccaaaaaactggcaggctttctatttgtgtcttcactatcttcttccctaccactatgacatccctcagaatgaagctccaaaagagggagaat

SEQ ID NO: 244758 - DNA, 201 bp, Homo sapiens
ttctcttccatcttccttatgtctgataattactaccattcttccatttatccaggatcaaaacttctgagcccctttgtatgatcttctgttgggtgttycttcaactttaactttttattcttcctctttgcccatgatcaatgggtccctaacggattgtgggcttttccttcacattactttccctcccatgatctt

SEQ ID NO: 244759 - DNA, 201 bp, Homo sapiens
gttgggaaaattaacaggggtgacactggataaatcaaatcatacatttttgcaaacttaatgcacaaccaatcctgcattctactgcttacttagtagtrttgattttcagagcctaagtggtaacatcagggacaagaggatcttccaagagataaatccctttacaaatattttcctacatttgtgatgactaataat

SEQ ID NO: 244760 - DNA, 201 bp, Homo sapiens
taataggatagcccagaatctttccttcttgttttcttcatgttttcagttattttaaaaatgtatgttttgctgatttttaggctttctttttttttttwaaaaaaaaggcaaatggctcaaaaatattctagacattaggaagaagacagcccaggatacagacatgtgcagataattgataacctggatattgtacat

SEQ ID NO: 244761 - DNA, 201 bp, Homo sapiens
ttttactttataaaaacactatgatagtcttatgctccatctggataactacatacagggataaaataaatgatgaatgaatgatggagtgaatacatgaytctgtgatcaagaatgaatgcataaaaagaatgcaatgctgtataaatgtggggtttaaaaagaaaatctcctgggcataattgttttcttcttttctat

SEQ ID NO: 244762 - DNA, 201 bp, Homo sapiens
atattcaaaaaagtaaatatattccatatgaaatggtgtgggggctgtattggagcttgaactaaatggcatcagaaaagggctctggttccagggtaccrgacatccccggcagagaatggaggctggaggtggtaatgggcaaggctggggatatgaagagtcccatgggacatgagcgtgtccagggctcatcttggg

SEQ ID NO: 244763 - DNA, 201 bp, Homo sapiens
acttaaatgctttcaaagtttttaaatagacttcagcctgaaaggcggacataaattttggccttaaagctatttccctggcaaccaaatgaggagtcttrgaaatttttattccacaggtaagagagagagtccatagggaatcaaaacaaagcaagtgaatgaaccacttagcatataattattctgtgaagtagcaca

SEQ ID NO: 244764 - DNA, 201 bp, Homo sapiens
gccccccagacaggaggaatttatcacagcacatgggaatggcaagaagagaagctcaagcctgattccatctgagtcacgtaaagtcacggtcagtgacrctgcgtcctgcatagctgatgggatgtctgctcttggaatgtctctcaggattctacccttctcgctgttccctaggtcaggccgttcccactagaatac

SEQ ID NO: 244765 - DNA, 201 bp, Homo sapiens
ccacataggctttgtttattcttttttctttatttttgccagactgcattttttgtgaagacctgtcttctagttctgaacttttttcttcttgcttggtstagtctactgttgaaggtttcaaatgtattttgtatttcattaaatgaattcttccattccataatttctctttgctaatttgtatgatagctatctctt

SEQ ID NO: 244766 - DNA, 201 bp, Homo sapiens
ggcacaactttacgtggctaatcttgaagattctttgcaaaagtctgtaaggtagttatacctccactttacagatgaggaaattatgtgctcactgttgrggcgacttgtatagtcatatatatagtaagtggtggagcaggctttaaattctctgtcggtttctctgactaaaacttacattctttttcatatatatat

SEQ ID NO: 244767 - DNA, 201 bp, Homo sapiens
gagccatagcaacacttgaacacacttacttgtcttcagcacactcatatttgaatgaatcttatacccccttgatatagaagatgttatggagaattttrtaattcctttaatatttttctcaatttctgaaagatctatttgtttctaaggaactgttgatatgatttttgaccaaattctaatggatttaccattctt

SEQ ID NO: 244768 - DNA, 201 bp, Homo sapiens
cggttcaagagcatcgttcacgcagtgcaggctgggatatttgtggagaggtaaagatgtcattcattgtcatttagtgactaaagcagccaaagcaacaygtttccaataactggaagctttgctttaatgtagttttcctatctttataaatactgaaaattgtgggtagaaacagatagtcttgaatgagaaatggca

SEQ ID NO: 244769 - DNA, 201 bp, Homo sapiens
tttttggctctatttagtcagaaacatttcatgctttcaacatcagcttaaaataaatcagagcaggggagtttttatttttcattttgtcagagcagacmtttccagtgcccctggagagtcttctgcccacatttgtggagagtcagaggaagggttcttttccactctctcagagttcacagaggagagtacttactc

SEQ ID NO: 244770 - DNA, 201 bp, Homo sapiens
ggacacattgctttatttatttaaattgcatcctcttttttttttctagttgcaaatgaagctggagacaagaatgccagaccactggcccgcttctctcrtgagtaaatcttgtttcactcctttcctggtctccatcagaaaatgttctccagagatctttcccccatgcggtatagctcttcaattctgtcaggtgtt

SEQ ID NO: 244771 - DNA, 201 bp, Homo sapiens
cgctccccaaacccactatgcaccaggtggagaaatcgtacaactgtaaatagaaacggatttatcactgcctcactggctttcactaaaagtaatttcaytcacactatctgggcctctgtcttcgcacctggaaaatgttcaaaattggacattgttacattaatttttttttttttgccttcctaaaagtcacctcat

SEQ ID NO: 244772 - DNA, 201 bp, Homo sapiens
caagttccagggagaggaagtagtttttgcaaaggcatagtggtcagaaagtttggggcctgttattagggagtataatggcttcccccaactcccaatgrcatcagctttagctctctgccttgtctggaagtctcagccagttaaggccctttcaaacccagatcctgcccaggtatcctgcaggactatctcaacccc

SEQ ID NO: 244773 - DNA, 201 bp, Homo sapiens
ataagcatgaatcgtgacccaaccacgctgtgagggctgtgctgggtgccccttcccccatgggagtcccagaggctcactacaagacagacgaaggttgsggggagggcggtccttgcatgagagttgaggcaatttgtcccttcacagagaaaggaaggtaacttcttgtgtgaacttctcaactgtatgactgggttg

SEQ ID NO: 244774 - DNA, 201 bp, Homo sapiens
gaaacttaaatatataagtttagaagctaagatcaatttagttattgaaaaacacctactattggaacaacttgagtatgtgaatctacttttctcaaatktccattttatgaaatagaaacatagatcaagtctttctgatgaaaacttatctgccaaattgagatacactgtaagtgtaaattacacactgatttctaa

SEQ ID NO: 244775 - DNA, 201 bp, Homo sapiens
tcttttcagaccaactatttgcagatttgtaccacagggcaatcagagcagtagtattctaagctatctagaattgtccttggtttattattagggtcctrtgaagcggtgtgtatgtgcgtgtgtgtgtgtgtgtgtgcgtgcatgtgtgtgtgtgtgtgtgtgtgtgtgcctttacttccttacttttgtagggcctct

SEQ ID NO: 244776 - DNA, 201 bp, Homo sapiens
cttgacccacccaggaacttagatcaacaacttagagatagagattatctccttgattagagtagaagcccgttttccagacagaatgtgggatcattackttctcttatttatgcttcattacccacaatgggggtggagtgggggtgggcaggaaggctaagccctgtttgcctgtttgtttaaagacagttttcttaa

SEQ ID NO: 244777 - DNA, 201 bp, Homo sapiens
ccctagtactaggaagcattcaaccaatatttgcaaatgaacgaagacctaacccttatgtggttcttagtatgggtctggtcctattcgaagtgctttgyatacattaactcattgggagtactgaaacatagttaagtaacttgtcatgtttacttagctctcaagtggtggagctggattttgaacccctgtagtctg

SEQ ID NO: 244778 - DNA, 201 bp, Homo sapiens
agaaggagaaattgcccctcaattttttggaatagtttgaggagaactgatgttagtccttctttgaaagtttggaggaatttgatagtgaagccatctgrtcctagacttctctttttcaggagaatttgtattactgattcaaactcattactcattattggtctgtccaggttttcaatttcctcatgattcaatttt

SEQ ID NO: 244779 - DNA, 201 bp, Homo sapiens
caaaggggatgacacagcatctctttaaatttctctagactgctcttgtcttagtcccagaccacagctctcagacttgatcacttgggttgccttaaatsatgaaatcaccccaccacttgtcttattcagatttttgtgtcttttgtctgctgtttctaagtttttccatcatcacatctctaatttcacacctgctgc

SEQ ID NO: 244780 - DNA, 201 bp, Homo sapiens
cagcgtcaagacatgtccctgggccttgtcttccaatcaggctgccatccctaagtatggcctgcaaacactctggattgtcactggattaatgtcagttrctaataatgccagagggtatagctgaaagtgagaatttgacacactgacttagaaataaagattttggaaaatgaaggcaccacctttcttccctagggg

SEQ ID NO: 244781 - DNA, 201 bp, Homo sapiens
ggttcaagagcatcgttcacgcagtgcaggctgggatatttgtggagaggtaaagatgtcattcattgtcatttagtgactaaagcagccaaagcaacacrtttccaataactggaagctttgctttaatgtagttttcctatctttataaatactgaaaattgtgggtagaaacagatagtcttgaatgagaaatggcaa

SEQ ID NO: 244782 - DNA, 201 bp, Homo sapiens
tatatttatgaaaaataattaaacaattgagagttaaaactcctaaaagagcattgcttttatgaaaatcaaacatggagcataattataaaataaaggayggtgatgtatcaatttttggcttgaacttttgtttttctaagcatgtttaaaagtaatatagataattttcccaagttcaggtactgtgctgagatatgt

SEQ ID NO: 244783 - DNA, 201 bp, Homo sapiens
aaattttttcttcttacttcacaatggcaaaaatgtatacatttattttattacctgctcctttggtcccataattattttcctttcagatgtatcagaayaagtgagaatattcgatgactgtaaaatgtatcaccatagttgtaggattattctttgtttcctctattctaatgaaattatgtctttttatttttctag

SEQ ID NO: 244784 - DNA, 201 bp, Homo sapiens
ctttcagcttagatgtctcagtgaatttggtgttatttgcctcgttagggactatggagataagagcaggctaggataaagcagaatgataaacttgggtrtagatatgttaaattggtagcctctggaatgttcaagtagctattggtgatggcaatatggagccatggagagacctttggcctggagtggtgggtctga

SEQ ID NO: 244785 - DNA, 201 bp, Homo sapiens
gtgaagatactagtttaactcagttaaatttgattgaggaaaccctctccccacaaccacacctattacacagctttgttgaagggcactttggtttccaktagactaatataaataatcctaatagctgtatttgatatatgaataaatgtgaacctgtttcctggagaaaaataattctgtacaactgttccccatacc

SEQ ID NO: 244786 - DNA, 201 bp, Homo sapiens
ccaaggccagtgctatgggaaatcatattgaactcaagggaatgaggccagacccaagcgtggatgaggactagcggctgttctctcttgattgctctcayttagtggaaaacaacagggtatactgggttaatgacttgatatagtgtgataccatatgataagaaattaattccatttttctgaaggcgttttcactct

SEQ ID NO: 244787 - DNA, 201 bp, Homo sapiens
tgaagtcacagtggattgaaaggaccaaggccagtgctatgggaaatcatattgaactcaagggaatgaggccagacccaagcgtggatgaggactagcgrctgttctctcttgattgctctcatttagtggaaaacaacagggtatactgggttaatgacttgatatagtgtgataccatatgataagaaattaattcca

SEQ ID NO: 244788 - DNA, 201 bp, Homo sapiens
ctcctttgtgctaactgtgtgattttggccagttactttagccaaaatacatgcccagtacatagtatcagctattacaatgattttaccacagcggttcytgaaatgaaaatcacaggatcaaatctcatattgtcccatcctcagtggggctcacgttaacattccagtcccttgcagttcaaaactcctggatggttt

SEQ ID NO: 244789 - DNA, 201 bp, Homo sapiens
cccagtgacctgtgacacatccatgtttcagagccacagttagaccccaacttgtgttgacccaaaatttctctgcttgcccacaaggggacttcaccacyttatcttaccccatttctccacccctttcatcaaacacagttgttatcaggcaagccgatcagcttggttcagtcaacagatgtattcattgggatttga

SEQ ID NO: 244790 - DNA, 201 bp, Homo sapiens
tcacagttctttcccataggagtttagtgtctttattatcagcaaaggctagtttgggcaaaaagtagaaaaaaatattttctgtgatctgtatattaccstaaagcctctattttttctggaactcttgataaaaaccctaaatcttcaattactttcaaacgcttttatttttgattgcagtgcatatcccatttaaac

SEQ ID NO: 244791 - DNA, 201 bp, Homo sapiens
acaccactagaaggtaattaccattgccaaccccccaagtagaaagcagtcatgcacctgctgatggcaaaggttagtcttaggaccacatgattaaacamgctatttagatagactcctctacattccaatgttaattacccttgctatagctcaaagaggattaggctgccttcagccataactctatcctgaggcttt

SEQ ID NO: 244792 - DNA, 201 bp, Homo sapiens
tttgtgttaaaataggaaagagaagctatagatggaaggcgggatgtttcaatatggacctaaggagtgctaagatctatcttgtctttggtcagaactaygtaatttttgtaactttttaacacaaaggatcatcagtaaaataatggaaacataatagcattgttattcactgaatatttgtgttcccaccaaattcat

SEQ ID NO: 244793 - DNA, 201 bp, Homo sapiens
agatccccatttctgcacttgtctcatttgtggaggccctggaagtgggatacagcaagcacaaaaatccttaccataacttaatgcacgctgccgatgtyacacagacagtgcattacctcctctataagacaggagtggcggtaagtagggataggaactcttaggttccccaaaagatgtaaggatgagtttttaatg

SEQ ID NO: 244794 - DNA, 201 bp, Homo sapiens
ggccactccattcaaaaaaaaaagtgttaagggaagtatgtcaacaagaagaaaagtgaacccacaaggaatgtatgagacacaggaattaggggtgagcrcatcagtaattaaaacatgttggtaaatttgagtgactagtgaccataaaataacatccgacttttgtgttaaaataggaaagagaagctatagatggaa

SEQ ID NO: 244795 - DNA, 201 bp, Homo sapiens
agcacatagaaagatgctagtcattagggaaatgcagatcaaagccacagtgagatgccacttcacacccattaggatggctactataaaagacaaacagmaaatagcaggtattggtgagggtgtggagaaatgtgaaccctggtatattgcttctaggaacataaaataacacagctgctgtgaaaaatggtctggcca

SEQ ID NO: 244796 - DNA, 201 bp, Homo sapiens
ctgtcatcattggatattttatgaattttatatctcagcaatgctaggataaggactattgagattacagtaattttggagaggggaggggggctccacasattattttgcctcttggtcatgtgatatttgaatcttacctaaatactgctttttaggacattatggtatttttatcctatgcatttctgtttgggggaa

SEQ ID NO: 244797 - DNA, 201 bp, Homo sapiens
ctgttcaattactcagatagctgaaaaatatgtcagccatgggtcccagtgcattattgatgttggctgttttctttcaggtgcattgcacagtccttgcytgctgagagcaagaagggtattctctcttctgtcccttggaggcaagttagagtgccaccccgctccaaaatgttccttcccttcaaaggtgaacagcat

SEQ ID NO: 244798 - DNA, 201 bp, Homo sapiens
gccctttcagtatcagtgatggctctgtccacacatggcgtttgagagctatattttggcaactgttcaattactcagatagctgaaaaatatgtcagccwtgggtcccagtgcattattgatgttggctgttttctttcaggtgcattgcacagtccttgcctgctgagagcaagaagggtattctctcttctgtccctt

SEQ ID NO: 244799 - DNA, 201 bp, Homo sapiens
gtgctagaacagattatttacttaggatttcacagctagtaatagcttagctctgtgacgtgccccaagcccatggtttttttcataagaccacccacctstcccaaaagcctctccatgggctcattttcctgtcacagaccttagcactaagatcctgtcttagatctattcttagtttaagaatagattatcacctta

SEQ ID NO: 244800 - DNA, 201 bp, Homo sapiens
aatgaattgtacccagtttcaatcaggaaaataaaaaatctattggcagatacattataatgaaactgcagaacagtatagacgatgggcaaacaccaaarataattgaagagaaaagacaggttacctactgtgtctgagactacgagtttagtgttttgtttttttttttaaatttttatttttggtagttttgctctt

SEQ ID NO: 244801 - DNA, 201 bp, Homo sapiens
ctcttaccaaacaagatacaaatgacaatgtcaataagcccaatgtgccaaattatcaggaggtccagtcttttcttggggttcttgtccctcactattcmcagggacccccagccttattgacaggctgggttcaagaatcatcgcttatcctgttatgccttttgtcccctactagggaaatgaggtctcatgttgagc

SEQ ID NO: 244802 - DNA, 201 bp, Homo sapiens
aatgttctatttaacttcgtctgtaagatatgaaactgtcttttttctttctcatatttaactttcagttataaagctttctaaattgctttgataatatycaaagatataggcagattaacactttctctgttatttcctctttcatgtgtgttgacacatacaactatatgtgtgtagtgttatataagtgtcaactac

SEQ ID NO: 244803 - DNA, 201 bp, Homo sapiens
gagaactgcagaagccctgggacagctgtgatccacatcctgagtaaggagtggcaggaaggagcttgaatcctgtggagcaaaagggactaaaagtgctscaggggacactgggaatcagagctagggctataacctgaatacaggacatggggtggacaggctaaaacaactgctgccagcctgtttcctccaagccac

SEQ ID NO: 244804 - DNA, 201 bp, Homo sapiens
acttcaagtggaatatcatgcagatagcagtgaattgcatcatgcagattagaaggggggttatctaaggtagcataacagcctcttttgaaggcactgaraaaatatatatttgggaatagtgttggcatacagcacctagaacaaagtctcacatgtaaaccatgctcagagaatgttctatttaacttcgtctgtaag

SEQ ID NO: 244805 - DNA, 201 bp, Homo sapiens
cacagctaccttgtctttagccatccaaagtggtcccaaaaggagtgtcttaggctctgcattctgagcatctccaaagcctacagggctgtaaaccacamtcctctgccctacaggacttgagagatggtcagaggtggaagtgggtagttctcaaaacaccagacataattaatctgtgtaactggtactacacagtgt

SEQ ID NO: 244806 - DNA, 201 bp, Homo sapiens; identical to SEQ ID NO: 47874

SEQ ID NO: 244807 - DNA, 201 bp, Homo sapiens
tgcaacctaaaatagagattctcaatggagggcacttttgcctctagaggatatttgtcaccatctggaggatgtttatgatcgtcatgactagggaggarctactgacatctcatgggtagaggccagggacactgctaaacattctccagtgcacaggacagcccccaccacaaagaattgtacagcccaaatgtcaca

SEQ ID NO: 244808 - DNA, 201 bp, Homo sapiens
agaaagcagaatgccacacttttcgttagttcgacaaaaggaaatttctaccacacaaggtgttccaagcctgtttgatgatgggaatcacctgggccacytgtgaaatacccaggtccctaaacctcgcctctggaagtgctggctccgagagcttagtgaggcctgggaaactggctttgtttttcatttttgttaaaa

SEQ ID NO: 244809 - DNA, 201 bp, Homo sapiens
atgctttgttttgtacacctgaataagagattcagctgagccaagcttatagaaccatctcgtctagatgtcagtcattatggagacaatgcatgtatggycattgcccttttagcagcatctcttatgactcactaggtaaagaaagattccaaacttttgtaagacacaaaggtaaaaggatactaaataaatataaca

SEQ ID NO: 244810 - DNA, 201 bp, Homo sapiens
ttgtttgttcatttgcttttattttacctcatttatcagatatttgagaattctaaaatcatgcaaatttaatacattgcttttttaatgattaagtaaayggaataaaaccagagtcacaaagtagagctagcatagatggaacaaaccagggcaaatgttaataagcagacgtgcagtctaaatcggcctcccctgatt

SEQ ID NO: 244811 - DNA, 201 bp, Homo sapiens
agcatgtagttgttttaatttgaaattctctaattgttgagcattttttcctatgcttatttgacacatatatcttccttggtgtgaagtctgttcagatrttttgcccattttaaaattgggttgtttctttttcttgagctttaagaattctttttatattttgaatacaagatctttatatgtgttttataaatattt

SEQ ID NO: 244812 - DNA, 201 bp, Homo sapiens
aaacaataaaaaggaaactaaaattaaatcaaagggcacaaaaatgatctttaaataaatggaaaaggcatcatgtttttaatgtgagtgaaacctcagtrctatatagatgtcagtttccctcaaagtaatctataaattcaaagcaatactattcaaagtttcaaggattttaatatgaaacatgataatctgaatctg

SEQ ID NO: 244813 - DNA, 201 bp, Homo sapiens
agacaaatactatcacttatcatctgtgacaggtcattggtattttccagccattcatgcttcaaattgattcttcaactttacataaagaacttgaatcrtttccagtgttcaactccctacagccttctaatactgtagactctcgaggtggggtcagatcctcagggagttgatgtagtcatctgccaacatctatgg

SEQ ID NO: 244814 - DNA, 201 bp, Homo sapiens
taactcaataaaagatttttaccaaacatttagagcaagcatcatattgaatgatggttccgtgaatacatggagcaagacagggatacccacattaataytcctacttggcatttttctggaagtctcagcctcaagaatgcagtatgcaatatgatatcttcaaaagttgaagatatattctgtgaaataatgtgatca

SEQ ID NO: 244815 - DNA, 201 bp, Homo sapiens
tctttgtgatgaacagacatattcaaatcacacgaaaccaaacctagtattgatggtggttgtattgtgcaggaaaaaagcattaaatactctgaatatgsagctctaatttatatactcttggttgataactcttagggcagtgtgtggggggtggggggtggggcgttgaagacctccagactctttcagtgttcccac

SEQ ID NO: 244816 - DNA, 201 bp, Homo sapiens
gaggagaactgatgttagtccttctttgaaagtttggaggaatttgatagtgaagccatctggtcctagacttctctttttcaggagaatttgtattactrattcaaactcattactcattattggtctgtccaggttttcaatttcctcatgattcaattttggtaagttgtatgtgtccaggaacttatccatttcctc

SEQ ID NO: 244817 - DNA, 201 bp, Homo sapiens
catgttacacagagaaagttgccactggaatgaatgacaaggattacattaatatcgtgttattgtctgaattacacttatgaacaaaaatgtcattaatraactaaggctaagaaccttagctatgtcataaagtttgaattctagtgggcacattttaaaaaactgaatcattttttgaatcagtgtacttatcagagc

SEQ ID NO: 244818 - DNA, 201 bp, Homo sapiens
aagatatttacactcagacacatacactcttatgactataaaattatgctgcactttttcaaaacttggcagacttaaagatgtttataacaaccccctcrgctgcatacatatactgtttgtcatgtttattactttcaggtgacttcaaagatggcaaaaataagacagacaagaaggatcactctaacatcggaaatg

SEQ ID NO: 244819 - DNA, 201 bp, Homo sapiens
tgttaactggctgtctccttttccttcaggtcttagatcaaatgtcacctgcttgtggaggccatccgtgaccacttgggtgtattaaagatggctgcaartatctgtatcactccctccccacaccctgcatcaagaggtggggtttatttcttctgttgaatcagggctagctctgtgattgctttaaccaacccagtg

SEQ ID NO: 244820 - DNA, 201 bp, Homo sapiens
ggacagcagtaaggcttacttgcgattagatacttaaagtaccttaaattctatcctgggtagcaaatggattggttccagagggatgatgggatgagtgwatatttgaaataaatgaatgaatatcattgcatacctgctttacatcaggcggtgtgttcagcactttcagataccttaccttgtggtgaggataagtag

SEQ ID NO: 244821 - DNA, 201 bp, Homo sapiens
ttttggaggccaaggcgggtggatcatttgaggtcaggagttcaagaccaacttgacctacatagtgaaaccccatctctactaaaatacaaaaattagcygggcatggtgatgggtgcctgtaatcccactacttgggaggctgaggcaggagaaacacttgaaccaaggaggtggaggttgcagtgagccaagatcatg

SEQ ID NO: 244822 - DNA, 201 bp, Homo sapiens
ctagtcaagaagcctagtagatgctaaatctaagacctgaaaagtgaattctctgtatacttgctgtcgttggaagctgtgagcatgtacaaaataactgytctcaagtcctttttcttgttatacgaaaatttcatctataccgataatttcacccagaaaatataaaggaatctgattgcagttaaaaagacctacctc

SEQ ID NO: 244823 - DNA, 201 bp, Homo sapiens
gtagtggtaacatttgggtcttttctcttcctcatttgtgtatttgctttaccagtgagttttttccttttgcattttcatgatggtagatgttgtttctytgtttccaggcgtaagactcccttaagcattcactgtaggtctggtcaagtaataaggaattccctctgcatttgcttgtgtgggaaaggctttatttct

SEQ ID NO: 244824 - DNA, 201 bp, Homo sapiens
tcagtctacatgtgtctttacaggtgaaaagagtttcttataggcgacatatagttgggtcatggatttatttttaatccatttagctagtctattttttragtgggaagtttaattgatgtacattcaaggttgctattgatatgtgaggacttattccagtcattttattaattaatttcagattgtgttgtatgtcct

SEQ ID NO: 244825 - DNA, 201 bp, Homo sapiens
tatgccctgctttgcagatctggggagaaaagagtcaaacagcaggctgtgggtagaactgacacatgtatgtctttactagagattgtttctgtcttagrttcatttccagagatttgagaaacaataaatgctttgtcacatgacctttattcagcaggtgtgcattcactggttatacggaccctgagggcattatca

SEQ ID NO: 244826 - DNA, 201 bp, Homo sapiens
atttgatatgtttagattttcatttgccttaaaaatatttttattttctccttaatttctttcttaatccaatggtaaatcaggaacatgtttaatttccrtgtatttgttcagtttccaaatttcctcttgttattgatttctagttttattttactgtgatctgagaagacacttgatattattttgatttttaatttt

SEQ ID NO: 244827 - DNA, 201 bp, Homo sapiens
aagccacatttaaatagcttgtggtgttgtatctctgaatagctcttgcttttaatcattcttctttgtgatgaacagacatattcaaatcacacgaaacyaaacctagtattgatggtggttgtattgtgcaggaaaaaagcattaaatactctgaatatgcagctctaatttatatactcttggttgataactcttagg

SEQ ID NO: 244828 - DNA, 201 bp, Homo sapiens
gtgagatcattaagggtcattggtgaggttattacctggctctgctaccttatggcactagacatttcaattaatctctctgaggttgccatctataaaastggagaaagtaacacctatctctagacttgcgaggttttgcaaatgcgtgtaaacactcacactgtgcctagcacagaaaatgtgctcacagaaatgtgc

SEQ ID NO: 244829 - DNA, 201 bp, Homo sapiens
agctggaaatgatatggactagtaactgacttagcagactataaaagcagaaagcctacagagaaggaatgcagcaagagggaagctcatttgtgctgcaraacagcagaaagactcaggagctggaggcctgaggaagctctgaacgaatggttcatagtcttcagaggaacaagcagatttccagatcacctcctcaac

SEQ ID NO: 244830 - DNA, 201 bp, Homo sapiens
acacaacattggattgtaagcattttcttgtgagtgtttttttaacttctccattaatataatttcaatagcagcataatattttattctgtggctctagygcaatttacttaaccacctctctgctgttgggcaattaacttatacgcttttattttattttttgcagttgtaaatagcagcaatggagctctttgtaca

SEQ ID NO: 244831 - DNA, 201 bp, Homo sapiens
  misc_feature (1)...(201): n = A,T,C or G
ccatcgcgaaacacacatggcgagcttacataagccttaccaaaaaggcactgtattttttggggccaatttaatttggtttctttgcacctaacatgcangtgaggcagagaggagcagctgctttgaacagagagctccaacttcagatttaatctcagtgtgctgattctgtttcttgtgttcaggagactcctggat

SEQ ID NO: 244832 - DNA, 201 bp, Homo sapiens
atgcacaagaacaaaagggaagcagaaatgacagaagaaaatagatgtcaacaaaaaattgaaagctggaaatgatatggactagtaactgacttagcagwctataaaagcagaaagcctacagagaaggaatgcagcaagagggaagctcatttgtgctgcagaacagcagaaagactcaggagctggaggcctgaggaa

SEQ ID NO: 244833 - DNA, 201 bp, Homo sapiens
gataaaaaggcaagctccaactgcaattgtacaagagatacactttaaatataaatacacaaaaaggttcaaagtaaaagtatgtaagatgtaccaaacaktaagaataagtagaatgcagtggtgttattaatattagctaaaatgaactgcaagaaaaaggatattgtgaaagagaaaggagattttctgataataaga

SEQ ID NO: 244834 - DNA, 201 bp, Homo sapiens
  misc_feature (1)...(201): n = A,T,C or G
tagagagaaccatcctgaaatatcagtggaagccaagaccatcgcgaaacacacatggcgagcttacataagccttaccaaaaaggcactgtattttttgnggccaatttaatttggtttctttgcacctaacatgcaggtgaggcagagaggagcagctgctttgaacagagagctccaacttcagatttaatctcagtg

SEQ ID NO: 244835 - DNA, 201 bp, Homo sapiens
ctttgcaaaccaattttagaaatttttagatgcctgttaattttttcctaggctactagattaataaccattgttgaatcagaaatgcatccatcttccawaatgacattattgcaaaatccccaaattgcttgcaattcctacagtaggccctagattgtatctacacagtgtgaaatgtacatgtgagtaattatacag

SEQ ID NO: 244836 - DNA, 201 bp, Homo sapiens
attaaagcggtttcagttactacatacgtttgaaagttataaaattgcatttcttttgaaaaatgttgaaatgttgaatacgaaaggtgtggttttttttycccctaatttagacaggcttctctgtcagtatttgtgatgtcttttatttgccaaattccaatctgaaagtatttcacagtaatctaagatttgtatggt

SEQ ID NO: 244837 - DNA, 201 bp, Homo sapiens
ggtccttggagcacatgtgatgtgagtggaatgttatttgaaatagatttcaatttagatggactacattctagggacaccacgaaaatttttaaaaagawgtataatcaaaatgataaagtaaaatgagattatataaaatccctagttaaaaccagacaaggaagaaaaacaacaggaaaagagcaggggaaagaactc

SEQ ID NO: 244838 - DNA, 201 bp, Homo sapiens
tttcttaaagtaaaaatagaatttactcaatttggaaagtatcgacagtataataggaaacttaaaatcacttgtaataccccatccaacaattaatcatwgtagatactttattttcttatgatctttcgctatgcatttttacacagttaaggccatatagtatagttaattttgaattatggtttgttcacacaacat

SEQ ID NO: 244839 - DNA, 201 bp, Homo sapiens
aagatacatcagtcataaataactattaggtaactgtagacttccaaaacataaaatgtaaaaattgataggagaaaaaggagaaatatatattttcacartcataggaggttttaagattcttgcgtcagcagttgatagacaaactggacaaaaatatcactaaggacctaagaggatttgaacaacatcagccacttt

SEQ ID NO: 244840 - DNA, 201 bp, Homo sapiens
caaggaagtgagatcatgaaagaggagaaaaacgaatttttaaaaatccactaagattttaaaaatcagatatagagctccattgtaattattgtatgttkttagtgttagtctaaaaattgagtttatgttttaattcataatgtccattagtaaatggaggctcctgaagtgatcgagaagcatgtgttctcttaagca

SEQ ID NO: 244841 - DNA, 201 bp, Homo sapiens
gtaagggaatgaaggccacatgtagtgttcagacatggccacatgtagtgttcagacgtggccacagtgtggcagaaaaagcccagattttggtggcatcyctctcctctagaggatgtaaaagacgctgcattcagtgcattggacagagcttctgtcaggagtccagggcattggaggagcccgagcgagggagacagt

SEQ ID NO: 244842 - DNA, 201 bp, Homo sapiens
aaaatttaagttgggccatcatgagtcagggactctgtgtagtcattcattactcccctttgtggggataaaagtggtttacatcctttatggcatccagmctgatgccttcaaaccggcctcagagagagaaccctctagtggtgatactgaatattacacaaataccaccccttcatcagggcctcctggtgtatcgtt

SEQ ID NO: 244843 - DNA, 201 bp, Homo sapiens
actttaaaaagtctaattttactttcatttttgagactaaactttgaaaagtttaattttactctcattttttcgtttgggagtccaaacagcctaggggrtagctgggcaccttgaggtgagaatcagaactggaggcagacttagccaggaatgtgttttgctaaagagcttccaatccttatttggagcagcagtcag

SEQ ID NO: 244844 - DNA, 201 bp, Homo sapiens
taaaatgcaggttgtaatttgcatttgtacatcacagggtaaaagaatggccatccattctgaggaagagtgttctgttctctaagatgctgcttaaccartgttatccaaatgccatagcatcatatctccaaatacaagattaaatcataaggattcatgtaaaacagagtatactgagctgttctcagaaaaattaat

SEQ ID NO: 244845 - DNA, 201 bp, Homo sapiens
ggtggggcagagattggctggatctccactaaaaccaccacctcttcctcttgagcctaccacaggactgtgttttccagcttctctcttggaaagacgtrgttaggtgactatggcttctggacaattggaagtgaccaggagcaatcagttccagttccagtctggttcataaaaacctctcgcacatgtccttttgca

SEQ ID NO: 244846 - DNA, 201 bp, Homo sapiens
gagtcatttgcattagacagtttatctgatcatgaacatgttcccagggagattagaaaaatgggaagcaggcctctaaagatcctccttggacatttgtraaaaggctggctgcttctccaggaatgtctgaattaagcaagaattgtgccactgaaatagcttcttgtttttatattaaacaaggaacgattgtgcagt

SEQ ID NO: 244847 - DNA, 201 bp, Homo sapiens
caagggcttacacacctgaattaagaattaactagcatgtggggacagcaatagggatagtcctaccacagacgaaaccatgcgctctacacgtccctggrtaaaatgtgacaagttagcccttgaatttgggtccccatgtcaccaaatagctctatatttaagttgtgttaatgtggtacgtttcagtggcataatgac

SEQ ID NO: 244848 - DNA, 201 bp, Homo sapiens; identical to SEQ ID NO: 47882

SEQ ID NO: 244849 - DNA, 201 bp, Homo sapiens
atgaatattttgattaacctctcaaaggatgactggaggtaaggatgagaaaagagagagatttgtaggccagggaaggaactttgaagttggatgaagtrtgctgtttttgagaaaagaacaccttgcttaaaatgttgattcgtgttgctttctctctctttctttctctcactctcaccctctctttgtgtatgtatg

SEQ ID NO: 244850 - DNA, 201 bp, Homo sapiens
caccctctctttgtgtatgtatgtatgtcttatttctcttttttctttatacagatattcaaatatttataaataaaggctatggaatgttatgattaagytccaactactttattttgccatctttacattgctttttattgatgaattgggaagtgaaaccagtttgagtcaaataattcaatattgtcctaaaaattc

SEQ ID NO: 244851 - DNA, 201 bp, Homo sapiens
acttcacaatggcaaaaatgtatacatttattttattacctgctcctttggtcccataattattttcctttcagatgtatcagaataagtgagaatattcratgactgtaaaatgtatcaccatagttgtaggattattctttgtttcctctattctaatgaaattatgtctttttatttttctagattacggtctttggt

SEQ ID NO: 244852 - DNA, 201 bp, Homo sapiens
cgcagaggagcagcaaaaggaaatggaagccaaaagccaggctgaagaaggcgcatctggcaaagctgagaaaaagacgtctggagaaactaagaatcaastcaatggaacacgggcaaacaaaagtgacaaccctcgtgggaaaaattccaaagccgagaagtcatcaggagaacagcaacagaatggtgagtagactta

SEQ ID NO: 244853 - DNA, 201 bp, Homo sapiens
gttatgtaggagaaatgaaactgacatgtaatattcaaatcaaggaatacatacagtacataagatcaagccattctcttttaatctgatctggaacttcwagatcagtttcttctggaaagtatggaaaggcccaaggtaatatgtggttcctctgaagcattgctgtttctcttcaggtttcattgatttcatcgtgga

SEQ ID NO: 244854 - DNA, 201 bp, Homo sapiens
ccccaaagcagcataactgattctaagcatgcatggcgtttgttgaaaaactaaggtggtaaaatgagttttaaagacaatggttttgttttttattgttrttgttgttgaatgcctgtttaaccattcattgtttttggtttaatagaagtaggttatatctaagataggattttgttcaattatttgggtaaggaggga

SEQ ID NO: 244855 - DNA, 201 bp, Homo sapiens
ttgcaaacatctcttacaattcttttaatttaatccgtgtctatagtatttttcccatttttatttattacacgtgttggtgagttttttcctttgttctstatgaaattatcagattgttttattgtttctctttttgtttatagtgccttcactggcctttttatttttatcaattcagttctcctttgagctgcttcc

SEQ ID NO: 244856 - DNA, 201 bp, Homo sapiens
attcttcccttgatttcaacacccttctcatatatgatgtaaaatctgtattgctttttaaaaatacataacacttgttaataaccgggcatttgggatcwcccggggcttacactatcagctgccgcttttcactgcattgtgacctataggcaagactgagttgtagaaacgggactgtccggccgggcgcagtggctt

SEQ ID NO: 244857 - DNA, 201 bp, Homo sapiens
aattcatataccatgtatttgcacttcaggatttaaagttctcacagctttaccttgtgaggtataaaaagtcttgggtcaaggggcaggcacttaaatastttcctgaattattccaagatgtggcaagaaagtttccatttcaattcatcagtcactctttaaaaagtggaaggatttaactactttttgtggccttca

SEQ ID NO: 244858 - DNA, 201 bp, Homo sapiens
tcccttctctcgttctgttattgagcactaactggcagtgattctaggcaatggggtctagctgtgtagacaggaaatggaggaggagaagaatagggatktggtgaacagctacctgcctaactgctgtctttagtttgtctgtcatgaatgtctgagtggccaaaggaacttgagtgtttctaaccaaattagtctttt

SEQ ID NO: 244859 - DNA, 201 bp, Homo sapiens
aagtagagagtatctgtgataggctagggatttttctttttctacttttgaacatttctttttgtgggttttaatttttaattaaagagacatttagccartggtattgctcttttccaatatgaaaaaatactacactttcgcttttcttggagtgaggtttcttggcgtaactgacattttgagccagataattttttg

SEQ ID NO: 244860 - DNA, 201 bp, Homo sapiens
ctgtttcttccaactctgtttgccctctcccatctagatgtgcccccctgtacctcaaagtcagcaaatctgaaactgagcccattgtcttttcttggccwtattctccttctatttcctgttttccctgctttgttgttggagtgtctttggcagatcccatacagaggcagtaccacctcctgctgtgcaggtatctgt

SEQ ID NO: 244861 - DNA, 201 bp, Homo sapiens
ttgaagtaaatatgtgccaaaggcagaacttaacactatctacattggtaatgccatttcttttctagacgctcacatgctaaaaaagctattaaatgcartattcagcaagtattcaagcttcccctctttgcattttttcttagcattctccactgatgggcatcctgctctccaagtgaccatgtctacatttcttaa

SEQ ID NO: 244862 - DNA, 201 bp, Homo sapiens
aatcacttactatataatatttcattatgtgttctaatggctttaaaatttattgaactttttataatctaaaagtaatgaaatttttgttcaatttttcwttccttctacctacttttttggtcttatttcattgactataattcgtaaccattttttttttttttgtaaataatgctactagagggcatccttgcctta

SEQ ID NO: 244863 - DNA, 201 bp, Homo sapiens
taggttgacccaaccatgagagttattattaattcagtgatgttttaacccaacataattggttttattttatgaatttggggaatatctattaaccaatycataatatgtggattatattatatattatatgagattgatgggtttaaataaattgtgttatactaagggaaacttctaacatcaattcatgttttttat

SEQ ID NO: 244864 - DNA, 201 bp, Homo sapiens
ccaattatttttcaactgatgagaattagcttttagtttgtaaaagtgggagaggaagtgtttgtatgagaaataggagattgtcctagtaaaaggagacrtgtcagctcattttcatgtttagttgtccttgtattatcagcattttattttatctgtctcttctttccagaatctttttaaattacttgtccatttggt

SEQ ID NO: 244865 - DNA, 201 bp, Homo sapiens
aatgaggtgttttccctgttctcaaagagtcagcagtctgggttggaacattattttgcaggtagctatgatatagggaccttagggtatttcttaagtgmcttaagaaattcacaaacagaagttacttttagagggcatgtgtttgggaaggccagggatgatgactcaggtcatcacgtcacagacccagctatagaa

SEQ ID NO: 244866 - DNA, 201 bp, Homo sapiens
ttcaaaacttggcagacttaaagatgtttataacaaccccctcagctgcatacatatactgtttgtcatgtttattactttcaggtgacttcaaagatggyaaaaataagacagacaagaaggatcactctaacatcggaaatgattcaaagaaaacagatggtaagagtattattctcattacatttttccataaaatgt

SEQ ID NO: 244867 - DNA, 201 bp, Homo sapiens
caagtcctattcttgctcttcagtttctctctttcattctgccttgcatcatagttatttatgtacccagcagagtacctggcacaaagtatatacacacrtgcattcgtgcacacatagcagctactgaaggcttaaaagcgtggtgttaacctctctacatacattattttatgtgtaatcatcaaatctatgaggaag

SEQ ID NO: 244868 - DNA, 201 bp, Homo sapiens
gtgtttaactttacttactatttgattcaagcctaggtactgtgaagttatatgctaatttatagatttttgactgagagagaagataaccccaaacgttrtggttttattgccctgtaggatatacccagttttgtctctaacttagcaaatatattttcacgtgtttctaaaatacctgtcaatacccagctccagtac

SEQ ID NO: 244869 - DNA, 201 bp, Homo sapiens
gagagggcagtaagagaagagtaagagtcaaggaagaaattggggaaaaggaccatcttcagggaaaagtattcctgctttctggggtggacccaacttgyttctggctgcagtagaagtcaccctgggcgtgtttccatttttagggaaaaatatatattgcatagtgattaaacataccctagaatagtggttctcaat

SEQ ID NO: 244870 - DNA, 201 bp, Homo sapiens
attaaaaacaaagtttagaactgaaaaataaaatgtctacatttagaatttgctacataggcttagtgcatgatagagaagacagaagaaggaaacagtgmcttttaaaaattcatttttcaggtttcaaagttggaaattatttgatttgaaaaagtaagaggaaaaagctgttttaaatgagtagaagttagggacatg

SEQ ID NO: 244871 - DNA, 201 bp, Homo sapiens
actttcaccgtgagcaacctgtgcatccttcctaatggactgcacaggtaatcacaaacctcccgtcggagacattaaatatgggtccaagtgccccactyggaacctcctgacctgtaacagatactgttagttgattttggtactttttcttactaaactgtgggtttattctgagtattcctctcagcacagaattcc

SEQ ID NO: 244872 - DNA, 201 bp, Homo sapiens
accactccctggcacagggccccgggagtaagtttgtctcctgtaggctactttcaccgtgagcaacctgtgcatccttcctaatggactgcacaggtaawcacaaacctcccgtcggagacattaaatatgggtccaagtgccccactcggaacctcctgacctgtaacagatactgttagttgattttggtactttttc

SEQ ID NO: 244873 - DNA, 201 bp, Homo sapiens
aggcccagatgacacataaaggaaaagaataaggacagtgaggattagagtgtttttgttgacattaacaacattgaccaatcttaccctctgatctctgrgattctgatgagatctcttctcatcctctctgatttcgtatctgctctgtttagtgcttgcaccactccctggcacagggccccgggagtaagtttgtct

SEQ ID NO: 244874 - DNA, 201 bp, Homo sapiens
ccaatcccaatccctatctctatccctatccctgtgcttatccctgggcattagcccgggaccatggctggttcccgcagctgcctccggagcgcacctgrggccatggtttgccgcgatcggagtccgctctaagtcggagtctgggggcgcagaagggggagcgcgccgagaaagtgccgggcaaacgcgcgccgcgcc

SEQ ID NO: 244875 - DNA, 201 bp, Homo sapiens
gagagtatggttgggtctgtttgctgtcatgcaacatggagctattggagataaatctcaccacctccccctcactggcccccggctcctccccccccccmccaccgccgttccgtcagaagtagttggcccctgaattggtctgggtaacaggattaccttctcctactaatcaattcccaagagccttactttccttaa

SEQ ID NO: 244876 - DNA, 201 bp, Homo sapiens
ttgaatgaatcttatacccccttgatatagaagatgttatggagaattttgtaattcctttaatatttttctcaatttctgaaagatctatttgtttctarggaactgttgatatgatttttgaccaaattctaatggatttaccattcttagaggatggtggtcttagtgaccatttttgttcagacttctactctagtt

SEQ ID NO: 244877 - DNA, 201 bp, Homo sapiens
gcctaattgcttactagatattgtgacctatgataaattacttgagtctctgagcgaaaacttcctcatttttttaaaatggtgaaaaatattccactttstagaagtgctctgatggttagaataaagtatcaaaaatattaagtactctgcctcataaaggaagctcaacaattaggcattattgttaaaacgttgcag

SEQ ID NO: 244878 - DNA, 201 bp, Homo sapiens
acttgagtctctgagcgaaaacttcctcatttttttaaaatggtgaaaaatattccactttgtagaagtgctctgatggttagaataaagtatcaaaaatmttaagtactctgcctcataaaggaagctcaacaattaggcattattgttaaaacgttgcagaatttttgtaaaacctatgatcattttttcagttcttcc

SEQ ID NO: 244879 - DNA, 201 bp, Homo sapiens
ttatgaaggattatttagtttaacagttcttttatggatcactaatataaacttatagttgtacctagatgtgtacaagtatagttgacaatgatcattcrgtatattacctttggtttcctttgcaggaattaattgacataataaatgcacagaggcctaccatagagtcatacatatggtaaaagattggtatgtatt

SEQ ID NO: 244880 - DNA, 201 bp, Homo sapiens
agtatatcagatagtcaggagtgattgttgttaaaacactaataattttaccatcactggaatttactagtttgcatgtatgtgtgtgtataaactaaatstaaaatgatatcctgttctgaatatatgtaagcaattgacttacatatttttgctagttttaggttcagtatttcaacatgagtattccgttttaaaaaa

SEQ ID NO: 244881 - DNA, 201 bp, Homo sapiens
gacttgatcacttgggttgccttaaatcatgaaatcaccccaccacttgtcttattcagatttttgtgtcttttgtctgctgtttctaagtttttccatcrtcacatctctaatttcacacctgctgcctgcccttctggctccaggttctggctttgtctttctgacccagtgttgattgctaccaataacctcccttcc

SEQ ID NO: 244882 - DNA, 201 bp, Homo sapiens
ctggcaaagctgagaaaaagacgtctggagaaactaagaatcaagtcaatggaacacgggcaaacaaaagtgacaaccctcgtgggaaaaattccaaagcygagaagtcatcaggagaacagcaacagaatggtgagtagacttacactggtgaagggctcttttcgcggcattaatgacataatgaatggaaactggtga

SEQ ID NO: 244883 - DNA, 201 bp, Homo sapiens
attggagaactctgtttaaggacaaatataagtttgcacttggtccttcaaaggggatgacacagcatctctttaaatttctctagactgctcttgtcttrgtcccagaccacagctctcagacttgatcacttgggttgccttaaatcatgaaatcaccccaccacttgtcttattcagatttttgtgtcttttgtctgc

SEQ ID NO: 244884 - DNA, 201 bp, Homo sapiens
gtgcaagttccttttgaaaaactttgttctttgtgctcaagagcagagatggaaagccagcacacagatgccgttcagtagctatagctgaaccggttttrtgaggctgggattggagaactctgtttaaggacaaatataagtttgcacttggtccttcaaaggggatgacacagcatctctttaaatttctctagactg

SEQ ID NO: 244885 - DNA, 201 bp, Homo sapiens
atcatcagtaaaataatggaaacataatagcattgttattcactgaatatttgtgttcccaccaaattcatatgttaaaatccaatccccaatgttgcagsggtccgtcccacagaccttgatccaacaacagatgaataacatacactgacacagatattatgcttgtcagtccagctgagagtctgggccgcttacaga

SEQ ID NO: 244886 - DNA, 201 bp, Homo sapiens
ataactgctgtagatctagctggcatacaaccctgagatgtgggcggaaggtagcaagctgaagggagatttatgaagtggactgtgcaagttccttttgraaaactttgttctttgtgctcaagagcagagatggaaagccagcacacagatgccgttcagtagctatagctgaaccggttttgtgaggctgggattgga

SEQ ID NO: 244887 - DNA, 201 bp, Homo sapiens
attttaaataactggtcttttgtgaatcaaagtggtgtattctctgccaaatattcacaaataaattcattaagttaatctcttcattgtgtggtgagatstttcatgtaataaaacccatcctgtggggaattatgtgacttttctatattgtaataagaagatccaccagggagggcgctatcacgaggcagcaatgat

SEQ ID NO: 244888 - DNA, 201 bp, Homo sapiens
taattgatgcatgtttgatataaaattgactttgaaactgacctgtaattcagattggagttgcttgaaaaccatttgagtaattttgagccaatgtgaaytatgtttatgtgaatttatatattttccctttttttaccttggacctaaaccagattaactgtatggcatgtcagtgagcaggaatgaggataattgctg

SEQ ID NO: 244889 - DNA, 201 bp, Homo sapiens
tgatgaagatacatacagataaggttacacttgcatataggataaatcacacccgtagggtacatttcatttagtcaacaaatacttcgagtgtgtgctaygcaccaggcaccatgctaagcactgggaattcagtagcaaagatgacatttaaaccccatcctcagtcactgaagaaggaagagataaagcctgagtgaa

SEQ ID NO: 244890 - DNA, 201 bp, Homo sapiens
gtcccccaatatacttctgcacaactgttcattcttcgtcaaacctaatcataaaaaaatacaagtctacttgtatctttgggttttcattttcaaaggcmctcatgtcacataaaacttatgttaaataaatgtgtatgctttcctcttgttaatctttccttttcccccacaaatacaaacaataacatttacataagc

SEQ ID NO: 244891 - DNA, 201 bp, Homo sapiens
aggaccacctgctggaacatgattgctgtagagaaatcatacagtaggataggctcgtatctgattagatcatgatgtcagaagggctaccattcattcakgtaaacttgaattgcccgatagctacagttgaggaaaaaccaggtttgtttctgaaatataccccccgccaccagttttttgtatgcttttagctagatt

SEQ ID NO: 244892 - DNA, 201 bp, Homo sapiens
agaatagcaatgtcaaacccctctcagcatcaaatccatacatttcacttcattgaccaagtggtggggacctccagtccattgcctccagaaaggggtgycaataaatgtgccaggaactgatactgtcatgataggtgatctgatggagcagcccctcaatattatgcttcacacttatcataatttaatataaactag

SEQ ID NO: 244893 - DNA, 201 bp, Homo sapiens
ccagatcacctcctcaacgtgcacagctaagcagctctttctccctctttgctctgggatgaaggagaaatcacttgggtcttcgtggggttacagagctrgcctgagggtacatgcgtgacatatacctacacacaaatgaatactattttgcctcagttagcagtttgttgcaaattttattcgtgtagtgtgaggtat

SEQ ID NO: 244894 - DNA, 201 bp, Homo sapiens
tgaagttttctgtcagctggagcacttctttctttgactaaaattttcaggaagcgggaacaccttctatgttcttaaatgtctagaagcacctttctttkttcttgtatagaactgagatttgaaatagtcaaaattcatatagtattttgggttttctggtcagtttctctctcttttctctgtttttttctctctctt

SEQ ID NO: 244895 - DNA, 201 bp, Homo sapiens
tctgtttaacattttgaggtgctgccaagtcatttttcaaagcagctgcaccatacatattacattcccatcaatagtgtatgagggttccaatttctcarcataatcaccaacgcttgttattatctgtttttggattattgccatcctagatgatgtgaagttgtatctcattgtgtttttcttttttttttagacagg

SEQ ID NO: 244896 - DNA, 201 bp, Homo sapiens
aaacactgtaataggggctttgagtagaaagaattaagagccattgtaggttcctaaggcaacctaattatgtacttaagttaaacatgaggaattaaaaraaattcctgattgttagattgagatactaagaacatcctaagacagaaggtattggatattcctcttttagaggaattttacaaaaattttagagaaatt

SEQ ID NO: 244897 - DNA, 201 bp, Homo sapiens
ccccagtgtgtgatgtttccctccttgtgtccagtgatatctgatgtattgcttactgaacctatacagagtttgtattttgagtataaacaagttaattrcctgctaaaacaaaacatcaacaatcttcagagcaatataacagaacccagattccctacaacttatatccataatgttcaggatacaatctaagtgaca

SEQ ID NO: 244898 - DNA, 201 bp, Homo sapiens
ttcaaaaaaacaacttttctcatttcattgctccattgcattgttttgttagtctctatttcatttaattctgctctgatcttcattattttgtttttttwctaatttcagtttggtttgatattgctttctttttcattgaggtacagtgttagattgtttatttggaatttttctactttttggatgtacacatttatt

SEQ ID NO: 244899 - DNA, 201 bp, Homo sapiens
gtaattaaggttaaatgaggtcatgagagtaggatcctcatcgaatgggactggtgtctttttaagaagaggaagagacactgggaatggatatgtacacrcaagagaaaaggccatttgaggacaccgtgagaaggtggccatctacaagccaagaagagaggcatcaggagaaactcaacccagaaatgccttgatgtt

SEQ ID NO: 244900 - DNA, 201 bp, Homo sapiens
atatgaggctttcttattattatcactcccattttcagatacagtaactgagacacatcgaggttaagtaacttgtctaaagttatgcatctcgtcagtgscagaggtggtatttgaacccaggcagcctggttcctggccctgtgctcttaatgacagtgctctgatacctaagctaaatatttatttgatatgcttgta

SEQ ID NO: 244901 - DNA, 201 bp, Homo sapiens
ttgggaaaggatcttttaattaattatttgtgtatcctatttcttaagctggcttgtaggaacatgtgataattttattattttttacaactccatagatyttcatattatatgtgtaaaatatttcttaataaaaatggtgataaaaaaaagacttaacaaggtggctataccctgagatcagtctcctttggctttttc

SEQ ID NO: 244902 - DNA, 201 bp, Homo sapiens
tatcagctgtttgaccttggaaaattactaattaacctctcttaactctaattttctcacctatagaatggatacaaatacgtatctcatagacttgtaargcttaaatgagctaagtgtataaaatacttatgtagtgcttgatacaacatcaatgttctgcaaataattatgttttattattattgataattgataaca

SEQ ID NO: 244903 - DNA, 201 bp, Homo sapiens
gcatttctgaatggctttgattccttgagtgattccctcttctactgaaaactcagtcatggatatacatgcacataagggttaatagaatgaatggtggyaagaaatcaggcatattagaagggttaaactgttaggatggagacttgactacgagttttctggtggacaggatgtaaaggaaaataggatgaatagctg

SEQ ID NO: 244904 - DNA, 201 bp, Homo sapiens
attagaggcaaggaaagtagttgactgcctcctacaggattacaaagaagagatgatgaatatcagaactaaggtagtaacggggcctctccagaagagargtggcacataaggtatcaaggatttggctgaacgcaaagctgagataaaggcagaactctacattaagtggttggaccatgatcccatttacaaaggttg

SEQ ID NO: 244905 - DNA, 201 bp, Homo sapiens
agttttgaattcaagtattatgcaataatgactgcttggaggaaactaagtcacatctagaactctagtttcaagaatggatagaaagtgtactttatgtkttctagcctgtgccatcctaaagatgcaccagacaagggttagagtaggtgccagatgagagtcaacctaccttatcatttggacattgatttttcagta

SEQ ID NO: 244906 - DNA, 201 bp, Homo sapiens
aggaacaaagacaaattatatatggtacctgctctcaaagacattaaaccagtattgggtgatgggcaaaatgttacaaaaacaaaaatctattagaatgktataatgccaaggtagacttttgtacctagtacgataaggtacacaacagagtgtgtgaaccattaggtttattaagggataatatttgaattgagtccc

SEQ ID NO: 244907 - DNA, 201 bp, Homo sapiens
tggttattttcagcaggagatgatttgatatgaggagttaaatgtttacaaaatcactggaagaactggaggagaaggttcttgacttggtttccaggaakgaatcctgaaataacaccatatagaactgaccattaagggaatgtctccccctgccgcatcctggaaggtgagaaattggggagccagtgtcccaacttc

SEQ ID NO: 244908 - DNA, 201 bp, Homo sapiens
cctggaatgtggcttgttcatgggagaattggacaatgatactcttggtgtctctgtcattccctgtcaagagaaagagggggccccaactttccaaggasataacaagtgtcattggcaggaagcccattctactccatcccgccattctgcatgcaggactgtaagctaacaaggcatttctactcactgatgcttctc

SEQ ID NO: 244909 - DNA, 201 bp, Homo sapiens
gcctctccaacatgggattataggcatgagccacggtgcacaacccaaatctcacttctgagctcccataggcttctaacttttcagtgtctaagctttcytgtaagtgtgttgtcagacacagacataaacacttgacaaaaaatatttccaattattcctaagcaaaatgtcattttaactttgtataatactagctgg

SEQ ID NO: 244910 - DNA, 201 bp, Homo sapiens
tcctttcctctgggggtatgacaagtattaagcctctggcccaagtttttagaaaacatctccattattatttagactcttcataatgcttattatggtgrtgctttttggtgagattgagaatatattggttagacaattgtgttttattgttgtctaacttcatagacacaagcaattatttattctctttttggtcca

SEQ ID NO: 244911 - DNA, 201 bp, Homo sapiens
ctcatgagacttatttgctaccacgagaacagtatgggggaaaccgcacccaggattcagttatctctcaccaggttcgtcccacaacatgtgggaattaygggagctacaatttaagatgagatttgggtagggacacagccaaaccatgtcattccaccctgacccctcccaaatctcgtattctaacatttcaaaacc

SEQ ID NO: 244912 - DNA, 201 bp, Homo sapiens
agtgattggcaggggttgagggaaaaaagagaggggtgaatcgaaggagcacaggggattttagggtgctgaatctattctgtatggatattgtgatggtrgatacatggcattatgcatttgtcaaaactggtagaactgtacagcatgcccagtgaaccttaatgtaaactatggactgtagttaacataatgtatcaa

SEQ ID NO: 244913 - DNA, 201 bp, Homo sapiens
cttcacagagaaacccccctaagaagtgttgacccccatgcccatccccactgaagtaatccctttcttacccactgcctgccacaacccttttctgatawatgtttatgccttttcttacaggaggaaatataagaaaacgtcccagaggtaagaacgtctttctgagctgcaactggttgattcatttgtggcccagct

SEQ ID NO: 244914 - DNA, 201 bp, Homo sapiens
ctcaatttgattcaattttgatcattcagtagatctttcattcagggctcctttgtctattgttgtatttgttttttgttttgttttgttttgttttttttgaacacttcaaattttcttgctctacaagatacttcaggtacttcttgtatattttgtgtccgagttctggaatcagtcatttctgcaaggagccctggt

SEQ ID NO: 244915 - DNA, 201 bp, Homo sapiens
tgtgaacctgtttcctggagaaaaataattctgtacaactgttccccataccaaaacaaaaaagtagccacgaagaaaaatgatgagagagagagagagaragagagaatggagagagagagacagagagagagagagagaacaaaagataggctggttgtggcagtgaaaggggagaaaatcatagatacctttgggaga

SEQ ID NO: 244916 - DNA, 201 bp, Homo sapiens
actgattgaaatctattgtgtgtctacagtgtgccaggtgctttacatgcattttctcatttgatcttcacaatgatcctgttttacagaaaaggaagtcrtggaaaagaggtaactcatctgaggtaactcaaatgagcagacaaatggtcgggccagggtttaaaggcaggcctttcagacactgaaagtttcttgagt

SEQ ID NO: 244917 - DNA, 201 bp, Homo sapiens
taaaataacatttaagtggcaataaatgattattttaatttcgttagtttagtatatgtggtttggtgtgtgtgtgtgtgtgtgtgtgtgtgtgtgtgtgkacacattgcagatagaaagtgtctataggagaaagtgctttttccaaatgtcatatcatagcattatgtttgaaagagaaaaaacagatatccaacactt

SEQ ID NO: 244918 - DNA, 201 bp, Homo sapiens
gtaaaataacatttaagtggcaataaatgattattttaatttcgttagtttagtatatgtggtttggtgtgtgtgtgtgtgtgtgtgtgtgtgtgtgtgtgtacacattgcagatagaaagtgtctataggagaaagtgctttttccaaatgtcatatcatagcattatgtttgaaagagaaaaaacagatatccaacact

SEQ ID NO: 244919 - DNA, 201 bp, Homo sapiens
gtttgtcttttcaaaaaaacaacttttctcatttcattgctccattgcattgttttgttagtctctatttcatttaattctgctctgatcttcattatttygtttttttactaatttcagtttggtttgatattgctttctttttcattgaggtacagtgttagattgtttatttggaatttttctactttttggatgtac

SEQ ID NO: 244920 - DNA, 201 bp, Homo sapiens
acatgtattatgtcattgaatcctcacaataaccctctaagggaggtactattatttctatttcacagattaggaaactaaggcacaaagagatgaatagyttacccaaagttagcagggggcaggcctgtgctcttttctctgaaggtcattgccaatggttaaagactgattctaaatagtcctcactgtaaccacttt

SEQ ID NO: 244921 - DNA, 201 bp, Homo sapiens
tggtctgtccaggttttcaatttcctcatgattcaattttggtaagttgtatgtgtccaggaacttatccatttcctctaagttttccagtttgttagtayatagttgttcataatagtctctgatgaccttttgtgtttctgtggtatcagttgtaatatctcccttttcacttctgatgttgtttatttggatcttctc

SEQ ID NO: 244922 - DNA, 201 bp, Homo sapiens
gattccagcttctgtcctaatgtggtgtgtagctgaaaggacaggcattttccgaaaggctgcatatagcactctctgttcttgtggataaggatgattastcatgaaaccaagaaaatcttcaaaatcttcactctgaattttcccaccagccaaagttcactgttctacatacatatgtgcaattataaatgacataca

SEQ ID NO: 244923 - DNA, 201 bp, Homo sapiens
aattgagtcacagtaatagtagctgctgtaaggttgttttgaggatgaaaataaataatccccaaaaaacactcagcataatacttggcagagcgaacacrttcaatagaagctattaataacggtgatattaataatacaattataatattggtttattaattattatccttattattttctccctgacctctcctctaa

SEQ ID NO: 244924 - DNA, 201 bp, Homo sapiens
aaattacttggctatgtttaaaagtttagccttctatgttaaattatataataagttctcaaattttgcaacaaatccatagtttagaatttaatttgagragaaatttatatctttaaaatggtaagcttttccatccaaaaatatgatgtggatctcactttcttcaatattcattttatatcccttagtagaacttta

SEQ ID NO: 244925 - DNA, 201 bp, Homo sapiens
cttgtccatttggtacagtttgagttagttaaatctaggtcatgaatcaacaatccatttaactggagactcacgaattcactcccttggaagaccactgygcttaaagtttttgtttttgttttgttttctggaaaggatatgaatgataaattttgaagttgttgacacctgagaatgtatttattggcttcttatgta

SEQ ID NO: 244926 - DNA, 201 bp, Homo sapiens
ccttcaccaagagcttcttttgagctatttttccaaaggctgtttttctaatagtagtaggaggatgttctccaaatctccactccccctgtcatatgctytctttgataatacttttgcaatatcaccctgtactagtctgttctcatgctgcaaataaagacatactcaagactgggtaatttataaagggaagaggtt

SEQ ID NO: 244927 - DNA, 201 bp, Homo sapiens
cacacacaccgcagcaccccccagctattatatgtgtatgtcaacaggtaccctatttagtttatggttaattctctttgcagagtcattgctcagcctcycagagtaattctcaaaggggactccatggtgtggggggaactagaactatacaggtgactccgcaaaatcatccttcaccaagagcttcttttgagctat

SEQ ID NO: 244928 - DNA, 201 bp, Homo sapiens
acacacacacacaccgcagcaccccccagctattatatgtgtatgtcaacaggtaccctatttagtttatggttaattctctttgcagagtcattgctcascctcccagagtaattctcaaaggggactccatggtgtggggggaactagaactatacaggtgactccgcaaaatcatccttcaccaagagcttcttttga

SEQ ID NO: 244929 - DNA, 201 bp, Homo sapiens
accccatctctactaaaaatacaaaaattagccgggcgtggtggtgggtgcctgtaatcccagctacttgagaggctgaggcaggagaatcgcttgaaccyaggagatggaggttgcagttagccgagatcgcactgccgtactccagcctggcgacagcgcgagactctgtctcagaaaaagaaaaaagaacaggcagga

SEQ ID NO: 244930 - DNA, 201 bp, Homo sapiens
gctcgacaaaatgacagttactttggcatcaccctataggattaagatgttaatcttgaactcatgtctctattataattggttgggttgtttctttctartggacaagtccaagacgcaaaattccaaaccagatgtggcaatttggggtcaggaaatcactagaaactgccattccagttgtatttaaacttcactcca

SEQ ID NO: 244931 - DNA, 201 bp, Homo sapiens
tagccatccagcaaaagcatgggacctccatcatcgctggacaatgtcactcctggaggagttcttcagacaggtaccttgttgctctctctccatcaggrctgtcatcattggatattttatgaattttatatctcagcaatgctaggataaggactattgagattacagtaattttggagaggggaggggggctccaca

SEQ ID NO: 244932 - DNA, 201 bp, Homo sapiens
tagtataagttcaaggtagaacacagtggaaaagttaattaatgttggaggatagtcctgaagactttacaccaaatatagcatggagagggaaccatatsaaaaaaatgaaagatcatgaaccataaaaatcttagaaggaaacggctgggcttggtggctcatgcacttttggaggccaaggcgggtggatcatttgag

SEQ ID NO: 244933 - DNA, 201 bp, Homo sapiens
actagctatactataagctcaatttttctgtcaacctaaaactctattaaaaatcaagctatttttaaaaagatggaatacctgtatccaatgtgaaatayggatgattaatttacctccaaggattattttcaagttaattctttcttaaaactctgaattcatttggagaaaagagcattttaatacaattttcagttt

SEQ ID NO: 244934 - DNA, 201 bp, Homo sapiens
tctccagagaagatctacaaatgggccaataagcacatagaaagatgctagtcattagggaaatgcagatcaaagccacagtgagatgccacttcacacccattaggatggctactataaaagacaaacagcaaatagcaggtattggtgagggtgtggagaaatgtgaaccctggtatattgcttctaggaacataaaat

SEQ ID NO: 244935 - DNA, 201 bp, Homo sapiens
acttcattaaaattaaaaactttttatacatcaaaagacacatgaatacagtgaaaaggcagctcacaatatgagaaaatattttcaaattatatattgggataaggggttaatatctagacatatgaaagatataaagaactctggcagctcaacagcagcagcaacaacaacaaaagtaaaacccaattcaaaaatggc

SEQ ID NO: 244936 - DNA, 201 bp, Homo sapiens
atctgaaatctgcaggggagaccattaggaagggcatcctgaaactctcaggcaaggttgaagatgctgtccacaggcagaatttattctttttcagagaygcctcagttatgctttaaggcctttccacccagattatgtagcacaatctcctttatttaaagtcaagtgattatggattttaataacatttacaaaata

SEQ ID NO: 244937 - DNA, 201 bp, Homo sapiens
gtggaagtaactacaaaactctaggcaggcgagagagagaaagaacccaaaacccaaatatcttctttttttttttttttttgagacggagtcccgctctktcgcccaggctggagtgcagtggcgctatctcggctcactgcaagctccgcctcccaggttcacgccattctgctgcctcagcctcctgagtagctggga

SEQ ID NO: 244938 - DNA, 201 bp, Homo sapiens
cttcttcagatagtcctccatcctgttccatcctggatgcacattagaatgaggggttttaaaaacatgagtgctgggcctccacccctgtactgtgggggtgacgcccaggcaacttcctatttagaaaacttcccctgtgatcctaaaatgtagcattgctcagtggcacatcggtcccaacatatcaaccttccagcc

SEQ ID NO: 244939 - DNA, 201 bp, Homo sapiens
agtcaagggaaatgtaattcctgaccttaaagtgtttatttcccaaagatgacagattacctacttagacacacacacacacacacacacacacacacacaaatgcacacgtgcacacacacgcatgcgcacatgcacatacacacacctttctaaaacaaataataaaaactgtgttgtatgacacagtttgctaagcac

SEQ ID NO: 244940 - DNA, 201 bp, Homo sapiens
gagtcaagggaaatgtaattcctgaccttaaagtgtttatttcccaaagatgacagattacctacttagacacacacacacacacacacacacacacacacaaatgcacacgtgcacacacacgcatgcgcacatgcacatacacacacctttctaaaacaaataataaaaactgtgttgtatgacacagtttgctaagca

SEQ ID NO: 244941 - DNA, 201 bp, Homo sapiens
tgagtcaagggaaatgtaattcctgaccttaaagtgtttatttcccaaagatgacagattacctacttagacacacacacacacacacacacacacacacacaaatgcacacgtgcacacacacgcatgcgcacatgcacatacacacacctttctaaaacaaataataaaaactgtgttgtatgacacagtttgctaagc

SEQ ID NO: 244942 - DNA, 201 bp, Homo sapiens
gtgagtcaagggaaatgtaattcctgaccttaaagtgtttatttcccaaagatgacagattacctacttagacacacacacacacacacacacacacacacacaaatgcacacgtgcacacacacgcatgcgcacatgcacatacacacacctttctaaaacaaataataaaaactgtgttgtatgacacagtttgctaag

SEQ ID NO: 244943 - DNA, 201 bp, Homo sapiens
tagtgaagtttggttgttggaacatatttgtaagtgaatgtccaggtgggttagatgggtcaggggtgtgggtgtcctctgtgtttgtgtggtctgtccaragagacttctagggagggcatggcagctcttcatcagcaacagtcttctcagtgtccttcccacctctttgactgtagctcttgtccttatgcttgtaaa

SEQ ID NO: 244944 - DNA, 201 bp, Homo sapiens
ttcattcttctgaaaatgcccaccttcatttctttctctgtcaaattttcaaggcccatcttaaacatctctcctctgtgaagctgtttctcccagatacyacttttctttcttcttatccccaaagcagcataactgattctaagcatgcatggcgtttgttgaaaaactaaggtggtaaaatgagttttaaagacaatg

SEQ ID NO: 244945 - DNA, 201 bp, Homo sapiens
gtccaaagagacttctagggagggcatggcagctcttcatcagcaacagtcttctcagtgtccttcccacctctttgactgtagctcttgtccttatgctygtaaaatggctgatgtacctttgcaaatccaggtaagaagataaggcagaatacaaagcacaaaagttggaaaccaaataaatctgcccacttttaaaga

SEQ ID NO: 244946 - DNA, 201 bp, Homo sapiens
tgtcaggtgttaataaaatagtaatgtaggaaatatcatctggttaacatcccacttgagcccaggctggtgagctactcattgctactgccttttcaatmcttagaactgtggtttccaaattgtgctctaagcctttgctattccaagtatggtcctcagagcagcagaatcgacatcacctgggggctttttagaacc

SEQ ID NO: 244947 - DNA, 201 bp, Homo sapiens
aagagtaaatcctgtccctcatacacattccctggaggcccagctcactccaattattattgggatcttttggcttcaataagtaccagtatttgagtgaraatgtgttcttggttttatgcaggctaaaaagaaagcttccattagtaagactggtaagaaaatatccaacacttgaaaataaggctgggtgaagaggcc

SEQ ID NO: 244948 - DNA, 201 bp, Homo sapiens
tttggaggtggagcctttgggaggtaatcaggtcatgaggatggagccctcacaaatgggattaacgaccttatgaaagagaccccagagagctagcttgstctgtttttaccataagagggcacaacaagaagtcagcagtctgcaacctggaagaggaagagggccctccctggaagccaactgtgctggaaacctcat

SEQ ID NO: 244949 - DNA, 201 bp, Homo sapiens
tattttccccttaccaatttttaaagaaggcaataattctccaaaattagtagttaattgaaagatatggcttaagtgggaaattagaaacacttaaatgytcattttaactcattttgcgttaacttaaatcatatgaatctattttatgcactgatctttaattcagaccacagggcttttatgagttcaccagtttgg

SEQ ID NO: 244950 - DNA, 201 bp, Homo sapiens
aaagttaagtgggaacttaaagatgtgcatgaagcaaactgagtgcagaagctctctaacttttctataaatgtgttctgctctttcacagttgtcacacrtattttgatagcagttcttttagtgagtgtccaaagcattaaacttaggttctacagaaataacaactccaattttgtgtccatattttattggtttgtg

SEQ ID NO: 244951 - DNA, 201 bp, Homo sapiens
aaagaagtataagttcacctcgttggtaaatatgtcatgttggaaaaactgtgaggttcattttctttgtattgttgtacaattttatattttgcaaacawctcttacaattcttttaatttaatccgtgtctatagtatttttcccatttttatttattacacgtgttggtgagttttttcctttgttctctatgaaatt

SEQ ID NO: 244952 - DNA, 201 bp, Homo sapiens
aagaacaagctattctaaatgggttacccataggagttcttcattcaggctaaattactactctgcttactgtctattctgtactataattcactctggcrgaagaagtgacccatttaataattcaatttccagtctggggcctatagagttaggttttttttcccccatggttcatatgtttgggattgctttaatttc

SEQ ID NO: 244953 - DNA, 201 bp, Homo sapiens
aattaaagatgtaagtacaaaagtaaaaatttgatcatattagaagaaaaaatgagaatatgtttatggccttgaaaaaagacattctttttaaaattaarcttttaaacacaaaagttatacaacaaaatattgattaatttgaatacattaaagttaaaagcttttgtaggataaaaagcatcataaacaaattaatga

SEQ ID NO: 244954 - DNA, 201 bp, Homo sapiens
ggtttgaaacagacatttccctaaaaaatgtatacaaatggaatataagtacatgaaaatgtgcctgacatagtcaacaaagaaatgtaaattaaaaccamgatgagataacactacatatccatcagaagaatggctgaaattaaagactcattagaggaggcaaagaaaaactgaaaatgttatatgctagtggtcaaa

SEQ ID NO: 244955 - DNA, 201 bp, Homo sapiens
aggaaagaaaaaagttccaaacacaatgacttcaggaagctagaccaaaacagtaatgtaaattcaaagtagatagaagaaattagtaatgataagaggaraaatcaataaaatagaaaaaataaaaagaaaaaattaagaaagctcaagctgttatttgaaaagagcaacatgattgacaaccttctacctagactggtc

SEQ ID NO: 244956 - DNA, 201 bp, Homo sapiens
agtgaaatcagacttttagaaaagaataaactgataaatatctgggtaaatgtaaaataccatttttcttcacttatttaaattgtgcatttgaccatttraagcaaaaattacaacaccatctcatgaggtttgtatgtagagaggtgtaatacatgtgacaatgataacataaagaccagttaatgttagtaaatggac

SEQ ID NO: 244957 - DNA, 201 bp, Homo sapiens
aatttttgtataaggtataaggaaggggtccagtttcagttttttgcatatggctagccagttttcccaacaccatttattatatagggaatcctttcccyatagcttgtttttgtcaggcttttcaaagatcagatggttgtatatgtgtgctattatttctgaggcctctgttctattccattggacagaacagagcct

SEQ ID NO: 244958 - DNA, 201 bp, Homo sapiens
ttctcaaagaagaaagtttgaaaaatcacttctaacagtgttcaactgaggacactttggatatatttgcttttttttttaaccttaggaaacttgtgttkcttttatctgaattccttaaatctgaattttatcttttatttaataacatgtgtttttcaccctatatttgatttggacttcttatcaatcttttgacat

SEQ ID NO: 244959 - DNA, 201 bp, Homo sapiens
ccctttaatacagggaattccatagagtagcactgtttaatgtatgtctgtgggtggaacctttgctctgaggacagagaccatggtgaatagcacctgcscaaggaagagaggtgggttgaacatatgtgggtcttgcctggagacgaggatcaaaaccagtcccaacacagaggagaatggctttattacaggaggtgg

SEQ ID NO: 244960 - DNA, 201 bp, Homo sapiens
agtggctcacgcctgtaataccagtactttgggaggccgaggctggtgaattgcttgaggccaggagttcgagaccagcctgggcaacatggtgaaatccygtctctactaaaaatacaaaaattagctgggcatggtagcttatgcctgtaatcctagcttcttgggaggctgaggaaggagaattgcttgaacccagga

SEQ ID NO: 244961 - DNA, 201 bp, Homo sapiens
cctctcttaagacaatgatgtggaactggagagagtctgacagtagagttagttcattatccttgacatagtaatcaaaaggagctagggtatggggaaargtggtaagtcaaagagaaagaatgtagcagggagggatgagagtttaacaccaaataaatacttgctgatttcacttgaaaaagcaggtgcacactctag

SEQ ID NO: 244962 - DNA, 201 bp, Homo sapiens
aatacctagtgtgcacaattcaggactaagcagcatccaaaacctctcttcctcctcatagagtaacgttttgctaaaaatgggtaactctcactgggtgsagtggctcacgcctgtaataccagtactttgggaggccgaggctggtgaattgcttgaggccaggagttcgagaccagcctgggcaacatggtgaaatcc

SEQ ID NO: 244963 - DNA, 201 bp, Homo sapiens
ctcctgacctgtaacagatactgttagttgattttggtactttttcttactaaactgtgggtttattctgagtattcctctcagcacagaattccaggcartagcaccagtcaattgtcatttctacttaggataaaactttccttgccctctcctagcctaagaacttgccctctcttaagacaatgatgtggaactgga

SEQ ID NO: 244964 - DNA, 201 bp, Homo sapiens
gaggtcaaggtgggtggatcacctgaggtcaaggattcaagaccaggctggccaacatggcaaagatggggtttgtctctactaacaatacaaaaaaaaaatagctgtgcgtgatggtgggcgcttgtaatcccagctatataggaggctgaggcaggagcattgcttgaacccgggaggcagaggttgcagtgagccaag

SEQ ID NO: 244965 - DNA, 201 bp, Homo sapiens
cttgtaataccccatccaacaattaatcattgtagatactttattttcttatgatctttcgctatgcatttttacacagttaaggccatatagtatagttaattttgaattatggtttgttcacacaacattggattgtaagcattttcttgtgagtgtttttttaacttctccattaatataatttcaatagcagcataa

SEQ ID NO: 244966 - DNA, 201 bp, Homo sapiens
atctaacatattgttctccttaactgcaacctcatctggtcctcctaccacttccaaaattcagataattgctaagtcatatggcttctacctccacactrtctgtacatcctatatgaacttttcaatctaaaaatacagcttttagccaggcacagttgctcacgcctataatcccagaattttgggaggcccagattg

SEQ ID NO: 244967 - DNA, 201 bp, Homo sapiens
taactttatcaatatactctgaactcaatcttgtatatgtatatatgtgtgtaaatatatgtgtgcatactgtatataatgtataatagcctgtgtgtgtrtatatatatatatatatacatatacatatacatgtacgagtgatttaatagtagatacattttgtttgttttctactggaagatttttcttttttctcca

SEQ ID NO: 244968 - DNA, 201 bp, Homo sapiens
acttgtaataccccatccaacaattaatcattgtagatactttattttcttatgatctttcgctatgcatttttacacagttaaggccatatagtatagttaattttgaattatggtttgttcacacaacattggattgtaagcattttcttgtgagtgtttttttaacttctccattaatataatttcaatagcagcata

SEQ ID NO: 244969 - DNA, 201 bp, Homo sapiens
gggtttcacaatgtttgccagtctggtcttgaactcctgacctcaggtgatccacccaccttggcctcccaaagtgctgggattataagcatgaggcacckcgccaggcccggaagtgttctttaagcctccaagactgagcatttgttaaggtagcatggaaaactaacagattactaaagaaactctatcattcacata

SEQ ID NO: 244970 - DNA, 201 bp, Homo sapiens
cacttgtaataccccatccaacaattaatcattgtagatactttattttcttatgatctttcgctatgcatttttacacagttaaggccatatagtatagttaattttgaattatggtttgttcacacaacattggattgtaagcattttcttgtgagtgtttttttaacttctccattaatataatttcaatagcagcat

SEQ ID NO: 244971 - DNA, 201 bp, Homo sapiens
tcacttgtaataccccatccaacaattaatcattgtagatactttattttcttatgatctttcgctatgcatttttacacagttaaggccatatagtatarttaattttgaattatggtttgttcacacaacattggattgtaagcattttcttgtgagtgtttttttaacttctccattaatataatttcaatagcagca

SEQ ID NO: 244972 - DNA, 201 bp, Homo sapiens
gcccctcccccagcctcactgctgccttgcagtttgatctcagattgctgtgctagcagtgagcgaggctccgtgggcataggaccctccaagccaggtgyggggtataatctcctggtgtgccgtttgttaagcccattggaaaagcgcagtattagggtgggagtgaccccattttccaggtgccatctgtcatccctt

SEQ ID NO: 244973 - DNA, 201 bp, Homo sapiens
aacttcacctaaaactctcagtgaagcaaaacaaaactccatgtaactcactcttagctttaaatctttaaaaagtgtttcgaagggatattgagtaaaartgcagttatctattaaaaatacaaaatgctatattatatgatgctatgaattgatactggagctgataaaacattaaagtaattattccaaatcagtgct

SEQ ID NO: 244974 - DNA, 201 bp, Homo sapiens
gctttgtttacctactcaagcctcagcaatggcaggcgcccctcccccagcctcactgctgccttgcagtttgatctcagattgctgtgctagcagtgagygaggctccgtgggcataggaccctccaagccaggtgtggggtataatctcctggtgtgccgtttgttaagcccattggaaaagcgcagtattagggtggg

SEQ ID NO: 244975 - DNA, 201 bp, Homo sapiens
ttggggacttctgggatgaagtcagctggctgtggggtccctttctagtcctgctctctgggatgctggtgaagctgccctccagtgccaggccctaaaarccctcctctctagacatgtctgttttatgcatctgtcggtctctattagacagtcagctccttgagcccatgggccgtgtctggttgactgcacctgacc

SEQ ID NO: 244976 - DNA, 201 bp, Homo sapiens
agcacaccaacatggcacaggtatacatatgtaacaaacctgcacgttgtgcacatgtaccctaaaacttaaagtataataataataataataataataawaagaaaaagcccaaccaattgaaaccaatgcagaactgaaacagatgttagaattagcagacaaatacataaaagcagttcttataactgtagcccatat

SEQ ID NO: 244977 - DNA, 201 bp, Homo sapiens
gtttttaacttctttgccattggttcgaacttcctcctttagctcggagtagtttgatcttctgaagccttcttctctcaactcgtcaaagtcattctccrtccagcattgttccgttgctggtgaggagctgcgttcctttggaggaggagaggcactctgatttttagagtttccagtttttctgctctgtttttttcc

SEQ ID NO: 244978 - DNA, 201 bp, Homo sapiens
gcgttcatgtcctttgtagggacatggatgaaactggaaaccatcattctcagcaaactgtcgcaaggacaaaaaatgaaacaccgcatgttctcactcayaggtgggaattgaacaatgagaacacatggacacaggaaggggaacatcacacaccggggactgttgtggggttgggggagggatagcattaggagatat

SEQ ID NO: 244979 - DNA, 201 bp, Homo sapiens
ctcacctgtgccatcctcttcagggagattgatacctttctggccatttccagctgccctggagactccagtgcctgcctgcctgccagctggggggaaaattaccatgatcaaccccagcacattcctgagtgtaaagtgggtaaatggaaagtcattttcccatatataccatcgctctatgagggccagacctcaggt

SEQ ID NO: 244980 - DNA, 201 bp, Homo sapiens
tgggctgcaggattccagcagaagcagctaccagctcacctgtgccatcctcttcagggagattgatacctttctggccatttccagctgccctggagachccagtgcctgcctgcctgccagctggggggaaaattaccatgatcaaccccagcacattcctgagtgtaaagtgggtaaatggaaagtcattttcccata

SEQ ID NO: 244981 - DNA, 201 bp, Homo sapiens
accacagagaagccagcaagtgctttctttaagtgaaaaggtgaaagttcttgacttaataaagaaaaaaactgtatgccaaggttgctgagatccacagrgagagcgaattttctatctgtgaaactgtaaagaaggaaacagaaattcgtgctagttttgttgttgcactaaagctgcaaaagttatggccacaggaca

SEQ ID NO: 244982 - DNA, 201 bp, Homo sapiens
aagtatacatgccaatctgatgaattaagcaaaaatgtacccaaacactcagtaaacaccttagatactctttgtgtactaaaacaggccattctcctaayggcatgacctctttttctcttttctgtggctttcccaacttgccatggatgcagaggagaaggccaagaaggaagcagaggaaaaggctcgcctggccgc

SEQ ID NO: 244983 - DNA, 201 bp, Homo sapiens
aaggcgcatctggcaaagctgagaaaaagacgtctggagaaactaagaatcaagtcaatggaacacgggcaaacaaaagtgacaaccctcgtgggaaaaaytccaaagccgagaagtcatcaggagaacagcaacagaatggtgagtagacttacactggtgaagggctcttttcgcggcattaatgacataatgaatgga

SEQ ID NO: 244984 - DNA, 201 bp, Homo sapiens
ggtgaagggctcttttcgcggcattaatgacataatgaatggaaactggtgaacaaccctactgatggggtcagctcacagggcaaggcttccctgctcayccagttccttctgatcccacctcattgggctgcaggattccagcagaagcagctaccagctcacctgtgccatcctcttcagggagattgatacctttct

SEQ ID NO: 244985 - DNA, 201 bp, Homo sapiens
gatgtgggatgagacacagatccaaaccatatcagcaggcacctaaatcaacaaatgaacaacaataaacgaagagaatgtatcaacttaatagaaggctraaggaagacagagaagcaaagaataaagaatgataaacacaaaacaaaattaaacagtagaaataagtccaaaaatatcaggaataacaataattgcaag

SEQ ID NO: 244986 - DNA, 201 bp, Homo sapiens
aaaatattaatgatgaaaatccagggagatttgtttaggctcatggatctattgaaccatttcagtagaaaggagattaattacagttgaaatttcattarcacacattttaataattaaaatatatgaagtgatatgttaagtgaagatgtgatataaatcgtcaaactttatttacgaccttatctaccaaacctcaaa

SEQ ID NO: 244987 - DNA, 201 bp, Homo sapiens
atctgagggtaaattggtatagtcatataagaaaacaattttgcagtgattactataaggaaaaatatacataccaatcctccagcacttccaagtgtacycagggaggcctatacaatcaggttcattgtagcaatgtttgccatagtgaacaattacggagtatatacctatcaatagggagttagaactctggaatac

SEQ ID NO: 244988 - DNA, 201 bp, Homo sapiens
atctttcattcagggctcctttgtctattgttgtatttgttttttgttttgttttgttttgttttttttgaacacttcaaattttcttgctctacaagatrcttcaggtacttcttgtatattttgtgtccgagttctggaatcagtcatttctgcaaggagccctggtttctgctattagcaaatggttttagaaaccaa

SEQ ID NO: 244989 - DNA, 201 bp, Homo sapiens
gatcattcagtagatctttcattcagggctcctttgtctattgttgtatttgttttttgttttgttttgttttgttttttttgaacacttcaaattttctkgctctacaagatacttcaggtacttcttgtatattttgtgtccgagttctggaatcagtcatttctgcaaggagccctggtttctgctattagcaaatgg

SEQ ID NO: 244990 - DNA, 201 bp, Homo sapiens
ctccttaagggaggcatatgtatataaattattctcccacaattatttatttattcaatcatttatttatatcagtgtggactcatggatatttattttayacttcgggttaaaatgcaatactgccttgtttattttgttgctcaatttgattcaattttgatcattcagtagatctttcattcagggctcctttgtcta

SEQ ID NO: 244991 - DNA, 201 bp, Homo sapiens
caagaatgcctggtggcaaaccaagttttggaggaaaggggatcaagaattctgatttagacatgtagagtttaagatccgtagtagacatccatttacakaggccaagcagaaagaaaaagggtgctagagttccaggggagatcagggataaacatgtagattaggtagtcttggacatatcaatagtataagaagaca

SEQ ID NO: 244992 - DNA, 201 bp, Homo sapiens
agtgtacagcacagtttttgctctcacagggtttttctctttaggatgcgtagcaccctatgcattaaatacatagcatcctaaagacaccctactcaccwtgagtctgtaggctctttcctgatgagggcactggccatatatgaatggaaaactcaactcatctcctcagctttagatgttgctgctgttcagctggat

SEQ ID NO: 244993 - DNA, 201 bp, Homo sapiens
tttctgagacagagttcaaaggactgctgtggtgaataggatttggaacattaaagaggggaatcgagaatacatcttagattcttggtttgataaacagwtgacaagaatgcctggtggcaaaccaagttttggaggaaaggggatcaagaattctgatttagacatgtagagtttaagatccgtagtagacatccattt

SEQ ID NO: 244994 - DNA, 201 bp, Homo sapiens
gcattggttattctagttagccattcatctaattttttttcaaggtttttaacttctttgccattggttcgaacttcctcctttagctcggagtagtttgwtcttctgaagccttcttctctcaactcgtcaaagtcattctccgtccagcattgttccgttgctggtgaggagctgcgttcctttggaggaggagaggca

SEQ ID NO: 244995 - DNA, 201 bp, Homo sapiens
ctggcaacaaaaccgtcatctccattgcaaaagaaggtggcttaatatccctactgcatgaccaaatgtttgctaatctagtttacagcaactattaagayttcaaatgtactgatattacagttttgcactgacattttccccttatgaatagaacaaatcttgttacaagggagacagcaatgaccagtatggaaatgt

SEQ ID NO: 244996 - DNA, 201 bp, Homo sapiens
ggactatagttattcacatcctatttgtatgcctttcattattttaacctaatggtaaatctttacttctaaccatttgaaatgttccttgcttcttttgrcccaacattttagcgctttagatgtttttggttttgctttaaaaatttttttttaagacatggaaatctcagtctatcacccaggctggagtgcaatggt

SEQ ID NO: 244997 - DNA, 201 bp, Homo sapiens
atagttttcagctccatcaggtcctttaaggacttctctgcattggttattctagttagccattcatctaattttttttcaaggtttttaacttctttgcyattggttcgaacttcctcctttagctcggagtagtttgatcttctgaagccttcttctctcaactcgtcaaagtcattctccgtccagcattgttccgtt

SEQ ID NO: 244998 - DNA, 201 bp, Homo sapiens
tctttttttcccttagggttagaggggaagggtatttaagagtagaggaggacaaggaaatacagaaaattaacatagtcaccaacaactcagttttctawgtgtgtattaaaaattactgctttacatgttactaaaactaagtatcttaaaatgatcagatgtcatttctcagggattctaaaatgagcaacaaagaaa

SEQ ID NO: 244999 - DNA, 201 bp, Homo sapiens
ttcttccagttgatcgcatcggctactgaggcttgtgcgttcgtcacatagttctcgtgccatagttttcagctccatcaggtcctttaaggacttctctkcattggttattctagttagccattcatctaattttttttcaaggtttttaacttctttgccattggttcgaacttcctcctttagctcggagtagtttga

SEQ ID NO: 245000 - DNA, 201 bp, Homo sapiens
ctagggcattggtttggatggatggatggatcaatgaatgaaaacataatatattaaggaagacatcttaggtaagcaaatataaagtcaggagaagtagactaaacaagatatcatagactttcacaaaatacatgtcataaagcctcgtgaacgtgtgaatctggaccaaatttgggctttgagctctttagcaactaa

SEQ ID NO: 245001 - DNA, 201 bp, Homo sapiens
aatgaaagttttctggatgcccttattttgtatatgcattttgcaatgttcttcgctgttacatagaaaaggaaggcatgtatattatacatatttcagaygacaaaacaattaatctaattggaaatattctgagtgactggtagttgcaaataaagactgaagtattttattcgttgagaaataaatgaatacatacta

SEQ ID NO: 245002 - DNA, 201 bp, Homo sapiens
ttttctctaaacttctcttctcactacatttcattcatttcgtcttccatcgctgataccctttcttccagttgatcgcatcggctactgaggcttgtgcrttcgtcacatagttctcgtgccatagttttcagctccatcaggtcctttaaggacttctctgcattggttattctagttagccattcatctaattttttt

SEQ ID NO: 245003 - DNA, 201 bp, Homo sapiens
gctagggcattggtttggatggatggatggatcaatgaatgaaaacataatatattaaggaagacatcttaggtaagcaaatataaagtcaggagaagtagactaaacaagatatcatagactttcacaaaatacatgtcataaagcctcgtgaacgtgtgaatctggaccaaatttgggctttgagctctttagcaacta

SEQ ID NO: 245004 - DNA, 201 bp, Homo sapiens
tccactagtattttgttaaataggttttctgactcttttgtttcctctttgcttttggggaccctgaaaatgcaaatatttggttgtttaatggtggtccrttcgccacataggctttgtttattcttttttctttatttttgccagactgcattttttgtgaagacctgtcttctagttctgaacttttttcttcttgct

SEQ ID NO: 245005 - DNA, 201 bp, Homo sapiens
gggcttccctttgtgggtaacccgacctttctctctggctgcccttaacattttttctttcatttcatctttggtgaatctgacaattatgtgtcttggarttgctcttctcgaggagtatctttgtggccttctctgtatttcctgaatttggatgttggcctgccttgctagattggggaagttctcctggataatatc

SEQ ID NO: 245006 - DNA, 201 bp, Homo sapiens
accatgctaagcactgggaattcagtagcaaagatgacatttaaaccccatcctcagtcactgaagaaggaagagataaagcctgagtgaacattccagggaaccttttgtggtcctgcatcctactgagaatgccatctcaccatcttcttctgcaagagcattctttcactctgtagttgtacctttctataaaggcca

SEQ ID NO: 245007 - DNA, 201 bp, Homo sapiens
tccttcaggagctcttttagggcaggcctggtggtgaccaaatctctcagcatttgcttgtctgtaaagtattttatttctccttcacttatgaagcttastttggctggatatgaaattctgggttggaaattattttctttaagaatgttgcatatttgcccccactctcttctggcttgtagagtttatgccaagaga

SEQ ID NO: 245008 - DNA, 201 bp, Homo sapiens
gagtgatggactggcatgtgtatgggggtaaggggcaggacactgagactcactctgccttctctttttgaatgtgcttgatagagtctttgaaatatatmcaaagacatatccctaggtccctaatatgttagccagtggtccaccagtggactggctgatgattccataagtagcttctaagagtttatggatgataca

SEQ ID NO: 245009 - DNA, 201 bp, Homo sapiens
cctttcttttttcttgtatagaactgagatttgaaatagtcaaaattcatatagtattttgggttttctggtcagtttctctctcttttctctgtttttttctctctctttctctctctggttgtaggtagtttaagtaggcatttcagaaaattatatcaagggataattagcccaatacagtttttaactgagacccta

SEQ ID NO: 245010 - DNA, 201 bp, Homo sapiens
tttacaatttggcatgtttttgcagtggctggtactggtcgttcctttccatgtttagtgcttccttcaggagctcttttagggcaggcctggtggtgacmaaatctctcagcatttgcttgtctgtaaagtattttatttctccttcacttatgaagcttagtttggctggatatgaaattctgggttggaaattatttt

SEQ ID NO: 245011 - DNA, 201 bp, Homo sapiens
ctgctgttgtgtgctgacatttggaagttcagagcactccctgatgcttccgtgagtacctgggatggtggtgttcttctgaccctgatttcctacctctrtcgattgctttcctctatttgcttctggctatcttcctattgctctgacatagtctcagatgtgctacgaagctcctcctcctcctttttctggagagta

SEQ ID NO: 245012 - DNA, 201 bp, Homo sapiens
tagcttgggcagactttaagtcttactttatcaccccaccccaaataagtatatcatctataaactcacataaaaagcatgcttgtgattcaaatgcagcktcaagacatgtccctgggccttgtcttccaatcaggctgccatccctaagtatggcctgcaaacactctggattgtcactggattaatgtcagttactaa

SEQ ID NO: 245013 - DNA, 201 bp, Homo sapiens
ggcaatcagagcagtagtattctaagctatctagaattgtccttggtttattattagggtcctatgaagcggtgtgtatgtgcgtgtgtgtgtgtgtgtgygcgtgcatgtgtgtgtgtgtgtgtgtgtgtgtgcctttacttccttacttttgtagggcctcttgcaattcaatgtctattctctgcctagcctcttggc

SEQ ID NO: 245014 - DNA, 201 bp, Homo sapiens
ttttgatctttgttggtttaaagtctgttttatctgagactaggattgcaacccttgcctttttttgttttccatttgcttggtagatcttcctccatccstttattttgagcctatgtgtgtctctgcacgtgagatgggtttcctgaatacagcacactgatgggtcttgactctttatccagtttgccagtctgtgcc

SEQ ID NO: 245015 - DNA, 201 bp, Homo sapiens
tggtcaggggtgagaaagtcctataagggaggtagatggggtgtggactctggattggctggtttttgttttaaaagcacacccctggaaggaggacttcycctgaggagttgggggttgggggagagtggggcgacaagggaggcaggaggccaaggtcaggtgactcaggcatactattgggttgtccagaactagctg

SEQ ID NO: 245016 - DNA, 201 bp, Homo sapiens
atcgcttgaacccaggagatggaggttgcagttagccgagatcgcactgccgtactccagcctggcgacagcgcgagactctgtctcagaaaaagaaaaaagaacaggcaggatctttaattattataaattgtttaaaaacaaattttaaaattgcatggaactagagaaatagggaaataaatgcatagcaccaagacc

SEQ ID NO: 245017 - DNA, 201 bp, Homo sapiens
gacagtggggtgttaaagtctcccattattattgtgtgggagtctaagtctctttgtaggtcactaaggacttgctttatgaatctgggtgctcctgtgtygggtgcatatatatttaggatagttagttcttcttgttgaattgatccctttaccattatgtaatggccttctttgtctcttttgatctttgttggttta

SEQ ID NO: 245018 - DNA, 201 bp, Homo sapiens
tgacagcattcaatattcattcatgatagaaactctcagaaaaataataatttaggggaatttcttcaacttgataaggaagatctacaaaaaccttcaaytaactttatatttaagggcaaaaacggatgcttttctttaaaaatgagaacaaggcaagaatgttcagttacaccactcctattcaacatagtgttgaaa

SEQ ID NO: 245019 - DNA, 201 bp, Homo sapiens
tacatctgttccacaatcccatctaggatgccacattacatttagtcatcatatctttaggctcctcttggctgtgacagtttttcagactttccttataygctagtccctctatttccaagggaattggttacctcaggtaacaaaatgcacagaggttcaagtgcctgatataaaatgatgtagtattgtcatataatt

SEQ ID NO: 245020 - DNA, 201 bp, Homo sapiens
ttttgcctcttggtcatgtgatatttgaatcttacctaaatactgctttttaggacattatggtatttttatcctatgcatttctgtttgggggaaaaaaagtatttccttgtagcagtcttttgtcaaaatgtcatttgaggggttcttttactttttttttctagtggctcgacaaaatgacagttactttggcatcac

SEQ ID NO: 245021 - DNA, 201 bp, Homo sapiens
cttcttttgagaagtgtctgttcatatccttcacccattttttgatagggttgtttgtttttttcttgtaaatttgtttgagttcattgtagattctggayattagccctttgtcagatgagtaggttgcaaacattttctcccattctgtaggttgcctgttcactctgatggtagtttattttgctgtgcagaagcaca

SEQ ID NO: 245022 - DNA, 201 bp, Homo sapiens
aaaatttttaaaaaatgctgtcttctacctctcaagtatccaacttacactaaccatgaagaaaatgtttgtcaagtgtatttcactgctaacagataagmttttgttctaattagtctactaaatgaatgctgttgaagttcttcaaaacagtctccctttaatcttttgtacatctttactctgctgaacagattcatt

SEQ ID NO: 245023 - DNA, 201 bp, Homo sapiens
taatatagagatctcatacggcctacacgcagtttcctgtattattaacctcttaccttagcatggtacatctgttccacaatcccatctaggatgccacrttacatttagtcatcatatctttaggctcctcttggctgtgacagtttttcagactttccttatacgctagtccctctatttccaagggaattggttacc

SEQ ID NO: 245024 - DNA, 201 bp, Homo sapiens
gtatatgtatgtgtgtatacatacatatatacataatctatatatacatatatacacacatatttaatatataatacatatatgtgtatctatgtatgtckacatgtatgtatataataaatatgtatatatgtatgaaatatatgtgtatataatatataaatattgaaatctataatatatattaaatatttgaaatat

SEQ ID NO: 245025 - DNA, 201 bp, Homo sapiens
ccgataatgaattttgcaaggtcacagaatacaaggttaatgtaaaaaacattatatatacacatatgcatatatgcacatatacatatatatatatagakagagagagagagagagagagagagacagagagagggagagagacactagcagcaaaccattggaaaataaaataattttttacaatagcacataacatat

SEQ ID NO: 245026 - DNA, 201 bp, Homo sapiens
tcataaaaaggaatgttaaagactaatgtattttatgaacatagctataacaattctcagtaaaatattaactaattaaatgtaacaatatactaaaaagrtaatatatcatgtgtgatagttaattttatgtatcaactcgcctgggcctcagtgtgtgctgatatttggtcaagcattattctgttgtttctgtgaggg

SEQ ID NO: 245027 - DNA, 201 bp, Homo sapiens
ggcttgggtctcatgatccttctgattcattgactgagaaaacggtgaaaaagctcttatgaattcattaatagttttagatgaatttgtagttttattartcacatctatatatatttaaatattagttacatatttatgggtaagatgtaatttcacccacagttaaatgcatggcaccctatggattcaggagctctt

SEQ ID NO: 245028 - DNA, 201 bp, Homo sapiens
ctggaactgtgaacctatgatatctcctatgtatgcctgtatattgttttctagcctttttagaagatgaaggcaagtgagaggggagttgagagtgagtrttgagtgaatcctagtcatctcttcaaccacagttttcttttaaactcatgaatgtgtatctttgtgggggctggtactttggaggtatcacattttcat

SEQ ID NO: 245029 - DNA, 201 bp, Homo sapiens
tgtgtgtgagtacgtgtgtgtgcatatttagaattgatctctctaatgatatacagtagggatactgtattcataaaatatttaaattaatcattattttscattataattatgttactaatatcacatacagttaggttcatttctgtttctattcaattttaggatttgtaaatttttttgttaactatatatttgaat

SEQ ID NO: 245030 - DNA, 201 bp, Homo sapiens
tattctatcttctacacagggaaattgggaagacatatgggttgtttgctttttaaagcacatactgccgaaaaagggaaaacccagggctattgcatatygccagttataaaaacttttgttgttgttaagggatcactttagttcatcattttctttttactgatgaggaagaaactgagaaagattaaaagacgtgtc

SEQ ID NO: 245031 - DNA, 201 bp, Homo sapiens
atgactgaggagtttgataaatgataaacaagaatgccatcctctaactcttctctacctttctctcttctcagaaagttattgtggaaagaacatactcmaagctaggaacatccactaagtgtaatttgtttagagaggggtcagtgaagtggggtttgtagataaaagtttacaaagctgtcagaagttcaatgccct

SEQ ID NO: 245032 - DNA, 201 bp, Homo sapiens
ttatctataataatagaagcaggaatcacgattccttcttggtagagctgatattttctctctagtccagtcacttttctctttgcattcatcttgtattkacatgtgccttttgggaatcagtgttcctgtcagtggctgtctccacacactcgtagcagtgaacagatgccctgtgaacttgattcttgcctcggagtt

SEQ ID NO: 245033 - DNA, 201 bp, Homo sapiens
atacatcttgctttaaatgtctctgggaaacttctgagggtggggcaagaattctgagagggaggagtattgcttttgatatgaaaacagttgggattagrtgaatctgatttcttccaatcccactgacccttgagacagattgaccagatctggcaacaaaaccgtcatctccattgcaaaagaaggtggcttaatatc

SEQ ID NO: 245034 - DNA, 201 bp, Homo sapiens
aaaattatactgaggctgctaagatctatgctaagaatgaaatcttctatcaatgcaattgtgaagaagaaaaaagaaatgggtgtgtaatacatataggkttcagcactatctgaggttttagacatcccctgggagtcttagaaaatatcctctgtgtgtaaagggaaactactacactgagcaacccatgcaatgagg

SEQ ID NO: 245035 - DNA, 201 bp, Homo sapiens
acttaataaagaaagaaaaaaaattatactgaggctgctaagatctatgctaagaatgaaatcttctatcaatgcaattgtgaagaagaaaaaagaaatgkgtgtgtaatacatatagggttcagcactatctgaggttttagacatcccctgggagtcttagaaaatatcctctgtgtgtaaagggaaactactacactg

SEQ ID NO: 245036 - DNA, 201 bp, Homo sapiens
tatttggactgttttgtgggacctctgaaggatttcttctcttttggtggtggaagaggtgatgaccatgtcctgcacttaaaatcctcctgtttggaccytggccagagtagactcccctgctcctcaattcttccacctagtgtgtattagtctgttttcacactgctgataaagacatacccaagactgggtcattta

SEQ ID NO: 245037 - DNA, 201 bp, Homo sapiens
ttatgtctttttatttttctagattacggtctttggtcaaacaattagagagaggggaagcttcagtggtagatcttaagaagaatttggaatatgcagcyacagtgcttgaatctgtgtatattgatgaaacaaggtaagctaaaaataacaaaagagattagtatagtgatagtaaattttctcttaaatggcttttct

SEQ ID NO: 245038 - DNA, 201 bp, Homo sapiens
  misc_feature (1)...(201): n = A,T,C or G
cagttttagaaatcagaaaggtgttagtcacctttcttttgcataggtttcctattttgaatttctgaaacaatgaacctctaaatgagagatcagtctgnttagcttcaatcaagacttagagtttaagaagccatctgctcctaattctcctattttgttcagatctcatatagatatctttttcttctctattctaat

SEQ ID NO: 245039 - DNA, 201 bp, Homo sapiens
atattgacatcctagtccccaggacctcagaatgggactgtatttggagagatggcctttgaagaggtattaaggtaaaataaagttgtatggatgggctstaatccattatgactggtgttcttagagaaagaggagattagaacacagacatgcacttgcaggtagaagggtccattgtgaggatacagagagaatata

SEQ ID NO: 245040 - DNA, 201 bp, Homo sapiens
tttgtttactacatccacaagaagttggttatgataagccaaagctcaacagactgtatttacatatattttggagtagctatttacaggcaaagactttkaacttcagggatggtatataaggtgtgtgttcagtttagtttttccttttactttttttcagtaaagtgactaacagatttgaggacaagatcccagact

SEQ ID NO: 245041 - DNA, 201 bp, Homo sapiens
tgcatatttccgtttgatatattgcagattcgtaattcaggtagatactacctgaatctaatgttatttgtattttatatcattgaaactcctggaaattwttttatggttgaccctcttgcttactttttaaggttgatccaagattttttctcattctttattgtgggtcattttcatgcaaatcaggaagggagtagt

SEQ ID NO: 245042 - DNA, 201 bp, Homo sapiens
acagtcctcccaacagtgtaaaaatgttcctatttctccacatcctctccagcacctgttgtttcctgactttttaatgatcaccattctaactggtgtgwgatggtatctcgttgtggttttgatttgcatttctctgatggccagtgatgatgagcattttttcatgtgttttttggccacataaatgtcttcttttga

SEQ ID NO: 245043 - DNA, 201 bp, Homo sapiens
atgttttcttgtccacttatgttgtgcttatatgaatataaaaatacatatgcacatcctcacacataccagctggatgttgaaaggaagagagttggaayagtgaagtggtagagggacatgggaccagaattaaatgctttataataagtcttgatatgtaggatagtaacaacagttttgttgttttaccacatcaac

SEQ ID NO: 245044 - DNA, 201 bp, Homo sapiens
gtgtctttatagcagcatgatttataatcctttgggtatataaccagtaatgggatggctgggtcaaatggtatttctagttccagatccctgaggaatcrccacactgacttccacaatggttgaactagtttacagtcctcccaacagtgtaaaaatgttcctatttctccacatcctctccagcacctgttgtttcct

SEQ ID NO: 245045 - DNA, 201 bp, Homo sapiens
tttttttgtattttgcttttaatcaataggataatgaaaagacctgctttctgtatttgagagtttatctgtcctgataaaaatcatttaggatgttggtytgtggagaaaatgacatcagcattgatatttaataaaagtagtaagccaaggagactaactgcttaacttcaactttaaaaaaacaatcacagatgtctt

SEQ ID NO: 245046 - DNA, 201 bp, Homo sapiens
gtaggatgaaatgatgtcttttcctcaatttagctgaagtggggtttgagatggaagaacaaaagagattaaaaacttaatgatttttaaaaaactcttamtgaggttctgaagagtgtggttatcatgtgtttgggtgcttttggtttacagcattgaaaagccaaaagccttatcccttatgctgcatacagcagatat

SEQ ID NO: 245047 - DNA, 201 bp, Homo sapiens
agggatgctaaagaaatttctttagaactttctttaaggtagtttcaaaaatattattttgttataaggtttatgagtaaaatgaaaacataaattaaaamcaaagtttagaactgaaaaataaaatgtctacatttagaatttgctacataggcttagtgcatgatagagaagacagaagaaggaaacagtgacttttaa

SEQ ID NO: 245048 - DNA, 201 bp, Homo sapiens
ctgataataaacatcatttattggaacatcagtattgtgatttgaaaagagacaaagataccatgggatagactgaatgcacatcaacctgagttgtgatrctttttgattggtcacttttcggttaaatgtggaggagagtgtaaatcagtgatgtggttcttagcctgtctggtattcagtaatatcaattatcgaacc

SEQ ID NO: 245049 - DNA, 201 bp, Homo sapiens
actattggtaaaagttataataaaaggtttgattacaaaaattttcccccattatgtaggttgcccattcactctgatgatagtttcttttgctgtgcagragctctttagtttaattacatcccatttgtcaattctggctgttgttgccattgcttttggtgttttagtcaagaagtctttgcccatacctatatcctg

SEQ ID NO: 245050 - DNA, 201 bp, Homo sapiens
tctacctcattgagttctagggagaatttaaagagaaaaacacaagaaaagatttagcccaaggactggcccatagtaagcaggcaatttggatacttttrttataagtcagtggtggcttttttcactattctaactttgttattctaaccttatgttaaatggatttatactgggcttattcattaatttatttaatag

SEQ ID NO: 245051 - DNA, 201 bp, Homo sapiens
tgaatccgttgtgactcaaatagtcctcatattttaattaaataatcagctgtttattgggtatttgtgtgctcaccatctttcaaggatttagagaaatraactttactgaacaatctgagaggctgatttttattaagagtggctaagagtttccatgtagctttagtttattaaaacatatgggaatatttgacttaa

SEQ ID NO: 245052 - DNA, 201 bp, Homo sapiens
ggcacataatgtttgagtggtgattctgattgatggattaagagggattctaaggctatgttttattaatgatatcagccataaatgcttgagttgtgaargtgaatgttctgtatattttgctgcacacagtaaaatgcctttacctgagtgtttgtcatctagtcctataaacaagtgtggcatcatttggagaccaac

SEQ ID NO: 245053 - DNA, 201 bp, Homo sapiens
tgggggcagaggttgcagtgagccaagattgcaccactatactccagcccggacaacagagtgagaccctgtttaaaaaaaaacaaaaacaaaaacaaaaygaaaacaaaaaaaccctgcttttatatctcccttctctcctcctgtccaaatatccttcctgaagtggggagctgatggcatgactctcttgcgtgtgaa

SEQ ID NO: 245054 - DNA, 201 bp, Homo sapiens
aagatggataccagcatctgctgtagttgttgacttgtatcaaaataaccacacagtacttgggtacagtgaattctgctccttctttgtttccttggctrgtgcttaagataaaaaaagtacattattctttgtatttttctagtagcattcacttggatctttcaaagcaaaacctgcaaatgtttttactttcatgaa

SEQ ID NO: 245055 - DNA, 201 bp, Homo sapiens
gaactgctcctttatgattatcaacaacagcaaacctactcagggaggttcaagatttctctgctgtgtgtgtgtgagtacgtgtgtgtgcatatttagarttgatctctctaatgatatacagtagggatactgtattcataaaatatttaaattaatcattattttccattataattatgttactaatatcacatacag

SEQ ID NO: 245056 - DNA, 201 bp, Homo sapiens
ggcccagattggtggattgcttgagctcagaagttagagaccagcctgggcgacatggtgagactcccatctctactaaaaatacaaaaaaaaaaaaaaaatagctgggcatggcagtgggtgcctatggtcccagcccttacttgggaggctgaggtgggaggtttgcttgagccctgggggcagaggttgcagtgagcc

SEQ ID NO: 245057 - DNA, 201 bp, Homo sapiens
tacacaggtatttgcacaatgctttgagacactaaaggtctgtgcagccacggcagtatccttccctgtaaaccatggtgattttttaaaaaaaattattattttttttagaggcagggtcttgctctgtcacccaggctgcagtgcaaacatggtgcttttgattctcatttgacttttgcaggaacatttgtttcactt

SEQ ID NO: 245058 - DNA, 201 bp, Homo sapiens
aaagctatcccttggccattttccttgcttttgtcaagcaaggtgccagtaattttccctttgtctttttttttttttttttccagaaaggagaagctgcrtatcttatttttatttattttttatttattatttattttttatttttttatttttattttttatttattttattttttatttttttggtcgtttatgaca

SEQ ID NO: 245059 - DNA, 201 bp, Homo sapiens
ttgcatgaaagaaatacacaggtatttgcacaatgctttgagacactaaaggtctgtgcagccacggcagtatccttccctgtaaaccatggtgatttttwaaaaaaaattattattttttttagaggcagggtcttgctctgtcacccaggctgcagtgcaaacatggtgcttttgattctcatttgacttttgcaggaa

SEQ ID NO: 245060 - DNA, 201 bp, Homo sapiens
acgggagccagaattcggtcccagctctgacttcagaggccatgcatttaaatattaggcatgcttctacaatatgcctttggcaaaaaaaaaaaaaaaaagcctcttatattcttacacctcagtatcctcatgtgcacttacttccacgtattgtgatgaggatgaaaatggatgcaaaaatgcactttgaactcatct

SEQ ID NO: 245061 - DNA, 201 bp, Homo sapiens
aaggggaccttcctcaggaattattttctagaattctctgtctagactggtgatcttctaaatcttctaggcaaaaccacttatgtaatttgcagagcccrgtgtgcacgcagtgaaaatttgggtctccttgttcaaaaaacataaaaaggggaccatggcccttcaagcatgaaagagtgatacctttgttgggcgtgt

SEQ ID NO: 245062 - DNA, 201 bp, Homo sapiens
tacttactccaaaagactcaccagattgagttgagatgagccatggcagaggcccatggtgatccttctaaggcaggaatgagtagcagattagattctgkctgtattttctagcacagaaaagctgtgtggataccctgtatcctgggcacctctttggcctggcttcacctcctcttggtcctatttttaagctccggc

SEQ ID NO: 245063 - DNA, 201 bp, Homo sapiens
tgtttacatatatatatagtctatatatagtcaataaatcataaatgtacatagtcaatagtcaatatacatatagtctatatatatagtatatatatatwgtcaatacatcatatattatgatagtttccctatgtcattatatatttattataagaaaatcttaatagttcattattgggttattctatcacttaaaca

SEQ ID NO: 245064 - DNA, 201 bp, Homo sapiens
gcaagtactgaacaaatgtttgctacatctgaatctgagcccctgctctcttgatgagctcagtggtacagatgctgccagtcaggaggatttataaccartccggagggtttatgggtccatgaaaagttgtctttgtgaagagaacggagaggatttatggcagggacagaggggaggtaagaggaaaggagaatgtaa

SEQ ID NO: 245065 - DNA, 201 bp, Homo sapiens
tcattttttcagttcttccttattataaagctgatttcttaaaaatagtatttaaaacactatctttaaagttataacaagattataaagggaacatttttaactcaataaaagatttttaccaaacatttagagcaagcatcatattgaatgatggttccgtgaatacatggagcaagacagggatacccacattaatac

SEQ ID NO: 245066 - DNA, 201 bp, Homo sapiens
gtttcctatgtaaaaaattgtctgtttcctattcagaaatgcaggatgttctgcgtgatctacactaagcatctgtttacttgctctgtaataaagtaatraacacagtgtgatgtatcacacagagccttggattaggagaatgagaattttgggtcaaagtaatgttttctaactctgtaatctaggttatttgatttc

SEQ ID NO: 245067 - DNA, 201 bp, Homo sapiens
gttcttttttgtggaggaggtgagtgccagatgcctatagttagccatcttgaagcccctcccactgaggaaatatgtctttacatgaccacaaatacttmatggccatggtccttaggtccttaatttttctttgcatcggaaatctgtatgaaaatcttgtggatgctggagaggatgctggagactttccttggaaca

SEQ ID NO: 245068 - DNA, 201 bp, Homo sapiens
gctgcatgcaagacagtaagtcaggcctgtaatgccagcactttggtaggccgaggcaggcggatcacgaggtcaggagtttgagaccagcctggccaacrtggtgaaacgccgtctctactaaaaatacaaaaattagctgggcatggtggcggacgtctgtagtctcagctgctcaggaggctgaggcaggagaaatcg

SEQ ID NO: 245069 - DNA, 201 bp, Homo sapiens
atgatttataactgcacagaaagtctctttcacttccccttgtttattgagtaacagctcacgtcagccattactccagatacaacccatgggaaattacwtaatggattttgctcaggcaacatcatcaaacaagcatgtgtcactgtcccagcccccttctttgtggagtgcccaggatatcttccaagttagagctga

SEQ ID NO: 245070 - DNA, 201 bp, Homo sapiens
gtcttttctcagcccattaaattcacctggcattatttatcctcccctgcagcctgagcttcctttgttaaaggaagctgcaaactgctgcatgcaagacrgtaagtcaggcctgtaatgccagcactttggtaggccgaggcaggcggatcacgaggtcaggagtttgagaccagcctggccaacatggtgaaacgccgt

SEQ ID NO: 245071 - DNA, 201 bp, Homo sapiens
ctaacttggaggaatctatagcctttttttttgtcttatgatatcaaaatatttttgaacccttcatttggacctttaatatctattgatttacacgtaakgtaaacaaacttttgtaacttaatcaatacatttcaatatgcttgtatttgataaaacatggtagcatctatttgatgctgaaacatggcaaagcatatg

SEQ ID NO: 245072 - DNA, 201 bp, Homo sapiens
ttctgatgaatggagaacatactgttactctaacctttcattacaaaccaagagggagaaaacgctttaaatcatttcagtgttataaattgtaagacacrtagagaatcaaaacaacccattgataaagtggtgtctgggcttcaacatcaacagtgatactttgtaaatgtaaaacattgtaatctgtttgtattactc

SEQ ID NO: 245073 - DNA, 201 bp, Homo sapiens
atagcatctgtgacttgtaccttgccaccaattggtaattctggaataaaataccagtgggactttaatttctgacttcttatgggttgacataaaacctyctgggttcacagtagttaatttggaagaggcaaggaaatctgaggtatattaaaataggaagttcaatttcctccaaaatagcttctcccactttctctg

SEQ ID NO: 245074 - DNA, 201 bp, Homo sapiens
tccaaatttaaattgccgcatgtgactaatggccatcatgttggaaagaagagctctagaaagtagacagagaagaaaataagcaaataaatactcaaaamtattaatatgtagatgaagattaaaacagaagatgcaaataaatttatgcaaacaaatttgaatatctctgcaaaatggcaattgtaaaggaaaatattc

SEQ ID NO: 245075 - DNA, 201 bp, Homo sapiens
atatgaatctattttatgcactgatctttaattcagaccacagggcttttatgagttcaccagtttggatacttacatttgtcttacatcaaccctgcccstatctaagatttctagtctcatctctttaaagttaagtgggaacttaaagatgtgcatgaagcaaactgagtgcagaagctctctaacttttctataaat

SEQ ID NO: 245076 - DNA, 201 bp, Homo sapiens
tagctgaactatcccaccaaaccatctacaccactagaatttatgttataaatgcacttccttttctacatatcacctaggtagaaatcactcaggaggamatcatttttatcatgccacttgagagagcagttttcagtagtgcgtacttgaaataaagaagccattgtgtccgctggggtgtctatataggaagagggt

SEQ ID NO: 245077 - DNA, 201 bp, Homo sapiens
ttagattttagcattgtggaggtgtgtagtagcatgtagttgttttaatttgaaattctctaattgttgagcattttttcctatgcttatttgacacatayatcttccttggtgtgaagtctgttcagatattttgcccattttaaaattgggttgtttctttttcttgagctttaagaattctttttatattttgaatac

SEQ ID NO: 245078 - DNA, 201 bp, Homo sapiens
gcacttggtccttcaaaggggatgacacagcatctctttaaatttctctagactgctcttgtcttagtcccagaccacagctctcagacttgatcacttgrgttgccttaaatcatgaaatcaccccaccacttgtcttattcagatttttgtgtcttttgtctgctgtttctaagtttttccatcatcacatctctaatt

SEQ ID NO: 245079 - DNA, 201 bp, Homo sapiens
gattaataaccattgttgaatcagaaatgcatccatcttccaaaatgacattattgcaaaatccccaaattgcttgcaattcctacagtaggccctagatygtatctacacagtgtgaaatgtacatgtgagtaattatacagaaagctcaatcagtatagatctcagtctggatgattaaagacaagggctttctcttca

SEQ ID NO: 245080 - DNA, 201 bp, Homo sapiens
tcatatttattcccacctttaactatatacaaattaaggagcagtctgcagaaattcctagagaaagggtggtaacttctgggtgttgccataacaatagkaaactgacatggcatactgatgggtgtcttatggaaagccgtttccgccttgtccctattttagctagtcctcaatttggtccagtgtctgagccctgcc

SEQ ID NO: 245081 - DNA, 201 bp, Homo sapiens
tggaaatgactatacaacaaaacaccgtctccgtgacctgtgttttcacaccccaacttgtctaccctcactccctcactcccttagtccatagctagctstagatttcattcctttcatttttttatggaatcgactcttatttatttttaaaatttacttttattataagctgacaataattgtatatatttatggggt

SEQ ID NO: 245082 - DNA, 201 bp, Homo sapiens
ataacctagccaagtggacatatatcactgcaatgtttgagtcgagtgccatcactttttaggtgtgtgaccctgctgaaagtcacataaagtattttagycagtttcctcgtttctgaaacaggaataataacattaactacgtcatatctgtgttttgtggactaaatgaggttatcagtgcaaagtcagaatatgtat

SEQ ID NO: 245083 - DNA, 201 bp, Homo sapiens
atgttataataaccaatatgtaccatcatatagtatatcagatagtcaggagtgattgttgttaaaacactaataattttaccatcactggaatttactaktttgcatgtatgtgtgtgtataaactaaatctaaaatgatatcctgttctgaatatatgtaagcaattgacttacatatttttgctagttttaggttcag

SEQ ID NO: 245084 - DNA, 201 bp, Homo sapiens
gcaatgtcttatatatttggtagcttaatgttcaacctttgtgataactgaagaagacaactgataataggaaaaaaggaatcaatttacctaatctacawatccttgccttggaaacacttagagtgagttgactatagctaaagggaaagggattatgttaggtctgctatttgctttcactagattcctcttattata

SEQ ID NO: 245085 - DNA, 201 bp, Homo sapiens
aaagtaccttaaattctatcctgggtagcaaatggattggttccagagggatgatgggatgagtgaatatttgaaataaatgaatgaatatcattgcatamctgctttacatcaggcggtgtgttcagcactttcagataccttaccttgtggtgaggataagtaggaggaactagacgaaatggagatattgggggcaga

SEQ ID NO: 245086 - DNA, 201 bp, Homo sapiens
ttaaagtatttttttctaattctgtgaagtatgttagtggtagtttgatgggaataacattgaatctataaactactttggtcaatatggccattttcacrctattgattcttcctacccatgaggatggaatgtttttccatttgtttgtgtcctctcatttccttgagcagtggtttgtagttctccttgaagaagtcc

SEQ ID NO: 245087 - DNA, 201 bp, Homo sapiens
atattggaaagagaattcagtgttggaggaatttatttttttgtagaactatattttcatgattttctggcccacagagatcctataaaagaacggcaggyaagcctgagcatcagtgactcacagagcattcagtgctccaactgaccttgagtaaaatttctgggcatttaggagaatgatggcataagaggagattac

SEQ ID NO: 245088 - DNA, 201 bp, Homo sapiens
attccatatgaaatttaaagtatttttttctaattctgtgaagtatgttagtggtagtttgatgggaataacattgaatctataaactactttggtcaatrtggccattttcacgctattgattcttcctacccatgaggatggaatgtttttccatttgtttgtgtcctctcatttccttgagcagtggtttgtagttct

SEQ ID NO: 245089 - DNA, 201 bp, Homo sapiens
gtagatgtgtggtgtatttccgacgtctctgttctgttccattggtctatatgtgtgttttggtaccagtaccatgctgttttggttactgtagccttgtrgtatagtttgaagtcaggtagcatgatgcatccagcttttttctttttccttaggattgtcttggctatgtggggtcttctttgattccatatgaaattt

SEQ ID NO: 245090 - DNA, 201 bp, Homo sapiens
gtctgactatggtccagaggtctcctggtctgaatctcagtttccccaacagacattgacctggtgggctcctggctcccaacacctctgtggctccagargaatccaaatcccaaccatggttccacaatcccaggctaattggttgtgatcaagctatccttgcctgccacctcatcccacccctgtttcctgcaccat

SEQ ID NO: 245091 - DNA, 201 bp, Homo sapiens
cctagcaccacttattggataggagatcctttcctcattgcttgtttttgtcaggttcatcaaagatcaggtggttgtagatgtgtggtgtatttccgacrtctctgttctgttccattggtctatatgtgtgttttggtaccagtaccatgctgttttggttactgtagccttgtagtatagtttgaagtcaggtagcat

SEQ ID NO: 245092 - DNA, 201 bp, Homo sapiens
ttgatgcacttaccttccttctagcacagagctatacttacctcattgccaaaggatgctcctaaatgtactcagaaaacctcataagataatactgctaytcttaggggaagaggaggagtatgtctttactgcctctgatcaaagttgaagcatcacaataaccaagaagcaggcaggagtttgagatatatatatata

SEQ ID NO: 245093 - DNA, 201 bp, Homo sapiens
gcatggctgtagcccactgggaatacctagtgtgcacaattcaggactaagcagcatccaaaacctctcttcctcctcatagagtaacgttttgctaaaamtgggtaactctcactgggtgcagtggctcacgcctgtaataccagtactttgggaggccgaggctggtgaattgcttgaggccaggagttcgagaccagc

SEQ ID NO: 245094 - DNA, 201 bp, Homo sapiens
tgttaactgaggtaacagacaatctgcaaacagaataaatttttaaaagattactccatcaaaggggaccttcctcaggaattattttctagaattctctrtctagactggtgatcttctaaatcttctaggcaaaaccacttatgtaatttgcagagcccagtgtgcacgcagtgaaaatttgggtctccttgttcaaaa

SEQ ID NO: 245095 - DNA, 201 bp, Homo sapiens
tatatgtaaacataataaatatatatatggatccaaatatatccacatccatatatatatatatatatatatatatatttaaggacaatatatttatattyataaatataactcttccctcgggtggaactacagggtgctttgaaacttcatgtcatgatttgatagcatcttagtcaacccatttctccttttatttct

SEQ ID NO: 245096 - DNA, 201 bp, Homo sapiens
ctgctctctttcagatccccatttctgcacttgtctcatttgtggaggccctggaagtgggatacagcaagcacaaaaatccttaccataacttaatgcaygctgccgatgttacacagacagtgcattacctcctctataagacaggagtggcggtaagtagggataggaactcttaggttccccaaaagatgtaaggat

SEQ ID NO: 245097 - DNA, 201 bp, Homo sapiens
ctacttactggctttatacataccacacacatacgcatatacacagacatacacatactttatttaattcttcaaccctacaacagaggtcattttttccrtaggccaagataggtaacaggtgcagaaagccaatggaggaatggaagggagccattatttactgagcacctgctcggtcccaggctttacggaggtgca

SEQ ID NO: 245098 - DNA, 201 bp, Homo sapiens
aaggactctcactaaatcatgtctaaagaatgattgatttgagaccagcctgggcaatgtagcaagatttggtctcaaaaaaaaaaaaaaaaaaaaaaaaaggttgattttggtgttgcctgcttgtagtcctagctacttgggaggctgaggcgggaggatcacttgagcccagtagttcaaggttgcagtgagccgtga

SEQ ID NO: 245099 - DNA, 201 bp, Homo sapiens
ctgcctcctctctgaagctatttgccagttgaactggtctctccacactttgaactaccctaaaatgttttggtcatgagagttatttgtatatatatatwttttgtgttgggttaggctagctgccagatagccctcaagtctcagtggcttaacacacaaatactttatttcttactcatccaccatcttatgcagctc

SEQ ID NO: 245100 - DNA, 201 bp, Homo sapiens
ctactgtaaactaatcagaatataattattctagacaataccccaagtaggtgccgatcgtttgatatgaggattagagataaaaacttcattatgttccrtataaaatgccagtgcaaaatggaaaacaataacacttcaactaactatattgatatttatgcagtgtcttccacccaagatcctgacaagtgctagtaa

SEQ ID NO: 245101 - DNA, 201 bp, Homo sapiens
tcaattcagcagcattctatttatctgtccaggtctgggtcagatatccccagtgccttcccaccctacctgggcagaatgcgtgctcttgtagcgtggggtcacacacatcattgcactttgtcttacagttagctacatgtgcgttagaatttctggctctttacgtaagggacaccaaatttcagacactttaattta

SEQ ID NO: 245102 - DNA, 201 bp, Homo sapiens
ctatgttgccagcttctctctctctcaacttggtttttacacccagtgaatgcatggaagtgtgtgtgtgtgtgtgtgtgtgtgtgtgtgtgtgtgtgtgkccggaagcgtaaagagacagatggttctgaaggctggcacagagtggaagcttcctgctaaacagatgtccctctcggagtaatgcaggctgcccaagaa

SEQ ID NO: 245103 - DNA, 201 bp, Homo sapiens
catctctgtccatctcatttactgtttttcagtgtgtgtgtgctagctggcaagtgacacagctaatgggaaaaagggtgtgagaatggatggtctggaaygtgtcagctaaacctgaagcatcattactctgttgttgtcctttatttaataagtagctatgtcctgcgcaatacctctgtgagcagttgctccatctcc

SEQ ID NO: 245104 - DNA, 201 bp, Homo sapiens
tgttttgagttgccaaccacctgaaactttcagtgtttggaaagtttaccagccttgctgtaatttagtttcaggctattatggaaactaggacatttccyatgaagctgttgctttcctgagacccctttggcagctaccaacaggagcctgaagtgaggcaagcctggagttgtagttaagaccttggcgtaacctggg

SEQ ID NO: 245105 - DNA, 201 bp, Homo sapiens
tatttttaatccatttagctagtctattttttaagtgggaagtttaattgatgtacattcaaggttgctattgatatgtgaggacttattccagtcattttattaattaatttcagattgtgttgtatgtcctttcttacattcttattatttataattgtggtttggtggttttctgtagtggtaacatttgggtctttt

SEQ ID NO: 245106 - DNA, 201 bp, Homo sapiens
gcactttgggaggccaaggcgggagaatcacgaggtcaggagatcgagaccatcctggctaacatggtgaaaccctgtctctactaaaaatacaaaaaatyagctgggcatagtggcaggcacctgtagtcccagctactcgggaggctgagacaggagaatggtgtgaacacaggaggcagagattgcagtgagccaaga

SEQ ID NO: 245107 - DNA, 201 bp, Homo sapiens
caggatcttctaatctttgccctctgttgagatgacttcctcccacagcctccccatccctggctgagaacaggaaccatcatgggctgctggttagcaaycagcaaagggaaccatctccacgacttccagaagacatcctggtgttgctgtagctgtgggtaaagctccagttcagagcaacctagagggcttaaaaag

SEQ ID NO: 245108 - DNA, 201 bp, Homo sapiens
gaaacttaatcttgatattacactattatctaatatacagtctgtgttcaaatttcaccaaatgtcccaataatgtctttaacagccatattttttctgascctggctccactctggaagcacacatcacctttagttgtcatggttctttaggttcccgtattttattttttttgtattttattgacatagttgtacata

SEQ ID NO: 245109 - DNA, 201 bp, Homo sapiens
aacctggctctgccactcttccttgagtaagttaccttatttttcttggtctcagtttcccatttatataaaggagataatcacagtgcatatttcatagrgttgcattgatatttaaatgaatctatctatctatctatctatctatctatctatctatctatctagaatagtggattgggtttctgtgattcactggtt

SEQ ID NO: 245110 - DNA, 201 bp, Homo sapiens
cataatagtctctgatgaccttttgtgtttctgtggtatcagttgtaatatctcccttttcacttctgatgttgtttatttggatcttctcttttttttcyttgttagtctagctagcaatttatttattttgtttgtcttttcaaaaaaacaacttttctcatttcattgctccattgcattgttttgttagtctctatt

SEQ ID NO: 245111 - DNA, 201 bp, Homo sapiens
gtaaaagattggtatgtatttactaatgcatccaataatgcatgcattcatttttccatctggtgacaatgctattaaaaataagacgtttctggctgggygtggtggctcacacttgtaatcccagcactttgggaggccaaggcgggagaatcacgaggtcaggagatcgagaccatcctggctaacatggtgaaaccc

SEQ ID NO: 245112 - DNA, 201 bp, Homo sapiens
tgtttgtaataacatagcctcatggacttgccataatttattatagctatccagaaatacaaacttgccgttaactttacttgatcacattaacagagaawtaagagatagccatcttttgtgcctctcaaacaacagattatgattaggccctgcgtggttataaaccaagtcttagggagggaattcagcaggagtttc

SEQ ID NO: 245113 - DNA, 201 bp, Homo sapiens
tcccttctcctaaggtttcttataactactccttccaccctaaaccagggtcatcattttcttcaatgaacaggcaaagagttactctcatgaaaataacrtcttatttgctcaccgaactccattaccatcatctgttttgtttgcattctcttggtgctctttaatagagagctcatgagctttaatattgatgcccat

SEQ ID NO: 245114 - DNA, 201 bp, Homo sapiens
tttttagtttctttctttcaacagagtattgctctgtcacccaggctggagtgctgtggtgtgatctcagctcaccgtaacctctgcctcctgggttcaartgattctcgtgcctcagcctcacgcccagctaatttttgtatttttagtagagatggggtttcaccatgttggccaggctggtcttgaacttctggcctc

SEQ ID NO: 245115 - DNA, 201 bp, Homo sapiens
atactagtccttattaatttttgatatgatttttgttatgcttatttctaggcattttatattttattgttgctattagaagactgtctccccctattatrttgtcttgcttattgttgatatatgagaaagtaatttttaaaataatataatttgttactttcttttcctgacttcttatttggttctatttttagtttt

SEQ ID NO: 245116 - DNA, 201 bp, Homo sapiens
actgttttccatagtgactgtaccaatttacattcccaccaacgttgtagaagtgttcccttttctctacatcctcaccagtgcatcttttttttttttttaaccataacagccattcttactggggtaagatgatatctcattttgcttttgattttcatttccctgatgattagtgataatgagcatttttttcatgta

SEQ ID NO: 245117 - DNA, 201 bp, Homo sapiens
gtaaagtgtaaaaacatgtggtgtgttaatgttgatatctcaccttgagttcatctgtctcttgcctaaaggtgtttttatatccatgtagagtgccttttactctatggctcctgatctgccatgcaatcaacagatttaataatttatcaatgtcatatgaggcttatcttgaagctgagtgtgaagtggcttcagggt

SEQ ID NO: 245118 - DNA, 201 bp, Homo sapiens
ttctcctatttagaatcttagtacagaaaaaatggaggaggcagggtagccagtattcttgttagtttgcatagaacaaataactgtgatcaaaagggttrttgcgtacattataggaatttgcctctaatcatatctacattatataattcttcacaaggctgttgtctcatgaccttgacttgctacatggctcacagt

SEQ ID NO: 245119 - DNA, 201 bp, Homo sapiens
tactagtcatgtgtctattgaacattgaaatgtgctagtgagactaaagaagtggatttttgattttattaaattttagttattccaaatttaaattgccrcatgtgactaatggccatcatgttggaaagaagagctctagaaagtagacagagaagaaaataagcaaataaatactcaaaaatattaatatgtagatga

SEQ ID NO: 245120 - DNA, 201 bp, Homo sapiens
tgtctttggagtaacttgttcttctaacttcttgaggtgcataacgagatcacttatttttagacttctccttttctttttttttttttttttttttttttgagactgagtctcgctctgtcacccaggctggagtgcagtggcacaatctcggctcactgcaagctctgcctcccaggttcacaccattctcctacctca

SEQ ID NO: 245121 - DNA, 201 bp, Homo sapiens
gtgtgattgtattatgtacaattctatgccttgttttttcacttggtgtttttgctgtctccaccctccccatacatacacacacacacacacacacacamgtatacacacacaggcacatgtatacaaacgtggagagatcaatctcgacctttttatttttgatagcaaatagtagtccttttcagggatgagtttaaa

SEQ ID NO: 245122 - DNA, 201 bp, Homo sapiens
atttactccctcaatgatggggtcgctggtcaggtcattcattcctgtgggtgttggtttagtaagtctgcagtgatgaactcctttatgggagctggtgtgtacgctgttactccagggccagccctgatgggagttgtgctcatggagctcacagcctcacagggaagatctcatgcacataaataaccgtaatacatg

SEQ ID NO: 245123 - DNA, 201 bp, Homo sapiens
ggtaattacaaataaaaaggagctagctctggtaggatcaactttctaaaaagcagaattcaaggaacaaattgcaaaatgagtaattttctatcgatgarggagggatgccgtccacaatgaagatgtgaaaatgctacaccttattccagccataggatagatcttgcgtgctatgctagatatggtccttttctttaa

SEQ ID NO: 245124 - DNA, 201 bp, Homo sapiens
tggcacgatctcagctcactgcaacctccacctcctgggttcaagtgattctcctgcctcagcttcctgagtagctgggattacaggaacctgccacaacrctcagctaatttttgtattttagtagaggtggggttttgctgtgttggccagactggtctcaaactcctgacctcaagcaatccacctgccttggcctcc

SEQ ID NO: 245125 - DNA, 201 bp, Homo sapiens
gctgttactctccaagacagcagggtcttgtattgtcctctggttcctcttgactccatggtgatatctcttgtctgcttggtcacaggaagtcttagtgrcatctctagctaatgtctgggactgcctttctccccaccagcttgtccctgttcagctcctcctggcactatggatccagctgaggtctggctgtagcac

SEQ ID NO: 245126 - DNA, 201 bp, Homo sapiens
gtttcaggtaattacaaataaaaaggagctagctctggtaggatcaactttctaaaaagcagaattcaaggaacaaattgcaaaatgagtaattttctatygatgagggagggatgccgtccacaatgaagatgtgaaaatgctacaccttattccagccataggatagatcttgcgtgctatgctagatatggtcctttt

SEQ ID NO: 245127 - DNA, 201 bp, Homo sapiens
tccctgttggcaggcattgcaagcagcgatggcagctactgcatcatctgcaaagaaacactctcttataatcaattacactcattacacttgaaaattcmatttctgacaacatgcaatttaaagaggtacttcaaaataatttgtttgcaattatctggcttactaaaattaccttcagaaactaatcacctggggaag

SEQ ID NO: 245128 - DNA, 201 bp, Homo sapiens
acatgtggggattatgggagctacaattcaaggtgagattgggtggggacacagccaaaccatatcagagagacagagtgagagagagagagagagagagagagagagagaaaagagagaaactaataataatccaattcatgaaaccacccaatctagcaatttaaacattctttttaggtaactcacttaaaaaaatgt

SEQ ID NO: 245129 - DNA, 201 bp, Homo sapiens
tacacctgtaatcccagctacttgagagactgaggcaggagtattgcttgagcccaggagttggaggcccgcctgggtgacatagtgagaccttgtctctraaaataaaagaaagagagagagaaagagaaagagagagaaggaaagaaagaagaaaagaaaattataatagtttcccaatctggattaaaacacattaca

SEQ ID NO: 245130 - DNA, 201 bp, Homo sapiens
gacatgtggggattatgggagctacaattcaaggtgagattgggtggggacacagccaaaccatatcagagagacagagtgagagagagagagagagagagagagagagagaaaagagagaaactaataataatccaattcatgaaaccacccaatctagcaatttaaacattctttttaggtaactcacttaaaaaaatg

SEQ ID NO: 245131 - DNA, 201 bp, Homo sapiens
aatttgaaaacactgtcttggaaaatagatgaaaattgaaaatgatgagaaaaggtagtaggaggtcagaaaagaaagaaccaacataaataaatgaatcstatgtatgctgagagaaaagttggaaaagaagcaacaaagaaaaaattgaaggcagcttgcctgaacagaagaaagtaagacctgggtttgcagattaaa

SEQ ID NO: 245132 - DNA, 201 bp, Homo sapiens
aataaagtgctatggatcagtaaaacattggtgacggtgctaggttgtaggatatgcactttgagtccaaggaggcaatgttttatccatttcatcctccrtaggagctagcaccaatatgaacacataatatgtatcaaataaattacctcatggaaatcagaagagacctcagttttctctaacaatctagatttcttc

SEQ ID NO: 245133 - DNA, 201 bp, Homo sapiens
tgacatgtggggattatgggagctacaattcaaggtgagattgggtggggacacagccaaaccatatcagagagacagagtgagagagagagagagagagagagagagagagaaaagagagaaactaataataatccaattcatgaaaccacccaatctagcaatttaaacattctttttaggtaactcacttaaaaaaat

SEQ ID NO: 245134 - DNA, 201 bp, Homo sapiens
taaaatcctcactgaaatataaaaattacagcaacaaaattttaatcaatgattagaagttaaatttgaaaacactgtcttggaaaatagatgaaaattgraaatgatgagaaaaggtagtaggaggtcagaaaagaaagaaccaacataaataaatgaatcgtatgtatgctgagagaaaagttggaaaagaagcaacaa

SEQ ID NO: 245135 - DNA, 201 bp, Homo sapiens
ctgaagcccagagtaaacacatacagttttgtaggctgtgaaatgtgcaagtccagggaacatcatcctatagactaagctatgaacaactccctcttcarctgtgtagttttgggggccctaatgaaattcttacatttgcagctgcgattcttgaaacccatgaaataattgcctaatttccaggtcagtacattttat

SEQ ID NO: 245136 - DNA, 201 bp, Homo sapiens
cttgttgcatttgtatattgtggtacaaacatctgctataatgatgtcatgtgggcattgtggattatattttatcaccttcataaagcctttttaactgygccctttgtaactgaatcatacccaagtatttaaaagaattaaacaggtttttttggggggaggggggaagtgataaaatagattttatgttctattgtg

SEQ ID NO: 245137 - DNA, 201 bp, Homo sapiens
attccctagtatggatatacgttttatttttcctttcctcagtcaatggacatttgggttgtctctaatttttggctcttgtgaataatgttgctatggayatttgtatattattttaaaaagtgtatatgtgtttttatttagcttgcttatatacctctgaatggaattgctggtttatatggtaactctaagttcaac

SEQ ID NO: 245138 - DNA, 201 bp, Homo sapiens
atggctttattgaaatataattcacatattataaagcttacccatttaaagggcataattcaatgatttttcatatatttatggagttgtgccaccatcawcaacataatctaatttcagataatttttgtcaccccaaaaagaagtcctgtgcccaacagttacttttcatctgagatccatacccacagtcctagaagg

SEQ ID NO: 245139 - DNA, 201 bp, Homo sapiens
ttttcctgaaataataaaattgagaaaaacatgaagagtagtcagaatgtttcatgtctaaaatccaagcctcacttactgatctgaaggactttctttayggtcctgggcttcttcctgacttcacagattcaaagactgatcagaaactaaactcttttgtgcagacaagggtgcttaactctaccctcacctgcacct

SEQ ID NO: 245140 - DNA, 201 bp, Homo sapiens
ctgtcatcctaacaaaattgggctttacatttgagggtctggggacatctctgaaggtggttagtattatgatgactctctaaaagaagcctcatgacgtrtgatcccaagttgataatggcagggtcagagtactaaggacaaagtcatgtattgcaattccatgtggaccaaactgtgcatagactatcaacatcaatg

SEQ ID NO: 245141 - DNA, 201 bp, Homo sapiens
ttaattaattatatatgcaaaaatccagcttccaaataaggtcactgtactgggttaaaaaaatgtccccaccaaaattcatatcaacccagaacctcagratgtgactttatttgggaatacagtctttgcagatataactagtcaacatgaggtcatcctggattagagtgggtcccaaatccaatgactggtgtcttt

SEQ ID NO: 245142 - DNA, 201 bp, Homo sapiens
atgcagttaaaaatatgttaaagatgattcttgaaggataaggcagaatttcaacaggtaaaggtggaatagaggaggcaggtaaggtaaagtcatctttkgagtggttaggatttgtaaataacatagaaacctttaaaagtgacttatacatgttggcattattacctttggtcatggctctggctggaaaccaaggca

SEQ ID NO: 245143 - DNA, 201 bp, Homo sapiens
tcctgggctcaagcctgattctcttgcttcagtctcccaagtagctggactacaggcacatgccactacaccaggcagtaaggtccaaaataatcaaattwaaaaaaattatagaggcccaaatgtttgagaaactatatgcagttaaaaatatgttaaagatgattcttgaaggataaggcagaatttcaacaggtaaag

SEQ ID NO: 245144 - DNA, 201 bp, Homo sapiens
catgctcctaattatagtctgcatgccccactggtttctgctaatccccctaccctcaactcccactccagctcgtctctacacccatctggaccctggcsttgggtttcaagctgttacttgtgtctgacctctctgttggacctctcgcttgtactgcctttttggagcctgccaaacaaattaatgtaaattatatac

SEQ ID NO: 245145 - DNA, 201 bp, Homo sapiens
ggagtgggggatgtgagtaggggagagggtaaccagaagctccagcccatctgttgggccacaagagggcttaatttcttcctcattttgcttttagaagytcatgaaggaaacctgtttttccagttctttgctcatgttgtctctctgctctttccagtaaggggttgatatccaggtgctgtatgctggtttgactgt

SEQ ID NO: 245146 - DNA, 201 bp, Homo sapiens
aaatataggcagtggtttgcagaagtcagctagccaggggctttctcccatcatattccttcttccctccctccctccctttctctctcttttctttcctktttttagtttctttctttcaacagagtattgctctgtcacccaggctggagtgctgtggtgtgatctcagctcaccgtaacctctgcctcctgggttcaa

SEQ ID NO: 245147 - DNA, 201 bp, Homo sapiens
ccagattatccttggtttacaatacttctaaattcacttaattaatgagaagtaatcatgggacattaaaagtattgctaaagcacaaactttggcaagcmcataggtatgtccagagggccccctactgattgaaatctattgtgtgtctacagtgtgccaggtgctttacatgcattttctcatttgatcttcacaatg

SEQ ID NO: 245148 - DNA, 201 bp, Homo sapiens
ggggtgcgaggtaaatgcacttctcgtctccagttgcatgagcaataacttcattgtacacaacctgtagacttacagggaagagattttcaatagagtayttgatgtgtgaaggtagcaccaataagctatgagggtgggagcagtagagtagaggagattggcagtgagatcacgggtgtagcccaatgtcaaggatgc

SEQ ID NO: 245149 - DNA, 201 bp, Homo sapiens
ggtggggcttcctgtggggttgtttagtttggagtttgttaccttctcctaggtttctctactttccactgcctggccagcactagatagaaatgcacttrctcctaagaaagagtaaaaaattgactgtcttatttacatctctgcttcagatttgcattctcccattctttagggtcaccatccccacccccaaaccac

SEQ ID NO: 245150 - DNA, 201 bp, Homo sapiens
gttaatttgagcaggtcacttacctattgatatggtttgggtctgtgtccccacccaaatctcatcttgaattgtaatcccatgtgtcaagggaagaatctgatgggaggtaactggcttttgggggcatttcccccatgctgttcttgtgatagtgagtgagttctcacaagatctgatggtttcataagcttctggcat

SEQ ID NO: 245151 - DNA, 201 bp, Homo sapiens
ctctgtttttgcttaggatgttttgaatttggtttctctgaaacagtcttaactaataccctattgatgtacagagaagttaagtgactcttccaacctayacagcaaagatgaggagaaaagccataggcaacaaagcctggacctttggttttaaatttcttatttaagccctctctgtgttttctttctatataaccg

SEQ ID NO: 245152 - DNA, 201 bp, Homo sapiens
gtcttcacagatgcccctttctcatcattcacatttcaccttgttagaaaggtcttcctcactcttcttaataaaacattgttatctgaaattagttgtttatttgttttttgtctactctcactaactccatatgagtattaaaccccataagaggaaaaatgtttttctatcttctttccttcagtagccacagcatct

SEQ ID NO: 245153 - DNA, 201 bp, Homo sapiens
ggaagctctgatacttccttctaagtatttaaatatttaaaattttaaattcatccatccaacccatcaaccaaccaaacaacaaataaatcattactgasaatctaccatgaactaggttctgggccagatcctggagatatagaagtgattaaatacagaccttgtgttttcagactagtagaatcagatattcaaaaa

SEQ ID NO: 245154 - DNA, 201 bp, Homo sapiens
tctaacttctttgtgtctcccaactataaactccatgaagttagagtctctgttgtcacattcactgttgtgtccccagtgtctaaaacaatgcttggttktggtaaataaagaggtgttaaatgaatgaagaaatgaatgtgaaatcatttggaaggcaatgtctctagtctagaggtgagaaaaggagaagctgaacta

SEQ ID NO: 245155 - DNA, 201 bp, Homo sapiens
caaattcaccaaatctttccatagtcatattctttttgtggttaagtccatcaggaaattttaaatttcaggtatagtattcttcaattctaaaattcctwttatgtttctttttatatttataagatataaatatattttatatttaccagctgaaatttcctgtcttttcattcattgtgagcatgttttcctttattt

SEQ ID NO: 245156 - DNA, 201 bp, Homo sapiens
caagttaaacctatttaatctctttttctgggaactgtttgcacttgacagctgcagaatatatggtagccccccagacaggaggaatttatcacagcacrtgggaatggcaagaagagaagctcaagcctgattccatctgagtcacgtaaagtcacggtcagtgacactgcgtcctgcatagctgatgggatgtctgct

SEQ ID NO: 245157 - DNA, 201 bp, Homo sapiens
tttgcactgaataaattaaaattgatgaaggagggttggaatcaatgctagctggacttctggctgtatttcctgaatgtagtgaagatcttatcagtagytaagttgctgttggtatttaattggtattggcatttaaatgctgaggtagaggatttactgatgttggcaatttgaattggattaatgagtcttttgctt

SEQ ID NO: 245158 - DNA, 201 bp, Homo sapiens
agtcttcacagatgcccctttctcatcattcacatttcaccttgttagaaaggtcttcctcactcttcttaataaaacattgttatctgaaattagttgtttatttgttttttgtctactctcactaactccatatgagtattaaaccccataagaggaaaaatgtttttctatcttctttccttcagtagccacagcatc

SEQ ID NO: 245159 - DNA, 201 bp, Homo sapiens
agctgctttcaactttttatctggtaattatgatatttgggttaagattgacttgttgaggatggatcacattatcctggtttctcatatatatactggaygttatgaacaatgtattgcagagattctagattttgttatgttgccccaaagagtattgatgtttttttatttagctggcaattaacttggttcatagtc

SEQ ID NO: 245160 - DNA, 201 bp, Homo sapiens
agcctgccattcctcataagtcactactccacagcacaccagtctcctttctgaaatacaggtacagctgtgtcaccacaaccttgctcaaaaatctttcktttctttttttttctttttattgcttggaggataaattcttaaatgagtagcattttattcaaggcactttgcaaatggcccaaccagcctctgacccga

SEQ ID NO: 245161 - DNA, 201 bp, Homo sapiens
gaagtcttcacagatgcccctttctcatcattcacatttcaccttgttagaaaggtcttcctcactcttcttaataaaacattgttatctgaaattagttgtttatttgttttttgtctactctcactaactccatatgagtattaaaccccataagaggaaaaatgtttttctatcttctttccttcagtagccacagca

SEQ ID NO: 245162 - DNA, 201 bp, Homo sapiens
gaagtttggggcatcttttttattattttcctctggccaatttttaaatcttcttctgggactccaactaccttatgatagaccttttgaaattttccacwgatctctgaggatctttaagtttttttcaacatttttcccctctgttcttcccattagatgatttctatgatatctattttcaaattcaccaaatctttc

SEQ ID NO: 245163 - DNA, 201 bp, Homo sapiens
ttaaattaatcattattttccattataattatgttactaatatcacatacagttaggttcatttctgtttctattcaattttaggatttgtaaatttttttgttaactatatatttgaatattaaaacatttacattattcaaaagtaaaaactatatacaaatgtgaagtctttcatctccaacctgtcttacttattcc

SEQ ID NO: 245164 - DNA, 201 bp, Homo sapiens
gtagctcactcctcctcaggtaaaatttagagaagtgatattatttttaataagatcacgagaggtccaaatagtctaatttgttatattggtttttttttcaggttttttgggggccattttgtgttcataggcagtaaaacaacagaggttttccccaggtatctaaactgcacccaaaagtctgacaagatctttcta

SEQ ID NO: 245165 - DNA, 201 bp, Homo sapiens
ttgacatgtggggattatgggagctacaattcaaggtgagattgggtggggacacagccaaaccatatcagagagacagagtgagagagagagagagagagagagagagagagaaaagagagaaactaataataatccaattcatgaaaccacccaatctagcaatttaaacattctttttaggtaactcacttaaaaaaa

SEQ ID NO: 245166 - DNA, 201 bp, Homo sapiens
tttaaattaatcattattttccattataattatgttactaatatcacatacagttaggttcatttctgtttctattcaattttaggatttgtaaatttttttgttaactatatatttgaatattaaaacatttacattattcaaaagtaaaaactatatacaaatgtgaagtctttcatctccaacctgtcttacttattc

SEQ ID NO: 245167 - DNA, 201 bp, Homo sapiens
tgaattttaggttctttggatcaccccacttgacttcttattatttgtcaatacttggtatgagtctgtggattacaaatcctactttataagatatcatrttgcatttttcccttttggcttttcagaatgtatagacggacatcaaacatggttggactgagctatccaccagctgttattgaggcattaaaggtaata

SEQ ID NO: 245168 - DNA, 201 bp, Homo sapiens
aatgcagattctgaatctgtacaaaacctgtttaaaatgcgcacatccaaaaatgccaaattagcagtagaccagaaacaacccccaggactgtggatgtwtgcttagtgttgaagtgtctattctagttctactcttcaaacacaccagccatttgggtgtggttccttctagtgtgattggaggaaccccttcttttat

SEQ ID NO: 245169 - DNA, 201 bp, Homo sapiens
ggcagaaggcaaaagaggagcaaagacatgtcttacatggcagcaggcaagagagcatgtgcaggggaactgctctttataaaatcatcggtgttcatgasacttattcactgtcacgagaacagcacgggaaaaccagcccccatgagtcaattacctcttgcgaggtccctcccttgacatgtggggattatgggagct

SEQ ID NO: 245170 - DNA, 201 bp, Homo sapiens
aggactcctgattcaaaatttattgctacttatattatccctggctgccattctttgttttctactacaccattgtattttacctctttgccagagataaytgacaaatggccatgctaaattctcatagggagttgtaaaatacaaaaataaatggactcaatccataagtaatcctggaaaaacctggggattttgaca

SEQ ID NO: 245171 - DNA, 201 bp, Homo sapiens
atttaaattaatcattattttccattataattatgttactaatatcacatacagttaggttcatttctgtttctattcaattttaggatttgtaaatttttttgttaactatatatttgaatattaaaacatttacattattcaaaagtaaaaactatatacaaatgtgaagtctttcatctccaacctgtcttacttatt

SEQ ID NO: 245172 - DNA, 201 bp, Homo sapiens
aagtcttcacagatgcccctttctcatcattcacatttcaccttgttagaaaggtcttcctcactcttcttaataaaacattgttatctgaaattagttgtttatttgttttttgtctactctcactaactccatatgagtattaaaccccataagaggaaaaatgtttttctatcttctttccttcagtagccacagcat

SEQ ID NO: 245173 - DNA, 201 bp, Homo sapiens
tatgacctgaccttcatgagctcaccctgctgggtgatggggcagtttgtgtgtgtgtttgtgtgtgtatgtatgtatgtatgtatgtatgtatgtatgtatgtatgtaagggagagtgtattagtctgttctcatgctgctaataaatatatagctgacactgggtaatttataaagaaaaagaggtttaatggactcac

SEQ ID NO: 245174 - DNA, 201 bp, Homo sapiens
ttccatcattgcagaaagttttactgcacagcacttttctctaaacctttcaaattaaaaaattctgaggaagtgagagactcaggattactaatgtctayttatgaatttaataatttggatgggtaaattgatgaaaaaaatgataaaaatgatctatgggtcaacatttagaaaatttcactgtaagttatttgtcag

SEQ ID NO: 245175 - DNA, 201 bp, Homo sapiens
tatttaaattaatcattattttccattataattatgttactaatatcacatacagttaggttcatttctgtttctattcaattttaggatttgtaaatttttttgttaactatatatttgaatattaaaacatttacattattcaaaagtaaaaactatatacaaatgtgaagtctttcatctccaacctgtcttacttat

SEQ ID NO: 245176 - DNA, 201 bp, Homo sapiens
gtatgacctgaccttcatgagctcaccctgctgggtgatggggcagtttgtgtgtgtgtttgtgtgtgtatgtatgtatgtatgtatgtatgtatgtatgtatgtatgtaagggagagtgtattagtctgttctcatgctgctaataaatatatagctgacactgggtaatttataaagaaaaagaggtttaatggactca

SEQ ID NO: 245177 - DNA, 201 bp, Homo sapiens
aatgattacactttacctggaaaaacccctggattcctggattctattaagagggaggagcatctgagtacgtcaaaccttttgcatgtccaagcaaacarggacactgagataactcatgaggctggctattggcctgattgattaaaatatggatacttcttcctcccttttgaattggttgtttggttcattctcttc

SEQ ID NO: 245178 - DNA, 201 bp, Homo sapiens
tatgtgatatagtttagaactgctcctttatgattatcaacaacagcaaacctactcagggaggttcaagatttctctgctgtgtgtgtgtgagtacgtgtgtgtgcatatttagaattgatctctctaatgatatacagtagggatactgtattcataaaatatttaaattaatcattattttccattataattatgtta

SEQ ID NO: 245179 - DNA, 201 bp, Homo sapiens
atggcgtgaacccgggaggtggaacttgcagtgagctgagattgcaccactgcactccagcctgggcaacagagcgagacttcttctcaaaaaaaaaaaaattgttaatttatttaaaactgaattttaagtctttgtatatttcagatacaagtcctttatcagatttgtgatttgaaaatattttcttgtggtctgtgg

SEQ ID NO: 245180 - DNA, 201 bp, Homo sapiens
cctcactcttcttaataaaacattgttatctgaaattagttgtttatttgttttttgtctactctcactaactccatatgagtattaaaccccataagagkaaaaatgtttttctatcttctttccttcagtagccacagcatctgaaacagtgtgtgacatatggtaggcactcattacacagttcctaaaacatgaatg

SEQ ID NO: 245181 - DNA, 201 bp, Homo sapiens
tgtatgacctgaccttcatgagctcaccctgctgggtgatggggcagtttgtgtgtgtgtttgtgtgtgtatgtatgtatgtatgtatgtatgtatgtatgtatgtatgtaagggagagtgtattagtctgttctcatgctgctaataaatatatagctgacactgggtaatttataaagaaaaagaggtttaatggactc

SEQ ID NO: 245182 - DNA, 201 bp, Homo sapiens
ttggttggttcagaggctgagcattgtcatccaatgcccaggttttttccagctttctgctctgtcatcctcagcatgatggttaggccttagaccagctytcctcacagtcacaatatggctgttgaggttccaagcatcatgttcatagatgacagctctggcagaagatgagatatctcttccagtgtcttcgttaag

SEQ ID NO: 245183 - DNA, 201 bp, Homo sapiens
acatatggcagattgtgttttccaaaaatatttgtaactatatctcccatcccacatgctcttcttgcaatgtgatgctgacaagcctcccactgagatgrtgaggcctctgttttcttcccttgagtctgggtggcctgtaaatgtggcagagatgatatgatgtgacttgcaaagttagattatcagaagaaacagctt

SEQ ID NO: 245184 - DNA, 201 bp, Homo sapiens
caaactagatttgtgggcgttaaaacaatgttactttttcagaaactactgctgtgatagggtgatcttttgaatcacattgtaccagaatttttttttttgacgttatagcttttaaatgttttcagactatcttcttactgacttgacatttaatacctttggcatgtgagttttccttatttcgttttccagagtctc

SEQ ID NO: 245185 - DNA, 201 bp, Homo sapiens
atgtatgacctgaccttcatgagctcaccctgctgggtgatggggcagtttgtgtgtgtgtttgtgtgtgtatgtatgtatgtatgtatgtatgtatgtatgtatgtatgtaagggagagtgtattagtctgttctcatgctgctaataaatatatagctgacactgggtaatttataaagaaaaagaggtttaatggact

SEQ ID NO: 245186 - DNA, 201 bp, Homo sapiens
ttgactgaagattaagaagggatgaacaagagagagccacaatatgcactgcaattgcagacagaccatttaaattcagtttgattttcaacagtccattyagccattctaccaccaataaaaattttaaagactgctttgcccatgctgctcctggcctaccactgtacatccttttatcctcatcctcctccattcttt

SEQ ID NO: 245187 - DNA, 201 bp, Homo sapiens
gtttatttgttttttgtctactctcactaactccatatgagtattaaaccccataagaggaaaaatgtttttctatcttctttccttcagtagccacagcrtctgaaacagtgtgtgacatatggtaggcactcattacacagttcctaaaacatgaatgaatggcttctaaaaccatttttctacagtctctgtagaggc

SEQ ID NO: 245188 - DNA, 201 bp, Homo sapiens
ctgaggtttctttacttcctatgtatgacctgaccttcatgagctcaccctgctgggtgatggggcagtttgtgtgtgtgtttgtgtgtgtatgtatgtadgtatgtatgtatgtatgtatgtatgtatgtaagggagagtgtattagtctgttctcatgctgctaataaatatatagctgacactgggtaatttataaag

SEQ ID NO: 245189 - DNA, 201 bp, Homo sapiens
cccataagaggaaaaatgtttttctatcttctttccttcagtagccacagcatctgaaacagtgtgtgacatatggtaggcactcattacacagttcctaraacatgaatgaatggcttctaaaaccatttttctacagtctctgtagaggcagtaggtacaaactgtgttttgtaaatgaggttggattgaatgactacc

SEQ ID NO: 245190 - DNA, 201 bp, Homo sapiens
acgtggaagcctccttttttccaccctgtctcttattcttcccttgatttcaacacccttctcatatatgatgtaaaatctgtattgctttttaaaaatayataacacttgttaataaccgggcatttgggatctcccggggcttacactatcagctgccgcttttcactgcattgtgacctataggcaagactgagttgt

SEQ ID NO: 245191 - DNA, 201 bp, Homo sapiens
caaatcccttgtatgacatccctgtcatggggtcatgagctctttgcaggagcccatccagcggaggaatattcactgtgtcctggaaagcattggtggtygtggtcagagtgatggactggcatgtgtatgggggtaaggggcaggacactgagactcactctgccttctctttttgaatgtgcttgatagagtctttga

SEQ ID NO: 245192 - DNA, 201 bp, Homo sapiens
actttcttcaatattcattttatatcccttagtagaactttatagttttcttcacatggaattagagaatttctttttacattttttcctagatatatatactttggctgttatattgaatagaatagctttctttatatttttaaatgttattgaacctttaatgggaagatacttatttttgtgtatctgtttggtaat

SEQ ID NO: 245193 - DNA, 201 bp, Homo sapiens
aagctcaaatcccttgtatgacatccctgtcatggggtcatgagctctttgcaggagcccatccagcggaggaatattcactgtgtcctggaaagcattgrtggttgtggtcagagtgatggactggcatgtgtatgggggtaaggggcaggacactgagactcactctgccttctctttttgaatgtgcttgatagagtc

SEQ ID NO: 245194 - DNA, 201 bp, Homo sapiens
cactttcttcaatattcattttatatcccttagtagaactttatagttttcttcacatggaattagagaatttctttttacattttttcctagatatatatactttggctgttatattgaatagaatagctttctttatatttttaaatgttattgaacctttaatgggaagatacttatttttgtgtatctgtttggtaa

SEQ ID NO: 245195 - DNA, 201 bp, Homo sapiens
atcaaccacgcaagcaacacaaaagaacacaagacagctggctactagcttcttatctacacttataatcatcctctcgaagctcccccagtgacctgtgrcacatccatgtttcagagccacagttagaccccaacttgtgttgacccaaaatttctctgcttgcccacaaggggacttcaccaccttatcttaccccat

SEQ ID NO: 245196 - DNA, 201 bp, Homo sapiens
gttgctccatgggtataaagtttctattatgtaagatgaataagatgtggagacctgctgtacaacataatccctgtagttaacaatatggtattgttcaygttaaaatacattaagaggatagctctcatgttaagttttcataccacaaaaaccaaccaatcaatcaaccacgcaagcaacacaaaagaacacaagaca

SEQ ID NO: 245197 - DNA, 201 bp, Homo sapiens
gggctgcctttttctcctctgtgtgaccgaaagtccactatggttgctcagtcacaagtaggtacgtgtttgcagctctttggatagaagcaccaaagcargaagcctgtagaagtaagcacagatgatcccagtggttctttggctgggaaactggctccattctgccatgttgtgctcatggctctgcctgattcaatt

SEQ ID NO: 245198 - DNA, 201 bp, Homo sapiens
ttttgttgttgcactaaagctgcaaaagttatggccacaggacaggataagtgcttagttaagatggaagtgttattaaatttgcggagggtagacatgarcagaatcgtgttctgattaacagcaatcatgttaggcaccatccctggtttcaggcagttgttggaacgtaccccctcggataatgggggactactatag

SEQ ID NO: 245199 - DNA, 201 bp, Homo sapiens
attcgtgctagttttgttgttgcactaaagctgcaaaagttatggccacaggacaggataagtgcttagttaagatggaagtgttattaaatttgcggagrgtagacatgagcagaatcgtgttctgattaacagcaatcatgttaggcaccatccctggtttcaggcagttgttggaacgtaccccctcggataatgggg

SEQ ID NO: 245200 - DNA, 201 bp, Homo sapiens
ttcgtctgtaagatatgaaactgtcttttttctttctcatatttaactttcagttataaagctttctaaattgctttgataatatccaaagatataggcakattaacactttctctgttatttcctctttcatgtgtgttgacacatacaactatatgtgtgtagtgttatataagtgtcaactacttaagtgaagaaagt

SEQ ID NO: 245201 - DNA, 201 bp, Homo sapiens
aaggtatcctgatgagtgaaagagggaggcaggaggatcatagccagatagagatctgaagatggcacactgctaactaggaaaatggaggaaggggccaygagccaaggaatgtaggcagcttctagaagctggaaaaggaaaggaatgggtcctcctctgcgaggcactgccaacactgtgattttaccccagtgaaat

SEQ ID NO: 245202 - DNA, 201 bp, Homo sapiens
actgcagaaggtgtaagtgcacagagtcagcgacagacatgtgtgtggtcatggacaaactaaaaaaaggccagctatttcatttccttctattatttttkggggggtgggtgttaaataaactttttatttgggaataattttagttttccagagaagttgcaaagacaatacagagtgtcaccatatacctcacccagt

SEQ ID NO: 245203 - DNA, 201 bp, Homo sapiens
tgggttcagaaaaattatatgccacgcccaaggacacacaactgaacagcagcagagcggagggtgaaacctgcatcattttgacctccaagcctttgtgytttccactccactccatgacctacctggaaacaggagcacagagaatggagtcatgccctactccagagcaaggagatggggtacaagagtggagaaagc

SEQ ID NO: 245204 - DNA, 201 bp, Homo sapiens
gtatatgtgatatagtttagaactgctcctttatgattatcaacaacagcaaacctactcagggaggttcaagatttctctgctgtgtgtgtgtgagtacrtgtgtgtgcatatttagaattgatctctctaatgatatacagtagggatactgtattcataaaatatttaaattaatcattattttccattataattatg

SEQ ID NO: 245205 - DNA, 201 bp, Homo sapiens
attgagaaagacctgtgtgaatctatctgtttgtgtatttttggctctatttagtcagaaacatttcatgctttcaacatcagcttaaaataaatcagagmaggggagtttttatttttcattttgtcagagcagacatttccagtgcccctggagagtcttctgcccacatttgtggagagtcagaggaagggttctttt

SEQ ID NO: 245206 - DNA, 201 bp, Homo sapiens
gctatttcttagtcaggtgaccactgtaacttcatcttgcttgagcctcagatttctcacctgcaaaatggagtttgaaatttgctttggttggttgtcayaaggattaaatgaaataatgcctgttaagtgcctatccagcacttaatagatggcaactgcatcagaatgctttgggcacaagtaacagaaaatccaacc

SEQ ID NO: 245207 - DNA, 201 bp, Homo sapiens
catagtcagtgtggccagcaaattacttcatttctttgcactgaataaattaaaattgatgaaggagggttggaatcaatgctagctggacttctggctgkatttcctgaatgtagtgaagatcttatcagtagttaagttgctgttggtatttaattggtattggcatttaaatgctgaggtagaggatttactgatgtt

SEQ ID NO: 245208 - DNA, 201 bp, Homo sapiens
agctgggactatatgtcctttccatactcttattcactggaaaccagttcactaagtccagccacacttatgagggatgggattaagctccacctcctggsaggaggaatagctacttattttggaacatcctattctttttgcttccccacttaaatgctttcaaagtttttaaatagacttcagcctgaaaggcggaca

SEQ ID NO: 245209 - DNA, 201 bp, Homo sapiens
caactcaatgtgttccttcttatttgcttgtggagttgtttcaatccagttagatgcatagtcagtgtggccagcaaattacttcatttctttgcactgartaaattaaaattgatgaaggagggttggaatcaatgctagctggacttctggctgtatttcctgaatgtagtgaagatcttatcagtagttaagttgctg

SEQ ID NO: 245210 - DNA, 201 bp, Homo sapiens
aatcgcttgaacctgggaggtggaggttgcagtgagctgagatcacgccactgcactccggcctgggtgacagagtgagactccaaaaaaaaaaaaaaaaagactaagtcaggactcttcctagttgcgataaggcaaatcctgtttcctatgtaaaaaattgtctgtttcctattcagaaatgcaggatgttctgcgtga

SEQ ID NO: 245211 - DNA, 201 bp, Homo sapiens
tcatgttttctctatgtcttttcatagcttgatgttctcttttttttaatttttagtgctggattattttccactgtctagatgtaccacagtttgtttarccattcacctataaaaggacatcttggttgcttccaagttttggcaattatgaataaagctgccattttttgtggacctgagttttcattttatctgagt

SEQ ID NO: 245212 - DNA, 201 bp, Homo sapiens; identical to SEQ ID NO: 47875

SEQ ID NO: 245213 - DNA, 201 bp, Homo sapiens
aagcaaatcaggtgccaatccctgctgttgaccatgccctgctgtggttgtctttgtagttctcttacggcaatctctccacctacaatattcagttcccractctgcaagaccaaaagctgtcattttttgagggtacagacaaatgctgcctcctctctgaagctatttgccagttgaactggtctctccacactttga

SEQ ID NO: 245214 - DNA, 201 bp, Homo sapiens
cagcctggccaacatggtgaaacgccgtctctactaaaaatacaaaaattagctgggcatggtggcggacgtctgtagtctcagctgctcaggaggctgargcaggagaaatcgcttgaacctgggaggtggaggttgcagtgagctgagatcacgccactgcactccggcctgggtgacagagtgagactccaaaaaaaa

SEQ ID NO: 245215 - DNA, 201 bp, Homo sapiens
tttttttttttttttttttttttttttttttttaccatttttgatagttttttttttttctgcctttgcaaagaaaattgaagcagtggcattccatttgkggtgaatttggaatcttatgtttttccatgttggtaaatttagcattcttctagaatgctataacttggtatctatttaaacacacatataagcacaaac

SEQ ID NO: 245216 - DNA, 201 bp, Homo sapiens
cttccagctcataggttgatcccacctcttagcccctcaggatgggtcctgaatcccgtgactggccagaagaaatacaggattcctccagccatgatgaktgcctggagatgggcaggtgtttctggctgggtcaatcaaaacctatctgtggtttttcaggaattactgggaaagtggtgctgcctttccacaaaggct

SEQ ID NO: 245217 - DNA, 201 bp, Homo sapiens
ataaaaatttcttcccattagtcttttttttttttttttttttttttttttttttttttttaccatttttgatagttttttttttttctgcctttgcaaaraaaattgaagcagtggcattccatttgtggtgaatttggaatcttatgtttttccatgttggtaaatttagcattcttctagaatgctataacttggtat

SEQ ID NO: 245218 - DNA, 201 bp, Homo sapiens
tctttaaaaaccaattacagcaaggttcactgtatcattgctgtctatccagggagagtaagggtggagtaagggtggaattagagctaacgcatggaaarttcacaaacaacacccagccatgactgcagatggtggtgttcatcatttacattaagggggaaatagttgagacccagcagctcgaagaataaaatccac

SEQ ID NO: 245219 - DNA, 201 bp, Homo sapiens
gtccgcttggtgcagagatgagttcagttcctggatatccttgttaactttctgtctcgttgatctgtctaatgttgacagtggggtgttaaagtctcccrttattattgtgtgggagtctaagtctctttgtatgtctttaaggacttgctttatgaatctgggtgctcctgtattgggtgcatataagtttttaatata

SEQ ID NO: 245220 - DNA, 201 bp, Homo sapiens
tgggatgctattttttactaaaggcttaggttctgtacttctgactacaatataacacagcattcccaaacttttaactaagctttgaaacccataagctwcacagagaaacccccctaagaagtgttgacccccatgcccatccccactgaagtaatccctttcttacccactgcctgccacaacccttttctgatatat

SEQ ID NO: 245221 - DNA, 201 bp, Homo sapiens
ccacaaccaacttatcccaggttcctcctgagagattatagctattgtcactttgtgtgtgtgtgtgtgtgtgtgtgtgtgtgtgtgtgtgtgtgtgtgttataatatgcatttttcagcaacttgctttttcactcacccgtagcttggatatttttctatgtcagctcatagaaatgtacctctttttaaaaagtttac

SEQ ID NO: 245222 - DNA, 201 bp, Homo sapiens
gtgttttgtaaatgaggttggattgaatgactaccatagctgaatccagtcatagctatgttgttataatggatgggccatgcaatgtaatgaagtaattractccctaagtttgtactttatccaaaagacatattactggctttaggtgaggaatgagtctggcttccatgatggatggaacttatatttaaagacaat

SEQ ID NO: 245223 - DNA, 201 bp, Homo sapiens
gtttgtttgatttactgtagtctcctgacacctaaagcaggacctggtgcagggttacctgataaatacaggaatgaatgagcaatgccaaagctaccccrtaacctgtccttgcccagggataagtaaatttgcatgacgtaaggtcagaataaatgcatctgttctcacaccaggaaaatggtgtcatatgaagattgt

SEQ ID NO: 245224 - DNA, 201 bp, Homo sapiens
gtattaatgcaggaattgatctaagaatctgaccttgtggtatttgagtgacatttacaattcaccagggtactgatgtatgaaaagttggttctttagartttttcaccagttgaatatctttattattagcattgttcttaaggttataaaaagttcttccttgtattttatgactttttgtaaaaataggatctcttg

SEQ ID NO: 245225 - DNA, 201 bp, Homo sapiens
cctggattcattgattttttgaaggattttttgtgtctctatttccttcagttctgctctgatcttagttatttcttgccttctgctagcttttgaatatstttgctcttgcttttctagttcttttaattgtgatgttagggtgtcaattttagatctttcctgctttctcttgtgggcatttagtgctataaatttccc

SEQ ID NO: 245226 - DNA, 201 bp, Homo sapiens
ccccacaaccaacttatcccaggttcctcctgagagattatagctattgtcactttgtgtgtgtgtgtgtgtgtgtgtgtgtgtgtgtgtgtgtgtgtgtgttataatatgcatttttcagcaacttgctttttcactcacccgtagcttggatatttttctatgtcagctcatagaaatgtacctctttttaaaaagttt

SEQ ID NO: 245227 - DNA, 201 bp, Homo sapiens
attgggatgggggtggtgtgtgtgtgttgtgtttattctctggctatggtttttgtttaataatactggaaacaaaaaccacacaactaacatttgttaagtgctttttatgtcaggcgctgttctaattactttttcacctatactctcatttaatccccgaagtggactctgtggatcacaggtacctggatcacccca

SEQ ID NO: 245228 - DNA, 201 bp, Homo sapiens
cagtcctgtgtcaattcaggctggattccagcttctgtcctaatgtggtgtgtagctgaaaggacaggcattttccgaaaggctgcatatagcactctctkttcttgtggataaggatgattactcatgaaaccaagaaaatcttcaaaatcttcactctgaattttcccaccagccaaagttcactgttctacatacata

SEQ ID NO: 245229 - DNA, 201 bp, Homo sapiens
ggataagctttttgatgtgctgctggattcggtttgccagtattttattgaggatttttgcatcgatgttcatcaaggatattggtctaaaattctctttktttgttgtgtctctgccaggctttggtatcaggataatgctggcttcataaaatgagttgggaaggattcctctttttctattgattggaatagtttcag

SEQ ID NO: 245230 - DNA, 201 bp, Homo sapiens
ctaataggatagcccagaatctttccttcttgttttcttcatgttttcagttattttaaaaatgtatgttttgctgatttttaggctttcttttttttttwtaaaaaaaaggcaaatggctcaaaaatattctagacattaggaagaagacagcccaggatacagacatgtgcagataattgataacctggatattgtaca

SEQ ID NO: 245231 - DNA, 201 bp, Homo sapiens
ttctccacagtatctaatatagtatccagcccatagtaagtatgttcagccaatatataaaagaatgtaaaaattaaaaaaatctagcatactttttaccrtgtttattagttgaataataactaggtaacacattcaactactggataaaatgctcttaatttatgatgataaaattatttcatcaacaaatatggttga

SEQ ID NO: 245232 - DNA, 201 bp, Homo sapiens
catgtggtttttatcattggttctgtttatgtgctggattacgtttattgatttgcgtatgttgaaccagccttgcatcccagggatgaagcccacttgaycatggtggataagctttttgatgtgctgctggattcggtttgccagtattttattgaggatttttgcatcgatgttcatcaaggatattggtctaaaatt

SEQ ID NO: 245233 - DNA, 201 bp, Homo sapiens
tctaataggatagcccagaatctttccttcttgttttcttcatgttttcagttattttaaaaatgtatgttttgctgatttttaggctttctttttttttwttaaaaaaaaggcaaatggctcaaaaatattctagacattaggaagaagacagcccaggatacagacatgtgcagataattgataacctggatattgtac

SEQ ID NO: 245234 - DNA, 201 bp, Homo sapiens
aatttattttgcatttacctatagggtcagaatttcccatcatctgaaattagttctggccctgaggtaagaaacacacacacacacacacacacacacamcccacatatcaagaaatggttggctcattctcaagtcctattcttgctcttcagtttctctctttcattctgccttgcatcatagttatttatgtaccca

SEQ ID NO: 245235 - DNA, 201 bp, Homo sapiens
ttgagatacgtcccatcaatacctaatttattgagagtttttagcatgaagggttgttgaatttcgtcaaaggtcttttctgcatctattgagataaccaygtggtttttatcattggttctgtttatgtgctggattacgtttattgatttgcgtatgttgaaccagccttgcatcccagggatgaagcccacttgatca

SEQ ID NO: 245236 - DNA, 201 bp, Homo sapiens
gtttaattctaactgcagttatttggctggagttaataattagtcaaataaagtaggtggcttaatataggaaaactaagtgatataaatgttatattaaraggtttgatttggacatcaaagggaagacagcccaggatacaaaaataatctacatttgtttacgcttttcttgctaactttcattttatttcacttatg

SEQ ID NO: 245237 - DNA, 201 bp, Homo sapiens
aaatttattttgcatttacctatagggtcagaatttcccatcatctgaaattagttctggccctgaggtaagaaacacacacacacacacacacacacacaccccacatatcaagaaatggttggctcattctcaagtcctattcttgctcttcagtttctctctttcattctgccttgcatcatagttatttatgtaccc

SEQ ID NO: 245238 - DNA, 201 bp, Homo sapiens
atagcgagatgaaatctcactctgccccacccacgatgttaatcctccctttgtccagtggatccatgtgtagatgctacctacacgttagtgacttaggrgccctctcgtttatcagattgcagtgcttgtgttcaaatcacccttattttatttagtaattgcctaagtgcaatttctaagtgcacttagtaaaaagtg

SEQ ID NO: 245239 - DNA, 201 bp, Homo sapiens
ctcacagtagagattcctgtgttgcatggtctcctccaggggtgtccagtggagagaatacagtcatgagttcttagtttctgtttctatttgggccagtraagccccttcctcatccctcttttattcttatcactatagacagaaactaaaaatcatggcttcaggctgctaaaagcctaaaacaaaacaaaacaaaac

SEQ ID NO: 245240 - DNA, 201 bp, Homo sapiens
ctttcaggtcaacctcctgtattctggcttctcactctctagctcactgcttcctcagcttccagattttcaaggttactgcaccttctgtggtttccaayagctcatcattcctctctccccaggtggtgaatcaggagaggaaaatacaggtggcagaaaaattctggcaccttctcttttgctgttttacatatgtat

SEQ ID NO: 245241 - DNA, 201 bp, Homo sapiens
atgtaaaagacgctgcattcagtgcattggacagagcttctgtcaggagtccagggcattggaggagcccgagcgagggagacagtgcccacagagctctygtggctgggcagctgtatgctggagttctggttgctttcctgagggaggactaatttctcccccaagatgagcaatcgtggacaagaaaatacaaaagtc

SEQ ID NO: 245242 - DNA, 201 bp, Homo sapiens
gttctggctttgtctttctgacccagtgttgattgctaccaataacctcccttcctacatgacccaaataggacacaattcattatttatgttttttttttcaccttgattcattctgtaatagaatggagccagacataacctccgtaaagcattaactcgtatcttggtgattacttctctgttaagaaatgctgaaat

SEQ ID NO: 245243 - DNA, 201 bp, Homo sapiens
ctagagtccaggagacccctgacaggacagacatggaccctttaattgctggatgaagctggggcagcagaggtggatattggccctgataacctggaatycattatatgaagcacagggactgtataccacaagcgctcaataagtgtggctggttgttattaccttgagttttcagccttcctcccctctcttcttccc

SEQ ID NO: 245244 - DNA, 201 bp, Homo sapiens
ctggctacgcagggcagattaaatacatggattttcctctactctttcatgaaaccgttttatgtgacagcaaggcaatgacgaaggtataaatgcacaaraacaaaagggaagcagaaatgacagaagaaaatagatgtcaacaaaaaattgaaagctggaaatgatatggactagtaactgacttagcagactataaaa

SEQ ID NO: 245245 - DNA, 201 bp, Homo sapiens
gtgctgattggtgcatttacaaacctttagccagacacagagcactgattggtgcatttacaatcctttagctagatagaaaggttctccaagtcctcacycaacccagaagcccagccagattcacctcaatgctagagcttatttccaagttgttgtggatgatcacatgcaagggtgaatgttaaaatacttgaaaac

SEQ ID NO: 245246 - DNA, 201 bp, Homo sapiens
actaattaacctctcttaactctaattttctcacctatagaatggatacaaatacgtatctcatagacttgtaaagcttaaatgagctaagtgtataaaayacttatgtagtgcttgatacaacatcaatgttctgcaaataattatgttttattattattgataattgataacatggccatgctaaaaaaagttattaat

SEQ ID NO: 245247 - DNA, 201 bp, Homo sapiens
tttaactatttatagtaaatagttaaagcattcatttggctctatgcttttcatttatatctttaatacactggtgtttattttggtgtcttacatacaataggcactaaattaattttttttactgacttgttatgtaactaatataataccaactcttaagattctatctctagtaatgttaaatgccacactttctta

SEQ ID NO: 245248 - DNA, 201 bp, Homo sapiens
gctggcttcaggagtgaaactgcagaatgagtgttacagctcataaaggtagtgcagacctaaaaagccagcagcaggaaaattcattgcaaagagggaargaacaaagcttctgcagggcacaagcagacccaaacgggttggctggggggtggcctgcttttattctcttttttggctccacccacatcctgctgattg

SEQ ID NO: 245249 - DNA, 201 bp, Homo sapiens
gttagctcttcttgttgcattgatccctttaccattatgtaatgcccttttttgtcttttttgatccttgttggtttaaagtctgttttatcagagactargattgcaacccctgctttttttttttgctttccatttgcttggtaaatattcctccatccctttattttgagcctatatgtgtctttgcacatgagatgg

SEQ ID NO: 245250 - DNA, 201 bp, Homo sapiens
ggtctcgctggcttcaggagtgaaactgcagaatgagtgttacagctcataaaggtagtgcagacctaaaaagccagcagcaggaaaattcattgcaaagrgggaaagaacaaagcttctgcagggcacaagcagacccaaacgggttggctggggggtggcctgcttttattctcttttttggctccacccacatcctgc

SEQ ID NO: 245251 - DNA, 201 bp, Homo sapiens
tggcaatgactgttacagctcttaaaggtggcatgtctggagttgttttccttggggttgcttcatggtctcgctggcttcaggagtgaaactgcagaatsagtgttacagctcataaaggtagtgcagacctaaaaagccagcagcaggaaaattcattgcaaagagggaaagaacaaagcttctgcagggcacaagcag

SEQ ID NO: 245252 - DNA, 201 bp, Homo sapiens
tccatgtctttgtctttttgtcttcctttatgttagacttttttcaagctcatctctaccctttgtgttgaatctttttatttcttctaatgtacttttcrtttctaatagctctctcattctcttctcctattatttgggtagcatcctattcttgtttcttctctgcaatattttatcttatcgctgtagatatcagtt

SEQ ID NO: 245253 - DNA, 201 bp, Homo sapiens
tcggtctctattagacagtcagctccttgagcccatgggccgtgtctggttgactgcacctgacctagagaaaaacgctgattgaagactgcataaactgrcccctttctgctcctttccccctgctcctctgcatcctaatcagtgagccgtcccattatcagcatacacaatccccaaatccccccagaatatatcctc

SEQ ID NO: 245254 - DNA, 201 bp, Homo sapiens
ctttttatttcttctaatgtacttttcgtttctaatagctctctcattctcttctcctattatttgggtagcatcctattcttgtttcttctctgcaataytttatcttatcgctgtagatatcagttactctttttctctaaaagttcatctcttccctgcattgtattgatttttcttccaggttcctttttgttattt

SEQ ID NO: 245255 - DNA, 201 bp, Homo sapiens
tgtttagcattctgttgtctgacttcaccctctgacgtgggctttaagaaacattttccaaaacgcactagttcttcctctccccggctttggttgaagtrcactgcctgcttagtgaatgaatgagcatgaaggtagagtgcagttcccaaagttatactgggagcacatcaatgcttcaagatgatccataaaaggcag

SEQ ID NO: 245256 - DNA, 201 bp, Homo sapiens
tcctgacattggggacttctgggatgaagtcagctggctgtggggtccctttctagtcctgctctctgggatgctggtgaagctgccctccagtgccaggmcctaaaaaccctcctctctagacatgtctgttttatgcatctgtcggtctctattagacagtcagctccttgagcccatgggccgtgtctggttgactgc

SEQ ID NO: 245257 - DNA, 201 bp, Homo sapiens; identical to SEQ ID NO: 47877

SEQ ID NO: 245258 - DNA, 201 bp, Homo sapiens
tcccctcattacttccagctattattttctgagtctgttgaattatttcctacactttgtgtctcgcagataacaaaagatgggacacagtccattcttcrtaatttctaaatcctctctcccatgtaactttcagaaagcagcagtgtgtgagacttttatgattccagaaagccagttatattacaattccacatagca

SEQ ID NO: 245259 - DNA, 201 bp, Homo sapiens
tttacacaagaccacatgatttatcagtcataagttcctgtgatgcctccttttcaacaaatacttatggagcaccaactcaatagtgtgccaagcactaygtctagcacacctcccctggacaggcaggtagaccaaggaggtgctacagttcttgccatggtgtgcattaggccgtggctaagccatggactgaagccc

SEQ ID NO: 245260 - DNA, 201 bp, Homo sapiens
ttaattggactgaaaacagagtgaatgaaaagattcaagatctgtgccaactccaaaccaggagggaaaatccactcatcccctggaagttcttagagatycatactcagttactctactagacagaattcagatgcattattaatttacacaagaccacatgatttatcagtcataagttcctgtgatgcctccttttca

SEQ ID NO: 245261 - DNA, 201 bp, Homo sapiens
agcctttgaattctttccttctctaataaagaaaacagctttattaaagcggcagtgttataggtctggcagtgttataggtccagcagtgttatggctcygtgacttctcctgcagagcagggctaccccatagggagtatgctgagaagtagcagctcaggacagttctgtagtcatatttattcccacctttaactat

SEQ ID NO: 245262 - DNA, 201 bp, Homo sapiens
cagacttcttcatttagaccagtgattctcagctgcagacagttttgcctcccagggacatctgacaatgtctggagacattttgggttgtcatgactggrgagttactactggcacctattgggtagaggccaggatgtggctaaacatcctacaatgcacaggacagcccccacaacccagaattatccaatttaaaac

SEQ ID NO: 245263 - DNA, 201 bp, Homo sapiens
taaactaccaaaactcatccaatgtgaagtagataatttgaatagccttataactctatactaagaaagtgtagtatgtaataaaaagctgtcctcccccygcaatctcttgagtccacatggtgtgactcaaatattctagcaaatttctaaagaaaatttaacatcaattctacataatctcttccataaaatagaaga

SEQ ID NO: 245264 - DNA, 201 bp, Homo sapiens
acccagaattatccaatttaaaacatcagtagtgctgaggctgagaaatcctgattcagacgtattagatgggctctctgtgcttttttaaaaaaacaaarttggaatcaaaaatagattctattttgccatctcttcccttgctcagtgataaacatctgtccttacatataaatccatctctctgtgattattaaagcc

SEQ ID NO: 245265 - DNA, 201 bp, Homo sapiens
tcttgtgccagttttcaaagggaatgcttccagtttttgcccattcagtatgatattgcctgtgggtttatcatagacagctcttattattttgagatacrtcccatcaatacctaatttattgagagtttttagcatgaagggttgttgaatttcgtcaaaggtcttttctgcatctattgagataaccatgtggttttt

SEQ ID NO: 245266 - DNA, 201 bp, Homo sapiens
acctgtttgcccattgcagattttgggacctcttattttccataatctttgaaccaatttgttataataaatctctttatggctgactgttgatctgtctrtctatctatctatctatctatctatctatctatctatctttctatcccctactggttctgattctctgcagaaccctgactaatacaaatttgtcctgga

SEQ ID NO: 245267 - DNA, 201 bp, Homo sapiens
atgttgaataggagtggtgagagagggcatccctgtcttgtgccagttttcaaagggaatgcttccagtttttgcccattcagtatgatattgcctgtggktttatcatagacagctcttattattttgagatacgtcccatcaatacctaatttattgagagtttttagcatgaagggttgttgaatttcgtcaaaggtc

SEQ ID NO: 245268 - DNA, 201 bp, Homo sapiens
gtagctttatggggatggcattgaatctataaattaccttgggcagtatggccattttcatgatattgattcttcctatccatgagcatggaatgttcttycatttgtttgtatcctcttttatttcattgagcagtggtttgtagttctgcttgaagaggtccttcatgtcccttataagttggattcctaggtatttta

SEQ ID NO: 245269 - DNA, 201 bp, Homo sapiens
gaacggtgtcagagaggtttcagcatgctgtgggagcacagaagagggtgtgtaatgcggcttcccacaagaggtgacactccccctgggtatcatcttttctaaaatataaattttattactcttcccacttaactctgtccttagcacttgccagccttatttcctgctacctcactctatagtccctgcttgctggac

SEQ ID NO: 245270 - DNA, 201 bp, Homo sapiens
gttttagacatgaagtccttgcccatgcctatgtcctcaatggtattgcctaggttttcttctagggcttttatggttttaggtctaacgtttaagtcttwaatccatcttgaattaatttttgtataaggtgtaaggaagggatccagttttagctttctacatatggctagcccgttttcccagcaccatttattaaat

SEQ ID NO: 245271 - DNA, 201 bp, Homo sapiens
ttgagatcatctcatccatttcacagatgcagaaatgaaagcttgatttagcacagagcttgcctgaggtctcatagctagtgtgggtgaagttaggttttgagccaggtctatcacactccagagccctgttgcctttccacaaaatcagacatgagacaatgcaatgccacggagaacggtgtcagagaggtttcagca

SEQ ID NO: 245272 - DNA, 201 bp, Homo sapiens
ttgcttttggtgttttagacatgaagtccttgcccatgcctatgtcctcaatggtattgcctaggttttcttctagggcttttatggttttaggtctaacrtttaagtctttaatccatcttgaattaatttttgtataaggtgtaaggaagggatccagttttagctttctacatatggctagcccgttttcccagcacc

SEQ ID NO: 245273 - DNA, 201 bp, Homo sapiens
gtagtgtgttgtttcaagtttcaaaatattacaaatttaaattaagttttagaaacaaattttaaaaacaagccaggaatggtggctcatgcctgtaatcscaacactttgagaggctgaggcagacagatcacttgaggtcaggagttccagaccagcctggccaacatggtgaaaccccatctctactaaaaatacaaa

SEQ ID NO: 245274 - DNA, 201 bp, Homo sapiens
gtaaaagtgttcctatttctccacatcctctccagcaccagttgtttcctgactttttaatgatcgccattctaactggtgtgaggtggtatctcattgtrgttttgacttgcatttctctgatggccagtgatgatgagcattttttcatgtgtcttttggctgcataaatgtcttctattgagaagtgtctgttcatat

SEQ ID NO: 245275 - DNA, 201 bp, Homo sapiens
tttaggatagttagctcttcttgttgcattgatccctttaccattatgtaatgcccttttttgtcttttttgatccttgttggtttaaagtctgttttatyagagactaggattgcaacccctgctttttttttttgctttccatttgcttggtaaatattcctccatccctttattttgagcctatatgtgtctttgcac

SEQ ID NO: 245276 - DNA, 201 bp, Homo sapiens
agtcccaccaacagtgtaaaagtgttcctatttctccacatcctctccagcaccagttgtttcctgactttttaatgatcgccattctaactggtgtgagrtggtatctcattgtggttttgacttgcatttctctgatggccagtgatgatgagcattttttcatgtgtcttttggctgcataaatgtcttctattgaga

SEQ ID NO: 245277 - DNA, 201 bp, Homo sapiens
ttttttttttttttttgagacagagtcttgctctgttgcccaggctggactgcagtggcatgatctcggctcactacagcctccgcctcccaggttcaagkgattctcctgcctcagcctcccaagtagctgggactacaggtgtgtaccaccatgcctggctattattattattattttgtatttttagtagagatgagg

SEQ ID NO: 245278 - DNA, 201 bp, Homo sapiens
gggtatatacccagtaatgggatggctgggtcaaatggtatttctagttctagatccctgaggaattgccacactgacttccacaatggttgaactagttkacagtcccaccaacagtgtaaaagtgttcctatttctccacatcctctccagcaccagttgtttcctgactttttaatgatcgccattctaactggtgtg

SEQ ID NO: 245279 - DNA, 201 bp, Homo sapiens
ccctcagcagagaggtttctgcattaccatctctagttttcaatctttaattttctttggctcatggaagactactttccttggtttccatttccccacatggaagaaaagtgtttataggacctatctcctggatttttgagaaacaactaaaagaaataattgttattaggttaatgcaaaagtaattgcagtttttgc

SEQ ID NO: 245280 - DNA, 201 bp, Homo sapiens
ctaagctaagcagcacatatgtaaaagagctttaagttgaaattcttttgagaggtgtgtgtattttttaaaactggaaatgcagttttaccaactgcagytgaggaaggcccacatgtaaaaagtaaagtagaggttcctcttcaaagagactttcctcccatctaattaagaataaataataacttctcttagaagcaa

SEQ ID NO: 245281 - DNA, 201 bp, Homo sapiens
tactatgaaattttagattatgaggcaagagtcagacagttttgccgtataaatcagaccagtatcaactcacgtaagctagtgtgattttttttttttttgtattggtggtgctaattgaatttgctggaaatgtttatgtaataaattttctactttaaagatgctgtgccaggagcataaactagtttcagtgcaaag

SEQ ID NO: 245282 - DNA, 201 bp, Homo sapiens
tttgctgagaatgatggtttccagcttcatcatgtccctacaaaggacatgaactcatccttttttatggctgcatagtattccatggtgtatatgtgccrcattttcttaatccagtctatcattgttggacatttgggttggttccaagtctttgctattgtgaatagtgatgcaataaacatacgtgtgtgcatgtgt

SEQ ID NO: 245283 - DNA, 201 bp, Homo sapiens
atgcattttgaaaaattgttctctaggaagtttctacttatttacaattaatgttttataattgataggttactctgatactgattcagggtaggcaagcycccactggggcttagctgggaaggttcttggctttgccaaggaaaaaattcaagggtgagcctttgaattctttccttctctaataaagaaaacagcttt

SEQ ID NO: 245284 - DNA, 201 bp, Homo sapiens
attccctgcttaataatgactcaacaaatgttgagtatatagccatgtgtgattccgtctttagatctttataaaaatatactttttgattggaaaaaaaacttatttgtcagatcccatgtcccaatttttggattgcagaatatggtcacttttggagtaaaagtgggaaatggctgaaactttgatagaggttgctgt

SEQ ID NO: 245285 - DNA, 201 bp, Homo sapiens
cacgcctggctactttttgtgtttttagtagagattgggttacaccaccatggtagccaggcttgccttgaactcttgacctcaggcaatctgcctgcctyggcctccaaaagtactgggattacaggcgtgagccactgtgcccggccctgttttttttttttttctccttacaacattcctataaggaataattgtatt

SEQ ID NO: 245286 - DNA, 201 bp, Homo sapiens
ttgtccttgcaatagtttgctgagaatgatggtttccagcttcatcatgtccctacaaaggacatgaactcatccttttttatggctgcatagtattccayggtgtatatgtgccgcattttcttaatccagtctatcattgttggacatttgggttggttccaagtctttgctattgtgaatagtgatgcaataaacata

SEQ ID NO: 245287 - DNA, 201 bp, Homo sapiens
acagatgttcgcttgtcccagccagtaccatttcttgaaaagaccattattttctcattgaattatcttggcactcttgtcaatgtcaaggcatttttgtsataattattctcataattattgtttgccatatgagtaacacaggttaacaaataatgattagctttattgagtctcagttaggtgttaggcaccattcta

SEQ ID NO: 245288 - DNA, 201 bp, Homo sapiens
cccccttcctggatctgtcaaagaacacaggagcagacacactctttgattcaattctggcagcaataactgtagtaggggtgatagggtgattgcaggagaaggttacaaggagagggtaggttccctttctagactgtccacagaaacttctgtggctttggcaaaaagatttctgtcatcatctagtacaacttctga

SEQ ID NO: 245289 - DNA, 201 bp, Homo sapiens
gcctccttgagctgtggtgggctccacccagttcgagcttcccggctgctttgtttacctaagcaagcctgggcaatggcgggcgcccctcccccagcctygctgccaccttgcagtttgatctcagactgctgtgctagcaatcagcgagactccgtgggcgtaggaccctcagagccatgtgcgggatataatctcctg

SEQ ID NO: 245290 - DNA, 201 bp, Homo sapiens
gcttagcactctagctgccatcttggaccacagtgataatgctcaaacccaagggttggtagaatggtaatctaaagattttgtgaaacagagctgctatrtcagttctgaaaggcttacatctcactcaacagagatataaacttctatctctgatttttatgtaacagagatataagcttttatttcatttaatctacc

SEQ ID NO: 245291 - DNA, 201 bp, Homo sapiens
catggtgggcacctcacatgggtgccgcatggaaagtaccccatgtgggtaccgcatcgtagccacaaggacagtgtggggaacagctgatctcccctgckcaggtccaggcctcaacttggtgaggagctcctggaacccactgtggctcctgacattggggacttctgggatgaagtcagctggctgtggggtcccttt

SEQ ID NO: 245292 - DNA, 201 bp, Homo sapiens
acccccttcctggatctgtcaaagaacacaggagcagacacactctttgattcaattctggcagcaataactgtagtaggggtgatagggtgattgcaggagaaggttacaaggagagggtaggttccctttctagactgtccacagaaacttctgtggctttggcaaaaagatttctgtcatcatctagtacaacttctg

SEQ ID NO: 245293 - DNA, 201 bp, Homo sapiens
gagcctacagaggcaggcaggcctccttgagctgtggtgggctccacccagttcgagcttcccggctgctttgtttacctaagcaagcctgggcaatggcrggcgcccctcccccagcctcgctgccaccttgcagtttgatctcagactgctgtgctagcaatcagcgagactccgtgggcgtaggaccctcagagccat

SEQ ID NO: 245294 - DNA, 201 bp, Homo sapiens
gagctagaagaatacctcatgtgggtactgcatggtgggcacctcacatgggtgccgcatggaaagtaccccatgtgggtaccgcatcgtagccacaaggrcagtgtggggaacagctgatctcccctgctcaggtccaggcctcaacttggtgaggagctcctggaacccactgtggctcctgacattggggacttctgg

SEQ ID NO: 245295 - DNA, 201 bp, Homo sapiens
catttaacattcttgctactctgttgttaatttccttagtagtggattcatgtttgattccttttagtgtttatttgttctctccttccctcccttctttwcttttttccttcctctcactttcttcctttcctccctctgttcatttttttctctcattaaatatatgctgaacacctactatataccaaacactgtaat

SEQ ID NO: 245296 - DNA, 201 bp, Homo sapiens
tacccccttcctggatctgtcaaagaacacaggagcagacacactctttgattcaattctggcagcaataactgtagtaggggtgatagggtgattgcaggagaaggttacaaggagagggtaggttccctttctagactgtccacagaaacttctgtggctttggcaaaaagatttctgtcatcatctagtacaacttct

SEQ ID NO: 245297 - DNA, 201 bp, Homo sapiens
tgatggcataagaggagattacccttcctcaaacgtaccacaaatcagataactttacagtgttcctactatgaaattttagattatgaggcaagagtcasacagttttgccgtataaatcagaccagtatcaactcacgtaagctagtgtgattttttttttttttgtattggtggtgctaattgaatttgctggaaatg

SEQ ID NO: 245298 - DNA, 201 bp, Homo sapiens
aaaagaagaggccaaatagcaaagaagaaatatgaagaatatagagactcttgagactgcaatgttgatgtttttcctgctgaaaattcagaatttcccaycggtcatatgtggaaaatagaataattataaacctcaggatccagatatttcacagcaataactttaggagtgctaaccattcctcctctgggcttgctc

SEQ ID NO: 245299 - DNA, 201 bp, Homo sapiens
tctcagatctccagctgcatgctgctctcttcaaagctgtcagacagggacatttaagtctgcagagtttactgctgtctttttgtttgtctgtgccctgyccccagaggtggagcctacagaggcaggcaggcctccttgagctgtggtgggctccacccagttcgagcttcccggctgctttgtttacctaagcaagcc

SEQ ID NO: 245300 - DNA, 201 bp, Homo sapiens
ggggcgagagccaccgggtgtgggcactgccatgctctgcaatgggcagggtgagctagaagaatacctcatgtgggtactgcatggtgggcacctcacakgggtgccgcatggaaagtaccccatgtgggtaccgcatcgtagccacaaggacagtgtggggaacagctgatctcccctgctcaggtccaggcctcaact

SEQ ID NO: 245301 - DNA, 201 bp, Homo sapiens
gcctagatactaaaggggcccgataccaccttctgtgctccccttaaaccacttcattccccatcaccccatgattttccacattcatgacttctccttgsgacacttatcccctctgatcacttgtctgaaatctacctgttcttcaaatcccacctcaagtcttacctcctctgttgacttgcttctgatttctcctag

SEQ ID NO: 245302 - DNA, 201 bp, Homo sapiens
aaacttatgcaaagtaagaatatagatttcaacttcataaatttaaggggatatatggtgttttaaaattctttcagtttgtaagagcaaaaagttataargctgtcggcctgtatttaacccatgtgggaacagaacacccatcaggcttatgttgaattgcattttgtgccagagaagggtggagaatggcagttgttg

SEQ ID NO: 245303 - DNA, 201 bp, Homo sapiens
tcccagttcaaattagtcagtttcagagaacagagcagagaaaattcacatgaggggattctggttatggggaaaaaagaagaggccaaatagcaaagaakaaatatgaagaatatagagactcttgagactgcaatgttgatgtttttcctgctgaaaattcagaatttcccatcggtcatatgtggaaaatagaataat

SEQ ID NO: 245304 - DNA, 201 bp, Homo sapiens
accagcttccaaccagcagatggtttgagaatggcatctatcacaaggccagctgtcctggggcgagagccaccgggtgtgggcactgccatgctctgcartgggcagggtgagctagaagaatacctcatgtgggtactgcatggtgggcacctcacatgggtgccgcatggaaagtaccccatgtgggtaccgcatcgt

SEQ ID NO: 245305 - DNA, 201 bp, Homo sapiens
gagccagtaagtctagacacattccagaggccatgaggggttttatgccctgagccctggattccatccaagccacgaggggttttatgccctgggcttarattatggtgtggcagggcagccttccaccctttggcacagagcttgttgttccaaagaccatgaggggtttcagaccctggacccccgacatgttccaag

SEQ ID NO: 245306 - DNA, 201 bp, Homo sapiens
agagaactgcagaagccctgggacagctgtgatccacatcctgagtaaggagtggcaggaaggagcttgaatcctgtggagcaaaagggactaaaagtgcygcaggggacactgggaatcagagctagggctataacctgaatacaggacatggggtggacaggctaaaacaactgctgccagcctgtttcctccaagcca

SEQ ID NO: 245307 - DNA, 201 bp, Homo sapiens
ggaaagattagatgacttttaggaaggcaaaaaaattatttttaatgtagcaatgtccgattgatgcttacttcactttaccaccttgaaactgaccttcrttgtgtggtgtgaatgaagagttcagtttgggaagattgggaggattcggatgataagtttttttttttttttttgagactggaagatgaagtactgcaa

SEQ ID NO: 245308 - DNA, 201 bp, Homo sapiens
ctagtttaagatacaatcattttataagcctgggaatgctagaagcaaggagccagtaagtctagacacattccagaggccatgaggggttttatgccctragccctggattccatccaagccacgaggggttttatgccctgggcttagattatggtgtggcagggcagccttccaccctttggcacagagcttgttgtt

SEQ ID NO: 245309 - DNA, 201 bp, Homo sapiens
gagagcagccatggtgaagactttgttgaatagtgagaatcaaaatctctgctgcgtgcccttccagacttcttcatttagaccagtgattctcagctgcrgacagttttgcctcccagggacatctgacaatgtctggagacattttgggttgtcatgactggggagttactactggcacctattgggtagaggccagga

SEQ ID NO: 245310 - DNA, 201 bp, Homo sapiens
tgtatagtctttgcttccctctcatgacctatcttggagtagaatttgtgtactactgtccttgtctttgagtgggtatatgtgtgatggtacagaaatayagtcacatattatattaatatatatagatggataggaaaaacctacagccataggtattgtccaataactgattctagaggtagaactatagagtataca

SEQ ID NO: 245311 - DNA, 201 bp, Homo sapiens
ggtttctgtaccagtgtgatcagcaaattatccagcaagttaatgcacttcctggaacgaaaacctggattccaaagaaggggggggaaaatactagagayggatgagggtggagtggagacgctccccaaacccactatgcaccaggtggagaaatcgtacaactgtaaatagaaacggatttatcactgcctcactggc

SEQ ID NO: 245312 - DNA, 201 bp, Homo sapiens
cgtttccctctggataggctgactttgagacattgcctcagtttcttagtccctcctttcttaatattttccaaagtgaaattttgccataaaaataataygcatgccctgtagactgctgataaatgatgagagataaaatgtcctgaatatgatcctcatgatcattttggctttctgaagtcttaatatctatgcctt

SEQ ID NO: 245313 - DNA, 201 bp, Homo sapiens
tatttcactgattcttaactcaggctgcatagtagacttatgagctatcaaaccagcctcgctgggtgggaccaggaagtgcatgtttaaaacttctttgrgtcccattctgctgccatgcagcagggctgagaacccccactctgcttgttccaggctcccccttgaccttctcttgttttccttcattcttctccatcc

SEQ ID NO: 245314 - DNA, 201 bp, Homo sapiens
ttataataaatctctttatggctgactgttgatctgtctgtctatctatctatctatctatctatctatctatctatctttctatcccctactggttctgwttctctgcagaaccctgactaatacaaatttgtcctggaccaggacataccccagagcttgcagtagaacaattgcttctatataaataaaacataggtt

SEQ ID NO: 245315 - DNA, 201 bp, Homo sapiens
tggtctgctatctgggttttcctaaaacaacgatttgaagtggaaactctgaaataatgattaattccagagtggaagatggtttttggctgatattggtrctgaggcccctgcttcctgggtggtgagaagaaagcccgcgcatgtcaaggtcattgccttctaagtccctggtactgctggaatttagaggcttgctcc

SEQ ID NO: 245316 - DNA, 201 bp, Homo sapiens
agcataagaaatgtcagcacaggtgttaggaatgcctcattaatctagggtgagtacagatcacagagggcagagccctttaggcactcagcataattctrtgctctgatttgggaagcctgtgaaaagaagggagataaatgtaggagtgttgttattttactatttttttatttatgttattaacagtaaggctgctgg

SEQ ID NO: 245317 - DNA, 201 bp, Homo sapiens
agatcccagcaagattttttatatagatgagagtattctaaaatgtatacagaaaatcataggaagtagaacagttaaaccatttttaaaaagaaaaaaaagtgtgaggagtctatctactcgatttcaaggcctatataactacattgatcaagatgagtggtattggtgaaagcacagacttacaaattaatagaatag

SEQ ID NO: 245318 - DNA, 201 bp, Homo sapiens
gcgtgaacctgggaggtggagcttggagtgagcggagattgtgccactgcactccagcctgggcgacagagtgagactccgtctcaaaaaaaaaaaaaaaacaaaacaaaaccaaaaaaaaaaaccacataaactaccaaaactcatccaatgtgaagtagataatttgaatagccttataactctatactaagaaagtgt

SEQ ID NO: 245319 - DNA, 201 bp, Homo sapiens
ctaatagacaggaccctcagctgcaggtctgctggagtttgctagaggtccacttcagacgctgtttgcctgggtatcagtagcggtggctgcagaacagyggattttggtgaaccgcgaatgctgctgtccgatggttcctctggaagttttgtctcagaggagtacccagccgtgtgaggtgtcagtctgcccctactg

SEQ ID NO: 245320 - DNA, 201 bp, Homo sapiens
tggcgtgaacctgggaggtggagcttggagtgagcggagattgtgccactgcactccagcctgggcgacagagtgagactccgtctcaaaaaaaaaaaaamaacaaaacaaaaccaaaaaaaaaaaccacataaactaccaaaactcatccaatgtgaagtagataatttgaatagccttataactctatactaagaaagt

SEQ ID NO: 245321 - DNA, 201 bp, Homo sapiens
agataccctcattgggctggtacttgaagacatcacttttccagtgttcttttaccatctgtccaggtcattacagttccctaaaatgaggaaaggtagtrgggttatattccctgagggaagaggaatctgcagttgccttgggaaggagacaggaatgagagagcttgggtgttaaattgttcaaaacatggttgttga

SEQ ID NO: 245322 - DNA, 201 bp, Homo sapiens
tcctgtagctcagagtagtttgatcgtctgaagccttcttctctcaactcgtcaaagtcattctccgtccagctttgttccattgctggtgaggaacttcrttcctttggaggaggagaggcgctctgctttttagagtttccagtttttctgctctgttttttccccatctttgtggttttatctacttttggtctttga

SEQ ID NO: 245323 - DNA, 201 bp, Homo sapiens
atggcgtgaacctgggaggtggagcttggagtgagcggagattgtgccactgcactccagcctgggcgacagagtgagactccgtctcaaaaaaaaaaaamaaacaaaacaaaaccaaaaaaaaaaaccacataaactaccaaaactcatccaatgtgaagtagataatttgaatagccttataactctatactaagaaag

SEQ ID NO: 245324 - DNA, 201 bp, Homo sapiens
tcatgacatggacgctcagtaagtaattatgggcatgtcagtttgagccagccagtaactgatcttaacatcctctccctgctgtggcaaaatcctgaccrtggcaaacctagctcttcgtctcatttatgatgctggtaggacttgcttgctcagagctgctgctctcactttttctggcactgcccactcctcccagcc

SEQ ID NO: 245325 - DNA, 201 bp, Homo sapiens
cctcctgtagctcagagtagtttgatcgtctgaagccttcttctctcaactcgtcaaagtcattctccgtccagctttgttccattgctggtgaggaactkcattcctttggaggaggagaggcgctctgctttttagagtttccagtttttctgctctgttttttccccatctttgtggttttatctacttttggtcttt

SEQ ID NO: 245326 - DNA, 201 bp, Homo sapiens
tgaacctccagtagtaggaataatgaagcatatgaagagactttgtgtgtttgaatgaataaatacatatttgaaagggagaagcttgggacctgttagakttacactggaagtctagatctgctgttcaatatggtaaccactagccacatgtggctcttgagcccttggaatgtggctaccatggtcacatgttaaaat

SEQ ID NO: 245327 - DNA, 201 bp, Homo sapiens
tctaaatttttttcaaagtttttaacttctttgcctttggtttgaatttcctcctgtagctcagagtagtttgatcgtctgaagccttcttctctcaactygtcaaagtcattctccgtccagctttgttccattgctggtgaggaacttcattcctttggaggaggagaggcgctctgctttttagagtttccagttttt

SEQ ID NO: 245328 - DNA, 201 bp, Homo sapiens
ataaaatagacatacattttcctatttttcccatgaattacaactaaaacccctggatattatatacaaaataaacaaaagaatactctgaaggcaaaaagaagaagacagagtgactagacgacttgggacccaagaaacaacatggtgatgagttccctgagttttctttttttatcatataccatagacttcgagctg

SEQ ID NO: 245329 - DNA, 201 bp, Homo sapiens
actgtactaatttacattcctgccaacaatgtataaggatttccttttttctccatctgagatgatatctcattgtggttttattttgcatttccctaatrattaacaatgtgaatttgtttttgcatgtatttgttggtcacttgtatgtcttcattggagaaatatctatttaggtcccttgcccatttttaaattagg

SEQ ID NO: 245330 - DNA, 201 bp, Homo sapiens
cctcctttaagcacttctctgtattggttattctagttatacattcgtctaaatttttttcaaagtttttaacttctttgcctttggtttgaatttcctcytgtagctcagagtagtttgatcgtctgaagccttcttctctcaactcgtcaaagtcattctccgtccagctttgttccattgctggtgaggaacttcatt

SEQ ID NO: 245331 - DNA, 201 bp, Homo sapiens
acagtatagacgatgggcaaacaccaaagataattgaagagaaaagacaggttacctactgtgtctgagactacgagtttagtgttttgtttttttttttwaatttttatttttggtagttttgctcttgtcacccaggctggagtgcagtggagcgatcttggttcactgcaacctccgcttcctgggtttaagccattc

SEQ ID NO: 245332 - DNA, 201 bp, Homo sapiens
gtcagctcatagaaatgtacctctttttaaaaagtttacagtatggctaaatcacggttaattgggatgttctcttaatgataggcacttaagttgtttcragttctttactgtgataaataatgttgcagcaatataagaaggctcattattgtgtttattaagggacagtctttaaaatgcacaaatgtattggctaaa

SEQ ID NO: 245333 - DNA, 201 bp, Homo sapiens
ggtgctgaaaaaaatgtatattctgttgatttggggtggagagttctgtagatgtctattaggtctgcttggtgcagagctgagttcaattcctgggtatscttgttacctttctgtctcgttgatctgtctaatgttgacagtggggtgttaaagtctcccattattattgtgtgggagtctaagtctctttgtaggtca

SEQ ID NO: 245334 - DNA, 201 bp, Homo sapiens
ctttgtgtgtgtgtgtgtgtgtgtgtgtgtgtgtgtgtgtgtgtgtgtgttataatatgcatttttcagcaacttgctttttcactcacccgtagcttggrtatttttctatgtcagctcatagaaatgtacctctttttaaaaagtttacagtatggctaaatcacggttaattgggatgttctcttaatgataggcact

SEQ ID NO: 245335 - DNA, 201 bp, Homo sapiens
tcttgtgtcagttttcaaagggaatgcttccagtttttgcccattcagtatgatattggctgtgggtttgtcatagatagctctgattattttgagatacrtcccatcaatacctaatttattgagagtttttagcatgaaatgttgttgaattttgtcaaaggccttttctgcatctattgagataataatgtggttttt

SEQ ID NO: 245336 - DNA, 201 bp, Homo sapiens
gttacagttcttacagatggtgtgtccatagtttgttccttaagattttcagatgtgtccggagtttcttcattctgatgggttcacgatcttaatgactycaggggtgaagctgcagaccttggcaatgactgttacagctcttaaaggtggcatgtctggagttgttttccttggggttgcttcatggtctcgctggct

SEQ ID NO: 245337 - DNA, 201 bp, Homo sapiens
gagccataatgggtagggggagtgggggatgtgagtaggggagagggtaaccagaagctccagcccatctgttgggccacaagagggcttaatttcttccycattttgcttttagaagttcatgaaggaaacctgtttttccagttctttgctcatgttgtctctctgctctttccagtaaggggttgatatccaggtgct

SEQ ID NO: 245338 - DNA, 201 bp, Homo sapiens
agagagggcatccctgtcttgtgtcagttttcaaagggaatgcttccagtttttgcccattcagtatgatattggctgtgggtttgtcatagatagctctkattattttgagatacgtcccatcaatacctaatttattgagagtttttagcatgaaatgttgttgaattttgtcaaaggccttttctgcatctattgaga

SEQ ID NO: 245339 - DNA, 201 bp, Homo sapiens
acattgttgaatcaaagtaatttgctattgctaataattagggagcagaagtctgtgaataatttatactttttgttttactctttaaaaaccaattacarcaaggttcactgtatcattgctgtctatccagggagagtaagggtggagtaagggtggaattagagctaacgcatggaaaattcacaaacaacacccagc

SEQ ID NO: 245340 - DNA, 201 bp, Homo sapiens
cttcaagtcagttttcacaattgaccaggcacgttaaagctgaaacatgggattacctttcctgttttctcagcagcagctggcatccattgccatcagargcaagagctgccctctgctaatagactctatacacttggacagagatgattcatactgctaggatttcgagctcctgggtctcttgagatgaaaactctc

SEQ ID NO: 245341 - DNA, 201 bp, Homo sapiens
tctccggagatgtggttctttattttctcctagggactgtgtatttggagaggtatctgttttttaattggtacaaatattgtatatatttatagggtacrtgtgatattttgttacacgcatagactatgtaatgatcaagtcagggtttttggggtgtccattacccgcattatttatcatttctatgtgttgggaaca

SEQ ID NO: 245342 - DNA, 201 bp, Homo sapiens
aataccctttatttccttctcctgcctgattgccctggccagaacttccagcactatgttgaataggagtggtgagagagggcatccctgtcttgtgtcasttttcaaagggaatgcttccagtttttgcccattcagtatgatattggctgtgggtttgtcatagatagctctgattattttgagatacgtcccatcaat

SEQ ID NO: 245343 - DNA, 201 bp, Homo sapiens
ctaagcactttctttctctgtacatccctgttgcctcatccatacccctattgttacctagtaaacccgtaggatggatatgctggggcaggtgaatgaaygaatgaatgtagctgacctggtagtttagatggctcttccttcatccttgtttcttgcgtatgtggttctcagacaaaggaattccatttataggagaaa

SEQ ID NO: 245344 - DNA, 201 bp, Homo sapiens
ggtctgagaggaagggattggtgctacacggacattttgatagaattgcagatgcttttgtcacctgtaaggaaaaagtatttatagacattgaatgactragtactctggaggaacacaaaaagaaatggccaattctacccagaaagtcagaaaagcatcctagaatatagtagtcaggttgagctgtgtcttgaaccc

SEQ ID NO: 245345 - DNA, 201 bp, Homo sapiens
tctgttattggtgtataagaatgcttgtgatttttgtacattgattttatatcctgagactttgctgaagttgcttatcagcttaaggagattttgggctraaacagtggggttttctagatatacaatcatgtcatctgcaaacagggacaatttgacttcctcttttcctaattgaataccctttatttccttctcctg

SEQ ID NO: 245346 - DNA, 201 bp, Homo sapiens
ctgctggtgatgtgaatggccaacgggggctcttgtggagtcccctaatctgatagaaaacactcataagtgggagctgaacaatgagaacacatgaacasagggaggggagcaacacacattggggcctgttgtgggggtagagagagggagagcatgaggataaatagttaatgcatgtgaggcttaatacctaggtga

SEQ ID NO: 245347 - DNA, 201 bp, Homo sapiens
ctcttctttcatccagtgttttataagccattgtattttcaccctacctggagtccaggcagttgcttgtgagagaaaggtcacaaaggcccagcagaggygaggtggggtggtccatcaaccctagagggagagacatcaaccctaaagggtagaaatgaacttcgacttagaatatgaagatgtgtgtcagcagatcca

SEQ ID NO: 245348 - DNA, 201 bp, Homo sapiens
actgtaaataagagctttccctttctctccctttctacattttagtatcagtgtagactctggactcttctttcatccagtgttttataagccattgtatyttcaccctacctggagtccaggcagttgcttgtgagagaaaggtcacaaaggcccagcagaggcgaggtggggtggtccatcaaccctagagggagagac

SEQ ID NO: 245349 - DNA, 201 bp, Homo sapiens
aataaggtcatttccttacagtaaagttgccatagtcaggaaacttaatcttgatattacactattatctaatatacagtctgtgttcaaatttcaccaartgtcccaataatgtctttaacagccatattttttctgatcctggctccactctggaagcacacatcacctttagttgtcatggttctttaggttcccgta

SEQ ID NO: 245350 - DNA, 201 bp, Homo sapiens
tattgaagtcatttaaagtgtgaattaatagaggatcagtttgagctcttctatttttaatgaaatacattttttatatgaagtagatccatgtgcttctratccatcattgaattacaagccatcctcaacttagtggcttaaaataacttttattctgctcataattttgcaggtcaggaattcaggaaggacttggct

SEQ ID NO: 245351 - DNA, 201 bp, Homo sapiens
gacagattggcctactgatatgggactctacactgggaaatatctcaaaaacaccatatgtcaccccttacaactttccatgatgaatgactttaactgcrtttgtttgttgcagtgaaattaaggtaccctaaataaaaataaagcagacccctttaaaactgtgccctgtaataaggcaaatctgtatatcccttgatt

SEQ ID NO: 245352 - DNA, 201 bp, Homo sapiens
tacagacaacctggcaaagctaaaactcagcctccctttacctaactctactggccactgagttcactttggtgtagagcttccggtttttgggcggatawccctccagagagagaagaggacactcaggtctcacccttgcctcttctgctctggtttctcttctccctgtcatctcccctgccagaaaagctgcacctc

SEQ ID NO: 245353 - DNA, 201 bp, Homo sapiens
agtctgtctatatttaattttatatttgatgcagtatcttccctatgggctctagtgggagggaacatggggcaagtcacaattttctttagtatcttgtmcttttattgccttacaggggattttgtggaagcattgagattaaagaaactacaacataaggataaaattgtaattatcctcaaaatatgattgttttca

SEQ ID NO: 245354 - DNA, 201 bp, Homo sapiens
ctttggtgttcagactcactaacggccttgctgaactttttttagagctgcagtacagtctcagacactgccacccaactttcttttactgggagtcagasctgcatccaggtctgatggctttctcagcctcgctcagctttttactcatttgtttttacagattttactccaatacatttcttgtatgtctaatcctgt

SEQ ID NO: 245355 - DNA, 201 bp, Homo sapiens
ccaaagaaggtgacagcctctaattctttctcacttcagtttttaaaaccctgtttgggagaagactgatcctctacacccccaactctttcttttgtgaytggattatgcagtgggccccagccagggaatatgagccctatggatgctttgtgagtgatgctggctgtgggcctgacctccttgggcagtggtggaaat

SEQ ID NO: 245356 - DNA, 201 bp, Homo sapiens
tgaggtgctgccaagtcatttttcaaagcagctgcaccatacatattacattcccatcaatagtgtatgagggttccaatttctcagcataatcaccaacrcttgttattatctgtttttggattattgccatcctagatgatgtgaagttgtatctcattgtgtttttcttttttttttagacagggtctcactttgtca

SEQ ID NO: 245357 - DNA, 201 bp, Homo sapiens
tcactcctttcctggtctccatcagaaaatgttctccagagatctttcccccatgcggtatagctcttcaattctgtcaggtgttaataaaatagtaatgyaggaaatatcatctggttaacatcccacttgagcccaggctggtgagctactcattgctactgccttttcaatccttagaactgtggtttccaaattgtg

SEQ ID NO: 245358 - DNA, 201 bp, Homo sapiens
tgttttaattcataatgtccattagtaaatggaggctcctgaagtgatcgagaagcatgtgttctcttaagcacccagcattccctcttcagtcttacgtrtgtcgctgatttacttagcaggtttattccacttgaattatctaaacgtattaaagcggtttcagttactacatacgtttgaaagttataaaattgcatt

SEQ ID NO: 245359 - DNA, 201 bp, Homo sapiens
ataagataaacatacaaaatcaattctattcctgtataaaaataaaatcatatttacaacatataacaaggtgaaatatgtagatgtaaatctaacaacayttgtatgtacaagacttgtatgctgaaaactatgcagtgccatgagagaaatcaaataacatctaaataagtggagatgcatactgtgttcatggattgg

SEQ ID NO: 245360 - DNA, 201 bp, Homo sapiens
aaaacaggctgctgttcttgttcttcttcccagaaccagaccttcattaacatagaactgatcttcattaatgcagaaccagacttcattaataggaccakatcttattaagatatatgtgtagggcccttaaaaaacaaaaaaagctgtcttgtctttcaggggtttgaggaatctgtttccttccactgatgtacttta

SEQ ID NO: 245361 - DNA, 201 bp, Homo sapiens; identical to SEQ ID NO: 47872

SEQ ID NO: 245362 - DNA, 201 bp, Homo sapiens
ggtttgaggaatctgtttccttccactgatgtactttaattttctcttgatagacacaagcagtttggatggacaccccaagggaggtcagttatggcacrggcattgaaagagctgtttgctgacccatgggtgtccttgcttgtaggctcaggaatccatgtgaggaactccctcttgtgtgtgaggttctttcagtct

SEQ ID NO: 245363 - DNA, 201 bp, Homo sapiens
gctgacttcaaaaatgaaaacatggacccacctggtgagtgttacagttcttacagatggtgtgtccatagtttgttccttaagattttcagatgtgtccrgagtttcttcattctgatgggttcacgatcttaatgactccaggggtgaagctgcagaccttggcaatgactgttacagctcttaaaggtggcatgtctg

SEQ ID NO: 245364 - DNA, 201 bp, Homo sapiens
taacagagaaaataacagcatttccagaaggccttgtagttctgctttttcactgactcaaggttcccagagttcccttactcagtgtttgcaaagaagayaccaaggggatgaaaagctacctctacgaaaagctatcaagctgcaggcttttggaagattatagtcagttattttttaaaaaattccaccaagcatttc

SEQ ID NO: 245365 - DNA, 201 bp, Homo sapiens
gctttcactaaaagtaatttcattcacactatctgggcctctgtcttcgcacctggaaaatgttcaaaattggacattgttacattaatttttttttttttgccttcctaaaagtcacctcatcgttccctctctagtattgactacaaaaagacttagtagctgacgtgccatctgacttttttccaggtcagtcaaaaa

SEQ ID NO: 245366 - DNA, 201 bp, Homo sapiens
cttagaactgtggtttccaaattgtgctctaagcctttgctattccaagtatggtcctcagagcagcagaatcgacatcacctgggggctttttagaaccmtgaagcctcagtcccccgaccaccccttcagacctattgagtcagaatttgtattttaacacatctacaggggatgcctgttcacattagagtttgagaa

SEQ ID NO: 245367 - DNA, 201 bp, Homo sapiens
tctttgaagcaattgtgaatgggagttcactcatgatttggctctctgtttgtctgttattggtgtataagaatgcttgtgatttttgtacattgattttrtatcctgagactttgctgaagttgcttatcagcttaaggagattttgggctgaaacagtggggttttctagatatacaatcatgtcatctgcaaacaggg

SEQ ID NO: 245368 - DNA, 201 bp, Homo sapiens
ctctccctctctattttttttctctctctccctctctcctcacatggcttttgtcctccagggtgcttccatctggcttgggcttcttactacatggtggkctcagggcaattgcacttgtctggtttcttaggtcaaatgttctaagagacaggaattaaaagctgctagtctcttaattatggcctgggtccagaagtg

SEQ ID NO: 245369 - DNA, 201 bp, Homo sapiens
ggtattttattctctttgaagcaattgtgaatgggagttcactcatgatttggctctctgtttgtctgttattggtgtataagaatgcttgtgatttttgyacattgattttatatcctgagactttgctgaagttgcttatcagcttaaggagattttgggctgaaacagtggggttttctagatatacaatcatgtcat

SEQ ID NO: 245370 - DNA, 201 bp, Homo sapiens
ttgtagggaaatcacgctggtggcgaggttcaaattccttctggatagaggaaactctcctggtgtcccactggtctggatcctgattcttgcctttcctrgcgtgacttggatctgggtcagcaattcccatccttggatagggtggtgggcagggagggcccggctgagtgaagatgtggctattgctgcgtgtgaaat

SEQ ID NO: 245371 - DNA, 201 bp, Homo sapiens
cttccaagatagtatctttgctcacgttaggagtcttggtgctttttgtttcttgctctctccctctctattttttttctctctctccctctctcctcacrtggcttttgtcctccagggtgcttccatctggcttgggcttcttactacatggtgggctcagggcaattgcacttgtctggtttcttaggtcaaatgttc

SEQ ID NO: 245372 - DNA, 201 bp, Homo sapiens
gtatacatgtgccatgctggtgtgctgcacccattaactcgtcatttagcattaggtatatctcctaatgctatccctcccccctcccaccaccccacaayagtccctagagtgtgatgttccccttcctgtgtccatgtgttttcattgttcaattcccacctatgagtgagaacatgtggtgtttggttttctgtcctt

SEQ ID NO: 245373 - DNA, 201 bp, Homo sapiens
tattctgtaatatttattctttttattgagaagagttaggaaataaagttacttagaccttttgctgaccaagcatttgaagcccacaattcaatctagamggcctgtatctgctttcattgtacttgacttgggtgttatggaattaaacagattacatgcagattaaaaaaatcattaatgcaattaaaatttgccagt

SEQ ID NO: 245374 - DNA, 201 bp, Homo sapiens
tttcttcctttttttcttcatgttttaagtgatttatgatgatgcatttattagtagtggtttccagtgcgagacagtaatggtggaaggtaggctatcaytgaaatgctattcaaatttataataaaattgaatgatgtaagttttcctgccaatattttgacataaacacattttcttttttttattttttattttttt

SEQ ID NO: 245375 - DNA, 201 bp, Homo sapiens
tgattttcacacaatgtcaatattgcctaaggacacatttattataaggtgactccattgttatattctgtaatatttattctttttattgagaagagttwggaaataaagttacttagaccttttgctgaccaagcatttgaagcccacaattcaatctagacggcctgtatctgctttcattgtacttgacttgggtgt

SEQ ID NO: 245376 - DNA, 201 bp, Homo sapiens
aaagacaggcgagtggctcactggagtgaggtcagaaccgcttgtgcatagagggattttcctctgctttgcaaacacccagcgacatcacacagccttgsgagcgccatcaattgcaattgttgccagcaaagcgtcgtctgatgggatattgatttggcaccgtgcttagcagcagctcggccaaatggggcctcctca

SEQ ID NO: 245377 - DNA, 201 bp, Homo sapiens
tatagtccctgcttgctggactggtttgagaccatgaggcatgccctctgtttctgcttgctgtatacttccatatttcttcctgctgacatttcacccakcaatcaagactacctctttcacaaagcatcccttgtatttgttgttaaaataacactttaggtgcatgtcttaacttcctttttagaatttgcgctcttt

SEQ ID NO: 245378 - DNA, 201 bp, Homo sapiens
agagccctttaggcactcagcataattctatgctctgatttgggaagcctgtgaaaagaagggagataaatgtaggagtgttgttattttactattttttwatttatgttattaacagtaaggctgctggctcacttagctccatgcattattttcagctgtgtagtatttaatccaagctcccttgtcttcatttccatg

SEQ ID NO: 245379 - DNA, 201 bp, Homo sapiens
ctccccctgggtatcatcttttctaaaatataaattttattactcttcccacttaactctgtccttagcacttgccagccttatttcctgctacctcactytatagtccctgcttgctggactggtttgagaccatgaggcatgccctctgtttctgcttgctgtatacttccatatttcttcctgctgacatttcaccca

SEQ ID NO: 245380 - DNA, 201 bp, Homo sapiens
ctgtggtgaaagctgtagtttgaagttagacatctgtactgactagtggatcactttgggccaattgcttgcctttctaaactttccttaggaaaaaaaaagtaataatgctgaattcacaactacaagttgtgtagattcagcaagacagtgctggtaagaatactcaacatagtgccttgcacacagtggatgtgcaat

SEQ ID NO: 245381 - DNA, 201 bp, Homo sapiens
gatctccgcattgagttacaacttcctgagactgcttaaggatgtgtgtaagcaagtcactgggctcagtttttagggagttattgataaaaaggactttytttgaaagataattttagatatttccaaggattattgtgatatccagttcataactatccagttttactttcttttctcctgccttttgggcaatggctc

SEQ ID NO: 245382 - DNA, 201 bp, Homo sapiens
ggcctgggaaatacttttaacttttactgtgtcctggatggattttctaattttcttatttttttctatttctccttctgtgtgtgtgtgtgtgtgtgtgkggttttttttctgtactctatggaagactttctcaacctgtatttcaatgttttgactgaatttttaattgcttttatcatattcttaatttctaagact

SEQ ID NO: 245383 - DNA, 201 bp, Homo sapiens
gttgggtctgtttgctgtcatgcaacatggagctattggagataaatctcaccacctccccctcactggcccccggctcctcccccccccccccaccgccrttccgtcagaagtagttggcccctgaattggtctgggtaacaggattaccttctcctactaatcaattcccaagagccttactttccttaaaagcttaat

SEQ ID NO: 245384 - DNA, 201 bp, Homo sapiens
ctgttccctggtggagagggtatgctttgcctggggggaaacccacttgtctgggctgcccagattcctcagaactaccaagaggaaaggctaagtatgayggtctgcagagactgcggccacccttccccctaggggctcaggcccagggagatcagggttctgtccctgagcctctggctggagttgctggagttcctt

SEQ ID NO: 245385 - DNA, 201 bp, Homo sapiens
ggactcacttggactagcggagcttgggacagatgcttatcccttaacagttcctgaagagtattctactgccagaggaaaggaggagtggacgccaggtrgcctgtatgcagtaagagtccactccatctatggaccccttggttaccttttccaggcctttgtagctcactcctcctcaggtaaaatttagagaagtga

SEQ ID NO: 245386 - DNA, 201 bp, Homo sapiens
cagccaatgccagagaacattaattcttttggagagcattgttcctataaagtgaaactactccaccaaattaacatgccaaaaaaacaagaggagagctstttcaggcaaagaagtagaaatcaattacctgaaaaaatttcaacggtatttattttaggtgattttatttccagattaaacaaataaaactcctgtgtc

SEQ ID NO: 245387 - DNA, 201 bp, Homo sapiens
ttagagtgagagctcactatcaccaatggggttggcccaagtcattcataaggtatctgcccccatgacccaaacacctcccaccagtccccacctccaayactgaggattacaattcaacatgagagctgggcagggacgagtatccagactgtatatcaagtgtcatcctaaaactgttacacaatgcacttgtttatg

SEQ ID NO: 245388 - DNA, 201 bp, Homo sapiens
actcttagcacatgcatcctaactttaatttatgttagttacgctgaccggattgtaaacacctctgagacaagggactgagtcttattttattattatgsgtgtctccaggcctagcattgggcctgctgcagagtgggtgctggcaaatgaatgaatgaataattgaatgaatgtgcgcttgtatcattgaaagctctc

SEQ ID NO: 245389 - DNA, 201 bp, Homo sapiens
ataattcactctggcagaagaagtgacccatttaataattcaatttccagtctggggcctatagagttaggttttttttcccccatggttcatatgtttgrgattgctttaatttcttttgaatttaacacttagaccacctgagtgaatattaaaaatgtcaaaaaatgaattttaggttctttggatcaccccacttga

SEQ ID NO: 245390 - DNA, 201 bp, Homo sapiens
ctaattactactttaaaatagtttctaaacccagatccaacctaaataaaatgaatcagtctctccaggtggggcttgagcatttgcgatttctaaaaacytcccccggtgattctaatgtgcagccagagctggatgccattaatctgacattttgctctagtttggggagatttcctagtttcccagattctgcactgc

SEQ ID NO: 245391 - DNA, 201 bp, Homo sapiens
gtagctagctgcttggtgttttgaaatatccatgtttccacttagaagactggtgttttgtttattttaatctgtcatgtgcagaaatgaggcttaactgkgatagatttcctatttgtgtgtggaggtgtgagttggaaggtgtacacttggtctgttcttgtaagggctgaggtgggcagagcaaagggacctggagat

SEQ ID NO: 245392 - DNA, 201 bp, Homo sapiens
tttgttaggaccttgtttccaaagctttagggtagccagagctcagatcacttttgctttactgtgggatatttaccttgtgctttgggtgaacagcttargtagctagctgcttggtgttttgaaatatccatgtttccacttagaagactggtgttttgtttattttaatctgtcatgtgcagaaatgaggcttaactg

SEQ ID NO: 245393 - DNA, 201 bp, Homo sapiens
tatctggccccttttagtttatgccattttcttgtaatgctaaaaagagcaaactaggttaacacacacatcgcatgcacacatatgtgctggcttgcacrtcattgaactgcagcaggatttttggggaaggcagcttttggatggtctccaggagggtccaagagcctcctaaaatatatgcaaatcatagtataacct

SEQ ID NO: 245394 - DNA, 201 bp, Homo sapiens
tggaaggcatgtatgacctctgttcgacccaatctcacatgtactggcaaatcataagtattcatgaggatcaagtataattattgtttaatataaggggsacttattgatcattctgtctccatgcatgtgcttacattctcaactacaatttaatttttatttaattttaacgagcagaatttggaaaagcacatctgt

SEQ ID NO: 245395 - DNA, 201 bp, Homo sapiens
ttccttcaggagttcttgcaaggcaggcctggtggtgacgaaatccctcagcctttgcttgtctggaatcacttcacttatgaagcttagtttggctggayatgaaactctgggttgaaatttcttcttttaagaatgttgaaaattggcccccaattttttctggcttgcttgtagggtttctgctgaaaggtctgttgt

SEQ ID NO: 245396 - DNA, 201 bp, Homo sapiens
gaattccctaaggagagagtatggttgggtctgtttgctgtcatgcaacatggagctattggagataaatctcaccacctccccctcactggcccccggcycctcccccccccccccaccgccgttccgtcagaagtagttggcccctgaattggtctgggtaacaggattaccttctcctactaatcaattcccaagagc

SEQ ID NO: 245397 - DNA, 201 bp, Homo sapiens
cattttttcttttaaaatgcaccaacaaggtaaggttatatgattaaaagaaaataaaacaaaacatccctctcaccatgggatgctttgtctggtggctyagagcattttctctctcatttatagttctccaagtatcggcaatgaagttggagccgtgatctactgacctttgagggccagtcagtgggcagcagacaa

SEQ ID NO: 245398 - DNA, 201 bp, Homo sapiens
agctcttttaattgtgtttttagggtgtcaatttgagatctttgtagctttatgatgtgggcatttagtgctataaatttccctcttaaccctgctttagytgtgtcccagagattctggtatgctgtgtatttgttttcattggtttcaaagaacttcttgatttctgccttaatttcattatttacccaggagtcattc

SEQ ID NO: 245399 - DNA, 201 bp, Homo sapiens
agtaggtaagatacttacttaactttcagcaatttgaaggctagtggcagagactgatatgagtacctggaggtgatgaatatagttccagggggatgcgraggaagctacgtctacctgggagggccagagaaggtgttacagactacagtgaattgtgtattcattctaggagactcattagagtcataaggaagaaac

SEQ ID NO: 245400 - DNA, 201 bp, Homo sapiens
taccgtcattgaagaaaatttaaaaaatgataaacataagaaggaaaaatgttgccaataatgctaccactcagggttaaccaagattacctctccttccwgtctttattaaatactttttctctagatttgaattagattaatactttatgtagagttttgtttccttccttttaaaacttaccactacattatgagact

SEQ ID NO: 245401 - DNA, 201 bp, Homo sapiens
ttgcttctctagctcttttaattgtgtttttagggtgtcaatttgagatctttgtagctttatgatgtgggcatttagtgctataaatttccctcttaacmctgctttagctgtgtcccagagattctggtatgctgtgtatttgttttcattggtttcaaagaacttcttgatttctgccttaatttcattatttaccca

SEQ ID NO: 245402 - DNA, 201 bp, Homo sapiens
aaatgttgccaataatgctaccactcagggttaaccaagattacctctccttcctgtctttattaaatactttttctctagatttgaattagattaatacyttatgtagagttttgtttccttccttttaaaacttaccactacattatgagactttcttcatgttattaaatacttcaacaaatatttcagtaattgact

SEQ ID NO: 245403 - DNA, 201 bp, Homo sapiens
tgcctccggagcgcacctggggccatggtttgccgcgatcggagtccgctctaagtcggagtctgggggcgcagaagggggagcgcgccgagaaagtgccsggcaaacgcgcgccgcgcctggctgggcatcgcgagctgggcgaggagacggggaggggacagcccaaactatctcagcttcaccgccagtggtcaccta

SEQ ID NO: 245404 - DNA, 201 bp, Homo sapiens
atccccgtcatcattttttattgtgtctattttattcttgtctcttttcttctttattagtctagctagcagtctatctattttgttaatttcttaaaaamcagctcctggattcatggattttttggagggttttccatgtctctgtctccttcaattctgctctgatcgtggttatttcttgtcttctgctagcttttg

SEQ ID NO: 245405 - DNA, 201 bp, Homo sapiens
cggctcccgctttgctcagccgccgcttttctctcccttctcactttctctcctccccacccagccctccttttcacctccaaaccctttagctgcgcgcygatcgcttctgtggctttgtttgggggtagggggagaatacgaatagacccgaggtgctttctcttggagctggagtccaatcccaatccctatctctat

SEQ ID NO: 245406 - DNA, 201 bp, Homo sapiens
tcatggaggataagttttttgatgtgccagtggtttgccggtgttttattgaggttttcacattgatgttcatcagggatattggtctgaagtttttttttgtttattgtgtctctgccaggttttggtatcaggatgatgctggctttataaaatgagttagaaataagtctcttcttttagttgtttggaatagtttca

SEQ ID NO: 245407 - DNA, 201 bp, Homo sapiens
tattgatctgaagaaacttacctcctcactattggtatattttctccttttcttccgcacaagagagagagatgggggtgggggggtgaaagggagggagrgagggaatgagggaggagagagagcgcgagcgagagagcccctttagcaagaaaacatcaagagtttttgagtgtggtgtgtggttcccttcgtccccat

SEQ ID NO: 245408 - DNA, 201 bp, Homo sapiens
ttgcatatgtttaaccagccttgcatcccagggatgaagccaacttgatcatggaggataagttttttgatgtgccagtggtttgccggtgttttattgargttttcacattgatgttcatcagggatattggtctgaagtttttttttgtttattgtgtctctgccaggttttggtatcaggatgatgctggctttataa

SEQ ID NO: 245409 - DNA, 201 bp, Homo sapiens
tgaaactttgtcaccatccacagccgcccagccagcacccaggagggaccctcttgagtagcgtgtgatattgatctgaagaaacttacctcctcactatkggtatattttctccttttcttccgcacaagagagagagatgggggtgggggggtgaaagggagggagggagggaatgagggaggagagagagcgcgagcg

SEQ ID NO: 245410 - DNA, 201 bp, Homo sapiens
tatttgaatacgctttattcctttctcttgcctaattgccctggccagaacttccaatactgcgttgaataggtgtggtaagagagggcatccttgtcttktaccagttttctaaaggaatgcttaaagcttttgcccatttaatatgatattggctgtgggtttgtaataaatagcttttattgttttgagatatgttca

SEQ ID NO: 245411 - DNA, 201 bp, Homo sapiens
ccagtctttggttcctctcttcatctgtcctccctccctgactcccaacttcatacctggtcccgttcttccagagcattctaccttattgacattgttcwtgaactaggggaaccctgacagtgagttgcagctttgtggagctgaaactttgtcaccatccacagccgcccagccagcacccaggagggaccctcttga

SEQ ID NO: 245412 - DNA, 201 bp, Homo sapiens
agacacaatttgacttccttgcttcgtatttgaatacgctttattcctttctcttgcctaattgccctggccagaacttccaatactgcgttgaataggtrtggtaagagagggcatccttgtcttgtaccagttttctaaaggaatgcttaaagcttttgcccatttaatatgatattggctgtgggtttgtaataaata

SEQ ID NO: 245413 - DNA, 201 bp, Homo sapiens
gtttgtgtaaaggaatgcttgtgatttttgcacattgattttgtatcctgagactttgctgaagttgcttatcagcttaaggagtttttgggctgcgatgrtggggttttctaaatatagaatcacgtcatcacaaacagacacaatttgacttccttgcttcgtatttgaatacgctttattcctttctcttgcctaatt

SEQ ID NO: 245414 - DNA, 201 bp, Homo sapiens
accaggccagagggcacttgggcttatatctggcaatgtgaaattcaggaggaaaccatggctagattttccaaatcatgaacattcatgcagtgcacctyacacacttattagaacaaggaaggaacaatttcatacgggttttgtgtcaaatgttggtctttgtcatggtacaggtatgaaatgagtgcccaataaatg

SEQ ID NO: 245415 - DNA, 201 bp, Homo sapiens
attctgtgaagtatgttagtggtagtttgatgggaataacattgaatctataaactactttggtcaatatggccattttcacgctattgattcttcctacscatgaggatggaatgtttttccatttgtttgtgtcctctcatttccttgagcagtggtttgtagttctccttgaagaagtcctccatgtcccttgttagc

SEQ ID NO: 245416 - DNA, 201 bp, Homo sapiens
ttgacccatgggccatagtttgccaaccccaggtctagtcagtgggagaaaccaataaatgcaaataagctagtcacaaagaaggatatgaattctaccayagggaaacaaagacccagagagggcagatgtggaaataataattcattttgaagttggttaaggggaaagcctgaaagaaacaaaacaggaacctgagtc

SEQ ID NO: 245417 - DNA, 201 bp, Homo sapiens
cctcccttcctccatatattcatgtgagtaggtacctgtttcacagaatgatatctcatttatggtgttgttagaagtattatcctttgttttgtgcatcytttgcttaaaaatatccctacagtatttattgtataattgaatcaaataaagtgactcaaaatgccactttgttaggattaacagttttcaaaagacttt

SEQ ID NO: 245418 - DNA, 201 bp, Homo sapiens
ttaggggatgacttacttttgtttacagggaagcaagattattgcttcaaaattattgattattcaagggtattcaataatccagtatatgactcaggtayatacctaaatgttaataatataaatgagatacaattttgacttgactcttttattattggtagttattataacttactctgcattttggtacaagattat

SEQ ID NO: 245419 - DNA, 201 bp, Homo sapiens
taaatctaaaattattctaaaattaaaagtttcttcaaaaacgttaaggagcttgttcctgtattttttaagtagatgatggtgattatttaatcattacrgtttttagatatcatggatacattgtggtatttagacttcactggttaaactaaaaatgtaatttttagttgtcgatgtttacaagatgctggaaatata

SEQ ID NO: 245420 - DNA, 201 bp, Homo sapiens
aaattattgattattcaagggtattcaataatccagtatatgactcaggtacatacctaaatgttaataatataaatgagatacaattttgacttgactcytttattattggtagttattataacttactctgcattttggtacaagattattttagatatgggaggataggaggaagggtgtgaattcagattgcatgtg

SEQ ID NO: 245421 - DNA, 201 bp, Homo sapiens
aactctgtattttctttgcaatttttctgtaaatctaaaattattctaaaattaaaagtttcttcaaaaacgttaaggagcttgttcctgtattttttaartagatgatggtgattatttaatcattacagtttttagatatcatggatacattgtggtatttagacttcactggttaaactaaaaatgtaatttttagtt

SEQ ID NO: 245422 - DNA, 201 bp, Homo sapiens
aggagaaataaaggcttcttcagacaaagaaaaactgagggaatccacctctagaagactttttcttcaagagatgttaaaagccaggagaacaatgatayaggttggagactcagatctatttaaagaagaaagaacatcagagaagaaataaatgagtataaaataaaatctttttttcttattttttaattgattcaa

SEQ ID NO: 245423 - DNA, 201 bp, Homo sapiens
ggggtgtaagagttgaaatccacaccaacctttccagcaggcagagggacagaggctgaggttctgtgttcaggaagtggggaaacccagttctcccacayaccgggtttacccaggggtgactttcaagactgaggggagatgtagctgtctttgggatcagtgttatgttaagtaaaacaaaaagtcttcgccatggag

SEQ ID NO: 245424 - DNA, 201 bp, Homo sapiens
aaaacctctcttcctcctcatagagtaacgttttgctaaaaatgggtaactctcactgggtgcagtggctcacgcctgtaataccagtactttgggaggcygaggctggtgaattgcttgaggccaggagttcgagaccagcctgggcaacatggtgaaatcccgtctctactaaaaatacaaaaattagctgggcatggt

SEQ ID NO: 245425 - DNA, 201 bp, Homo sapiens
agggacagatccttggcaatcttcacagtacataaaatccaggaatagatcagataattaattgttagttatagaggaatagatccattaaaaagcacatsaaaattaaaagctgtaaaatggaaaggaaaccatgaaagcaaattgggttagctagggtaatgcaagctaccttagcaaacaccagacaccagtggctta

SEQ ID NO: 245426 - DNA, 201 bp, Homo sapiens
ctattccagtaagccagagggacagatccttggcaatcttcacagtacataaaatccaggaatagatcagataattaattgttagttatagaggaatagayccattaaaaagcacatcaaaattaaaagctgtaaaatggaaaggaaaccatgaaagcaaattgggttagctagggtaatgcaagctaccttagcaaacac

SEQ ID NO: 245427 - DNA, 201 bp, Homo sapiens
ctatggtggttttgtgtgataaaccaagctgttacagataagtggagaaaagaatagatagataactattccagtaagccagagggacagatccttggcartcttcacagtacataaaatccaggaatagatcagataattaattgttagttatagaggaatagatccattaaaaagcacatcaaaattaaaagctgtaaa

SEQ ID NO: 245428 - DNA, 201 bp, Homo sapiens
gccaataatgctaccactcagggttaaccaagattacctctccttcctgtctttattaaatactttttctctagatttgaattagattaatactttatgtrgagttttgtttccttccttttaaaacttaccactacattatgagactttcttcatgttattaaatacttcaacaaatatttcagtaattgactaacattt

SEQ ID NO: 245429 - DNA, 201 bp, Homo sapiens
aatttagcatttatataacatgcatttttataagtgaccttacattcttgtacataagtcttctgagtctgtaagtacggatttaccatagattccactargtaagattgctggctcaaagaatgcagacatatataggttcctgacacattattacctaagtgattttcagaaagatggtattaatgtatggttttagtg

SEQ ID NO: 245430 - DNA, 201 bp, Homo sapiens
aagaatgcagacatatataggttcctgacacattattacctaagtgattttcagaaagatggtattaatgtatggttttagtgtgagtttgtccatttcaygatccccttgctaatgctaaacattattttcaatattttactgatttgctaagagaaaaatgatatctacatttggtttgaatgtatctttctattaaaa

SEQ ID NO: 245431 - DNA, 201 bp, Homo sapiens
taagcagtaaatgagaggtgggaaaagaaagcagtttagagcaataataagaaagcctaatggtggttcgggactatattacagcagcctaattaaaatgmtttataactgcacagaaagtctctttcacttccccttgtttattgagtaacagctcacgtcagccattactccagatacaacccatgggaaattacctaa

SEQ ID NO: 245432 - DNA, 201 bp, Homo sapiens
gttttctctaattaaagagaaaaacatctagtagttttctttttttttaaattaaactttaagttctgggttacatgtgcagaacatgcaggtttgttacrtaggtatacatgtaccatggtggcttgctgcacccatcaacccatcatctaggttttaagccctgtatgcattaggtatttgtcctaatgctttccctct

SEQ ID NO: 245433 - DNA, 201 bp, Homo sapiens
ttcagaaagatggtattaatgtatggttttagtgtgagtttgtccatttcatgatccccttgctaatgctaaacattattttcaatattttactgatttgmtaagagaaaaatgatatctacatttggtttgaatgtatctttctattaaaaaaacagtttttttagtgttaattcacctttacatttcttctttggggaa

SEQ ID NO: 245434 - DNA, 201 bp, Homo sapiens
taagcccctgactgaggctgccgcctttctttcagagatgtcctgccaagtgagtaggatttagagaggcagtccagccccaggacctttgccacactgcrgtgagttccacacagtcagagttaacactgtgaggggtttaaccacctactcaggtctcagtaatggcagatgcacctccccacaccaagctcaatcgtc

SEQ ID NO: 245435 - DNA, 201 bp, Homo sapiens
tgtctgtacatcctatatgaacttttcaatctaaaaatacagcttttagccaggcacagttgctcacgcctataatcccagaattttgggaggcccagatkggtggattgcttgagctcagaagttagagaccagcctgggcgacatggtgagactcccatctctactaaaaatacaaaaaaaaaaaaaaaatagctgggc

SEQ ID NO: 245436 - DNA, 201 bp, Homo sapiens
gagatgtcctgccaagtgagtaggatttagagaggcagtccagccccaggacctttgccacactgcggtgagttccacacagtcagagttaacactgtgaggggtttaaccacctactcaggtctcagtaatggcagatgcacctccccacaccaagctcaatcgtcccaggtcaacttcagattgctgtgctggcagtga

SEQ ID NO: 245437 - DNA, 201 bp, Homo sapiens
tgtcctgccaagtgagtaggatttagagaggcagtccagccccaggacctttgccacactgcggtgagttccacacagtcagagttaacactgtgaggggtttaaccacctactcaggtctcagtaatggcagatgcacctccccacaccaagctcaatcgtcccaggtcaacttcagattgctgtgctggcagtgagaat

SEQ ID NO: 245438 - DNA, 201 bp, Homo sapiens
gtcctgccaagtgagtaggatttagagaggcagtccagccccaggacctttgccacactgcggtgagttccacacagtcagagttaacactgtgaggggtwtaaccacctactcaggtctcagtaatggcagatgcacctccccacaccaagctcaatcgtcccaggtcaacttcagattgctgtgctggcagtgagaatt

SEQ ID NO: 245439 - DNA, 201 bp, Homo sapiens
ccctgtactgtgggggtgacgcccaggcaacttcctatttagaaaacttcccctgtgatcctaaaatgtagcattgctcagtggcacatcggtcccaacayatcaaccttccagccagaggaactgcgtactgtcacacacacaaaggcaaaggcgatgctcccagcttttctggaccacagaatatgcaccaccctgcaa

SEQ ID NO: 245440 - DNA, 201 bp, Homo sapiens
acgtacacacccacatacatatatacaaaaaatgtaaaattttttggcaggacctctcagttctccctttgtccctttattctgctctctccttattgatyccatcctggggtttgacttttcattgcctcgtgacccattaaagggtttattagaacaaagataatccccttcctcataggaattctgttgccagttgct

SEQ ID NO: 245441 - DNA, 201 bp, Homo sapiens
agacttttttaaagtatccccaaggggaagaagtgtccaacttgctgataatcaaccatttatttgtggcaggggtggggatccaggtttggttcttctcyactagtggtcggggattgtacgactggttggattcagctgtgggaagtgcccagtcgttgaaaggaggagggtcggaccccttccgatagtttaggtata

SEQ ID NO: 245442 - DNA, 201 bp, Homo sapiens
gagaatggagagagagagacagagagagagagagagaacaaaagataggctggttgtggcagtgaaaggggagaaaatcatagatacctttgggagaaatygttatatttatgaaaaataattaaacaattgagagttaaaactcctaaaagagcattgcttttatgaaaatcaaacatggagcataattataaaataaag

SEQ ID NO: 245443 - DNA, 201 bp, Homo sapiens
ttcttcatttttgtactattggagaaaagatactggaagtttcttgaatatttagaagccagagttttatttttagttatgaaactctggacattatagayagataacagtataccatcagttttcttttgccatttactctagattttacagagatcactagctataagttttgtcttgaggctggaaatttgaactctc

SEQ ID NO: 245444 - DNA, 201 bp, Homo sapiens
gtactggtttgctttcagaaagaggcccaagagatcagtgggaacaaagtatttcttcatttttgtactattggagaaaagatactggaagtttcttgaayatttagaagccagagttttatttttagttatgaaactctggacattatagatagataacagtataccatcagttttcttttgccatttactctagatttt

SEQ ID NO: 245445 - DNA, 201 bp, Homo sapiens
aatggcaggcgcccctcccccagcctcactgctgccttgcagtttgatctcagattgctgtgctagcagtgagcgaggctccgtgggcataggaccctccragccaggtgtggggtataatctcctggtgtgccgtttgttaagcccattggaaaagcgcagtattagggtgggagtgaccccattttccaggtgccatct

SEQ ID NO: 245446 - DNA, 201 bp, Homo sapiens
gactcctggatacagaggatgagctcagtgacattcagtcagatgctgtgccttctgaggtccgagactggctggcctccaccttcacgcggcagatgggkatgatgctcaggaggagcgacgagaagccccggttcaagagcatcgttcacgcagtgcaggctgggatatttgtggagaggtaaagatgtcattcattgt

SEQ ID NO: 245447 - DNA, 201 bp, Homo sapiens
ccctccgcccgagacttttctgtattgttggttgttttcactatttgagaagttaaagtattagaatttagtagatattggggctcgacataaagatatcmttctggtttcatattaaagcatctgtgtttatattggcttcttatctgcaaactgtccactgactcaatgatatgtcagctcgtttgttttggtgggata

SEQ ID NO: 245448 - DNA, 201 bp, Homo sapiens
tgtcacttttcctccctccgcccgagacttttctgtattgttggttgttttcactatttgagaagttaaagtattagaatttagtagatattggggctcgrcataaagatatccttctggtttcatattaaagcatctgtgtttatattggcttcttatctgcaaactgtccactgactcaatgatatgtcagctcgtttg

SEQ ID NO: 245449 - DNA, 201 bp, Homo sapiens
tgtctctctgttgcttaagtcaccatgagttccttttctgtcacctcaaatcaagagtctgaaacactagactctttatcactgcccaccatggcaagccstttatgcttgtgtgtttctgctcattgcctgggatgcccatctccatctctcaattcagcagcattctatttatctgtccaggtctgggtcagatatccc

SEQ ID NO: 245450 - DNA, 201 bp, Homo sapiens
aggggctgctgtgcctggtggtgctacttctgatgtcctaaatgtgtctccagaatttccccctcaacagactctcttcatgatgccactgccaagtcgtkaaaaatggatcaagggcataggctggcttcatggaggtcaaagcaagtagtcatcatctcatagctgaaagaaaaaaagctttgctctttctgatttgcc

SEQ ID NO: 245451 - DNA, 201 bp, Homo sapiens
tcctgccaagtgagtaggatttagagaggcagtccagccccaggacctttgccacactgcggtgagttccacacagtcagagttaacactgtgaggggttwaaccacctactcaggtctcagtaatggcagatgcacctccccacaccaagctcaatcgtcccaggtcaacttcagattgctgtgctggcagtgagaattt

SEQ ID NO: 245452 - DNA, 201 bp, Homo sapiens
atcttttctttttttaagagtttttcctaagcatcctgtatcaatttccttcattctctttaaagactgaatggaactttattgtatgtgtgaaccactgycttccctagtgcctcacatatgacagacaatcaatatttgttgacttaacaaattaaatatttaactattctccccactgatgggtaggggcatctggct

SEQ ID NO: 245453 - DNA, 201 bp, Homo sapiens
aaataattctgtacaactgttccccataccaaaacaaaaaagtagccacgaagaaaaatgatgagagagagagagagaaagagagaatggagagagagagrcagagagagagagagagaacaaaagataggctggttgtggcagtgaaaggggagaaaatcatagatacctttgggagaaattgttatatttatgaaaaat

SEQ ID NO: 245454 - DNA, 201 bp, Homo sapiens
aatttgaaaggggcatctggaatcactaggctttgtgtggcagctacataaagcagaaagttggcagctgcagcttgtatctgacatgggtgacacccaarcaggagatgggtatatacaaagctggtcaccacttaactctttttaacaataagttcttgtagtctttctattgtcatgtttttttctttttaaagaaac

SEQ ID NO: 245455 - DNA, 201 bp, Homo sapiens
cttgggcagaatagacaaacatgagaaagtatgtttccatagcttctttttatagttcatttttatttgtgcaaaagaatgaaattctagtagggtctaaygctcaacaaatgtatatgttttcaaggcatagggttatagggctttctgcgacctcactggggtggggaataatgcctagtccagtataaggcagttttc

SEQ ID NO: 245456 - DNA, 201 bp, Homo sapiens
gttgttttaagttatttcctatggcatttaggtaagtggcagaggacaggagtgacatggaggaggcaggtgtatgaaaaggacacagagatgagtatgcygttcgaatacatgggtgtgatgaactgaaatgaagtttttttaattcaaatgagtttttagggctcatgatccattgggacatgtagagaaagtactgta

SEQ ID NO: 245457 - DNA, 201 bp, Homo sapiens
tgggggacagaattgcaaccccccttgagaatcactcccttaccatgagactataatggggaacatattcaaggatccgtttaaagaaagcctttgggcaraatgaactgggtaatagattaatctgctatttacataggcctgctcatactaagggtttacacattcttttcattactgtacctgcctttgtccttctct

SEQ ID NO: 245458 - DNA, 201 bp, Homo sapiens
tggggctgtcctgtgtattgtggaatgtttagcagcatccctgcatacctattagatgccagtagcaccttcctgttgttaacaaccgaaatgtcttcagrcattgctaatttccggtgggggacagaattgcaaccccccttgagaatcactcccttaccatgagactataatggggaacatattcaaggatccgtttaa

SEQ ID NO: 245459 - DNA, 201 bp, Homo sapiens
cattggattgcaaacagagattccataattcttcatctattatggaagcatgccgttatatattattcagttacccagattgtatgttaatttgttatgtrctaacatgttgattttccttctaagaaaactgtctatagttgatatatattttccaaccttcttaaacagtgttctaagcagagtttagtattttcttga

SEQ ID NO: 245460 - DNA, 201 bp, Homo sapiens
tagcagatatctagagtaataattcttaaatttagtgtttctgaatcattgaaaggcttgttaaaacacagcttgttgagccttaaacccagactctctgwttcagtaggtctgggatgggtcctgaaagtctgcatttctaaaaaggtcctaggtaatgatgcttctggtcctgggaccaccctttgagaaccactggct

SEQ ID NO: 245461 - DNA, 201 bp, Homo sapiens
acctcccaaaggccccacctccaaatgccatcaacatatgaatttgaggattgttccaacatatgaagtttgtgagacagatttaaactatagcagatatstagagtaataattcttaaatttagtgtttctgaatcattgaaaggcttgttaaaacacagcttgttgagccttaaacccagactctctgattcagtaggt

SEQ ID NO: 245462 - DNA, 201 bp, Homo sapiens
aggcaatttggatacttttattataagtcagtggtggcttttttcactattctaactttgttattctaaccttatgttaaatggatttatactgggcttaytcattaatttatttaatagttgttgagcaactactgtttgtaactcactgggtggttgataaagataagatccttgttctaaaggagcacatgttttagt

SEQ ID NO: 245463 - DNA, 201 bp, Homo sapiens
gtttgagggtgagatgaattaatatgtgaaaaacacctagagtagtacgtagcacattttagtaaaataatgactatgtatttacttgaattatttaattmttataacctccatataatgagttacgggtgatttttattccattttagagatagaaaccatggcatggataactggtccaattctcatggttggtaagta

SEQ ID NO: 245464 - DNA, 201 bp, Homo sapiens
ccactaaggtgtggtatttgttaaggcagcaacaggaaactgacatagtcaggaagcaagttggtcacaggtggaactatgtctttgatcaggagagtgaraacctgcttgtgatcatttcctagagtattaaccaaaaagtcttatgaaatgtggaaaaaatagcaatcttgtgacccaggatttactgaagcccttgga

SEQ ID NO: 245465 - DNA, 201 bp, Homo sapiens
ccacccattcttaagggttcagctcaaatgtcacaacttcaggcaggttgtgttattcagtcttggtcttttacacagctcttatcacagtgcttgttctrtagtgggtgttgagtgtatatttcttaggcactttattgaactgtatcctgaaaagtcataggaagttatgtaggagaaatgaaactgacatgtaatatt

SEQ ID NO: 245466 - DNA, 201 bp, Homo sapiens
tactagtctactcttggcccttgtccgtgcgctgataaacctttcatggtatgcactcactcatggcttgatggtgtctggatagcagattcccagggttkgttctttaggcgtcaatttttataattatttccttacattttgctctcttttactttgaggaaaggtcgtgtttccttcagagtagctaaggcatggacc

SEQ ID NO: 245467 - DNA, 201 bp, Homo sapiens
tttttcctactgaagaatgaagaatggaagtgctggggctggggtgtatcttggtctatttttagattgctgtgattgattgctatgcatctttgcttgcrgcatgaaatctggtttctggaagcaaacttcccttcacagtacatgttgggtttaacattgtgtagggtctttattgaagcagacttttactttataaaa

SEQ ID NO: 245468 - DNA, 201 bp, Homo sapiens
ggtaaatacctaggatgcacaattgctgcattgcatggtaagactatgtctagcttcataagaaacggtcaaactgtcttccaaagtggctgtaccatttygcattccaatcagcaagaatgggagttcccattactttacatccttgccagcaattggtgttgtcaagttttttagattttagcattgtggaggtgtgta

SEQ ID NO: 245469 - DNA, 201 bp, Homo sapiens
aatcagcaagaatgggagttcccattactttacatccttgccagcaattggtgttgtcaagttttttagattttagcattgtggaggtgtgtagtagcatrtagttgttttaatttgaaattctctaattgttgagcattttttcctatgcttatttgacacatatatcttccttggtgtgaagtctgttcagatattttg

SEQ ID NO: 245470 - DNA, 201 bp, Homo sapiens; identical to SEQ ID NO: 47894

SEQ ID NO: 245471 - DNA, 201 bp, Homo sapiens
gcatgtctcattgtaaatgttttgaaattgtatatggtaaagtgtaaaaacatgtggtgtgttaatgttgatatctcaccttgagttcatctgtctcttgmctaaaggtgtttttatatccatgtagagtgccttttactctatggctcctgatctgccatgcaatcaacagatttaataatttatcaatgtcatatgagg

SEQ ID NO: 245472 - DNA, 201 bp, Homo sapiens
aatgttgatatctcaccttgagttcatctgtctcttgcctaaaggtgtttttatatccatgtagagtgccttttactctatggctcctgatctgccatgcmatcaacagatttaataatttatcaatgtcatatgaggcttatcttgaagctgagtgtgaagtggcttcagggtcagagagctgggtcttgcagattcctg

SEQ ID NO: 245473 - DNA, 201 bp, Homo sapiens
gtcctgaccacatgggttttttttgttccatggttaaggacccaagttgttgtagaaaggcttttactacattttcagtagggccaggaattttgctgcaktatggacttattggtaaacaagcatttgttaacaccttctgctgttgttttacaagccaggtaagagtggtaactgaacagatattctatgcagttactc

SEQ ID NO: 245474 - DNA, 201 bp, Homo sapiens
atgacgagttgatgggtgcaggaaaccaacatggcacatgtataactatgtatcaaacctgcatgttgtgcacatgttccctagaacttaaagtataatamcaaaataaataaataataaaaaacgtattaaagttcaattctcttttttcttggagataaaaagatttctcaaggttcctggaaagccactttttggggg

SEQ ID NO: 245475 - DNA, 201 bp, Homo sapiens
ctagtcaacatgaggtcatcctggattagagtgggtcccaaatccaatgactggtgtctttacaagatcggaagaggccatagggagaagaaagccatgtraagtaggaggaagaaattggagtcagacagctacaaggcatggaacatgaagaattgtcagaaaccaccagaagctaggaggaggcaaggaaggattctt

SEQ ID NO: 245476 - DNA, 201 bp, Homo sapiens
cttccttgcctcttcccagcatctggtggctcctggcaatcttgatattccttggcttctggtctcatcactcaggtctcttcctcctgcttcacatggcsttctctctgtgccctccccacttcttattaggatatcagttattggatttagggcatcctaatccaatatgagctcatctggatccttaattaattatat

SEQ ID NO: 245477 - DNA, 201 bp, Homo sapiens
tgcagctggagactttttcttactttctaagttcattcttttctctttaggcttgtgggtggtttcctttataagccattttagaagttctgggtctccaytgctcctgaggtgaccagactttctggaaaatggaggctgaggcaggatgatgagctcagctgggtgggccctcatcctgtcctgattcctaagcactgc

SEQ ID NO: 245478 - DNA, 201 bp, Homo sapiens
ttgactctgtccctaccacctcatttccaatctttgcctcagagggcctaacctcgttttacatcatcagaaccagagctctgaatttgaccattgcccartgtttcctcaaagagatgtttaataggcttttgagggctagcctgagaatgtaggcactattaactctcatttctataggaagatatatgtcacattcca

SEQ ID NO: 245479 - DNA, 201 bp, Homo sapiens
ggtgcatgggatcccactggggaacaagtcattctctttatgctcatccctgcaaccaagtcctttttcaggccatgctgatcagctcatggaaacagaarcctccctctcccttttccagattaacccagataggtctggaaccaataggaacccgctaacatattaccagctaaaaacaatagctttgcgtctgttagg

SEQ ID NO: 245480 - DNA, 201 bp, Homo sapiens
ggcttgggcctggtgcatgggatcccactggggaacaagtcattctctttatgctcatccctgcaaccaagtcctttttcaggccatgctgatcagctcayggaaacagaaacctccctctcccttttccagattaacccagataggtctggaaccaataggaacccgctaacatattaccagctaaaaacaatagctttg

SEQ ID NO: 245481 - DNA, 201 bp, Homo sapiens
aatataattattctagacaataccccaagtaggtgccgatcgtttgatatgaggattagagataaaaacttcattatgttccgtataaaatgccagtgcaraatggaaaacaataacacttcaactaactatattgatatttatgcagtgtcttccacccaagatcctgacaagtgctagtaagctatcattatgttctct

SEQ ID NO: 245482 - DNA, 201 bp, Homo sapiens
gggcttactcaagaccataaaataaaattagatatagcatatcagggaattggtgaccctttctaccacacattgtgattgttgctttgcctctgtatgcrgctctccttgggcttggtgcacttgctactgctttggtgactctcaggaaatacaggaaaatgggacttatatattagactccaacactgattcagtagc

SEQ ID NO: 245483 - DNA, 201 bp, Homo sapiens
aaacaagcatttgttaacaccttctgctgttgttttacaagccaggtaagagtggtaactgaacagatattctatgcagttactctttgtaattgtgccgycactcttcctggatttgcctaaggttatgaaacttgggctggattcacttcttttgcagatatttttttcaccttctggggaacttgtgaaggttcctga

SEQ ID NO: 245484 - DNA, 201 bp, Homo sapiens
ctactggcacctattgggtagaggccaggatgtggctaaacatcctacaatgcacaggacagcccccacaacccagaattatccaatttaaaacatcagtrgtgctgaggctgagaaatcctgattcagacgtattagatgggctctctgtgcttttttaaaaaaacaaagttggaatcaaaaatagattctattttgcca

SEQ ID NO: 245485 - DNA, 201 bp, Homo sapiens
cctattgggtagaggccaggatgtggctaaacatcctacaatgcacaggacagcccccacaacccagaattatccaatttaaaacatcagtagtgctgagkctgagaaatcctgattcagacgtattagatgggctctctgtgcttttttaaaaaaacaaagttggaatcaaaaatagattctattttgccatctcttccc

SEQ ID NO: 245486 - DNA, 201 bp, Homo sapiens
caatctctgtagcccgacttcagccatctctctatcactatacaaaggtatagttctaggcctgagccctcttccactttccaatcctgtttcttccaactctgtttgccctctcccatctagatgtgcccccctgtacctcaaagtcagcaaatctgaaactgagcccattgtcttttcttggccatattctccttctat

SEQ ID NO: 245487 - DNA, 201 bp, Homo sapiens
atctctgtagcccgacttcagccatctctctatcactatacaaaggtatagttctaggcctgagccctcttccactttccaatcctgtttcttccaactctgtttgccctctcccatctagatgtgcccccctgtacctcaaagtcagcaaatctgaaactgagcccattgtcttttcttggccatattctccttctattt

SEQ ID NO: 245488 - DNA, 201 bp, Homo sapiens
tttacagtcccaccaacagtgtaaaattgttcatatttctccatatcctctccagcacctgttgtttcctgactttttaatgatcgccattctaactggtdtgagatggtatctcattgtggttttgatttgcatttctctgatggccagtgatgaagttaatctgtatgctgtgaaaagtgtactcagctatggcttgtc

SEQ ID NO: 245489 - DNA, 201 bp, Homo sapiens
tgtcttctgtgtaggttattctccataatgcaatgccacctcattgcctccaaagccctgcatgatctgaaccctgcttgtccttggtcatttgaccacgkcatctatcactaagcccttgtcaaatttactttaaccatactcaatgttctttgagcataccaagctcatttctacctcatggcctttgcattttctagt

SEQ ID NO: 245490 - DNA, 201 bp, Homo sapiens
ggtgcatccggaccctcacccaggagaagccgatgcagccaatggccccgcacagcatgtccgcaagcatggccgggtacgagctggcagtggggaagtargcgaagaagtaggggctgtgccagtgcgtcacctgcatgggaggacagagcagctgctgaggagtgaggaaagccaggcctcaagagagcgggggaccca

SEQ ID NO: 245491 - DNA, 201 bp, Homo sapiens
gcaccctcattcccagagatttcaggtcttggtccccagaatctgtgactgtttcccttccagggaaaaggtgactttgctgatgtgattaagttaagaamcttgacttgagagattatctcagattgcctggatggacccaatccaatcatatgtgtccttaaaagtggagacccactttccgatcttatatgtggtcac

SEQ ID NO: 245492 - DNA, 201 bp, Homo sapiens
cagtcatcagtcccggcatgtggcctattcaggaatctgggtgtcatccggatgaattagcgttcacattttttggcccagagtctaggaataggcattayaagcaagttccctccatgactctgaagcacactggatgtggtaggcacattaatgcaccctcattcccagagatttcaggtcttggtccccagaatctgt

SEQ ID NO: 245493 - DNA, 201 bp, Homo sapiens
gctctggggacgctgcctgcagccgatggatcactttggtccgagcggccagcagggccaccagggtggcttcactggcacttccctaaattcaagagaargtccaaatgaaatcccaaacatagcgaaggcattggtacctacactattggaagacatattgttttgtgtccatagttttcttaaaatatgagtctgaaa

SEQ ID NO: 245494 - DNA, 201 bp, Homo sapiens
gtgagctctggggacgctgcctgcagccgatggatcactttggtccgagcggccagcagggccaccagggtggcttcactggcacttccctaaattcaagrgaaggtccaaatgaaatcccaaacatagcgaaggcattggtacctacactattggaagacatattgttttgtgtccatagttttcttaaaatatgagtct

SEQ ID NO: 245495 - DNA, 201 bp, Homo sapiens
agccgatgcagccaatggccccgcacagcatgtccgcaagcatggccgggtacgagctggcagtggggaagtaggcgaagaagtaggggctgtgccagtgygtcacctgcatgggaggacagagcagctgctgaggagtgaggaaagccaggcctcaagagagcgggggacccaggtacccccatggctcccagctgccag

SEQ ID NO: 245496 - DNA, 201 bp, Homo sapiens
atcccaaagccagcattttcccaagagctcggttttgtttattctccaggagaaatttgaggaactaacaagaagcatgagtgcctctttccccacctgcrgctacagtcctgtgcagagcccatgcatcccaaaagtggccctcacagctcccaccttacctggatcactcctcccccttctccagctttctcattcaaa

SEQ ID NO: 245497 - DNA, 201 bp, Homo sapiens
ttgctcattctcaggactggaagtggagagacttgcttgctagtttcgcgtggccacactggccatgtgctctgcacaaaggtgttctccagtgtgtgccwcactgtcctcatccactgaatgggccttcaccaattctcagagccttgtgaaagacaatatctgaaaaggaagcccctttttcccaaagttaacaatgct

SEQ ID NO: 245498 - DNA, 201 bp, Homo sapiens
cttttggatgaaggacagacagaactcaaagtcacccctctgcccactgagatagctgcacatctgatggcctcctttggaaaggctaatcagaaactcaraagaatgcaaccaattgtctcttatctacctatgacctgaaagccccctccctgctttgaattgtcccacctttccagaccaaaccaatgtacatcttac

SEQ ID NO: 245499 - DNA, 201 bp, Homo sapiens
tgagccaccacaccaggtccataatcacataatcatgtggagaaaaccatgaaaagcttcctaaaatatagaagataacaaaaaagggaaatatcgaaagraagagagaaatcatggaagaggtacccaatctgtggaaaattgaagtccctgaaaaagagtgacgtggcccacaataactaacatacagtagaagaaaaa

SEQ ID NO: 245500 - DNA, 201 bp, Homo sapiens
tgagctgcttggagaaatgcagattcccaggttcgagctgcagaaactctgggccccagaccatgatgttagttcataccaagtgcttccaacacagcctstgcagaatgggctttgagttgttgagactttctctgttctcaatcgctactttctcagaggcactctctctgggctgaatcctttctcctccctgcaaca

SEQ ID NO: 245501 - DNA, 201 bp, Homo sapiens
gcctggaaaatgcttaggcacagtggccggcgatggggaaccccacacaaacgatagttgctgtagttgttacttccacgcacctgctgtgagatagcggytgtgctacctaccatagctaggggcctggggaactgagtgccctgccctggggaagcgagtgaaagacagcactgggatcctaatccagatcctgccaat

SEQ ID NO: 245502 - DNA, 201 bp, Homo sapiens
tgggactggtggtttgcaggcaggagctaggcccttttccagagacccccctgctccaaggctctggacacatctgataggctggttggagcctctccccrggcagcagccctggtggagaacagaaggaatgagacaggggcagtcgcggttctcaagctttggaggatatagaaattctctgagctgcttggagaaatg

SEQ ID NO: 245503 - DNA, 201 bp, Homo sapiens
taaaagagatagctactaagataaaaagctacatgcctccctcataaggaatttccttttggatgaaggacagacagaactcaaagtcacccctctgcccmctgagatagctgcacatctgatggcctcctttggaaaggctaatcagaaactcagaagaatgcaaccaattgtctcttatctacctatgacctgaaagcc

SEQ ID NO: 245504 - DNA, 201 bp, Homo sapiens
ggccaaacctgcctcccattctattcctaaaagagatagctactaagataaaaagctacatgcctccctcataaggaatttccttttggatgaaggacagrcagaactcaaagtcacccctctgcccactgagatagctgcacatctgatggcctcctttggaaaggctaatcagaaactcagaagaatgcaaccaattgt

SEQ ID NO: 245505 - DNA, 201 bp, Homo sapiens
tgctgccgaacttacaaagaaaggaatcaggccagccgctttgtctctctccagggcttcctgcagggcagacgcacgcatggcgaagttgccatctgagrggatggcttttaatttcactccaccaattaacccagctctttccactgaggagtgtgcctggaaagaagacagcagagttggatttgtacaggtgtgtgc

SEQ ID NO: 245506 - DNA, 201 bp, Homo sapiens
tattggccaggagccacaagtgctgccgaacttacaaagaaaggaatcaggccagccgctttgtctctctccagggcttcctgcagggcagacgcacgcayggcgaagttgccatctgaggggatggcttttaatttcactccaccaattaacccagctctttccactgaggagtgtgcctggaaagaagacagcagagtt

SEQ ID NO: 245507 - DNA, 201 bp, Homo sapiens
atgaggttgtctttaatgaaacgaaaatgcagcccatagtagcatgcacatctctggacaccaacccaagcctatggtcagggatgagctggtgtaacagycataactctggttgtctttcctactagccttggctttaattcacttttgctgctatgcatgttctactaactttctgggactcaatatcctcatccatga

SEQ ID NO: 245508 - DNA, 201 bp, Homo sapiens
ggctcctgaggggcagcggcagggatcagcggccgcaggtacccgggctccacgtcagggtagacctggcgtccctcaatgccttccatgtagttggccaygtaatccaccatctccttccctctccttcggaattcacttgcgttcatggtgtctgggctctgtcagaggtgaaaactgcagaaagaaaatgattcagtg

SEQ ID NO: 245509 - DNA, 201 bp, Homo sapiens
tgacacctgagaccaccacttcagctgttggtatgagtttgccattggtgggtctattttgtgtaacagcagcagctaacatttctgaccacttccctgcrccaggtattgtgagagcttctcctcatggactgcccccagcctggcctaggacgactgctcctgtctctatcagaggagaacggcccagggcaccagcat

SEQ ID NO: 245510 - DNA, 201 bp, Homo sapiens; identical to SEQ ID NO: 47918

SEQ ID NO: 245511 - DNA, 201 bp, Homo sapiens
cttttttttttttttgagacagggtctcactctcactcaggctggagtgcagtggcaccatcatagctcgcttggttgacagtctttttctttcaacattygaaatatgttatccttttgctttcgggcctccatggtttctgataggatgtcagctattcttatttacagtctcttatacatatagttgcttctcataag

SEQ ID NO: 245512 - DNA, 201 bp, Homo sapiens
actaaaaagcatatttaatagttttcaaaataagttgctgctttttcctattggaaaatttttatctactggaaaatttgttgaaaattagtattcagagytttaaaaatggtaatggcattttagatagcaagatttgggtaactttggaataggaacaaatggcaagagaacgtaaagaattcttaaagaatttcagta

SEQ ID NO: 245513 - DNA, 201 bp, Homo sapiens
acctgtaattttgctgttttctacatcttgtcttttttttttttttgagacagggtctcactctcactcaggctggagtgcagtggcaccatcatagctcrcttggttgacagtctttttctttcaacatttgaaatatgttatccttttgctttcgggcctccatggtttctgataggatgtcagctattcttatttaca

SEQ ID NO: 245514 - DNA, 201 bp, Homo sapiens
cccttcttcttttttttgagactggagtttctctcttgttgcccaggctggagtgcagtggcacgatctcagctcactgcaacctctgcctcccaggttcragcgattcttgtgcctcagcatcccaagtagctgggactgctacaggcacatgccaccaagtccggcccatttttgtatttttagtagagatggggtttc

SEQ ID NO: 245515 - DNA, 201 bp, Homo sapiens
gtagctgggattacaggtgtgcaccagcacatctggctaatttttgtatttttagtagagatgaggtttcaccatgttgtccaggctggttttgaactcckgaccttgtgatctggcggccttggcctcccaaagtgctgggattacaggcgtgagccactgtgcctggcctaaaagaagattttgaaacatcattgaatg

SEQ ID NO: 245516 - DNA, 201 bp, Homo sapiens
aatggcctttgctacccccatggggatgcctagcttctccaatagccttcacctggtctttcttcctcctctctttattcctcctctttctttctctcctwctctctctctctctctctctctcaaggtcttgctctgtcacccaggctggagtgcagtggtatcacagctcactgccacctcgaactcctgggctcaagc

SEQ ID NO: 245517 - DNA, 201 bp, Homo sapiens
gtgtgcaccagcacatctggctaatttttgtatttttagtagagatgaggtttcaccatgttgtccaggctggttttgaactcctgaccttgtgatctggmggccttggcctcccaaagtgctgggattacaggcgtgagccactgtgcctggcctaaaagaagattttgaaacatcattgaatgttttctctgcagtctc

SEQ ID NO: 245518 - DNA, 201 bp, Homo sapiens
caaatcaagtatacagaaaatcggtgaagagaggttttgaattcacgcttatggtagtgggtaagatatgatttcttactaaaatggaactttggtttaarttttaaacgttagtcaactctgaatagatttaagaaaacactggcacagatatctacagtgatcatatctttgttgtattttctcttatgtgcatacatt

SEQ ID NO: 245519 - DNA, 201 bp, Homo sapiens
gcctaatacatcttcagagtgtttctgataagtaagtaaagtagttacattgtatttaactagcattggggatgtgaagaatcttgttctcccaaactgakcaattcagtcaaattaaatactgtgtatttcagacttaaaccattggatattgagtttatgaagcgtttgcatgaaaaagtgaatatcatcccacttatt

SEQ ID NO: 245520 - DNA, 201 bp, Homo sapiens
tcatcccacttattgccaaagcagacacactcacaccagaggaatgccaacagtttaaaaaacaggtgagcaggatgtgttaacccaggtttcttataccrttctcataatttgcagtttttactatttttagtataatgtgttgcaatccattcctcttactgctttactatattgtcatttatactgtattagaaataa

SEQ ID NO: 245521 - DNA, 201 bp, Homo sapiens
caagaacataaaattaaaatatacgaatttccagaaacagatgatgaagaagaaaataaacttgttaaaaagataaaggtaggttcatccctgtacacacrctaaagtaatctgaggccttaaaaacatactacagcgtccacaggaaagatcaaaagtatcagtgttttaagtagttggcttacaaaatacctagggaga

SEQ ID NO: 245522 - DNA, 201 bp, Homo sapiens
gttattgttgaatcaccaaggaaggtcctagtgaagactgctgtggtgtcctacttgatctgaaaggaaaatttgccacaccagtaaatcgaagtcctttytaataataagcttgcaaatgtaagcccttgtacttcatccagaattttacctgccccttttgtaataaaaacttcccataactgtcctgttccagatggt

SEQ ID NO: 245523 - DNA, 201 bp, Homo sapiens
gaggaggaccccaactgtcacgagcaacacccatcaaacacagccacccacctggggacagaccaagaagctgccacagatggcagaagaaaacctgaagaaagcaggacaaccagtcacaatgagtaatttaatggtagctatgatagcggtaatcaccactgctgtgagtattccttcaataagggctgacacagggaa

SEQ ID NO: 245524 - DNA, 201 bp, Homo sapiens
ataataagaagtatggcaagagttcctattatctggaaccgtggcagtatagtgacacctcaacctcaaatgatatggcccactgtaggagctaaacattraggatttgtggaaactattaatagctcttagtaagatcaaaatttgggaaagaataaaaaagcatctagaaagacactctacaaacttgtttttggatat

SEQ ID NO: 245525 - DNA, 201 bp, Homo sapiens
ctgttcggggctctcagctctgaaggctgtgagacccctgatttcccactttacacctctatatttctgtgtgtgtgtctttaattcctctagcaccactsggttagagtctccccgactgagctggtctcggcacttctctttgccttgaaagcaggtacagcggaccttcctggcatcagaaaaaggcctccagaaaaa

SEQ ID NO: 245526 - DNA, 201 bp, Homo sapiens
tttcaccatgttggtcaggctggtctctcctgacctcgtgatctgcctgccttggcttcctaaagtgctgggattacaggtgcaagccaccgcacccagcmtggttttttttgttgttgttttttttaataggtaatataatcacttggttcaaaattcaaaaggttaaacagagagatacagtgaaatctccttcttact

SEQ ID NO: 245527 - DNA, 201 bp, Homo sapiens
tgtctgccatctatattctcagccacacttagtttcttaatctgcaagatggaattaataatagtacttactttatgacgctgttgcagaaattcattgarttgctacacgccaaacactgagaacccagctgggcatataataagcattctattgcatggcattattgccatcatttttacttctattactgctactgct

SEQ ID NO: 245528 - DNA, 201 bp, Homo sapiens
cctgggtttcaccgtgttagccaggatggtctcaatctcctgacctcatgatccgcccgccttggcctcccaaagtgctgggattacaggcgtgagccacygcgcccagccagatgtttacttatttaaaatttcagctggtacgtttcacagcagcagttgcttcagactcagggttatgctagtgtttctttgcaggag

SEQ ID NO: 245529 - DNA, 201 bp, Homo sapiens
attattgccatcatttttacttctattactgctactgcttgtaactgcttgtgcttttttgatatgaaagtccaccatcagggagcactgtagtggaaaakgtattaggccaggcatagcctttagttctctggccttgggtccttcatctgtgatattcagttaacaatacctagccagtaggggtgttaaagattaaat

SEQ ID NO: 245530 - DNA, 201 bp, Homo sapiens
ctgctactgcttgtaactgcttgtgcttttttgatatgaaagtccaccatcagggagcactgtagtggaaaaggtattaggccaggcatagcctttagttstctggccttgggtccttcatctgtgatattcagttaacaatacctagccagtaggggtgttaaagattaaataaatgtgagaatgtgcctgttgcttaat

SEQ ID NO: 245531 - DNA, 201 bp, Homo sapiens
ctcctgtgcttatttgccatctgtttgtcacctttggtggtccattgaaatctttggtccatttttaaattaggttatttgtcttaatgaattgtaagggttttttttaatattttaggtactagttttttgttggactgtgcaaatacactatttctcattacacttttacccactaactttagtatcttgtcaatgatt

SEQ ID NO: 245532 - DNA, 201 bp, Homo sapiens
ccttcattccttccttccttctttctttccttccttccttctttccttccttccttccttctttctttccttccttccttctttccttccttccttccttmtttccttcctttctctcaactccagtgtcctggctgaagtgcagtgcactgaacattgctcactgcagccttcacctcttcagctcaagcgatcctccaa

SEQ ID NO: 245533 - DNA, 201 bp, Homo sapiens
aaataaatcaggatatagccatagaacagaatactatgtagaaagcgagaatgaagtattcctttatttcttcttaaggaaatacgtctaagcataacatwgagaaagaatgaggtattcctttatttcctattaaagaaagaactctaatcataactttgagtgataaaagcaggtcatatgctataataacatttaaat

SEQ ID NO: 245534 - DNA, 201 bp, Homo sapiens
tggatggctgttacgtattcctagtctctctctctattcttatggttgctgtttcacatctttacttcttaaaatcccctacttctcttctcttttttttkgggattttcaagttgttttatatctggtacttagggaaaatcctgtccttcattccataaatgttatctgtgtccttacttaactttgtctgctacttgg

SEQ ID NO: 245535 - DNA, 201 bp, Homo sapiens
gctggagttaccctgcctgcatattttggacttgccagcttccacaattgtgtgacccaattccttacaataaatctctctctcttctctctttctgtccctctctctctctctctctctatatatatatatacacacacacataaatatatatagattatgtacacatatgtatatatacataaacctatgtatacatac

SEQ ID NO: 245536 - DNA, 201 bp, Homo sapiens
tactttttctatgcgaataagaaaagaaatgtttgcattgctaaaaagcaaattgccccaggagctagcataatattttattttatgttaataataagtagaacaataaacatttgagaagatcaagccaactagggaatggctgtaattggaatagatatttgatatgatttgataaattagattgttactacttcattg

SEQ ID NO: 245537 - DNA, 201 bp, Homo sapiens
tttttctatgcgaataagaaaagaaatgtttgcattgctaaaaagcaaattgccccaggagctagcataatattttattttatgttaataataagtagaacaataaacatttgagaagatcaagccaactagggaatggctgtaattggaatagatatttgatatgatttgataaattagattgttactacttcattgaat

SEQ ID NO: 245538 - DNA, 201 bp, Homo sapiens
cagtcctaggaaagaatttgtgacgtccaggtgttttcttagttactgaaataataacttactacatttcttgagtttattgctaaatagttcagctttamgaattctttcttctggcttttttattttgatgaaaggaaaaaatatctttgttagtgcccctgagaatgtaaatgaacagatcatctaaattactaagca

SEQ ID NO: 245539 - DNA, 201 bp, Homo sapiens
tttgggaggccaaggcgggtggatcatgaggtcaggagttcaagaccagcctggccaagatggtgaaaccccatctctactaaaaatacaaaaattagccrggtgtggtggcacatgcctgtaatcccagctacttgggaggctgaggcagggaattgcttgaacctcggaaagaggttgcagtgagccgagatcgcgcca

SEQ ID NO: 245540 - DNA, 201 bp, Homo sapiens; identical to SEQ ID NO: 47924

SEQ ID NO: 245541 - DNA, 201 bp, Homo sapiens
ccactgccccccagcctgggcaacacagtgaaattctgtctcaaaaaaaaaaaaactattccaaataaaaaaagcaacaagtgcaaaagccatgaagtgawagtatgcactgtatgtttggggggtagttagggattcagtgttggggaaagtgaagtgagcaaggggaggaagtgtagcaggagatgaggccagaagtaa

SEQ ID NO: 245542 - DNA, 201 bp, Homo sapiens
ggttattagaagttttactacatattaaatataaagactaaatgactaattaaagactaattttttattttgaaatcttaaatccgtatggttttttgatytaagttgtgaggcaggaatctgatgtttattttttaaatggttgagtagccctaccaaaaccgtttgttacaagcttaatttttaaaagtgtatatgctt

SEQ ID NO: 245543 - DNA, 201 bp, Homo sapiens
atgcctagcttctccaatagccttcacctggtctttcttcctcctctctttattcctcctctttctttctctccttctctctctctctctctctctctcarggtcttgctctgtcacccaggctggagtgcagtggtatcacagctcactgccacctcgaactcctgggctcaagcaatcctcctacctcagcctcctgag

SEQ ID NO: 245544 - DNA, 201 bp, Homo sapiens
tgctttccaggtagtactctgaatttacaacagggctattcaaatagtgctcatactccttatcattagggtgtctggatgaaacatacctctgcttctgrtttcttaaatagttttgttttatatattgtgctatgatttagctccagcggcgccatgagcaaatgaaaaagaatttggaagcacagcacaaagaattgg

SEQ ID NO: 245545 - DNA, 201 bp, Homo sapiens
tttttacccctacccttgttacaaatagcatggcaatgaagatctttaaacacacagagttttgttatatgtatgttggcagacagagggcagtatcattwttatttatttgttaataattcctgaagtaggattattagatcaaagtatttgaacattttgtggctcttggcacatactggcaaattgttcctttctttt

SEQ ID NO: 245546 - DNA, 201 bp, Homo sapiens
taatgccaggatctggagtgcttaaaggagctgcagacagattagcagctagtaacccattaaaatggatacaaacacttggaagctctgtgatttcaatratgattgtgcttttaatctgtgttgtttgtcttgtatagcctgcagatgtggatcctgactcctgagagaagtagctcaccgtgacaaagctgtctttgc

SEQ ID NO: 245547 - DNA, 201 bp, Homo sapiens
cttcacctggtctttcttcctcctctctttattcctcctctttctttctctccttctctctctctctctctctctctcaaggtcttgctctgtcacccagsctggagtgcagtggtatcacagctcactgccacctcgaactcctgggctcaagcaatcctcctacctcagcctcctgagttgctgggattacaggcatgc

SEQ ID NO: 245548 - DNA, 201 bp, Homo sapiens
gcaaggccattcttctcatgtggatgccccctcatcctatttaactcagacatctcatgctagtccattcgtatgctctattagaaacttttcctcattcygtaggctctaataccctaataccctgttctgggccactgtggatttctctccagcatggacacctacctctgtcagtctcacgtaatgacttttggactg

SEQ ID NO: 245549 - DNA, 201 bp, Homo sapiens
ctctctttattcctcctctttctttctctccttctctctctctctctctctctctcaaggtcttgctctgtcacccaggctggagtgcagtggtatcacakctcactgccacctcgaactcctgggctcaagcaatcctcctacctcagcctcctgagttgctgggattacaggcatgctccactacacctggctaatttt

SEQ ID NO: 245550 - DNA, 201 bp, Homo sapiens
cattcgtatgctctattagaaacttttcctcattccgtaggctctaataccctaataccctgttctgggccactgtggatttctctccagcatggacaccyacctctgtcagtctcacgtaatgacttttggactgaatttttaggaagaaatatggaaaagatagagctgaaataattttgaagtgttcaaaagccagta

SEQ ID NO: 245551 - DNA, 201 bp, Homo sapiens
cctggctaatttttaaatattattgtttgcagagacagggtcttgctatgttgcccaggctggtccagaactcctggactcaagtgatcctcctgctgtgrcctccctaagtgctgggattacaggtatgagccaccatgtccagccgggttattaatgtcaatctccgccacctccacctgtttttgtaatttcttatcc

SEQ ID NO: 245552 - DNA, 201 bp, Homo sapiens
gacagggtcttgctatgttgcccaggctggtccagaactcctggactcaagtgatcctcctgctgtggcctccctaagtgctgggattacaggtatgagcyaccatgtccagccgggttattaatgtcaatctccgccacctccacctgtttttgtaatttcttatccaatttggcctggggatcatcatcagaggaggga

SEQ ID NO: 245553 - DNA, 201 bp, Homo sapiens
ttaaacatatttttattcgtgcattttcatgacttagttttaagatccaaaacgaggaatgaagaaaagggaaagcagggatggtagacaatgatatgcarttaataagctaaatatttgattaatccttactttgtacttctgttttggttgaactcttttgattataaacattcggggcaaatgtgtgctctttgtaat

SEQ ID NO: 245554 - DNA, 201 bp, Homo sapiens
actcctggactcaagtgatcctcctgctgtggcctccctaagtgctgggattacaggtatgagccaccatgtccagccgggttattaatgtcaatctccgycacctccacctgtttttgtaatttcttatccaatttggcctggggatcatcatcagaggagggatttgagagggtattctttttttttttttttttgaga

SEQ ID NO: 245555 - DNA, 201 bp, Homo sapiens
ttgagagtgtcttcaggatggctcaactttgcagtgtcttcaataaataacttcccataacttcccactctgtaatttgcccacctgtattaccccacccycaagcctcagactttaggaaatggcatcaggcctgtatctggagagttcagagttctgtgaggtagagcattccttccaatgggacctagaattcctaga

SEQ ID NO: 245556 - DNA, 201 bp, Homo sapiens
aattccaggacttgagcaatggagccagcaaccggctgtctcctgtggcctgtagagaactgggtaaatacatgagcctctggtaagcagacggagaggcmgctggccagggaactccctttccttctctcctgaatgctcaatgacctgctgacatgttcggcaagtcaaagttcagcagtgtggaagacttggctttct

SEQ ID NO: 245557 - DNA, 201 bp, Homo sapiens
tctctcctgaatgctcaatgacctgctgacatgttcggcaagtcaaagttcagcagtgtggaagacttggctttctaggaaatgcagttctcacaggcagygccaacactaagaactagttcttactatctgtgtcaagataccaagaattttaacttactaggtttttttttttttttttgtacgaagtcttgctctgtc

SEQ ID NO: 245558 - DNA, 201 bp, Homo sapiens
cagttggagattattattgccttcttttgaaaagggaggcattaggacaaatttttgaaggatagaattggggccaagattgaaggagcagtcctgttggsggaaataatagccatcatttacataacttttttatgtgccaggtaatgttttcagtactttatgggcattatctgctaacttacgattcttacaacagcc

SEQ ID NO: 245559 - DNA, 201 bp, Homo sapiens
gggggatataaacaatgaccaagtcagctattgctgcttggattctttatttcttcagactgcaagggaatgagtaaggggtggttgggtggtgatggggrggtggtacggtcgtggcgggagagcagtaaacaatctttcatctcattcagctgttcagtgggtgggactaaaggagataagagttgagtgaagctatga

SEQ ID NO: 245560 - DNA, 201 bp, Homo sapiens
gtacaggtagggatgaaatttatggaatcctgatagactgaaggggggatataaacaatgaccaagtcagctattgctgcttggattctttatttcttcaractgcaagggaatgagtaaggggtggttgggtggtgatgggggggtggtacggtcgtggcgggagagcagtaaacaatctttcatctcattcagctgttc

SEQ ID NO: 245561 - DNA, 201 bp, Homo sapiens
tactaaaaagagaaaaaaaggaaaataaagacttagcagcaagagataataatcattaatatatgctgtgtttatcttccatattttactttgaccactgygtaatgtttccagctgtggctatctgatattttaccattgcttcatcatttgacatttgaatgatttgttttgtttaatctcataataatgctgcaataa

SEQ ID NO: 245562 - DNA, 201 bp, Homo sapiens
catctaacctgttttacatatttatgcacatgcaggtgatgagtatagtcagtttttccccctaaagtttatgtgcagacatggggaggagagtattttaracttaaaagtgtacaggtagggatgaaatttatggaatcctgatagactgaaggggggatataaacaatgaccaagtcagctattgctgcttggattctt

SEQ ID NO: 245563 - DNA, 201 bp, Homo sapiens
ggaggcttattcaagtcctggttcttccactttctggctagcaatcttgggcaagtcacttaaattctgcaactgtttcctcatctgtacaatgagaacartgatgtgttcactgcccagcctccaacatatttgtgattaaagaaaaacgagataagatagtaattttccattataaagtactccacactgttaagtttg

SEQ ID NO: 245564 - DNA, 201 bp, Homo sapiens
gcactttctcagtctggttcttccagccgcgcctctttgccttacgccaattccgtaaggaggcgctgaggccaactggccggctcccgcagctccaaaasttgacgtgaaattgcgcggggcagagctgactgcggccatctttaattcgggcaagaccccaccctcgcaccccacccactagtccttttcagcgttccc

SEQ ID NO: 245565 - DNA, 201 bp, Homo sapiens
taaaagtagtttaacttatatttgaggcagatgtattttaggacatgttgctaaaagtaaatattacgaacaagtaattgtgaacctgtagccaaggaacyctttgggaattttaatgattactgtgaatggtgaagacagttttgaagaactattctttgaaggatggaatgttaacatttcaaggacctgtgaagagct

SEQ ID NO: 245566 - DNA, 201 bp, Homo sapiens
tagcagagaggggccttgtgagtataatggatgaggaagaaccttcaatcagagttccatacttagacaatatcagctaattcaggtgggacttaaaatgrtcatacgtaatgaagacggaaaactcagggaagcatggggaatacggaatgtgagatcatccacactggagagaagtcttaggagtacaatgagtgtgga

SEQ ID NO: 245567 - DNA, 201 bp, Homo sapiens
caggaataatcaagagtctactacattatctccacacttagattccattgagaatctaaaagtagtttaacttatatttgaggcagatgtattttaggacrtgttgctaaaagtaaatattacgaacaagtaattgtgaacctgtagccaaggaaccctttgggaattttaatgattactgtgaatggtgaagacagtttt

SEQ ID NO: 245568 - DNA, 201 bp, Homo sapiens
tgggagaacttccaggcactaatcaggctaattcatcccggagaaaaaccttgatgatgaagaaggggaaaaagtcttccagtttttttccttattggatytcagagaatcctcagtgacatatagggaaacttgctggaggaattcagggtttattaagattcacattaaagcattaatcccattaaagtaggagtttaa

SEQ ID NO: 245569 - DNA, 201 bp, Homo sapiens
attttcaaaaacagagatttaaagaggacgggctagagctcttatgttcagcttcttattccataagggaagaatcaggcgtatttcttgtgttgaagcaacacacacacacacacacacacacacacacacacacacacacacacacacacacgttgtttggcaaaagtcagaccagaagaaagcttctctcctaccaac

SEQ ID NO: 245570 - DNA, 201 bp, Homo sapiens
ttttcaaaaacagagatttaaagaggacgggctagagctcttatgttcagcttcttattccataagggaagaatcaggcgtatttcttgtgttgaagcaacacacacacacacacacacacacacacacacacacacacacacacacacacacgttgtttggcaaaagtcagaccagaagaaagcttctctcctaccaacc

SEQ ID NO: 245571 - DNA, 201 bp, Homo sapiens
ctggagttaccctgcctgcatattttggacttgccagcttccacaattgtgtgacccaattccttacaataaatctctctctcttctctctttctgtccctctctctctctctctctctatatatatatatacacacacacataaatatatatagattatgtacacatatgtatatatacataaacctatgtatacatacc

SEQ ID NO: 245572 - DNA, 201 bp, Homo sapiens
tttcaaaaacagagatttaaagaggacgggctagagctcttatgttcagcttcttattccataagggaagaatcaggcgtatttcttgtgttgaagcaacacacacacacacacacacacacacacacacacacacacacacacacacacacgttgtttggcaaaagtcagaccagaagaaagcttctctcctaccaacct

SEQ ID NO: 245573 - DNA, 201 bp, Homo sapiens
gcatattttggacttgccagcttccacaattgtgtgacccaattccttacaataaatctctctctcttctctctttctgtccctctctctctctctctctmtatatatatatatacacacacacataaatatatatagattatgtacacatatgtatatatacataaacctatgtatacatacctattccttaccaattcc

SEQ ID NO: 245574 - DNA, 201 bp, Homo sapiens
ttcaaaaacagagatttaaagaggacgggctagagctcttatgttcagcttcttattccataagggaagaatcaggcgtatttcttgtgttgaagcaacacacacacacacacacacacacacacacacacacacacacacacacacacacgttgtttggcaaaagtcagaccagaagaaagcttctctcctaccaacctc

SEQ ID NO: 245575 - DNA, 201 bp, Homo sapiens
atattttggacttgccagcttccacaattgtgtgacccaattccttacaataaatctctctctcttctctctttctgtccctctctctctctctctctctmtatatatatatacacacacacataaatatatatagattatgtacacatatgtatatatacataaacctatgtatacatacctattccttaccaattcctt

SEQ ID NO: 245576 - DNA, 201 bp, Homo sapiens
tgcaccaaaatataagtatagacagggaagctaggtttaggtatattagccattggtttgttatgggttcaaataaggataggtagttgaaaattatttgratgtctgtattctgtttagaattggagtgattttgaacatgataatttaatttgaactaggtcatttctgatgttaataataagttgtcttctctaggtt

SEQ ID NO: 245577 - DNA, 201 bp, Homo sapiens
tgccagcttccacaattgtgtgacccaattccttacaataaatctctctctcttctctctttctgtccctctctctctctctctctctatatatatatatmcacacacacataaatatatatagattatgtacacatatgtatatatacataaacctatgtatacatacctattccttaccaattccttacaataaatctc

SEQ ID NO: 245578 - DNA, 201 bp, Homo sapiens
ctattgctgcttggattctttatttcttcagactgcaagggaatgagtaaggggtggttgggtggtgatgggggggtggtacggtcgtggcgggagagcastaaacaatctttcatctcattcagctgttcagtgggtgggactaaaggagataagagttgagtgaagctatgaaataaatgtggaagctacataggtgat

SEQ ID NO: 245579 - DNA, 201 bp, Homo sapiens
taaatctctctctcttctctctttctgtccctctctctctctctctctctatatatatatatacacacacacataaatatatatagattatgtacacataygtatatatacataaacctatgtatacatacctattccttaccaattccttacaataaatctctattctctctctttcattctctctctatatatgcatac

SEQ ID NO: 245580 - DNA, 201 bp, Homo sapiens
caagttttgtctgtgttgtagcatgtctcagtagtacttcattccattttattgctggatattattctgttgtatatatactaccatatttcatttatccrttagttgatatttgggttgttttctactttttgactattatggataatgctgctgtgaatgttttgagtacaagcttttgtgtggacctatagttttcaa

SEQ ID NO: 245581 - DNA, 201 bp, Homo sapiens
attttacagaatggaaattttggtcaacattttaacgataatgcttaatggctatatgtgtattctaatctgagatggaatatgctataatttttgtaatdttatgttatgttatgttatgttatgttatgttatgttatgttatttttgagacagagtcttgctctgttgaccaggctggagtacagtgcgctatctcgg

SEQ ID NO: 245582 - DNA, 201 bp, Homo sapiens
agtacatctttcatgacttaatattcataattatgatttagcaacttcataacattctccccagttaacttaccttcattggatttcttacctcctccccscagttgttggacataagggttgttttcaatttttggcacacaaagggaacattcttcaaaatctattacatatttaggggtatgttttaactgttgaatt

SEQ ID NO: 245583 - DNA, 201 bp, Homo sapiens
tatatatacataaacctatgtatacatacctattccttaccaattccttacaataaatctctattctctctctttcattctctctctatatatgcatacamgtatatagatatgtacgtgtgtgtatatatacataaatatatgtatacatagatatgtgtacatagatatgtatgtgcacgtagatatgtgtatatagat

SEQ ID NO: 245584 - DNA, 201 bp, Homo sapiens
ttttacagaatggaaattttggtcaacattttaacgataatgcttaatggctatatgtgtattctaatctgagatggaatatgctataatttttgtaatgdtatgttatgttatgttatgttatgttatgttatgttatgttatttttgagacagagtcttgctctgttgaccaggctggagtacagtgcgctatctcggc

SEQ ID NO: 245585 - DNA, 201 bp, Homo sapiens
gtcaggcaagtgtgtgttaagtcctaaagttgtagtataggttgaacattcttaaagagaaaattcaaaatgtgaattgctccaaaataaaacgttttgarcactgacatgctgctcaaaggaagcgctcactggagcattctgaattttggatttttggattaaggatgctcgaccagtaagtatagcacagatattcca

SEQ ID NO: 245586 - DNA, 201 bp, Homo sapiens
tgtgaaatatcactaatgtcatgttacttacctctgttaatgttacgaaattacactatttctgttttctgctttcctagtttcctgttgcaccgtttttsatctctgcatggttccactgtcatctagctttttgaaaaactcattttgtttgctctccttccaggtcctggcttcctgtcctggccatccaatcatatc

SEQ ID NO: 245587 - DNA, 201 bp, Homo sapiens
ttaatggcttaaatccagtgtcttaatcatggaacagtgtagttaggaaaaatacttggaaaatcagtcttacagattgcagtctattagccagatgtagyggtgtgcacctgtaatcctagctactcaggaggctgaggcaggagaattgcttgaacccgggaggcaggggttgcagtgagccgagatcgtgccactaca

SEQ ID NO: 245588 - DNA, 201 bp, Homo sapiens
attctgtgtcagatgaagtgactcaaagggacagaatggccatctttggacagtttaagagcttttataaggaagaggaatcagaactcacttcatgtggygcatggtgccaaatcaacaagataagtgttcccaggaagcagatttcagcccatctcagctcacttcaacctctgcctcccgggttcaagtgattctccc

SEQ ID NO: 245589 - DNA, 201 bp, Homo sapiens
gatgaagtgactcaaagggacagaatggccatctttggacagtttaagagcttttataaggaagaggaatcagaactcacttcatgtggtgcatggtgccraatcaacaagataagtgttcccaggaagcagatttcagcccatctcagctcacttcaacctctgcctcccgggttcaagtgattctcccacctcagcctc

SEQ ID NO: 245590 - DNA, 201 bp, Homo sapiens
cttagactcaagcagaaaggtgaacacagatctttattagcagataccaaatttgacatttaaaggagatttctgagcagctgcagacctcgccaagaccrtgcagattccactgactattcccatgccagtgctccagctgctcaggcttgaaggtatgtgaaataatgtcactacattagagcagtgtctctgcacact

SEQ ID NO: 245591 - DNA, 201 bp, Homo sapiens
gtgattctcccacctcagcctcccgagtagctgggattacaggtatgtgccaccatacccagctaatttttgtatttttagtagaaacggggtttcaccayattgcccaggctgattttgaactcctgagctcaagggatccacccacctcggcctcccaaagtgttgggattacaggcttgagccacagcgcctgaccta

SEQ ID NO: 245592 - DNA, 201 bp, Homo sapiens
tttacttacactccagcatgccacgtggccagctgtaagttgccctctacttttgtagagccctttgctgtgtttctgcaaaatctactttttctgattcrtgtaactcaaaactagctctattttcttccaaattaaaactcttattttcttaattaatgctggcccaaaatagaaattagagggaaagtcttattccag

SEQ ID NO: 245593 - DNA, 201 bp, Homo sapiens
atctacctttcaaatcatttgggaagcttcttcaaagtattcttggaaacacttgcctagatattctgggctttgggtctaggatggaatatgatcatctrttttgaaatacctcctgagatgacactaatatgtattttggttaagaactatagtttgttgctgtctcacctcttaataggtttcatttgaggtgctttt

SEQ ID NO: 245594 - DNA, 201 bp, Homo sapiens
tatccagcagaattgttagttcttagtactggtgtaattacagtaattagaataagtaaacttcttttaagataattgcagggccaggttatatagagctygtttagcttgccttttagtattagcatgtacatcagtgtgtatgttaaaggataccctaatagattttgtggaaatggaattgtcttatagtaaattcca

SEQ ID NO: 245595 - DNA, 201 bp, Homo sapiens
gagaatctgatgctgccgctggtctgacaggaggcggagctctggcagtagtgttcactaccactcacctcctgctgtgtggcctggttcctaacaggccrcggactgtgggttggggatgcctggtctagattgttcttcacagattaaatctttaccagattaagtttattaaaaagtaaaacaaagaatagcgccctc

SEQ ID NO: 245596 - DNA, 201 bp, Homo sapiens
catttgaaattttaaactgcatataattgttttcatattatgaagtgtgttattaatacacttattagtgcaaataatatgctaatatttagctgtgtttygacagtaaatagtttattttctttcatttggaaagttttgaataatgaatatttattcaacataatttatatttttgagtatatagaataacttgacata

SEQ ID NO: 245597 - DNA, 201 bp, Homo sapiens
caaaatgtcagtagtgccaagattgagaattcctgtagtacagctgtctggagctgtagttgccagcatctgcagcaacctgtgcctgatgcctgcctctmatttactctgtagtctcttactggactcaataatcatttttctcttaacttttatcccagtactcccaatcactatatttgcaggtagcctcttctcagg

SEQ ID NO: 245598 - DNA, 201 bp, Homo sapiens
tgctaatatttagctgtgttttgacagtaaatagtttattttctttcatttggaaagttttgaataatgaatatttattcaacataatttatatttttgartatatagaataacttgacatatcttctactggtaaattcattttgcccatttgaaaatactgattattgtcctttaacagtcatcagttaattcatatgt

SEQ ID NO: 245599 - DNA, 201 bp, Homo sapiens
ctctcacctgcatttccagtcctgtctctagaaataagcattaaattggtgcaagtcttttggcatttttttatacttttatatacaccaggcattcctaygtcaattttttttgtgtgtgtaaacagtaccatgctataagtactattctgtgaatgtgttttccctatcactgaatatactgtgtgtgtatatacactg

SEQ ID NO: 245600 - DNA, 201 bp, Homo sapiens
ctttaagtttgtgaagtacacacaactatagccattatgaagtactaaatttcatgtagaaatgtcttagttgaaaagccattttaagtcctatataagcyaacagtgattttactccttagttcttcattcataaggattttccctgcttcatgaaataaacagtgttgccaccatggtttgaggtctcaatgtggcaaa

SEQ ID NO: 245601 - DNA, 201 bp, Homo sapiens
ttaagtttgtgaagtacacacaactatagccattatgaagtactaaatttcatgtagaaatgtcttagttgaaaagccattttaagtcctatataagctarcagtgattttactccttagttcttcattcataaggattttccctgcttcatgaaataaacagtgttgccaccatggtttgaggtctcaatgtggcaaatt

SEQ ID NO: 245602 - DNA, 201 bp, Homo sapiens
aaaatggagaaatttctagaagcaagccctgtttacaataaaataatatagacttcaatacataagtgcttggacatagtgtattaggtaggacagcatartagagtacttacaatgaattattaaagttataatgaacaagtgtgagttgtgaaaaataaaattataagccattccatacaggtggcataagaacactaa

SEQ ID NO: 245603 - DNA, 201 bp, Homo sapiens
ccagtttaaaacttcaatttctgtcacagacaagctgtatgaccctggacagatcactttgaatctcactttccttttcacaacaaatatttacctagtctttttttttgagacggagtctcactctgttgcccaggctagagtgcaatggcgtgatctcggctcactgcaacctccgttcccctgggttcaagcagtctt

SEQ ID NO: 245604 - DNA, 201 bp, Homo sapiens
agaaaaggtgaaagcagtatgtacttctctggggtaacatacttgatagactccttgaaaaattttcacagagccctatcaggagagtctcctgttgacarctggtccagttttgatagtttttgagccattcacataacatatttgaatgcttgtcttaaactaagttttggggctacaatgatgatagacaaaaagttc

SEQ ID NO: 245605 - DNA, 201 bp, Homo sapiens
gacattaatctaatctgattgttctgtttgttatagttagcctgtactccctttttttgttttttgtacttctgctgtcattttgagtacatatatgtgtyattgacaactgcagaattttccaattattcttcctcagtcttttcctttgggtaagtaactcagtatatataattcagccacctgatgattataactcca

SEQ ID NO: 245606 - DNA, 201 bp, Homo sapiens
ttacaagttaggtctgcactcttgccgctcatttgaagggaatgaattgggaattggtttgctgcctccttgagacccagataaactgcagaaggggtggracaagatcacagaaaaatgtcacaaaagttttgcatattttttttcttaattgggcatttgcttcattctgtagacctttgtttttcacaggtcctgtaa

SEQ ID NO: 245607 - DNA, 201 bp, Homo sapiens
ctcttactgctttactatattgtcatttatactgtattagaaataactcttcaatcttctgcctttgtcagtttttaaatatggctgttttaagtgttctstaataacacccccacacagacaatttctccccatactctttagaattattttcttttttcttttctcttttcttttctttttttttcttttctttttttt

SEQ ID NO: 245608 - DNA, 201 bp, Homo sapiens
aaaaattttacgtgagtttagccctgtttattcaactaaataagatacttgggaatttatatctaaaggaagaatctcagtcattgtaaataaatgacctwaagtcattattgtggaaatcaatcagagaaatccctttctggagttttacatcctttttggaactcttttggtatgacagctatatgactttaacacttc

SEQ ID NO: 245609 - DNA, 201 bp, Homo sapiens
aataatactggtttttatatttgcccttgcatttacctttacgggatctttatatctttatattgctttgagttactgtctagagtccttctatttcaacytgaaggactaccttcagtatttcttgtagtacatgtgtagtgataatgaacctccctcaggttttgtttactggggaatgtctttatttctaccttgttt

SEQ ID NO: 245610 - DNA, 201 bp, Homo sapiens
gctcttttttcttaatgtgaaaaccttgtgaaaactatataagagaaggctagtttttgagtccaaagctagaatttgaatgttaaaaggtgcacagcctrgtagctggtgagtagggcacattttatgtactggaacatagtgaataaaaccagtattcctaccaggtgagaaatccctaaattgtgtcttacacacctg

SEQ ID NO: 245611 - DNA, 201 bp, Homo sapiens
cacaaagcacatgttgtaacttttattaggcttccttagaggtaagatgcaaatttgtccttagccagtgtatgatggtaaatatgacttcataaaatttwaaaaaaaaagtacagttcatcagaagaattatcttggctagaacttcccaaatttgtctagaggactctcctagagatgacactgtgacatagtaaccaa

SEQ ID NO: 245612 - DNA, 201 bp, Homo sapiens
gaagctttgcctggggcatgaacaggtagagaaactgcagattctgtgtcagatgaagtgactcaaagggacagaatggccatctttggacagtttaagarcttttataaggaagaggaatcagaactcacttcatgtggtgcatggtgccaaatcaacaagataagtgttcccaggaagcagatttcagcccatctcagc

SEQ ID NO: 245613 - DNA, 201 bp, Homo sapiens
ctcccgagtagctgggattacaggtatgtgccaccatacccagctaatttttgtatttttagtagaaacggggtttcaccatattgcccaggctgattttraactcctgagctcaagggatccacccacctcggcctcccaaagtgttgggattacaggcttgagccacagcgcctgacctatatgcgtattttatgtcca

SEQ ID NO: 245614 - DNA, 201 bp, Homo sapiens
atcatgcccggctaatttttgtatttttagtagagacggggcttccccatgttggccaggctagtcttgaactcctgacctcaggtgatccaccctccttrgcctcccaaagtgctgggatgacaggtgtaagccactgcggctggacatccacggctattttcctcatgcctcaccttcccctgttggttcagtgaccct

SEQ ID NO: 245615 - DNA, 201 bp, Homo sapiens
tatcctccatgcttcctgtggttgcgtccaagacatttctcttccaaaggcagcagagtcacctgctgtccctctcggtgactgctgtctgctggtcttcygcttacacctcctcatccactgaggacttgggctctcagttgacagtgttctccatcattcttgtcatgtcgttagagggattgctgcctggcaacccct

SEQ ID NO: 245616 - DNA, 201 bp, Homo sapiens
tgcttattaggttgaagtacatgtgttgtattactgactctagttactcttgtttcttaattttcatagagtaacaccttaaattgtaaatattatgtttygttttaataaggacaaaaaaatttaaaatccagttatttccccttaaactgcagtaaaatgagggaatgataatgacattgttgcaaaacatgtataatg

SEQ ID NO: 245617 - DNA, 201 bp, Homo sapiens
tttctcttccaaaggcagcagagtcacctgctgtccctctcggtgactgctgtctgctggtcttctgcttacacctcctcatccactgaggacttgggctstcagttgacagtgttctccatcattcttgtcatgtcgttagagggattgctgcctggcaacccctctacattccccaggaggtttgcaacagtgatttca

SEQ ID NO: 245618 - DNA, 201 bp, Homo sapiens
caaaaaaatttaaaatccagttatttccccttaaactgcagtaaaatgagggaatgataatgacattgttgcaaaacatgtataatgcatttcaaagtcaraataaatgtaaaataggcattaatttggaacattcagaaatttatttggatttattaaaatattagtttgaagaaatatgaaatgttacagatattcttt

SEQ ID NO: 245619 - DNA, 201 bp, Homo sapiens
ctgaggcacacagatcacttgagttcagaagttcgagactagcctggccaacatggtgaaacctcatctctattaaaaatacaaaaattagctggatgtgrtggtgagtgcctgtaatcccagctacttgggaggctgaggctggagaatcgcttgaacctgggaggcggaggttgcactgaactgagatcacgtcactgc

SEQ ID NO: 245620 - DNA, 201 bp, Homo sapiens
ctgctgtctgctggtcttctgcttacacctcctcatccactgaggacttgggctctcagttgacagtgttctccatcattcttgtcatgtcgttagagggrttgctgcctggcaacccctctacattccccaggaggtttgcaacagtgatttcatacaagacgttggcgtcgtcacccacgtggacatgccaggctactc

SEQ ID NO: 245621 - DNA, 201 bp, Homo sapiens
gtataatgcatttcaaagtcaaaataaatgtaaaataggcattaatttggaacattcagaaatttatttggatttattaaaatattagtttgaagaaataygaaatgttacagatattctttttatcttgagtaatttttttcttaagccagtatatatattattctgaactctattcttaaatgttttctaaataatgca

SEQ ID NO: 245622 - DNA, 201 bp, Homo sapiens
tctccatcattcttgtcatgtcgttagagggattgctgcctggcaacccctctacattccccaggaggtttgcaacagtgatttcatacaagacgttggcrtcgtcacccacgtggacatgccaggctactccctgagggcgtcatcacccacgtggacaggccaggctactccccgagggtgatgtcacccacgtggaca

SEQ ID NO: 245623 - DNA, 201 bp, Homo sapiens
ttgaggccagtaccctttagtgtcaataaattgccaaccttactcttctactttacccccctgcatccctgtttcaaatgtttattcccttcttaaggctrtctacttcacctttgacccttattcttagtagttgcactagggtcctttctttttctgtgagaaaatgtgaatagtaataaaatacatttcattgcaact

SEQ ID NO: 245624 - DNA, 201 bp, Homo sapiens
caagagcttttggaaaagtatagctcattcaatatcagagaattcacaatggaggaaaatcgtatgtgtgtaatggacgtaaaaatgctttgagatggtgyccagagctaatcagacatctgggattttgtagcagagaggggccttgtgagtataatggatgaggaagaaccttcaatcagagttccatacttagacaat

SEQ ID NO: 245625 - DNA, 201 bp, Homo sapiens
tccatcattcttgtcatgtcgttagagggattgctgcctggcaacccctctacattccccaggaggtttgcaacagtgatttcatacaagacgttggcgtygtcacccacgtggacatgccaggctactccctgagggcgtcatcacccacgtggacaggccaggctactccccgagggtgatgtcacccacgtggacagg

SEQ ID NO: 245626 - DNA, 201 bp, Homo sapiens
acaattaagcatattatttaaatcatttttattttttcagcgcttgatttatccatatccaaaagacctattagtcttttaatgtggaacttgctaacttsctgttgtttccaagtttttgccttaagtatttttaacattttgttatttatattcttctgtcatatcaaacttccatgtgtttctaatttccttaaatga

SEQ ID NO: 245627 - DNA, 201 bp, Homo sapiens
aaaattataaattatatgattgatatggtatttttgtttgtcagcactgctctaaactgttgattaaaaatattgttggtgagctctgcttatgtgatatrtaggacatgagcagagaggaggcaagtgaacagttctggctggagttggcttcattcaggcagtgatgcttttagctggatttgaagaagtggtagtgat

SEQ ID NO: 245628 - DNA, 201 bp, Homo sapiens
ttcagacagctccccactgacctctctcgttccagaactctccacttggcctcatcacctcactgtcactctctctgtgtccactgccttccttaatcatygttcataattaaaatcaactcctgcagggcgaggtgattcacgcctgtaatcccagcactttgggaggccgaagcggatggatcacttgaggtcaggtgt

SEQ ID NO: 245629 - DNA, 201 bp, Homo sapiens
tgaaaaagtagtatctgaaaatcccaacattgttgtaattgggttagctattgttgttatcatgttgtctatcatgtttataaaatggtcactcatcttgwttattttcctttcatcatttagaaccttggaaaagaacaagaagaaagggcagatcttttaaaccctctattgaccaccagttacgtattagttgccaat

SEQ ID NO: 245630 - DNA, 201 bp, Homo sapiens
gtaaacatcaagaagggcaattgctggatcattgccttgtgtcctcactgctcttaaagatcagatttgttcagctttttacttcttagaatggagtggcracttccaagctccttatgtatggaaccagaaaaagcagactgagttctcaactactttttggtacccattttttctgcctccttaccctgaatgagactg

SEQ ID NO: 245631 - DNA, 201 bp, Homo sapiens
acttggcctcatcacctcactgtcactctctctgtgtccactgccttccttaatcatcgttcataattaaaatcaactcctgcagggcgaggtgattcacrcctgtaatcccagcactttgggaggccgaagcggatggatcacttgaggtcaggtgtttgagaccagcctggccaacatggcgaaacacccgtctctact

SEQ ID NO: 245632 - DNA, 201 bp, Homo sapiens
ctgctcttaaagatcagatttgttcagctttttacttcttagaatggagtggcaacttccaagctccttatgtatggaaccagaaaaagcagactgagttytcaactactttttggtacccattttttctgcctccttaccctgaatgagactgggctctttgaggatcatttcccctgtggcatatagctcaagggggag

SEQ ID NO: 245633 - DNA, 201 bp, Homo sapiens
tataaatacttataaggaagaactaacttgccattttgttttctgtatgtcttttagctgttttgtccttcatttcttccattactgcctttgtttgtgtytacttgattttttgtagtgacacaatttgattcccttctctttttttttttggtatattttatagaaattttctttggttattatagggataatatataa

SEQ ID NO: 245634 - DNA, 201 bp, Homo sapiens
aagtcattaacaacttatggtgctttagctgatgtaaggtgcttttcctcatagctcagtacatatccatgaataactgaaaagaaagactaatgtttaartaagtgaagtaagcaggtatgagttaggcttcttttaatgttctttttgtattgctctcatgcgactctccatagcaatgtattctttaacagtggtagt

SEQ ID NO: 245635 - DNA, 201 bp, Homo sapiens
gcttttcctcatagctcagtacatatccatgaataactgaaaagaaagactaatgtttaagtaagtgaagtaagcaggtatgagttaggcttcttttaatsttctttttgtattgctctcatgcgactctccatagcaatgtattctttaacagtggtagtggggaggggttgagagttgcaagaattttggaatggaaca

SEQ ID NO: 245636 - DNA, 201 bp, Homo sapiens
aggccagctctgaaccgtctcttttcttccactgacatagaaagatgagatgtgtcagcacccttgcaaacatgaaagcctagccagtgaagtgctgagtkctggaagctttgcctggggcatgaacaggtagagaaactgcagattctgtgtcagatgaagtgactcaaagggacagaatggccatctttggacagttta

SEQ ID NO: 245637 - DNA, 201 bp, Homo sapiens
catagctcagtacatatccatgaataactgaaaagaaagactaatgtttaagtaagtgaagtaagcaggtatgagttaggcttcttttaatgttctttttrtattgctctcatgcgactctccatagcaatgtattctttaacagtggtagtggggaggggttgagagttgcaagaattttggaatggaacatgaacctat

SEQ ID NO: 245638 - DNA, 201 bp, Homo sapiens
tattttttaaaacatttgttaagttgtagataaaaggaattatttatttgttcccatgtctcaaatataaggctttttaaagtagtgctgttggatgcagktaagataattcatggaaaaatagaaaactttacagtatcattaagtttctttctgcatatacaaaattctactgtgtggatacatgagttaaactatatc

SEQ ID NO: 245639 - DNA, 201 bp, Homo sapiens
gccctttcatttcctttcctcccccacatgttggaaaaagaacaggccatttcatttacattttccactcctgagttccatttcagctgtgtgtatagtargaaataagcaaccgagatttttctaggacatttccatttgctgagttacttttgaagagtacactgtttcaaatttgggtttttacagtcctaggaaaga

SEQ ID NO: 245640 - DNA, 201 bp, Homo sapiens
ttcattactcattttctatttttcatggtaaaatgttgtttgaagaacaaaattaaattattttcttctaatgtttcattctgtgaatgtattttgggaatttttttcccattttccttctacagtttatttggtatgtcatccttaggtttgatatgcagtaggtttagagaacatctttgttttttagatttttttcat

SEQ ID NO: 245641 - DNA, 201 bp, Homo sapiens
gatagttaatagttattgttgaatcaccaaggaaggtcctagtgaagactgctgtggtgtcctacttgatctgaaaggaaaatttgccacaccagtaaatygaagtcctttctaataataagcttgcaaatgtaagcccttgtacttcatccagaattttacctgccccttttgtaataaaaacttcccataactgtcctg

SEQ ID NO: 245642 - DNA, 201 bp, Homo sapiens
ttattaaaactatgaattcaaggacaggcgtggtggctcacgcctgtaatcctaagactttgggaggttgaggtgggtggattgcatgaagtcaggagttygagaccagcctggccaacatagtaaactctgtctcttctgaaaatacaaaaagttagccgggtgtggtggtgggcacctgtagtcccagctacttgggag

SEQ ID NO: 245643 - DNA, 201 bp, Homo sapiens
gggaatgtgatatttttgttaacaggttaggccttctttatttataatgtagtgtcaaggtagttcctggtgttacaacattgggcagggtaatgacaaarcatcccagaagacatatctactatcttgaaacccttctagatgttgagttatacatttagtttctattaatcaaaaagaccttggagacatttccttcaa

SEQ ID NO: 245644 - DNA, 201 bp, Homo sapiens
agtgaagtaagcaggtatgagttaggcttcttttaatgttctttttgtattgctctcatgcgactctccatagcaatgtattctttaacagtggtagtggygaggggttgagagttgcaagaattttggaatggaacatgaacctattgaaaatttatagttaaattgatctttggcaatgtatgcttcacaaagtgctaa

SEQ ID NO: 245645 - DNA, 201 bp, Homo sapiens
tcccaaaataacagtggtttcagtatgaagttttcttcacataaatttgttataattaaaaattataaaatagcctgggcatggtggctcatgcctgtaaygccagcactttgggaggctgaggcacacagatcacttgagttcagaagttcgagactagcctggccaacatggtgaaacctcatctctattaaaaataca

SEQ ID NO: 245646 - DNA, 201 bp, Homo sapiens
caggtgatgagtatagtcagtttttccccctaaagtttatgtgcagacatggggaggagagtattttagacttaaaagtgtacaggtagggatgaaatttrtggaatcctgatagactgaaggggggatataaacaatgaccaagtcagctattgctgcttggattctttatttcttcagactgcaagggaatgagtaagg

SEQ ID NO: 245647 - DNA, 201 bp, Homo sapiens; identical to SEQ ID NO: 47919

SEQ ID NO: 245648 - DNA, 201 bp, Homo sapiens; identical to SEQ ID NO: 47920

SEQ ID NO: 245649 - DNA, 201 bp, Homo sapiens
cacaccaactctgtgttgttgtaggtactgcttttatctgcatttcataggtgagggcactgacacacagaagtatggtttgcccaaggtcacaagaaaartttattgatggaactgagataagagatttcaaggaaattttaagctctaatggactactataacctttgcccctagacttttccaaagttacacaactac

SEQ ID NO: 245650 - DNA, 201 bp, Homo sapiens; identical to SEQ ID NO: 47923

SEQ ID NO: 245651 - DNA, 201 bp, Homo sapiens
ttagatatgcaagataaaactaaccactacccaaattaatgtacagttcatttccagaaccctagtttcttctgtgtgctcactgtcattcagtattacamcccccaaagatacacaccttaactgactgctttctccatagataaatttgcctgttcttgaatgttacatacatatacttttttatatctgttttctttc

SEQ ID NO: 245652 - DNA, 201 bp, Homo sapiens
agagaagcagccataccagttagacatattcaaaataaatccaaagatgctatttattataagtttcatagaaatgattatcaaaaacacttgcatgccartgttttcttgtgccatttctttctacaataaatctatttggcttctgtttcaccttagctgtcatagacgtgttgttcaggtatcatattgtcagtacta

SEQ ID NO: 245653 - DNA, 201 bp, Homo sapiens
aaagttgtttaacttctttgaacccatttacttttctataaaatggagataatacctatcataaaattgtttttaagacatattctaaaataacataggtraatagaagaattctcattattgtaagaaatttaaaactgttcactttaattttatccatttgtataaattctatctcaatcctaatttaaacctgatatt

SEQ ID NO: 245654 - DNA, 201 bp, Homo sapiens
tgtggcggtgggcacctgtaatcccagctactgggaaggctgacgcaggagaatcacttgaatccgggaggtagaggttgcagtgagctgagatcacacaycactgcactccagcctgggtgacagagggagactccgtctcaaaaaaaataaataagtaaactcctttttctctctctctcctgacattgttcccctcaa

SEQ ID NO: 245655 - DNA, 201 bp, Homo sapiens
gagtgcagtggtgcaatctcactccaagctccgcctcctgggttcacgccattctcctgcctcagcctccctagtagctggaactacaggcgcccgccacsacgcccggctaattttttgtatttttagtagagacgtggtttcactgtgctagccaggatggtctcaatctcctgacctcgtgatccgcccaccttggcc

SEQ ID NO: 245656 - DNA, 201 bp, Homo sapiens
ctacagcctctgcctcccagcttcaagtgattctcctgcctcagcctcccaagtagctgggactaaaggcatgtgccatcacgcccagctgatttttgtatttttttttttttttttagcagagttggggtttcaccatgttggccaggctggtctcaaactcctgacctcaggtgatcctcccacctcggcctcccaaag

SEQ ID NO: 245657 - DNA, 201 bp, Homo sapiens
tgtttttttaattagctgggcatggtggcatgccaagagcagaaatttgtcagggtattaagttgaaacaataacagtcctttaaaacttttatatgcttwaaaaaaatgaccttatgcccccacccactccattccctcctggtttaactactgcttatgttttatttttatttttttgttgagacggggtcttgctctg

SEQ ID NO: 245658 - DNA, 201 bp, Homo sapiens
tccctcctggtttaactactgcttatgttttatttttatttttttgttgagacggggtcttgctctgttgcccaggcaggagtgcagtggcacgatgatarcccaatgcagactggaactcctgggctcaaacagaccatctgtttctggtcaaaaaaagaaaaaaaaatcatctgtttctggtcagaagtcaggtagctc

SEQ ID NO: 245659 - DNA, 201 bp, Homo sapiens
gggctgcaatttctacatttctaacaagatcacaggtgatgctgatgctgctggatggtagatcacactttatagagcaaggggctagattctagatatgyactttttattaaatagtacagcagcctgtagccacatgtggctattaatctttgaaatgtaggtggtctgaattgtgatgttctgcaaatataaaatata

SEQ ID NO: 245660 - DNA, 201 bp, Homo sapiens
ctcccgggttcaagtgattctcccacctcagcctcccgagtagctgggattacaggtatgtgccaccatacccagctaatttttgtatttttagtagaaayggggtttcaccatattgcccaggctgattttgaactcctgagctcaagggatccacccacctcggcctcccaaagtgttgggattacaggcttgagccac

SEQ ID NO: 245661 - DNA, 201 bp, Homo sapiens
ataattttttatattgattgtatactgcagtgataatattttggatgtatcaggttaaataaaattgattgatttcacctttttcctattttaaaagtggctactaagaaaattataaattatatgattgatatggtatttttgtttgtcagcactgctctaaactgttgattaaaaatattgttggtgagctctgcttat

SEQ ID NO: 245662 - DNA, 201 bp, Homo sapiens
ggaggctgaggcaaaagaatcgcttgaacccaggaggcaaaggttgcagtgagccaagattgtgccactgcactccagcctgggtgacagactgagacacyatctcaaaaaaaaaaaaaaaaaaggattcagctgggcctagtggctcatgcctgtaatcttaacactttgggaggctgaggcaggcggattgcttgagcc

SEQ ID NO: 245663 - DNA, 201 bp, Homo sapiens
tgggtccttcatctgtgatattcagttaacaatacctagccagtaggggtgttaaagattaaataaatgtgagaatgtgcctgttgcttaatcttcctcaragggttatggactctcagagccacaagaaggtcatctctcctttgctcctcgtatgctgggatctgccacatcaatggcaacaggtgggcctccagaatt

SEQ ID NO: 245664 - DNA, 201 bp, Homo sapiens
taattttttatattgattgtatactgcagtgataatattttggatgtatcaggttaaataaaattgattgatttcacctttttcctattttaaaagtggctactaagaaaattataaattatatgattgatatggtatttttgtttgtcagcactgctctaaactgttgattaaaaatattgttggtgagctctgcttatg

SEQ ID NO: 245665 - DNA, 201 bp, Homo sapiens
aattttttatattgattgtatactgcagtgataatattttggatgtatcaggttaaataaaattgattgatttcacctttttcctattttaaaagtggctactaagaaaattataaattatatgattgatatggtatttttgtttgtcagcactgctctaaactgttgattaaaaatattgttggtgagctctgcttatgt

SEQ ID NO: 245666 - DNA, 201 bp, Homo sapiens
ttttagtagagacggggtttcaccatgttggtcaggctggtctctcctgacctcgtgatctgcctgccttggcttcctaaagtgctgggattacaggtgcragccaccgcacccagcctggttttttttgttgttgttttttttaataggtaatataatcacttggttcaaaattcaaaaggttaaacagagagatacagt

SEQ ID NO: 245667 - DNA, 201 bp, Homo sapiens
aatccagagtgggatttgagttggaaagggaaagaaataaaggttttgggaaggaggttgctaatagaaaatgagaggggcaagggatttgaggtctcagygtaaggagacagggatatgagaggtagagaggttcagaatagaaggccaagttagagttttgggatcaactttcttagtaaagtagttctgggtcttgat

SEQ ID NO: 245668 - DNA, 201 bp, Homo sapiens
agaaaagtttgaaattcttggacttcaactaatttgttttccatggatcccatgaggatacttgtaaaagcagatgataggatacagtcggatcctgtgartggcactagtttagttgtgttttctggatctcttccatatgtcgctgacttctttgtatttgaccgtgtatggatacacagaattttgtaggccagagaa

SEQ ID NO: 245669 - DNA, 201 bp, Homo sapiens
gggtttcaccatgttggtcaggctggtctctcctgacctcgtgatctgcctgccttggcttcctaaagtgctgggattacaggtgcaagccaccgcacccrgcctggttttttttgttgttgttttttttaataggtaatataatcacttggttcaaaattcaaaaggttaaacagagagatacagtgaaatctccttctt

SEQ ID NO: 245670 - DNA, 201 bp, Homo sapiens
ggcaagggatttgaggtctcagcgtaaggagacagggatatgagaggtagagaggttcagaatagaaggccaagttagagttttgggatcaactttcttartaaagtagttctgggtcttgatgagaaggaggtattctttaagcataactgttttactattggtcacttcctctttcattttcttgtggaacacgatgaa

SEQ ID NO: 245671 - DNA, 201 bp, Homo sapiens
attcccagaggtaactactattccgaattgtgtatatgtgactcttttcatttaaaaaaaataactagagacattttcttatgttcctactttctgacatktcttagtaacttgtttgctgtcatcaggaagatatcacctcagatttgattcatgtttgcttaagtgtgtcttaggtgattttgttttgtaggaattgca

SEQ ID NO: 245672 - DNA, 201 bp, Homo sapiens
tcttaagagtgagattgtgacctgtacctttatctacatgcagttaacacaaaagataattacttatatgtaacaagttaaagaatgatgaacactgtaarcctactacctggcttaaaaaaatagaatgttatcaactcatttgaagatgctgtgtgcctgtcccctattgtatccctctctctcattcccagaggtaac

SEQ ID NO: 245673 - DNA, 201 bp, Homo sapiens; identical to SEQ ID NO: 47921

SEQ ID NO: 245674 - DNA, 201 bp, Homo sapiens
atagttaaattgatctttggcaatgtatgcttcacaaagtgctaatcacactttggttttagaatataagctaaactttttaaagatgttagacattgaakagtaaaatacattcatgtgccacataacgatgttttggtcaatgactgactgcatatatgacaagatcccataatattataatgtctataccatagagcc

SEQ ID NO: 245675 - DNA, 201 bp, Homo sapiens
aaagaggaaaggtgttagtaattggagttataaaatacaccattctttgtaagtaatgccgagatggtttatcagagtctctcatctttaatgaaaacttytgctgcttttcaagcaaacttggttcccataatttgggattcatccacagaatgttcaaagtttagtgtcagccattttcagcagaaaatagaggctgac

SEQ ID NO: 245676 - DNA, 201 bp, Homo sapiens
gttccctgtgtcttggataagccagtagttttaagcaacttggcaaatggtgagtgaagtaatgagcactctggcatggcccctggtgttaatgtgagctrttttccctgcatttcagaagtcggaatatatcggtgggacataataggagctgtccaatttttttttccttagggataactctcaatgtgattatacaaa

SEQ ID NO: 245677 - DNA, 201 bp, Homo sapiens
taattgtctcagtttagaccccaactctgtgaattgggcatgtaacttctatgaatgttttctcagctataaaacagaccccatgccttccttgctggttkggagtgaggattacattgtgactgcacacgttaaggtgtccagacctcgagaatgtgacaatctgctggggtcatgacagaccaaaaagtatttcttctc

SEQ ID NO: 245678 - DNA, 201 bp, Homo sapiens
tggcctctgagaagtttctaactcattcagattaggtatactctcaagtccctggaaactgaattttttaactggaaagagagtggtgtaatttctcaagrtcaaatgatgtagattttaacataatacataatttaagtgtaattaatgtagcccagtttattatcttgaaatgttttaccctatttactttttaaatta

SEQ ID NO: 245679 - DNA, 201 bp, Homo sapiens
tataatgtatgtgtacatatatgtatacatgcacgtacatatatgtatatatgtatatatacacagatgcatgcatgtacatatatgtatatatgcgtatrtacacaggtgcatgtatacatgtgtatatatacatgcatatacacatgtatacatgtgtacatatatatacacacatatacatatatgaaataaaggggt

SEQ ID NO: 245680 - DNA, 201 bp, Homo sapiens
tgttcttccaaaggtgttttttgcatatggaagttaaaaacatttatccttcctgcccccacccttggtagcattaagacacattatttcccacatgtttytttccaatgagtgtaatttgggttattccgtatcagtacataaagagcattcttattcttttatacagctgcataaccgttacatgatatctcagtctgt

SEQ ID NO: 245681 - DNA, 201 bp, Homo sapiens
tgttgatgaaaagaccagccaatataaaactaaatggacagaggaaaaaattcaaccagaatgtaatatacatgtgaactaaatgttttctgttgctgacrttttgtaggcttctgaaatttaatgggacttttacaaggtttaccttttttcctaaagtttaatttttaaactgacttaaatgttctttgaccctttggt

SEQ ID NO: 245682 - DNA, 201 bp, Homo sapiens
gttttgttttatatattgtgctatgatttagctccagcggcgccatgagcaaatgaaaaagaatttggaagcacagcacaaagaattggaggaaaaacgtmgtcagtttgaggatgagaaagcaaactgggaagctcaacaacgtattttagaacaacagaactcttcaaggtaactaatagcagattactaagaaatgtg

SEQ ID NO: 245683 - DNA, 201 bp, Homo sapiens
tttctgttgctgacattttgtaggcttctgaaatttaatgggacttttacaaggtttaccttttttcctaaagtttaatttttaaactgacttaaatgttytttgaccctttggttatatttaagaagttgacttccctaatttccttgttatgtttatttttaaatatctttctttctagaagttgggatattataataa

SEQ ID NO: 245684 - DNA, 201 bp, Homo sapiens
aaggtttaccttttttcctaaagtttaatttttaaactgacttaaatgttctttgaccctttggttatatttaagaagttgacttccctaatttccttgtyatgtttatttttaaatatctttctttctagaagttgggatattataataaatactcagcaagtattgttttgcatttaaatataaaatcttgttatttgg

SEQ ID NO: 245685 - DNA, 201 bp, Homo sapiens
ccgggcatggtagcaggcgcctgtagtcccagctactcgggaggctgaggcaggggaatggcctaaacctgggaggcagggcttgcggtgagccgagatckcgccactgcactccagcctaggcgacagagcgagactccttctcaaaaaaaaaaaaaaaaaaaaaaaaaagctgggattctgttgtaaggaagagctctt

SEQ ID NO: 245686 - DNA, 201 bp, Homo sapiens
tttaaatatctttctttctagaagttgggatattataataaatactcagcaagtattgttttgcatttaaatataaaatcttgttatttggattttaatastttatattaaatgcccttaagatttattaaaattttggattaactgaactctgcttttttgtcactggattgataagcaggcttatatctgacataacag

SEQ ID NO: 245687 - DNA, 201 bp, Homo sapiens
tctagaagttgggatattataataaatactcagcaagtattgttttgcatttaaatataaaatcttgttatttggattttaatagtttatattaaatgccyttaagatttattaaaattttggattaactgaactctgcttttttgtcactggattgataagcaggcttatatctgacataacagcttaataaggtagtgg

SEQ ID NO: 245688 - DNA, 201 bp, Homo sapiens
ccatctacacacacttttttcgttgtgctccctattctctgaatgccagtgtcaattttcaggggatttaagacaaggagaattagaataggaggcagctrtcttaattctccatgtttgctttctccccctcactgtctctgtctttctgcctgtcagccttactactacagtaaagtatatacagtaatctttgttagt

SEQ ID NO: 245689 - DNA, 201 bp, Homo sapiens
caattctaaacaaaagttacaagtacagtacataacttttttcctaggatatttgagatggatgcttctcttttgtccccctaaatactttagtatatctytcttcctcaaggatattctgctatatagccataatataccatcaaaatcagaaagtaacaagtgtatgttatacacacacagacacacacatttatatat

SEQ ID NO: 245690 - DNA, 201 bp, Homo sapiens
caggaatgctaagagatgaggttagcttgagaatctatgtcttcacaagctttgtgggccattctagttaaggcatctggcctttagtaagatttttggtyaggtcataactccataagatttggatttagaaagaccactctgacttcagtatggatgattcatgttatagttattcattccaaaggacttggtggccta

SEQ ID NO: 245691 - DNA, 201 bp, Homo sapiens
atgccattcactgagataggaagcgtagaagagggaaaatgggggttcaggtgagcttttgattttaaggagcccatggaacacccaggtagcatatccaytgggtaaacacaaacctggaacttaacagtgagatatgagctgtctatgaagatttggaagtcagttgaccaattgaagataattgaaatctattgtagt

SEQ ID NO: 245692 - DNA, 201 bp, Homo sapiens
tgtcagtttttaaatatggctgttttaagtgttctctaataacacccccacacagacaatttctccccatactctttagaattattttcttttttcttttytcttttcttttctttttttttcttttcttttttttttttttttttttgaattattttcttagaatgaattcccaggaagtggattattctttcaaaggct

SEQ ID NO: 245693 - DNA, 201 bp, Homo sapiens
ctcagcctcccagtagctgggactacagatgcatgccaccatgcctaactaatttttgtattttttgtagtaacaggatttcaccacattgcctagtccartctcaaactcctggcctaaagtgagccttacaccttggcctcccagagtgctgggattacaggcatgagccactgcacctgcccaggaacagaatattga

SEQ ID NO: 245694 - DNA, 201 bp, Homo sapiens
ccggccggctggctctggttaggtccccggctcctctccatgctgctcggcggcgagggcagcggcgggggcacccgggggcagctgcagcatgcggagcycccgggcagggcctggccgcgccccgctccctccccgccgatccgcctgccctttgtccccgtgaccgccaccccttaacacccagatattctaattcag

SEQ ID NO: 245695 - DNA, 201 bp, Homo sapiens
aattttgtatattaaaagaaaatatacaaaatatacaaaaaatatatgtacttatacaatatattttttaaaacatttgttatgttgtcgatataaggaaytgtttaattgttcccatgtctcaaatgtaaggctttttaaagtagtgctgttggatgcaggtaagataattcagagaaaaatagtaaactttacagtatc

SEQ ID NO: 245696 - DNA, 201 bp, Homo sapiens
atgtgcatgaagaatacaaccaagagagccatcacgttcaagaaaagaccacaggttattccgagtgaagtaaggctttcactagaaggcacttggggaaygttccaatgacagcgacattcatcgctacagtagaaactcacacaatcgcagccctttattagtattttgttacccagtagttcctgtgtccattcattt

SEQ ID NO: 245697 - DNA, 201 bp, Homo sapiens
aggatgctcgaccagtaagtatagcacagatattccaaaattccaaaaaaattcaaaacacttctggtcccaagcatttcaaataagagatactcaacttkccccaccctggctggcatcctgcctcatcattaagtctatttctgttttcatatttgaaaacataactaaaattgaggggttctttacctggggcccaaa

SEQ ID NO: 245698 - DNA, 201 bp, Homo sapiens
tagtggtcacttgtgagtgggcctttagggactaccagacacatcaaataatgacagcagtttgagagtgaggctttgaaagcattccatgattgttctgtttttttccagttgccactaggctgctggtttttactgtgattgtgtgctgatggttttcaaggctactgtagaggtagagagatgagaatgggcaagtta

SEQ ID NO: 245699 - DNA, 201 bp, Homo sapiens
tggtaaagaggatctcttactaatgaattagaaaagcagcagcagagaggaaatcatgaagaaaaagtgtaataggactagagatgttagtagacaaggarcagaaagggcatcaaaatgatcctcagtattttcatgttgagacacattcattcccctccctacctgactccgcatttcccacttttctctcttgcttct

SEQ ID NO: 245700 - DNA, 201 bp, Homo sapiens
acaatagaggtgagagtgaattttgaaattaaataaatggcatgtaattgatctttattttcaaaggagcaggtgttcttggtaggaactacatgataggwttaattcagcagttgaggttgccaggcctcacttagtggagaagagcaaaagcacgagaaggtcatcttctgggttttgagaatacaacacttcaggctc

SEQ ID NO: 245701 - DNA, 201 bp, Homo sapiens
tttgtcaaatatttgattgtctaagaaaatactactataggttaacattgtcttagttgtttacttctaaatcttgtaatttctttaaatgaaaaagtagyatctgaaaatcccaacattgttgtaattgggttagctattgttgttatcatgttgtctatcatgtttataaaatggtcactcatcttgattattttcctt

SEQ ID NO: 245702 - DNA, 201 bp, Homo sapiens
gcacgatcttggctcgctgcagcctccacccaggttcaagtaattctcctgcctcagcttcctgagtagctgggattataggcatgcaccactacacctgrctaatttttgtatttttagtagagacagggtttcaccgtgttggccaggctggtctcaaactcctgacctcaagtaaaccacctgcctcagcctcccaca

SEQ ID NO: 245703 - DNA, 201 bp, Homo sapiens
ttaatagccctggaacaattctattttagagggacttaaaacaagaattagatgcgttgtttaaatctgaagaatagctgaacttgtccagtcagctatartttgtctcaaggttagatctggagaagcggatgctgttcttagcagctatccagtaattacctgtttctgacaaagaacgtatggagccatcaaagtact

SEQ ID NO: 245704 - DNA, 201 bp, Homo sapiens
atcccagcattttggcaggcgaaggtgggagaattgcttgagctcaggagttcaagactggcctgggcaacatggtgaaacctcgtccctactaaaaatasaagaaatagtcgggcgtggtggtgcatgcctgtagtcccagctactcaggaggctgaggtgggaggatggtttgagcctgaaaggcagagattgtagtga

SEQ ID NO: 245705 - DNA, 201 bp, Homo sapiens
gcagaaaacttgcagctgtgacttataatggagttgataacaacaagaataaagggcagctgactaagtaagtatatatttttttctccaaaaaggtattmtttctgtagtcaataatcatattgtttcattttcattaaatttcttctggctactcagtagaaaatttggataatgttctttatgcacagcagcataaat

SEQ ID NO: 245706 - DNA, 201 bp, Homo sapiens
ggtggtgcatgcctgtagtcccagctactcaggaggctgaggtgggaggatggtttgagcctgaaaggcagagattgtagtgagctgagatcgtaccactrcattccatccagcctgggcaacagagcgagaccctgtatcaaaaaaaaaaaaaaaaaaaaaacggaaaagaaaaattaaataaacattgttttatattgg

SEQ ID NO: 245707 - DNA, 201 bp, Homo sapiens
gcccggcccgggggccagggccgccaacgcagcgcccccgcgcggtgccgctgtccgccttggcggccgccgggaccacgagcacgcgtcgggccgttccytgcgccgccgccttcgggaggccggccggctggctctggttaggtccccggctcctctccatgctgctcggcggcgagggcagcggcgggggcacccggg

SEQ ID NO: 245708 - DNA, 201 bp, Homo sapiens
tgagttaaataacattttattctaatttacgcaattgcgaaaacagatcatcttaattaagaaaaactgatagccagtattctgtcttgttttgtttttarcattttcactctagctctcttgcctgcttcctttatagaaaagattgctgtgatggttagaaatatttagccaaataaggagaaaagacaccataataag

SEQ ID NO: 245709 - DNA, 201 bp, Homo sapiens
aggaggggaggaatcctaggtttcacacttgagtaatggggaagattgtaatgccattcactgagataggaagcgtagaagagggaaaatgggggttcagrtgagcttttgattttaaggagcccatggaacacccaggtagcatatccattgggtaaacacaaacctggaacttaacagtgagatatgagctgtctatga

SEQ ID NO: 245710 - DNA, 201 bp, Homo sapiens
ggttcacagcctggcggctagtgagggacctccctagtataagcattacagagcaaattgaccatgcctgcaggaagatttaatacagcagagcagcaagmcttttatgcctaaaaattctaaagttattattaaaaagatgtgtatttaatttagctcatgtctttaagacaaagccatctagtggatatttaataaata

SEQ ID NO: 245711 - DNA, 201 bp, Homo sapiens
aaaatttgaaagagtgaaataaaaggtttacactttccccaagctccaatgaattattactttgcacgttggaggccatcgatctaggcagtatgtggatrgttaatagttattgttgaatcaccaaggaaggtcctagtgaagactgctgtggtgtcctacttgatctgaaaggaaaatttgccacaccagtaaatcgaa

SEQ ID NO: 245712 - DNA, 201 bp, Homo sapiens
ttaattgttcccatgtctcaaatgtaaggctttttaaagtagtgctgttggatgcaggtaagataattcagagaaaaatagtaaactttacagtatcattwagtttttttccgcatacacaaaattctgtgtagatacgtgagttaaactatatcccaggtgaaaacataaatagtagaattctactggaaatatatctct

SEQ ID NO: 245713 - DNA, 201 bp, Homo sapiens
aatgtttaacacagttggagactctataactcactaggtgggaagtggggcttagaagcttgcttattaagaggcgggcatggtggcagtggttctcatckgtaaacccagcattttgggaggtcgaggcgggctgatcacttgaggtcaggagttcgagaccagtctggccaacatggtgaaaccctgtttctactaaaa

SEQ ID NO: 245714 - DNA, 201 bp, Homo sapiens
taattgttcccatgtctcaaatgtaaggctttttaaagtagtgctgttggatgcaggtaagataattcagagaaaaatagtaaactttacagtatcattargtttttttccgcatacacaaaattctgtgtagatacgtgagttaaactatatcccaggtgaaaacataaatagtagaattctactggaaatatatctctt

SEQ ID NO: 245715 - DNA, 201 bp, Homo sapiens
cgtctctactaaaaatacaaagaattagccgggcatggtagcaggcgcctgtagtcccagctactcgggaggctgaggcaggggaatggcctaaacctggraggcagggcttgcggtgagccgagatctcgccactgcactccagcctaggcgacagagcgagactccttctcaaaaaaaaaaaaaaaaaaaaaaaaaagc

SEQ ID NO: 245716 - DNA, 201 bp, Homo sapiens
tttaaagtagtgctgttggatgcaggtaagataattcagagaaaaatagtaaactttacagtatcattaagtttttttccgcatacacaaaattctgtgtrgatacgtgagttaaactatatcccaggtgaaaacataaatagtagaattctactggaaatatatctcttaaagagaggaatcataccatactttttctat

SEQ ID NO: 245717 - DNA, 201 bp, Homo sapiens
tgtttgttatagttagcctgtactccctttttttgttttttgtacttctgctgtcattttgagtacatatatgtgttattgacaactgcagaattttccarttattcttcctcagtcttttcctttgggtaagtaactcagtatatataattcagccacctgatgattataactccaccatctctccaccaaaagaactgt

SEQ ID NO: 245718 - DNA, 201 bp, Homo sapiens
ctagtttaactctatgaagaactgcctgactgccgaagcagctgccttattttacatttctaccagcagtgtatgagagttccagtttttccacattcttktccatacttgttattgcctgtgttttaaaactatcctactgggtgtgagctggtatcattgtggttttaatttgcatttccctaatgatgttgaacatct

SEQ ID NO: 245719 - DNA, 201 bp, Homo sapiens
catatgtaaaaccaacatattcattctgggatatatcccattggttatggtgtataacccctttttattgctggatttggtttgctagtactttgttgatktttttttccatccatataagatattggttggttgtttttactcgatgtgtttggttttggtatcagagtaaaactggcctcataaaatgagttgggaagt

SEQ ID NO: 245720 - DNA, 201 bp, Homo sapiens
ttcatttatttctgcttaaataatcatttccttattttgttttccctgttttgggtttagtttattctttttctagtttcttgagatggaaggttatgatrtgagatctttctttttaatataggcatttacagctgtaaatttccttctaagcactgatttagctgcattcaatacattttggtatgttgtgtttttagt

SEQ ID NO: 245721 - DNA, 201 bp, Homo sapiens
aatatactttgtatgattttcagcccatttaaattgagacgtgttttgtgatctaacatatggtctcttctggagaatattccatgtgcacttgagaagawtgtgttttgctgtttttgggtggaatgttgtacagctatgtgttaggtctagttggtttatagtgttgttgagtcttctgcttctttatcatctgtctag

SEQ ID NO: 245722 - DNA, 201 bp, Homo sapiens
gcctgccgggaggttcgggaaactggcgtcgcagcggagagggcatcaggccaacgcctcccccgaggctcagctgcgggctcccaggcgtaggcacccayggcccttacgctgaccgtagcttggacgccgctgccgccggggtccaatgccggtcatgcccatcccgcgggggttgtgctccttccatggtccacacac

SEQ ID NO: 245723 - DNA, 201 bp, Homo sapiens
gtttttgggtggaatgttgtacagctatgtgttaggtctagttggtttatagtgttgttgagtcttctgcttctttatcatctgtctagttgttttacccrttattgaaagtagggtgttgaaggtcaggtattactgttcagttgttttttttacctttcattttcttagctttgtgcaatttggggactcttttattag

SEQ ID NO: 245724 - DNA, 201 bp, Homo sapiens
ttaattttcatagagtaacaccttaaattgtaaatattatgttttgttttaataaggacaaaaaaatttaaaatccagttatttccccttaaactgcagtraaatgagggaatgataatgacattgttgcaaaacatgtataatgcatttcaaagtcaaaataaatgtaaaataggcattaatttggaacattcagaaatt

SEQ ID NO: 245725 - DNA, 201 bp, Homo sapiens
ccttctctgcagggtttattgttgttgctttttgttatttgcttagttccttttcgaactaattctgtgaagttaatttttgccatatgttgtcactgaartctctgcttggttatcttagtggtcacttgtgagtgggcctttagggactaccagacacatcaaataatgacagcagtttgagagtgaggctttgaaagc

SEQ ID NO: 245726 - DNA, 201 bp, Homo sapiens
tggtgattaagagttttcggatctagagtcagacttggattcatatctcagttctaaagcttaactgaacctttggcaaataacagaacttctatttttcyttctctgtaatgtgggaatcataaggttattggagaagtaaatgagatagtacatgacaaatccttagcatgatgcctggcatataataaacactgagat

SEQ ID NO: 245727 - DNA, 201 bp, Homo sapiens
tatttattgtttaccttggtggcaataccatgtgatggcagtttactaaatatttgttaaatggcctataaaaactaatgcagaaactatcgaaagtaaattttttttttttttggctaacctgttgagtaatgtaactttttttatttttgaatttgtgaggactacagagatgtatttgaacaagaatactttgtttta

SEQ ID NO: 245728 - DNA, 201 bp, Homo sapiens
aggaaggcagtatccttggggtgttgctgaaggtaagattttcttcagtgaatgactttctaaaatatctcaaaactgattaaaaatttgtatttatagtaagtagtacagtatgcacactgtattgatatagtctagattttcaaggataatactgatttcaggttcttgtagtctcaattttctctttaagtacattgg

SEQ ID NO: 245729 - DNA, 201 bp, Homo sapiens
attttttggattctggtttgggagaagcacccttatatttaggctgatgggtggctgaattagaaagtatgttttgtgatttagaattttatacggagatrttcattgtgattaattctttgtattagcagatttttgctttttatagttgcatgatttcttgttttgatcattcattattgtctattagtaaagaaaaac

SEQ ID NO: 245730 - DNA, 201 bp, Homo sapiens
ataacaaactaagaaaaatcatccgtattgtactatccacagagtagccactatttacattttggtgtgttacctttcagacttctatttttcttcctctstcttttccctttgtcctctgtcatcttgttcccccactcctcaccacaaataaaaaggggtaaaaaactaaaaaaaacctctaaacacaatttattgagt

SEQ ID NO: 245731 - DNA, 201 bp, Homo sapiens
gaagggaatgaattgggaattggtttgctgcctccttgagacccagataaactgcagaaggggtgggacaagatcacagaaaaatgtcacaaaagttttgyatattttttttcttaattgggcatttgcttcattctgtagacctttgtttttcacaggtcctgtaaggttaattcaactaatttctggttgtttttggtg

SEQ ID NO: 245732 - DNA, 201 bp, Homo sapiens
gtcctttgcccattttttgatggggttgtttgtttttttcttgtaaatttgtttgagttctttgtagattctggatattagccctttgtcaaatgggtagrttgcaaaaattttctcccattttgtaggttgcctgttcactctgatggtagtttcttttgccgtgcagaagctctttagtttaattagatcccatttgtc

SEQ ID NO: 245733 - DNA, 201 bp, Homo sapiens
ttgcccattttttgatggggttgtttgtttttttcttgtaaatttgtttgagttctttgtagattctggatattagccctttgtcaaatgggtagattgcraaaattttctcccattttgtaggttgcctgttcactctgatggtagtttcttttgccgtgcagaagctctttagtttaattagatcccatttgtctattt

SEQ ID NO: 245734 - DNA, 201 bp, Homo sapiens
taactataaaacggactccagttgtttgaagtgggttgtgatataactcatagatttgtatcagtataaaaatgcacacttttcacagtttggccaaggaktatctattttattttctgtgcttcattagttgccttttagttttcacagttcacatatgtctcctctttccatctgtttctgcttatcatctttagcttc

SEQ ID NO: 245735 - DNA, 201 bp, Homo sapiens
taccctagtgtaacaaaacggataaatttctagaagcaagcaccgtgtttataataaaataatacatacttcaatatgcaagtgcttggacgtagtatatkaggtaggacagtgtaatagaatacttataatgaattattagttataatgaacaagtttgagttgtgaaaaataaaattacaaaccattccatacaggtgg

SEQ ID NO: 245736 - DNA, 201 bp, Homo sapiens
gttttcttcttttggttgttagagtggtgtaagtgactaccaagtgtgtagctttgccctgttgagcttatatctcaagctgtggtggtttcatgttgggktcgaaaaaagagatgtgtgaggaagctggtaaccatgtctgtgccctactttttaaaaatctgtcattattgaaaatcataattacatcatatgtcactt

SEQ ID NO: 245737 - DNA, 201 bp, Homo sapiens
ctacttatttaaaaaacattagaataacacttaaaaagtcatcacccattatcatgcattccaaacacaatggttttcatagataaatatttttatatggrtggatacagtctgtgtccattagcagtattttttcagtacatctttcatgacttaatattcataattatgatttagcaacttcataacattctccccagt

SEQ ID NO: 245738 - DNA, 201 bp, Homo sapiens
gttaacaggttaggccttctttatttataatgtagtgtcaaggtagttcctggtgttacaacattgggcagggtaatgacaaaacatcccagaagacatayctactatcttgaaacccttctagatgttgagttatacatttagtttctattaatcaaaaagaccttggagacatttccttcaataggtggcaagaaagaa

SEQ ID NO: 245739 - DNA, 201 bp, Homo sapiens
tgtgtattaatgttttaaagaattgttttcctacttatttaaaaaacattagaataacacttaaaaagtcatcacccattatcatgcattccaaacacaayggttttcatagataaatatttttatatggatggatacagtctgtgtccattagcagtattttttcagtacatctttcatgacttaatattcataattatg

SEQ ID NO: 245740 - DNA, 201 bp, Homo sapiens
ttaatgttttaaagaattgttttcctacttatttaaaaaacattagaataacacttaaaaagtcatcacccattatcatgcattccaaacacaatggtttycatagataaatatttttatatggatggatacagtctgtgtccattagcagtattttttcagtacatctttcatgacttaatattcataattatgatttag

SEQ ID NO: 245741 - DNA, 201 bp, Homo sapiens
tgttttaaagaattgttttcctacttatttaaaaaacattagaataacacttaaaaagtcatcacccattatcatgcattccaaacacaatggttttcatrgataaatatttttatatggatggatacagtctgtgtccattagcagtattttttcagtacatctttcatgacttaatattcataattatgatttagcaac

SEQ ID NO: 245742 - DNA, 201 bp, Homo sapiens; identical to SEQ ID NO: 47922

SEQ ID NO: 245743 - DNA, 201 bp, Homo sapiens
agtctctcatctttaatgaaaacttttgctgcttttcaagcaaacttggttcccataatttgggattcatccacagaatgttcaaagtttagtgtcagccrttttcagcagaaaatagaggctgacaatttcctgtgttctttagaagactttgaaagcttcatgggaagaatgaagactattcttggcctgaacatttgc

SEQ ID NO: 245744 - DNA, 201 bp, Homo sapiens
tgtgtagatacgtgagttaaactatatcccaggtgaaaacataaatagtagaattctactggaaatatatctcttaaagagaggaatcataccatactttktctatgcgaataagaaaagaaatgtttgcattgctaaaaagcaaattgccccaggagctagcataatattttattttatgttaataataagtagaacaat

SEQ ID NO: 245745 - DNA, 201 bp, Homo sapiens
catgattgttctgtttttttccagttgccactaggctgctggtttttactgtgattgtgtgctgatggttttcaaggctactgtagaggtagagagatgasaatgggcaagttaaaatgcaagagctgctgtttttaccaaggctcagccccttgtcttgaatcagcattacctggattcctgcaagcttttagttaattt

SEQ ID NO: 245746 - DNA, 201 bp, Homo sapiens
gaaggcagtatccttggggtgttgctgaaggtaagattttcttcagtgaatgactttctaaaatatctcaaaactgattaaaaatttgtatttatagtaartagtacagtatgcacactgtattgatatagtctagattttcaaggataatactgatttcaggttcttgtagtctcaattttctctttaagtacattggta

SEQ ID NO: 245747 - DNA, 201 bp, Homo sapiens
taacttttggagacagagtctcgctctgtcgcccaggctggagtgctgtagcaccatcctggctcactgcatcctctgcctcccaggttcaagcaattctygtgcctcagcttcctgaggagctgggactacctggctaattttttgtattttagtagagacaggatttcaccatgttgcccagggtggtcttgaactcct

SEQ ID NO: 245748 - DNA, 201 bp, Homo sapiens
tttaaactgacttaaatgttctttgaccctttggttatatttaagaagttgacttccctaatttccttgttatgtttatttttaaatatctttctttctaraagttgggatattataataaatactcagcaagtattgttttgcatttaaatataaaatcttgttatttggattttaatagtttatattaaatgcccttaa

SEQ ID NO: 245749 - DNA, 201 bp, Homo sapiens
atcatcaggcattagattctcataaggactgcgcaacctagatcccttgaatgaacagttcacaatagggttcactctccaatgagaatctaatgctgccrctgatctgacaggtgccagagctcaggcggtaatacgagaggctggagatacagataaagcttcagttgcttgcccgccacttacctcctcttgtgcggc

SEQ ID NO: 245750 - DNA, 201 bp, Homo sapiens
agggttcactctccaatgagaatctaatgctgccgctgatctgacaggtgccagagctcaggcggtaatacgagaggctggagatacagataaagcttcasttgcttgcccgccacttacctcctcttgtgcggcccagttcctaacaggccacagaccgctaccagtccatggcctggaagttggggacccctctactgg

SEQ ID NO: 245751 - DNA, 201 bp, Homo sapiens
gttgcttgcccgccacttacctcctcttgtgcggcccagttcctaacaggccacagaccgctaccagtccatggcctggaagttggggacccctctactgsgatatttataattgcatatgtggttacctaatatttccatgatacaacactggtctagattctaggccattctccttcaaaaagaaccctgcttccttac

SEQ ID NO: 245752 - DNA, 201 bp, Homo sapiens
agtacccagttgttcatatcagtaaaaagaggagagctgggggcatgctaaataggttatgaacctttaaaatagttgagggatgaggaacataaaaactratatttaggacatgcctatgtaatcttgtaatattttagttttcatattatattaaatctagaatctaggcatttttagaccagttatacttaaaatatt

SEQ ID NO: 245753 - DNA, 201 bp, Homo sapiens
agccctttcatttcctttcctcccccacatgttggaaaaagaacaggccatttcatttacattttccactcctgagttccatttcagctgtgtgtatagtragaaataagcaaccgagatttttctaggacatttccatttgctgagttacttttgaagagtacactgtttcaaatttgggtttttacagtcctaggaaag

SEQ ID NO: 245754 - DNA, 201 bp, Homo sapiens
ttttaaaatccaaagggaggcagattggagttatttagaaaagatcaatggctatttttgaaatacaaagttactaatgtaaaccttggatttttgtagcytgatgtttaaactgcaaatagaatttgggtgtgttaaggtaatttgaggtgcgcattataatccctagtcattttagttttttattaaacatctcatttt

SEQ ID NO: 245755 - DNA, 201 bp, Homo sapiens
atgttgctctctttcttaaaaaatagaattcttttttccccaactttgtctttgagttgttactgacaaatcacactttggtttttttgtttgtttgtttttgtttttgtttttgttttttttgagactctgttgctgaggctggagcgctgtggcgtgatcaccgctaactgcagccttgacctccccaggctcaggtga

SEQ ID NO: 245756 - DNA, 201 bp, Homo sapiens
cagcatgaagaacttgctttgagagcaaaatagtatttaaaaaagtgcagtgtgcactctttaaacctgttcagagctcttcactctagttggcaaaagakgtgaatgtaatgtaatgtaatgggattgaaaaagtcttatgagaaagcagagcttttccttggcactgttttgtgttttgggcaattagtattttgctta

SEQ ID NO: 245757 - DNA, 201 bp, Homo sapiens
cacatatgtatcgcccccacgtttcttccaagctgcctcttcctttcccttctattcctccgtgttaaatatctaaactattccatggaatgggctctctmtatatttttttgtgtcaagaggctctttgtattcacactcttaacactgcaacactccactgtcttcatccaccccatgcatattttttttgctgtgaca

SEQ ID NO: 245758 - DNA, 201 bp, Homo sapiens
tttttgaacaaaaatggtgcatctgtgtatgcagccacccacttgtctatctctgaaaggatttatacccaaaacactaccaattattacctttaagtgaygaaaaaatgagtgatttcaattttgtcaattttctttagctctattttcttaattttttgaattgaattttttttttttttttagacagagtctagctct

SEQ ID NO: 245759 - DNA, 201 bp, Homo sapiens
gccacccctgtcccttcattgtacatgactgggaaccccctgaggctggttaaaaccaactgtctacttggcgccacacctgtatttgtgctcttgaacawtgtcagtgaaaaaacatgcaactttactcactggactcgttacaaatttacaaccaaaagtgtgaaatgggtgctccacactgcatagatggactagagg

SEQ ID NO: 245760 - DNA, 201 bp, Homo sapiens
ttttttcttagatcctgtcttttgtaccttctgaaagattcagttaccattatcccctttctgtcttgcatcatcaactttttcctctctgccagatcatycccactggcaaataaacatactgtaatataattcgtcttaaaatgaaaaacaaatccccttaatttggtccttctttcaagtgccaccccatttcttggc

SEQ ID NO: 245761 - DNA, 201 bp, Homo sapiens
cagatccccattgatctatgtcttgtcagtgccaatagttaagcccctcctatactcagcctctcagcagccaccctggttacatgtttcttctgaaacayggtcttttcaggctttctgcaacacaacatcctcttggatttccttcttcttggtcttctttgctggcttctttttctctaccatgttttacatgttagt

SEQ ID NO: 245762 - DNA, 201 bp, Homo sapiens
tgttattagaattttattgtcatgagaatattattatattgaatattactgtacaaatggaatgattcaatcaaactgaatgaaaagatttatagttctcrttctttttttttttttgagacagtctcactctgttgccaaggctggagtgcaatggcacaatcttgcctactgcaacctctgcctctcaggttcaagtga

SEQ ID NO: 245763 - DNA, 201 bp, Homo sapiens
atgtttgtgcaccttattttctttatccatttatccactgatggacacttgcttaggttgttttcttatcttggattttgttaagcatgctgaaatgaacrtgagagtgaagatatctctttgagataccggttcatatcttttgggtatataatcatgtaccacataacagtgtttcaatcaatgacagtctgaatgtag

SEQ ID NO: 245764 - DNA, 201 bp, Homo sapiens
ctggtgaagatcctgtgaacattactgaatcgacagcaaaggatttaaaatatttcataaatttagttaatagagcagtggcaaaatttgagggaattgaygccaattttgaaaattctactgtgggtaaaatgctatcaaatagtatcgcatgtaacagagaaatcttttgtgaaaggaagagtcaatcaatgcagtaaa

SEQ ID NO: 245765 - DNA, 201 bp, Homo sapiens
tttgcttttgttgctagtgcttttatggccataatctaaaaaattgtttctcaggccaatattaggaaactttccccccatctttttctattagttatatsgttttatgtcttatgttttagtctttaatccattgtgagttgatttttgtgtacggtgtcagatacaagtcaaatttctttcttctgcctgtggatatat

SEQ ID NO: 245766 - DNA, 201 bp, Homo sapiens
ggctgagaccacatagggaggctggaattttccctctactcagtagtagcaaggcccccttctgtgatgtcggtgccacatgaggaataggacaaagattwtttgccccttccattcagggcaattttaagtggagacctactgggaagccagaactcccactcctacctagtgatgagtggtttcctcctctccagaagg

SEQ ID NO: 245767 - DNA, 201 bp, Homo sapiens
taaaatggttacaaaacattatgatcattttttaatgttataaatatacatttgttacagaatcatggtatggagaaaagaataaaaagtaaacatccacaatttatacaaaaatgctaaaattatgcataaaccaaaattatttctatgtggtaaggttatagttgattttatttcttcttttctctctgtcgatattta

SEQ ID NO: 245768 - DNA, 201 bp, Homo sapiens
gcaattatttgttcaacaaatttgtattgattgacagagcatgagccatggagtctaatagatagaagctctttttgtttttgagacagagtctcactctrtctcccaggctggagtgcagtggcgcaatcttggctcactgcaacctccgcctcccgggctcaagaaattctcctgcctcagcctcccgagtagctggaa

SEQ ID NO: 245769 - DNA, 201 bp, Homo sapiens
caagaaagaaaggaaggaaggaaggaaggaaggaaggaaggaaggaaagaaagaaagtagggttataggttagtttttttttttttttttttttttttggkgggtggacaggatatttagggattttctgcttcatgttttccatttttcccagggactggtaaacaagaatgttttcaaagaatgaagaaggaagtagtg

SEQ ID NO: 245770 - DNA, 201 bp, Homo sapiens
atcatattaaaattgtttgtgggtctgagataaaaagaaccagaacttagaagtgcctgtccataagcatacttatgtctctgttagatttaatatactgkatttcttcatcagccactacatgaagtttctgtggccagggtatttaattttcctgaaaaacagaaatatacacaattgagatattggggttgggtactc

SEQ ID NO: 245771 - DNA, 201 bp, Homo sapiens
ctattccttctgctaagtaaaaacgaaaactctagatattatatatgaaacaaacataagaagactctaaaaagtaaagagaaaaagacagactggttagrcatctcaagacccaagaagcaataggatggtcagttcttttggacttatatattccagagttagagctaaagaaggtggcaatctggaaaccctaatagg

SEQ ID NO: 245772 - DNA, 201 bp, Homo sapiens
cagaccatgtcatttttgctatgtctgcctagaatatagcttctgcagcacaggctatgagaagtgaaaaacacagcagcctgctcctcatggggtaaagccatagtcctagagtagaaggtaggtggagaggaagccctccttatcttggctgcacctgcctggagtagactgcctcggttaaagcttttgtaatgcaga

SEQ ID NO: 245773 - DNA, 201 bp, Homo sapiens
tgttgctctctttcttaaaaaatagaattcttttttccccaactttgtctttgagttgttactgacaaatcacactttggtttttttgtttgtttgtttttgtttttgtttttgttttttttgagactctgttgctgaggctggagcgctgtggcgtgatcaccgctaactgcagccttgacctccccaggctcaggtgat

SEQ ID NO: 245774 - DNA, 201 bp, Homo sapiens
gttgctctctttcttaaaaaatagaattcttttttccccaactttgtctttgagttgttactgacaaatcacactttggtttttttgtttgtttgtttttgtttttgtttttgttttttttgagactctgttgctgaggctggagcgctgtggcgtgatcaccgctaactgcagccttgacctccccaggctcaggtgatc

SEQ ID NO: 245775 - DNA, 201 bp, Homo sapiens
acagaagtgatctgtgaaatggtgattagcactaggcggccccaggcagccctggaatgctccatggttcaaatgcccaagaccagatggaagtctagaastggatgactcaaagtttattagttttgccacctgggctgtacagccaaaccagctgccacaggcagttccaattttgacagagcggtaaatgaacataaa

SEQ ID NO: 245776 - DNA, 201 bp, Homo sapiens
ctgctgtgctaggtagggggcaagaaaaggcctgaaaaatcatgccttgagttgttccaggagccaatctcaatttggggtatgttttaatgacaggcttkgtaggttttccaatcgcatctgacgatctagaaagggaaaagcaagccggtgctatatcatgattatgtcatgtggcctgaaccactttttattcttttc

SEQ ID NO: 245777 - DNA, 201 bp, Homo sapiens
ccggtgctatatcatgattatgtcatgtggcctgaaccactttttattcttttctggaatccatggaaaatcatttgatcacctcctttccatagttctgyggtggtggagccataaatattcattggaacataagatccttgtggcagatcaccaggaatcaattcattatcttcatattatcgtcatattgagttgaac

SEQ ID NO: 245778 - DNA, 201 bp, Homo sapiens
atcagaaagagattagtaacaagacccttaaacagatcaaaggaacttgctgaaagtaagtgccttttgggctcgtatgatggttttcttttttttttttcccacctaaaagaggcactgactgtagccattttataaagcatgatttgttaaccatgtcagttacaaaacaaatgttacctaccccatctgacaataata

SEQ ID NO: 245779 - DNA, 201 bp, Homo sapiens
gggaaaataactgagttctgatatggtaccaattactattatagtttaatattaggcaaataatataacaatggtagaaagcctgtaagatgttaagtacygaagtgaatctgtactggagacttgaacaaatcatgttgatgtataagtatggctgtgaaataggctgtttccttcttaagtttgcttctggcatttagg

SEQ ID NO: 245780 - DNA, 201 bp, Homo sapiens
cctttgtttgtgacccacactgacctctactgtctccaatatcgtagaagatccattcacaaatacactcacaaggacaggtgatactgaatatagtgggaaaaaatggagtttttatttacttattttaaaattagattttagagcatacaagtgcaggtttgttacatgcaaatattatgcagtggtgaagcctgggct

SEQ ID NO: 245781 - DNA, 201 bp, Homo sapiens
cagacaggaaatggtacgtgtgcatgctgagtggtgctagtgaaataggaacattatacagaattatattaataattcatttggcctatttttcacctggraagtatttactctcaagtgccccctcctccttctcgcctgagggtgaaagcaggtgcgaaatgctctgggtcctagtgacactgagtagtctatggagtg

SEQ ID NO: 245782 - DNA, 201 bp, Homo sapiens
gtagtggtgtgatcatagcacattgcagcctcaaactcaagcaaacctcccacctcagcctcccgagtaatagctgggaccacaggcacacaccaccatgyccagctatttaaaaagttttttttagagacagggtctcatcatcttgcccaggctggtcttgaactcctggactcaagtgatcttcccaccttcacctcc

SEQ ID NO: 245783 - DNA, 201 bp, Homo sapiens
ttccatattttgcctaagggcattgcatctgcattttatgtcctctatcacctgtattatacttcataggataagcagatgatcatataaataaataaataaatatatatatatatatatatatatatatatatatatatttatttattttttgagacagagtcttgctctgttgcccaggttggagtgcagtggcgcaat

SEQ ID NO: 245784 - DNA, 201 bp, Homo sapiens
tccatattttgcctaagggcattgcatctgcattttatgtcctctatcacctgtattatacttcataggataagcagatgatcatataaataaataaataaatatatatatatatatatatatatatatatatatatatttatttattttttgagacagagtcttgctctgttgcccaggttggagtgcagtggcgcaatc

SEQ ID NO: 245785 - DNA, 201 bp, Homo sapiens
atggctccatttggtgcattggatgctatggctgagaggtgccatataaaaatattgttattgttatgatgatgagttcaagcactggaagggaaattgtrcaataacttagtactggagctatcattattttcagcaaaatgaagtttggcttcttactacactactaagccttgaagattaaatggtatctacagcatg

SEQ ID NO: 245786 - DNA, 201 bp, Homo sapiens
attgtcttgccatgttgctcaagccgtcctcaaactcctaggcttgaccagtccttctgcctcagcctcttgagtggctgtgcctgacttaaatttgacarcttagatggaattggcctcctttcaaaaatgcaaaatactacaactcactcaatattaaacacataatataaatagccttacaattattaataaaattga

SEQ ID NO: 245787 - DNA, 201 bp, Homo sapiens
gtacaagtacaattaaatatggactgttttttttttcagtgactcagaaacttatgcatagaaaagaagatgccttaaattgacgttgatgtttcctttaggctgggcttcacagtcctgatgtagagtcaccacagctcagtttgttttctgagacctgaagattcagacttcatttattatcaaatatttcatgagtgc

SEQ ID NO: 245788 - DNA, 201 bp, Homo sapiens
ccttctgcctcagcctcttgagtggctgtgcctgacttaaatttgacaacttagatggaattggcctcctttcaaaaatgcaaaatactacaactcactcratattaaacacataatataaatagccttacaattattaataaaattgaggtcaaaattttaaaactcccccaaaagaaaccttcaagcccagatgattgc

SEQ ID NO: 245789 - DNA, 201 bp, Homo sapiens
gagaggccgaggaggctggatcatctgaggtcaggagttcaagaccaacctgaccaacatggtgaaactccatgtctattaaaaagacaaaaaattagccrtgtgtggtggcacatgactgtagtcttagctactttggaggctgaggcaggagaatagcatgaacccgggaggcggaggttgcagtgagccgagatcgtg

SEQ ID NO: 245790 - DNA, 201 bp, Homo sapiens
gtaatattttcttcaataacttataactagttttgttccatttgtctttgtttcttatttggaaaattctattttgtttagattaaaatttggaatctccwtcctccatgtctgttatcttctttctcatgttgttttcatttctttgtttctttcttctatgtatcaggagaacttctcatctttgccccttaatcactg

SEQ ID NO: 245791 - DNA, 201 bp, Homo sapiens
atggctactattacttttctaacaattattactttatcatcagggcaacaagtgaaatatgttttatgagatcttgcatcttgatcttttgccaatatatrttttcaattcatgggctaaataggaaaagtatataccagatcctgcataatgtttacttgggtgttactcatcgaagcagagacacaccaaggagaaaaa

SEQ ID NO: 245792 - DNA, 201 bp, Homo sapiens
tctcagctcacatgagtaaatagaaatgtgatctttaatttttattgagttgcttaacagtttctgctttgtaaaatctgtgataggctactaaatccctytataaacccttccttttacccccaaaatattttcagatggtgcagaatataacaagttgctatagtaactgtgcaagctaaagtaatatgccctgtaata

SEQ ID NO: 245793 - DNA, 201 bp, Homo sapiens
tgaggcaggaggatggcgtgaacccgggaggcagagcttgcagtgagctgagatcgtgccactacattccagcctgggcgacagagcgagactccatctcaaaaaaaaaaaaaaaaaatttactgaagacattttcttagtagtgactgtacttggaagacccctgggctctttaaagtggtatgcagatgaagagagact

SEQ ID NO: 245794 - DNA, 201 bp, Homo sapiens
ccgggtatagctctactccctttctccagggatacctcacacttttgaaaaacagggctgttctctgtatccctgtcaatgtagatgcagagggtcttggygatgatgtggttaaagtagtgaaaactcagccttacactaggtatggatttaattatcccatagtactgattagtttgatagcaaaaaaggatatttgag

SEQ ID NO: 245795 - DNA, 201 bp, Homo sapiens
gtgcaaattataatgaacttttaggtttatgtcagaaaacaccagaaagaattcttacttggagagagtgaacatgctgtggaatgaatagaatgttttakttgtgatgttcaaatggaactaaaattcccccagtagggagtttgtagagtgtgttttaataataagtatatgtgcctatatatttagttgggaacaaaa

SEQ ID NO: 245796 - DNA, 201 bp, Homo sapiens
tcatagcagaaactgggaggaaggtgctgtgtgatgaactctctttctacctgctccttttataagacagcttcctcagtagactcctgtttatgtctcaytggtcagaacgagttccatgcccacttctggctacaagagaggctaataagaacgttcatatcttgcttttaaaagatctctatagcaggagtcagtcaa

SEQ ID NO: 245797 - DNA, 201 bp, Homo sapiens
ctgaggcaaaagaatcacttgcacccaggaggcggaggttgcagtgagctgagattgtgccactgcactctagtctaggtgacagagtgagactctgtctaaaaaaaaaaaaaaagaaaaaagaaaaaagacactatcttgcaaaaggacaacccacagaatgggagaaaatatttgtaaattacacatctgataagggat

SEQ ID NO: 245798 - DNA, 201 bp, Homo sapiens
gtgatcagggcgattttcctgatttgctggctgtcaggttgaagtgaaggacaacatcttttgttaaagcctgtgtagccctgaaacttctgcaaatgtcrcttctcagagggctgtgagagtaggttagtttttccacctgtgctcaagaccacccccttcctttcttcagggcaggcttctgaagtctgagcttgtgct

SEQ ID NO: 245799 - DNA, 201 bp, Homo sapiens
agcagagaagaatggctggagcaaagttcccaaggaggaacatgcttggtgaacagcaaggaggccagtgtgggtggggcagactgagccagagggagcastgcaagagaggaaggcacagggtggcttggtgggaagaggagtggattatgtagaaccccatcgcctattgtgaagagcaagggaaagcctcacagtgtt

SEQ ID NO: 245800 - DNA, 201 bp, Homo sapiens
agaatccctgaacatgatcatattattattagatgatttcctccccatccttacagctactgatatacacattgattatttaaggtaaaactatcattctstatggttcaaagtcctggagagagattcctgggaatgatttccatttttttggattggcactcctgcctactgtcttccctgttgcatgggttagtctgt

SEQ ID NO: 245801 - DNA, 201 bp, Homo sapiens
gtacagaatgatgaaaacagattgaatataatgaaaacagtaaagaaaatgtataaaataatgctggacaaatatattctctgtgaatgaggaaacacatkgtcagtatgtaataataatagtatatttagtggccgggcgtggtggctcacacctataatcccagcactttgggaggctgaggcaggtggatcacttgag

SEQ ID NO: 245802 - DNA, 201 bp, Homo sapiens
caggagaagaggatttagtggtgtattggatgaaggtggtgtgttgggcatggcaaaatcatccatccatctagacagcaaattaacagttttgtagaaaygtatagtccccaagtatttatatgcatattagatacgtaaatgctaaaagcataaaaaaagaatggatagaatgattggtggcaagtaagtatcctgatt

SEQ ID NO: 245803 - DNA, 201 bp, Homo sapiens
catattttgcctaagggcattgcatctgcattttatgtcctctatcacctgtattatacttcataggataagcagatgatcatataaataaataaataaatatatatatatatatatatatatatatatatatatatttatttattttttgagacagagtcttgctctgttgcccaggttggagtgcagtggcgcaatctc

SEQ ID NO: 245804 - DNA, 201 bp, Homo sapiens
ttagtatagccatcttacaggctgggccatttaaactgcaaatggcatagtcactgatttaagctttatttctaaagagaaacaaactcttagaagcaaaytgccaaattcttattgaatgtttgccacataaattccagattgtctgttctttattatctttattggtttggaatgaccatttttggttcagggaggacc

SEQ ID NO: 245805 - DNA, 201 bp, Homo sapiens
atatgggaattcccagatttgagatgaaatgcatgagtctagttaatgtttggaattagaatctgagtgtgttttgagtgcagcacatctgaattcctcaygagaggggaatgacaattctgcttacagatgtcagataaaaagaggctattgtatctcctaattcagtatatcccaataagaggccacataaacaggaca

SEQ ID NO: 245806 - DNA, 201 bp, Homo sapiens
tattttgcctaagggcattgcatctgcattttatgtcctctatcacctgtattatacttcataggataagcagatgatcatataaataaataaataaatatatatatatatatatatatatatatatatatatatttatttattttttgagacagagtcttgctctgttgcccaggttggagtgcagtggcgcaatctcag

SEQ ID NO: 245807 - DNA, 201 bp, Homo sapiens
gggtttgaatctagccttcacagttttctggttgtgtgatcttaagaaagttatataacttttctgtgccttaggtcctcaattgttaaaatgacaataamataacatctaccttattggctgaacttagaactttataaacataaatatatgtttgcagacatacacacacactgttgttacgagctatatgtgtccccc

SEQ ID NO: 245808 - DNA, 201 bp, Homo sapiens
gttggagtgcagtggcgcaatctcagctcacttcaacctccacctcccaagttcaagcaattcttgtgcttcagcctcccaagtagctgggattacagagrtacgtcaccacgccaggctaatttttgtatttttaatagagatggggtttcaccatgtttgccagactggtcttgaactcccaacctcaggtgatccacc

SEQ ID NO: 245809 - DNA, 201 bp, Homo sapiens
aatatatgtttgcagacatacacacacactgttgttacgagctatatgtgtcccccaaaattcacatactgtagcctgtatttggagatgggtttctaagraagtaattatggttaaatgacgtcataagggtggagccctaatctgataggattagtgttcttccaagaagagacactagagagttctctctttctcctt

SEQ ID NO: 245810 - DNA, 201 bp, Homo sapiens
cttagaaaaatgtcaaagtgctgttaaatcatggcagattaggtaacattgggaatctttttctttttttttcttaaacacatgttaaggatttttttttwaaaagtcaaaatataaatgatatacatctgtctcttcttgtgtgactttctatttatttattttaccatagtcacactaaggcactaaaatgtgaaggta

SEQ ID NO: 245811 - DNA, 201 bp, Homo sapiens
actgttgttacgagctatatgtgtcccccaaaattcacatactgtagcctgtatttggagatgggtttctaagaaagtaattatggttaaatgacgtcatragggtggagccctaatctgataggattagtgttcttccaagaagagacactagagagttctctctttctccttgtacatttactgaggaaaggccattta

SEQ ID NO: 245812 - DNA, 201 bp, Homo sapiens
caaaacaaaacaaacaacaacaacaaaacaaaaacaaatttcttttctgactgtatccaaactaagctggatgcatcatggatgtgcgtcttttttttttktttgtttttggcagattctagaattcttctaatctgtttccattatctctttaacaaatgtcaagtttattatgattctagtgggtaccaaacctaatag

SEQ ID NO: 245813 - DNA, 201 bp, Homo sapiens
catcttttgaataaatcctttggtcgcatatgctaaaatggtattaggatcataagtaagtgatggtatagtgaagcaactctacctattaacagttccayctatttaatgagaacagtccttgagcaatataggagttggggatggttttagctgttgtgagactcatcgtttctagttttcaacctgtatttctggagt

SEQ ID NO: 245814 - DNA, 201 bp, Homo sapiens
gacagtgcatttaaaatatgtggcatagggtctggcacatagcatatgttcagtagccggtagctgtgactgccagtactacacgagctcagagaccgcargcctgctgctgttgtctttatctcccagctgataacccagttcatcaactgccaggagtccttgttcctataggttttgtccaccagagtggagctctgg

SEQ ID NO: 245815 - DNA, 201 bp, Homo sapiens
ttgacccctagttttcttttgatgtactgtctgtctagttttgagaccatatttttattttttagagacaggatcttgctctgttgctcaggctggagtgyactggcacaatcatagctcactgcagcttcaaactcctgggttcaactaatcttcccaccttagcctcccaagtagctgacactgtaagcatgtatcacc

SEQ ID NO: 245816 - DNA, 201 bp, Homo sapiens
ttaaaatatgtggcatagggtctggcacatagcatatgttcagtagccggtagctgtgactgccagtactacacgagctcagagaccgcaggcctgctgctgttgtctttatctcccagctgataacccagttcatcaactgccaggagtccttgttcctataggttttgtccaccagagtggagctctgggtcatggaga

SEQ ID NO: 245817 - DNA, 201 bp, Homo sapiens
aaaatatgtggcatagggtctggcacatagcatatgttcagtagccggtagctgtgactgccagtactacacgagctcagagaccgcaggcctgctgctgttgtctttatctcccagctgataacccagttcatcaactgccaggagtccttgttcctataggttttgtccaccagagtggagctctgggtcatggagaag

SEQ ID NO: 245818 - DNA, 201 bp, Homo sapiens
aatatgtggcatagggtctggcacatagcatatgttcagtagccggtagctgtgactgccagtactacacgagctcagagaccgcaggcctgctgctgttrtctttatctcccagctgataacccagttcatcaactgccaggagtccttgttcctataggttttgtccaccagagtggagctctgggtcatggagaagtc

SEQ ID NO: 245819 - DNA, 201 bp, Homo sapiens
gggcggctgagtgagactctgtatcaaaaaaaaaaaaaaaaaaaaaaaaaaagaaaataactgtctgcattgtttgtttatgatctgtagctttgcatatwttcctttatttgtaatctcattgctccttgatattttattttcgccatcacagtctaagaaggagagattggaccttggtcttgatctactgccatcttg

SEQ ID NO: 245820 - DNA, 201 bp, Homo sapiens
ctcggcctctcaaagtgctgggattacaggcgtgagctaccgcgcctggcctcaaactttattttttaccaaaacattaacttagcttcaattgctctgcygctgctttatgttctctgtctcagttattgaaagataatctttaattattaagatcagaatcagggaccattctttttagttctgctggatcaatgcagc

SEQ ID NO: 245821 - DNA, 201 bp, Homo sapiens
ttgggaggctgaggctggcggatcacctgaggccaggagttcaagaccagcctggccaacatgcataaaccccgtctctacaaaaatacaaaaattagccrggcatgatggtggatgcttgtaatcctgctactcgggaggctgaggtgggagaatcacttgaacccgggaggtggaggttgtagtgagccgagatcatgc

SEQ ID NO: 245822 - DNA, 201 bp, Homo sapiens
agctataacagaaacccccaaatagcacagattaaagagaggttaatcctctctcccatgatagtctggaggcgggcagttcagcgctggtatgacatctctgccctgggatgtcttcaggaaatcaggctccttttagctcattgctccaccttccctggaaggtggtccttgtctttgcagtacaagatggcatttcga

SEQ ID NO: 245823 - DNA, 201 bp, Homo sapiens
tctcagaatcctccttgagaagatgaaattggaatgatcccatcagctctggcagttgtaggtggattctaatggtaagggactgtagtggggaaaatggsgaattcttaatgagctccctttctattgctgacttgaaccaaatgtagttatccttgaacgtttgaggattctataagcattgtggtttcagacagtgag

SEQ ID NO: 245824 - DNA, 201 bp, Homo sapiens
tgcctgtaatcctagtgctttgggaggctgaggcagatggatcacttgaggtcaggagatcgagaccagcctggccaacctagtgaaaccccgtctctacyaaaaatacaaaaattagccaggtgtggtggcgggcacctgtaatcccagctactctggaggctgaggcaggagaattgcttgaacccgggagacagcagt

SEQ ID NO: 245825 - DNA, 201 bp, Homo sapiens
tatcccctattctgcattttctatgctccctttgattatggtgaccatagttaccatatgcaaatcaggcatgtgtggccaatgtagtcatgatcattctrcctggggttggcagtcttctaaagtagtagtacagtaggtgaggctctaggggcagtcatgagtaatgagatgaagcaccatgtccacacttaacattag

SEQ ID NO: 245826 - DNA, 201 bp, Homo sapiens
gaatcttcagacttcttggctgtgctaaaaactactgatcagcctgtgatggcaagatggatactccattgcttgactctcagttgacccttgtcaattaygttgagaagatgagacaatctctgcagtgaattttaagttcatgtgtttattgagcatattaagtgtcaacattcactctcagacgttgtcacttaagta

SEQ ID NO: 245827 - DNA, 201 bp, Homo sapiens
tccaggtagaaaggcctttcagatgacaacaggaaaagtgtgtaaagttttcatgttgtgcgtagtgcataatctatcttctagaaagagcatactccttwagggaccaggttaagctgcaaaaagaggaaagagatgaaaggaagtttctagagtctgtcaacaaaatgagagaaagttggcaggaaagtgaattttcaa

SEQ ID NO: 245828 - DNA, 201 bp, Homo sapiens
tcaagatccaatttcctgtaccccaggaagaatggtaatccaggactgataaccacatccttcaactagagaaactggattctgaagaagtactgtagatwctaaaaatatgttgtggatgtgggcagttgttattaccagaattggctttaaggaacgttgaaaaataggcagaattcagcattattttattctcctttt

SEQ ID NO: 245829 - DNA, 201 bp, Homo sapiens
agcaagttacttgacctttatgtactttactttccttactgaaaaaatgagaatagtaatggtacttctaaaactggtataaagtggtaattaagtttatrtgtatatatgaaaaacattaatctatatatataaagaagttaatttgcataaaaattaaaatatgcttagaatggtgcttgacacacagaaagacagcat

SEQ ID NO: 245830 - DNA, 201 bp, Homo sapiens
atcagccctaagttatcaatgaattcctggggtgcagagtaagttttcactactaggaagtgatatttatgctcaagaattttcctgggggaatatttaaytggactcatacattctttgggattttttccagtatctctatgcagaatgatccttgagattagaggtatgttttaaataatccgagtggaccattgaatg

SEQ ID NO: 245831 - DNA, 201 bp, Homo sapiens
ttctatattcaaatggtaaaatgaattaaatgaaaaactgttgagctgggggattactgtagttcctttagtacattgcactgtggtctaacagggataaycacacagtatatgctcaaccttataatttctcagtcaataacagcttttatctcttgtgttaccctactcaggtgatttttgttctaggtgagcaaataa

SEQ ID NO: 245832 - DNA, 201 bp, Homo sapiens
ctcgagtagctgggattgcaagcacacgccaccacacgctgctaatttctgtatttttagtagagacagggtttcaccatgttagccaggctggtctcgamctcgtgacctcaggcgatccgcctgccttgacctcccaaagtattgggattacaggcgtgagccaccgtgcccggctgggcctgttagtttaatcttcca

SEQ ID NO: 245833 - DNA, 201 bp, Homo sapiens
gagcgtggcattgataagctgactgggagctttgtatgtgtgagtaggatttgacgactgacagcttcttgagtggaagcagataagatggtaagcgggctttttcattgaaggaccccaaatatcagcatctacacatccattctcttggtctgttcagttctctagagggaaactctacacatctctgcctgtggggtt

SEQ ID NO: 245834 - DNA, 201 bp, Homo sapiens
aatactgcgtgattccatataaggtacttagagtagtcaaggtcatagacacagaaagtagaatagtgattgtcaggggctggagggagaggggtatggcvagttagtgtttacagaatacagagtttcactttgggaagatgacaaagttctggagatggatggcataatagttgcacaacaatgtgaatgtacttagtg

SEQ ID NO: 245835 - DNA, 201 bp, Homo sapiens
ggtttaagggaccattcctaaactgataaatggggcctgaaagatagaatacactgagtggcataagcaattcctggtactagcgatggggttaactccayccaaactgtgtggctgagactgggggacaggtgattcctccaaagaatggcatggttattttttggccagaaaagagggaaatggatgttggggaagcaa

SEQ ID NO: 245836 - DNA, 201 bp, Homo sapiens
gtgtgtatatagtacatatatatcatacatacatttatctatctcttgatcaattagtctatctctttcatatgaaatgatagtttgctgaaaggtagagwccattctataatacttagaaaatatatttaaaatatgtcctattagcatttaaactatttgtgttattcgtgaaggaggtttaagaacagtgctagaaga

SEQ ID NO: 245837 - DNA, 201 bp, Homo sapiens
gggctttttcattgaaggaccccaaatatcagcatctacacatccattctcttggtctgttcagttctctagagggaaactctacacatctctgcctgtgrggtttaaacctgattgtctttgttctaggagctcagtcagggaaggaggatagggaatgtcaaatttggcatgtgaattttcagttaattgtctggtttt

SEQ ID NO: 245838 - DNA, 201 bp, Homo sapiens
atctaaatgctatctacatggactgttataacaggagaaatttgccttctgtgtctgtgtgtgtttcagcctagcttttttttttttttttttttgagacrgagtctcactcttgttgcccaggctggagtgccagggcgcgatctcagctcactgcaaactccgcctctcgggttcaagtgattctcctgcctcagcctc

SEQ ID NO: 245839 - DNA, 201 bp, Homo sapiens
actaggaacatgtgtcccttggagccacatgagacaagttgtaatggtcatttactggagaaattggctggattgtgctaacaaagggagaggaaaccaartaagaaaactgaccgtcctccgagggtcaggattttcttttgtttttttagctcaagggtccaatgttcccggggagcgtcaaagtgggttctttctgct

SEQ ID NO: 245840 - DNA, 201 bp, Homo sapiens
aatgaaaatagctaccatatgaaatcatcaatccttttaaagcttgctttaaaatttttcaatacataatggaattttcattttcactcatatttcacttmtataaatcacttgtatgagacaacagtaaaatggatatcttttaaacagatatatttatatcctccttttatatttctttttcttctttctttctgtttt

SEQ ID NO: 245841 - DNA, 201 bp, Homo sapiens
gattctaaatctttaccccatcacactactgaattctgaaaagaaatggatgtgtgtaaaggctaacttaaaggactgtggagtggagcaaatatggtagkttttacattgactattgctggttcagtttatcaaggaaggaaggaaaaggagagacttatttttctgaggcagacccaacttaaagtttctttaaaagct

SEQ ID NO: 245842 - DNA, 201 bp, Homo sapiens
gtcatttactggagaaattggctggattgtgctaacaaagggagaggaaaccaaataagaaaactgaccgtcctccgagggtcaggattttcttttgtttytttagctcaagggtccaatgttcccggggagcgtcaaagtgggttctttctgctatgacagcggaatacccatgaacactgggcgggagagggttggcca

SEQ ID NO: 245843 - DNA, 201 bp, Homo sapiens
caattaattcatgtatatcagcatgccaggtcattactatacaggcagatgctctttagaaaggccagtggagggaggattcatagaggtgataattgttytgggcattcatgtatataaatttctttttcctagcagagaactagagaaagggtcactgcaagaagagggactgttcacgtagacatgaaatccagagtg

SEQ ID NO: 245844 - DNA, 201 bp, Homo sapiens
ttgcccttcatttttgcctgtgtgtttactaatttttagcctgtcaagtaatagaaaaggtagccttgggtggagcagacatcttgttgttctagagaagrcttaggtgtccagtggatagcaagcaatgagcccccaaattctggggaaaataaaaatatcacaaaggcaatcttttttaccttttttatgtctgaattt

SEQ ID NO: 245845 - DNA, 201 bp, Homo sapiens
tgaaacatcagatcggtttctaaaaaatcttttatttttagtttggttagtaggcattggggagagaaatgcactgagaagtatatagtaaatataaatawtttcctattaccaacagatattcacaatagcaatttattttattaactttcttgtgtgtatgtgtctgcacagttaatagacaattcttttttctatttc

SEQ ID NO: 245846 - DNA, 201 bp, Homo sapiens
aggggtcaaacatctgtttgatgggacatcaacatctgttaacgggacaaacatctgtttggatgcatgggatgtgagccataactgtaggatattatttsagaaaaccaggtggtcaagaaggtgacagaagatggtaactttgaccaatgaatgacagctaccatcccagacacaggatctgtgtagatagtgtgcaaa

SEQ ID NO: 245847 - DNA, 201 bp, Homo sapiens
cttgggtggagcagacatcttgttgttctagagaagacttaggtgtccagtggatagcaagcaatgagcccccaaattctggggaaaataaaaatatcacraaggcaatcttttttaccttttttatgtctgaattttttaagaaaatcatagatttccaagcaaagcagaaagaccatagtttgtttagaatgtcacttt

SEQ ID NO: 245848 - DNA, 201 bp, Homo sapiens
atagacttgctacagctgccccattcagaatagcttctgggctgtgagtagtggttagagaacttcaaaaggcaatttaacagataatttgttctttttgktattattattattattattattattattattattattatactttaagttttagggtacatgtgcacaatgtgcaggttagctacacatgtatacatgtgc

SEQ ID NO: 245849 - DNA, 201 bp, Homo sapiens
acatctgtttggatgcatgggatgtgagccataactgtaggatattatttgagaaaaccaggtggtcaagaaggtgacagaagatggtaactttgaccaakgaatgacagctaccatcccagacacaggatctgtgtagatagtgtgcaaattttcaaaccacacatgtgtgatacatggctctcagaatggagagggttg

SEQ ID NO: 245850 - DNA, 201 bp, Homo sapiens
ttactgcaacctctgacctcctcggctcagatgatcttcccacctcagcctcccgagtagctgggactacaggcacgtgccaagatgcctgactgcctgaytaatttttgtatttttttgtagaaacggggtttcaccatgttgcccagtttgatcttgaattcctgggctcaagccatccacactcctcagcctcccaaa

SEQ ID NO: 245851 - DNA, 201 bp, Homo sapiens
aacactaaaagaagaacctgcctttaaatgaggggtatagatttgaattttcagtgtaagctaagaaaatgctgcaaaatctacttttttttttttttttwaaaaaggcagaactgtttgggcaaagagaacgttttcttcgtctcctttctttgcttcatcctcatttgtttcggaaggtgttttgaatgaatgtatatg

SEQ ID NO: 245852 - DNA, 201 bp, Homo sapiens
catgaagcaattgttggtagaagtatggacattaaaggcacttctgctgaaggctcagaaagaatgaggagagctggagattatgccttcattttcttagmgaatacatagataatctcgaactgaatgttggtggaatgtaaaatccattgtggtgaggcctcacaaggaaatgaggaacaggttattggcaagtggaga

SEQ ID NO: 245853 - DNA, 201 bp, Homo sapiens
caaaccaagacagcctgctatatccactcagtgatggcagccagaaattattaaagtcttggcttaagaatcctatctttatcttcatactagaaactttyttgacatcagatttatagtattcaagtcaaatggaaagtcaaatggatgtctttctttcttagagtctgcttggatgaactcacctaaaacttgtcttag

SEQ ID NO: 245854 - DNA, 201 bp, Homo sapiens
acagcaggctgaatttggccagtatggcgttgtttgctgacccctactgttgagaatcattgatctatgatgagtagaatgtcaaagacaccaaaaaatargtcctgctttaagacttggcacataagaataggagacttggctattttgtttcccattaaatccttagcacatagatgcccaataagtagttttgaataa

SEQ ID NO: 245855 - DNA, 201 bp, Homo sapiens
atatgttgatttaaatttgattttccaaagttcagactctatatttacacttgaataattggatgttaagagactaaaagggtttagatacataggaatakgtatgacaaatgcataatgatagcgaaagtgctttctttggtattcttgtgtgcccaaggttacccataaacccaataaaaaagaagtgatttcctctac

SEQ ID NO: 245856 - DNA, 201 bp, Homo sapiens
atggatgtctttctttcttagagtctgcttggatgaactcacctaaaacttgtcttagaattcttttttatctaaagtttcaacaaccgccttcttctttyctagggagaggaatggcatggagtttggggaaggaggaatataaagagaagaaaatgtgggcagatttcaagagacacaaaaatttgttaagtgctcacc

SEQ ID NO: 245857 - DNA, 201 bp, Homo sapiens
cagtggctcatgcctgtaatgccaacactttgggaggccgagatgagtggatcacctgaggtcaggagttcgagcctagcctggccaacatggtgaaaccstgtctctactaaaaatacaaaaaattagccaggtgtggtggtgcatgcctgtaatcccagctactcggaaggttgaggcaggagaatcgcttgaacccgt

SEQ ID NO: 245858 - DNA, 201 bp, Homo sapiens
aaaaagttttagatttcactgcttcttttgttcccatttctagtggaccctgccacagagaagcacttagcctaagggattaatagttacataatatttgktaatttttttttttttttgagatagagtctcgccctgtcacccaggctggagtgcagtggcgtgatcttggcttactgcaacctccacctcccaggttca

SEQ ID NO: 245859 - DNA, 201 bp, Homo sapiens
tgaggcaggagaatggcgtgaacccgggaggcgtagcttgcagtaagctgagattgcgccactgcactccagcctgggagacagtgagagactctgtctcaaaaaaaaaaaaaaaaaatctttttctgtgtcatttttatggcgatctaattttttcttatatgtccactgtaattattttactaatgctgtattattgaa

SEQ ID NO: 245860 - DNA, 201 bp, Homo sapiens
ttctgagaattcagatatttatgtatttatttattatttatgagactggttctcactttgttgtccaggctggagtgcagtggtgtgatcatagcttactrcagcctcgacctgctgggctcaagtgttcctagtagctgggataccgagtagcggagactacagatacgagccacagtgtctggcaggtttcagattttt

SEQ ID NO: 245861 - DNA, 201 bp, Homo sapiens
ggtggctcaggcctgtaatcccagcattttgggaggctgaggcgggcggatcacctgaggtcaggagtttgagaccagcctggctaacatggtgaaacccygtcgctactaaaaatacaaaaagaattagccaagcattgtggcgtgcgcctgcaatcccagctactcgggaggctgaggcaggagaattgcttgaactca

SEQ ID NO: 245862 - DNA, 201 bp, Homo sapiens
tcttcaatgatagaaatgtacttttcctgttgaattgtgccattcacataaaatggatagtatacttatttgattttagttgattgcagctgtattatctrtaagaaataagaaatctaccaggttatttcctcaagagcccagaattaatttgtttcctcttcccaagaactagttcagcactgtgattaaggaataaat

SEQ ID NO: 245863 - DNA, 201 bp, Homo sapiens
ctgaggcaggagaattgcttgaactcaggaggtggaggttgcagtgagccaagattccagcctgggcgacaaaagtgaaactctatctcaaaaaataaatwaataaataaataaataaataaataaataaataaataaagtactggctcaagagagaagagaaaaaccaggaaaatccagcatgagtgaagccaagtgaaa

SEQ ID NO: 245864 - DNA, 201 bp, Homo sapiens
attcagaatcttggcttttattttggaaagtaaaagacataggattttttttctctttctctctgtgtgtgtatctgtgtctgtgtttgtctgttcttcartgatagaaatgtacttttcctgttgaattgtgccattcacataaaatggatagtatacttatttgattttagttgattgcagctgtattatctataagaa

SEQ ID NO: 245865 - DNA, 201 bp, Homo sapiens
tctcaaatagaagaagaatacaatattaaagaattaagagcattatgtatcttaaaaataaactcatctttcttgttagacttttggaatctgcattggatttttttttttgtttttttttttttacatagttaaatttaagatatatttctagtcattgtttaaaatgcatctcaagaaactttagaaggggtgtggatt

SEQ ID NO: 245866 - DNA, 201 bp, Homo sapiens
aggtggaggttgcagtgagccgagattgcaccactgcactccagcctgggcgacagagcaagactctgtctcaacaaaacaacaaaacaaaaataaaaagrgaaaaggaaaaaggaaaatgtattggattggaacatggatgaagtgatttcccattctgttaaaagtgacaaaattggccgggcgcggtggctcacgcct

SEQ ID NO: 245867 - DNA, 201 bp, Homo sapiens
attctctagtgtaattccaaatcccatcacataggtaggtgttcactgcgttcaagcataaagtttatagtttattttttgctcatttaaaaaatggaacrtcattttaaaaagctttatatagacctcagctattccttctgggcatgtgcacctagagttctggcaccctgggtatgccctcaattatttcactatgtg

SEQ ID NO: 245868 - DNA, 201 bp, Homo sapiens
gaagaatacaatattaaagaattaagagcattatgtatcttaaaaataaactcatctttcttgttagacttttggaatctgcattggatttttttttttgtttttttttttttacatagttaaatttaagatatatttctagtcattgtttaaaatgcatctcaagaaactttagaaggggtgtggattgttcttttttgc

SEQ ID NO: 245869 - DNA, 201 bp, Homo sapiens
aggaaaagtatataccagatcctgcataatgtttacttgggtgttactcatcgaagcagagacacaccaaggagaaaaatcccttgcggttttgttttttkttttttttttttttttgagatggagcctcactctgttgcccgggctggagtgcagtggcaaaatcttggctcactgcaacttccgcctcccgggttcaag

SEQ ID NO: 245870 - DNA, 201 bp, Homo sapiens
tatttatttatttagagacagagtcttgctctgttgcctatgtgggtgtgcagtggcacgatctcagctccctgcaacctccacctcccaggttcaagcgrttcttctgcctccacctcctgagtagctgggactactggcatgtgccaccacgcctggctaatttttgtatttttagtagagacagggtttcaccatgtt

SEQ ID NO: 245871 - DNA, 201 bp, Homo sapiens
agaggatttagtggtgtattggatgaaggtggtgtgttgggcatggcaaaatcatccatccatctagacagcaaattaacagttttgtagaaacgtatagyccccaagtatttatatgcatattagatacgtaaatgctaaaagcataaaaaaagaatggatagaatgattggtggcaagtaagtatcctgattccatttt

SEQ ID NO: 245872 - DNA, 201 bp, Homo sapiens
ggaaaagtatataccagatcctgcataatgtttacttgggtgttactcatcgaagcagagacacaccaaggagaaaaatcccttgcggttttgttttttgttttttttttttttttgagatggagcctcactctgttgcccgggctggagtgcagtggcaaaatcttggctcactgcaacttccgcctcccgggttcaagc

SEQ ID NO: 245873 - DNA, 201 bp, Homo sapiens
ccgggaggtggaggttgtagtgagccaagatcacaccactgcactccagcctgggtgacagggcgagactctgtctcaaaaaaaaaaaaaaaaaaaaaaawatatatatatatatatatatatatataaatatttataaaatacacacatatatataatttagtgacagcatcgaccagtggctcttttttttttaaattt

SEQ ID NO: 245874 - DNA, 201 bp, Homo sapiens
tgtgagttttctaaatgttccgaaacgtatgtatggaaaaataagctggcccaatcagtgttttcacatttacctctaactctacagcttttatcattgcrcagcctgcatcccaacaggcaacagttataacaaatgtttcaccactgcataataaaggtaatcctgtttccaaacagaaagagttggaacctcacagcc

SEQ ID NO: 245875 - DNA, 201 bp, Homo sapiens
taagtggtatagtagtggtacttagggggaatcatgaacaactgagtggtgcagacaaggtaacaattctgttttgcagggaatgcagatactcggttctrtaaaaactacagtgaaggtgggacatttaagtcttcccctgagaataagggtattactttgccaggttaagaggacaatggattggggcatagaataggg

SEQ ID NO: 245876 - DNA, 201 bp, Homo sapiens
cttaggattgtcttggcaatgcaggcccttttttggttccatatgaactttagttttttccaattctgtgaagaaagtcattggtagcttgatggggatgrcattgaatctataaattaccttgggcagtatggccattttcacgatattgattcttcctatccatgagcatggaatgttcttccatttgtttgtatcctc

SEQ ID NO: 245877 - DNA, 201 bp, Homo sapiens
ctcttcatccttcaacagtttttattgaatattcaagatgctaagacttaatttggaaactcttatacaaatctataatctcaatagtattcttaatgcartggtcagtaattattagtcctttgataagcagagacctcgggactgccatggcacaatcagtcttggcccaacagcttcaactttcttccatgtgacaat

SEQ ID NO: 245878 - DNA, 201 bp, Homo sapiens
tgaactttagttttttccaattctgtgaagaaagtcattggtagcttgatggggatggcattgaatctataaattaccttgggcagtatggccattttcasgatattgattcttcctatccatgagcatggaatgttcttccatttgtttgtatcctcttttatttcattgagcagtggtttgtagttctccttgaagagg

SEQ ID NO: 245879 - DNA, 201 bp, Homo sapiens
atacagagaaattggtacccttgtgcactgttggtgggaatgtaaaatggttcagcccctatggaaaacagtatggacattcctcaaaaaaattaaacacrgaagctgggcgtggtggttcacgcctgtaatcccagcactttgggaggccaaggtgggtgggtcactcgatgccagaagtttgagatcagcctggacaac

SEQ ID NO: 245880 - DNA, 201 bp, Homo sapiens
ggatggcattgaatctataaattaccttgggcagtatggccattttcacgatattgattcttcctatccatgagcatggaatgttcttccatttgtttgtrtcctcttttatttcattgagcagtggtttgtagttctccttgaagaggtccttcacatcccttgtaagttggattcctaggtattttattctcttcgaag

SEQ ID NO: 245881 - DNA, 201 bp, Homo sapiens
tatggacattcctcaaaaaaattaaacacagaagctgggcgtggtggttcacgcctgtaatcccagcactttgggaggccaaggtgggtgggtcactcgaygccagaagtttgagatcagcctggacaacatggtgaaatcctgtctctaccaaaaatacaaaaattagccaggcgtggtggcgggcacctgtaatcccag

SEQ ID NO: 245882 - DNA, 201 bp, Homo sapiens
ttgtatcctcttttatttcattgagcagtggtttgtagttctccttgaagaggtccttcacatcccttgtaagttggattcctaggtattttattctcttygaagcaattgtgaatgggagttcactcatgatttggctctctgtttgtctgttattggtgtataagaatgcttgtaatttttgcacattgattttgtatc

SEQ ID NO: 245883 - DNA, 201 bp, Homo sapiens
gtttgtctgttattggtgtataagaatgcttgtaatttttgcacattgattttgtatcctgagactttgctgaagtagcttatcagcttaaggagattttrggctgagacaatgggttttctagatatacaatcatgtcatctgcaaacagggacaatttgacttcctcttttcctaattgaatatgctttatttctttct

SEQ ID NO: 245884 - DNA, 201 bp, Homo sapiens
gcttggagattgtattgcagtgggggaagctgggtagaaattgggggaggagagcatcttacacaatgggagaggaatcctagccatttacaaacttgggrtcctggcaagggtggtgggaaacgggtcccacataactgcccatgtcaagagctatatattgggaggggcaccagggacaagactccctgggttcatagc

SEQ ID NO: 245885 - DNA, 201 bp, Homo sapiens
ggacgttagcttgttgcccccatttgccactataggaatgtgtgcctccctttaatttactcaattcgctttcatcctgatctattatgttgtcatagacycagttccagttgttaaagtactgggtcatcagttctaaggccctggccaaggagccgaggcttggagattgtattgcagtgggggaagctgggtagaaat

SEQ ID NO: 245886 - DNA, 201 bp, Homo sapiens
tgttgaattttgtcgaaggccttttttgcatctattgagatagtcatgtggtttttgtttttggttctgtttatatgctggattacgtttattgatttgcrtatgttgaaccagccttgcatcccagggatgaagcccacttgatcatggtggataaggtttttgatgtgctgctggattcggtttgccagtattttactg

SEQ ID NO: 245887 - DNA, 201 bp, Homo sapiens
gattcttatgtggaatgtgccctctgtctacctgcatttctttagagcttaaatccaaacattgcctgttcggtgaaggctctgaaataaaaataaaagakgtaattggaacatgagaggatagaacagtaacagtaaccagcaagcatagctcctatgttcagttttactttgcttgcagaagtgaatatgctcatcagt

SEQ ID NO: 245888 - DNA, 201 bp, Homo sapiens
ttgttccaactataggacatacctataaatcctgatagaagtatattcagcatgtcactttaactaatattcatccttaaacttgggtgatcatctgtgargaaggaagtttggggaatctattgttagcatgcttgcctttttcagttggtccttatctttgattctctgaaactctcctctattttatgcttacagttt

SEQ ID NO: 245889 - DNA, 201 bp, Homo sapiens
aagagtgtgcagttgcaagatttaatagagtgaaaacagagctctcatacaatgggaggggacccaaagggggttgcccactcccggctcaaatgcctggrgtttatatcccaatcattgtcccttcccctgtgctctcaggcgatatatgatttgacttatttctttacctcctgcttttagcctaatttgtattttagt

SEQ ID NO: 245890 - DNA, 201 bp, Homo sapiens
cagaaaatctgaatcagcacttactgtgtggtaagtgttgtagttgagatactgcaggctgctgtgtgagtacctgggtgagagagaagaggagaaccttmggagtatcagcagctgggtgatttttgaagtgtgagaatgagttgataaaggaagaaagtgtcaaaggcacattggggtatgttgctgttactagctgca

SEQ ID NO: 245891 - DNA, 201 bp, Homo sapiens
accagtgcacacaagcttaatgtcagccctggtgaaaacctaataattcattagtaactgtttgattcattttttattaaatttcacaaatgcagtctgtyttgactctcagtcctccgctgtcagaattgaattgtaagtcctgggcagatatgaaagaagagaatactcattacaatattgtatgcaaatcctaaggag

SEQ ID NO: 245892 - DNA, 201 bp, Homo sapiens
taataactctgatctctgctccagaaactttgtgtttactttcaggttacaagaatgaatcaatatagagattaaaaacttaaatatttttaatgtaaaayacttcttaggagaatatacttaataatttctctgtacagaaatgattgtatgtatacttcaggtttaagctttaccttagtattcctaaaacttttcaga

SEQ ID NO: 245893 - DNA, 201 bp, Homo sapiens
aaagggtaagatcccagggatcttccccttttcttcccaagcagaatttgcttaccataggtagattgctttctttcactttctcaggcgaaggcggcagstgggcagttatcctgtacaaacctacagattcaaaattttgggattcttctcctgtggttcaacccttacctatcaatgggttttcattgcattgtctat

SEQ ID NO: 245894 - DNA, 201 bp, Homo sapiens
caaagggtaagatcccagggatcttccccttttcttcccaagcagaatttgcttaccataggtagattgctttctttcactttctcaggcgaaggcggcasctgggcagttatcctgtacaaacctacagattcaaaattttgggattcttctcctgtggttcaacccttacctatcaatgggttttcattgcattgtcta

SEQ ID NO: 245895 - DNA, 201 bp, Homo sapiens
tgttgataattttgataggtgatttttattttgtgtcaagtactgttctaacatctttacatatgggccaaggattggattgtcaaatcagactgacatgragtggagatgttaatcaatattaagctttccttataatttcaagaatacaagcaatcaaaaggctcagaaaaagcagagacatgtctgggacattgagag

SEQ ID NO: 245896 - DNA, 201 bp, Homo sapiens
cccacctcagcctcctgagtagctgggattacagacacatgccaccacacccagctaattttgtatttttagtagagatgaggtttcaccatgttgaccasgctggtctcgaactcctgacctcaggtgatccacctgcctcggcctcccaaagtgctgggaaaatctttatttaatatatggatattcctgtcatttttt

SEQ ID NO: 245897 - DNA, 201 bp, Homo sapiens
caggtaaatccttctggatagcagggcctcagccacaaggccagtattcaaaagcagaattcaattcctgacatttaagaaagaaaaagccaagaacgagrtggaatcattgattttcccatatcctggaaggacacagttaccagaatagttttaagggtggaactgagaccaagggaagaaggcagacttttcaaaact

SEQ ID NO: 245898 - DNA, 201 bp, Homo sapiens
ccggtcttccgctcagccagctctgcgtgaattactctttctggattgcaatttccctgtcttgatgaatcggctctatctagacagtgggcaaggtgaamcccttgggcagttacattcctaggccttagccagggaattaccatgtatatgatgatgaattcaggagagaagagatgaagagaaagggagaaagtttta

SEQ ID NO: 245899 - DNA, 201 bp, Homo sapiens
gaatagaggcaaatggagcctttccttgtttcctgcttcccttttacttaggagattaaagtgacagtttcattaactgcttttaccacattaaacattgktgaggatttggatttgggtaacattttgtcttaataagaaacctactaaaaagtaagtttttcaaaaaatgttttactcttacatgatcaagtctttatc

SEQ ID NO: 245900 - DNA, 201 bp, Homo sapiens
caagtttattctggttttatcagctattgtccttaaaagggatctctagatgttgtaaaacttgagatcttgattttgactggcttctattttcgttttcygttttgaaagtttctgtcaaaggccccaagtgtgaatgaggaagattgcctttagtcctaaacctaccaacttgtttccgttgtgcgaaaagctgacatg

SEQ ID NO: 245901 - DNA, 201 bp, Homo sapiens
aaatccttctggatagcagggcctcagccacaaggccagtattcaaaagcagaattcaattcctgacatttaagaaagaaaaagccaagaacgagatggartcattgattttcccatatcctggaaggacacagttaccagaatagttttaagggtggaactgagaccaagggaagaaggcagacttttcaaaacttgaac

SEQ ID NO: 245902 - DNA, 201 bp, Homo sapiens
catatatgtgccaccacacctggctaatttttgtattttcagtagagacggggtttcaccatgttggccaggctggtcttgaactcctgacttcaggtgatctactcgccttgacctcccaaagtgctgagattacaggtgtgagccaccgtgcccagcctttagtgtaacttttattgaaaaaaaattccacgtataagt

SEQ ID NO: 245903 - DNA, 201 bp, Homo sapiens
gaggatttggatttgggtaacattttgtcttaataagaaacctactaaaaagtaagtttttcaaaaaatgttttactcttacatgatcaagtctttatcayggaacctgtcagcgttaacatctaggatttaatgtcaaccaacgtaagcttttaaaaagccatattaaatcagaaatgacttaaaaataaactctagatg

SEQ ID NO: 245904 - DNA, 201 bp, Homo sapiens
tccaggagggcctcgtgtaatcaccatcattttataagagggacacaggagtagtcagaatcagaggagaatatgatgtgataatggaagcagagagcagrgtgataagctttgaagatggagaaaggggccacaggccaagaaatgcaggccatcactagaaactgaaaaaggcaaggaaatggattgtgccctagatct

SEQ ID NO: 245905 - DNA, 201 bp, Homo sapiens
gattacatatatgtgccaccacacctggctaatttttgtattttcagtagagacggggtttcaccatgttggccaggctggtcttgaactcctgacttcargtgatctactcgccttgacctcccaaagtgctgagattacaggtgtgagccaccgtgcccagcctttagtgtaacttttattgaaaaaaaattccacgta

SEQ ID NO: 245906 - DNA, 201 bp, Homo sapiens
ccctgacattcccagatcattccaagactttcgggctataccagaaattagagccacatccatttagattcaagtttattacctactgtgatgagtaacawtttaagtttctatcaatcacacagtcttttatgtgtttgaaagatctgggagtaggttttgataggtgggagtcagggttgggaacaagaggttacaggg

SEQ ID NO: 245907 - DNA, 201 bp, Homo sapiens
taaggcccctcacagtggcttacgcctgtaatcccagcactttgggaggctgaggtgggcggatcgcttgaggccaggagttcaagaccagcctggtcaayacggtgaaacctcatctctactaaaaatacaaaaatgagccgagcctggtggtgcacatctgtaatcccagctactcaggaggctgaggcacgaggattg

SEQ ID NO: 245908 - DNA, 201 bp, Homo sapiens
tgagccccctgtgccccagccagttatgattttgttttggcatatattcatgggggtacaagtgcagttttgctacattgatatattgtattggggtgaaktcagggccttcagtgcatccatcactggcacaagacacattgtacccagcaagcaacctcctgtagtccatccccttccctctacatccccaaccctcca

SEQ ID NO: 245909 - DNA, 201 bp, Homo sapiens
gagcagttctaaaattgtaacatgctctgccatccccaattgctaaacttcactggaaagctctgtgaagtaggtacgtgggggcttcctcctactttcarctaaggaaactgagttggggaagaagttcttatgtggcctagagccagacagtgagtgaaggagagatatgctctaaaaacttagcctcagattaggaga

SEQ ID NO: 245910 - DNA, 201 bp, Homo sapiens
acatgtggtccccatgttctatgagcctccagtccattcgaagagaaggagctctaaagccactaaaggtctgacaaaagcaatgtgtgctcatgcctagygtggtctaactataggagcagctgacctgaccggaggagacttgtacggtggatcctcctttctggaacactgacgagaatcaagaagagaaaagtaaaa

SEQ ID NO: 245911 - DNA, 201 bp, Homo sapiens
tgggagtgcacatatctcttcgtgattgattttcttctttcttggatatctacccagctgtggaattgctggatcatatggtattattattattattattwttatttttttttttttgagatggagtcttgctctgttacccatgctggagtgcagtggcacgatctcagctcactgcagcctccgcctcccgggttcaag

SEQ ID NO: 245912 - DNA, 201 bp, Homo sapiens
aagtagtgggatagcagattcaaagtcagacaagcaattgcaccttagttccagggaagccttgttaatgaatgcttggggaagttgcttatctttcagcrcttctgtttcctcaacagtaaatttataataatacatatatcttatggttgtgctgatgatcatgcaaagtaattgataaaatgaatttattataatgtc

SEQ ID NO: 245913 - DNA, 201 bp, Homo sapiens
tagtttagatgatgcccataatatgggagtttcccatcactctggaaacttgcagccttggcttttaattcagaaaaattggctttgagaataggaactaytacttgctggctgtgtgatcttgggaaagtcactgactttactgagttcacttctcttcatctgtaagtggggatatctacccacaaggattttgtgagg

SEQ ID NO: 245914 - DNA, 201 bp, Homo sapiens
tttttttcccacctaaaagaggcactgactgtagccattttataaagcatgatttgttaaccatgtcagttacaaaacaaatgttacctaccccatctgayaataatattctcacaggattgaagtaaaatgaaaatttgcgtgtgatggttcttcatttttggaacaaagcagatggctcaggagctgctgttctttatt

SEQ ID NO: 245915 - DNA, 201 bp, Homo sapiens
tagaggctgattttaatttaaaataaagcacctcttcagatgagcagaaatatccgtttaagaacttggttactttggatggtattgacttttacatcacygaaggtgtttccatagatggaagacagccacactgtggggattctggaattagatttcaggcccttaaggttttataatactacagaatctctgggttta

SEQ ID NO: 245916 - DNA, 201 bp, Homo sapiens
actcctcatttgtcagatatgctgaaaaatcttaatatttgccttttaattttatatttttgtacattcagaaattttcaatttttatagtcgtttatcarttcttttttaaaaaaggattcttccttgcccacaccaagttcagctgttttttacttcattctatttcttttatgcttttatttaaaatttattttgagt

SEQ ID NO: 245917 - DNA, 201 bp, Homo sapiens
cagtataatgtggatctgtttttcttttgagttcataaataaaataaacatcagtatgatttgactgctgttaatgataattcagaggaatgttcctttcrttaagttaaaaaatgactatgaagagaataattccattatgtgttttttctttggtaagtaaataaaagtagagattttaaaactatttaacaactctac

SEQ ID NO: 245918 - DNA, 201 bp, Homo sapiens
acttcaaagtcaatgtcatttcccccttaacatagtgtggacattgtatattctgtttatttttcagtgattactttaaaaaactttaattgttaaatagktgtctttatgttcctttgaaacattatgagcaatgtttgaactccactcattcctcagtttgcatattgttgtttttcagtatttagttccacctcggtt

SEQ ID NO: 245919 - DNA, 201 bp, Homo sapiens
cttgctctgtgtcctaggctggagtgcagtggcatgatcatagttctctgcagcctcaatattctaggctcaaacaatcctcccttctcagtctcctaagyagctagttctacaggtgcacaccaccacgcccagttaattttttttttattcttagctgagaagaggtcttactatattgcccaggctgatcttgaactc

SEQ ID NO: 245920 - DNA, 201 bp, Homo sapiens
cctctgctttccctccaattatccagtctagtcatccacttcagtggctttacccttgtgttagttttctgttgctgcataacagattatcagaaatgcartatgaaaggtgccttccaacaacacaaactatgattttatagtttctgtatgtctgttgtctggtaatggcttagatggagtctctgctcaggtcttaaa

SEQ ID NO: 245921 - DNA, 201 bp, Homo sapiens
cgttgtttgtttgttttgagactgagtctcgctgtgttgccaggctggagtgcagtgatatgatatcggctcactacaatctctgcctcctgggttcaagygattcccctgcctcagcctcctgagtagctgggactacaggcacgcaccaccacgcctggctaatttttcttattttagtagagacgaggattcaccatg

SEQ ID NO: 245922 - DNA, 201 bp, Homo sapiens
acccaaatagcccagatactgaattgccttaagatgccttagactttcaccattttaatcatttatttcattaatgttatctacctaaacccttatttttwtttatttatttatttatttatttatttatttatttatttatttattttgagacagggtctctgctgctcatgctggagtgcagtggtgcgatcatggctc

SEQ ID NO: 245923 - DNA, 201 bp, Homo sapiens
gtctctttcccatccccagagattctaatttaactggtatagggcatggtctgtgtactgaggttttaaaaatctctccggatgattctgatgggcagcaragtttgaaaactgctgtcccacagaataattcatgaacttatgatgtataaaagtaccagtgagctttttgaaaaactgattcctgggcctcacacgcaa

SEQ ID NO: 245924 - DNA, 201 bp, Homo sapiens
cacctttgttattccaaggaaaagcatctaaatgctatctacatggactgttataacaggagaaatttgccttctgtgtctgtgtgtgtttcagcctagcttttttttttttttttttttgagacagagtctcactcttgttgcccaggctggagtgccagggcgcgatctcagctcactgcaaactccgcctctcgggtt

SEQ ID NO: 245925 - DNA, 201 bp, Homo sapiens
tatcccctttatcgttttttattgcacgtatttaattcttctctcttttcttctttattagtcttgctagcggtctgtcaattttgttgatcttttcaaaraaccagctcctggattcattgattttttgaagggttttttgtgtctctatctccttcagttctgctctgatcttagttatttcttgccttctgctagctt

SEQ ID NO: 245926 - DNA, 201 bp, Homo sapiens
acctttgttattccaaggaaaagcatctaaatgctatctacatggactgttataacaggagaaatttgccttctgtgtctgtgtgtgtttcagcctagcttttttttttttttttttttgagacagagtctcactcttgttgcccaggctggagtgccagggcgcgatctcagctcactgcaaactccgcctctcgggttc

SEQ ID NO: 245927 - DNA, 201 bp, Homo sapiens
tcctgagttctagtttggttgcactgtggtctgagagacagtttgttataatttctgttcttttacatttgctgaggagtgctttacttctgactatgtgrtcaattttggaatagtgctatgtggtgctgagaagaatgtatattctgctgatttgggatggagagttctgtagatgtctattacttctgcttggtgcag

SEQ ID NO: 245928 - DNA, 201 bp, Homo sapiens
acactaaaagaagaacctgcctttaaatgaggggtatagatttgaattttcagtgtaagctaagaaaatgctgcaaaatctactttttttttttttttttaaaaaggcagaactgtttgggcaaagagaacgttttcttcgtctcctttctttgcttcatcctcatttgtttcggaaggtgttttgaatgaatgtatatgc

SEQ ID NO: 245929 - DNA, 201 bp, Homo sapiens
ttctgctgatttgggatggagagttctgtagatgtctattacttctgcttggtgcagagctgagttcaattcctggatatgcttgtgaactttctgtctcrttgatctgtctaatgttgacagtggggtgttaaagtctcccattattattgtgtgggagtctaagtctctttttaggtctgtaaggacttgttttatgaa

SEQ ID NO: 245930 - DNA, 201 bp, Homo sapiens
aattagccgagcgtggtggcacttgcctgtagtcccagacactcagaaggctaaggcaggagaactgcttgaaccgggaggtggaggttgcaggagcccakatctcgtcattgcactccagcctgggctgcagagcaagactacgtctcaaacaaaacaaaacaaacatgccgggcacggtggcacatgcctgtaatccca

SEQ ID NO: 245931 - DNA, 201 bp, Homo sapiens
tacacaccatatatattgcactgcaggatattgtgatagacatatacaaacacctcttgaaaatctgttcagatcatttatgatatttcgttgttctagtyactcatgttgttacttgcattccataaattagtatgtaatttactagagtgaatgtaaaaattatgtctgcctagcattcttttcttgggaggtactttt

SEQ ID NO: 245932 - DNA, 201 bp, Homo sapiens
cagaactttctccttagttcagctaaaagcaggctcttgtcacacgaccaggaaagattaggctcgcggacacatagaagggtgaggaaaatggaatttawtgggcgaaggggaaaaaggaaaacgaaccaaagcaagagagagccctgctagcagcttttctgactcacagattgaatcccaggtcaccacaggagctga

SEQ ID NO: 245933 - DNA, 201 bp, Homo sapiens
ttgatttttaaaacttttcctgttttgtaagtgaatcatactcattactatatcttatttatttatttatttatttatttatttatttatttatttatttwttttaagagagtctcactctgttgcccaggcaggagtgcggtggcacgatctcagttcactgcagcctctgcctcccaggttcaagcgatttttctgcct

SEQ ID NO: 245934 - DNA, 201 bp, Homo sapiens
ttatagatatatagatataaatacatagaaaaaaatatttggaactaaatttatattagaggtagttactgaaaatggtacataatgagaagtatattctcctcttcttctttattcacatattttagtttttaaaaattatctataatagcacaataatgaaaagttattttctattttaaatgaaagatatgtctttaa

SEQ ID NO: 245935 - DNA, 201 bp, Homo sapiens
tttttattttttacttttttgtctgagacagagtctcactctgtcacccaggctgaagggcagtggtgccatctcggctcattgcaacctccacctcccakgttcaagtgattctcttgctctggcctcctgagtagccgggactacaggcgcccactaccacacccagctaattttcgtatttttaacagagatggggtt

SEQ ID NO: 245936 - DNA, 201 bp, Homo sapiens
cagcctctgcctcccaggttcaagcgatttttctgcctcagcctcccaagtagctggaactacaggtgaccaccgccacacctggctaatttttttttttyttcttctttttttttcttagtagagtcagggtttcaccatgttggtcaggctggtcttgaactcttgactttaagtgatccacccaccttggccccccaa

SEQ ID NO: 245937 - DNA, 201 bp, Homo sapiens
tatagatatatagatataaatacatagaaaaaaatatttggaactaaatttatattagaggtagttactgaaaatggtacataatgagaagtatattctcctcttcttctttattcacatattttagtttttaaaaattatctataatagcacaataatgaaaagttattttctattttaaatgaaagatatgtctttaat

SEQ ID NO: 245938 - DNA, 201 bp, Homo sapiens
atcttgtacatagatctttgaaattctctattcatttggtaaatataatggacagagttaataccaggtactatgaatgctcacctgatatttggtccttrtgaaggtgtagatagttgttaactccttgtgtgtgcatgttgggggatggtcggtggagctttttattccaccatcttgctccaccactctccttgacag

SEQ ID NO: 245939 - DNA, 201 bp, Homo sapiens
tggccaggatggtctcgaactcctggcctcaggcgatctgtccacctcggccccccaaagtcctgggattataggcgtgagccaccatgcctgacccttgacttttttttttttttttgagacggagtctcgttctgtcatgcagactggagtgcagtggcgcaatattggcttgcttactgcaaccttctcctcctgggt

SEQ ID NO: 245940 - DNA, 201 bp, Homo sapiens
gttgacaatggggtgttaaagtctcccgttattattgtgtgggagtcttaaatctctttgtaggtcactcaggacttgctttatgaatctgggtgctcctrtattgggtgcatatatatttaggatagttagctcttcttgttgaattgatccctttaccattatgtaatggccttctttgtctcttttgatctttgttgg

SEQ ID NO: 245941 - DNA, 201 bp, Homo sapiens
gcccactctagtggtgtttagcagtgttcttctctttctccgtatctttcccctttccagcgggtgtaggggctgcggctttttctttcttttttgcgtckatttccagaaatatacaaaatgcacgaattcctcaaccgataatgcagcagatgactgcttagcctctggaatattctgtctccttgaagtcccagttct

SEQ ID NO: 245942 - DNA, 201 bp, Homo sapiens
ttcccttgatattgtcaatatcattttgagctgtgttcatttttgtttcatgttacagaggaataagatcatcatagtttatctatatatggcactggtaygctggaatctgtaatactgagttggtttataagcaccagaaatcccagagaaacatcaacaaactgaaaacatttcaaagaaatgttaaaaaaaaagaga

SEQ ID NO: 245943 - DNA, 201 bp, Homo sapiens
aggaatagcattaggagatatacctaatgctaaatgacgagttaatgggtgcaggacaccagcatggcacatgtatacatatgtaactaacctgcacattktgcacctataccctaaaacttaaagtataataataataaaataaataaataaataaattacccagaaaaaaaaataaaataaaatggctggcactgcgat

SEQ ID NO: 245944 - DNA, 201 bp, Homo sapiens
aaaaatacaaaaattagccaggcatgatggtggatgcttgtaatcctgctactcgggaggctgaggtgggagaatcacttgaacccgggaggtggaggttrtagtgagccgagatcatgccactgtactctagcctgggtgacagggcaagactacgtctcagaaaaaaaaataaataaataaaatttaagtatcatgaac

SEQ ID NO: 245945 - DNA, 201 bp, Homo sapiens
tgagctgcggtgggctccacctggttcgagcttcctggccgctttgtttacctactcaagcctcagcaatggtgggcgcccctctcctagcctcactgccrtcttgcagtttgatctcagaccgctgtgctagcaatgagtgaggctccatgggcgtgggaccctctgagccaggtgtgggatataatctcctggtgtgcc

SEQ ID NO: 245946 - DNA, 201 bp, Homo sapiens
ttttgcccagtggctcttaaactttcttgttgcctgtaattcttttgaggaactgatgaaatctatgaaagcctttcttagaaaagtacacatattgatayacatgcatgatttttgcctgggatatcaggagcttcttagacttcctagaactcattcctggaccctaggttaagattatctgccagaaaccaactcaat

SEQ ID NO: 245947 - DNA, 201 bp, Homo sapiens
gcacatgtatacatatgtaactaacctgcacattgtgcacctataccctaaaacttaaagtataataataataaaataaataaataaataaattacccagaaaaaaaaataaaataaaatggctggcactgcgatattcgctaaaagtatatgaacttactaaacaacacctgtgcccctcaaaaaacacttaattttttt

SEQ ID NO: 245948 - DNA, 201 bp, Homo sapiens
ccgagcgtggtagtgggcccttgtagtcccagctactcgggaggctgaggcagaagaatggtgtgaaccctggaggtggaccttgcagtgagccgagatcrtaccactgcactccagcctgggcaacagagcaagactctctctcaaaaaaaagaacaagccataccacattagggcctatcatttcttgactgcagttgt

SEQ ID NO: 245949 - DNA, 201 bp, Homo sapiens
ttgtcatctccgaaagtcttccttgacctcttacttcctgcttttccctcgtaagtcagatctcacattataacattttagtctatacttttttattttgkgattatttatttatttatttttgagatggagtgttgcactgtcgcctgggctggagtacaatggctgatctcggctcactgcaacctctgcctcccaggt

SEQ ID NO: 245950 - DNA, 201 bp, Homo sapiens
aaaattatcaatttttaaagaaggaatttcaggttttactttttaactttttaattttgaaatagttttttttctttttcttttcttttctttcctttcctttttttttttttttttgaggtggagttttgcttttgttgccaaggctggagtgcaacggattcaagtgattctcctacctcagcctcctgagtagctggg

SEQ ID NO: 245951 - DNA, 201 bp, Homo sapiens
ttttactttttaactttttaattttgaaatagttttttttctttttcttttcttttctttcctttcctttttttttttttttttgaggtggagttttgctyttgttgccaaggctggagtgcaacggattcaagtgattctcctacctcagcctcctgagtagctgggattacaggtgcttgccaccatgcctggctaatt

SEQ ID NO: 245952 - DNA, 201 bp, Homo sapiens
attacaagggatgtgaaggacctcttcaaggagaactacaaaccagtcctcaacaaaataaaatgacacaaacaaatggaagaactttccatcctcatggwtaggaagaatcaatatcatgaaaatggccatactgcccaaggtaatttacagattcaatgccatccccatcaagctaccaatgactttcttcacagaatt

SEQ ID NO: 245953 - DNA, 201 bp, Homo sapiens
aaaaaagttgcacaagtagtagagtgcctatactcttcaccccatttcctttaatgttaacattttcaagtagagctatgatcaaaactaagaaattatcrttgataatttcttttaataatcattgatacaattcttttatctaaactgcaccttattcagatttgagtgggttttccactaatggtcagcttttacttt

SEQ ID NO: 245954 - DNA, 201 bp, Homo sapiens
tctttttaagcttctagtagtacattttgtagcaagataaaagtgaccaataaaaaagtttgagttgtgtttttctgtcgtatagcagtatactctctctmtatattttttatttatttaagtattgagacatgtcttgctctttcatccaggctggagtgcagtggcgcaatcccagttcactgcaacctctgcctctct

SEQ ID NO: 245955 - DNA, 201 bp, Homo sapiens
ggacacttgggtttattccatatttccgctgttgtcaatagtgctgcagtaaccatgggagtgcacatatctcttcgtgattgattttcttctttcttggrtatctacccagctgtggaattgctggatcatatggtattattattattattattattatttttttttttttgagatggagtcttgctctgttacccatgc

SEQ ID NO: 245956 - DNA, 201 bp, Homo sapiens
aggaagggctcagcattgtctagtatttatatgatcattaatatttctaataatacagcatttcctttattctatggtacatatattttaatttatatttraagacatttatatcagtatgtgtcttcaatcatgatagtgattcttatccttctggaaaagtcattatggagtggctgggcgcagtggctcatgcctgta

SEQ ID NO: 245957 - DNA, 201 bp, Homo sapiens
atagaggtcccagtgcctagaacatagaggagcagtaaacatttgttcaatgaattattttgttagtaaacatgagtacttgcctctcttggaacttcctrtcacaaaattgtacaataagtatctcttattcactgtcaggaattatgatgacataaattttagaagagtcactagggatcatgtgatccaccagttttc

SEQ ID NO: 245958 - DNA, 201 bp, Homo sapiens
tggaaccttatcactaactgttggagtcactcattgaatttatactgttttgtgaattctgtttatatttgaagtcattgataaaatgtttctgtgtatcytcaactagattttaggtttgtaaactctgagcacagtatccagtctcatgggtctttgagttccctggagtggctcatgccttgacatgtacagaacagg

SEQ ID NO: 245959 - DNA, 201 bp, Homo sapiens
ttgaatatttgaattctagaaggcaaagaagaggaagaattgattattttggcaaagagcacgttgtcagcaaggtgtttcttcacccttttgagtattcrtgagtgtctaaaataatgacacgcaaacactagtgttggaaaaaaaaaaacagtcaggagagagcttcttccagtcccacatttttcagagacctcagcg

SEQ ID NO: 245960 - DNA, 201 bp, Homo sapiens
agggatgtcgaatccaacatttcaacattcagcctctgaatatacctcagaagaggatggagtctcttacctgaggccacagggggccctttggcacatgsaggcctcacatctccatagagttaaacttagggagcagacttcagagtgcgctgccattattttattcttttgaaacctttagattttactgcctctgga

SEQ ID NO: 245961 - DNA, 201 bp, Homo sapiens
agactctctcaaaaaaacaaacaaaaaaagaaaacaaatcaaaaaaatagaaacaaaaggaacataactactcatcccccacccaaattcaaaagattctytgagatttgtcatatacttatttaagtgtccctaaaaagagagctatggttctgctgtagtttctgtttaaatctcctagttttgcctgaagccatgaag

SEQ ID NO: 245962 - DNA, 201 bp, Homo sapiens
gtgcagcaaacacagcaaaggtattgatgcggggtgggatgggaagttttgctgctgtgacctcatctatacaattgcagaagaacatctagcctgcctcygctgtcttcttaaagtcccatctcctgttccctggcatccaatcccatctccctcccttcaggaacccagtgtcttccactacaggatggaaggaatgtc

SEQ ID NO: 245963 - DNA, 201 bp, Homo sapiens
tgatgccatgcacctgtagtcccagatacacaggaggctggggcaggaggattgcttaaacctgggaggtggagcagtaagctgagatcgtgccattgcaytccatcctgggagcctgggtgacagagacagaccctgtcaccaaatacatacacacacacacactcatatatacatacatacatacatagacacatatgt

SEQ ID NO: 245964 - DNA, 201 bp, Homo sapiens
gtcacccaaagcatgctccatccatcagttgccctcattttccataaaacaaacaaacaaaagagctcaatgtgtctaaaactgagcttacctttgccccycctcatgtgttttctatctcagtggatgggcacgagcatctaccaaacataaaagctacaaaaggaagaatcatcccagacttctccctgtctttacctg

SEQ ID NO: 245965 - DNA, 201 bp, Homo sapiens
acaacttaatgattttagtaagtttagtgggttatgtaaccatcagtattaatcaggttttgatgagtacccgtattgttacttctggtgcgggtcttgcygatgaggctagaatggacgagttttgagtggggagagatctgggactaggctgacttaaaagaaggggcccattatgacttccgtgggccctgggaactt

SEQ ID NO: 245966 - DNA, 201 bp, Homo sapiens
ctttagtgctaagcacagacaagccgcttattaagtggtaggtgagtgtattgctggatttgggcattataagaggaacttgtgaactcaattgatgagcygggtggggaacatgttcctgactttaacatattgcttgaccctggtgagctgccagtaaattcctgtggaattctgttgaatactgaagcagggaggttt

SEQ ID NO: 245967 - DNA, 201 bp, Homo sapiens
gtggcctacagaaatatcttttggaagttttaatgtccttactgtacttaattgcaaccaggctcccttaattactactacaatgagttagtttttttagmaccataattatttgcatatatagaatatattgtcacttttgatgtgaccatcctttactcacacatgtacattgatcatattacatgaacatattcaagt

SEQ ID NO: 245968 - DNA, 201 bp, Homo sapiens
aaaagcaggctcttgtcacacgaccaggaaagattaggctcgcggacacatagaagggtgaggaaaatggaatttattgggcgaaggggaaaaaggaaaaygaaccaaagcaagagagagccctgctagcagcttttctgactcacagattgaatcccaggtcaccacaggagctgaagacagcaagctcctcccgtgcac

SEQ ID NO: 245969 - DNA, 201 bp, Homo sapiens
ccatggtatcctcaattcccagcccagcctttgtcaaagattggcttttccaatcctttgaggtcaatgtgagaactactgttaccagtgggaatgtctcrtaacccttaggtttgccaaggaagatgtgaaaagatagtaaatcattagaattatgataagtactcgataaacagctaatgatgagattatttgcttttg

SEQ ID NO: 245970 - DNA, 201 bp, Homo sapiens
gtggtgaaaccccttctgtactaaaaatacaaaaaattaacggcgtggcagcgtgcgcctgtagtcccagctgctggggaggctgaggcaggagaatgacrtgaacctgggaggcggagcttgcagtgagccaagattgcatcactgcactccagcctggtgacagagtgagactccatctcaaaaaaaaaaagctctggg

SEQ ID NO: 245971 - DNA, 201 bp, Homo sapiens
aactaataaagatgtgtctgctttgtaagatttcatatttaacacagattacattcattaatttatttttattgaatgtacaagaagaagcttggatagayattaattaaattgtcagaaataaatagaaattgtaagtatgacaccccctgcaaagtggagttttatggtgctataaaagcattacgtggagggatttga

SEQ ID NO: 245972 - DNA, 201 bp, Homo sapiens
tgactgatcttgccactggcctgtatgcatatggagctattatggctggattgatacaaaaatacaaaactgggaaaggactgttcattgattgtaacctrctgtcatcccaggtaacaatccaactaacatttcagataatgttataaaaactgtgtctgggttataccttttcagatcaaattctatggtcacatgtac

SEQ ID NO: 245973 - DNA, 201 bp, Homo sapiens
ttccgcagggcttagagtttgtatttgaaaagagataaattcattcctagaaatattttggtatcactggctctcaggtggctcgtgttccattcattggyggtcagagctttctgggatctaaggaaggagaggtgaggagttggaggggaggatcttacatgtaaggggagcacgtgcggtgtgatataacaatccctg

SEQ ID NO: 245974 - DNA, 201 bp, Homo sapiens
ttcttttcttgattattgcagtgtctagaacttctagtaataagtcaaataagagtggtgggagcagacatccttgcctcattttattttatttttatttyatttttaatttttattattttatttttattattatttttttccttgcctcattttcaatcttagaggaaaagcattcagtatttcaccattaagtatgat

SEQ ID NO: 245975 - DNA, 201 bp, Homo sapiens
gaaaggttttctaagcatcaatgcaatagcagatgtcagaaagaaaagaaatcgataaatttggttagtaaaagtgaaaacctgtaaagtacatatcggtrtgataaaaatacaaagtttagttacagagcaatattaagttattgcaatgaatatgaccgaatgctgttgtaacataaatatcttaagagctcttagaaa

SEQ ID NO: 245976 - DNA, 201 bp, Homo sapiens
tttaatgtttaattatttcttctttctcaacccaaccttcaaatcagaatggagatccagttcgcccaggagtagctatgactgatcttgccactggcctrtatgcatatggagctattatggctggattgatacaaaaatacaaaactgggaaaggactgttcattgattgtaacctactgtcatcccaggtaacaatcc

SEQ ID NO: 245977 - DNA, 201 bp, Homo sapiens
tcttcattatctaagtcagctgtccccaatctttttggcaccagggccagttttgtagaagacagtttttccatggacggggatgggggatggtttcaggrtgattcaagggtattacatttatcattagattctcataaacagcgtccaaccgagatccctcacatgtgcagttcacaataggcttcccgctcctatgag

SEQ ID NO: 245978 - DNA, 201 bp, Homo sapiens
aaggtggccataaggactattgtccttcactcagggagaagtcctgttggggaacagtcttcaatagaagtggggttcagtccccttcccaccttgccctscaaggggaatggaggcctcaagtagcattttggtctgaatggaggggtcctggagacaacacatttaacagcatcttctatttgattgatgttggttgtc

SEQ ID NO: 245979 - DNA, 201 bp, Homo sapiens
tgcagtggtgcaatcttggcccactgcaacttctgcctcccgggttcaagcctcagactcctgagtagttgggattacaggcgtgcaccaccgtgcccggytaatttttgtatttttaggggagatggggtttcaccatgttggccagactagtctcgaactcctgacctcgtgatccgcccgcctcaggctcccaaagtg

SEQ ID NO: 245980 - DNA, 201 bp, Homo sapiens
ctctgtgggaggctgaggtggatggatcacctgagatgaggcgttggagatcagcctggccaacatggcgaaaccccgtctctactaaaagtacaaaaaayagcgggacatggtggcacatgcctgtaatcttagctacttgggaggctgaggcaggagaatcacttgaacccgggaggtggaggttgcagtgagctgaga

SEQ ID NO: 245981 - DNA, 201 bp, Homo sapiens
tcattgcacttcgtcccttagaaagagatattattatcccctttttactaataaagattctttttttaaattttctatttttaaaattttttgaatatatwtttttgaaacggagtcttgctctgtcgcccaggctggagtgcagtagcacaatcttgactcactgcaacctccgtctcctgggttcaagcgattctcctg

SEQ ID NO: 245982 - DNA, 201 bp, Homo sapiens
gtgccaattagtgcctttcacatctttatctgatcattcaaacttcttacaacagggcttctcatacttgggctttgacttaacggtgatctttgaacttytgaaacttgatgataaatttgtgagtatgggttcttcagcagttcctgggagaggacctcagctttcatcaagctctcactggtggtaatgcccaaaaca

SEQ ID NO: 245983 - DNA, 201 bp, Homo sapiens
gagaatcacttgaacccgggaggtggaggttgcagtgagctgagatcactccagcctgggtgacagagcaagactccatctcaaaagaaaaaaaaaaaaawtttagtgagtagtcaaattcccaaatacagaatctgagtattaactgtaattcctctgtggtgctgctgccatgtgtacaatgagtcagtaaaagcttca

SEQ ID NO: 245984 - DNA, 201 bp, Homo sapiens
tgaatatatatttttgaaacggagtcttgctctgtcgcccaggctggagtgcagtagcacaatcttgactcactgcaacctccgtctcctgggttcaagcrattctcctgtctcagcctcccgagtagctgagattacaggcacacaccaccacacctggctaaattttttttttttttttttagtagacgcggggtttcg

SEQ ID NO: 245985 - DNA, 201 bp, Homo sapiens
ttttattcccagacttatatattcacattcactcatttattaaacatgcttttgctaagttactggtagacgtaattctaggtgctaaagatattgcagasaacagtcaccttggtcacaggcctcagggtactaacattctagaggagagagatatccatcaaaaatataaaagtatccactagtgataagtactttaga

SEQ ID NO: 245986 - DNA, 201 bp, Homo sapiens
tgccccttccctttgcccagagataacaaatttcaattctttttgccttttttttctgccaaattgctaaataacctgattataatgttattgattatttygttttttttttaaggcactatcggtagagataaagactaaatttcaggccaggcacggtgcctcatgcctgtaatcccagcactttgagaggtcgaggtg

SEQ ID NO: 245987 - DNA, 201 bp, Homo sapiens
agttccatgtttgagctcacaagcaattctttaaataactatgagattttccagcattcatcgtgatagacgctagatctccagagcatatccttatgtgycaattcttttgaaatatctatctatctatctatctatctatctatctatctatctatctatctatctatctatctggtgttatctatctgctatctatct

SEQ ID NO: 245988 - DNA, 201 bp, Homo sapiens
catcatcagcatatggtgctatcaatattccttattttagtcattctgtagatgtgtttcaacagctaattgtgatttttattataattcctgaatggctratattgaacgtctttatatatgcttttagccacctccatattatctcagtgaaatgtctgttcatgttttttgctcattttctaactggcttttaaaaat

SEQ ID NO: 245989 - DNA, 201 bp, Homo sapiens
gaggatgtagtagcaagccatgtgaagattggagagaaatacatcctaggttgtgcaaaggccccaccttgggaataagctgtggagaacactaaaaacartatcagggcccaagatagggcattgggaaaacagacgagctgaggccaaagagtaggtagtaaccaagccatgtggggccctctaagccaggataaagag

SEQ ID NO: 245990 - DNA, 201 bp, Homo sapiens
ggaggtggaggttgcagagagctgagatcatgccactgcactgcagcctgggagacagagcaagactccatctaaaaaaaacaaaaacaaacaaacaaacaaaaaaaaaaaaggaagaaaaaaagaaaataacactgggaatggtgaaaatagagaaatacatgaatacatatgggaagtgaataatcagaagacttttag

SEQ ID NO: 245991 - DNA, 201 bp, Homo sapiens
tggagttgataaatttcacttcattcagtacaccatgccagtgctgatgacacagatctggagtaaatgtgattcctaccatcaagggacgtgtgtgtgtstgtgtgtgtgtgtgtgtgtaactctaggaatttcttgagtgtggtatatggatttttactaaacagcgctgtttttatttttcaaaaaacacctataata

SEQ ID NO: 245992 - DNA, 201 bp, Homo sapiens
ccttatgtgccaattcttttgaaatatctatctatctatctatctatctatctatctatctatctatctatctatctatctatctggtgttatctatctgctatctatctatctatctatctatctatctatctatctatctatctatctatctatctctatcatttacttttgagacagggtctcactctgttgcccagg

SEQ ID NO: 245993 - DNA, 201 bp, Homo sapiens
gaggtggaggttgcagagagctgagatcatgccactgcactgcagcctgggagacagagcaagactccatctaaaaaaaacaaaaacaaacaaacaaacaaaaaaaaaaaaggaagaaaaaaagaaaataacactgggaatggtgaaaatagagaaatacatgaatacatatgggaagtgaataatcagaagacttttagt

SEQ ID NO: 245994 - DNA, 201 bp, Homo sapiens
ctccttttttctttttagaaaggaagtataaagattaattacatcatacaatggtcttttcatttttagggaaaggtggtacatagatgtgtttcattccttcctcaaatctgtttttgtactaaagttgagaatgcttcaagtctctttctattttttaaatgcatattgctgtttagttagcttttaaggtgacgtgtg

SEQ ID NO: 245995 - DNA, 201 bp, Homo sapiens
cttatgtgccaattcttttgaaatatctatctatctatctatctatctatctatctatctatctatctatctatctatctatctggtgttatctatctgctatctatctatctatctatctatctatctatctatctatctatctatctatctatctctatcatttacttttgagacagggtctcactctgttgcccaggc

SEQ ID NO: 245996 - DNA, 201 bp, Homo sapiens
cagatccacaatgaaactgtgaaaataaaaacatttcagattttcagtactaattagcccttttcaccttgtgtgttaaatacttttaaataattcaaaakatactgggaaagaataaccacagaattaatattaggaacattggagggcattttgtaagcatcagtctaaatagttaataaggagaatatgcagaagggg

SEQ ID NO: 245997 - DNA, 201 bp, Homo sapiens
gagtgcacatatctcttcgtgattgattttcttctttcttggatatctacccagctgtggaattgctggatcatatggtattattattattattattattwtttttttttttttgagatggagtcttgctctgttacccatgctggagtgcagtggcacgatctcagctcactgcagcctccgcctcccgggttcaagcag

SEQ ID NO: 245998 - DNA, 201 bp, Homo sapiens
tgggaggccgaggcaggtggattgcttaagttcaagagtttgagaccagcctgggcaatctggagaaaccccatctctacaagaatacaaaaatgagctgrgcacggtggcagacatgtgttgtagtcccagctacttgggaggctgaggtgggagaatcaattgagcccaggaggcagaggttgcagtgagtcatgacta

SEQ ID NO: 245999 - DNA, 201 bp, Homo sapiens
ttatgtgccaattcttttgaaatatctatctatctatctatctatctatctatctatctatctatctatctatctatctatctggtgttatctatctgctatctatctatctatctatctatctatctatctatctatctatctatctatctatctctatcatttacttttgagacagggtctcactctgttgcccaggct

SEQ ID NO: 246000 - DNA, 201 bp, Homo sapiens
tgcacatatctcttcgtgattgattttcttctttcttggatatctacccagctgtggaattgctggatcatatggtattattattattattattattattwttttttttttgagatggagtcttgctctgttacccatgctggagtgcagtggcacgatctcagctcactgcagcctccgcctcccgggttcaagcagttc

SEQ ID NO: 246001 - DNA, 201 bp, Homo sapiens
ctgaggtgggagaatcaattgagcccaggaggcagaggttgcagtgagtcatgactacgccactgtactctagcctgggcacgcctgtctcaaaacaaacaaacaaacaaacaaacaaacaaacaaacaagcaagcaaaaagaagagttaccgaacatataccttactgttttgtgttctgacttcaaagtcagcaacaaa

SEQ ID NO: 246002 - DNA, 201 bp, Homo sapiens
caccatgcccagctaatttttgtatttttagtagagacaacgtttcaccatgttggccaggctggcctcaaactcctgacctcaggtgatccacctgcttyggcctcccaaagtgctgggattacaggcatgagccaccgtgcctggccaggaagagtgtgtgttttaaggaagactaagtgctgtggcagatcatctttc

SEQ ID NO: 246003 - DNA, 201 bp, Homo sapiens
tagatgttataatatataatttagaaactgtgacaggatccttccacacctacctctgcattttgtctactgccagctctgtaattctggcttccatgaarttgatcagttcagcctcccaggtatgggcatatgaagcagttgaagcaaaaagcctttgtcattatcctacaccgctctagaaccatcccttagaggacc

SEQ ID NO: 246004 - DNA, 201 bp, Homo sapiens
tagacttgctacagctgccccattcagaatagcttctgggctgtgagtagtggttagagaacttcaaaaggcaatttaacagataatttgttctttttgttattattattattattattattattattattattattatactttaagttttagggtacatgtgcacaatgtgcaggttagctacacatgtatacatgtgcc

SEQ ID NO: 246005 - DNA, 201 bp, Homo sapiens
tatgtgccaattcttttgaaatatctatctatctatctatctatctatctatctatctatctatctatctatctatctatctggtgttatctatctgctatctatctatctatctatctatctatctatctatctatctatctatctatctatctctatcatttacttttgagacagggtctcactctgttgcccaggctg

SEQ ID NO: 246006 - DNA, 201 bp, Homo sapiens
tgaggtgggagaatcaattgagcccaggaggcagaggttgcagtgagtcatgactacgccactgtactctagcctgggcacgcctgtctcaaaacaaacaaacaaacaaacaaacaaacaaacaaacaagcaagcaaaaagaagagttaccgaacatataccttactgttttgtgttctgacttcaaagtcagcaacaaac

SEQ ID NO: 246007 - DNA, 201 bp, Homo sapiens
gctgctccactctgctctcctgccagtggagcttggggtttttatgggtacagggttgggggcagggtgggccagggtggttttggaaaaggcaacatttygggtgggaaaacagggatgttaaagttctcattttggaccgcaggtccaggcttgagggtggggccctcgccagggaccgccctcttctacccagtactt

SEQ ID NO: 246008 - DNA, 201 bp, Homo sapiens
gggaggtggaggttgcagtgagctgaggttgcgccagtgcactctagcctgggtgacagagctagacgctgtctcaaaaatactgaaaaaacaaaaacaamaacaaacaaacaaacaaacaaaaaaaccaactggatattcagatgcagaagaatgaggttggacccttatcttacactatatacaaaaatcaacttaaaa

SEQ ID NO: 246009 - DNA, 201 bp, Homo sapiens
cttcctgctttccttctcctttggcaggcccagctgtgagatacagtaagttcaagatgtcagaggccaggccgcccccgctgctcgggcagcacacaacrcacatcctgaaggaggtcctgagatacgatgacagggccatcggggagctgctcagcgctggagtggtggaccaacatgaaactcactgacaaaggaaaa

SEQ ID NO: 246010 - DNA, 201 bp, Homo sapiens
aggtgggagaatcaattgagcccaggaggcagaggttgcagtgagtcatgactacgccactgtactctagcctgggcacgcctgtctcaaaacaaacaaacaaacaaacaaacaaacaaacaaacaagcaagcaaaaagaagagttaccgaacatataccttactgttttgtgttctgacttcaaagtcagcaacaaacaa

SEQ ID NO: 246011 - DNA, 201 bp, Homo sapiens
tgttactacaaatatcaagtgaggtttgcatgatgcagcaaaagtgaggtccaaatttttgagaatctgtgttaaaaagcttgggcattatcttgtatgayagagagatactgacaggtttcacccatatcgatgacattgtaatatttgtgttttaggtaaattactcttgaatgggtgaggagatggttttaggagaga

SEQ ID NO: 246012 - DNA, 201 bp, Homo sapiens
aaactaaacagtttctgcacagcaaagggaacaatcaacagagtgaagagacaacttacagaatgggagaaaatatttgcaaagcatatatctgataaggrgttgttatccaaaatatataaggaacccaaacagttcaccccattaaaatttgggcaaacgacctgaatagacatttctttctttttctttttttttttt

SEQ ID NO: 246013 - DNA, 201 bp, Homo sapiens
ccaggaggcagaggttgcagtgagtcatgactacgccactgtactctagcctgggcacgcctgtctcaaaacaaacaaacaaacaaacaaacaaacaaacaaacaagcaagcaaaaagaagagttaccgaacatataccttactgttttgtgttctgacttcaaagtcagcaacaaacaataataactacaattctaactt

SEQ ID NO: 246014 - DNA, 201 bp, Homo sapiens
acattgtaatatttgtgttttaggtaaattactcttgaatgggtgaggagatggttttaggagagacaaaactggaggaagggaagccagatttaatcttycatgtgaaagatgagcaagactttggattaagtcagtggtagcaagggatctatttgagatgtaagtttgaaaaataaatttacaggagctagtgatgct

SEQ ID NO: 246015 - DNA, 201 bp, Homo sapiens
ccgccctcttctacccagtacttccctgcctcctgtctgtatcaataggaagctctcacagaaatccagcaagagatgatggtagctagcattaggctggytgtaaaaagtgattggattttgtatgtgtttagaagccagaatcaatagaatttgctgatggattggatatgacatgtaagagaaagagaagagtcaaga

SEQ ID NO: 246016 - DNA, 201 bp, Homo sapiens
tttttgagtgtgcttattaccgacacctataatttaaaattccctattagccccattaaaaaaataaagaggaacagatgagattaattttgattatatattttattcaaccaaatatatccaaaatattttcctttcaaaatgtaaaatttgtataaaattaataattattttacttttttcttatatgatgtccttcaa

SEQ ID NO: 246017 - DNA, 201 bp, Homo sapiens
aatccaacttacaagggatgcgaaagacctcttcaaggagaactacaaaccactgctcaatgaaataaaagaggatacaaacaaatggaagaacattccaygctcatggataggaagaatcaatatcatgaaaatggccatactgcccaaggtaatttatagattcaatgccatccccatcaagctaccaatgactttctt

SEQ ID NO: 246018 - DNA, 201 bp, Homo sapiens
tgttgcacttcacttaatttccaataggttagaggcagcccacggcatgattatgtgcacaggggcattgtctggtctcaatatctgtgttacttacttcrttttaaactgtacccttattcctcatgtcctatctttattcttatatttatttttccattttccttgttttgcctttggggagtagatgactgtaaacta

SEQ ID NO: 246019 - DNA, 201 bp, Homo sapiens
atcccttccttacaccttatacaaaaattaattcaagatggattaaagacttacatgttagacctaaaaccataaaaaccctagaagaaaacctaggcagyactattcaggacataggcatgggcaaggactacatgtctaaaacaccaaaagcaatggcaacaaaagccaaaattgacaaatgggatctaattaaactaa

SEQ ID NO: 246020 - DNA, 201 bp, Homo sapiens
tttttctaagaaaatatccatagacatagttatagatatatagatataaatacatagaaaaaaatatttggaactaaatttatattagaggtagttactgraaatggtacataatgagaagtatattctcctcttcttctttattcacatattttagtttttaaaaattatctataatagcacaataatgaaaagttattt

SEQ ID NO: 246021 - DNA, 201 bp, Homo sapiens
agttatagatatatagatataaatacatagaaaaaaatatttggaactaaatttatattagaggtagttactgaaaatggtacataatgagaagtatattctcctcttcttctttattcacatattttagtttttaaaaattatctataatagcacaataatgaaaagttattttctattttaaatgaaagatatgtcttt

SEQ ID NO: 246022 - DNA, 201 bp, Homo sapiens
aaatgctgcaggatttctggatacaaatgtttctaacacactatattgtacagtggttttagcacaccctgtgtggtgctgaatatgtttatttttgttgytttagggtatggtcagacaggtccaatttctcagcgagctggttatgatgctgttgcctcggctgtttctggtctgatgcacatcacagggcctgaggta

SEQ ID NO: 246023 - DNA, 201 bp, Homo sapiens
ttctattttaaatgaaagatatgtctttaataaactgataagattgacacagtaaagggagaatacaaatgaaagtgcttttggaataaaaatagaaactrtgctcttgattttggtcatttgtatcaaatcatatttcatgcaaagcaataagcattctgatataaaaactagcatctcccattttattgctgtgttgat

SEQ ID NO: 246024 - DNA, 201 bp, Homo sapiens
agatacaaattaatcgatattgaattaataacattgctttagaacaagctttctatatagatattttagaaattaaacttttgtggtcttgtcaacatatmaataatatttacctgtgtatttatttcttttaggcttttaaaaccaaggatggctatattgtagttggagcaggaaataaccagcagtttgccaccgtct

SEQ ID NO: 246025 - DNA, 201 bp, Homo sapiens
tttttagtagagatcatgttggccaggctggtctcgatctcctaacctcaagtgatccacctgcctcggcctcccaaagtgctgggattacaggcgtgagscagcacaccaggctgggagcacatgcaattctggtacaagtcataaacctagattctagtccccccactgccagaccttgggtaagtcacttaacctcat

SEQ ID NO: 246026 - DNA, 201 bp, Homo sapiens
agaaataagtaaaataatagcctttagatggccagatgccactctgtgtcatgtttttgctccttgaatgtatatattttgtaataaaatgcatcccttaygtatcatctttgaatgagactaaaagatgcacggtgttttgacaacatgaagaaagctttacagcatgttacatggaagattttaaaacactgagctgta

SEQ ID NO: 246027 - DNA, 201 bp, Homo sapiens
ctgggttcaagtgatcctcctgcttcagcctcccgagtagctgggattacaggtgcccgccaccatgcccagctaatttttgtatttttagtagagacaaygtttcaccatgttggccaggctggcctcaaactcctgacctcaggtgatccacctgcttcggcctcccaaagtgctgggattacaggcatgagccaccgt

SEQ ID NO: 246028 - DNA, 201 bp, Homo sapiens
gattttgattatatgttggctttttccataagtttcatattttcaatttaccccaaatactgtaactgtgaaatataacgactaaggcattttggcaaataaaaaaaaaaaaaaacccacaaatttggtgtgaacatcaagaaataatgggtcttgagttttcatggccatgtgtactgtcccattagtaacatttagttg

SEQ ID NO: 246029 - DNA, 201 bp, Homo sapiens
aacataatttttttgatggtggtggacaaaaacgaggcagggcattttttcctgcctcctttaggcccacgccatccacttttcccacccctgtttaagcrctcaaatgttctttcttcggctgggcattcttgatggcaaatatgatgtaaatgacttcttgttcaaaggtggaagtcagaggctgccagggtggtttcc

SEQ ID NO: 246030 - DNA, 201 bp, Homo sapiens
gttcatttatactaataggacttggcaggaagaaaaaattggcaggacttggagttcctagtgtgggttttttttttctttttctttcttcttcttcttctttttttttttttttaattttgttgcctttaacaaatttaaaaacaccagcattgaaaacttttaaatattttgaggaaacagttttcagaggccagcttg

SEQ ID NO: 246031 - DNA, 201 bp, Homo sapiens
tgtacatctattatgactcaataaaaaaagtaaattattcaaaaaaggaaaagaacataatttttttgatggtggtggacaaaaacgaggcagggcatttyttcctgcctcctttaggcccacgccatccacttttcccacccctgtttaagcgctcaaatgttctttcttcggctgggcattcttgatggcaaatatgat

SEQ ID NO: 246032 - DNA, 201 bp, Homo sapiens
actgcctgatactgtgattaagctagggccacagataccatttgatgtttacccttctccgttgcccaccaacctgtcttgaattgattccagaattattmttcttcttcttttttttaagacagggtctcactctgtcacccaggctggagtgtcatggcgccatctaagactggctgcgacctctgcctccgggactca

SEQ ID NO: 246033 - DNA, 201 bp, Homo sapiens
caggaggcagaggttgcagtgagtcatgactacgccactgtactctagcctgggcacgcctgtctcaaaacaaacaaacaaacaaacaaacaaacaaacaaacaagcaagcaaaaagaagagttaccgaacatataccttactgttttgtgttctgacttcaaagtcagcaacaaacaataataactacaattctaactta

SEQ ID NO: 246034 - DNA, 201 bp, Homo sapiens
ttttttaaggactatgtctttatctacaaaaaaaatattaatcaggattgtctaggtttaatgaattacaccttatataaggtgaatctttttggtcagcmcaaaaagggttagatttagttagatttttattcatcttggtaattttgttacagaaaacgtctgattaagctaaaaaaatatagagtgggaaaaatggct

SEQ ID NO: 246035 - DNA, 201 bp, Homo sapiens
tgcttaaagatagcaacaaaataatttaaaatcaaagaatgttttcagttgccattttgcctaaacagttttctaactgatttgcatttccaggaactgchaacgctagatattttattcagcaaattcagaggctgtggatgtattctagtgatcagaggtctgtaggcctacctaggtaggtcaacttggtatgcttga

SEQ ID NO: 246036 - DNA, 201 bp, Homo sapiens
ggaggcagaggttgcagtgagtcatgactacgccactgtactctagcctgggcacgcctgtctcaaaacaaacaaacaaacaaacaaacaaacaaacaaacaagcaagcaaaaagaagagttaccgaacatataccttactgttttgtgttctgacttcaaagtcagcaacaaacaataataactacaattctaacttatt

SEQ ID NO: 246037 - DNA, 201 bp, Homo sapiens
gatgtaggtggggaaaagatttttgcacccttacttgaatggttttgaacaaggccagatggaactttccaatccgtataatcatcaagaaggcatcccartacaacccttggaagttgctaaaatgcttttgttttatatcctttcatcttcatgttactctttagctgtaatttactccttttttgtcaatcatgaatt

SEQ ID NO: 246038 - DNA, 201 bp, Homo sapiens
gacttactcttctgcagtttcacaaagcccagttggtttaaattctttgtccttccattgtccaaacctaataaggaagtcagtcagctgtgggttgggayaaggaactggttggtggtaaggaagaacattcctccaagggccttttgatctttaagaggcaataagttgccccattccctgcttttatacaaaaatatc

SEQ ID NO: 246039 - DNA, 201 bp, Homo sapiens
tccaccttctggtagttttttgaaacagggattccactgcttaaaactcattacttgtcctagatcgatcatcttgtactgaaggactttattgaacaagraagtgggttttgtacatgtgtatgtgtgtgtgtatgtgtgtgtatgtgtgtgcatgtgtgtgtatgtgtgtgtatgtgtatgtgttttggagaaaagaga

SEQ ID NO: 246040 - DNA, 201 bp, Homo sapiens
ggcagaggttgcagtgagtcatgactacgccactgtactctagcctgggcacgcctgtctcaaaacaaacaaacaaacaaacaaacaaacaaacaaacaagcaagcaaaaagaagagttaccgaacatataccttactgttttgtgttctgacttcaaagtcagcaacaaacaataataactacaattctaacttattggg

SEQ ID NO: 246041 - DNA, 201 bp, Homo sapiens
tctctatttcttttttcttttcttttctttttttgagacagggtctggctctgtcatcaagctggagtgcagtggcacgatctcagcacactgcaacctcygcctcccgggttcaagcaattctcctgcctcagccttttgagtggctgggattacaggcacatgccaccatgaccagctaatttttgtatttttagtaga

SEQ ID NO: 246042 - DNA, 201 bp, Homo sapiens
ggctctatggtcatttaaatgatactgattcttagaatccgtgagtatggaatattttttcatttgtttgtttaatgtatgatttcttttagcactgtttyatagttctccttgtagagctcttttttgtccttggttagatgtagtcttgggtattttgtttgtgtgtggtggtttttgtaaatgggattattttcttga

SEQ ID NO: 246043 - DNA, 201 bp, Homo sapiens
catacaatgggaggggacccaaagggggttgcccactcccggctcaaatgcctggagtttatatcccaatcattgtcccttcccctgtgctctcaggcgayatatgatttgacttatttctttacctcctgcttttagcctaatttgtattttagtgagccctctttactacctgattggttggatgtgagctgagttaga

SEQ ID NO: 246044 - DNA, 201 bp, Homo sapiens
gcagatgacatgactgtatatttagaaaaccccatcgtctcagcccaaaatctccttaagctgacaagcaacttcagcaaagtctcaggatacaaaatcartgtgcaaaaatcacaggcattcctatacactgataacagacaaacagagagccaaatcgtgagtgaactcccattcacagttgcttcaaagagaataaaa

SEQ ID NO: 246045 - DNA, 201 bp, Homo sapiens
ttgaagtcaggtagcgtgatgcctccagctttgttcttttggcttaggatcgtcttgacaatgtgggctcttttttggttccatatgaactttaaagtagtttttttccaattctgtgaagaaagtcattggtagcttgatggggatggcactgaatctataaattaccttgggcagtatggccattttcacgatattgat

SEQ ID NO: 246046 - DNA, 201 bp, Homo sapiens
ttagaagccccgtgtttaaaggtgggtgtggtcaccttcccagctagtcttaggaattcttagttggactaggaaatccagctagtcctgtctctcagtamcccccaacaggaaaacccaagtgctgtaggggaggttggccaatgaccactctaactgcttcctgctgaattggggcgtagtaggggtcatgcagttgag

SEQ ID NO: 246047 - DNA, 201 bp, Homo sapiens
acacatctacaaccatctgttctttgacaaacctgacagaaacaagaaatggggaaaggattccctatttaataaatggtgctgggaaaactggctagccrtatgtagaaagctgaaactggatcccttccttacaccttatacaaaaattaattcaagatggattaaagacttaaatgttagacctaaaaccataaaaac

SEQ ID NO: 246048 - DNA, 201 bp, Homo sapiens
tcttgtgccagttttcaaagggaatgcttcccattttcgcccattcagtatgacattggctctgggtttgtcataaatagctcttattattttgagatacrtcccatcaatacctagtttattgagagtttttagcatgaagggctgttgatttttgtcaaaggccttttctgcatctattgagataatcatgtggttttt

SEQ ID NO: 246049 - DNA, 201 bp, Homo sapiens
tctctttggtggtcaaaatgttgtgtacccatgtttctggagaaggctttttgtgttcttttctaatgtttgtaatagcacgtgttacttgttgtcaagtrcatattacattttatattgtagttattagtaggagaatattttaatttcaatgcaatgcaatttttttttcccttataaggcaaaatctcagagagaggg

SEQ ID NO: 246050 - DNA, 201 bp, Homo sapiens
atattccacgttctctatttcttttttcttttcttttctttttttgagacagggtctggctctgtcatcaagctggagtgcagtggcacgatctcagcacrctgcaacctccgcctcccgggttcaagcaattctcctgcctcagccttttgagtggctgggattacaggcacatgccaccatgaccagctaatttttgta

SEQ ID NO: 246051 - DNA, 201 bp, Homo sapiens
gcctgatttttacctaaagcgtttactttttgatagtcttgcaattatgatgtcttccattatgaagtaagagtcttactttgctactacttttttttttwaatttcaattagggtaatgtacatgttaaaatacttcaaccaaaattaaatgaaacatgctgatggcgtatttcttattgtaaacatccatgtgaagctt

SEQ ID NO: 246052 - DNA, 201 bp, Homo sapiens
tgttacttacttcattttaaactgtacccttattcctcatgtcctatctttattcttatatttatttttccattttccttgttttgcctttggggagtagwtgactgtaaactatatgttaaacacatttttgctgtcattttccatgattttattaggttttgtacaaaaatgcaagtgcttttgttgcttacatggcac

SEQ ID NO: 246053 - DNA, 201 bp, Homo sapiens
atggttgataagctttttgatgtgctgctggattcagtttgccagtattttattgaggatttttgcatcaatgttcatcagggatgtttgtctaaaattawcttttttttgttgtgtctctgccaggctttggtatcaggatgatgctggcctcataaaatgagtagggaggattccctctttttctattgattggaatag

SEQ ID NO: 246054 - DNA, 201 bp, Homo sapiens
ggtgcagtctaattttattctttaaaaaaaaaaaaaagactagtttccaccctcctgtcctagtgcttaggtcttgaattgttcacccctcctccatttcyaggaagtttctcagatatttttaatgctgatattctgaaattttatgtgatgtcaagatgtaaatcttttttccatctatactgttggattctcagttga

SEQ ID NO: 246055 - DNA, 201 bp, Homo sapiens
gactaaaaatatatttttttctaccctcacacttgacttgtgctttaattgggtttagaattttagagagaaagaatttctcccctcagaattttaagggttttttttttgctccagttttttgtctttcagcattgttgagaaattcaatgtcctcctgataaccaatactttatatctgacctgcttttttctccctag

SEQ ID NO: 246056 - DNA, 201 bp, Homo sapiens
gtctggtcctggactttttttggttggtaggctattaattattgcctcaattttagagcctgttatttgtctattcagggattcaacttcttcctggtttwgtcttgggagggtgtatgtgtccaggaagttatccatttcttctagattttctagtttatttgcgtagaggtgtttataatattctttgatggtaatttg

SEQ ID NO: 246057 - DNA, 201 bp, Homo sapiens
tttcttattgtaaacatccatgtgaagcttatggattctggctgattcgtagagtaggcagagaactgagataacatgaatgttcaggaaagacctctttkgtagtgagctgtgatgcaaatctgatcattttgaggaaaagtactccagtgcacattgacctctttcgctaaaagagatcttgaggtaactgacgtccag

SEQ ID NO: 246058 - DNA, 201 bp, Homo sapiens
ttattgtcatcagataaattttgccgttcacgtatctttgttgattcaaggaaaattttaccctgattggctctatgaatagaaatataataaatgtagcygtgtgatattccaaaagctggatgaaatggcttttagtatttaagcataattccagatattttgttttaataaaacaatgaaagttagcatttgtcagga

SEQ ID NO: 246059 - DNA, 201 bp, Homo sapiens
ttaatttttttcctggaaaaatgcactccttattctacttacattaatgtcctaaacgtttgccccttaccccccatgccctcaccagaccccccgccccrtccatacaggcctgaaaaagagcagctctcttgatactttctacttgtacataaaatctgcatttaaatttgtgttagggagtcaaagcaataagcagaa

SEQ ID NO: 246060 - DNA, 201 bp, Homo sapiens
tgttcaggaaagacctctttggtagtgagctgtgatgcaaatctgatcattttgaggaaaagtactccagtgcacattgacctctttcgctaaaagagatsttgaggtaactgacgtccagacctttagcattaaattggtgaaaatcagtacactgaaacaaagctcaacatgaattagtacagccagcacatattaccc

SEQ ID NO: 246061 - DNA, 201 bp, Homo sapiens
atgaaaatttgtctggatatagaattcttggtaagcatctttccccattgaaaagctgtaattttattccatacacaatattgtgaagtgatctaggccartctgacttttaagtcttttttaaggactatgtctttatctacaaaaaaaatattaatcaggattgtctaggtttaatgaattacaccttatataaggtga

SEQ ID NO: 246062 - DNA, 201 bp, Homo sapiens
ttagtgaccaagcaatttggagaaggtggagacatgggacatctaggctggaagatttcctttctggttggtttactctctgtacatggggaaactgctgwtccatgggccagctttccacagctagtttcttttcctcccggcatctcctcaagaatactgcttggctgtgtctggcctccttcctggagctcctgcctg

SEQ ID NO: 246063 - DNA, 201 bp, Homo sapiens
tctggaagagataaacttaacaaggaggttaaagatacagggattgaaatgtatggcctgcagtgcaaagtgcaggggattatttcttcagcacacttcayaggccctgactatctgcttgacagtttttaaaaggcctggtccagtaaataatgatttggccatctgatgggtgctatcaatgcctaagtgaaaggtttg

SEQ ID NO: 246064 - DNA, 201 bp, Homo sapiens
agacaggattaatttgaatgatcctaccatacagtagatacatatttaaggtggtggatatcccaattgccctgatttgatctttatacattacatgaacrtatcaaatttacatatgcagcccccaaatatgtacatctattatgactcaataaaaaaagtaaattattcaaaaaaggaaaagaacataatttttttgat

SEQ ID NO: 246065 - DNA, 201 bp, Homo sapiens
agccatcctgaggggaggaaactattttctcttgagattccccattctatttcttctgccgagtactggggcttggtttcctggaggggattaccccatactctaggggtccttctataagcatttctaatggatggtcccgccttgcggatcttttggcttcggtatctgcttggtggttcccttctatttcccttttct

SEQ ID NO: 246066 - DNA, 201 bp, Homo sapiens
gccatcctgaggggaggaaactattttctcttgagattccccattctatttcttctgccgagtactggggcttggtttcctggaggggattaccccatactctaggggtccttctataagcatttctaatggatggtcccgccttgcggatcttttggcttcggtatctgcttggtggttcccttctatttcccttttctt

SEQ ID NO: 246067 - DNA, 201 bp, Homo sapiens
aaaaaaaaaaaaaaagaatgatgttgaagaaacagtaacaaaagagcaccaggacataaaggcaatggtaatcagaactagaggaaaatgtgacaaatagrgaattggagagggtcctagaataaccagacaaaggatgtgaagcccttcccagaatgaatcactcctatggaaggaacagccccttgggctccacgaaat

SEQ ID NO: 246068 - DNA, 201 bp, Homo sapiens
aatgacatgaacctgggaggcggagcttgcagtgagccaagattgcatcactgcactccagcctggtgacagagtgagactccatctcaaaaaaaaaaagstctgggggtctggggttaaatgtaatgtcctggaacctgagatctaagcacagctagtggtttactgttctttttctgaaatcagtacagtgcaatttga

SEQ ID NO: 246069 - DNA, 201 bp, Homo sapiens
tttattttgaatgaataaatgaaaaatgcgagaccttctttctttagagtatacttttatggtatgcattatctgaaactatcttctttgaatcctaatayccaaatgacacaatgcgttttccgtgaacccttgcccacttttaatcttttgagtttctgcatgctcatatttccttttaaagtttctccttctagttga

SEQ ID NO: 246070 - DNA, 201 bp, Homo sapiens
caacacgtaataaatactcacttaatattagcaattacagttaactcttgaacaatgcagggattaggttcctacgcaggaacggtgtcaggacaaccacrttgtattacttggagtccccaaatactgtattactagcctaccattgactggaagccttaccaataacaaacaatcactaacatatattttatatattat

SEQ ID NO: 246071 - DNA, 201 bp, Homo sapiens
aagaaggggttggtcttgctgtctcaggggtggcagaggcgggagaaaacccatgcataagtggatccgtgcagttcaaacctgtgttgtccaagggtcakctgtattacccaatatgtactaacctgcatacttaagacacttaacagtttcttaggtgtttataaaggccaatatcttatatttcagtgtaatcacaca

SEQ ID NO: 246072 - DNA, 201 bp, Homo sapiens
ccgtgaggacacacactgtacctgactgcacaggtgctgcttggaataagaattttcgtgggaggaacaagtgtgatcatcagggaaggggttagtacccrtagccaaaggactgtgcactaagacaacaaagaatgatatataaacaaagcacaacatttgcatggcaggagaaggatgaatggggtacttaagcaaagc

SEQ ID NO: 246073 - DNA, 201 bp, Homo sapiens
gcaggagaaggatgaatggggtacttaagcaaagctctcgagacagagtagtgtgtgattgaaaaggctaaaatgactatgtatattgtgtttggagaaayaggtgaggcccccatgggctgtcaaataatgactaatatattagtagtcatgctatcgtgttattattagtgactcctttgctcactgttagctaaggca

SEQ ID NO: 246074 - DNA, 201 bp, Homo sapiens
atgtaatattaaaaattagagatcccttttgagatcagttgactaccagaattgtgttgtctttgcttacaacttacttggcttgggtgaaggtgggaggttttttttttttttttagggcagtttctgtacacacccggtgtcctgtgttaagctgtcatgtggatgtgcattttcttaatttgtagaaaggagatactt

SEQ ID NO: 246075 - DNA, 201 bp, Homo sapiens
tgtttgatgttgcatttgggtgagatgagatgagaaaagtagtccagggtgggaatctgagggcctttggtccatgctaaattttggactttatcttgtasaccaacagttacaattcagataccatcagatgctaggcaaatgaaatcagtgagtgaatcatactgggtaaccagcagagagagtggtgggtactatgga

SEQ ID NO: 246076 - DNA, 201 bp, Homo sapiens
tcaaactcctgacctcaagtgatccacctgcctcagcttcccaaagtgttgggattacaggtgtgagccaccatgcccagtctatttttattttttaatgwcaaataataatgatatatatttctcacatatgctgtgatattttggaatatgcataaattgtgtaatggctcagttgagctaattaatatctgcaatacc

SEQ ID NO: 246077 - DNA, 201 bp, Homo sapiens
ggaccagaagattgattccggtctttgttttttaaatggaggggttatttgtttagataggggtacatgaattaaacagaattctagctcctgataatctrtgaggatatatcttgggagctaggatacagtttgttttagggctgctgtaacaaattactacaaaccggactgcttaagacaacaggtattctctcacag

SEQ ID NO: 246078 - DNA, 201 bp, Homo sapiens
tgtgactatccatgctgaaacagtgtgtctgtaaggcaggttgatgacacctgattgaaattgtgagccaacacgcctgtaatcccagcgctttgggaggycaagatgggtggatcacttgaggtcaggagttcgagacccacctggccagcatggtgcaaccccaactctactaaaaatacatagtggcgcatgtctgta

SEQ ID NO: 246079 - DNA, 201 bp, Homo sapiens
gtgctatgttatttctggtggggacattatactgtatatttaatttggcagaagcagagactcagacaggcagtaaattccaagtttgaagatatgcagtrctttgctatcattccttagaaaaatgtcaaagtgctgttaaatcatggcagattaggtaacattgggaatctttttctttttttttcttaaacacatgtt

SEQ ID NO: 246080 - DNA, 201 bp, Homo sapiens
aataataataataatagtattaataataataaaagggggggaaagcctcttatggctttctgcaatctaagtgaaagcaatactccttctgtgaatgaatwtttataattaagcactagcaattattttagaatatgatctgaaaggcctacttgtgtatagctgctggcaagtagagtatataaaaagtagtcccccaga

SEQ ID NO: 246081 - DNA, 201 bp, Homo sapiens
ctgaagtagcttctaactcaagaggttgaagaaaacaattatttacatgattaaataaaataacatcttccttgttccaatttgggcttattcaaccaagsagtagagcaggaagctgtgctatgttatttctggtggggacattatactgtatatttaatttggcagaagcagagactcagacaggcagtaaattccaag

SEQ ID NO: 246082 - DNA, 201 bp, Homo sapiens; identical to SEQ ID NO: 47958

SEQ ID NO: 246083 - DNA, 201 bp, Homo sapiens
atttctccctttctctcattcaggttcatgacaagtagctagctaaatcctcaaattaattcactctatgacttcagagggcaaaccatattccttgctcaaaaaaaaaaacaaaaaacaaaactcattaaggaaagaaatttgtctatagcagtaaagctgatggatgttcttaaaatccaaagaatctttcctgttagg

SEQ ID NO: 246084 - DNA, 201 bp, Homo sapiens
aatttcttctaaacttttcttctgaagtagcttctaactcaagaggttgaagaaaacaattatttacatgattaaataaaataacatcttccttgttccartttgggcttattcaaccaagcagtagagcaggaagctgtgctatgttatttctggtggggacattatactgtatatttaatttggcagaagcagagactc

SEQ ID NO: 246085 - DNA, 201 bp, Homo sapiens
ccatcaattgcaaagtggcaaaatgttcacaagttagaaatctgggtggagtgtcagttattttattttcagtattcagcatgttttgaaatatttcatawttattttaataaaaagaaaaacaaaagcagtaacaaaaaaaaggacacaaagaatttttgtaagaaagggcctcttttgtcatgtcactttccatgcatg

SEQ ID NO: 246086 - DNA, 201 bp, Homo sapiens
ccccaggagttcaggtggtatgcaatagctaggggtagttgactttctgagtagttcattagtgagaattctttttttatgctctttcatgagcctttcartgggaattttcctttaaatggcctgataattcacatggtaatttcttctaaacttttcttctgaagtagcttctaactcaagaggttgaagaaaacaatt

SEQ ID NO: 246087 - DNA, 201 bp, Homo sapiens
tggtatatagtaagtgtccaatgaatgctgtcttctaaaaaagatataattgctcgtaagagaatggcatttagtgtcctagtctttctgtaggattttgrcatgatcttcactgatccctgtcctcaggcaagaaatctgaattccttgtgctgcttctcccatatgcaaaaaggactatgtttctccttttttcttttt

SEQ ID NO: 246088 - DNA, 201 bp, Homo sapiens
ttctgcaccaaacagttaagagaaggatagctataatggttcatacatccactctgggttttctgtttggttggttttttgttttccagggttttttttgtttttttttttttttccggatgtgagcactcctagccacaaagaattagctagagaggaagatttcaggccagatatacctattgcttcaggccttctttg

SEQ ID NO: 246089 - DNA, 201 bp, Homo sapiens
gtgctttgcagaccaatgggagaccccaggagttcaggtggtatgcaatagctaggggtagttgactttctgagtagttcattagtgagaattcttttttwatgctctttcatgagcctttcaatgggaattttcctttaaatggcctgataattcacatggtaatttcttctaaacttttcttctgaagtagcttctaac

SEQ ID NO: 246090 - DNA, 201 bp, Homo sapiens
ggtgaagagaaaaggaggattcgtgggttaggatcatgggctttggagttcatggttggagtcagggacagttctggctgaaattctatcagtatgtattsgctaggtgatcttgtataagcaacttaatgtcactgttcttggcttcttcggctgtaaaatggggaaaattacaattcatatcagggttgtagtaagatt

SEQ ID NO: 246091 - DNA, 201 bp, Homo sapiens
aacatgggtatgaatctctttgtcgatgactgttttatttgttaatttctcattacatttttattagtttttgctttatttattacacttacatttaatttctgttattttgctttatttaacattatttaacttttatattatatgttatgcagcatagaaaaacaatacatgtgataaatattatatatttcacacgag

SEQ ID NO: 246092 - DNA, 201 bp, Homo sapiens
tctgcaccaaacagttaagagaaggatagctataatggttcatacatccactctgggttttctgtttggttggttttttgttttccagggttttttttgtttttttttttttttccggatgtgagcactcctagccacaaagaattagctagagaggaagatttcaggccagatatacctattgcttcaggccttctttgt

SEQ ID NO: 246093 - DNA, 201 bp, Homo sapiens
tttcaaatcctatcctatttctatatgtgctactatacaggactcttccaaaaaattttgggtgattgctggatggaagccctctactgtctattctatgrtgtggtctgtgctttgcagaccaatgggagaccccaggagttcaggtggtatgcaatagctaggggtagttgactttctgagtagttcattagtgagaat

SEQ ID NO: 246094 - DNA, 201 bp, Homo sapiens
acatgggtatgaatctctttgtcgatgactgttttatttgttaatttctcattacatttttattagtttttgctttatttattacacttacatttaatttctgttattttgctttatttaacattatttaacttttatattatatgttatgcagcatagaaaaacaatacatgtgataaatattatatatttcacacgagt

SEQ ID NO: 246095 - DNA, 201 bp, Homo sapiens
gttaagagaaggatagctataatggttcatacatccactctgggttttctgtttggttggttttttgttttccagggttttttttgttttttttttttttyccggatgtgagcactcctagccacaaagaattagctagagaggaagatttcaggccagatatacctattgcttcaggccttctttgtttcttccactcct

SEQ ID NO: 246096 - DNA, 201 bp, Homo sapiens
gggtttcaccatgtttgccagactggtcttgaactcccaacctcaggtgatccacctgcctcggcctcccaaagtgctgggattacaggcatgagccaccrcgcccagccagatcatagttttgaccttaaaaagcccaccaacctttctttgattcccaagcaatgtctttttcaaatcctatcctatttctatatgtgc

SEQ ID NO: 246097 - DNA, 201 bp, Homo sapiens
aaataactatatgccatttggaaaagtgttagtttgggatacatgagcaagtgattagtatttttttatgttaatcattttcggtttatttcatatatgtkttttctgctggacaattatttcaggtggagttgataaatttcacttcattcagtacaccatgccagtgctgatgacacagatctggagtaaatgtgattc

SEQ ID NO: 246098 - DNA, 201 bp, Homo sapiens
tgaagcacgagaatctcttgaacccaggagacggaggttacagtaagccaagatcacagcactgcactccagcctgggcaacagagtgagacttcgtctcaaaaaaaaaaaaaaaaaaaaaagttaatggcctgtggatactgaatttcctggcaccatttattgaagagactatcctttccccattttgtcttctctgtg

SEQ ID NO: 246099 - DNA, 201 bp, Homo sapiens
ggatgtgagcactcctagccacaaagaattagctagagaggaagatttcaggccagatatacctattgcttcaggccttctttgtttcttccactcctactttttttttttttgagacagagtctcactctgtcacccaggctggagtgcagtggcccaatcttggctcactgcaagctccgcctcccaggttcacgccat

SEQ ID NO: 246100 - DNA, 201 bp, Homo sapiens
caaacacacatctacaaaccccatgaaaccaaataactatatgccatttggaaaagtgttagtttgggatacatgagcaagtgattagtatttttttatgktaatcattttcggtttatttcatatatgttttttctgctggacaattatttcaggtggagttgataaatttcacttcattcagtacaccatgccagtgct

SEQ ID NO: 246101 - DNA, 201 bp, Homo sapiens
ccgcttgatggtattctgtaagtccctaggctttattctcttttttcattcttttttctttttgcttccttgatgtgataatttacaatgacccatctttsagtttgctgaatatttcttatgcttgatcaagtctgctattgaatctctgtagtcaattttccaatttagggattgttttcttcaggtccaaaatgtctg

SEQ ID NO: 246102 - DNA, 201 bp, Homo sapiens
cagtggcccaatcttggctcactgcaagctccgcctcccaggttcacgccattctcttgcctcaccctcccaagtagctgggactacaggcacccgctacyatgcccggctaattttttgtgtttttagtagagacggggtgtcaccatgttaaccaggatggtctcgatctcctgaccttgtgaccagcctgcctcagcc

SEQ ID NO: 246103 - DNA, 201 bp, Homo sapiens
attgctacaagccattactcaatttccatagttctgaaaaagttgttattgactatttttgccaatcttgtcattgttttgtggaggagaggattttcggrggtctttaccctgccattcgtgctgatgtcactccggcatatggcttttgaactctgtgcagcttgcctcctccgagttgctgtttactgtatttatggc

SEQ ID NO: 246104 - DNA, 201 bp, Homo sapiens
ttgatgtgataatttacaatgacccatctttgagtttgctgaatatttcttatgcttgatcaagtctgctattgaatctctgtagtcaattttccaatttwgggattgttttcttcaggtccaaaatgtctggttcttcattatgtgttgtgtctccttgtggagcttctcattttgtttatgtatcgttttcctgaggcc

SEQ ID NO: 246105 - DNA, 201 bp, Homo sapiens
ttctggaaattatatgctggctctttttttaggatttgttgttgttttcctggtcagttttctgaactaaatctgtaaagtttatattctttgttgtatgkgaccactgagtgtcttctcaattagcttggtagtcagctaataatttgacagagatttcctgtcttcaagtatttgctgaagggctctgtctgtgctgag

SEQ ID NO: 246106 - DNA, 201 bp, Homo sapiens
acatgtaggaatgttgatctgagatgggttgttttccaagacccatcttaacaagaaacattaacaacccaaggaagtttccctgcttggaaagttttttycctttttttctacctgctgaattatttctcccatttgtgatgtaaagttccttacgtggaaagtaaacattgacttaactgactcctgttaaatgactct

SEQ ID NO: 246107 - DNA, 201 bp, Homo sapiens
aattacatacatccttatcagagagaggcagaagatgtcttgagacacacaggtaaggagaaggcattgtgcagaaagattggagtaatgaagcctcaaarcaaggaatgctggcagctaccagaaggtagaaagagcaaggaactgaatctgtcctatagcttttagagggatacacagtgctgcccacaccttgagttt

SEQ ID NO: 246108 - DNA, 201 bp, Homo sapiens
tttatgtatcgttttcctgaggccattgaacatccttgtgatgattattttgaattatttgtcaggtaattgatatgcctctgcttctttaggtttgtttkttatttattctggtcctttgattgggtcatgttttctttttttctttttttttttgtcttataacttcttgttgatatccacatgtttcaaaaagtatgt

SEQ ID NO: 246109 - DNA, 201 bp, Homo sapiens
cttgtgaatggttgggtccaaactgtgatgattcttaggctggggggtgggtggggagtagagtttcccaaagacatacgcttggaccccattattaacayttttaatagttacatggagaaagatgttggaggccacgcttttgcatctgatataaaatcagggttaatgatttttccaccagaagtattcaaaagtaga

SEQ ID NO: 246110 - DNA, 201 bp, Homo sapiens
ggtcctttgattgggtcatgttttctttttttctttttttttttgtcttataacttcttgttgatatccacatgtttcaaaaagtatgtgacatataattsagattcacaagatgtaagatgccattaggaatgaggcagttgcttagtccatatctctatttctattttgtagtcttgtctcagttttagagtttattag

SEQ ID NO: 246111 - DNA, 201 bp, Homo sapiens
catttaactactgtgagtttcaagacttttgctatcaaaatttttcatctcccatatgccatactttatcttgctgactgctttcttttcttttcttttctttttttttttttttgagatggagtcttgctctgttacccaggctggagtacagtggcacaatctcagctcactggaacctctgcctcctaggttcaagca

SEQ ID NO: 246112 - DNA, 201 bp, Homo sapiens
caattagatggagcaatgggccacattaaccagattgcagggttttatttaactaaaaactaattgcaaataaatttattggtggggttactaaaagtcamcttgtgattttagtctgtaaaagtagatgcataatatctagactaaggaaaaagataaacctcctatattctgcgcacctggaacatggcacttaatttt

SEQ ID NO: 246113 - DNA, 201 bp, Homo sapiens
caccttgtgacctactaggatgacttactaaatttttttcgtgttgttttggaggaatgttcccatttattctgctgttaacttactttggaagggataayttcctagttggtctaaattttgttgcaaaccttacataacactctcatgaccttaatcatggtagatgtgcccatgtgagtccaattcttttgagtaact

SEQ ID NO: 246114 - DNA, 201 bp, Homo sapiens
tattattttgagatacatcccaccaatacctcgtttattgagagtttttagcatgaagcgctgttgaattttgtcgaaagccttttctgcatctatggagrtaatcatgtggtttttgtctttgcttctctttatgtgatggattatgtttattgatttgcatatgttgaaccagccttgcatcccagggatgaagccaac

SEQ ID NO: 246115 - DNA, 201 bp, Homo sapiens
cattattgagttgcgtgaactctttatcaattttagatcttaacctcttatcagatatatgttttgcatagattgttttcccaatctctaagttgctggtytgttttgtttatggttttctttgctatgcagaatcttttaagtttgatgtagtctaatttattaatttttgcttttccttagtttttggtgtgatatcaa

SEQ ID NO: 246116 - DNA, 201 bp, Homo sapiens
cattccatcctgggagcctgggtgacagagacagaccctgtcaccaaatacatacacacacacacactcatatatacatacatacatacatagacacatakgtgtgtgtgtgtgtatatatgtgtgtgtgtgtgtgtgtgtgtgtgtatatatatatagagagagagagagagagagagaaagagagagagagagagatct

SEQ ID NO: 246117 - DNA, 201 bp, Homo sapiens
gtgcctggccagttattttattttatttgtttacatcctcaaaaagaaaacctttattctttctgctcaccagcttaagctatggtctggtatctctcctmtcctttttacacaagctctgagatacccctttggctctcacattgttttcattcattcctttgcccccgttaatctggattttgtccttgctgctttgtt

SEQ ID NO: 246118 - DNA, 201 bp, Homo sapiens
aaatacatacacacacacacactcatatatacatacatacatacatagacacatatgtgtgtgtgtgtgtatatatgtgtgtgtgtgtgtgtgtgtgtgtrtatatatatatagagagagagagagagagagagaaagagagagagagagagatctattctgtgatgatggaaatattccgtctgtgctggctaatacaat

SEQ ID NO: 246119 - DNA, 201 bp, Homo sapiens
ttgaactcgtgagttcaagcagtcctcctgtcttggcctcccaaagtgatgggattataggcatgagccactgtgcctggccagttattttattttatttktttacatcctcaaaaagaaaacctttattctttctgctcaccagcttaagctatggtctggtatctctcctatcctttttacacaagctctgagataccc

SEQ ID NO: 246120 - DNA, 201 bp, Homo sapiens
gtaaaagcctactttatattattctttggattaaaatgtagacttttattgtgtaccttttgtttataaagcactgcattaggttttgtactcatcagttyatctactcctcctaaaacccagtgtggtgagtgtgatttccacagttaacaaatgtgtggagggggagtctcagaagggttagaaaatgtgtccaagtca

SEQ ID NO: 246121 - DNA, 201 bp, Homo sapiens
tctttggattaaaatgtagacttttattgtgtaccttttgtttataaagcactgcattaggttttgtactcatcagttcatctactcctcctaaaacccartgtggtgagtgtgatttccacagttaacaaatgtgtggagggggagtctcagaagggttagaaaatgtgtccaagtcaccttgactagtaatgccccagg

SEQ ID NO: 246122 - DNA, 201 bp, Homo sapiens
ccgcctggacctcccgaagtcctgggattacaggtgtgagtcactgtgcctggccagtcttttaaattttagccattttggtgagtatgtagtagcagctsattgtgatttgaatttgcaattccctgatgagttaagatgtgttttctatgcttagtagacatttagatatctatgtgaactataggttccggcctttcc

SEQ ID NO: 246123 - DNA, 201 bp, Homo sapiens
tataaagcactgcattaggttttgtactcatcagttcatctactcctcctaaaacccagtgtggtgagtgtgatttccacagttaacaaatgtgtggaggrggagtctcagaagggttagaaaatgtgtccaagtcaccttgactagtaatgccccaggaaaaattcaaggccagaagtggctgctcccaaaagctgcctt

SEQ ID NO: 246124 - DNA, 201 bp, Homo sapiens
tccacccgcctggacctcccgaagtcctgggattacaggtgtgagtcactgtgcctggccagtcttttaaattttagccattttggtgagtatgtagtagsagctgattgtgatttgaatttgcaattccctgatgagttaagatgtgttttctatgcttagtagacatttagatatctatgtgaactataggttccggcc

SEQ ID NO: 246125 - DNA, 201 bp, Homo sapiens
ggctgaatcgatcctcccatgtcagcctcctgaatagctggaactacaagcacatgccatcacgctcagctaatttttgtagtttttgtagagatggggtmtctccatgatgcccaggctgggttcgattattattatttttttaaatatagacaccttggatagacactactcagtttaagatacagcatatttccatca

SEQ ID NO: 246126 - DNA, 201 bp, Homo sapiens
catactatatcaagagtgataatgagtcttaaacatatttggcatgtatgactttattaagaaaatttgttaaggaagcagatgttaatgttttgttacawccttcatattcttgtggacttactaagggaaagctttgctacatcaaataaggagatgccttgttgcaattcgatcccaaaggagatttaatttcagtag

SEQ ID NO: 246127 - DNA, 201 bp, Homo sapiens
tcaaggtcaagtaaagaagttgggaggttgtttgctcaaagtgaagttcagaagatgtttcagaaggggagtgatatgatgaaagctgtgcttcgtaagaktagtttggcccaagtgtgcaggatggattaaatcaagtttacaagcattgttccttagatatttatctcctcctttaaaaactaagaaaacacaaaatta

SEQ ID NO: 246128 - DNA, 201 bp, Homo sapiens
gagtgataatgagtcttaaacatatttggcatgtatgactttattaagaaaatttgttaaggaagcagatgttaatgttttgttacatccttcatattctygtggacttactaagggaaagctttgctacatcaaataaggagatgccttgttgcaattcgatcccaaaggagatttaatttcagtagagtttacaacaca

SEQ ID NO: 246129 - DNA, 201 bp, Homo sapiens
tttatataatctattatatcttataatacattatatatacatttatgtgtatatataaatgtatatataactgcagttccaggggaagctagagaaaatargcagaggcaatattttaccatgcttaggaattttccaaaacttttgaagacataatttttcagactcaggaagtcctaaagactacatggattcagtaaa

SEQ ID NO: 246130 - DNA, 201 bp, Homo sapiens
ccacaatatcacattgagggcattgacattgatatagtcaagatagagaagagttccatcaccacgaaaatctctcctgctgcccttttatagccacatgmacctcccttccctccactcccatttctcctctaacttctggagacccccaatctgttctctgcttctagaatgttgtcatttcaagaatgctatgttcaa

SEQ ID NO: 246131 - DNA, 201 bp, Homo sapiens
acccagtcttacaacaggaggcctcacctttctaaccatatcctttgattgttaccagggagtttcactgttctgaatagcataagaatctccccatcttstgtctctctctctcccttctcctttctggcttcagaggtcccttgtctctcttctccttttcaagagcaatgaatttctctagtcttctatgagttttta

SEQ ID NO: 246132 - DNA, 201 bp, Homo sapiens
tcacattgagggcattgacattgatatagtcaagatagagaagagttccatcaccacgaaaatctctcctgctgcccttttatagccacatgaacctcccttccctccactcccatttctcctctaacttctggagacccccaatctgttctctgcttctagaatgttgtcatttcaagaatgctatgttcaatgaaatca

SEQ ID NO: 246133 - DNA, 201 bp, Homo sapiens
tgcaagccaccatgcaaggctaaaacttattaaagctaatgaatattataactgtggaaatataactttggaaataatgaggccattttgattttttatcrgcaattgtgtaatatagtgcaaagaacatggggtttggagttacatagcatttgaatgcaggctctgccatttattatctatgcaaatttagataagctg

SEQ ID NO: 246134 - DNA, 201 bp, Homo sapiens
aaattggaacccagactggaattcagcagtaagcagccagaatgatgaaagacttatagctatagaacagtttcaaataaaagaaatgtttcttttaacckgcaaaagaatgaagaaaataaaaattatttgccatggctgtttagacatcagtaacaagaaagattcaagcctgtaacaagtgttttgacaggatagtat

SEQ ID NO: 246135 - DNA, 201 bp, Homo sapiens
tggcttaattgtgtatcatagtagtaattattactaaacaattttggggaattcataggtgaaaattgttgctagtgaagtcagaagaagtaacactatcrtactacaaattcctagaatatgtgatttaaagttcaagttagaaagttaaatttctcttctccttttactttgaagaagttaagtgattctagaaataat

SEQ ID NO: 246136 - DNA, 201 bp, Homo sapiens
tgctagtgctctccttctggcaatacctacattccattctatgccaatctccagaaactgttttctgtaaaggatctacataaaacctgatttgtatgacmcagcaggcaatctcccaaggcttacaaacaatttggaagaacgtatttgatggctttattgtatattcttactttgtttcaaagcttttaaaaacataaa

SEQ ID NO: 246137 - DNA, 201 bp, Homo sapiens
tcctttgaaatgtacaactcagtggtttttttgtatattcacaagtttgtacagctatctctatgatctaattttggaaaaaaatgtagtcttgatctatrtggtgtgattagaatgtggcttttagccattctatttctaaagtgcaattttgtcttatagtatatgaaatagatctaattttaaaaatcagaaggaaaa

SEQ ID NO: 246138 - DNA, 201 bp, Homo sapiens
ataaactccttctgctttcctcatggtgaacttggcccatggggaaaaatcctccctcctccttggccattggcaggtgtacagtttattccgaactcttrgctctgttgcttttagccgatgtagccataaccccttgcctttggtattctttcagacacatgccacaggtgcttaggtaattccaaattcccagaattc

SEQ ID NO: 246139 - DNA, 201 bp, Homo sapiens
gatccatccaattggttaggaaaatatttagtactttccatttggaggaaatcattagtatcttccattttcttttttttctttttttttttttttttggkgagacagggtctcactctgtcacccaggctggaatgcagtggagtgatcatggctcactgcagccttgatttcccaagctcaagcaatcctcccatctca

SEQ ID NO: 246140 - DNA, 201 bp, Homo sapiens
aatccctgtctctactaaaaatacaaaaattagctgggtgtggtggcgcatgcctctagtcctagctactcaggaggctgaggtaggagaatcacttgaamccaggaggcagaagttgcagtgagccaagatggcgtcactgcactccagcctgggtgacagagcgagagtccatccccgccgctcccccctcaaaaaaaa

SEQ ID NO: 246141 - DNA, 201 bp, Homo sapiens
ttggttcagagagagtgggagcccatggcaggcagatcaagtcgtgaactcatgaaagcctttatgacaaagtagtttcttaaacttgtgaaataaaggattttttttttctggccataaaatggatttgcttattgcaacttttttctaacttgaagagagagcgtcaagggagggagtgctctacctagtagagaagag

SEQ ID NO: 246142 - DNA, 201 bp, Homo sapiens
cttgatttgcttcagtggtaacaccttgcgtaactatatcagacaggaaactgtcagtgatacagttgactgaccatatgcagattttaccagttttatgygactcattgtgtggtgagcgtgtgtgtttagtactatggaattttatcatacacgtagatccttgtgaatatacccgtgatcaatgtatagaacgattcc

SEQ ID NO: 246143 - DNA, 201 bp, Homo sapiens
gagaagcactggcttagagtgagaagaaattacaggaaagaatgtgaggggatcacaatatttaaatgtcaatccagagaggactgtaatacacgtaggcygccaaggagttcaaggaaagaaaactctttagaacatcaggtgtggctgcatcaccttcttgattcagatgattaagaagttcaaccatgcccggcgcag

SEQ ID NO: 246144 - DNA, 201 bp, Homo sapiens
ttccatagcactcacggaataattgcttattctccttttctctaactacacattttatgtttacaatattcctggctaggaaaagaaactaagtgaacagtctctctctctctctctctctctctctctctctgtctttctctctctgtcacacatacacagaatcatatgtacacaacttaaatctctaaatttataaat

SEQ ID NO: 246145 - DNA, 201 bp, Homo sapiens
acaccttgcgtaactatatcagacaggaaactgtcagtgatacagttgactgaccatatgcagattttaccagttttatgcgactcattgtgtggtgagcrtgtgtgtttagtactatggaattttatcatacacgtagatccttgtgaatatacccgtgatcaatgtatagaacgattccatcacaaggatccctcattc

SEQ ID NO: 246146 - DNA, 201 bp, Homo sapiens
aaatgacagattttatactttaatattttaaaatttaaaatgactagatgactgttgtctctgcataatacaagctcattatggacaattttattggtaamtacttacaaatgttagagaaatgacctgcagccttttattacccactgcatagcccatgagtctgctgtgcatgtgtgtgcaagattttatttttgagac

SEQ ID NO: 246147 - DNA, 201 bp, Homo sapiens
tccatagcactcacggaataattgcttattctccttttctctaactacacattttatgtttacaatattcctggctaggaaaagaaactaagtgaacagtctctctctctctctctctctctctctctctctgtctttctctctctgtcacacatacacagaatcatatgtacacaacttaaatctctaaatttataaatt

SEQ ID NO: 246148 - DNA, 201 bp, Homo sapiens
cagtgatacagttgactgaccatatgcagattttaccagttttatgcgactcattgtgtggtgagcgtgtgtgtttagtactatggaattttatcatacaygtagatccttgtgaatatacccgtgatcaatgtatagaacgattccatcacaaggatccctcattctgcccttttagagggaccaccacttccctctctc

SEQ ID NO: 246149 - DNA, 201 bp, Homo sapiens
acacctaatagtgtgattgctgggtggaatggtatttctgttttgtgttctttgagaaattgccaaactgctttccaccctatctgaactaatttgcattstcatcaacagtataagtgttcccttttctctacaactttgtcaacatctgttattttttgactttttaataataggcattctgactggtgtgagatggta

SEQ ID NO: 246150 - DNA, 201 bp, Homo sapiens
actttgaaggaatgtagaaaacaatggaattttattttcaaatatatgtgtctgtctatatatctagataatataggtatatatatatctatatacattctttttttttttttttttttttttttggagactcggtcttgctctttcacccaggctggaatgtagtggcatgatcatggctcattgtagcctcaacctccc

SEQ ID NO: 246151 - DNA, 201 bp, Homo sapiens
tataatagtgtgattgtattgttttcactactcttataagattttcaaggcctttataagcattatcccattaattcacataatacctttttgggttaggyaataactgtgatcagagttccacataatgtttttagaaaatctctagaatgagtaaagcttaattttgtcaataaaacatttataagcactcttcaatga

SEQ ID NO: 246152 - DNA, 201 bp, Homo sapiens
atgcagattttaccagttttatgcgactcattgtgtggtgagcgtgtgtgtttagtactatggaattttatcatacacgtagatccttgtgaatatacccrtgatcaatgtatagaacgattccatcacaaggatccctcattctgcccttttagagggaccaccacttccctctctccctccttctataattcctgtcaa

SEQ ID NO: 246153 - DNA, 201 bp, Homo sapiens
actggctggtggagagattttaaagctgtggggtttttttgtttgtttgtttagaagcacttgaacacattttatgttttgttaagtactgagtcataacmatgatataaataagaaagtcaccatgacttgaatttggttgtttctctgtgtcctgtacctgtttgggtttagtttatcataaatacaacaacaacaaca

SEQ ID NO: 246154 - DNA, 201 bp, Homo sapiens
ttgtttgtaataatctctcatgatcatttgtattttgtgatgtcagttgtaatgtctttttaaatgtttttggattttatttatttgagtcttcttctttraagaacttggacccctcaatgatttgttgagtttatcttttcaaaagccaattctttgttttgttgcttttttatttttattttttgtagttcctattca

SEQ ID NO: 246155 - DNA, 201 bp, Homo sapiens
atcacaccactgcactctagcctggtgacagagcgagactctgtctcaaaaaacaaaacaaaaaacaaaaaacaaaaacaaacaacagaacaaaacaaaamacacacacacacacaaactgctattttgaatactttgtcatgcacttcactgatctctatctcttcaaggtcagtccccagcaccttattttgtccgttt

SEQ ID NO: 246156 - DNA, 201 bp, Homo sapiens
ttatgcgactcattgtgtggtgagcgtgtgtgtttagtactatggaattttatcatacacgtagatccttgtgaatatacccgtgatcaatgtatagaacrattccatcacaaggatccctcattctgcccttttagagggaccaccacttccctctctccctccttctataattcctgtcaaccactaattgttcttcat

SEQ ID NO: 246157 - DNA, 201 bp, Homo sapiens
agtatgtttattttatcgtggtatttttaagactcttaacatccagacccatcttgaccttgcattgtgtagcttcattatcagcttttactaccgatccyatccttgggcttatttatttcattttcgatattgcaggggtgggcaaactagggcccatggatctgtgctgattttatgtgacccatgagctacgaatag

SEQ ID NO: 246158 - DNA, 201 bp, Homo sapiens
cctgtgaattgaaggagatatttgttacagtcctcaccatctggttatgcctagtaatgttcctcaacagtaaacctgtccagaaatcttgagcagacccwctgtagtggtcccaaagcctatgatcactatagctattgcagcactagaaggagctctaagcccaggacaaccatggccagtgccacccaggcttgagtt

SEQ ID NO: 246159 - DNA, 201 bp, Homo sapiens
tctatgatatgaatggctttcttgtcagcaataagaagaactttcatggctgggcacggtggctcatgcctttaatcccagcactttgggtggctgaggcrggcggatcacgaggtcaggagatcgagaccatcctggccaatatggcgataccccgtctctactaaaaatacaaacattagctgggcgtggtggcgtgtg

SEQ ID NO: 246160 - DNA, 201 bp, Homo sapiens
caaattttgcgatttattttcatttagtctgtgtggtttataatagttttttttccctccttatttgaataagtcttctaggatttaggataatctgtgcgtgtgtgtgtgtgtgtgtgtgtgtgtgtgcatgcatgtgtataagtgtgtgtatgtgattgtgagtttagttaaggtcacttttagcaagatgcattgaca

SEQ ID NO: 246161 - DNA, 201 bp, Homo sapiens
gggcgtggtggcgtgtgcctgtaatcccagctacttgggaggctgaggcatgtgaatcgcctgaacccgggaggcagaggttgcagtgagccaagattgcrccactgcactccagcctgggtgacagagcaagactccatctcaaaaagtaaaaaaagaaaaaaagaaaaacttttatgatagtattttaatacacatact

SEQ ID NO: 246162 - DNA, 201 bp, Homo sapiens
aaattttgcgatttattttcatttagtctgtgtggtttataatagttttttttccctccttatttgaataagtcttctaggatttaggataatctgtgcgtgtgtgtgtgtgtgtgtgtgtgtgtgtgcatgcatgtgtataagtgtgtgtatgtgattgtgagtttagttaaggtcacttttagcaagatgcattgacat

SEQ ID NO: 246163 - DNA, 201 bp, Homo sapiens
ttatgatagtattttaatacacatacttttttttttttttactttttattttagattcaggggatacatgtgcatgtttgttatgtgggtatattgcatartggtggggattgggcttcttgtgttttggtcatcgaaataatatatatatatatattttttaatttttagagtattgctgttaatatcaaggatccaaaa

SEQ ID NO: 246164 - DNA, 201 bp, Homo sapiens
gtccagaaatcttgagcagacccactgtagtggtcccaaagcctatgatcactatagctattgcagcactagaaggagctctaagcccaggacaaccatgrccagtgccacccaggcttgagttccttgacttatacagctggtacagaagctgtctggaatcaatctgaggaagactcaatgagagcaccagctttgtgt

SEQ ID NO: 246165 - DNA, 201 bp, Homo sapiens
ttttttattttaattgctgttacatagaaattaaattaattttgtaggttaatcttgtatctttctatcatgctaaactcacttattagttccagtagcatttttttttttttcgatgtgaattccttaggattttttaaatgtaagctcatgttatcttcctatccaatctggatgactttcttttcttgtctttttctt

SEQ ID NO: 246166 - DNA, 201 bp, Homo sapiens
gagttattgctccattgtacccgcaacctgaatgttccaactttaaagcaacattttcttactatttttgaaaaaagttttttgatcatttgcttgaagaraatcctgacatagttgttaagttgaagtgctctaaaagtttagatattttgtaagtacttattcatgggaatttgaattttcatagtatatataattcaa

SEQ ID NO: 246167 - DNA, 201 bp, Homo sapiens
tttttattttaattgctgttacatagaaattaaattaattttgtaggttaatcttgtatctttctatcatgctaaactcacttattagttccagtagcatttttttttttttcgatgtgaattccttaggattttttaaatgtaagctcatgttatcttcctatccaatctggatgactttcttttcttgtctttttcttt

SEQ ID NO: 246168 - DNA, 201 bp, Homo sapiens
cttgatactgattttctggtttagctgtcatttaaatacttagacacaatcatgttttatattttgaactcttttatgctttctgtgcactgacatcaagratatccattaattacataagggagcagaggtgcagaagacggtgtttgcgttatgtgctggtcagacttggggacaatctggctgcactatctgccatcc

SEQ ID NO: 246169 - DNA, 201 bp, Homo sapiens
gcttggactacaggtgtgtggcaccaaacctgactaatttttaaattttttgtagagatggtgtcccattatgttgctcaggcttgtcttgaactcctggrctcacgacatcttggcctcctaacgtgatgggattacaggcatgagctgctgtaccctgctggccttcccttaaaatattcaagagcaccagttttcttt

SEQ ID NO: 246170 - DNA, 201 bp, Homo sapiens
tttgacagaatttgttttttgaggttgtgagcactttgagtttccttgttttagaaacctgaggactgaattcaaagcttggttaaactcaatcagtcccycattcactccctcttgaggaaatacaaagatctctaccattataacatgtacattctagcagagaaagacagataaagaatggtagatgtacatgaaaag

SEQ ID NO: 246171 - DNA, 201 bp, Homo sapiens
atctctaccattataacatgtacattctagcagagaaagacagataaagaatggtagatgtacatgaaaaggactctggaagaaaggaggtaaactggccwaaggggcgatggaaagtagcagtcagggtggcaggatgaaaaaaagtagaagtgaagctgggcgtggtggctcacgcctgtaatctcagctctttgggag

SEQ ID NO: 246172 - DNA, 201 bp, Homo sapiens
tttttctttttttgttcagtatgcttttgctgcatcacaggatactgcttaacttaccaatttatttacctttggtgactagggacatatgcttcttagtrttacatttcagaagttttagatgctgtgtaattaatcagccagttttgctgcctttctgtggtagagattgaggggtccaacttcaaaggttattgatgt

SEQ ID NO: 246173 - DNA, 201 bp, Homo sapiens
gggattacagatgtgagccaccacacctggccagtataatagaccttgagatcttaagatcccagcccaataatgataattcatggccaatcttactttgrtgatgggatcacaactcactgcagcctccttgaccccttgggttcaagaaatcccctcacttcagcctccccagtagctaggactacatgtgtgtgccac

SEQ ID NO: 246174 - DNA, 201 bp, Homo sapiens
gtaattatagaatcatagaaagtagctgtgtatctttgggtaaggcacttagtctttcagaacctcaattttctcaataataattaaactaggacaataamatttactttgtatagttcttgtgagacttaaatgagatgacacatatgaagcaccaacacagtccctagaacacagaagtactctgtacatgttgactat

SEQ ID NO: 246175 - DNA, 201 bp, Homo sapiens
accagctgattttttcagtagaggcagagtttcaccatgtagcccaggctggtctcgaactcctgggctcaagcaatctgcccgccacggcctcccacagkgctgagattacaggtgtaagccactgcaccagcttgaaatattttgtattccatgaaattctttataaaattactttataaaacaacttcctcactttct

SEQ ID NO: 246176 - DNA, 201 bp, Homo sapiens
ttccttagaattctaaatcttatgttcactcccttataacaagtgtcaattaattagaagctggtaaaaataaggaagtttaccctaattgctggctggtkttttttagtataggagtatgtgaagaaataaagcttttttcccaactcgtttgaaggcagtttgtactgttttgatttgagaataggagacacatgattt

SEQ ID NO: 246177 - DNA, 201 bp, Homo sapiens
caattccggacacatttaaatacaaattagtaagtagaataaagggagtgaaagcaagaggtgctcttcaaaattattatttgctctttggagaagaaatrcacacatgtactactttgtagtaataacatttttattaaacaatagaagcctggctcccacttttccaaatgaaggggggagaaagtgttgtaattggat

SEQ ID NO: 246178 - DNA, 201 bp, Homo sapiens
agctcaaaagggaacaaataatgtaccttttttctctacatccttggtgttatccccacctttaggccatggataccaaatactctagatctggggcctgsagactttttctgtaaagtgccagagagtaattctgttttttttttaagacaggatctcactcttttgtccaggctggagtgtagtggcatgatcgcggct

SEQ ID NO: 246179 - DNA, 201 bp, Homo sapiens
agagctctgctgggtgtaattagggatatgcaagtaccctctcatgacacagctttgtacataaatgtatgtggtctacttcaattcccagatatttttayttttctgatactattgatttaaaaaagagaaacccaaaactttaacaggagattgagctgtttttctacatattctaaaattccagaagcaaagagatcg

SEQ ID NO: 246180 - DNA, 201 bp, Homo sapiens
gacaaaacagataatattatgtaacaataacagaccagtggtttctgcttaattggaaagtttcccttaaaaggcagtaagcttcttgagggcatgacctkgagttttctgtgacccagtttttcctcagcacttaacaatgcctggcacattagtatgtatttaatgcttattattaattattgttctttactgttagta

SEQ ID NO: 246181 - DNA, 201 bp, Homo sapiens
ttgagacagcatcttgctgtgtcgcctgggctggaagctgtggtgcagtcatggctcacttgcagcttctacctcccaggctcaagtgatcctcccacccyagcctcctgagtagctggaactgtaggcgcaagccactgcacctggccaagttttgtattttttgttgagctggggttttaccatgatgcccaggctggt

SEQ ID NO: 246182 - DNA, 201 bp, Homo sapiens
gctgcatgtgttttgtgacctcagctcataagtcacaaactgtcacttctgtcctgttctagtagtcacatagagtagccctaattcagtgtgaaaatggrctacacagatatatgaataccaacaggattcttgtgggtcatattgcaggctggttaccacagtgggccttcaggtttctgaaacttaactaaatgaaaa

SEQ ID NO: 246183 - DNA, 201 bp, Homo sapiens
agtagacgcggggtttcgccatgtcggccaggctggtcttgaactcctgaactcaggtgatccacctgcctcggcctcccaaagtgctgggattacagatrtgggccaccacgcctggccactgatgagggttttaagccttagactacttaaatgccttgcccaagatcaccctctgggtccatccccttcaaatacttc

SEQ ID NO: 246184 - DNA, 201 bp, Homo sapiens
tgtgggccaccacgcctggccactgatgagggttttaagccttagactacttaaatgccttgcccaagatcaccctctgggtccatccccttcaaatactyccaattttcacagcctttgtatctgtggtgccagagtatccttggctacctgcaatggtgcagctcagtgtattaactaataggaccacatggtgtcatg

SEQ ID NO: 246185 - DNA, 201 bp, Homo sapiens
tttggctgattttctttccccactaaagtgactaattttttttacagaattgaccacatcagctagttattttaatggtaaatcaaataaagcttttccatttttttttgtctccaactgccagaacctggctaaattagacacacctaaattataatccaagatcagccatttagtaattgtgaaatcttggacaaatac

SEQ ID NO: 246186 - DNA, 201 bp, Homo sapiens
agagcatcacccgaaaagtggtaaccattcccaaagaaaccagtggcagccagaatatttagccatagcaaaactgtagttctaaacttaaaaggtcaccygtgaagttgtcttattgatgatttattttatgatgtgactcactagaaatgaataaaacccaagaaatttgagctctctctccgagtttaacaaagtgag

SEQ ID NO: 246187 - DNA, 201 bp, Homo sapiens
tcagtcttatggactttgtttaatttttaattaagggtaattctttttaaatagctattttaactttttcttgcttactaatgtaatacatgtatatttcaaaaaaaaaatctggaaagtctgggaaaaatagttatgtgaatgtattattcactcttaaagccatccagagaaaagtatttctgacattttggtgtattt

SEQ ID NO: 246188 - DNA, 201 bp, Homo sapiens
ggtcctatttcttgaccttggccgagtcctgccataaggttatgcaggaaaaggctgagctttaatattaggggagcatccataaatgaaagagaggaaaycatctgctatatttaggagcaaataaaaattttaagagtgggaaggtcttattgaaatgttttctagtccgtgaatcctctagtcttttttggcttcatt

SEQ ID NO: 246189 - DNA, 201 bp, Homo sapiens
tcccacagcctccatttctctgataatcacaatattacctttatcagatatgttttttctctattccaggcatcgctggaaaatccacattccagcaatgragttccaaattatttgttcattgtgtccatattttctagactaaacacaaaccaagcacttatttttttttcttttcttctgatggaggtcagtgaaatt

SEQ ID NO: 246190 - DNA, 201 bp, Homo sapiens
aattttgcgatttattttcatttagtctgtgtggtttataatagttttttttccctccttatttgaataagtcttctaggatttaggataatctgtgcgtktgtgtgtgtgtgtgtgtgtgtgtgtgcatgcatgtgtataagtgtgtgtatgtgattgtgagtttagttaaggtcacttttagcaagatgcattgacatg

SEQ ID NO: 246191 - DNA, 201 bp, Homo sapiens
ttgctgcctttctgtggtagagattgaggggtccaacttcaaaggttattgatgtagtaaaccatattaatcagatttttggtctttgaataatatatgatttttttttttttttttgaggtggggagtcttactctgtcgcccaggctgtagtacagtggcatgatcttggctcactgcaacctctgcctgccgggtata

SEQ ID NO: 246192 - DNA, 201 bp, Homo sapiens
ttaattattaataattaaataaaaactaaataatttttttaacatcttattgtggaaaaatttaaagtcacctaaagtagagagaatagtttaatagatctttttttttttttttttttttgagacagagtcttgctctgtctcccaggctggagtgcagtggcgctgtatcggctcactgcaaccatcacctcctgggtt

SEQ ID NO: 246193 - DNA, 201 bp, Homo sapiens
tagttccagtagcatttttttttttttcgatgtgaattccttaggattttttaaatgtaagctcatgttatcttcctatccaatctggatgactttctttycttgtctttttcttttcttttcttatctttttctttcttgatctccctggataggacctccagtagaatgttaaatagcattggtgagagcaaatatcct

SEQ ID NO: 246194 - DNA, 201 bp, Homo sapiens
taattattaataattaaataaaaactaaataatttttttaacatcttattgtggaaaaatttaaagtcacctaaagtagagagaatagtttaatagatctttttttttttttttttttttgagacagagtcttgctctgtctcccaggctggagtgcagtggcgctgtatcggctcactgcaaccatcacctcctgggttc

SEQ ID NO: 246195 - DNA, 201 bp, Homo sapiens
atctgtaggattcttaagacccagtaaattctgaaggattaagaatcacttcaagtctgacaccctgaactgagcaagtatgtctgtgtgtgtgtgtgtgkgtgtgtgtgtgtgtgtgtgtgtgtgtatttgctgtgtttgtggatcgccttggattacttttaatctgtagtgtgaggttctctagagttgattctaggt

SEQ ID NO: 246196 - DNA, 201 bp, Homo sapiens
acctactgaaggtcgttaacctgactcttaacccagggcaacaggggttaatgagtggggttctaagagtatgagcatgtattcaattactttcttctgaggagagttcatagcttcttaccagtttgtcaaagggacctgtgacctccaaaagtataaccattaacaagacagtgtgttgagcactgatgggagagaggg

SEQ ID NO: 246197 - DNA, 201 bp, Homo sapiens
gtagagacagggtttcgccatattggccaggctggtctcgaactcctgaccttaagtgatctgcctacctaggccccccaaagtgctgggatttacaggtktgagccactatgcccggccaatttatttaaaaaagattttttttttttttgaagcaggttctcactctgtcacccaggctggagtgcagtggcatgatct

SEQ ID NO: 246198 - DNA, 201 bp, Homo sapiens
ttcctaacaagtatttagatggccaaaatgtggttggttagattaaaaaaaaggctctcggggaaagcaatatgaatgacgttaaacaaagtgaaaaaaaktgtgaaagcctagtaaataaaaatgctaaaacacacccatttcaaaacaaactagattgatggccttaaaaaacttgtttcagtgggtgttcattctcca

SEQ ID NO: 246199 - DNA, 201 bp, Homo sapiens
ttactatagtactacagctctcctcttctggctacaaaatcttactgcagcactttcccttattcttgccttctgttttacccattttacctgttttcttytcttttctcttgtcttgtcaggtgcctgtggcagccttctccctgccttccctcaggcagcagtgtgccatgtctctgcaatgccttgttgctcggaggc

SEQ ID NO: 246200 - DNA, 201 bp, Homo sapiens
aaatcccgtgcctggattgggtctggataaccatagaggggaagaagtgatccatgtttagaccttactttttgaaatcaataaggtaatgccacagactkcttagatcggattctgcctgcagatgtccatgtctcctgagacataagggcagttccatctcaaaagcctgggtagggtttgacagaggtagctagaaga

SEQ ID NO: 246201 - DNA, 201 bp, Homo sapiens
agttaattcttcaggaaatattgcttgctgtagtgttggaataaactgagacagagtgacctcaagtcttttgcagtcttccttttatttaattttacttattaattaattaattattttcctttgcctctattttctcatgatgagatttactttttattaatttcaaagcaactgttggggttttaatttctggaaata

SEQ ID NO: 246202 - DNA, 201 bp, Homo sapiens
tactacatgccttaatttttaccacatatgcataaattggcaaagtatcttatgggttataataatcctgatggcttggaattaatatattgccatcatakagcaagtcctgagcccatctactctgaatctttggataaagacaaaactccatcctgccatgcacctggtcagttgtgcaatgctgaccaatacacagct

SEQ ID NO: 246203 - DNA, 201 bp, Homo sapiens
ggagctacttttaatatgcggggatgactgatgaagctcatgtttcccatttatgtttgatgaactcataattttgtttccctccagggaaaactcactaraatatgtaaaagggaaatcataatggagattttcaacttctcaattcagcttcatctttctgtttgctgggaatgggaaaagccagatatccttatggct

SEQ ID NO: 246204 - DNA, 201 bp, Homo sapiens
gttaattcttcaggaaatattgcttgctgtagtgttggaataaactgagacagagtgacctcaagtcttttgcagtcttccttttatttaattttacttattaattaattaattattttcctttgcctctattttctcatgatgagatttactttttattaatttcaaagcaactgttggggttttaatttctggaaatac

SEQ ID NO: 246205 - DNA, 201 bp, Homo sapiens
aatcccagcactttgagaggccgaggcgggcggatcacctgaggtcaggagttcgagaccagcctgaccaacatgacaaaacccccgtctctactaaaaayacaaaaattagctgggtatggtggtgggtgactgtaatcccaacactttgagaggccaaggcgggcggatcacctgaggtcaggagttcaagaccagcct

SEQ ID NO: 246206 - DNA, 201 bp, Homo sapiens
gcctggattgggtctggataaccatagaggggaagaagtgatccatgtttagaccttactttttgaaatcaataaggtaatgccacagactgcttagatcrgattctgcctgcagatgtccatgtctcctgagacataagggcagttccatctcaaaagcctgggtagggtttgacagaggtagctagaagaccactgagt

SEQ ID NO: 246207 - DNA, 201 bp, Homo sapiens
ttaattcttcaggaaatattgcttgctgtagtgttggaataaactgagacagagtgacctcaagtcttttgcagtcttccttttatttaattttacttattaattaattaattattttcctttgcctctattttctcatgatgagatttactttttattaatttcaaagcaactgttggggttttaatttctggaaataca

SEQ ID NO: 246208 - DNA, 201 bp, Homo sapiens
cgggactgaatgaagggggatgaacccagaaatgaaaacttaaaagaaactgttttaatgaagggatctgtcggggggaagaagagggctccctgcttctrgtgagcaaacacagcagccctgagcctttacagcccttcgtatttattgggtagaaagagcagggaggaggaggtaacgactggtcagctgcttgactga

SEQ ID NO: 246209 - DNA, 201 bp, Homo sapiens
catggcagggtactgagtgaaatcaatcagtgtattctcaggtgacttgccattgagtgcctggagtcttctctggaagtccctataacaataaggtgggrtagtagacattgttactgttctgtgagaaatgaatagcacagtgattttccttcctaggagagcagggaggaaacaaaggaggcgtgaattgcatcccca

SEQ ID NO: 246210 - DNA, 201 bp, Homo sapiens
taattcttcaggaaatattgcttgctgtagtgttggaataaactgagacagagtgacctcaagtcttttgcagtcttccttttatttaattttacttattaattaattaattattttcctttgcctctattttctcatgatgagatttactttttattaatttcaaagcaactgttggggttttaatttctggaaatacaa

SEQ ID NO: 246211 - DNA, 201 bp, Homo sapiens
ttcattactctttctttctggaaggataaacatttcattatattattgactagactgagtttgtagtgggaacactgtacatgtcatttaatgaagtttcttttttttttttttaaaggaagagggtttgaaaagtgccttttttatttttgtgaattcctcagggacatttccttaatctctatttatatagcattacat

SEQ ID NO: 246212 - DNA, 201 bp, Homo sapiens
ccaaagctacctcttcagggccatctggctgcttccaggaccagccctctcctttcagaggtagctgctaggtgtcccaacaaacgatgatatgctgggtrtatgcatagtattttccaggcgatcccatgggaaatgacagagtttatgtgggaactagagaaatacatagtagttaaaggaattgttcatccacagcca

SEQ ID NO: 246213 - DNA, 201 bp, Homo sapiens
aaactatactattatgaaagaatgaaatagtactgtggtggagattaacagaggaggggttgcatgctgtaaatgggcttgtcagggaaggtttttttttgaggggggtaacatttaagagacctgaaggatgacaaggagccagccatgtaatgagcaaggggagaagtgattgaggcagagagaataccatgtgcaaag

SEQ ID NO: 246214 - DNA, 201 bp, Homo sapiens
aaggaattgttcatccacagccattcgggcactgatagaaggtgaatttccaattctcctttctaccaaattttgtttaattagctagtgtattttcactsttgaatctctagagcagttctaaaattgtaacatgctctgccatccccaattgctaaacttcactggaaagctctgtgaagtaggtacgtgggggcttcc

SEQ ID NO: 246215 - DNA, 201 bp, Homo sapiens
taaagcaaaagactaaaaattgaaagtaaagggcagagacattttccttttggaacattatcgaaaaaatatgaagatcatttgcagtgggttaatgaagyttgcatttaatgcctgagctcttcactgcttgcctgagagtttgccaaaccaacagagaaattagtttggctaaataaataaatgacaagagggcactct

SEQ ID NO: 246216 - DNA, 201 bp, Homo sapiens
acctgcagtggagccttctgtgtgcctgaagttctgtaggtggctctctttatggggagttttgtagtctcctcagagacctcagattgtagttctcccayttcagtccctgttttttgtggttgtctatacacagagtctatctgttatgatcaccttgtcctataggcagccctcatgggtagaattccttttcagata

SEQ ID NO: 246217 - DNA, 201 bp, Homo sapiens
aaaacatataataaatacaacatgtattagcaaactatactattatgaaagaatgaaatagtactgtggtggagattaacagaggaggggttgcatgctgyaaatgggcttgtcagggaaggtttttttttgaggggggtaacatttaagagacctgaaggatgacaaggagccagccatgtaatgagcaaggggagaagt

SEQ ID NO: 246218 - DNA, 201 bp, Homo sapiens
atggtatttcccctaacaatttaattttaagttgtaccttctttccctcgtatcttctgaacatgttattaattataaaaatttagcagtaggaatcctckccactacattttaaaatgttatttctcctgttcttgttaatttcattactctttctttctggaaggataaacatttcattatattattgactagactgag

SEQ ID NO: 246219 - DNA, 201 bp, Homo sapiens
ggtttcgccatattggccaggctggtctcgaactcctgaccttaagtgatctgcctacctaggccccccaaagtgctgggatttacaggtgtgagccactrtgcccggccaatttatttaaaaaagattttttttttttttgaagcaggttctcactctgtcacccaggctggagtgcagtggcatgatctcagctcactg

SEQ ID NO: 246220 - DNA, 201 bp, Homo sapiens
aatctcttaccatgaacttcttccaggattatgcacagtgagaacagctggggacacccctcctctcttcacaggattttagtcaggtcctgtgtggcacyaacaagacaataaagaagtaggacatcattggtgaatttcccaaatcccacatttatgcatggtcaatgtaaaacagaacacagtgcagctgctttggtt

SEQ ID NO: 246221 - DNA, 201 bp, Homo sapiens
tatcttttaaatgttttccaatgtggtgagaaaaaaaattttattgtgataatattcatcttttttattttaagtggaattgctatgaacatcttttgctrtgatactggagatttttatttatttgtgagttggttgctcatgttcttttcccacttttccattacgctgtgtttctttcttactgatatgtgagagttc

SEQ ID NO: 246222 - DNA, 201 bp, Homo sapiens
agtgctaggattacaggtgtgagccaccgcacctggccatgaacttttttttttattttaaatttttataggtacgtagtagacatatatatatatatatwtttttttttttttatttttttatttttttatttttttgagatggagtctcgctctgtcacccaggctggagtgcagcggcatgatctcggctcactgcaa

SEQ ID NO: 246223 - DNA, 201 bp, Homo sapiens
acttaattaaaggctattaagattttaaaatattatggaaagtgtcaattgctctcctaaaagattgttactgattgatattccacaatgtatgaaagtgyccatttcaccccacttttgcgagtattgaatagttatcttttaaatgttttccaatgtggtgagaaaaaaaattttattgtgataatattcatctttttt

SEQ ID NO: 246224 - DNA, 201 bp, Homo sapiens
tgctaggattacaggtgtgagccaccgcacctggccatgaacttttttttttattttaaatttttataggtacgtagtagacatatatatatatatatttttttttttttttatttttttatttttttatttttttgagatggagtctcgctctgtcacccaggctggagtgcagcggcatgatctcggctcactgcaagc

SEQ ID NO: 246225 - DNA, 201 bp, Homo sapiens
taagaaatatgagagatgaatcctgtttatcctatgtgcctttttcctacgagaagaagagcaaggagaaaaagatgggtttgctttttttgtaagtactktaaggcttgcctgagtgtaaacagctcacatgtttgagcagaccaattttcctaactcgcttttacaagtgtttccctatcaattactgcatacccattg

SEQ ID NO: 246226 - DNA, 201 bp, Homo sapiens
gctaggattacaggtgtgagccaccgcacctggccatgaacttttttttttattttaaatttttataggtacgtagtagacatatatatatatatattttwttttttttttatttttttatttttttatttttttgagatggagtctcgctctgtcacccaggctggagtgcagcggcatgatctcggctcactgcaagcc

SEQ ID NO: 246227 - DNA, 201 bp, Homo sapiens
gtcctttaacagcttgcccaacattgcctttgcactcagaggtgagttcctttccagggtgcataaccacccatggacctctgcttatcggaatagttaaygcttactgatgtagcagtcctgcacctcttttcctgcctctcttgaccacagagaaaggggttggggctgctggattctagtggtcctttaccagcatac

SEQ ID NO: 246228 - DNA, 201 bp, Homo sapiens
ctacaagcacatgccatcacgctcagctaatttttgtagtttttgtagagatggggtctctccatgatgcccaggctgggttcgattattattattttttwaaatatagacaccttggatagacactactcagtttaagatacagcatatttccatcactccagaaagtttctttttctattcccaagcaatactacctcc

SEQ ID NO: 246229 - DNA, 201 bp, Homo sapiens
tacagtgggaactgcctgctggcctgtggggaataattctctttcctctgttgtcatcctatcattgacctgactgagataccagagatcgccagactctygggctgcagttacggcggcacttctctcatttggggttagtgtctgatctagcaataacattatatctctccatgtcagatcaaaggattgtcctaaccc

SEQ ID NO: 246230 - DNA, 201 bp, Homo sapiens
cttcttcctaattttccttagtccttctggcatgcaagttagcaaatgtctgtggcaccaatctccatgttctgattctgtgtcccaatgagggtctacastgggaactgcctgctggcctgtggggaataattctctttcctctgttgtcatcctatcattgacctgactgagataccagagatcgccagactctcgggc

SEQ ID NO: 246231 - DNA, 201 bp, Homo sapiens
taaaactgaactctcttctgaatgccttttgtttgacatgcgtattgatttctcttggtatatacctacaagtgaaaaactaacgggtcacagggtagatrtatatttagctttagtaagctgctggttttctggaatgttgccagattagactgtagtagcagtgtttgagagttttaattatctgcaccaactcttgat

SEQ ID NO: 246232 - DNA, 201 bp, Homo sapiens
tatatttgcatctgtcgtgtgcccttgtacacatttcttaacctctctgagctccatgttcctcctttgtgatttaggcattaaatgcatttgtaaatgtaaaaaaaaaatgtttaatgttgttgtgaggatcaaattagataacaaacacatagcatctcatgtcgggtgaggtatgcagtaagcgttcattaaatagta

SEQ ID NO: 246233 - DNA, 201 bp, Homo sapiens
cccctaggatagtgacagatctggaggacagttgtccgggacaggagagtaagactgagaagaatgtgccagtgtccaggagacagttaacttcctggccrttaatggtcaagcatacctggggctctgtgagggtgatggcataggctggcacttgccctgggcaccctcagtcctgctgctggatcatctggttagtgg

SEQ ID NO: 246234 - DNA, 201 bp, Homo sapiens
accaccatgaccggctaatatttttgtatttttagtagggacggggtttcaccatgttggccaggctggttttgaactcctaacctcaattgatccaccckcctggacctcccgaagtcctgggattacaggtgtgagtcactgtgcctggccagtcttttaaattttagccattttggtgagtatgtagtagcagctgat

SEQ ID NO: 246235 - DNA, 201 bp, Homo sapiens
ttattgggcgaaggggaaaaaggaaaacgaaccaaagcaagagagagccctgctagcagcttttctgactcacagattgaatcccaggtcaccacaggagmtgaagacagcaagctcctcccgtgcacaaggcgtgaactccccgtggccccacccatttcccccagggcacatgtcgggctccagtccactgtgggcatg

SEQ ID NO: 246236 - DNA, 201 bp, Homo sapiens
tgtcagcaatgtttgagaataaaaacctgttttaagttagaaatatctatgcaaataaacaagtagagatgtggctctttccagcgcgcgcgcgcactcgcacacacacacacacacacacacacacacacacacacaccctccctctctgtctctctctctctcactctctcttaaaaattcaactgtatttgctatggg

SEQ ID NO: 246237 - DNA, 201 bp, Homo sapiens
tctgcctgttgctgtgtaaatgagaacccccttgatttttcttttttttaaaggaggggaaggtgtaaatatcaatgctgggaggtaaccagattagcatraaacagagctgccattttatactatgcctcattcaagtgacagtcattcaagttgcattttttttcatctcctgagagttattatgaactttctttactg

SEQ ID NO: 246238 - DNA, 201 bp, Homo sapiens
gtcagcaatgtttgagaataaaaacctgttttaagttagaaatatctatgcaaataaacaagtagagatgtggctctttccagcgcgcgcgcgcactcgcacacacacacacacacacacacacacacacacacacaccctccctctctgtctctctctctctcactctctcttaaaaattcaactgtatttgctatgggt

SEQ ID NO: 246239 - DNA, 201 bp, Homo sapiens
tacatcttcagtgcctaggaaagaacttcacgcttaataaatattatagaaattatgggttcttacacatataaaatatatttcttattttatgacttagrataacatatttccttgattttaatcttaaccattataagtattagttcactaacaaaagaggttaaatagtctaggttaagtaatgaagtttttcttaat

SEQ ID NO: 246240 - DNA, 201 bp, Homo sapiens
tctcagctcactgtaacctctgcctcccgggttcaagcgattttcctgtctcagcctcccgagtagctgggattacaggcccctgccactgcgcctaatttttgttttagtggagacgggggtttcaccatcttgaccaggctggtctcgaacccctgaccttgtgatccatccaccccggcctcccaaagtgctgggatt

SEQ ID NO: 246241 - DNA, 201 bp, Homo sapiens
tacctgcctcagcctcccaaagagctgggattgcaggtatgagctactgtgcctggccagcctgcagtttattttctttagtgcttgtagtagtgtttttktttttttttttgagacagtctcactctgttgcccaggctggagtgcagtagtgagaatttggctcactgcagcctccaccttctgggctcaagcagtcct

SEQ ID NO: 246242 - DNA, 201 bp, Homo sapiens
ctcaaccactagcttatacatacacaaggtctttggcaggacatagagtcccagtttctctactggaaaggcaaatacctacaagcattctcagttaacartgctaagaggtatatctgcaaactaataattaatatgcattgagtgctaactctgtcagataagatgcctaacatacactgttttagaaacattatttca

SEQ ID NO: 246243 - DNA, 201 bp, Homo sapiens
tctagagtctgtcaacaaaatgagagaaagttggcaggaaagtgaattttcaaatagactagctagggtacttcccaaagtcctcaattatttttttaccrttattaaatccttaacccatggcagggtactgagtgaaatcaatcagtgtattctcaggtgacttgccattgagtgcctggagtcttctctggaagtccc

SEQ ID NO: 246244 - DNA, 201 bp, Homo sapiens
caaagctgtcagacagggacatttaagtctgcaggggtttctctgccttttgtttggctatgccctgcccccagaggtggagtctacagaggcaggcaggmctccttgagctgcggtgggctccacctggttcgagcttcctggccgctttgtttacctactcaagcctcagcaatggtgggcgcccctctcctagcctca

SEQ ID NO: 246245 - DNA, 201 bp, Homo sapiens
tgaatgagactaaaagatgcacggtgttttgacaacatgaagaaagctttacagcatgttacatggaagattttaaaacactgagctgtattttttctttrtatttctaggttctacctggatttgtaagagtcaggttatttttcctggttttatgaaacttatcttccaaaagcacataaggttaattttttgaaatac

SEQ ID NO: 246246 - DNA, 201 bp, Homo sapiens
tttgggaggccaaggcgggcagatgacaaggtcaggagattgagaccatcctggctaacgtggtgaaaccccttctgtactaaaaatacaaaaaattaacrgcgtggcagcgtgcgcctgtagtcccagctgctggggaggctgaggcaggagaatgacatgaacctgggaggcggagcttgcagtgagccaagattgcat

SEQ ID NO: 246247 - DNA, 201 bp, Homo sapiens
ttttttttttttaattatacttttaagttttagggtacatgtgcacattgtgcaggttagttacatatgtatacatgtgccatgctggtgcgctgcatgcraaataaacttcctgaaggtcttatatcactctgtgttcactagttttgttatgtattcataaaactatagattagtataatttttaggcagagaggacct

SEQ ID NO: 246248 - DNA, 201 bp, Homo sapiens
gtagagctcttttttgtccttggttagatgtagtcttgggtattttgtttgtgtgtggtggtttttgtaaatgggattattttcttgatttggctctcagyttgaacattattggtgtatagaaatgctgctgatttttgtacatggattttgtgtcctgaaactttagtgaacttgtttatcagtttcaggagcctgtga

SEQ ID NO: 246249 - DNA, 201 bp, Homo sapiens
ttatttccctggaatgtcttccagtggatactaattttccaggtaccctccactcctaaaatttcctatcaaactaggttgttaggaacagagcttcttcygtgacttcagacacatgctggaaaggaaacatcatgctaactattatagataaagcttcagcagattaagagagcatgctttgaagagaggcccattttc

SEQ ID NO: 246250 - DNA, 201 bp, Homo sapiens
ctcagctcactgtaacctctgcctcccgggttcaagcgattttcctgtctcagcctcccgagtagctgggattacaggcccctgccactgcgcctaatttttgttttagtggagacgggggtttcaccatcttgaccaggctggtctcgaacccctgaccttgtgatccatccaccccggcctcccaaagtgctgggatta

SEQ ID NO: 246251 - DNA, 201 bp, Homo sapiens
gagccaccatgcctgacccttgacttttttttttttttttgagacggagtctcgttctgtcatgcagactggagtgcagtggcgcaatattggcttgcttwctgcaaccttctcctcctgggttcaagcgattctcctgcctcagcctcccaagtagcagggactacaggcaccttccaccatgcccagctaatttttttg

SEQ ID NO: 246252 - DNA, 201 bp, Homo sapiens
tcagctcactgtaacctctgcctcccgggttcaagcgattttcctgtctcagcctcccgagtagctgggattacaggcccctgccactgcgcctaatttttgttttagtggagacgggggtttcaccatcttgaccaggctggtctcgaacccctgaccttgtgatccatccaccccggcctcccaaagtgctgggattac

SEQ ID NO: 246253 - DNA, 201 bp, Homo sapiens
ggccaggatggtctcgaactcctggcctcaggcgatctgtccacctcggccccccaaagtcctgggattataggcgtgagccaccatgcctgacccttgamttttttttttttttttgagacggagtctcgttctgtcatgcagactggagtgcagtggcgcaatattggcttgcttactgcaaccttctcctcctgggtt

SEQ ID NO: 246254 - DNA, 201 bp, Homo sapiens
cagctcactgtaacctctgcctcccgggttcaagcgattttcctgtctcagcctcccgagtagctgggattacaggcccctgccactgcgcctaatttttgttttagtggagacgggggtttcaccatcttgaccaggctggtctcgaacccctgaccttgtgatccatccaccccggcctcccaaagtgctgggattaca

SEQ ID NO: 246255 - DNA, 201 bp, Homo sapiens
tccccttttcttcccaagcagaatttgcttaccataggtagattgctttctttcactttctcaggcgaaggcggcagctgggcagttatcctgtacaaacytacagattcaaaattttgggattcttctcctgtggttcaacccttacctatcaatgggttttcattgcattgtctatggggtattaggtatgggaaaatg

SEQ ID NO: 246256 - DNA, 201 bp, Homo sapiens
ccaaaacactaccaattattacctttaagtgacgaaaaaatgagtgatttcaattttgtcaattttctttagctctattttcttaattttttgaattgaattttttttttttttttagacagagtctagctctgtcacccagactgaagggcagtggcatgatctcagctcactgcagtctccacgtcctgggtttgagca

SEQ ID NO: 246257 - DNA, 201 bp, Homo sapiens
ttgaactcctgggctcaagcaatcctcccaaagttttgggattacaggtgtgagccacaacacctgacctattttcaggctttacggcctgttttctattktgccaagcggaaagctactctggcctaaaggaaaggcagagaacataattacatcttaggccacatttcattgcctgcgtatctgtgctattcagttgct

SEQ ID NO: 246258 - DNA, 201 bp, Homo sapiens
ggcacggactggctgtactgtatcccccaaatctagaacaatgcctggaacataatcggcattcacatattgtttgatcgaatgtgtaaatatatttacatttttttttttgaggcggagcctcgctctgttgcccaggctggagtgcagtggctccacctgtgctcactgcaacctccgcctcccggtggctggacagag

SEQ ID NO: 246259 - DNA, 201 bp, Homo sapiens
ctggctctgtggatattattgtggcagatttgccatttggaaaaaagatgggatccaagaagagaaactggaaccttcatccaccttgcctatgggagatragttgcgtctgtgtacacctacaacaggccaagctgtacgatgtactcaggacgcgaaatgctttaccaaagcattatctggcatgtgatgtgtatggtg

SEQ ID NO: 246260 - DNA, 201 bp, Homo sapiens
tggagtgcagtggtgcgatcttggctcactgcacaaactccacctccctggttcaagtgattctcctgcctcagcctcctgagtagctgggactacaagcrcccaccaccgtgcccggctaatttttgtatttgtgtttttagtagagacagggtttcaccatattggccaggctggtctcgaactcctgaccttgtgatc

SEQ ID NO: 246261 - DNA, 201 bp, Homo sapiens
cctctaaatcactctcttgcacattaaaggtgtgagctaaagctggctggtacctagcattctggctcttttccctcccatgccagtgacagacattgctsatcaatcccaggctctttcctaccaagcttagagtgcacttggctttggagaacccttcctgggacagggctctaccagtcatttggagtcagcaagtag

SEQ ID NO: 246262 - DNA, 201 bp, Homo sapiens
ttatgtcattaaaattctacattactggggattacattctgaggacaagattcacttgcttgtgggaggaactcttgtagactaatcccttattaatacaygtgaattcttgacctcttgggccagagaatgtcccctttgatccctttccagttcatcttttctgtagcagggactggggaagaaataactttaaaacaa

SEQ ID NO: 246263 - DNA, 201 bp, Homo sapiens
acacccaaaaaagtaacttatttttctaccatcagcagaatctagaattaacttaaagaggttactttaacctagtatggttaaagaagtaccatactagrttttggttcctcaagctctttcacaaatccttccttttgagtcaacagctcatgaagatagtaggtcaatgtttttttcaacttgtattttagattcagg

SEQ ID NO: 246264 - DNA, 201 bp, Homo sapiens
atacctcctatcattttaattcagaaacatcctacactagaaaatgagtagagaaataaacagaatccaggtatgtatgtacattttgaagaattacattrcttactatgaaacattttattgcattttattctcctttgaggtaaacagtctattgttggagtttctgtagttgcttagaatattaatcttaaccttcta

SEQ ID NO: 246265 - DNA, 201 bp, Homo sapiens
gaaaatgagtagagaaataaacagaatccaggtatgtatgtacattttgaagaattacattacttactatgaaacattttattgcattttattctcctttsaggtaaacagtctattgttggagtttctgtagttgcttagaatattaatcttaaccttctagctaataacaatggtattacttttaaatatacactgttt

SEQ ID NO: 246266 - DNA, 201 bp, Homo sapiens
tacttcacctttatatgtaaatacttttacttagtaagtgctgtcaggtacttttacttactttgcataacctaactctagtcaagttccataacatgtamattctatactgcaacaataattcccccaatttgcagttgactgagataaggcatagaagtgggatgaggttgaagagaacgtaccataggaggccaagcc

SEQ ID NO: 246267 - DNA, 201 bp, Homo sapiens
tccataacatgtaaattctatactgcaacaataattcccccaatttgcagttgactgagataaggcatagaagtgggatgaggttgaagagaacgtaccayaggaggccaagccttgcggggctgagtgctgtccttatagggttcaggggtcagccctcttcccaagaccccagccaattccctatgctaggcatcctcc

SEQ ID NO: 246268 - DNA, 201 bp, Homo sapiens
caataaattaggtaattttgtttaaataccatatttagccttttgaaaaggctcaagtgtttctatgtagtatacatcaaagttataagaactaaaattcygctgtttttatttttgttgtctttgtatttggggatgtctgcaggaatatctgaatcaacattcatctatctatttttcctggatttgaaatacttttgt

SEQ ID NO: 246269 - DNA, 201 bp, Homo sapiens
caaccaatacaaatcttttagaagaaagaaaaaaaataaagaaaaaaatatctttatttggaagcaaagtaactttggggaaaataaaaccaacttactakgagaacttactatgaacagatgagtaaggaaattctaaagaactattctacaggaagagagaatatagccactaaaggaaagcctaagataaaaaaatgg

SEQ ID NO: 246270 - DNA, 201 bp, Homo sapiens
tgactcactgcaacctccgtctcctgggttcaagcgattctcctgtctcagcctcccgagtagctgagattacaggcacacaccaccacacctggctaaattttttttttttttttttagtagacgcggggtttcgccatgtcggccaggctggtcttgaactcctgaactcaggtgatccacctgcctcggcctcccaaa

SEQ ID NO: 246271 - DNA, 201 bp, Homo sapiens
ctaactcatagatgtagagagtagaatggtggttaccagaggcctggggaggagggcaggttagggagatgttggtcaaaggatataaaaatttagctagraggaataagttcaagagatctattgtacaacatagttaatatacttaatgtacagttgacccttgaataacatgaatttgagctgtgcgggcccacttac

SEQ ID NO: 246272 - DNA, 201 bp, Homo sapiens
tggtgtttcagttatggaccgttttaggaaaaaataagaaaaacgaaccctagatatctctatagatggcatttcctcaaaactccaccaagaacagaatcctttggccgatctccaaacttgaaaacaattattttttctttctcactcctctaccccttctcttcctctgaacatttttattagttgaaactctttatt

SEQ ID NO: 246273 - DNA, 201 bp, Homo sapiens
agatgttggtcaaaggatataaaaatttagctaggaggaataagttcaagagatctattgtacaacatagttaatatacttaatgtacagttgacccttgrataacatgaatttgagctgtgcgggcccacttacatgtggagttttttcaatcaaatgcagcttgagggatacatatatactgagggtcaatttgcatat

SEQ ID NO: 246274 - DNA, 201 bp, Homo sapiens
taaatatttctttgttttgagacagagtcttgctctgtcatcaggctgaagtgtagtggtgccatctcagctcactgcaaactctgcctcctgttttcagrcgattctgctgcctcagcctccccagtagctgagatcacaggtgcgtgccaccatatctggctaatttttgtatttttagaagagatgggtttcaccatg

SEQ ID NO: 246275 - DNA, 201 bp, Homo sapiens
cagacttctgacctccaggattataaaataataaatttgtcttgttagaagccactaagtttaggggcaatttgttacagcagtaacgggaaaccaattcwccaccttagcaggtggaggtggctacagacagttttggttttatataccatatgtatatacatacattctgtacaaatgaaggtctttatcagttctgat

SEQ ID NO: 246276 - DNA, 201 bp, Homo sapiens
tttgggtgtttttttttatgttacaacaactatttttagagactgccaactacctaatccttttatagtatatgaaaatagtcactttcctcacataaacyattttataatttcaaggtacaaaaacttttaaaccagtgtaatccaaggaggactcttaaatttataactcatcattgttatattacttagacttttttt

SEQ ID NO: 246277 - DNA, 201 bp, Homo sapiens
gactcacagtacaagagctcagatgtccagtaaaattctgattcaactggttagatttatatgtgtgtgtgtgtgtgtgtgtgtgtgtgtgtgtgtgtgcrtgttttcttactcgttgacttgctcttccaggagaaaagaaatttagctacttgaaaaaaaggcacttaacttttatgaatgccattatagaaataactt

SEQ ID NO: 246278 - DNA, 201 bp, Homo sapiens
aattggggctgttttactgcattgaactggctaaggagttttccctgtcaaccttcctgatagaggtagttccaatcctatttcatccctctgctaccttstgtacaaggtgagctgtcaatttcttggagaggagtaagatcacagctgggactcacacacagttcttccaagcatgccacaggttggggctgcagtgtt

SEQ ID NO: 246279 - DNA, 201 bp, Homo sapiens
ctaccttctgtacaaggtgagctgtcaatttcttggagaggagtaagatcacagctgggactcacacacagttcttccaagcatgccacaggttggggctkcagtgttctttctgtggtgtggaggctcctctttctctagtattccaatcctagaggttctttgtgcttatggtatctcaagttataatcagaatggtat

SEQ ID NO: 246280 - DNA, 201 bp, Homo sapiens
ttcgtgtgaggtgggaaaaggcaaaagtttatttcggtgctctcctatttaaagacaacagaactctgttgtaatataattttttatacttgaattccaayataatatagttgaaaccatgaagccctcaaaagtgtagaaaaagtgatacatatcatctatatacaaatcctgttgtcagtcctggtataactaaattca

SEQ ID NO: 246281 - DNA, 201 bp, Homo sapiens
aaggccctttcctttgtttttgcatgactaaattctctttatcaaaaaatgttagctcgaatgccactttttatcccttcttgattttttaaaaatgtctyttgtagcattgatcatttctattctgaattataaataataaattaacctttctgagagatgaaactgttttattgattttgggatctcccactacactta

SEQ ID NO: 246282 - DNA, 201 bp, Homo sapiens
ctaggttttcatgaaggggactctggtggaaagttgttagggaccagattatggatgctatctggccctctttgtcccccaactccactccctcttccacraactctatgttagttgggtggccgacatacaagtgagtaggaataaagattgtcacgtgtgggctcagtcttcagaagggaggtcctgaaactttgacca

SEQ ID NO: 246283 - DNA, 201 bp, Homo sapiens
tatatgttggcagtattttgtcagtatttagaatagggtgtaattaaattttcaataaagcaattatttattgactagcatttttgagttgttggtattgrggcaatcactgctaaaagttaccatatatattatttcatttaatcctatggaaaatctcaacatgtcttccatggaatcttgtataaaaattttcttggt

SEQ ID NO: 246284 - DNA, 201 bp, Homo sapiens
gtaacccagttcaggatctgatggttagtctctcgatacatgctgaaacacgagggaatttttacttgccaggatgcctgcttcatggaaaatattgtgtytatgttgaagcatacacttacatctctctatataagttggtggagttgaattctaccagattaccttagctttccaagtcagttcagggttaaggctctc

SEQ ID NO: 246285 - DNA, 201 bp, Homo sapiens
ttaagttagtgaaaacttaaaccaaataacaaaatggtaaatttgttaatgttacatgcattttagatcctctaatgtatttcaggcattttggatatatkcttttgatctttgctcatttctaactacaaggaatgcctcatttcattgtacttcacttaattacagtgtgcagatattgcttttttaacacattgaagt

SEQ ID NO: 246286 - DNA, 201 bp, Homo sapiens
ctggtacctagcattctggctcttttccctcccatgccagtgacagacattgctcatcaatcccaggctctttcctaccaagcttagagtgcacttggctytggagaacccttcctgggacagggctctaccagtcatttggagtcagcaagtaggatgaaatccatttgccatctatagaacaatgccccatgtagtaaa

SEQ ID NO: 246287 - DNA, 201 bp, Homo sapiens
atccttgatggcatttgctagctattttcaaataatttagggactgtcagaagtaatttttggagttcacatgatttattatttatttgtatagaaacttmgttcataaggcactatacatgattatctcatttgacttttataatttttgttggtatctattttatcactgttttgcaagtgaagaaactgaggctcaga

SEQ ID NO: 246288 - DNA, 201 bp, Homo sapiens
tggttaaccacttttgagtcaagaccctattgttttactcagctgtggccagaggttgtagaattgtactttataaatcatagctgccttctacagactctagtatacctgtgcttttagcacccttggggtgtgagaatataatgatgatggctagattagaatcgtgacaatctacttgatttacctggggaatatcat

SEQ ID NO: 246289 - DNA, 201 bp, Homo sapiens
agacaagaaagatgtctgtggccgcagtcagattggagaggagtcagggagaccagtgaggtggctgaggctagtcacatctggaaagcagataaaaatgrgtaataccaaatatataattaacagtagctggtaattgattagatttggatggggttggggagatgtgggagccggaaacaggaggcattgacacataat

SEQ ID NO: 246290 - DNA, 201 bp, Homo sapiens
gaaatcttaggaggacctaaaggttgtaactagaagtcactgacagacaccctcaaggtctggttcttctccagaggaaaaggcaagagcccatctggacsaaatatacttgggccttttgcacttggctgtctgatatttcctctggaatagaaaaggaagactcaggaaaaactgatattgggtcttcctactgttgga

SEQ ID NO: 246291 - DNA, 201 bp, Homo sapiens
cttattagttaatttgccagattccctgttttaaagtcccaggctgcattgtatcttttgaaaattgaagtcatgtacacaaaccactttcaagttaggaragacattaaaaataattaggtcctgcaatatttctctagaaccgttcctttcaggatcttggcacgtgctacatcattaatgcatagccacctgctttgg

SEQ ID NO: 246292 - DNA, 201 bp, Homo sapiens
catgtaggaatgttgatctgagatgggttgttttccaagacccatcttaacaagaaacattaacaacccaaggaagtttccctgcttggaaagttttttcyctttttttctacctgctgaattatttctcccatttgtgatgtaaagttccttacgtggaaagtaaacattgacttaactgactcctgttaaatgactctt

SEQ ID NO: 246293 - DNA, 201 bp, Homo sapiens
gttgccctcatgacagggtaaattgcccaagaggccggtcttgagaataagactgtaacctttccttaaaaagactaccagagccagtcatggtggctcaygcctgtaatcccagcactactgatgcgggaggattgtttgaactcaggagtttgagaccagcctgggcaacatagtgagacctgtctctcaaataaaaaa

SEQ ID NO: 246294 - DNA, 201 bp, Homo sapiens
taagttttcactctttttggaagctatgtgccacgttgacttgcattgggtgcccattactaaatcaccttttaaacaaaaccttagcagttcctaaaccktatttctcctgtgccttcatggtaaagtacattttttattcactctgtttaaaataaaatcatccttgtttaaaccaacatgattgctgtctctgctagc

SEQ ID NO: 246295 - DNA, 201 bp, Homo sapiens
ttatttttattgaatgtacaagaagaagcttggatagacattaattaaattgtcagaaataaatagaaattgtaagtatgacaccccctgcaaagtggagwtttatggtgctataaaagcattacgtggagggatttgatgtagtcatggccctctgggaaagttctctgtgaaagtgatgaagagttgagctctgaagat

SEQ ID NO: 246296 - DNA, 201 bp, Homo sapiens
aataggagacttaatgtaataagagatatatctcctattgcttctgtttctgtttctctggagaaccctgacaactacagaagagactagtcatatgtatrtgacttatgagtaattgaatcatgtgatcagtcccaagatctgcagttgacaagcaggaaagccaggaaagctggtgatgtggttccactttgaggatca

SEQ ID NO: 246297 - DNA, 201 bp, Homo sapiens
attttcaccacttatggttgatttgctgtagagtagttggtccatgaaggtcctcatgctgtcattctggaagttgccaccccttctacccatcccggtakatcttaaatctatattgctgtatgaaagaagccagccacaaaaggatgcatattatataattccaattatacaccattatctgaaaggaaaaactatgga

SEQ ID NO: 246298 - DNA, 201 bp, Homo sapiens
ttagttcagcatgtcaatgtgccatattttggggtctcagtttttgagtcccaacacagtccattctttgaaaagtaaaataagcatgtagcttattttasatttaaagatttagagatacaaccttaaatactggatttttatacatgtagctagggtcttcctgaaaccgcctttgcaaaattatgactgagatagtga

SEQ ID NO: 246299 - DNA, 201 bp, Homo sapiens
aggggcccaccaccacgcccggctaattttttgtatttttagtagagacagggtttcactgtgttagccagatggtctcgatctcctgacctcgtgatccrcctgcctcggcctcccaaagtgctgggattacaggcgtgagccactgtgcccggcatagtagatatatatttatggggcatgtaagattttttgatagag

SEQ ID NO: 246300 - DNA, 201 bp, Homo sapiens
tgtgtacgggtggcagtgtattggttaaaagcacgagggctcgaaaacagaacgtacggctctgccactctttcggataatcttccggaagtcactcaacytctctaagcctcagttcgctcatctgcaaaattgggctaacaatagtacctcagagaggattagacaaaataatccacgtaaagggaatattagtaccgt

SEQ ID NO: 246301 - DNA, 201 bp, Homo sapiens
aaaaaggtctgggctggtaatatggatttggatgtcatctgcatagagatgacaagatggcttaggtgagtaaaagagaacaaagagtactgggagtgtcaaaaaaaaaagcacaaatatccaaagcagtatttagagaaccaagggagggccgggtgtggtggctcatgcctgtaattccagcactttgggaggccaagg

SEQ ID NO: 246302 - DNA, 201 bp, Homo sapiens
ttatttcagccatttagtacattgtttcaatctttgtaatcattaccattattaaaatacaataagtagtatcatctaaactatttcctttattatatctrttgcaaatactccctttcatatgagtctctatcatcttcaaactataataaagagttaggaaagaaatgtaatttgtgtttacagatgatctggttaaaa

SEQ ID NO: 246303 - DNA, 201 bp, Homo sapiens
tcaaactataataaagagttaggaaagaaatgtaatttgtgtttacagatgatctggttaaaacatgcaaactagttaagcccatgaattatctctaagtrtgagttttagttatgctaatgctattgttctttatttagtatattattcattaaagtactccctcatctgaactttaaagcctattatacagttaaaagt

SEQ ID NO: 246304 - DNA, 201 bp, Homo sapiens
taatttgtatttctgtgggatcggtggtgatatcccctgtatcattttttattgcatctgtttgattcttctctcttttcttctttactagtcttgctagyggtctgtcaattttgttgatcttttcaaaaaaccagctcctggattcattgatttttttgaagggttttttgtgtctctatctccttcagttctgctctg

SEQ ID NO: 246305 - DNA, 201 bp, Homo sapiens
tagctatttgattttggggtttaaattgatctggtattccctgtgggactccaattgcatttaaatagatgtgagagtcgaaagacccataagaggcttcycttgctttatgacgtctggtttttccttcctctgcttgatgaaaggccagagtaaaagggatagccgattggactagagcataaatactgctctaattat

SEQ ID NO: 246306 - DNA, 201 bp, Homo sapiens
gtatagatatttccaagatctctcctcatggccatccttggatcccagagcctgggacagtgttagggatcttggaagcactgccaacatgtctgacattsaagaagccactaacagctcctagttgtaaacctgcatgagaaccagaggtctgcacaagtgacagaaagtgacctcagaggtgagtcttagcttcctcaa

SEQ ID NO: 246307 - DNA, 201 bp, Homo sapiens
ttacttttgaatcctcaaatagctgctccttgtattctgtccaggatttagagctgtgttcagtgggagagatggtgtagagttattgctccattgtaccygcaacctgaatgttccaactttaaagcaacattttcttactatttttgaaaaaagttttttgatcatttgcttgaagaaaatcctgacatagttgttaag

SEQ ID NO: 246308 - DNA, 201 bp, Homo sapiens
accctgtgtcttaaaaaaaacaaaaagttgaaaacaagctctacttgtagtttttagtagacactagtgaggagtttggtgcagtctaattttattctttaaaaaaaaaaaaaagactagtttccaccctcctgtcctagtgcttaggtcttgaattgttcacccctcctccatttccaggaagtttctcagatattttta

SEQ ID NO: 246309 - DNA, 201 bp, Homo sapiens
aaattgcttaatgctgtttccataggtcccatgtaaacaaatagtcgaatgctggcaagtttttacaatcaaggccaatgtttaataaagacaggaaggartaaaaaatggaaatattatttctggatttacattttgtcttatttcagtccaaattcctaatgctgaaataatccaaaaatgtactgaagctgtcacctg

SEQ ID NO: 246310 - DNA, 201 bp, Homo sapiens
ctcttactcacaatgattgtgtaattattgtcaaatatgttacatttatatatgttaaaggcctaacaatacatttatatacatattgtttattgaaattkctttttaaatcaatcaagagaagaaatattcaactgtattgttttgtgaaattgcatacatgattacttttactggtgctctcttttttatgtgtgcatg

SEQ ID NO: 246311 - DNA, 201 bp, Homo sapiens
tggtaaactcaaattctgataataatcaagctatggatgaccaatgaatgagccctgtaaaagctatactgtgcttcaggttaccagaaatcagctacttyagtatatggatatgtgtgggcatcttggggagctatattgaactacaactgggctaagctaacctgctctgagctctgtttttggccatttaggatcata

SEQ ID NO: 246312 - DNA, 201 bp, Homo sapiens
aggaaacacagggtttgctaaagataacaggggcacttgtgttaggctgggtaggaaagattactttaaggagttaaaattgcggggatgagaaggagccygccacaggactagccaagtcaagatactctcgcctctctcttaggagaacccctttttttaagtttcattaggcccacatggataatccaggataatctc

SEQ ID NO: 246313 - DNA, 201 bp, Homo sapiens
ggcttggtgggaagaggagtggattatgtagaaccccatcgcctattgtgaagagcaagggaaagcctcacagtgttttgagcagaggaatgacatgactrgacttgtttttaaagggtgactccagctgctttgttgagaatacactgaaggaaagcctgcaggcagggagagctggtagtgatatttcccttgacctct

SEQ ID NO: 246314 - DNA, 201 bp, Homo sapiens
cggaggttgcagtgagccgatattgcaccattgcactccagcctgggtgacacagtgagattccatctcaaaaaaaaaaaaaaaaaaaaaaaggattagcraaaataacccctctccatttaggccttggtggctatgattgctaatacaatgagtttagtttatagaaacagttccaaagtattacacaaggcaatcagc

SEQ ID NO: 246315 - DNA, 201 bp, Homo sapiens
tagctattattattcctatgttcctgatgttggattcatcatgtgggataaaccttgtttgccatccttgttaaggtttaagttgaatctaatggttgtayagtattcttctgtattcaggggattggttctactagaacctccacatataccaaaatctgtgcatactcaagtcctgcagtcggccctgtggaacctgct

SEQ ID NO: 246316 - DNA, 201 bp, Homo sapiens
acatgttttataactccactgcacacatctgacatgtctgattgctgtttcactgccactgcaatgtggaaagtgaatctagaaggagtataatagatgawtatacattatcaccctgctgcattagtgaagaggtttgcaaaggactgattttgatgcatcagtcaggaaatttttttaaaaaacaaaatttaacttgtg

SEQ ID NO: 246317 - DNA, 201 bp, Homo sapiens
ctcttggttgcttggaagcctcaaagctgtccttgaacagatccctgtcgggagagttgttttgataattgaggttctccaggcctagagcagtgatgacytactgaaggtcgttaacctgactcttaacccagggcaacaggggttaatgagtggggttctaagagtatgagcatgtattcaattactttcttctgagga

SEQ ID NO: 246318 - DNA, 201 bp, Homo sapiens
gaattgttctagggattgtgtcttagtctgcagtgacaaaaatgtggaggttgtgcagaaataatctatgaattgtcgaagacctgaactttattctttgrctttggtgactttgtctatagttgctgagacacgggcaggatgagaatattttctttatagcagtggttttgagacttgactgctcacaggtgttacttg

SEQ ID NO: 246319 - DNA, 201 bp, Homo sapiens
tgcgtatgatttgagctctccctgtgataaagaatctggtagtggtgtgtgtgcacggcatgttatcacctggtttgctttctgttagagtgaggcaaccmacagaatgaggagaagagaaggaggagtgatttgcagggccagtgaaggcctgggagtcaagacctaagggcttagaattcactgaggagttcctttctt

SEQ ID NO: 246320 - DNA, 201 bp, Homo sapiens
cacaaagagagtagtaagagattgtactggtttctgaattgctagaattaaaaacaacagcaacaaaagcaaccaaagaattgttctagggattgtgtctyagtctgcagtgacaaaaatgtggaggttgtgcagaaataatctatgaattgtcgaagacctgaactttattctttgactttggtgactttgtctatagtt

SEQ ID NO: 246321 - DNA, 201 bp, Homo sapiens
ctctactaaaaatacaaaaattagccgggcatgttggcgggtacctgtaatcccagctagttttagcaattgatggtacagtgaaattatagttctagaarttggtagtactatttttatttttattttcaaggtcacttagaaactgctttaaatggatgggcgcggtggctcacgcctgtaatcccagcactttgggaa

SEQ ID NO: 246322 - DNA, 201 bp, Homo sapiens
aaggcagtgtgaatttttaaagatttccagattttgaaatcatggcagctagttaaaaattttaagaattgtgcaggtcacgtatgtttattgcggcactrttcacaatagcaaagacttggaaccaacccaaatgtccaacaatgatagactggattaagaaaatgtggcacatatacaccatggaatactatgcagcca

SEQ ID NO: 246323 - DNA, 201 bp, Homo sapiens
gggtttcaccatgttgaccaggctggtctcaaactcctgacctcaggtgatccacacacctcggcctcccaaagtgctgggattacaggggcgagccaccrcatctggcctattgtcctttttttgaccagttactatgactccctgtcttcacccttctgattaatacattttaatattcatattatatatttaattgtt

SEQ ID NO: 246324 - DNA, 201 bp, Homo sapiens
atgcaaagtaaaggcctctgtacatatggaatgaacagaatcttaataggtgaagttatcacaactctgcaatattagctatggccattaactccagaacmagggcttggtttggtaggagtatacaagtgagaagtcaaataagagttgcatgaagatattgtaaagaaagagtataagaagatgatgagaatagagtta

SEQ ID NO: 246325 - DNA, 201 bp, Homo sapiens
aactaaaccacaacagatctttctttgtctaggcctttattatgtctcatcgccatacacttggtatcgggctttgttcctagcagggatttattgtcttyttttttttgagacagacttttcgctcttcttgcccaggctggagtgcaatggcacgatctcggctcactgcaacctctacctcccaggttcaaatgattc

SEQ ID NO: 246326 - DNA, 201 bp, Homo sapiens
agtggagagaccaggtaaagctattactccctttaaaaaatagaaacaagctaataaatattttaaaataattctctaaatacccatgtttagtgtacctrtaagtgggataaggagagaattaaaatgaaatgattgtctttttcttctccatttcttgttttcctgtgaactaacactaatgatatctttttcactcct

SEQ ID NO: 246327 - DNA, 201 bp, Homo sapiens
ctatgttattcaaaattcaacaaaaaagtgaaatagtaattaatatatcgatgtcacataattacttaatcatcctctaatctttcacgattataaattargcttccttgtacacaaatgtttccctcagttttgatttcttcctcaggataaaattctagaaaaagaattataggggccaggcgcggtggctcacgcctg

SEQ ID NO: 246328 - DNA, 201 bp, Homo sapiens
agaggattttgagcagggaaggatattatgttttacataaaaaaggatcattctcactgctataacaggttatctctgctgtaagccattgtattaatctrttgccatataacaaaccactccaaaacttagtgcgttaaaacaagactttatttttttctcaaagttctgtgggttgattgggcaattctttctttcttt

SEQ ID NO: 246329 - DNA, 201 bp, Homo sapiens
ccaaattgctaaataacctgattataatgttattgattattttgttttttttttaaggcactatcggtagagataaagactaaatttcaggccaggcacgktgcctcatgcctgtaatcccagcactttgagaggtcgaggtgggtggatcacctgaggtcaggagtttgagaccagcctggccaacatggcgaaaccccg

SEQ ID NO: 246330 - DNA, 201 bp, Homo sapiens
aacccaaggctgctcggtcagcaatatgaagaccatccaaaatgtggaagctacttttttcattgatctcagacttaactgccctcatgtttgttgtggtkggttttttttttttttttttttttcatcttctgaaaactaatttctggctaaaattcacacacatatatgcatactgctatacccacccactggtgactt

SEQ ID NO: 246331 - DNA, 201 bp, Homo sapiens
agacactacgtttctgtggtcactgttctttcctacctagagttcactcagttgagtgccctacctctgagtcttcatgacgggaacaccagcttccaaayaggcccggcacaaattagcttcatccatgcagccccactgcatggtgatgagcgagtcagatgagcactgcacatttggatgaacctgagtcaagaaaag

SEQ ID NO: 246332 - DNA, 201 bp, Homo sapiens
tgtgccaccatgcctggctaatttttaaattttttgtagagacgaagccttggtatgttgcccaggcatgtcttgaactcctgacctcaagtgatctatcmccccgactcagcctcacaaagtgttgggattacaggtgtgagctatttggcctggccaattactgtgttttttttttttttttttttttgagatggagtc

SEQ ID NO: 246333 - DNA, 201 bp, Homo sapiens
attcgccagaatgtcaaagtctgaaaaatatttcaaagaccaatcttaggaggttttgacgatagtgatgttatctataggagcacttaggaagtcacacrtcttttgacttctgaaatagtaaatccttatagaaaggtaagcaagggaactatgctggttatcatttcattaagccatatcttagcagaattcaagtcc

SEQ ID NO: 246334 - DNA, 201 bp, Homo sapiens
gtagggttagtcattaacaggcttcctgctttccttctcctttggcaggcccagctgtgagatacagtaagttcaagatgtcagaggccaggccgcccccsctgctcgggcagcacacaacgcacatcctgaaggaggtcctgagatacgatgacagggccatcggggagctgctcagcgctggagtggtggaccaacatg

SEQ ID NO: 246335 - DNA, 201 bp, Homo sapiens
atagtaaatccttatagaaaggtaagcaagggaactatgctggttatcatttcattaagccatatcttagcagaattcaagtcccttctctaatgctaatmttgtattctttcattactcttaaaaggcagttttgatccctgagcaaggagggctcttggaagggactgtaaagttaaagaagtcagttagcttgtgaaa

SEQ ID NO: 246336 - DNA, 201 bp, Homo sapiens
gaatgaccgtgaaagctccacatgtattgattttggggttacaaataaattttagtgagtaggctgggcgtggtggctggctcatgccggtaatgccagcwctgtgggaggctgaggtggatggatcacctgagatgaggcgttggagatcagcctggccaacatggcgaaaccccgtctctactaaaagtacaaaaaata

SEQ ID NO: 246337 - DNA, 201 bp, Homo sapiens
tcatttactgtagttaacttattatgtacagaaattacttattactgtgcctcttttgtatgagaaggtagggagcagagctaaaaaccacagcaaagggwtgggaaggaccagggagaagctgacaaatggagatagttctgattgcaggaagggctgaaacatctgaggtgggaaagaggggagccttttaaatggtga

SEQ ID NO: 246338 - DNA, 201 bp, Homo sapiens
cccttatggtaataggcctgggaaataaatccataaatttaaagaagcaatgttagataagaaaaaaattttatacttaaaaggataaaaacatacatgtyagatagtgtttagatagcattcatctcgctaattattttttccattctttgcatgtttcttcaagctagcattagtgcaataccacaactttcagccttt

SEQ ID NO: 246339 - DNA, 201 bp, Homo sapiens
caggaacctagcgtttcccagtcttatttgatggccaacccagtatttcccagagtttggatgatgttactttaaaagttacctttataattaagtagagmaatgtaagtgttcaagcttttagccacagagctcagttcaattagtaaacatgtattgagctcttttatcatagttaccctgttaagtccccaaatcatg

SEQ ID NO: 246340 - DNA, 201 bp, Homo sapiens
ttttccatgtgttgaatttaagcatattttttgttcaagtgcatgatttaattaaaaaatgttctatgggcctgaataaaatatttgttctcatttcatartatgtataattatatttatgtatttatataaaatcttgtttgactgtattattcatgttttctattaattatattattaaattttttcatgtgcttacat

SEQ ID NO: 246341 - DNA, 201 bp, Homo sapiens
tctgtcttagcccctaccagctgcaacaagagggagtcatgtgatagaggagtaggccacttgggctgcaggggttctcagcaggcccattacaagcgggrtgtggcctggacaggcagtgacagcttctcccctgtaatccactggttaccatgagggtctttaaatgaagagaatcatcttttcagtttcaaaacagag

SEQ ID NO: 246342 - DNA, 201 bp, Homo sapiens
ctttgggaggctgaagtgggtggatcacctgaggtcaggagtgagccgagattgcccattgtactccagcctgggcgacaacagcaaaactctggctcaaaaataaataaataaataaataaataaataaataaataaataaataaatccaggattcataatattaattaatttatttaattttgtgacaaagtcttgttc

SEQ ID NO: 246343 - DNA, 201 bp, Homo sapiens
tttgggaggctgaagtgggtggatcacctgaggtcaggagtgagccgagattgcccattgtactccagcctgggcgacaacagcaaaactctggctcaaaaataaataaataaataaataaataaataaataaataaataaataaatccaggattcataatattaattaatttatttaattttgtgacaaagtcttgttct

SEQ ID NO: 246344 - DNA, 201 bp, Homo sapiens
ttgggaggctgaagtgggtggatcacctgaggtcaggagtgagccgagattgcccattgtactccagcctgggcgacaacagcaaaactctggctcaaaaataaataaataaataaataaataaataaataaataaataaataaatccaggattcataatattaattaatttatttaattttgtgacaaagtcttgttctg

SEQ ID NO: 246345 - DNA, 201 bp, Homo sapiens
tgggaggctgaagtgggtggatcacctgaggtcaggagtgagccgagattgcccattgtactccagcctgggcgacaacagcaaaactctggctcaaaaataaataaataaataaataaataaataaataaataaataaataaatccaggattcataatattaattaatttatttaattttgtgacaaagtcttgttctgt

SEQ ID NO: 246346 - DNA, 201 bp, Homo sapiens
cattccatatgctaaatatattttcacctccaagggtattattctgatctaattccttttacatattgatattcacttaggaagtaagaaattaagttgcrtctgtacaaacagaatccaaccatccatccctgctcctcatctattatgtgccagagtatacaatgaatgatagataagccagcaagtttcttgcctcat

SEQ ID NO: 246347 - DNA, 201 bp, Homo sapiens
cccagggcaacaggggttaatgagtggggttctaagagtatgagcatgtattcaattactttcttctgaggagagttcatagcttcttaccagtttgtcaragggacctgtgacctccaaaagtataaccattaacaagacagtgtgttgagcactgatgggagagagggaaaacacaaagtcagacataattaagaagaa

SEQ ID NO: 246348 - DNA, 201 bp, Homo sapiens
tatagccttgtagtatattttgaagtcagaaaatgtgataacaccagctttgttctttttacttgggatatttttggctattcgggctcatttttagttcyatatgaactttagaattgttttttctaattctgtgaaaaaatgatgttgatagaaattgcattgaacctgcagattgctttgggcacaatggtcatttta

SEQ ID NO: 246349 - DNA, 201 bp, Homo sapiens
caggtgtgatgagtctattccctttcccactgtaagaacagcagtcttggtggttagcagcacaaggtagggtccttcccagggtggctggagttttcctyctttccaccctttgatgagaccatgatcttcaggctgttgctggtttaccggaaattctaggggtggtacctgtgctaaaagacttttagttttgaggga

SEQ ID NO: 246350 - DNA, 201 bp, Homo sapiens
ttcttcctctctttgacttcctgtctctttctgtctctttgattccctctttgtctctctgtctcttcctctttctctctgcctctctttctctctctttyttctctctttctcctcactctctctctctctccctctctttcctctctgctggtctttccctgcctctgccagccgcttatgctgctgttctcccctctc

SEQ ID NO: 246351 - DNA, 201 bp, Homo sapiens
ctctgatggtggatggtttccctaaatgtaacaacagatctggagagtttagtggcatgtagattgtcattttgttcattcataacctgccaacttgttakggaatgaatctttttgtaggtttaagctaaaagtgtgattgcatgcatttgtcttaaagacaactggaatcatttagcttgttcatgttttagaacactt

SEQ ID NO: 246352 - DNA, 201 bp, Homo sapiens
acagtaaagaaaatgtataaaataatgctggacaaatatattctctgtgaatgaggaaacacatggtcagtatgtaataataatagtatatttagtggccrggcgtggtggctcacacctataatcccagcactttgggaggctgaggcaggtggatcacttgaggtcaggagtttgagaccagcctggccaacatggcga

SEQ ID NO: 246353 - DNA, 201 bp, Homo sapiens
tgtctcttcctctttctctctgcctctctttctctctctttcttctctctttctcctcactctctctctctctccctctctttcctctctgctggtctttmcctgcctctgccagccgcttatgctgctgttctcccctctccttccccttccgctaggggagggaccagcaggagtggacctactctttcttccctagag

SEQ ID NO: 246354 - DNA, 201 bp, Homo sapiens
tgctgctgtgttgttcccctattggctagggttagaccgcacaggctaaactaactctgattggctaatttaaagagactgacagggtgagtggtttggcrggaaaaatggttatgagagagcaggaaatcggaatgagtcagggtggagtaggtaatcaggtaatcgggatgagtcagggtggagtaggtaatcgaaaaa

SEQ ID NO: 246355 - DNA, 201 bp, Homo sapiens
gctgatgctccatgccttggatgatgggtgtggccttgtttgagagtggctgtggtctgaggcaggagtgggggcagggttggggtgtcgtattcatgactttttttttttttttttttgagacaaagtttcagtcttgtcacccaggctggagtgcaatggcgcaatctcagctcactgcaacctccgcctcctgggttc

SEQ ID NO: 246356 - DNA, 201 bp, Homo sapiens
caaacaaaaaattacaaaaattagcagggtgtgctggtgtgtccctgtactcccagctactcaggaggttgaggtgggagaatggcttgaacccgagaggyggaggttgcagtgagccaagatcacgccactgcactccaacctgggaacagagtgagaccctgcctcaaaaaaataattatggtttaggagtcatgcggc

SEQ ID NO: 246357 - DNA, 201 bp, Homo sapiens
taaaatatgtggcatagggtctggcacatagcatatgttcagtagccggtagctgtgactgccagtactacacgagctcagagaccgcaggcctgctgctgttgtctttatctcccagctgataacccagttcatcaactgccaggagtccttgttcctataggttttgtccaccagagtggagctctgggtcatggagaa

SEQ ID NO: 246358 - DNA, 201 bp, Homo sapiens
atcactaaatgcgtggcaaatacttggtttgggtaatttcagccaagaaaatggttttattgatgtaaaaacaatacagttttagcttacatataattttyttttgttcaaataattaaggtcaccatagtaattacttctaagctttagggtcttttctaacatcatttattctgatgtgattccttatgaccagaaaca

SEQ ID NO: 246359 - DNA, 201 bp, Homo sapiens
ttccttgattttattctctggtgagatgcattagtaaacagaggaacaattatccaggtgtttgtgtgtgcagtgggatattctcagtgttcctgttcctrtgaagtgatggccataaaatggcagttatatttaacaaaagcattttgtatgagtttggggaagaggcaaggaggtgtgaaaataacacagttgtcatgc

SEQ ID NO: 246360 - DNA, 201 bp, Homo sapiens
gggatccttaattatgacttaaaagcaaatttccttcagaaatcaggttgtacatcttttgaataaatcctttggtcgcatatgctaaaatggtattaggwtcataagtaagtgatggtatagtgaagcaactctacctattaacagttccacctatttaatgagaacagtccttgagcaatataggagttggggatggtt

SEQ ID NO: 246361 - DNA, 201 bp, Homo sapiens
aacctttgtcttataccctgttagtcagaactctgggcctcagcttctggtaaactcaaattctgataataatcaagctatggatgaccaatgaatgagcmctgtaaaagctatactgtgcttcaggttaccagaaatcagctactttagtatatggatatgtgtgggcatcttggggagctatattgaactacaactggg

SEQ ID NO: 246362 - DNA, 201 bp, Homo sapiens
cttgggtaggagacagaaatggatacattttccctgaaggagagcttcttaagctctcgtatgtgctacagaatcatcttgttttcaggcaagttaacagyggaatattcttaaggtctaagttatgcactgaatggcatctaacagtacagtaggaaattaaacaacaaaatctaaaaataatgaacaccgaaatattag

SEQ ID NO: 246363 - DNA, 201 bp, Homo sapiens
agcaataggagacttaatgtaataagagatatatctcctattgcttctgtttctgtttctctggagaaccctgacaactacagaagagactagtcatatgyatgtgacttatgagtaattgaatcatgtgatcagtcccaagatctgcagttgacaagcaggaaagccaggaaagctggtgatgtggttccactttgagga

SEQ ID NO: 246364 - DNA, 201 bp, Homo sapiens
atgtccttatcattggagcctggcttatatgagaaaagtgtgactattatcacatatgttaagatgtgattaagttaaggatcttgaggggtggaagttakcctggattatcttggcgggccctgaatgtaattacatacatccttatcagagagaggcagaagatgtcttgagacacacaggtaaggagaaggcattgtg

SEQ ID NO: 246365 - DNA, 201 bp, Homo sapiens
gatcttgaggggtggaagttatcctggattatcttggcgggccctgaatgtaattacatacatccttatcagagagaggcagaagatgtcttgagacacasaggtaaggagaaggcattgtgcagaaagattggagtaatgaagcctcaaagcaaggaatgctggcagctaccagaaggtagaaagagcaaggaactgaat

SEQ ID NO: 246366 - DNA, 201 bp, Homo sapiens
tagagacagggttttgccatgctggccaggctggtctcagactcctgacctcaagtaatctgcccacctcggcctcccaaagtgctgggattatggccatragccaccgtgcccagccatttttgttttactttgttttattttgacagagtcttgctctgttgccgaggctggagtgtaatggtgctgtctcagctcact

SEQ ID NO: 246367 - DNA, 201 bp, Homo sapiens
ttggggcttccaaagcaccttcatgttgctctctctgcaaagattttgtttcctcctcctattaccgttatattctaaactgtgtctgacttgctacagtaaaaaaaaaaaaaaaaaactcaagaacacaatgttgaattaaaaaaagatacaaaagaatacaaaaatttaccctttacattaatttgaaaaacatacaaa

SEQ ID NO: 246368 - DNA, 201 bp, Homo sapiens
atacacagtgctgcccacaccttgagtttaaacttctggtctccaaaactaccagagaataaattcctattgttgtaagccacctagttagtctgtgatartttgttatggcaaccttacaaaactaatgcagtctagtctagtctttgtctagtaagtctaacatctggcactcctcaaggacaatttctattgactact

SEQ ID NO: 246369 - DNA, 201 bp, Homo sapiens
ctggagtgtagtggtgcgatctcggctcactgcaacctctgcctcctcggttcaagtgattctcccccctcggcctcctgagtagctgggattacaggcaracgccatcacgcctggctaattttttgtacttttagtagagacagggttttgccatgctggccaggctggtctcagactcctgacctcaagtaatctgcc

SEQ ID NO: 246370 - DNA, 201 bp, Homo sapiens
cagagaataaattcctattgttgtaagccacctagttagtctgtgataatttgttatggcaaccttacaaaactaatgcagtctagtctagtctttgtctrgtaagtctaacatctggcactcctcaaggacaatttctattgactacttcttatttttttgaggcctataagtttttaatattcccacatgccttgtatt

SEQ ID NO: 246371 - DNA, 201 bp, Homo sapiens
ttttgaagtggagtctcactctgtcacccaggctggagtgtagtggtgcgatctcggctcactgcaacctctgcctcctcggttcaagtgattctcccccytcggcctcctgagtagctgggattacaggcaaacgccatcacgcctggctaattttttgtacttttagtagagacagggttttgccatgctggccaggct

SEQ ID NO: 246372 - DNA, 201 bp, Homo sapiens
agacattttcagagataggactgtggggctagcaaggtataagtaaggccagggattagagtgctgttattgagaggatggtcatgccaaaattcaaatakgggcatagagagaaaggactttctcctaaaacatttccatctggactgcaaaggcaaggtgaaagggaaaaactaagatcaattgttcgacaaataatta

SEQ ID NO: 246373 - DNA, 201 bp, Homo sapiens
agtcatttcacgcttcttctttttttttttttttttttttaagacggggtctcacccttttgcccaggctggagtgcagtggtgtgatctcagctcactgyaacctctgcctcccgggttcaagcgattttcctgtctcagcctcccgagtagctgggattacaggcccctgccactgcgcctaatttttgttttagtgga

SEQ ID NO: 246374 - DNA, 201 bp, Homo sapiens
gcccttgagactggcccctggcctcacctgaagacagaggccatcagacatcccagcagcggaagcctggacagtctgaataaatgggaatagccttctgkaaaatgaagaatgcttggatttgcaagaactgtattcagccaaggctggattatctgcaaagaggtatgcatatgcttgggcactgtctcctccctcaca

SEQ ID NO: 246375 - DNA, 201 bp, Homo sapiens
actctggggaaggaatagaagatggttgatataagactaattcttttactatagtgactaaaacgttcagaaaaaatttattaaattctgaaagactagtrtcatcaagtttacagaaaaacttttcaaagctcatttgaggtaagagccacagataagcacctactatagctctgtttagttgctccttttaaaattgaa

SEQ ID NO: 246376 - DNA, 201 bp, Homo sapiens
gaggctgaggcaggagaatggcgtgaatccgggaagcggagtttgcagtgagccgagatcgcgccactgcactccagcctgggcgacctgggcgacagagygagactccgtctcaaaaaaataaataaataaaataaaataaatgcaacatctcaaacgataagcctatgtaacttttataattcaaccaccgtcatgtca

SEQ ID NO: 246377 - DNA, 201 bp, Homo sapiens
aaatatttggagatttattgggaacgaaagagtaggtgatagcaaagacattagattacatttcagaggcttctacaaacttttgattaattagcactgaygagttagaatattcaaaagttggttttctggtaaattaaggcatggattgtatgaacccccagcccctttagttctaaagtttttggccaggtagctttt

SEQ ID NO: 246378 - DNA, 201 bp, Homo sapiens
acaaaacaaacaacaacaacaaaacaaaaacaaatttcttttctgactgtatccaaactaagctggatgcatcatggatgtgcgtcttttttttttgtttktttttggcagattctagaattcttctaatctgtttccattatctctttaacaaatgtcaagtttattatgattctagtgggtaccaaacctaatagctgg

SEQ ID NO: 246379 - DNA, 201 bp, Homo sapiens
gctggaggcattatacttcttgatttcaaaatataatacaaaactattgtaatcaaaacagcatggcattggcatgaagacagacatgtagaccaaaggarcagcatagaaagctcagaaataaatacacacagttacaggcaattgattttttgtttgtttgttttagatgtttttttggagacagggtctcaatctgtc

SEQ ID NO: 246380 - DNA, 201 bp, Homo sapiens
ggaggcggaggttgtggtgagccaagatcatgccattgcactccagcctgggcaacaagagcaaaattccatctcaaaaaaaaaaaaaaaaaaaaaaaaargaaaagaaatggtagctggactatgatagctattactactactgtcttgcttcaggtaattcaagtggagtaaagtcacatgacattgacttcaggaggc

SEQ ID NO: 246381 - DNA, 201 bp, Homo sapiens
taagtttttatcatgagaagatgttgaatattgctaaatgctttttctgtattcactgagacaatcatataatttttatccttcattctgttaatgaatcsaaagcagtctcaggtgaaaaacacaaagctggaggcattatacttcttgatttcaaaatataatacaaaactattgtaatcaaaacagcatggcattggc

SEQ ID NO: 246382 - DNA, 201 bp, Homo sapiens
tggcaccctgctcttggtcctaggctagcctggggaaaatgtattgagctttttgtggtgtctttctcttacaacatcttcaatcctttccccaagttagyactagggcttgggagaaacaaagtgttcccccttggcctgggttgcttggatctccactggaaaggtgagcttcagagggaggctttctgcctctctcat

SEQ ID NO: 246383 - DNA, 201 bp, Homo sapiens
attctttacaaaagtaatcattactaaaagatcctgtgggggttgagaggagattatgaaaacccttaagatgttgaagtcatttcacgcttcttcttttyttttttttttttttttaagacggggtctcacccttttgcccaggctggagtgcagtggtgtgatctcagctcactgtaacctctgcctcccgggttcaag

SEQ ID NO: 246384 - DNA, 201 bp, Homo sapiens
tattctttacaaaagtaatcattactaaaagatcctgtgggggttgagaggagattatgaaaacccttaagatgttgaagtcatttcacgcttcttctttktttttttttttttttttaagacggggtctcacccttttgcccaggctggagtgcagtggtgtgatctcagctcactgtaacctctgcctcccgggttcaa

SEQ ID NO: 246385 - DNA, 201 bp, Homo sapiens
gtggcgcaatctcagctcacttcaacctccacctcccaagttcaagcaattcttgtgcttcagcctcccaagtagctgggattacagaggtacgtcaccaygccaggctaatttttgtatttttaatagagatggggtttcaccatgtttgccagactggtcttgaactcccaacctcaggtgatccacctgcctcggcct

SEQ ID NO: 246386 - DNA, 201 bp, Homo sapiens
ggttggagtgcagtggcgcaatctcagctcacttcaacctccacctcccaagttcaagcaattcttgtgcttcagcctcccaagtagctgggattacagakgtacgtcaccacgccaggctaatttttgtatttttaatagagatggggtttcaccatgtttgccagactggtcttgaactcccaacctcaggtgatccac

SEQ ID NO: 246387 - DNA, 201 bp, Homo sapiens
gttcatgcctatctttcaaacagctacatacagccgacacttactaagcataatttatgtggtttgaaacaatgaatgatagagaaaaacctgtgtgctgmtcttcaaggcatgtcagatctaaataatttagccagtcattagacatgacagaatctgtcacacagagtaagtaataaaccaggagtgagggtagatgct

SEQ ID NO: 246388 - DNA, 201 bp, Homo sapiens
ttattctttacaaaagtaatcattactaaaagatcctgtgggggttgagaggagattatgaaaacccttaagatgttgaagtcatttcacgcttcttcttyttttttttttttttttttaagacggggtctcacccttttgcccaggctggagtgcagtggtgtgatctcagctcactgtaacctctgcctcccgggttca

SEQ ID NO: 246389 - DNA, 201 bp, Homo sapiens
gcatgcttttttcataagttactccatggcttacatcagttaatggctggggctgcactctctgagcctggagcggagtccctgcacctgggctcaccctrctaatagatcacccagggcctggtgatggcctgcgaggacagctggaatggctcaactcccccactcatctgtcatgattaccatgcgttgggggtttgc

SEQ ID NO: 246390 - DNA, 201 bp, Homo sapiens
gtttattctttacaaaagtaatcattactaaaagatcctgtgggggttgagaggagattatgaaaacccttaagatgttgaagtcatttcacgcttcttcwttttttttttttttttttttaagacggggtctcacccttttgcccaggctggagtgcagtggtgtgatctcagctcactgtaacctctgcctcccgggtt

SEQ ID NO: 246391 - DNA, 201 bp, Homo sapiens
aagaccttccaagggcttgagtacctagaagttaggagaaagtccttccagcggtttgcagagcacatatcaacagaccattggtcctgccctcccctgtycatgccccgtgcccatactttttgctccctgcactagtcatgaagacccctgaggacctccttgcaatgtctcaatcaggccctagcagaccctgacagc

SEQ ID NO: 246392 - DNA, 201 bp, Homo sapiens
tggctaatttttgtatttttagtaaaggtggggtttcaccatgttggccaggctggtcccgacctcctgacctcaggagatccacccgccttggcctcccraagtgctgggattacaagcgtgagccaccaggcctggcctattttgagttaattttttatgggatatgaaaattaggatgaggtctgttgcctatggatg

SEQ ID NO: 246393 - DNA, 201 bp, Homo sapiens
gaatagctggacttccaaatactgtgattagtgtctgtggaaagatattaatgttactgctgatgcatgtcatattcactaagaaagtacatgtcaaactstctgaaatcatagactattttataggaagagatgtgactaaatttatttggcaataaattcccagaatatatttatcaatttaagtaaccaaaagctatt

SEQ ID NO: 246394 - DNA, 201 bp, Homo sapiens
caattaggaaaagaggaagtcaaattgtccctgtttgcagatgacatgactgtatatttagaaaaccccatcgtctcagcccaaaatctccttaagctgayaagcaacttcagcaaagtctcaggatacaaaatcaatgtgcaaaaatcacaggcattcctatacactgataacagacaaacagagagccaaatcgtgagt

SEQ ID NO: 246395 - DNA, 201 bp, Homo sapiens
aactgaaacccaatggagatggaagaggacaacccaattctgttcaaatggtggtttacagaagctgttcacttcagcaggctcatttaacttacgcaacytaaaaaccactgagccttccttccatcccttgagtcacatgtgctttctatagatagctggtagaaatcacaatattgaaaagtcaattacttgcatatt

SEQ ID NO: 246396 - DNA, 201 bp, Homo sapiens
tgttcaaatggtggtttacagaagctgttcacttcagcaggctcatttaacttacgcaacctaaaaaccactgagccttccttccatcccttgagtcacaygtgctttctatagatagctggtagaaatcacaatattgaaaagtcaattacttgcatatttggagctaaaagtggggatttgaagtatgaccatccccag

SEQ ID NO: 246397 - DNA, 201 bp, Homo sapiens
acctcatcctgcatctgtttatatctacgagttgaagtagtgaggtcatctacctttgtctttgtaagaatatcactgtccgggccattacccttctcagaaaaaaaaaaaaatactttcaatgcaatcagcatttgtggatgatttaaagatggaatatcttaagtgaaagcatctgttggaaaacatgataaggtactc

SEQ ID NO: 246398 - DNA, 201 bp, Homo sapiens
agtgccattgccattaaaatgcactgtgtttctactatcttgagtgcagaaaaagaaaaaatgttggcatcatagggctgattctgcacccatgtggaatratttaattctgttaataatgctagaaatgttaagaaaacatttgggggagggaaaggcagaatatgggaacgtgcaaaaccagccttgtttcatctgaac

SEQ ID NO: 246399 - DNA, 201 bp, Homo sapiens
actaaaagcttatagaaatttcaaattttcaagtacctagggctagatattctgtaataagttcctgcttttaaaaaggggcgatgtctaaactctgtaaygttggtggagttttgttctcaaaggttcccaggtggtcctgagtagcccatttcagggttttatcaaaccctgacatgggcaagacttacagatgttcaa

SEQ ID NO: 246400 - DNA, 201 bp, Homo sapiens
ccttgacttaatgattggagagtctctaagttttcttacagttctcaaattctgtattaaaattttagtgtggtgaaatggcattggagatagattatatwattcagtagttctcagacaaggaagaatggttctatcatgtgctttttagtgatattatggaggaatgagagggtgataggcagatatgtgtagtctgaa

SEQ ID NO: 246401 - DNA, 201 bp, Homo sapiens
gagaaagctgcttaatttcaaggttaacctgaaggactctgcccttgagactggcccctggcctcacctgaagacagaggccatcagacatcccagcagcrgaagcctggacagtctgaataaatgggaatagccttctggaaaatgaagaatgcttggatttgcaagaactgtattcagccaaggctggattatctgcaa

SEQ ID NO: 246402 - DNA, 201 bp, Homo sapiens
tatctcttgtgtgtgtcattcagacagattgttttccttcccatgaatgtaattgttgtctcttggagattttatgagaaacagaattcaggccattccasagttaggcagaagaggaaagcatatgactttatcttgctcacttcccagacttgtccttttacttgttaatatttgtctccaggagtcatatatttcaat

SEQ ID NO: 246403 - DNA, 201 bp, Homo sapiens
gacttgtccttttacttgttaatatttgtctccaggagtcatatatttcaatgacaaggcaaaatacccccagacaattcatgcctgttcctgactctgtrcctaacgaactgtggaccttggtcaaacattttatactgttgggcctcggttttctcatctggaaacttgggaagttggactggacaagataaatttggc

SEQ ID NO: 246404 - DNA, 201 bp, Homo sapiens
tagattttagagcatacaagtgcaggtttgttacatgcaaatattatgcagtggtgaagcctgggcttttagtgcagtcatcacccaaatagtgtatgtcrtatccaataggtactttctcctccctcactccccttccacctcccatgtttttgagtctccagtgtctattattccactctctatgtccatgttatttag

SEQ ID NO: 246405 - DNA, 201 bp, Homo sapiens
tatcagggtgatgttagattcatagaatgggaccacagtcattgattttttggggatagtttcagtagaattggtaccatctcttctttgtacatcaggtrgaattcagctgtgaattcatctggtctggggctttttctgattggtagtttttaaaattattgcttcaatttcagaacttgatattggtctgtttggggt

SEQ ID NO: 246406 - DNA, 201 bp, Homo sapiens
tcaaataattttttgatttctgccttaatttcattatttaatcagaagtcattcaggggcaagttctttcatttgcccttggctttgagaggtcttcttcrtactgatttctaattttgttccactgtagtcccagagtgtggttggtttgattttgattttttaaaaaaattattgagacttgctttatggacaagcatg

SEQ ID NO: 246407 - DNA, 201 bp, Homo sapiens
gagaccaactcagtcatggagaccctaacccagtgtcgctagaggaagtaaagacacacacgcagaaatatagagtgtggagtgggaaattaggggtctcrcagccttcagcgctgagagccttgaacagagatttacccacatatttattgacagcaagtcagtcgtaagatttactaaaagtattccttatgggaaaca

SEQ ID NO: 246408 - DNA, 201 bp, Homo sapiens
tcagtaaaagcttcatagtggaaatatttatcaaaacactgcagggggctgtatagcaggagatacacagaatgatacttcactcttgttcacaaatgtartataatttataatttatcttttaatttttaaaatcaaagttttaggtatacttggttttaaaacttcagaagttctgcagtgttaattatgaagaagagt

SEQ ID NO: 246409 - DNA, 201 bp, Homo sapiens
tgactaaaaatatatttttttctaccctcacacttgacttgtgctttaattgggtttagaattttagagagaaagaatttctcccctcagaattttaaggkttttttttttgctccagttttttgtctttcagcattgttgagaaattcaatgtcctcctgataaccaatactttatatctgacctgcttttttctcccta

SEQ ID NO: 246410 - DNA, 201 bp, Homo sapiens
ctgcgtgagaatgaatacaatttcatgcagtagtaaaaaacacattttcctactcattttgattatattacatagaatgatgaatgattataacattgaaygttagttgctaaaaatgaaattgttatattcctcttaaaagtgatctagtgtaaaaaagacaatttacacctgattggaatagtagctaattattaactc

SEQ ID NO: 246411 - DNA, 201 bp, Homo sapiens
aagagaaaagttacaacagacataaaatgggaggggccatttgaaaattcaggagaatgttcacataacccaaacctgtcaatgtgacttgaacacaggayagagtaattaaaactttgagtttctgaggctgccatatctctgctttccatgtgattagatgattcacaacttctgtctactcaatttcttcatagtaga

SEQ ID NO: 246412 - DNA, 201 bp, Homo sapiens
ggatttgggggcactgagctaggtatgtgggccttattgcttctctcctcagctggagcgaatcttatttgtcctgtatgtatcagctttaatgaaaccayatcttcatgttgtcatatctttatctgggtatggcattaacagtcagcatgtctcagtgttcctcctttgagtaagatgttctaataccacataggaagg

SEQ ID NO: 246413 - DNA, 201 bp, Homo sapiens
agaaaaccaagcagcatattatccagataaggttttcagctcagtcttgggcttcttctcctccattcagcaggtaagattccatagtcaggggcctcagsctgcttcactacctatttcttagaactctgcacagctttagtggaagaggcagtggctgctcaaggagggttcacagcagcaatctgcaggaagcctcgg

SEQ ID NO: 246414 - DNA, 201 bp, Homo sapiens
cattatgaacccacaatattgagcatatttgatgtgcttcaatttattgcaattattatccttcttgatgctcacattctcaggccagtaaaggcctttcygggttggcttctgcgtctttttgacatgaccaataatttttgatagcttccttgatttctggtaaaacaagatattccaggaacattttgtacctttcct

SEQ ID NO: 246415 - DNA, 201 bp, Homo sapiens
gatactgaatatagtgggaaaaaatggagtttttatttacttattttaaaattagattttagagcatacaagtgcaggtttgttacatgcaaatattatgyagtggtgaagcctgggcttttagtgcagtcatcacccaaatagtgtatgtcgtatccaataggtactttctcctccctcactccccttccacctcccatg

SEQ ID NO: 246416 - DNA, 201 bp, Homo sapiens
tcagtggtaggaaatagtgctctatgtttgtcatgatgtactagcacagacccagaagtcaataactgcttggcattccagaaaacattctcatggcggtragttaaacttcatggaatgtctttttccagtgggtgatgaagtcatttagcaatggttaccttttgtggaagaaaatcttgttaaaaagtaagtagccct

SEQ ID NO: 246417 - DNA, 201 bp, Homo sapiens
tgatagggtctgtgggctatgtccttaagtgtgtttttgtggtagcagttttcattatttcatttctatgtttagaactctcttaaggaactgttgtaagrcttgtctagtggtaatgaattcctttagcatttgcttgcccggaaaagattttcccttcacttatgaagcttagtttggtgggatatgaaattcttggtt

SEQ ID NO: 246418 - DNA, 201 bp, Homo sapiens
gaaaaccaagcagcatattatccagataaggttttcagctcagtcttgggcttcttctcctccattcagcaggtaagattccatagtcaggggcctcaggstgcttcactacctatttcttagaactctgcacagctttagtggaagaggcagtggctgctcaaggagggttcacagcagcaatctgcaggaagcctcggc

SEQ ID NO: 246419 - DNA, 201 bp, Homo sapiens
tagatgcagaccagttccacgttgccaagctggcaagtctcactgcccaagagaaactacagctgtagcagctctccttctgcctgaggcttgcaatgtgrggagcacaattctagcacctactgctgaggtgccttctacagttcgggctgtggaggcccctaccccactccaaagcaagtcttgctccagcctctggtc

SEQ ID NO: 246420 - DNA, 201 bp, Homo sapiens
ctttacatacatggccaacatggtaattcttttaatttcatagcctgcatctatctaaaactcttgcccaaatttcttcaaccttctaggaaccttcattkccatgtcctcctttgtttgtgacccacactgacctctactgtctccaatatcgtagaagatccattcacaaatacactcacaaggacaggtgatactgaa

SEQ ID NO: 246421 - DNA, 201 bp, Homo sapiens
atttttaaaaaaatgtaacgtttttgaaagcaggaaccgtataaagtgtttagcaactcagcattcagccaaggattaggcacatagtattcgattctccrtaggtacttgctaaatttaatggaattcctttatgtggggtcccccagagttcatataaggagccacaatcaagaacagaatattaccatatacaaataa

SEQ ID NO: 246422 - DNA, 201 bp, Homo sapiens
tctggtttgttcttcaagattccagtagattcctattttccttcttgaatgaaagttcacagagttgatctttatgcattgtcttgctatctccaagtggmtgaggcaaactaaaagcctctcatctgccatctgggatggggtggggtagttggtcaattttaaggctaaagaggttactaaggttattctttagcaagc

SEQ ID NO: 246423 - DNA, 201 bp, Homo sapiens
cctttcctctttatgtaacacatactagcatttgattgattgtatagttcttcagtagttttatgtatattaaattttgtgatttttaaaaaaatgtaacrtttttgaaagcaggaaccgtataaagtgtttagcaactcagcattcagccaaggattaggcacatagtattcgattctccgtaggtacttgctaaattta

SEQ ID NO: 246424 - DNA, 201 bp, Homo sapiens
ccatagcaggcaaaccctcaggtattctagagctttttgttttgcatcagtaaatatttgctgccattgtatcatcttagtaatgatttaccatacatccyatttgaatttcatggagcaacccccttaaataacttttaataccagagataatcccagtggctaagtcaattagatcttaaaaatagaacctttgttaaa

SEQ ID NO: 246425 - DNA, 201 bp, Homo sapiens
ctgttttgcgtatttcttcatcagaaagagattagtaacaagacccttaaacagatcaaaggaacttgctgaaagtaagtgccttttgggctcgtatgatrgttttcttttttttttttcccacctaaaagaggcactgactgtagccattttataaagcatgatttgttaaccatgtcagttacaaaacaaatgttacct

SEQ ID NO: 246426 - DNA, 201 bp, Homo sapiens
gttttttaacgtattccatgaaataaagaaaaagaaaaacctgacttcttcaaagtcctaacccctccacatgagtaagggaaaaaatggagggggaatcygatgtgtgctcactttgaagaagatgctttctcccagctctgactgtcagagtggactcagctcattaagtaggccaggcaggcgacccattctcctcag

SEQ ID NO: 246427 - DNA, 201 bp, Homo sapiens
gtgattcctaccatcaagggacgtgtgtgtgtgtgtgtgtgtgtgtgtgtgtaactctaggaatttcttgagtgtggtatatggatttttactaaacagcrctgtttttatttttcaaaaaacacctataatatttaaaaatatagtaattgctctttagtacattcattttcatatgtccctgtgtagcctcttttaaga

SEQ ID NO: 246428 - DNA, 201 bp, Homo sapiens
aaatggagggggaatctgatgtgtgctcactttgaagaagatgctttctcccagctctgactgtcagagtggactcagctcattaagtaggccaggcaggygacccattctcctcagccatccgacggtccaaacaggcaaccttcccagttagaggagccctctttttggattaaggttacatagatgcttacattccca

SEQ ID NO: 246429 - DNA, 201 bp, Homo sapiens
ccgtatttataaaggaaaactaaatcaccaaaaagttccaacactttatttataatatgcatgttacatatatagtaaagctattttatttttccttaaaratctattttattaagtgcctacagacaatatattaagaaggagacttaagctcaaaatgtaaaacccacaataaacaactcaagtactgcatttttaaat

SEQ ID NO: 246430 - DNA, 201 bp, Homo sapiens
ttaagttctgttttgcgtatttcttcatcagaaagagattagtaacaagacccttaaacagatcaaaggaacttgctgaaagtaagtgccttttgggctcrtatgatggttttcttttttttttttcccacctaaaagaggcactgactgtagccattttataaagcatgatttgttaaccatgtcagttacaaaacaaat

SEQ ID NO: 246431 - DNA, 201 bp, Homo sapiens
aagtgcctacagacaatatattaagaaggagacttaagctcaaaatgtaaaacccacaataaacaactcaagtactgcatttttaaatcctcatattgcayggctagttgtctctaagttttaaatggtagttgctaaagcataccatcaaggatgacttttagcaaaaataacagctggctttgaaattaatttgaaaat

SEQ ID NO: 246432 - DNA, 201 bp, Homo sapiens
caatatattaagaaggagacttaagctcaaaatgtaaaacccacaataaacaactcaagtactgcatttttaaatcctcatattgcacggctagttgtctytaagttttaaatggtagttgctaaagcataccatcaaggatgacttttagcaaaaataacagctggctttgaaattaatttgaaaatgaatataatctgt

SEQ ID NO: 246433 - DNA, 201 bp, Homo sapiens
tttctgtaattgttgtcattgggttatttcataatttaattatctaagaatgccccacgtcacccagtggtgaggtgaggctacaaagaaaggaaccctgscatcctgccctgcactcataagtgatcagaaaataatcaaagtggatcacaggcctggaggccaaggaagctggtttgatatgagtgatctgcttggcgt

SEQ ID NO: 246434 - DNA, 201 bp, Homo sapiens
ggaaatagattcagaggtaaggagaattttgaggctacactttaaaaaagtcatgatcaggacccaggacgtatgggtcagaaggagatgtaggggcgcaygcatgggcaactgttgagtaaagacttctggctgcaccatgatctcgaccggccaatgctgggagtttgggatgacacctttctgtctctagtcagccct

SEQ ID NO: 246435 - DNA, 201 bp, Homo sapiens
ctgcaacctctgcctcctgggttcaagagattatcctgtctcagcctcctgagtagctgggacaactggtgctcctcgccacacccagctaaatgtttgtrtttttgtagagatggggtttcaccattattggccaggctggtttcgaattcctgaccttaagtgataggtccgccttggcctcacaaagtgcggggatta

SEQ ID NO: 246436 - DNA, 201 bp, Homo sapiens
attttttaaagaaataaacatttccatttcctacagtgtttcaggcattctggatttttctgcctgcttccatatggtgtccttgaacatagtcctctgtstcctatagctcctgtcacttatttgtaagttggatctagagtcttccttatattcaggtggggaggaatgattttcttataaagtaattttctaaatttc

SEQ ID NO: 246437 - DNA, 201 bp, Homo sapiens
agaccacgcagtgtgaaagcctcctccaaaatcattattttcagacagttcatgcaggtgaaaataatgcagaggtcatagataacactgtaacagcttarttatgggaaattagagaggggcccatgatagagcacagcatttcctaaatgttccttgcctagaggaccctagttttctgaaatagtaatagttgtccca

SEQ ID NO: 246438 - DNA, 201 bp, Homo sapiens
tcctgatctcaggtgatccgcctgcctcggcctccgaaagtgctgggatacaggagtgagccactgtgcctggctgagcttccagtattctttactagagycttgtggtctgtggactcccttgctaagaatcactgtagtccttgtgatctgtctcaagcttataatggtgtatgtgaaaatgtaagaaaattactaatg

SEQ ID NO: 246439 - DNA, 201 bp, Homo sapiens
tagagtcttgtggtctgtggactcccttgctaagaatcactgtagtccttgtgatctgtctcaagcttataatggtgtatgtgaaaatgtaagaaaattastaatgaattatcttgaaatgttttctctgttttgccagatatgaacaatataaagccattggaaggggtaaaaattctggatctaacaaggtttgtattg

SEQ ID NO: 246440 - DNA, 201 bp, Homo sapiens
aggtgggaaagaggggagccttttaaatggtgactctgagtaagtgtagggaaaatcgattcaaacatttgatctgggatcaaagaatctttattatgaasggtcaatgttaaaaatatgaaacatacggaagctgttgcctgtgaagtcatttgcgtactctaactgcagagatgtataagccagttcattgctataaac

SEQ ID NO: 246441 - DNA, 201 bp, Homo sapiens
tatagcctgctacacacataggctatatgggatagcctattcctcctaggctataaatctgtacagcatgtacatgttactgcactcaatactataggcarttgtaacacagtggatacacaaaaatcatccagaaaaacacccagagggggaaaaaaatgtattatccatggggaaacagtgatttgattaactgcatat

SEQ ID NO: 246442 - DNA, 201 bp, Homo sapiens
ctttttaagccctctgtgggactggcctttagcaccacatcacttacagagctttgtgtggtctactttcatgaacttcaccaccagaagtcaagcagtasaaggtggtgattaacacatgagcattggacccaagatagaatttctgcttggtgcataatgtttacgtgaatttaaaaggtaacttaaattttctaaacc

SEQ ID NO: 246443 - DNA, 201 bp, Homo sapiens
aagtgctactctgtaaaacttgtcaaagaggaaaaaagaaaaagaaaagaaagcaatcccattaggcaacctggactttgcatcctgtcgtttattaaatktgtcagttgaggcagttaggattatggcagtagatttattaatttttcagaaaacctggcatggaaaagccttatccttggcactagcctggaaaatgca

SEQ ID NO: 246444 - DNA, 201 bp, Homo sapiens
gcctgtatattttctaacttgatggacaggtttttttcttctacaatgagatgaagtgaaattactttcataatataacgttctctttatgagtatagatwaactagctgttctattttatttatttactttttttcctggtaggtggcgtgtttgtctcacatagctgcaaattatcttattggtcaaaaggaagcaaaa

SEQ ID NO: 246445 - DNA, 201 bp, Homo sapiens
ggtagaactgaaacccaatggagatggaagaggacaacccaattctgttcaaatggtggtttacagaagctgttcacttcagcaggctcatttaacttacscaacctaaaaaccactgagccttccttccatcccttgagtcacatgtgctttctatagatagctggtagaaatcacaatattgaaaagtcaattacttgc

SEQ ID NO: 246446 - DNA, 201 bp, Homo sapiens
tgcgtagctttttctttctggctataattagtaaggctagtttctgtctgtgaccatacctagtttgtaatactgaaataataccatcatttgtcatattwttaatatctattctcagtaggtggagggcagtagaatgtgttgagaagaataagagggtccattttgttttatctctttagattcctcagtagtgatttg

SEQ ID NO: 246447 - DNA, 201 bp, Homo sapiens
cattgggtgaagaagctaagcctctgggcctcacaaccaaagcccaggcttgccgcaggctacagaaacagttttcagaaagtacccagctcctgacaaasagtgaccatttaaacagtatgtggagaatgttgttaattctgactccagggttgtttttgagtcacccacagggcatcagtctttgtaagtattggcccc

SEQ ID NO: 246448 - DNA, 201 bp, Homo sapiens
ccgtctctataatgcgtgttgatagtcatgaaaggaactgaaagttgatgtcggaaatatttactctcttgtctctgaatggcattttgtcaaaatttgtsgtatagtttgcttactttcttaatttgattgctgcctgtatattttcctttctgtatttattttgttaggttttgggggttagagcttgcataattacct

SEQ ID NO: 246449 - DNA, 201 bp, Homo sapiens
gcaagtttgctttctttcacctccaaatccactagatttttctatcttcattttcttttggtgctttgtgcttcaatttttttgtggtatgcatagttaamatcctgacgaatgaaaaggaatcctctgtcatacaaacaaaggaagaagctcagtgtacttaggccacagcataaaggaggggcagggagggaaagagaa

SEQ ID NO: 246450 - DNA, 201 bp, Homo sapiens
ggggatggagaaaaggcatctggagagctggcatattggggcttccaaagcaccttcatgttgctctctctgcaaagattttgtttcctcctcctattacygttatattctaaactgtgtctgacttgctacagtaaaaaaaaaaaaaaaaaactcaagaacacaatgttgaattaaaaaaagatacaaaagaatacaaaa

SEQ ID NO: 246451 - DNA, 201 bp, Homo sapiens
aggcatgagccactgcacccggcctacatgttttaaaataactagattcttagttagttcagggaacctgcaaataaatatagagaaaataaacaagcatrtttttctacctttacacaacttacttgttggttgactgaattgactgctcagtttagtttagttagttcaactagaactggatttatagactcaatccca

SEQ ID NO: 246452 - DNA, 201 bp, Homo sapiens
agattctagaaaatttagaatctatggattctagaaaatttagaatctatggattctagaaaatttagaatctatggattctagaaaatttagaatctatrgattctagaaaatttagaatctatagattctagaaaatttagaatctatgattaatatatagaatttagatcaatgaaaagtatcctaaaactttataaa

SEQ ID NO: 246453 - DNA, 201 bp, Homo sapiens
catgggaaagactgacctcaatatcatcataatggtaaagaccacctccagcggcgccacagttcctgaccttcactgagaacttcccacacaccaggcastgttctcattgctcactaaagcctcctggagaaggaaaaagaagcggtttggaccgcatgactttagcggtttgggggcatgactttagttgtctttgaa

SEQ ID NO: 246454 - DNA, 201 bp, Homo sapiens
agattctagaaaatttagaatctatagattctagaaaatttagaatctatggattctagaaaatttagaatctatggattctagaaaatttagaatctatrgattctagaaaatttagaatctatggattctagaaaatttagaatctatagattctagaaaatttagaatctatgattaatatatagaatttagatcaat

SEQ ID NO: 246455 - DNA, 201 bp, Homo sapiens
cacgtcatgagcacacccaattggctctacttcaccacacacacattgagtcagaatacatctgtgtccccaactgccaccaccccaggcccagagcctcmtctcaggtctgctctgctgaccacagtcacctcccagtgcttgcctgccttcacccttgggctaccagtttcttctccatgtggcttttcacaatgtaaa

SEQ ID NO: 246456 - DNA, 201 bp, Homo sapiens
tcatcttcatgcgtgaaattatatttcattcttattagttactttctttatctacctttaagatgtaagctttatgaaggcacggactggctgtactgtaycccccaaatctagaacaatgcctggaacataatcggcattcacatattgtttgatcgaatgtgtaaatatatttacatttttttttttgaggcggagcct

SEQ ID NO: 246457 - DNA, 201 bp, Homo sapiens
agattctagaaaatttagaatctatagattctagaaaatttagaatctatagattctagaaaatttagaatctatggattctagaaaatttagaatctatrgattctagaaaatttagaatctatggattctagaaaatttagaatctatggattctagaaaatttagaatctatagattctagaaaatttagaatctatg

SEQ ID NO: 246458 - DNA, 201 bp, Homo sapiens
tctggtgatgattccaactctgtcttcttccctctcctgcccccctccctctactgctgggactgttccccagcactttcaccttctcctcattgcttacrcctgctgtggcctcagaggagcaatagccttcatgggccacccagaagttggatataagaaaacaggttaggttggagagagtgagagggagaacagcca

SEQ ID NO: 246459 - DNA, 201 bp, Homo sapiens
actaatacttcaacacatttagcaaaattcttgttgtaattgtcttccctctgctttggaagtggagtggaagatggcaatgaagtagactattattagakatttctctggcttttgtgggaagaagatgacttctaaattgagtttttcttgaagaaactgactcctagttatgtctaccatttttttctatcatttttt

SEQ ID NO: 246460 - DNA, 201 bp, Homo sapiens
gagataggtggtgacacagagtcctgaaaagtaacccagagcaggcatccaacagttctggttcttgctccgcttccttatttgggggattctaggcaacrtgaaacctctcagggccttattttcctttaatgttaagtgggaaaaataattatcctccatcctacagggtcattgtgagtatcatctaatatcatattg

SEQ ID NO: 246461 - DNA, 201 bp, Homo sapiens
ttcagtcctgaaaggtgacatcccttttaggttgtccaaccaccctcacagtgtttccagttactctccagctccttatcctcctttagttttcttcatarcagtcatcttcatgcgtgaaattatatttcattcttattagttactttctttatctacctttaagatgtaagctttatgaaggcacggactggctgtact

SEQ ID NO: 246462 - DNA, 201 bp, Homo sapiens
ccctcccatgccagtgacagacattgctcatcaatcccaggctctttcctaccaagcttagagtgcacttggctttggagaacccttcctgggacagggcyctaccagtcatttggagtcagcaagtaggatgaaatccatttgccatctatagaacaatgccccatgtagtaaatatcaagccaaaggttggtttttctc

SEQ ID NO: 246463 - DNA, 201 bp, Homo sapiens
gtgaaaccctgtctccactaaaaatacaaaaatgagccaggcatggtggcagacacctgtggttccagctacttgggaggctgaggcagaagaatctcttraacttgggaggtggaggtttcagtgagccgaggtcgtgccactgcactccagcctgggtgacagagtgagaccctgtctcaaaaacaaacaaacaaacaa

SEQ ID NO: 246464 - DNA, 201 bp, Homo sapiens
taggcctcactgagcagaaatgtgaaggacgtgagggaatgatgtgagtagattttaggaggaagaatgttcccagcagagaagaatggctggagcaaagktcccaaggaggaacatgcttggtgaacagcaaggaggccagtgtgggtggggcagactgagccagagggagcagtgcaagagaggaaggcacagggtggc

SEQ ID NO: 246465 - DNA, 201 bp, Homo sapiens
ctttttgtttttattttttagagacagcatttccctctgtcatccaggctggagtacagtggtgtgatcatagctcaccatagcctccaactactaggctygagcagttctcctgcctcagcctcctgaatagctgggactacaggcatgtaccaccatgcccagctataataataaaaatttttttgtgtgtgtagagac

SEQ ID NO: 246466 - DNA, 201 bp, Homo sapiens
gtagattttaggaggaagaatgttcccagcagagaagaatggctggagcaaagttcccaaggaggaacatgcttggtgaacagcaaggaggccagtgtggstggggcagactgagccagagggagcagtgcaagagaggaaggcacagggtggcttggtgggaagaggagtggattatgtagaaccccatcgcctattgtg

SEQ ID NO: 246467 - DNA, 201 bp, Homo sapiens
gggagggatagcattaggagatatacctaatgttaaatgatgagttaatgggtgcagcacaccaacatggcttatgtatacatatgtaacaaacctgcacrttgtgcacatgtaccctaaaacttaaagtataataataaaaaaaaaaagaattgtgtgggtcaaataaaacatgtctcccaagctgcaggtttttccagt

SEQ ID NO: 246468 - DNA, 201 bp, Homo sapiens
cattatctccacctgagatatgagtgcaaatatctaaaataaactactagcctggtgcagtgggatcactttgggaggcctaggcggctgggtcacttgargtcaggattgaggtcaggagttcggaactagcccggccaatattgtgaaaccctgtctctactaaaaataaaaaattagtcgggcatggtggtgcacgcc

SEQ ID NO: 246469 - DNA, 201 bp, Homo sapiens
aggcgtgagccactgtgcctggcctgttctgtcatttagtacagtaagactggacctgacgtggcaatatcagtacaagtttcatggtaactcttgtttamccccatgatataagagtagagaaacacccacccaaaggaagggtataaagagaacgattgtcaaactgcctttctcacgtcctaactgtgttgttgtagg

SEQ ID NO: 246470 - DNA, 201 bp, Homo sapiens
cataaattggcaaagtatcttatgggttataataatcctgatggcttggaattaatatattgccatcatagagcaagtcctgagcccatctactctgaatstttggataaagacaaaactccatcctgccatgcacctggtcagttgtgcaatgctgaccaatacacagctgctaacaataagggtattgtgcttatgtaa

SEQ ID NO: 246471 - DNA, 201 bp, Homo sapiens
cttaccctgtttgtcaataaggaaagcacaagagcaggtgagggcagccaagagacttggcagtggatttcaggcctgagaaagctgcttaatttcaaggwtaacctgaaggactctgcccttgagactggcccctggcctcacctgaagacagaggccatcagacatcccagcagcggaagcctggacagtctgaataaa

SEQ ID NO: 246472 - DNA, 201 bp, Homo sapiens
tctgaggtaatctcatattgttgaacgtggagaaatcctgaaagagatatggggaaggaataaattgaaaatgagagtgttaaggaaatggggaaatactrtgggagttggcagctagaaacacaagttaggaaaggaaagagtgggaaattcagagaaagtgaagaatcagtaagcaagagtttgactaaatattccgaa

SEQ ID NO: 246473 - DNA, 201 bp, Homo sapiens
ttgcaagcattgggtgaagaagctaagcctctgggcctcacaaccaaagcccaggcttgccgcaggctacagaaacagttttcagaaagtacccagctccwgacaaagagtgaccatttaaacagtatgtggagaatgttgttaattctgactccagggttgtttttgagtcacccacagggcatcagtctttgtaagtat

SEQ ID NO: 246474 - DNA, 201 bp, Homo sapiens
caagtgttgtttttattcccagacttatatattcacattcactcatttattaaacatgcttttgctaagttactggtagacgtaattctaggtgctaaagwtattgcagagaacagtcaccttggtcacaggcctcagggtactaacattctagaggagagagatatccatcaaaaatataaaagtatccactagtgataa

SEQ ID NO: 246475 - DNA, 201 bp, Homo sapiens
aactatactattatgaaagaatgaaatagtactgtggtggagattaacagaggaggggttgcatgctgtaaatgggcttgtcagggaaggtttttttttgrggggggtaacatttaagagacctgaaggatgacaaggagccagccatgtaatgagcaaggggagaagtgattgaggcagagagaataccatgtgcaaagg

SEQ ID NO: 246476 - DNA, 201 bp, Homo sapiens
ccccatctgctcggcttccctgctcaccttaacccttcaagccactctgctacgtttagaatgaagatgagatcctcaaagcatcatttctataatagttyaggagaagtttatgggcaaagtctccttttttctgtcatgaatgaatcattttactttagggtagccattggccctgaatatgaaaaaagaggttgcata

SEQ ID NO: 246477 - DNA, 201 bp, Homo sapiens
aaaagttccaggttttatagtttgtttcttaaaaatatatgattaaataattatcttctcttttaaaaaatttgttttttgctgacttcttactttgtgayttgaaatgtatgttacagtcttcttttgtgcttgaataacaatggtttgaaaaggaacaaaaaggcttctaaagatggtatttcaatttgtccaacagtg

SEQ ID NO: 246478 - DNA, 201 bp, Homo sapiens
gataattcatagagttgttatatgaattaaacaaataattgacaaaagtctaacagagtgtctaatacacaataacttgataaatgttgtcattgttattytagatacgggaatttccagtatcttgtttagaagggatgagattcattagagagatgagaatgagaagagagaggaccaaatatggactgttggggaatg

SEQ ID NO: 246479 - DNA, 201 bp, Homo sapiens
ttactttcaaattttcctttataatggagtagagcaatgtaagtgttcaggctattagccacaaagctcaattcagttagttaacatttattgagctcttkgtattataggtgccatgtgaggttcccaaaccacaaagcttgttcatcaaataataataataacaattatttcttttggtttaaaatggaaacactgacc

SEQ ID NO: 246480 - DNA, 201 bp, Homo sapiens
ggagactgaggcaggagaatggcttcaacccagcaggtggaggttgcagtgagccgagattgcttcactgaactccagtctgggcaatagagtgagacccygtctcaaaaaaaaaaaagtcctggtgcggtggcttacacctgtaatctcagcactttgggaggctgaggcaagtggatcacgaggtcaggagatatcaag

SEQ ID NO: 246481 - DNA, 201 bp, Homo sapiens
tatgagctactgtgcctggccagcctgcagtttattttctttagtgcttgtagtagtgtttttttttttttttttgagacagtctcactctgttgcccagkctggagtgcagtagtgagaatttggctcactgcagcctccaccttctgggctcaagcagtcctccttcttcaacctcctgtgtagctgggactacaggca

SEQ ID NO: 246482 - DNA, 201 bp, Homo sapiens
gcactgggaatgcggctggcctgagagccaaactcacaaaatgctgcagtgcagggaagatacacacacacatacacacacacacacttgtaaccacacayccctgtatattagatatatttttataataatgaagctatataagttacagcatgtgttgagattcagacttgctagtaggttgtgtagttcagaccaaaa

SEQ ID NO: 246483 - DNA, 201 bp, Homo sapiens
tgccagtttatttctattattatctgtggtctatgatataaggaagttaggtagtaaacacttgggctttgtaagtttcttctgctcctaaccaaagattyctagcaaaatcattagcagaagtgttcttctagccaccacatttaggtcattgtctttaatttcagaccaaaagattgtctagaaaagtttgagggcagt

SEQ ID NO: 246484 - DNA, 201 bp, Homo sapiens
agggcagtgtgtatttggattggcacatgcatcctttgagcctaaatataagaagagaatccagagaaatatcatcattcctgtcaaggaaaaaagtggtrtgagggggcctcattccttaccccttttcagattgaattcatctcatgaaattgccatgttcttgtttagcaaaaacaacaggagcatagaggaacacgg

SEQ ID NO: 246485 - DNA, 201 bp, Homo sapiens
atgaaatctgtgtcttttgtgacaaactctgggtagtcacaacatccaaaagcttgccctgtggagaccaactgatgccagccagaggacatcggactacyttttcctcttgctaggaattattttagtcctggagctaagagggtggccacctctttttcagggaatcccatacagaatgagatagaactttcaggcccc

SEQ ID NO: 246486 - DNA, 201 bp, Homo sapiens
gtgggaggatcacttgagcccagcagttcaagaccggcctgggcaacatagtgagaccttgtcaccaaaaaacaaaaaattaaaaaaatttaattagctamtggtggtaatgcatgtctgcagtcctagctactcaggaaattgaggcaagaggattgcttgaacccagggatctgaggctgcagtgagctatgattgccc

SEQ ID NO: 246487 - DNA, 201 bp, Homo sapiens
gtgttataggatgttcttagtgtcatatattcaatgtaacacttttgattagcaggaattacttattatctcagctgtgaggttggccttaccatagttayttggcttaaactggcaatcacgtctgatttcaattatgttaatgtaaggtaaagatattcatagactagaaattaagagtatactagcagaaacaattcc

SEQ ID NO: 246488 - DNA, 201 bp, Homo sapiens
aattattagattctgttttaagtgtctttcagaacgcatatactgtatcaagtgctcagtcaggccctgtaacatttaattagtaatctcgtgaggtagatttttttttgagacggagtcctactctgttgcccgggctggagtgcagtggcgcaatctctgtcgcccgggctggggtgcaatggcgcagtctcggctcac

SEQ ID NO: 246489 - DNA, 201 bp, Homo sapiens
attattcaaataagtaaagagccatattaagcaattatctgtggaaataaccaaaagaaaaatataattaatttctataataaatgaaaaataagctgagrtaagtatacaggagtggtattcaaaataccttaacaataattaatcataccccctcactaaaaataatagaatgctggccaaggcattggaatggtgtca

SEQ ID NO: 246490 - DNA, 201 bp, Homo sapiens
tggctcatgcctgtagtctcagcactttgggaggccgaggtgggcgaatcgtgaggtcaggagatcgagaccatcctggctaacatggtgaaacccccgtytctaccgaaaatacaaaaaaaaaaaaaaaaaaaaattagccgagcgtggtagtgggcccttgtagtcccagctactcgggaggctgaggcagaagaatgg

SEQ ID NO: 246491 - DNA, 201 bp, Homo sapiens
ccaaaagaaaaatataattaatttctataataaatgaaaaataagctgaggtaagtatacaggagtggtattcaaaataccttaacaataattaatcataccccctcactaaaaataatagaatgctggccaaggcattggaatggtgtcactgaggctgcatcctgaattggatgttagccttaatgttttggatcatta

SEQ ID NO: 246492 - DNA, 201 bp, Homo sapiens
tgactgcttaccagtgggagatgggacctaactaagtggtaaaaaaatgcttccttgagaagtctccagcgctgatacttgtaatcactcttaggactgtrtactcactgatacttgtcacctagtaagactgtgcactaactttgagctgtggttcatccactgcaggtccttctgaacagttctcagagatctccgacc

SEQ ID NO: 246493 - DNA, 201 bp, Homo sapiens
ccccaccccttttctagaaaattctgaataacctactccttaaatagcatataacgaagactgtgtataaatatagctagccagcaatccataaggactgmtgctgctgctgctgctgctgctctgggcagctctgcctatgaaagaaccctgctctggggagcagccactttgccatacactgttgctctaataaacttg

SEQ ID NO: 246494 - DNA, 201 bp, Homo sapiens
aggcccctcacagtggcttacgcctgtaatcccagcactttgggaggctgaggtgggcggatcgcttgaggccaggagttcaagaccagcctggtcaatayggtgaaacctcatctctactaaaaatacaaaaatgagccgagcctggtggtgcacatctgtaatcccagctactcaggaggctgaggcacgaggattgct

SEQ ID NO: 246495 - DNA, 201 bp, Homo sapiens
ctccccagtgtctctctctaggcctgcacccttccctagctccagggcctgcatcacatttccacacagacaccaaaagcatatagaaaactcaattcatrtagcatgtggcaaactcaatccaaaatagaatgctgactttccttcaaaaaccatttctcccccagtattctcccattgcagtaactagcatcatcttta

SEQ ID NO: 246496 - DNA, 201 bp, Homo sapiens
tgagtgtttgtctgggaattatcagttgtgtagaaaattgtttggattattccttctgtttctctccagtccctaccctctcctgtccctctcccaatgcyccccatcacatcatgcataaacttttctccatattctcttaacccttttggaaaagaggcattttaaccacattaggggacatcatttggtatctaactt

SEQ ID NO: 246497 - DNA, 201 bp, Homo sapiens
taacttccatttcccatgtagaaaaccatctgaagttattaaattaagaaacattttaaactttatgtcagtttccatgagaacattaattagctaatatyaatcattgaaaacaaaacaaggccgggtgcagtggctcatgcctgtaatcccagcactttgggaggccaaggcaggaggatcacttgaggttaggagcct

SEQ ID NO: 246498 - DNA, 201 bp, Homo sapiens
atcatgggcaaatcttttgctggcctcccagaaacaagggcgtgccaattataactttaggcctgcaatgtaagtctagctcctaaatctaaagtctgttrgattccacaccgatggtgtagattacaagcttatctttccaggtgcagaacaaagataagaggagaccaattatttccacctacccagagaaacttgcat

SEQ ID NO: 246499 - DNA, 201 bp, Homo sapiens
atcttttgctggcctcccagaaacaagggcgtgccaattataactttaggcctgcaatgtaagtctagctcctaaatctaaagtctgttggattccacacygatggtgtagattacaagcttatctttccaggtgcagaacaaagataagaggagaccaattatttccacctacccagagaaacttgcataatttacactt

SEQ ID NO: 246500 - DNA, 201 bp, Homo sapiens
gtattcaaaataccttaacaataattaatcataccccctcactaaaaataatagaatgctggccaaggcattggaatggtgtcactgaggctgcatcctgwattggatgttagccttaatgttttggatcattaagaatttcagtgggatcccaggttgggcacaggtgatgcaggacagcagttatttactaattaatat

SEQ ID NO: 246501 - DNA, 201 bp, Homo sapiens
aagcacagacaagccgcttattaagtggtaggtgagtgtattgctggatttgggcattataagaggaacttgtgaactcaattgatgagctgggtggggarcatgttcctgactttaacatattgcttgaccctggtgagctgccagtaaattcctgtggaattctgttgaatactgaagcagggaggttttcctgccctg

SEQ ID NO: 246502 - DNA, 201 bp, Homo sapiens
agtcctgggcagatatgaaagaagagaatactcattacaatattgtatgcaaatcctaaggaggtatctgagagtttcatttctaataaggaagaccagtktgtagcacactaacccttccagcaagaacagtaagaaaaactggataagttttcaaaaatctgttcaaaatcaccagggaactaccaagagagttagggc

SEQ ID NO: 246503 - DNA, 201 bp, Homo sapiens
ttccacctctgtcagcaaaggcaaagtgagaagcctagacttacatttctacctggcagtaatgatgcccatccccgcatcaaaagtggagacccatgggragaaggcacttcctcccctgcccggtggtaacaggcatgcctccccttctttgctggcgaggtgttagagaccaggggggaaagcctggactgttatctt

SEQ ID NO: 246504 - DNA, 201 bp, Homo sapiens
ttaaggaaatgtatatatactggacagcctgaaaactcttgggaaaaatagccacagctgtgtctatggctcgtgtttttcctggatgtaccctaaagctrgcttaataaacctccatgattgagactttttcctcagtgcctcatttccgttatctgcagaaactggaaatttggtggataacactgatgactatcaaag

SEQ ID NO: 246505 - DNA, 201 bp, Homo sapiens
aaagtacaatgcctgtatattttctaacttgatggacaggtttttttcttctacaatgagatgaagtgaaattactttcataatataacgttctctttatragtatagataaactagctgttctattttatttatttactttttttcctggtaggtggcgtgtttgtctcacatagctgcaaattatcttattggtcaaaa

SEQ ID NO: 246506 - DNA, 201 bp, Homo sapiens
tcctcaaaattctattccatacacatcttcagattcttactgctattcaccatattttgttattccattgtaaattgtcattcctaaaattgtctaagaartactcagaggaatgagtgatgggagtttcagttggtgctttctggagagaagacttgtctaatagaatgaatagttataatcaggagagttctaggagag

SEQ ID NO: 246507 - DNA, 201 bp, Homo sapiens
cctccccttctttgctggcgaggtgttagagaccaggggggaaagcctggactgttatcttccagcagtaataagccactcactctaccacctgctgtatmcatgaaagccacatgggtaggagcaagaaggtccctgataccaccagagacccagggggaccctgaagttccacccctgcccagtagtattgaggagtca

SEQ ID NO: 246508 - DNA, 201 bp, Homo sapiens
aatgaggacatttagatggtaaatgacttctgattttacacatgctggccaaaactcttcctttaatttcagacttgcatagctaaagacccactgacatytctctttggatatttcataggcatctcaaacttggcgtgtccaaaaaaataatccttggcttgtgccaaacttgtccatgcaatccattcaatcttccct

SEQ ID NO: 246509 - DNA, 201 bp, Homo sapiens
gaaagccacatgggtaggagcaagaaggtccctgataccaccagagacccagggggaccctgaagttccacccctgcccagtagtattgaggagtcattcyccctgcagcagggtatcgtggagaccaaatgggggcctgggcttccacctgcagcttgccataatgaggcaggaccccttccccggccagcatgcagtca

SEQ ID NO: 246510 - DNA, 201 bp, Homo sapiens
aaacttggcgtgtccaaaaaaataatccttggcttgtgccaaacttgtccatgcaatccattcaatcttccctatctggtaaatgaacccagaaactcagkattcttctttgatccttttctttttctcctgaactaccctggcccatgtattaatcagtgtgtcctctcattctatcactaggatacctctcaaaaacac

SEQ ID NO: 246511 - DNA, 201 bp, Homo sapiens
agggacacaggtaccaatggagagaggtcctaatggccaaaactggaataatttgatcaacaacaaaaaagtggtattgaattataaccaaaaaagtattaaaaaaaaaaaaacacatgaccatgctgatttaaataaatgattgaataaataaataaataaagggagacaaatgtgtgctaaattctaaataattatgta

SEQ ID NO: 246512 - DNA, 201 bp, Homo sapiens
gcttcctaagacagaagattgaaatgagatccagagtctcataacactcaaaatgtccaggaatacaattgtaaatcagtcttcatatcaagaaaatctcmgcttgaatgggagaagaaaaatcaatggatgccaacgatgagactgcacagacgttggaattacctggcaaaagttttaaggcagccatcatataaaagc

SEQ ID NO: 246513 - DNA, 201 bp, Homo sapiens
attatccagtctcgaatatttcttcatagcagtgtgagaatggactaatatagctttgagtgtattctaagtacttagtgagccatgatacagaggagagwtttcttaaaatgtcttttctctgaaggcctaactcagatcaaagaaataattccaacagataatagaataaataacagtatggactacagaaattatttg

SEQ ID NO: 246514 - DNA, 201 bp, Homo sapiens
gaaaaagcatttgctgtttatatagaatgtatcttttcccttttcaattaaaaaaattaaagttgttatgataaaggtaagaccactggattaaaattagygtaacacaaatttgtcttcatcagatttcaaaagaaccattactgtaagctctatctttgtagcactttactgtcaatgcaatagagacaaataattttg

SEQ ID NO: 246515 - DNA, 201 bp, Homo sapiens
tgcattgtatcttttgaaaattgaagtcatgtacacaaaccactttcaagttaggagagacattaaaaataattaggtcctgcaatatttctctagaaccrttcctttcaggatcttggcacgtgctacatcattaatgcatagccacctgctttgggatcaggtgctgcaaattttcctctatttgtttctggactgaat

SEQ ID NO: 246516 - DNA, 201 bp, Homo sapiens
cagtgaagaaatactaggtttcaatttgctggatcctattacatataatgtgactgagcagtaataagtcagggagcccaaatggctgattgatgtttaasctgtacaactgtcatctctgcagaaggtccaaacagttacttcaaaactttaactcattccaaagtctacttctgtttaacaaatttaattaatgaatca

SEQ ID NO: 246517 - DNA, 201 bp, Homo sapiens
cgcagataatatattttatagatttcagatatggattgaatgatgcaacattataagtatcaatgagaaagaaaaaatgccactagtctaactgtgatatrccatgaattgtaatatataactagattttaaagatgttaaaatgcgaaagaaaaatgtgccttttgggatcaacaaagtatagtagaaaactagaaaaaa

SEQ ID NO: 246518 - DNA, 201 bp, Homo sapiens
aacccatctctactaaaaatacaaaaattagccgggcgtggtggcatgtgcctgtaggccgaactactcgggaggctgagacaggagaattgcttgaaccyggggggcagaggttgcagtgagctgagattgtgccacttcactccagcctgggtaacagagtgagagtctgtctcaaataaataaataagtaaaataaat

SEQ ID NO: 246519 - DNA, 201 bp, Homo sapiens
tggtagctggactatgatagctattactactactgtcttgcttcaggtaattcaagtggagtaaagtcacatgacattgacttcaggaggcatatattgcytcaagcagttcttcttttgatagacgggttttagattaaaactgtttttaattaatatcaaaatggaacagagttggagagagcaatgagtaagggtcag

SEQ ID NO: 246520 - DNA, 201 bp, Homo sapiens
taatagcacaataatgaaaagttattttctattttaaatgaaagatatgtctttaataaactgataagattgacacagtaaagggagaatacaaatgaaartgcttttggaataaaaatagaaactgtgctcttgattttggtcatttgtatcaaatcatatttcatgcaaagcaataagcattctgatataaaaactagc

SEQ ID NO: 246521 - DNA, 201 bp, Homo sapiens
gattaataacaaatcagttttctatttgtgtctcatatgtgtattaagactctaacctctgcaaccaaatccaacaaaatcttgtgaaaaatttcagaaayaatgtttgagaagaaacccgggacttaaaaatgaacaagtatgcagtgtaagctgaccctgagtgtcacattttaacatctgtttttcatgttgtgatac

SEQ ID NO: 246522 - DNA, 201 bp, Homo sapiens
tccataggtaacagggcagtaacttgaggctgatggattggcatgctttgtctatataatgtaattcaaataaagtcataacattttggctatggcttatktgtcaaacatttatacattttttttgtctgataaatgaactgctaggctttctgactgtttaataatagtccaataaaaagggagcaaaatagcttttga

SEQ ID NO: 246523 - DNA, 201 bp, Homo sapiens; identical to SEQ ID NO: 47944

SEQ ID NO: 246524 - DNA, 201 bp, Homo sapiens
ttgatgagaaggatatttcaagggatctccaatttgtcttactcccttgttctgattccgtattgaccagcaacctattaattgccatgaagaaaatatgytgatgaaatatgctggacttgtagctatctggtccatgtgacaatggtttctgatgcaaacaaagtctcttcttgaaataatgcttccatgtagttgact

SEQ ID NO: 246525 - DNA, 201 bp, Homo sapiens; identical to SEQ ID NO: 47945

SEQ ID NO: 246526 - DNA, 201 bp, Homo sapiens
aaggcttttaaaagtacaaattcctgtgctggagattctattcagtagatcaggcacagtccagctatttgtattatttaagaacactccttagatagttmtaatgcatatccatatttaggacgcattgtcttagactatctccatacaacattcatatatgccttgttttagctgatttttaaagccataattagattt

SEQ ID NO: 246527 - DNA, 201 bp, Homo sapiens
tagctgggattgcaggcatgctccaccacgcctggctaattttttgtatgtttagtagagacggagtttctccatgttggttaggctggtctcgaactccygacctcaggtgatccacctgcctcagcctcccaaagtgttgggattacaggtgtgagccactgtgccaggccaagttatttttattctgtgttccttttt

SEQ ID NO: 246528 - DNA, 201 bp, Homo sapiens
aatctagtgccttttaaatgtatcccacgttttgttccctaccatcttttttttcagatgatgatttcattatggatttgtgggatttttaaaaataaagwtttaatttttttcctggaaaaatgcactccttattctacttacattaatgtcctaaacgtttgccccttaccccccatgccctcaccagaccccccgccc

SEQ ID NO: 246529 - DNA, 201 bp, Homo sapiens
ccatcagttctttcagaaatatgcaaaatttgactctagatatactttttaagtatagcgcattaagaagtgatttttttcctgttccttagaataatcatatgtttatcttttcttgttttcaaacaagaagttatttgctgtaatagatcatgtgactgtataatacatatatgataatgatgataatcataacaattg

SEQ ID NO: 246530 - DNA, 201 bp, Homo sapiens
gtttgctaaatgtctcttcatctgtatctatactgtttaacctttccattgagtttttaaattaatgatttacttatttctaaaagttatgttttcacatrttattcttatagagtgattttttttcttataactttgattcttcctttttaaaacgtttatatgttggatttgataatctaatagctgaactatttaagg

SEQ ID NO: 246531 - DNA, 201 bp, Homo sapiens
tgtttagtagagacggagtttctccatgttggttaggctggtctcgaactcccgacctcaggtgatccacctgcctcagcctcccaaagtgttgggattayaggtgtgagccactgtgccaggccaagttatttttattctgtgttcctttttgtatccatctggatattaaggagtttgactagactcttgtaaggctat

SEQ ID NO: 246532 - DNA, 201 bp, Homo sapiens
tgttggtgtcccatttagtcatcaatccatgaaaacaagtgattatatgcaaaggtattcaaaagggatgagaacactgatatggtaaggagagaacttcygactgaaagctagagagtgacctggacatttctgagaagatgcttgggaggatggcaacttggtagacttcatactaacaagaagcatattagagaatta

SEQ ID NO: 246533 - DNA, 201 bp, Homo sapiens
ttaagcactggccatatatgattgtattatcacatcgggaccccgaaagctaggaggcagcttccatcatcattcctgttttataagtgaggcttagagarctaaagtaacttgtttgagattttatatcatacatagcagaccagagatttgaacccaactttttctgatatcacaccctggtcttcatcactaagctat

SEQ ID NO: 246534 - DNA, 201 bp, Homo sapiens
attatcacatcgggaccccgaaagctaggaggcagcttccatcatcattcctgttttataagtgaggcttagagaactaaagtaacttgtttgagattttrtatcatacatagcagaccagagatttgaacccaactttttctgatatcacaccctggtcttcatcactaagctatattgccttctatatcaggtgtggct

SEQ ID NO: 246535 - DNA, 201 bp, Homo sapiens
ggtctcgaactcccgacctcaggtgatccacctgcctcagcctcccaaagtgttgggattacaggtgtgagccactgtgccaggccaagttatttttattytgtgttcctttttgtatccatctggatattaaggagtttgactagactcttgtaaggctatgcttctcaactctggtgtgccattaatactacgctggtg

SEQ ID NO: 246536 - DNA, 201 bp, Homo sapiens
ttcctgttttataagtgaggcttagagaactaaagtaacttgtttgagattttatatcatacatagcagaccagagatttgaacccaactttttctgataycacaccctggtcttcatcactaagctatattgccttctatatcaggtgtggctacaggttgcatctttttatgtcttagatattgtggagaaaatatttg

SEQ ID NO: 246537 - DNA, 201 bp, Homo sapiens
agtttggagccaactgatagctccagaaatttggccctgaggcagtgcccaaaagagtggatgacagttagtgaaggtcagcccgagatgagacaaggcasgtccctgaggagaagccaggcacaatctgaaagctgaatgtccaaagagcaaggcagggtaaggccagggttgactgggatatgaacaaagtataaagtg

SEQ ID NO: 246538 - DNA, 201 bp, Homo sapiens
attttcagcagccaccgctttgatcagtcagcagccatcaacatcaaggcaagaccctccaccagtaaaaaggttatgatgtgctgatggaacagatgatwgttagcattttttagcaataaaatatttttaaattaagatgtattttttagacgtaatgctattgcacacttaataatgttcaatatagtgtaaacataa

SEQ ID NO: 246539 - DNA, 201 bp, Homo sapiens
tccatctggatattaaggagtttgactagactcttgtaaggctatgcttctcaactctggtgtgccattaatactacgctggtgaaatttttttttccaartttccatccctgaaaaacctgattcatttggtatggggtgggttctatgaattccataggtgactggggggatgcatgggtaggttaaggaagtagtgac

SEQ ID NO: 246540 - DNA, 201 bp, Homo sapiens
ggccaatgggctttctcatgtccaacctttggaccagccactgattctcagcccactttattgttatcaaacttacagggtcacctgatgaaaagcatgamccccccccaaataaatggtgggctgctttgcttagaagagctgatgcaagttgtaggtacttttaggatttagtgcttcacagtattaggtacatactct

SEQ ID NO: 246541 - DNA, 201 bp, Homo sapiens
gccaaacttgtaatatctccaaggtatgcctatatttcttggcacaaaatatagaaaaactttgcaaaaagacagaatttttttactgtagaaagtgtcamatttacattagaagacaaatgtatggtaatattaaacaacaggtttaaatatgagttgaaatgttggcttagattctctctaagatcactttcaccctca

SEQ ID NO: 246542 - DNA, 201 bp, Homo sapiens
gatgcatgggtaggttaaggaagtagtgacctagctcgttctagctttgacatcttacaattctaattgtagtacaaggaagactgtgaaagtgcagtagraatcagataaattaagtgttgtattcattcgggggcaggaaatataatctcttgcttgctggctgggattggggcttaatggaaaagatgatgttgaaat

SEQ ID NO: 246543 - DNA, 201 bp, Homo sapiens
atattaaacaacaggtttaaatatgagttgaaatgttggcttagattctctctaagatcactttcaccctcaggaattgctaatcatcataattatgggcygtccaatttagctattgttaactgaggtcccataggatagggatgaggtcccattgtctctcttattattttgtggcagagattcaaataaaataatggt

SEQ ID NO: 246544 - DNA, 201 bp, Homo sapiens
cacaatagcaatttattttattaactttcttgtgtgtatgtgtctgcacagttaatagacaattcttttttctatttcacattagaagatttgagaaatcmtatgattcttttaatgtttaattatttcttctttctcaacccaaccttcaaatcagaatggagatccagttcgcccaggagtagctatgactgatcttgc

SEQ ID NO: 246545 - DNA, 201 bp, Homo sapiens
ctgctattattattattgcacagggttgcaagaacagatttcaaatggctcatgggaatttagctttctctgagatcttgacatcactttatttgtcccgytgcagtctatgtcttcatcctagcaagtgtgaaaaagttgccaggtaataccattttaccaacctaaattcttgaagatattttatgcaaaaggttaaat

SEQ ID NO: 246546 - DNA, 201 bp, Homo sapiens
tgtaattcaaataaagtcataacattttggctatggcttatttgtcaaacatttatacattttttttgtctgataaatgaactgctaggctttctgactgkttaataatagtccaataaaaagggagcaaaatagcttttgaccttccatttaatattactaccagcagtttggagatttaggtgtatatgtaaacattta

SEQ ID NO: 246547 - DNA, 201 bp, Homo sapiens
ctgcctcggcctcccaaagtgctgggattacaggcgtgaggcagcacaccaggctgggagcacatgcaattctggtacaagtcataaacctagattctagwccccccactgccagaccttgggtaagtcacttaacctcatgtgattttagagtcacatgaccttggttaagtcacaaactccttggtcctgagtattctt

SEQ ID NO: 246548 - DNA, 201 bp, Homo sapiens
agatctccaatccctcctttagaattcaagattcagcaactctgattgaatcctcagccacacacagattctccaaccttccttactcttctgcatatgtrtatttcctagcatttatcaaactgtattatagtaataatttgatattatgtcttttcccttcccagtgatcttcttgactgtaggctcatatttatcttt

SEQ ID NO: 246549 - DNA, 201 bp, Homo sapiens
gatctccaatccctcctttagaattcaagattcagcaactctgattgaatcctcagccacacacagattctccaaccttccttactcttctgcatatgtayatttcctagcatttatcaaactgtattatagtaataatttgatattatgtcttttcccttcccagtgatcttcttgactgtaggctcatatttatctttt

SEQ ID NO: 246550 - DNA, 201 bp, Homo sapiens
acctttctttccttttctttttcttttttaactaacatcaaggttattggaaaattttgatagcttttatgtagcatattttgcttgggaatagcatactscttttgaaagcttctaaagaaagcatataaaaatatcctgtgcattttgtgtgaaagattgacaaaagtatgttttcctaaagaaagttacccaaacaac

SEQ ID NO: 246551 - DNA, 201 bp, Homo sapiens
tccatgttatacaactgtggataccaaaacctgtgtccgaccttcagaaaaataggactttctcagtctttaggaagataactagtggtaattctcactawgacttcacccccacaagcagtcttgaattaatctctgggtggggtggctctttaataactagctgccacttcttgtcccttgaaacacagggaaagaaat

SEQ ID NO: 246552 - DNA, 201 bp, Homo sapiens
tcagaatctttttgtagaaaggaaaatcctttcttagcacaagtgctacagtggctccactcactgtgggcctggaaaatgacactgtgctccaagcagaygtttgttttcatttctgacattcaaaagtcattgtcatcaatgtgtaaagatttattcttgcctacccagccaaaaagcaggacttactcttttcccttt

SEQ ID NO: 246553 - DNA, 201 bp, Homo sapiens
taggtggaaatgtgggcaggtgggtgattgcatggttggtgttcagttcaccttagctgtaggccagaagacatgcaagggaagtgggggaaaatgacccrttttgatgcagtgaaccatggttctagtcttgtttttttcattttacctgtcacacttggttgtccttttggagatgaaagattgtattattgcagcttg

SEQ ID NO: 246554 - DNA, 201 bp, Homo sapiens
tgacccattttgatgcagtgaaccatggttctagtcttgtttttttcattttacctgtcacacttggttgtccttttggagatgaaagattgtattattgmagcttgatcctcattcggtggaagtggagcatgtggtgacagacaccatgcgactgctttgagagataattgggcatattcttcctcaagccttttgggg

SEQ ID NO: 246555 - DNA, 201 bp, Homo sapiens
tgtctgattcagcaagtcttagtgggatttggaagctacatttatgtaagcaatcccaaacaattcagaacatcttgtgggggggaggtctgagatgtatyttgttagagatttgtgccttattctcataggcttgggttatttcaaaaaggatagagagaaaatgttaccctaacatcttgccaaccaggatgttgtgga

SEQ ID NO: 246556 - DNA, 201 bp, Homo sapiens
acatcttgtgggggggaggtctgagatgtatcttgttagagatttgtgccttattctcataggcttgggttatttcaaaaaggatagagagaaaatgttaycctaacatcttgccaaccaggatgttgtggatgtatcttggtaagaaactttacagtattcaaagtacttcatcttgaggggtagatttcacgtggacaa

SEQ ID NO: 246557 - DNA, 201 bp, Homo sapiens
tggatgaggatctgaccccatagaccagcttatatagctcttgtgaacaagaaaaaaaatctgcatctagtcttacattctcttctagcaaatgttaagcrtggccaccgagaaacccagtcattaaaaatgaaaataaaacaaaaactatttcctatgatgtgaatttaaagaacagactcttttttttcctgaatggaa

SEQ ID NO: 246558 - DNA, 201 bp, Homo sapiens
tggaaatttccccagtggtgtcagcactcagacacacacacacacgcacacaccacacacacacacacagtcaccttcaagttgtcttcttgctgactttrcaatgtgatcatcaccaaaatggcatttaaaaccccccaaagcctctttctatttctgggtctacatttactgtgtattctgatcccctgtcttgttcat

SEQ ID NO: 246559 - DNA, 201 bp, Homo sapiens
tttactgtgtattctgatcccctgtcttgttcattatggataagattttctgttaagattataaaagccttacggtttccacttcgtcatctttaaagccwtgtaaacaccttccccagcaaagcctagtgattgcaagtagtgagcggtagaactgaaacccaatggagatggaagaggacaacccaattctgttcaaat

SEQ ID NO: 246560 - DNA, 201 bp, Homo sapiens
tttgatggccggcgttgcacggtattgggggctgtgtgccctctgctgggcagagcagcacacgcgtccgcctctcagcgcctggcttaaagaatttcaascttttgctaacacgggggcagattttcctctcaggagtgatgctctaccagcataagacgatggccatggaaatacagccttgagttatttggggaaatt

SEQ ID NO: 246561 - DNA, 201 bp, Homo sapiens
gatctattttttgtatttatcagaaggcaaaccaccatgataaacagagagaggaggatgttttgcattttgttgcctgtttccttttgtttcttctcagygagtaaaacagttctcgaaataagcatcaatgtttttttagcctgtatttttattccttctatcatcacaggcttatttacttgcatacagaatacaaat

SEQ ID NO: 246562 - DNA, 201 bp, Homo sapiens
ttctcagcgagtaaaacagttctcgaaataagcatcaatgtttttttagcctgtatttttattccttctatcatcacaggcttatttacttgcatacagamtacaaatatttgtatatacatatatgtattattagtattgtatttattattgtagcaggttgaggaataaatgggaagtcagaaattgaagatacacaag

SEQ ID NO: 246563 - DNA, 201 bp, Homo sapiens
tctctgaaaacacaattattttctcattcaaggtttggactttaaaagcttactttttccttgagacacctttagcttgagacaaatctaggaagaacatygttttgtgattctgtagatcttttgacaaagtggatcctcctgcttcagcctccctgacaattactttattttttgtagaggcgagatcttgatatgttt

SEQ ID NO: 246564 - DNA, 201 bp, Homo sapiens; identical to SEQ ID NO: 47942

SEQ ID NO: 246565 - DNA, 201 bp, Homo sapiens
tcccgcctcggcctcccaaagtgttgagattacagacgtaatctctatgattatgcgcgcggcccactatgaatcttgaaattagttgcaggatgcaggatttttttttttttttttgagacagtctcgctctgtcgcccaggctggagtgcagtggcgcgatcttggttcaccacaacctctgcctcgcgggttcaagcg

SEQ ID NO: 246566 - DNA, 201 bp, Homo sapiens
ccttttagatcatcagccagtctactcaggggagggggcagaaaagtgagagtggtggggaccaaaattaactttattattattattatggacatggggtkgtctcactctgtcaccgaggctggagtgcggtggtgagatcacagatcactgcatcctcgacctcctgggctcaagtgatcttcccacgtcagtctccca

SEQ ID NO: 246567 - DNA, 201 bp, Homo sapiens
tttttgtctttttaatagccattctgttgtgtgtaagatgatatctcattgtggtttttaatttgtatttctctgatgattggtgatgttgaacatttttwaaaaattttactcatggcagtacacagaaattttcagggaagattaaaaggcatgaaaacatgactcttaatagacaattctagcaatatacaaactatt

SEQ ID NO: 246568 - DNA, 201 bp, Homo sapiens
gagttggtcttgttgcccaggctggagtgcaatggcgcgatctcggctcaccgcaacctctgcttcccgggttcaagcgattctcgtgcctcagcctcccragtagctgggattgcaggcatgctccaccacgcctggctaattttttgtatgtttagtagagacggagtttctccatgttggttaggctggtctcgaact

SEQ ID NO: 246569 - DNA, 201 bp, Homo sapiens
tacaaaatacctgatcagtttcctcaaagctttcagtgcataaaaaataaggaaagtatgaggaactgtcacagcgaaaaggagccaggatgactaaatayggagccaggatgactaaatacaatgtggtatcctggttgggatcttggaatagaaaaaggatatgaagtgaaaagtcaggaaatctgagtatgtgggttt

SEQ ID NO: 246570 - DNA, 201 bp, Homo sapiens
ggtttgaaacaatgaatgatagagaaaaacctgtgtgctgctcttcaaggcatgtcagatctaaataatttagccagtcattagacatgacagaatctgtcacacagagtaagtaataaaccaggagtgagggtagatgctctccctgagagttgtcagagggtcaggggagactctcagatgaagagctttgaggaaagc

SEQ ID NO: 246571 - DNA, 201 bp, Homo sapiens
ccataggaggtgataaagccagaatttgaactagatgtctctaataccaaaaattgtgctgtttcgctgtatcacctctgcctcacctatcctagtcactygttaataatgtctcagtaaaccctattctgtgtctgttatgtctcaaggctatgctagatgctgagcagagaaagggcttgatacattgccataagtggt

SEQ ID NO: 246572 - DNA, 201 bp, Homo sapiens
ttggatataaaatgcatcctgaataggagtgaagattaccatgtgacatttgtttttcctgccaccagctgtttagatttagtttcaccattcaacaaatkcaacatttgatggttttcactcatcaaagaactaaatcagcagtttccctacaaattggtaaaagctagtcctttcatgatctgaaatcccgtgcctgga

SEQ ID NO: 246573 - DNA, 201 bp, Homo sapiens
ggggaggaaaaaagagtaatcttacagcagagaaaactgataaacactacctcagccaggtgatcaagattgattgttgacactgtgtatctttgatatgrtatgttgaaattggtgctgttcttttatggtctttcttttaaaacctcataactccagtctaattatgagtaaaacatcacaaaaatcccagtcgaggaa

SEQ ID NO: 246574 - DNA, 201 bp, Homo sapiens
ttgttgttttcctggtcagttttctgaactaaatctgtaaagtttatattctttgttgtatgtgaccactgagtgtcttctcaattagcttggtagtcagmtaataatttgacagagatttcctgtcttcaagtatttgctgaagggctctgtctgtgctgaggcttgccttccatgctcagccagtccattgactcttct

SEQ ID NO: 246575 - DNA, 201 bp, Homo sapiens
ccatttcctagtcactcaacatgaagacatactagatagacatgaaaaaggaatatggagttacccgaccagtttctttcttctgacttgcttgctgttcyatgcctgagtaagaagaaaaagaatgttatgtatctgtttccatacagataatgtaaaaccatattcattcattcatttgttcaaaaaagatttgaatgt

SEQ ID NO: 246576 - DNA, 201 bp, Homo sapiens
ctgtgaagcagtagctgcttttggcaggctattcaaaataatctggcttagcattctttataatacagttagttcaggtttcttaaaaccagtttttggcytatattcctcaggaagaaaaactctgtgtcattttaccttgtgcccaagatacatgataactgccttcttgaataacagcaggctttctaggctttcttc

SEQ ID NO: 246577 - DNA, 201 bp, Homo sapiens
cctccagaagcaggaccataactttctaccccttaagtataggcttatgtagtgacattcttccaaagagtactgtatggaaagggggaggaaaaaagagyaatcttacagcagagaaaactgataaacactacctcagccaggtgatcaagattgattgttgacactgtgtatctttgatatgatatgttgaaattggtg

SEQ ID NO: 246578 - DNA, 201 bp, Homo sapiens
tctatgcctgagtaagaagaaaaagaatgttatgtatctgtttccatacagataatgtaaaaccatattcattcattcatttgttcaaaaaagatttgaakgtcaagtatatgtcagtcacacaagtagttgaaaatatgatttatttttcactacatcttcaaaatagagatttaaagtcttccatttagaatttttaag

SEQ ID NO: 246579 - DNA, 201 bp, Homo sapiens
ctagcctggatctggggcaggaaatcagtatataatgttgctttcaaggttactctagaattacctaattcaaagcaagggcttatatttagcaatgagcyctcaacatggtttgttccatgtaaaaaatgtcctgccaatgccaaattggtagtaggtgaagttggagactccagggctcatctaccatttgtggcattg

SEQ ID NO: 246580 - DNA, 201 bp, Homo sapiens
tgactccagctgctttgttgagaatacactgaaggaaagcctgcaggcagggagagctggtagtgatatttcccttgacctctttgcaagacttgtgaagrggtggctcatttactcggcccgcagctctaaacccatcacgggaaggggagtactcaggtgagtgggtgcaggaaccagggcaaatcaacactggaacca

SEQ ID NO: 246581 - DNA, 201 bp, Homo sapiens
gaggggggaaagatggcggaggtttcctgggagaaactctgacaaataaatccttattccttggcagttcattattgatttcccccatatagcgaacaccytgtctcctgatcttgatctgtcttaaagtgccttccatgtccagattaagatcctgtccccttgaatgttctctctccttactgcctctctggttctggg

SEQ ID NO: 246582 - DNA, 201 bp, Homo sapiens
gcactagggatatagcagtaaaatacagtcaagaattcctgccctcctgaattttcatttggtaaccattgcagactttctagaagacatacttctttttkgtagtggttgtttttgaactattacttaacacatttgtttcggtgagcctaagaagttagttttccatatttttcataataaccacttaaaaaatttttt

SEQ ID NO: 246583 - DNA, 201 bp, Homo sapiens
cagggaaaatataaacggtgcccttgggctgcttggctcggtcctgctaatacagagggtccagggaagaacatgaagcaggggaatgacgtggttggatytgaacacaggagagtccattcagatagtattttgttttgtttttgagacggagtcttgctgtgttgcccaggctggagtgcaatcgcatgatcttggctc

SEQ ID NO: 246584 - DNA, 201 bp, Homo sapiens
caagcaagaatcctagcaatggcccacatataatataacttcttcttccccacatataatataactctattatggctttcccaacataaagctcaaatgcytccaattctctgtgaccatactagttcaaggccccgttatgcttcacttgggactcctcatagcctccttattagtctttccacttctacccttttctat

SEQ ID NO: 246585 - DNA, 201 bp, Homo sapiens
gtcacacagaaaactctgccaactcagagaatccatgtgcattttttttttgttatgctgtatttttgtccaattgactatttttcctccttacacttttwtgttactttggtccctgcaaaaaaatagaatggttggcagacatttaagtgatgagttcttgatcaacaaatgaagagtaataagaaaaatgtttgcctc

SEQ ID NO: 246586 - DNA, 201 bp, Homo sapiens
attagtctttccacttctacccttttctatctattatctattttctatctgtttttcagaaagcagccacttttgtaaaaatgtaatttaaatagctgggttttttttctttgtttaaaacccatcaatgccttctcagtgaaattaaaacaaaatcaaaatgcacttcttcctgtgtcctacaagaccaagtgctgcagg

SEQ ID NO: 246587 - DNA, 201 bp, Homo sapiens
attggccattgactgtgtaccattgtcctgcagatacagagctgaaagatgaagcctgggcttttaaggagctcatggtctaattaggaaaataaacacasaaagcattgatttaagtagagtgtgggaattacctgggtaatcatatgcacagtggattggggagcccagagaaggagcaactcctttaatctgggaaat

SEQ ID NO: 246588 - DNA, 201 bp, Homo sapiens
gtaccatatcatttttctttttggtgtttatctcagtggatcattctgtatttgtttagtgctttaattcactaaactcgaggaggcaggtgcaattttgytcagcatctagtaagtacagggcctcccactcaatgaatatctgttgcatgaatgaatcagggtgagcaggatgctgctgctgattcagaaatcaggcat

SEQ ID NO: 246589 - DNA, 201 bp, Homo sapiens
aaaagatagttggtgggtgggggagtggggtttccctatgttgctttggctgttcttgaactcctggcctcagataatcctcctgctccaacctcccgaartgctgggattatagctctgagtcactatgcctggcttctatagcttgaaggataaagttcaaaccattttacctgaacacatgcacctcccaccttgtca

SEQ ID NO: 246590 - DNA, 201 bp, Homo sapiens
aaggatccacgatgtcaggttctacaaaacagaaaagagcagtggtagctggaagtgaggactttgaatgaactagagaacctgtatcgtggtcatacaayataagaagatctgaatttgagatcctagtctttcagtgatcagccttgagcttcaggttctcatatatcatacgtgtaaaaatacctacatcacaaagag

SEQ ID NO: 246591 - DNA, 201 bp, Homo sapiens
ttttgtatttttagtggagacggggtttcgccatgttggccacgctgatcttgatctcctgacctcgtgattcacccaccttggcctcccaaagtgctggrattacaggcctgagccactgcgcccggccatgaagtagattttataatccccattttctagatgaaggacctaacgtgaaagaagataaatgtctggctg

SEQ ID NO: 246592 - DNA, 201 bp, Homo sapiens
ggctgatcttgaactcgtgagttcaagcagtcctcctgtcttggcctcccaaagtgatgggattataggcatgagccactgtgcctggccagttattttattttatttgtttacatcctcaaaaagaaaacctttattctttctgctcaccagcttaagctatggtctggtatctctcctatcctttttacacaagctctg

SEQ ID NO: 246593 - DNA, 201 bp, Homo sapiens
ttttcttataaaatgggagttgcaatgtgactttatttgctttcattcattgcctgttcatacaccataatgaccaggtgatttaattatagaaatcaacrccttcctatgacacttagaataatatctcagatccttacccaggcctgcaaggacccatatgatatggcccttttacactttcctgacctcatcttgtac

SEQ ID NO: 246594 - DNA, 201 bp, Homo sapiens
acccaggcctgcaaggacccatatgatatggcccttttacactttcctgacctcatcttgtactactgtctcttttacttactaggttccaactccaatgkctctctttctgttcttcactgtatgtaagctttttagcatattaaagtcttctaactggttgatctcactgcctagaaagatttcttctaggctgggcac

SEQ ID NO: 246595 - DNA, 201 bp, Homo sapiens
cttaaactcatgatttttccatgtctactgctaccaaccttgtctgagctatctatcatcaaattatgcctggacctttacaatatccctaacagtcccckttctctcttgcctcttcttagttcattctttgaatataattacaaatgtgggggatccctatgggttttaaatagaagaatgacgatacaatttgtgatt

SEQ ID NO: 246596 - DNA, 201 bp, Homo sapiens
tgggggatccctatgggttttaaatagaagaatgacgatacaatttgtgattgttctgaaatgatcattctgcaagatgtgcaaagaatggctccttaccrttactacaatgactggcatgctgtggcctctgtctacctttctctttcatttcgtttcagtctctttctcaccatggtttagttatatttgtcttctttc

SEQ ID NO: 246597 - DNA, 201 bp, Homo sapiens
ggagggatagaagaacatataaataatattgtagcatggaggaaggcaatgttgttggagtaaagttctgttattaaccacctgtatgtcctcacataagttttttttttttttttgagttggtcttgttgcccaggctggagtgcaatggcgcgatctcggctcaccgcaacctctgcttcccgggttcaagcgattctc

SEQ ID NO: 246598 - DNA, 201 bp, Homo sapiens
gagggatagaagaacatataaataatattgtagcatggaggaaggcaatgttgttggagtaaagttctgttattaaccacctgtatgtcctcacataagttttttttttttttttgagttggtcttgttgcccaggctggagtgcaatggcgcgatctcggctcaccgcaacctctgcttcccgggttcaagcgattctcg

SEQ ID NO: 246599 - DNA, 201 bp, Homo sapiens
cacttgttgcaacatccctttctttaaacaaccagttaatttattttaggacaagaatttactatataacattcgtttttacataaattctcctccccacttttttttttttttctcaaagataataaccgttcttttccaaagtgaacttccttcatgtctgtggactagtctaaggccacaagattagaagttaggata

SEQ ID NO: 246600 - DNA, 201 bp, Homo sapiens
ccatgttgctctctttcttaaaaaatagaattcttttttccccaactttgtctttgagttgttactgacaaatcacactttggtttttttgtttgtttgtttttgtttttgtttttgttttttttgagactctgttgctgaggctggagcgctgtggcgtgatcaccgctaactgcagccttgacctccccaggctcaggt

SEQ ID NO: 246601 - DNA, 201 bp, Homo sapiens
catgttgctctctttcttaaaaaatagaattcttttttccccaactttgtctttgagttgttactgacaaatcacactttggtttttttgtttgtttgtttttgtttttgtttttgttttttttgagactctgttgctgaggctggagcgctgtggcgtgatcaccgctaactgcagccttgacctccccaggctcaggtg

SEQ ID NO: 246602 - DNA, 201 bp, Homo sapiens
ttcttggagctgatacctctgctgaccttgaagaaactgggcatgtcttaagtattggtgatggtattgtccatgtacatgggctgaggaatgttccaagsagaagaaatggtagagttttcttcaggcttaaaggatatgtccttgaacttcgaaactgacaatgttggcattgtagtgtttgaaaataataaagtaagg

SEQ ID NO: 246603 - DNA, 201 bp, Homo sapiens
aaccgccacagttgaacgctgctgctccacggtggagtcaccgcacccccgccagcatcatggtgttctacttcaccagcagcagcgttaattcatctgcytgcgctatttacatgggaaaggataaatatgaaatagagacagggtttcaccattttggccagaatggtctcaatctcctgacctcgtgatccgcccacc

SEQ ID NO: 246604 - DNA, 201 bp, Homo sapiens
gtcagctatggcctcagatgctgccctacttcagtacctggctccttactctgactgttccatgggagagtattttagagacgatggcaaatatactttgrtcatctatgacgacttatccaaacaggctgtcgcttactgtcagatgtctctgttgctccaccgaaccccctggtcgtaaggcctgtcctggtgatgtgt

SEQ ID NO: 246605 - DNA, 201 bp, Homo sapiens
acagagcaaaaattgtctcaaaaaaaagaatgttatcatccaccttctgaactcttttatctctaccaatgagagttacagaactcaaaggagaatattaygcttagtatggaattttccatttatgctggaggttgcaaacttttttggtgaaaaatcagaccctggcgatgaccttaagcagtaggatgtaaataactc

SEQ ID NO: 246606 - DNA, 201 bp, Homo sapiens
tgaaatgtgggacaccataatgtgagcagagcaaaagggctactgcagaattcttagtgtccttaaaaaactggataggaatttttaatttgtgttttcctgattatcacatacgtgcatgtaatgatggttttatagacttgtagccatagctataacctataaattaacttgtgtgttggctttcaaataggtgacttt

SEQ ID NO: 246607 - DNA, 201 bp, Homo sapiens
gccacagttgaacgctgctgctccacggtggagtcaccgcacccccgccagcatcatggtgttctacttcaccagcagcagcgttaattcatctgcctgcrctatttacatgggaaaggataaatatgaaatagagacagggtttcaccattttggccagaatggtctcaatctcctgacctcgtgatccgcccacctcag

SEQ ID NO: 246608 - DNA, 201 bp, Homo sapiens
gaaatgtgggacaccataatgtgagcagagcaaaagggctactgcagaattcttagtgtccttaaaaaactggataggaatttttaatttgtgttttcctgattatcacatacgtgcatgtaatgatggttttatagacttgtagccatagctataacctataaattaacttgtgtgttggctttcaaataggtgactttt

SEQ ID NO: 246609 - DNA, 201 bp, Homo sapiens
acaaaactggaaacaattcagatgtctgtcaacaggtgaatgattaaaccactgtggtctagccatagcagtcatactgtttccactctcccgggtgactmtttcccactttcctctctctacttaacctccaacaactgggagcctccctcagtctcattcttaggtcaggtgataacctcgctttctaactcaaggaga

SEQ ID NO: 246610 - DNA, 201 bp, Homo sapiens
aaatgtgggacaccataatgtgagcagagcaaaagggctactgcagaattcttagtgtccttaaaaaactggataggaatttttaatttgtgttttcctgattatcacatacgtgcatgtaatgatggttttatagacttgtagccatagctataacctataaattaacttgtgtgttggctttcaaataggtgacttttt

SEQ ID NO: 246611 - DNA, 201 bp, Homo sapiens
aatgtgggacaccataatgtgagcagagcaaaagggctactgcagaattcttagtgtccttaaaaaactggataggaatttttaatttgtgttttcctgattatcacatacgtgcatgtaatgatggttttatagacttgtagccatagctataacctataaattaacttgtgtgttggctttcaaataggtgactttttg

SEQ ID NO: 246612 - DNA, 201 bp, Homo sapiens
aggtaatgcgttactcctctagtaaccttaaaaatccgtggaatcaatttctgctaaaagaatgcacaagactgaattaatgctgaaatgtgttataacatgtgcccaatattcgttgcattctattctgtctgatcttaatatggcagtctttgccttcattttatgtatgtgttttcttgatatgcccttggccgccgt

SEQ ID NO: 246613 - DNA, 201 bp, Homo sapiens
ataaatataacagaaggagaaacaaaaactaatgaaaatggttacctatgagggagagagaaaatagggcagaaaggatgaagatggaaatgagacctttygaaatgtacctggttttatagtttggcattggaactctttaaatgttttccataattattgctatggtttgaatgtgccccttccaaaacaggtgttgcc

SEQ ID NO: 246614 - DNA, 201 bp, Homo sapiens
taaatataacagaaggagaaacaaaaactaatgaaaatggttacctatgagggagagagaaaatagggcagaaaggatgaagatggaaatgagacctttcraaatgtacctggttttatagtttggcattggaactctttaaatgttttccataattattgctatggtttgaatgtgccccttccaaaacaggtgttgcca

SEQ ID NO: 246615 - DNA, 201 bp, Homo sapiens
gtgggttggcctacagggctcctcccttgtgaatgggattaggggcccttataaaaggacttggcagagggagggcttctcttgccttttcaccttacgakgttgcagccttcccccaactccaagtgccagtgccttcttcttggacgtccagcctccagaactgtgagcattagatttctgttctttataaattaccct

SEQ ID NO: 246616 - DNA, 201 bp, Homo sapiens
tggcagagggagggcttctcttgccttttcaccttacgaggttgcagccttcccccaactccaagtgccagtgccttcttcttggacgtccagcctccagmactgtgagcattagatttctgttctttataaattaccctgtttgtggtagtctgttatagcagtgcaaaacagactaaagcaattataaaacaaatttaa

SEQ ID NO: 246617 - DNA, 201 bp, Homo sapiens
ttcttggacgtccagcctccagaactgtgagcattagatttctgttctttataaattaccctgtttgtggtagtctgttatagcagtgcaaaacagactamagcaattataaaacaaatttaagtcaactgtttttttttcttgagatggagttttactcttgttgcccaggctggagtgtaatggcgtgatcttggctca

SEQ ID NO: 246618 - DNA, 201 bp, Homo sapiens
ctcttcggggtatgacctcacagctgcaaatgttagatgtcctgatcaacaaaccctttaaatatcacttagcaatatagaaggttttatttagagacatkaatatatatttaaagaacaaatgtaaaatccagcttttctcaatcctttgtaaattgggacttgtgagttgtaggaaaatgtttagtgatagcattaggt

SEQ ID NO: 246619 - DNA, 201 bp, Homo sapiens
tggtccatgcctatagtctcagctactcaggaggctgaggaaggaggatagtttaaatccaggagttagaggctgttagagccataccgcactccaggcakccttttaaaatctctatcagattgcttgtaaaagttttttgtaattcagaaattttctcagtgtgtatctaggttacttttcactaattgtgcttagaac

SEQ ID NO: 246620 - DNA, 201 bp, Homo sapiens
tgccttgatgtcctcctcgtgttttgacttgggcagagtgtgggagaaattgtattggtgacaccattttccacatgcacactcataattcagtcagcatytgggcttcagagggaaggatgggaaagagaaggaggagaagagaataaggcagaggaagatgagaagtcgaacggtgagagggctgttatccgaggttcg

SEQ ID NO: 246621 - DNA, 201 bp, Homo sapiens
tgatcactttttggcaccaagaaagaacgagctgtaatacacgtgatggatatgcaacaggtggagaccaaatgacctgctgtgtgaacaaaggttttttktgtgtgtgtatgtgtgtgtgtgagtcaaataaagaaacgtggtatcagaactgaaccctccccatatcataaaatagcatgcatgccagattcaaaggaa

SEQ ID NO: 246622 - DNA, 201 bp, Homo sapiens
gatgaagcatggctggcctgaatatatctggtttcgtgcggacagactctctttggctcatgtataccttcaattgcataagggagagaatatagaggacrttccaaaggaagtgctgacagactgcgcccaccttgtgaaggccaatagcactcaaggctgcaagaacaacgttaatgtggtaaatactccacggtctaa

SEQ ID NO: 246623 - DNA, 201 bp, Homo sapiens
tgcaaagatgctgtctgtgtgtgtctccgcggccgtagcccgtgacctcactcggtgggcaggactggtctccagaaatgctttgggttcatctttcattkctgcaaggaacctccatgcctctaacactcatcttcagaagactgggactgctgagatgtcctctattcttaaagagcatgttcttggagctgatacctc

SEQ ID NO: 246624 - DNA, 201 bp, Homo sapiens
ctgaccttgaagaaactgggcatgtcttaagtattggtgatggtattgtccatgtacatgggctgaggaatgttccaagcagaagaaatggtagagttttyttcaggcttaaaggatatgtccttgaacttcgaaactgacaatgttggcattgtagtgtttgaaaataataaagtaaggaaggaggtatagtgaagagga

SEQ ID NO: 246625 - DNA, 201 bp, Homo sapiens; identical to SEQ ID NO: 47960

SEQ ID NO: 246626 - DNA, 201 bp, Homo sapiens
ttgtcactgtttgttctagtaaattagtttcatttgtaaaagagttactctcatattccttatgtacaaaaatcacataaaaaagtttccataatgcattaaaaaaaaaaaaagaggagagttccggggaccaggcaaccgccacagttgaacgctgctgctccacggtggagtcaccgcacccccgccagcatcatggtg

SEQ ID NO: 246627 - DNA, 201 bp, Homo sapiens
taatgtgtgatgatggatatgtttgttttactatagtaaccttcttaatatctatatgtatcccatgacatcatgctgtgtgccttaaatatacacaatarcatttatttttttaaaaagtcaggccaggtgcagtagctcacgtctgtaatcccagcactttgggaggccgaggtgggtggatcacctaaggttaggagt

SEQ ID NO: 246628 - DNA, 201 bp, Homo sapiens
caccactgtggtgtcagctatggcctcagatgctgccctacttcagtacctggctccttactctgactgttccatgggagagtattttagagacgatggcmaatatactttggtcatctatgacgacttatccaaacaggctgtcgcttactgtcagatgtctctgttgctccaccgaaccccctggtcgtaaggcctgtc

SEQ ID NO: 246629 - DNA, 201 bp, Homo sapiens
tagcaagaccctatctcaaaaaaaaaaaaaaattaggtgggcatggtagtgcactcctatagtccccagctactgaggaggctgaggtgggaggttgaggygcagtgagctgagatcatgccactgcactccagcctgaccaacagaatgagaccctgcctcagaaaagaaaaagctacacttattaatttttagcagcac

SEQ ID NO: 246630 - DNA, 201 bp, Homo sapiens
acggtgagagggctgttatccgaggttcgcctctgcagaagtagatcaggattaagctatgtatgtatgtacgtatgcatttgtgtgtgtgtagttgttgwatttatttatttatttatttatttatttatttatttatttttccaagactgagttttgctcttgttgcccaggctggagtgcaatggcacaatctcggct

SEQ ID NO: 246631 - DNA, 201 bp, Homo sapiens
tctttcattgctgcaaggaacctccatgcctctaacactcatcttcagaagactgggactgctgagatgtcctctattcttaaagagcatgttcttggagmtgatacctctgctgaccttgaagaaactgggcatgtcttaagtattggtgatggtattgtccatgtacatgggctgaggaatgttccaagcagaagaaat

SEQ ID NO: 246632 - DNA, 201 bp, Homo sapiens
cctgccttggcctcccaaagtgttgggattacaggcatgagccactgcgcccagcctatttatttttttatgtggagacggtggagtggggagtggttgtkggggggggggtcttgttatgttgtccaggctggtctcgaactcctggactcaagcaatcctcccacctcggcctctcaaagtgctaggattacaggaatg

SEQ ID NO: 246633 - DNA, 201 bp, Homo sapiens
ctgccttggcctcccaaagtgttgggattacaggcatgagccactgcgcccagcctatttatttttttatgtggagacggtggagtggggagtggttgtgggggggggggtcttgttatgttgtccaggctggtctcgaactcctggactcaagcaatcctcccacctcggcctctcaaagtgctaggattacaggaatga

SEQ ID NO: 246634 - DNA, 201 bp, Homo sapiens
ctttcccactttcctctctctacttaacctccaacaactgggagcctccctcagtctcattcttaggtcaggtgataacctcgctttctaactcaaggagaaaaaaaaaaaaaaaaaaatcaaagcaatttggagtccgtccaaggctcggaccaccaaatctacccacctaccagcacctgtacctgtagagagataatg

SEQ ID NO: 246635 - DNA, 201 bp, Homo sapiens
agagagcagccaaaatgaatgatgcttttggtggtggctccttgactgctttgctagtcatagaaacacaggccgatgatgtgtctgcttacattccaacraatgtcatttccatcactgacagacagatcttggaaacagaattgttctacaaagatatccgctctgccattaacattgggtctgtctgtgtcttgtgtt

SEQ ID NO: 246636 - DNA, 201 bp, Homo sapiens
attacaggtaataaaaccatacagtagacaggattcatgctagatgagattttagctgctcttgctacaaaaacaaaaaaaaaagtgggtaactaatgtgwgatgatggatatgtttgttttactatagtaaccttcttaatatctatatgtatcccatgacatcatgctgtgtgccttaaatatacacaatagcatttat

SEQ ID NO: 246637 - DNA, 201 bp, Homo sapiens
ctggccaggctggtctcgaactcctgacctcaggtgatacagtctcctcggcctccctaagtgcggggattacaggcatgagccaccacacccagcctgtyaacattgtaaaaagcaatccctaaatgtagggaaaaagaggggaggagaagaattggagctgataagtttggacaatttttaaggtaattttgctcaaga

SEQ ID NO: 246638 - DNA, 201 bp, Homo sapiens
agagtattttagagacgatggcaaatatactttggtcatctatgacgacttatccaaacaggctgtcgcttactgtcagatgtctctgttgctccaccgamccccctggtcgtaaggcctgtcctggtgatgtgttttacctatactcccggttgctggagagagcagccaaaatgaatgatgcttttggtggtggctcct

SEQ ID NO: 246639 - DNA, 201 bp, Homo sapiens
ctttgggaggctgaggagggcggatcacgagttcaggagatcgagaccatcctggctaacacggtgaaaccccgtctctactaaaaatacaaaaaattagycgggcgtggtggcaggcgcctgtagtcccagctactcgggaggctgaggcaggagaatggcgtgaacccgggaggcggagcttgcagtgagctgagattg

SEQ ID NO: 246640 - DNA, 201 bp, Homo sapiens
tatctgccatttagcttggcaaaacttggatctcattgattttcagttttgtttgtatttaatttgtattcattcttccatttaatattgttttgtttttrtgaccgtgtaagagttttaagataaagttcatggaccagggacggtggctcacacctgcagtttgggaggccaaggtgagaggatcgtttgagtccagga

SEQ ID NO: 246641 - DNA, 201 bp, Homo sapiens
tctgaccaacatggcaaaactccatctctactaaaaatacaaaattagccaggtgtggtggcacatgcctcaactacttgggaggctgaggcaggagaatygcttgaacccaggaggcagaagttgctgagatgacaccattgcactccaacctgggcagcaagagcaaaactctatctcaaagaaaaaaaaaatcaatcc

SEQ ID NO: 246642 - DNA, 201 bp, Homo sapiens
agccattattatatcattctcatcatcttcattaacgtgtagataaagtaatactaagccttgtggtaaggaacacatatgaaaaaataaactataatgtrtgggaggaaattctacatttttatctattggaagtcagtcaaatttggctttcatatttacttttaaaaaatgcctggcagggtgggtgtggtggctcac

SEQ ID NO: 246643 - DNA, 201 bp, Homo sapiens
tatgacctcacagctgcaaatgttagatgtcctgatcaacaaaccctttaaatatcacttagcaatatagaaggttttatttagagacatgaatatatatwtaaagaacaaatgtaaaatccagcttttctcaatcctttgtaaattgggacttgtgagttgtaggaaaatgtttagtgatagcattaggtggaagtaaag

SEQ ID NO: 246644 - DNA, 201 bp, Homo sapiens; identical to SEQ ID NO: 47965

SEQ ID NO: 246645 - DNA, 201 bp, Homo sapiens
ggcacacagaacaagacggtgccgcctgctggccacagcaaagccacctcccccggtcgccgctgtcctgggcaaggcctggtccctgcagaaccggacayggcctgccagagccagtgtgtgtggcaggacaggggacacctgcagaggcttggcctgtggatgctgctccttactgggatggagggagaagacgcggcc

SEQ ID NO: 246646 - DNA, 201 bp, Homo sapiens
aaagaaaattacctcccagcacagagaaatggccttgaaacctgcctttctcctcttgggctcaagaaagtcttcctgggaattcataattacaggcctgycctccaacaggcttgaagtttgaatttatacaaacaacatagttcaagaagcacacagccaaaatgtgtgtgccaggacactcggggacattccggaggc

SEQ ID NO: 246647 - DNA, 201 bp, Homo sapiens
gtggggcccgtgagtgctgggccttgaccctctctgttgaggtcctgcctgtgtcactggcctggggacagctcccgcctggctgagtgccgagctaaatycagatagacaggttggtgagatggcgctcccggcgagctcacagtgtctcattaacctcataaatgcagcggacactgggctgcaggtgacagacgcgtt

SEQ ID NO: 246648 - DNA, 201 bp, Homo sapiens
gggtggccaggacacgatgacacctgcctttgcacggacacagtgtgtggctggcagggggcaccccaaccccagtttccagcaggaagctgagaaccatkaagagatcaaagagatcaactagaaaaaatatcttgaagccagtgagctcagtgataacagtctccaaccatctttaaaagagagcgggtcggccaggtg

SEQ ID NO: 246649 - DNA, 201 bp, Homo sapiens
tctgttgaggtcctgcctgtgtcactggcctggggacagctcccgcctggctgagtgccgagctaaatccagatagacaggttggtgagatggcgctcccrgcgagctcacagtgtctcattaacctcataaatgcagcggacactgggctgcaggtgacagacgcgttctctggagcaccgacagcccaggcgtgccgga

SEQ ID NO: 246650 - DNA, 201 bp, Homo sapiens; identical to SEQ ID NO: 47969

SEQ ID NO: 246651 - DNA, 201 bp, Homo sapiens; identical to SEQ ID NO: 47974

SEQ ID NO: 246652 - DNA, 201 bp, Homo sapiens; identical to SEQ ID NO: 47976

SEQ ID NO: 246653 - DNA, 201 bp, Homo sapiens; identical to SEQ ID NO: 47978

SEQ ID NO: 246654 - DNA, 201 bp, Homo sapiens; identical to SEQ ID NO: 47983

SEQ ID NO: 246655 - DNA, 201 bp, Homo sapiens
atgggaaacgtcagccactaaatgccctcaccaacagagaatggggaaaaaagagggggaaagaaaacttagagaagaggtcctggtgtgttctccccagracggggccagacccctcacgcgttctccccaggacggggccgggtcccaggtggaacttgcttttccctctggcagtgaccatgcagccgcctgggctgg

SEQ ID NO: 246656 - DNA, 201 bp, Homo sapiens
tgcatgttctaaagagatacctgtaggcacacacacacatgtgcattgtaagaactgtccgtgtgatagttttggagcacagttacctgattatcagtctrctagaacccgagtgtgctttaaagacttgaactgtgtttgtgtgatttggaaagtgtcctagagctgcgctcttatattgaggggctgggcagggtcaga

SEQ ID NO: 246657 - DNA, 201 bp, Homo sapiens
tcctggcacttctgtgtacatcatccagccccgttttcacgttcaggaagtcacgaatccacagtgtctttgaagaaagtggggaatagagttatcaaccrtcactccacggagagtctaaggcagagagaagttgggttccccttccacggttccctgcccccggggacacagttgtgggaggtctcagggcagagacgc

SEQ ID NO: 246658 - DNA, 201 bp, Homo sapiens
tggtggcatgcgcctgtaataccagctactcaggaggctgaggtgggaggatggcttgaacccggaaggcggaggttgcagtgagcttagattgtgtcatygcactccagcctgagcaatagagtgagaacttgtctcaaaaaaaaaacaaagtttcttattgattttaaaaatcttatctgtacattatttcagattttt

SEQ ID NO: 246659 - DNA, 201 bp, Homo sapiens
cacagtgtctttgaagaaagtggggaatagagttatcaaccgtcactccacggagagtctaaggcagagagaagttgggttccccttccacggttccctgyccccggggacacagttgtgggaggtctcagggcagagacgccgcacggtggggtagggggctctggtgccaataccaatgcagcccggttccctgtcctg

SEQ ID NO: 246660 - DNA, 201 bp, Homo sapiens
ataacaacagatttgttttccttttcagtccttagatttctattgacttttcttgtcgtcctgtgctggcatctccaacaagcatgggactgaggtgatgmaggcatgttggcgacagagggtcctcaccaaagggaaaccttccttgttacactgctaagtgaagtggttgttgtgggtttttttttttttttaatgttt

SEQ ID NO: 246661 - DNA, 201 bp, Homo sapiens
ctgtccccgagctgtgccctcctttctcatcatggcctttgcctttgagatgaccccacctgcgtccctgcagaaccacttccgttagctaagctgcctcrgatgaaacctaaactactccccgatgctggcagaagaatttcattgcagtcaaagcccctgtgtgaggcagcacccccaggccaccccccggaagcctgg

SEQ ID NO: 246662 - DNA, 201 bp, Homo sapiens
agagaatggggaaaaaagagggggaaagaaaacttagagaagaggtcctggtgtgttctccccaggacggggccagacccctcacgcgttctccccaggayggggccgggtcccaggtggaacttgcttttccctctggcagtgaccatgcagccgcctgggctgggtcattcaccctcccgtctcctcccacagtcgcag

SEQ ID NO: 246663 - DNA, 201 bp, Homo sapiens
ttcaccatgttggccaggctggtctcgaactcctgacctcaagtgatccacccacctcggcctcccaaagtgttggaattacaggcgtgagccaccgcgcyggccgtaaatggtgttttttatttttattgatttctaagtctttgctggtgttctgtagaaatgcagttgacttttgggtattgatttaacagctgatca

SEQ ID NO: 246664 - DNA, 201 bp, Homo sapiens
aaagcctcatgggcagagggatatagtctgtatagcactgagtctctggcatttctttaaggattgaattctattatgtatcttctggcttataaagttgyggttaggaagccagctgtcatttcaattgtccttcctgtgtcagtagtaagctttttgtctggctgcttttatagtctctttatttctggtgtttttcaa

SEQ ID NO: 246665 - DNA, 201 bp, Homo sapiens; identical to SEQ ID NO: 47979

SEQ ID NO: 246666 - DNA, 201 bp, Homo sapiens
gagtacccgctttggtcattacccctgaaggggtcccgaaggtgtctcagcaaggaggctgtggctcacctgtctcctcacctgtcaccttgaagcggctytctctggcagagctccatggcggcctcagaaacaaagtttagggacttaaaattttatgcatgtattttagaggtggggcctcactgtgttgcccaggct

SEQ ID NO: 246667 - DNA, 201 bp, Homo sapiens
ttcttcagctgtcttccaatttagcaactctatcttcatctccatctactgtgctatttaaataggtatacattttttttgagatggagtcttgctctgtygcccaggctggagtgcagtggtgcaatcttggctcactgcaacctccgcctcttgggttcaagtgattctcctgcctcagcctgaagagtagctgggatt

SEQ ID NO: 246668 - DNA, 201 bp, Homo sapiens
ctccatggcggcctcagaaacaaagtttagggacttaaaattttatgcatgtattttagaggtggggcctcactgtgttgcccaggctggactcaaactaytgggctcaagcgatcctcccaccttggcctccccagtaactgggactacaggtgctgccaccacacgtggctaagtttagtgacttttgataatccacaa

SEQ ID NO: 246669 - DNA, 201 bp, Homo sapiens
ttcacctggagtggaggggcaagtgcctgggcccagtggtggcagcttcgggagggttccatgaggctgcctcgggaagcaagggtcccggcggagctggrtgttctcctgggccccctcaggacagcagcatccacttcaggcgccgcctctctaaggagccacacctccctctcgggccaagtatggaaacgagccaca

SEQ ID NO: 246670 - DNA, 201 bp, Homo sapiens
ccgcatctttcacctggagtggaggggcaagtgcctgggcccagtggtggcagcttcgggagggttccatgaggctgcctcgggaagcaagggtcccggcrgagctggatgttctcctgggccccctcaggacagcagcatccacttcaggcgccgcctctctaaggagccacacctccctctcgggccaagtatggaaac

SEQ ID NO: 246671 - DNA, 201 bp, Homo sapiens
tgtgactgactttaggaggccacacaattcaggaagcagagtgtgccaccctggccagacataccatattttgaaaactccgtgcgttctcgttatttcastgtgaggtgcctgagtggcggggccccgatagccagtcccctgtgaccttcagaaggaggccactgctcccgtagtgggtgcctcatgcgggtggggagc

SEQ ID NO: 246672 - DNA, 201 bp, Homo sapiens; identical to SEQ ID NO: 47966

SEQ ID NO: 246673 - DNA, 201 bp, Homo sapiens
ggggtttcacccatttggccaggctggtctcaaattcctgacctcaggtgatccacctggcttggcctcgcaaagtgctgggattacaggtgtgagccacygtgcccagcctctgcgctattaatatttaacctgttattgttgttctttttcttttttctttttttttgttggtagagatggggtcttgctatgttgcca

SEQ ID NO: 246674 - DNA, 201 bp, Homo sapiens
catatcacatcacgccacccacgccactcacacgccacccatgccacccacaccacctctacccctcacgtcaccgacgccactcacatgccactcacatrccattgacacgccacccacgccactcacatgccacccatgccacccacaccacctctgcccctcacatgtcacccacgccactcacatgccactcacatg

SEQ ID NO: 246675 - DNA, 201 bp, Homo sapiens
aggagggaaggttgcccggtcaggggctccaaatacaggcaggggtttttgcaaagccggggcagcgacatggcaatcgtgatgccataggaagccgaagyctgcaaagggcacagctgggtggacgcagcacctgcggccagagactggtggctgagcatgggggtgcctggcatggaaacttgcagggcttggagctga

SEQ ID NO: 246676 - DNA, 201 bp, Homo sapiens
ttgatggcaccacgggtccagggaggcctcgccagctccctcccagagcaggaaggcgggctggccactcaccaggagcctgggagtctggcgtccttcasgaggcgctcctgaagcacctctgcctaccctgcattcgccacacgtgcccaggtacctggcgacggacagcagggagcccacaatgccagctcttcctgg

SEQ ID NO: 246677 - DNA, 201 bp, Homo sapiens
gcatctggtgctagtgacgtcccactgctggggtgagggaggttaatcacacctggagtttcgctcggtcactggcatgagaaaggaaatgtggaatcttyatggggtttatctgaagaaagattttattgacatcctaaaaacactctattttatgttgtagctctgaggaggcctccaggaaattgaatcaacatactc

SEQ ID NO: 246678 - DNA, 201 bp, Homo sapiens
agttatcaaccgtcactccacggagagtctaaggcagagagaagttgggttccccttccacggttccctgcccccggggacacagttgtgggaggtctcarggcagagacgccgcacggtggggtagggggctctggtgccaataccaatgcagcccggttccctgtcctgggcctgccagtgactttgtggtcctgggca

SEQ ID NO: 246679 - DNA, 201 bp, Homo sapiens
gctgtgcacctgtctccttgtctgttctccttcagcagtttgtgaggctgcacatgtgaaaatgccttgtcaatggcacagtggcacgtggacctgctgckctgtgtgcgtgtcagggcggccatgttgtgtgtggctgtctgcactctgagtcctggctgggccgcccggggatgatggcacttagggaagagtgactgc

SEQ ID NO: 246680 - DNA, 201 bp, Homo sapiens
ggttttgccatgttgcctaggctagtctcaaactcctgatctgcctgcctcagcctcccagagtgctgggattacaggcatgagccaccagccaataccaratttgaacagtggtcagtcctggggatggagacggggtgagggctgagcattcccttctgaccatgtacctcgtcttggtttaaaatttttacagcaagg

SEQ ID NO: 246681 - DNA, 201 bp, Homo sapiens
gtgagtgcgcggagcagcccgataccctgcatgcctggaggaggccacgccaactcctgatgcacggctgcccacatcccaggctgggaaaccccatgagrgcctctgcacatggggtgctgtttccatggggccatgactcccccatctgagctgcaggcgtggaggcttctcttgggccacctgcttgctactcgccgc

SEQ ID NO: 246682 - DNA, 201 bp, Homo sapiens
gctgcatttcagcccccctctaagaaccagcagtgccttccatcactgcaacagcaaacacccctccataaacatctagggcagcgagcagtcacatcccrtgagactcaactgggtcagagggcccttgcttgggtctcctccagccacgggtgccctggtcttggggggtggtgcccctgggtggggcttaaggaggta

SEQ ID NO: 246683 - DNA, 201 bp, Homo sapiens
tggggaaatcattgacctggctttcgaggccacctccatcctctccttctgcctccttgggaagcccctgtagttccctctgtaagatgctctgtcccttygtgggctttgtctcaaaccccactgggctccataagtctcctggggcccacagtcacacgacctggggggcatacggtgctgacttctcaccgaggggtg

SEQ ID NO: 246684 - DNA, 201 bp, Homo sapiens
ccaaaacccagatgataaagttcaggtaactttgttctcttcctgcgagggatgagctgagctcaaaggggctgagctacaaatgacgctgggctgaggckcctaccagggcacagcggacatgggagtcacctcacagggctgccccggctctgttagcagcccaggaagtccacccctctcctggagaccgactgggag

SEQ ID NO: 246685 - DNA, 201 bp, Homo sapiens
aggcagggccctccttgccacatgtaaagctgcacagagcggtcactatatgtgtttccatatttgcaatccaaccaccaccaactgagtgtgcgtcctgrtcagccgagcctgcccacggtggccacaggccctctacattctaatctcgagagcctgagcatgtacaaattaaacgaagcaaaacgacaccacccagtt

SEQ ID NO: 246686 - DNA, 201 bp, Homo sapiens
ccctgtggctctcgcgccgccccccataccttcatgagcttgcgctgggcagaggccaggagggtggctgggtccaggccccacgtcccacagccccgcasggtggaactcacacggaaggcctgtctgcagccctgccctgctgagcagacacaggagaggccctgcaggactcgtccggggcttgggttgcaggccacg

SEQ ID NO: 246687 - DNA, 201 bp, Homo sapiens
ctgatgaggctgcaggtcccttctgggtggccctggaccctgtgtccttctcccactgtggctgctttctacccaggaggtgtctcctccaaatgctgtcsgcagagatcaaatcccatccctgatgttccaaggcttccaggtgtaactcacaggcccagttcttggtaggcaggtgatttagccttctgtgtcccagtc

SEQ ID NO: 246688 - DNA, 201 bp, Homo sapiens
agccaccacctctgatggccacaagggtgtaagggagtggcaacgctctaaagactgtcttggaagtcctgtgacaccaatcccaccacattctattgatrgggtgagccctgaagtcaacctgggttcaaaagggtggggagtagactccatgtcttggcaggaggagctgcacgttactaagggcatgtgttcagggaa

SEQ ID NO: 246689 - DNA, 201 bp, Homo sapiens
ccaccaactgagtgtgcgtcctgatcagccgagcctgcccacggtggccacaggccctctacattctaatctcgagagcctgagcatgtacaaattaaacraagcaaaacgacaccacccagttctggccgtactataggaggtttccaggaagggtttgtgaacataaacataagctaggtaacactcctttctgaagtt

SEQ ID NO: 246690 - DNA, 201 bp, Homo sapiens
tgtgctgtggatgaggttttgcttctaggggagaaaccggccaaggcgcgtcaggcatcagcagacctctcccagaaggaggacattttgagaagatgaakatggaaatcggtttgatctcctttgttccctttctggggacagggacatcacggttctgtaataactgaggtctaggaaaaagaacagaaagaagggcag

SEQ ID NO: 246691 - DNA, 201 bp, Homo sapiens
tttgtgaggcctcctggctctgtttgcagagattgattgtgcagtttggatcttttaaatgagatactaaatcaaataaaaattatgatgccttcaccacragttaatcactatcaatatttgggtgtatttcttctagtcttttcgttttttctttctggtttgcatgggagagtgtgtgtgtgtgagtgtggcatgttt

SEQ ID NO: 246692 - DNA, 201 bp, Homo sapiens
tctgctctgaggcgtgaacccacagccaggagtgtcgccggagccgtgttcatcaggcctgtgtgccctgcggaggtggactgggtgaacacactgccggmtacttgcccaggggagcagcatggaatgagctgcgtggagacacccgtgctccgcctgggcgagccgacacacacatgctgggtggaagaagcgcagtgg

SEQ ID NO: 246693 - DNA, 201 bp, Homo sapiens
ggggtcccagggtcatcccggggtcgcaccttggctaccaggcttgagggttctgtgtgcgatttcaggagagacacacagcccatcgcacacctgacagytgtcaccctaaagaaaattcggctgaactgtgcacattggggagcattttcattcacattacacatttcatttcacttcacgttttattggtttgagtaa

SEQ ID NO: 246694 - DNA, 201 bp, Homo sapiens
aggcttgagggttctgtgtgcgatttcaggagagacacacagcccatcgcacacctgacagctgtcaccctaaagaaaattcggctgaactgtgcacattsgggagcattttcattcacattacacatttcatttcacttcacgttttattggtttgagtaatggtttagaaactatcttttacttcaaaatgtttgtgca

SEQ ID NO: 246695 - DNA, 201 bp, Homo sapiens
acagtgagaacattaaaaaatatttaataattcatttcaaagtccaatgcatacaaaaaagtattttttttcctgtgtcctgggataaaccagcttttgtraggaaaacccatagtttccaaaattagtaaggacagtggccctgttttctatttttatcagtctctttgatgtctgacctcagaggccacggctgacgtc

SEQ ID NO: 246696 - DNA, 201 bp, Homo sapiens; identical to SEQ ID NO: 47980

SEQ ID NO: 246697 - DNA, 201 bp, Homo sapiens
tttttaaatccgtggttgaaaaataggctatggctggcttactcattgtgctttagggaagcatgtatttgagtgaaggaaatgataaaaggaatttcatrtcgggcccaggcgccgcccaccctgcaagacagtttacagatgcctgccctgacagctgtctgcagttagccagcgtcagccgaggggtcctgagatccg

SEQ ID NO: 246698 - DNA, 201 bp, Homo sapiens
caagacagtttacagatgcctgccctgacagctgtctgcagttagccagcgtcagccgaggggtcctgagatccgctgaaggctgcctttgcatgccgacrgcaagggaaaagtgccacatgtccctgggcttgccacaggtgacctttggatgggaccattctccagacagcgcagctcgtctttccagaacactcatgg

SEQ ID NO: 246699 - DNA, 201 bp, Homo sapiens
acgcgtatttcagcatgcatccctgaaagaaaaggtgtcctgcctccctgcgtatcaaacacatgtgtagctgtgtgtctgtccgtatgtgcctctgtgcrtatgtgtattatacatagagaaaccgatctgtacctgtcatgtggacagagactcagaggcttggtaacaacacccactgtggacaggtaaccgctcaca

SEQ ID NO: 246700 - DNA, 201 bp, Homo sapiens
cggctgggccagatgccatgggattctgtgtttgtgaacctctagaaaaggtaaattaacctatagagctggaaagctgacctgcattgtcaggctgggtrgggaaggacttggatggaaatgttccctgttgcagtgtggtggggtcacaggcggcttagcttgtcaacacccataacgctatgcacggacactcggcaa

SEQ ID NO: 246701 - DNA, 201 bp, Homo sapiens
tctatgcatgcacatttctgcgtgttttattgaccgggtcatctgtgttcattagctagcagctcccctgcagtcctctgaagtgcaggccagcagagacrggggcggtggctttcgtctgaccatgcctagtcacgaggctgctgtgtgtctgtgcgtgtgtcttctctcagacactgcctgcctggcacccccttacct

SEQ ID NO: 246702 - DNA, 201 bp, Homo sapiens
ctgtgtcctgggataaaccagcttttgtaaggaaaacccatagtttccaaaattagtaaggacagtggccctgttttctatttttatcagtctctttgatrtctgacctcagaggccacggctgacgtctctctgcctctgcaggcagcctgttgctctgtgtcgtggttgaggctcataaagaaaattatgctgcacaag

SEQ ID NO: 246703 - DNA, 201 bp, Homo sapiens
ggcaggctgggtggctgttctctgttgagcccacagccatgccccacatgcaggacgtttgcctatcacttggaggcctttcagggatcttgctagcccayggctgagcacagggtagacctcaccaactcacccacaacctggccccttgacacactggtgctgtgaggaggaagatgtgggcactcttaggtccctggt

SEQ ID NO: 246704 - DNA, 201 bp, Homo sapiens
tctcatatggaaaacagtgagcgcgtagacactttgtctcgtgggaaatggtgaacccacatacactttgtctcatatgggaaacggtgagcgcgtatacrctttgtctcatgtgggaaatggtgagcgcatagatactttgtctcatgtgggaaatggtgaacccacatacactttgtctcatatggaaaacggtgagcg

SEQ ID NO: 246705 - DNA, 201 bp, Homo sapiens
tggccccctcaggagtaggaggtcagccccttccgcgcaggaaggacctgccgctcacacatccttgtgatgtggccatcctgggagcagagccaggcagraactgtcctttttgtgacctagccttggcaatcacgtagcacatttctgcaaggctgttcatcagatgcaatgaccaagtccaggccatagtcagaaagg

SEQ ID NO: 246706 - DNA, 201 bp, Homo sapiens
actatgtttccaggctggtattcaactcctgggctcaagcaatcttctggcctcggcctcccaaagtgctgggattacaggcatgagccaccacacctggkcccttcttcttaatgtttgagaaattaacaaactacagacaagtatgaagggtaacatgatgcctgtataattatggctggtaacatttggtcacatttg

SEQ ID NO: 246707 - DNA, 201 bp, Homo sapiens
ttgtgaacataaacataagctaggtaacactcctttctgaagttcaaggactggctgattagaggcggaggcgttcttctcccgacccggggtcagtgggsccacgagctgagagttctctcccttatgtgcctaaaacccctgggagggagctctgagccactgtggaccatggaggctgcggtgactgaccggggccct

SEQ ID NO: 246708 - DNA, 201 bp, Homo sapiens
tgagcggcttaccctgtgtacttactcaaattccaactgacttttaaaataagagctgtaacatgttactcatttaaaattttccgattagatttgtccarttaggtaatttgtaattaccctgcttatcttaccaagtagaggtgtcaacttgtgggctgctaatccatttggtagattagcacttaatcttggtagatt

SEQ ID NO: 246709 - DNA, 201 bp, Homo sapiens
ccctctgtgaaaaatacgggcttctacaaaacagcagactcaaaaagcaacaacaaccaaacccccaaacccagcagaccgataccatgttaaagccacaygtttgtcgattcccctgctcgggtgtttgcgcgccctctccgtcgcacggctccgtgtgctggagaccccacgggactgagtagtccccaccctcgtgga

SEQ ID NO: 246710 - DNA, 201 bp, Homo sapiens
actaagaccaaatgggtaacgtcgttgtttaaggtcacaggctggcgctgagccttggctctcagctcccctggcagtcgcgcgactcagcgtccagcccyacctgctccagggccctccctactgccagccgctgcctgtcctctcccctgacctgccttgagccagactgggccccctgggccttgggcagggctggat

SEQ ID NO: 246711 - DNA, 201 bp, Homo sapiens
tttcttgaccgattattttcctgggagacttcctcagtcaaagggttgatatgcttgcgagctctcgatgcacgctatcagattctccaaaaacgtacagscagcttcgcctgcacctgcagcttctgtgatttgtgctcttaattgacgtggcgctttttttaggttgagtcgtttttcattgccaacaatcttctcctg

SEQ ID NO: 246712 - DNA, 201 bp, Homo sapiens
gtgactggctgattatcgacttagtgtcgggtctaccacgtttgtctgtgatgttgccagtgacaggacttccttcttccttatggctgaataataacacrgcgttacgcaccgcacgctcgctatccattcgtctgttggtgggcacctgggctgcctccatcgtgtggctgttgggggtgatgctgcagtgaacatggg

SEQ ID NO: 246713 - DNA, 201 bp, Homo sapiens
atttatattcttggagtgtcgtccttaaatgttaggatgcatgcttgatgtcacaaaagtttaccggtgtctctattttctttttttttaaacttcactartgtgtggggtacaggtggattttggttatgcggacaggttctttagtggcgaattctgagattttagtgcacctgtcacccgagcagtgtacactggacc

SEQ ID NO: 246714 - DNA, 201 bp, Homo sapiens
gttgcagtgagccgagatcgtaccactgcactccagcctgggcgacagagtgagactccatctcaaaaaaaaaaaaaaaacaaaaaaaaacgagagagttkatggtgcccttcactacttcccaagcatcctagagtcccacgggctgccccgcccacgggcagtggctgcggagtgtctgctctatcaggcatggtgatt

SEQ ID NO: 246715 - DNA, 201 bp, Homo sapiens
ctcatttaatgtttgtttttagaaattgagagtgagaggctgggcgcagtggctcacgcctgtaatcccagcactttgggaggctgaggcgggtggatcaygaggtcaagagatcgagaccatcctggtcaacatggtgaaaccccgtctctactaaaaaaaaatacaaagaaaaaaaattagctgggcgtggtggcgcat

SEQ ID NO: 246716 - DNA, 201 bp, Homo sapiens
gcctgccccaccgccccatttgctgggttgtcctcaaagcacacggtaagcacccccgcccccgccccccacacacgtaccgctgtcagccttcttgctcktcacctccatccagggcacatccgcccctctgggtgctgtgagcctgttgccggcgcggtcccgctgctcctccttctgctgccctgcactgccgtggca

SEQ ID NO: 246717 - DNA, 201 bp, Homo sapiens
ttcaccatattggccaggctggttttgaactctgacctcatgatctgccctcctcggcctccctcccgtgtatttttaaatcatctttagattacttatartatctaatacaatgcctatatataacttcattaatgtggatttaatatagtagagagcagcaaattcaagttttgcttttaggaatttttccacccaaat

SEQ ID NO: 246718 - DNA, 201 bp, Homo sapiens
ctagtacctggaaggagaacacagggcttctgcatcctctgcctcccgggttcaagcgattctcctgcctcagcctcccgagtagctgggattacaggcgygcaccaccacgcctggctaatttttgcattttcagtagagacggggtttcaccatgttggccaggctggtctcgaactcctgacctcaggtgatcctccc

SEQ ID NO: 246719 - DNA, 201 bp, Homo sapiens
ctgcaacctccatcttctgaggttcaagtgattctcgtgccccagcctcccaagtagctgggattacaggtgcctgccaccacatccagctaattttttttatttttaagtagagatgggcttttgccatgcttccccagctggtcttgaactcctggcctcaagtgatcctcctgtctcggcctcccaaagtgctgggat

SEQ ID NO: 246720 - DNA, 201 bp, Homo sapiens
cgcccccgccccccacacacgtaccgctgtcagccttcttgctcgtcacctccatccagggcacatccgcccctctgggtgctgtgagcctgttgccggcrcggtcccgctgctcctccttctgctgccctgcactgccgtggcacaaccctccctccgggtctctgctgagccctccaggcgctcaggtctgccgtctgg

SEQ ID NO: 246721 - DNA, 201 bp, Homo sapiens
aaacagtgagcgcgtagacactttgtctcgtgggaaatggtgaacccacatacactttgtctcatatgggaaacggtgagcgcgtatacgctttgtctcatgtgggaaatggtgagcgcatagatactttgtctcatgtgggaaatggtgaacccacatacactttgtctcatatggaaaacggtgagcgcgtatacactt

SEQ ID NO: 246722 - DNA, 201 bp, Homo sapiens
tgggtgtctggggacggcgggcctgtctcccccaccaaggtgtggggtgagtgtggagaggacatttcacagctccccgggggtcaccatcaatgtgagtkttgggacattcttttcctgatttctctgtctctcgatgccatttttgtgaaggtttagcaaatactcgatagattgttgtgagaatgtgggcttccttat

SEQ ID NO: 246723 - DNA, 201 bp, Homo sapiens
gttaatcagtaattagctccacactgttgattctctgagctcttttttttttcccccagggataaagcgttaattacttttttaacacgatactaacctcstgacagcctcccaccccaagctgggtgtctggggacggcgggcctgtctcccccaccaaggtgtggggtgagtgtggagaggacatttcacagctccccg

SEQ ID NO: 246724 - DNA, 201 bp, Homo sapiens
ggacacgtgacaggtggcaatatgttaactgttcgtagcaaggaagatttgttttcaggctggtggtttgattacaagttggtcattcttaatgccagggagggggaagagagagaaaatgagagagaatgaatgagaacaaatgtaagaactttttttggaaaaaaagaaaattgagaagaaagtgatagtaattactaa

SEQ ID NO: 246725 - DNA, 201 bp, Homo sapiens
aaaacagtgagcgcgtagacactttgtctcgtgggaaatggtgaacccacatacactttgtctcatatgggaaacggtgagcgcgtatacgctttgtctcatgtgggaaatggtgagcgcatagatactttgtctcatgtgggaaatggtgaacccacatacactttgtctcatatggaaaacggtgagcgcgtatacact

SEQ ID NO: 246726 - DNA, 201 bp, Homo sapiens
tagacactttgtctcgtgggaaacggtgagcgcgtatacactttgtctcatatggaaaacagtgagcgcgtagacactttgtctcgtgggaaatggtgaayccacatacactttgtctcatatgggaaacggtgagcgcgtatacgctttgtctcatgtgggaaatggtgagcgcatagatactttgtctcatgtgggaaa

SEQ ID NO: 246727 - DNA, 201 bp, Homo sapiens
cacctgtgacattcatgcatctggcctgcgcctgtctccagcgcccacattcccacacagagctctgtcaggacgtgccacagcaggactcccaagtccaytccaccttctccgtcagggcaggccaatcctcgtctgctgcaaatgtcctgggagtaacaaacccagagctggcctctctggtgtggtggccgccggcgc

SEQ ID NO: 246728 - DNA, 201 bp, Homo sapiens
tcgtctcatatgggaaacggtgagcgcatagacactttgtctcgtgggaaacggtaagcgcgtagacactttgtctcacgtgagaaatggtgaacccacayacactttgtctcatatgggaaacggtgagcgcatagacactttgtctcatgtgggaaagggtgagcacgtagacactttgtctcatatggaaaacagtga

SEQ ID NO: 246729 - DNA, 201 bp, Homo sapiens
acttgaatccaggaggcagagtttgcagtgagctgaggtcatgccactgcattccagcctaggggacaaaacaagactccttcttaaaaaaaaaaaaaaaagtgcatgagacattgatgaccagtttaatgaataagtatgcagcaaatatccatctgtttctatagagtaaaagtagttattataacgcgtagttcgttg

SEQ ID NO: 246730 - DNA, 201 bp, Homo sapiens
gttctctgcatgtcaacaaaccctgcctagccctttgcaggggaactcctgggaggtagggaagcaggggatggcaggaactcattctgatccctcctggsgtccttgggcagctctcccatccttctgcaaaggggtttttgttcagaacattcctgaaggagctgagcggtttcataccatctgggcggtgtttgtaga

SEQ ID NO: 246731 - DNA, 201 bp, Homo sapiens
atgagcaaacacgggctttttcctggttgccggcaggcaggctaatggtctgctggcgggggctgggctgggctggattttggagaagcccagggctgcgkctggcagggctttgggaagcagcgggagcgcatgtaaggctggtgtagctgtcgcaggagctgtggcatccggaggggcccatggtggccccgcctttcc

SEQ ID NO: 246732 - DNA, 201 bp, Homo sapiens
ggccaagggcatgatggtttcaactccagccacaggggccctcttctccggggcctgcaggtgtacccctgccctgagttcgacacggccactgttttgamaatgcctgctcagaaacgctgacacagcgttaaggaatatacacacaggcaaggtggcaagccccgtcattccggggggcagccgagttctgtttcccca

SEQ ID NO: 246733 - DNA, 201 bp, Homo sapiens; identical to SEQ ID NO: 47968

SEQ ID NO: 246734 - DNA, 201 bp, Homo sapiens
acgtcgcagtctcctcttcactgagtccaaagtcacttccatctcgggcccgtccagtgtctgtcggggccttgattctgagatgagattgtttgctgaartgctccatggactctttcaggagtgacgttgttctttcaggaactgtaaacggaggtggcatgtaaccagtgtggactaagaagccatgctgctgtttct

SEQ ID NO: 246735 - DNA, 201 bp, Homo sapiens
aacaatttcatatttttcaggcttatgaagaggtaaggtggtctctgtaagtgaatttacccaagaactgaaatttgccctttaaacctcaaaataggatkgtgtttgtttcatctaaaattttagttgaatgcttagtagtatcttcgctgcttaccagacttctcagataatgtggtaactgtgacgccgccctctctc

SEQ ID NO: 246736 - DNA, 201 bp, Homo sapiens
tgatccacccgccttggcctcccaaagtgctgggattacaggtgtgagccactgcatctggtctttttttttttttttttttttgagatagagtctcactstgtcacctaggctggagtgcagtggcacaatcttgactcactgcaacctctgcctcccaggttcaagcagttctctgccttagcctcccgagtagctggg

SEQ ID NO: 246737 - DNA, 201 bp, Homo sapiens
tttcaccatcttggccagtctagtcttgaactcctgacctcgtgatccaccagcctcagcctcccaaagtgctgggattacagacaggtgtgagccaccgygcctggccattttttgtttgtttgtttgttttaaataaagcacatcattgtatattcactgctctgcactatttttattttttaatttaacagatcttgg

SEQ ID NO: 246738 - DNA, 201 bp, Homo sapiens
cccctgagaaccagctccctgagcacgccagccccccaaggaccagctcccacacaccagccctctcaccgcggtgtgcctgtccccacctcccaagggcrgaaggaggggcctccaggcctcgtcttccttcactgtgcccatgctcagagatggtgacttcataagaggccacagaggctccgcaagtccccaggccgt

SEQ ID NO: 246739 - DNA, 201 bp, Homo sapiens
tgggcctgggccagacgggttccctgcacagctgcttttgcgtcattgatgcagacgcggagactcacttctctgcttcgtgtgttcctagttggtctccrgttcttgaacaaataactttcaattacaattttttttctacttatgattgccagtttttcttttttctttttttttttttttgagacagagtcttgctct

SEQ ID NO: 246740 - DNA, 201 bp, Homo sapiens; identical to SEQ ID NO: 47982

SEQ ID NO: 246741 - DNA, 201 bp, Homo sapiens
ggagaagcctcagccagggctcggggcttggggcagtgccctggctctccaggtgcgctaagcaaacagatcatgccaggctttttccctgatggcggctygagtcggaagccagagtgtagaacagtagcggagcccgcccagctgttcctaagcaaggcctaggccccactgcagggtcacacggaaggctcacatgcc

SEQ ID NO: 246742 - DNA, 201 bp, Homo sapiens
atactccattgtgtataagaaccacattttctttatccatccgtctcttgatggacatgtgggttgcctccaaatcttggttcttatgaacagtgctaaaygaacatggaagtgcaggtatctctgatatactgatttcctttcttttgggtatatacctaagagttagatagctgggtcacatggtggctgtatttttag

SEQ ID NO: 246743 - DNA, 201 bp, Homo sapiens
cacagctccccgggggtcaccatcaatgtgagttttgggacattcttttcctgatttctctgtctctcgatgccatttttgtgaaggtttagcaaatactygatagattgttgtgagaatgtgggcttccttatttgggggagattttttataatggaaaaggtttccttttttggaagtcacctggggacggggatgagt

SEQ ID NO: 246744 - DNA, 201 bp, Homo sapiens
aactcacattcccaccaacagtggtttgctggagatttcatagtgcaggaactggctaaacgtgggtactccaaagcagccctgctaaccaggtcaaggcycagctccttctctgtttttgcaggtgaagtagtactggctgtcactccattgccttcttggtgcctgtggccactgttgagctgcaatggccccaagcct

SEQ ID NO: 246745 - DNA, 201 bp, Homo sapiens
cagacttgtcacaggtccattgtgcagtcatcaggccctgggagctttccacatccctccacctcccacccaacatcaccactctccggccagtgagaccrtcacagcaccccagaggagacaaattctggagctcagagagctggggtaggtgacgggagggtggggggctggaggtccttggccagcagccttcccatc

SEQ ID NO: 246746 - DNA, 201 bp, Homo sapiens
cactgcacttcagccagggcgccgacacatggtcgttcgacttctggcttggcctcttttgtgagtgtggggcctggtcatatcctcttggtcagtgtctstgtgatgatgagaacgggaagacggccacggtgcccaccctggcaggactctctcccctcgctggcgctggctcagctgccgtgagcggccgtaggcact

SEQ ID NO: 246747 - DNA, 201 bp, Homo sapiens
ttctggctcttgccttcctgccctgagcagagcacccctcccatctgctccccaccgctgaggatcactggtcccccaggaggcttcccaggcatcacctygtgtgtgtgtgtgcagcagctgcctcggccccggttctgttgggtgttgagaggagcttgggagaacccatgactgggagtggtagagattcgtgaccca

SEQ ID NO: 246748 - DNA, 201 bp, Homo sapiens
gggctcgttgacctgcatcctggctggccctgtgactctgcctgtttacagtgagcagctcctggccaaaagctgcttattggattagccggtgccccgayggcagagcccgcagctgtgcgcaggaggacgaacctgtgtgtatgtcctgcttcagcgcgctcctggggtcccttgagttggtctctgtgactagaagga

SEQ ID NO: 246749 - DNA, 201 bp, Homo sapiens
gtaacgcactggcgccaagggggtgctgagccttcgctctgccgtccttggctgaacaagctgtttctctggggaccacgtcaggtaacacgtaggacagyggggtggtccagcagggagggcatgcgcatctgtgtggcaggactgggggtgattttatccgggatcccctggggtggcccagcgttggctcgggtgttt

SEQ ID NO: 246750 - DNA, 201 bp, Homo sapiens
accatgttggccaggatggtctctattgcttgacctcgtgatccacctgcctcggcctcccaaagtgctgggattacaggcgtgagccactgcgcccggcytagtgtctctttaggattgttttattaagattgcttatttgatagcagataactatgaagatactaacgatactataaagacacagtggcagctcccagc

SEQ ID NO: 246751 - DNA, 201 bp, Homo sapiens
cgctgcagagggaggaggaagcagctcacacgcttgctgttgtctggtgggagggctgcatttctcctctctcccccactttctctctctctctctctctcacacacacacagacacacacacacacacacacacactcacactcactgttgggtttcttgggctgctaacaggattaaatgaatgtcttggttccatgat

SEQ ID NO: 246752 - DNA, 201 bp, Homo sapiens
tcgctgcagagggaggaggaagcagctcacacgcttgctgttgtctggtgggagggctgcatttctcctctctcccccactttctctctctctctctctctcacacacacacagacacacacacacacacacacacactcacactcactgttgggtttcttgggctgctaacaggattaaatgaatgtcttggttccatga

SEQ ID NO: 246753 - DNA, 201 bp, Homo sapiens
ccgataccatgttaaagccacacgtttgtcgattcccctgctcgggtgtttgcgcgccctctccgtcgcacggctccgtgtgctggagaccccacgggacygagtagtccccaccctcgtggaagcatgttcccgtaatagcagagcaaagggatgatggtcttcggaggagggcgctggctcaggcaccccagggacgct

SEQ ID NO: 246754 - DNA, 201 bp, Homo sapiens
gctactggagacgtcatcggatttactgaggagggtgtgtttgcgtgtgtttggctacctacggatactacagatgaggcgctgtctaattttgtttcacmatgagctgaaatttatccccacaccaatcctctttttgccctacggagtttgtgccttggccccaccctaggtggctccggcaggttcctcagctgtgtg

SEQ ID NO: 246755 - DNA, 201 bp, Homo sapiens
aagcaaaagcagggagaggggaggacaatgcagccccagccccttgtgcctgacgtcacaccaggctggcaccaggcctccaaccccagccgggttcctcrgcctcccctagcagtggcgagcacggcattgtttaccgggggctgtggacttttctgtgggtgcacctgcagcgttcgtctgtctgagagcagactgctg

SEQ ID NO: 246756 - DNA, 201 bp, Homo sapiens
agcacgctttgctgtgcgggcatcggttgtgtcacacactgggccgtgtggtggccttgcgtggtgagggagcaggaggcaggctcaggacacaccacaaragcaaatgtcagagctgggacccaggggcagcaccctccagtagcagcacccagatcccgcctctctccagccccggggaggctgagccggggtccccag

SEQ ID NO: 246757 - DNA, 201 bp, Homo sapiens
gttccggtcactgcagttcttacatctttgctgtgtgtgggaggaggaattatctttgtgctctgaagtgtgatgtatatgaggggagagcaaagggctcrgactttgatctgccaagctgtgtctcgtgaagtcaggtattctgcaagggaagcttttttcttaagaaacaaatctcatcagtgttcaggacaaggctgt

SEQ ID NO: 246758 - DNA, 201 bp, Homo sapiens
ctgggcaacagagcgagaccccatctctaaaaaacaaacagaacctaagtgtggaatttaggagacaaattagcttgggatttggggcctctgagagtttsagcaagggggtcggtcattggtgagggttccaaaaccccaggagcaaccgctcactcatcctcaacctggggctaccgcgagtgtgacgggggccatgta

SEQ ID NO: 246759 - DNA, 201 bp, Homo sapiens
cacctctcagtccacagtttcccacagagcacgcaggggccgcaccagggctgggacggggctgcgaccaggctaggggagcatcctgggcaaaccctgcyggggacaggttcgttgtgtctgatgccgtgggagatgcacgagcagtgactttcactttatcccactgtggccccgtgaccctgagcgagaatgcactgg

SEQ ID NO: 246760 - DNA, 201 bp, Homo sapiens
gggacagccgtggtggtcaatctgctcacttcaaagagggggagccaaggccagagaagtcaagtgacctgccaggaccccagctctgcagcccaaagagkccaggactgaagcaaaagcagggagaggggaggacaatgcagccccagccccttgtgcctgacgtcacaccaggctggcaccaggcctccaaccccagcc

SEQ ID NO: 246761 - DNA, 201 bp, Homo sapiens
cgagttctgtttccccaccccgtcaccccgagggagtgaaatagggtaaggttcaccaagacattctgcagatcagcgtgggcagcagcactctggagggktcagtgcctcccgcctggggacagaggcctctgcttctcccgacccgtaggctgcagtgatccatgcagttcactgctctgtctgaaggtttgacttagg

SEQ ID NO: 246762 - DNA, 201 bp, Homo sapiens
acagtttcccacagagcacgcaggggccgcaccagggctgggacggggctgcgaccaggctaggggagcatcctgggcaaaccctgctggggacaggttckttgtgtctgatgccgtgggagatgcacgagcagtgactttcactttatcccactgtggccccgtgaccctgagcgagaatgcactggccgggcctccagg

SEQ ID NO: 246763 - DNA, 201 bp, Homo sapiens
tctcaatgttccatacaggttgaggttttgtttccgttctgctttttacctgaagaggatctcgtgtgtgtgtgtgtgtgtgtgtgtgtgtatgtgtgtgtctacctacctactacctatttgtcatctatctataattgacaaaatatgattgtgtatatggagtaccatgtgatctatgtgtacattgtagaaagatta

SEQ ID NO: 246764 - DNA, 201 bp, Homo sapiens
ggcccgtgagtgctgggccttgaccctctctgttgaggtcctgcctgtgtcactggcctggggacagctcccgcctggctgagtgccgagctaaatccagrtagacaggttggtgagatggcgctcccggcgagctcacagtgtctcattaacctcataaatgcagcggacactgggctgcaggtgacagacgcgttctct

SEQ ID NO: 246765 - DNA, 201 bp, Homo sapiens
caggctgtcctgattcgtaggagatgtggacggacatggagggagtgccgtgacgtagcccaggagacctttttagcttaaagcctgtgcataagaaatakgcaagtgagttttagatgttcatacatatttcattgcagaatattagtttagggtgatcaataaaagactttcaagcctaatgttaagcaaaagagactt

SEQ ID NO: 246766 - DNA, 201 bp, Homo sapiens
gaggctgggcctccactaggatgttatacaggcagcatggcttaggtgtcagagacgggaaaggacctggaagaaaagaactgtttcctttaggccccgtkgggtaaccagaaggtaagactaggaggtgtgcgatggtgatggggcggaggaggggacagcgggaacctgtggaggggcgggctcaagccctggtcgtga

SEQ ID NO: 246767 - DNA, 201 bp, Homo sapiens
atctcaatgttccatacaggttgaggttttgtttccgttctgctttttacctgaagaggatctcgtgtgtgtgtgtgtgtgtgtgtgtgtgtatgtgtgtgtctacctacctactacctatttgtcatctatctataattgacaaaatatgattgtgtatatggagtaccatgtgatctatgtgtacattgtagaaagatt

SEQ ID NO: 246768 - DNA, 201 bp, Homo sapiens
catgtacaaggatttctccggcagaggaagacacagtgagagaatcaggtggcacgccggtaatgcctgtgttgaaagacctgctcgtgaatgagctctgyccctataatacttctgttctatcacagccgaaaagctcacccgactgctgcccacagagacttcagataccttggcaaaaacaagacatcctttcctttt

SEQ ID NO: 246769 - DNA, 201 bp, Homo sapiens
tatctcaatgttccatacaggttgaggttttgtttccgttctgctttttacctgaagaggatctcgtgtgtgtgtgtgtgtgtgtgtgtgtgtatgtgtgtgtctacctacctactacctatttgtcatctatctataattgacaaaatatgattgtgtatatggagtaccatgtgatctatgtgtacattgtagaaagat

SEQ ID NO: 246770 - DNA, 201 bp, Homo sapiens
ctatctcaatgttccatacaggttgaggttttgtttccgttctgctttttacctgaagaggatctcgtgtgtgtgtgtgtgtgtgtgtgtgtgtatgtgtgtgtctacctacctactacctatttgtcatctatctataattgacaaaatatgattgtgtatatggagtaccatgtgatctatgtgtacattgtagaaaga

SEQ ID NO: 246771 - DNA, 201 bp, Homo sapiens
tccagctatctcaatgttccatacaggttgaggttttgtttccgttctgctttttacctgaagaggatctcgtgtgtgtgtgtgtgtgtgtgtgtgtgtatgtgtgtgtctacctacctactacctatttgtcatctatctataattgacaaaatatgattgtgtatatggagtaccatgtgatctatgtgtacattgtag

SEQ ID NO: 246772 - DNA, 201 bp, Homo sapiens; identical to SEQ ID NO: 47970

SEQ ID NO: 246773 - DNA, 201 bp, Homo sapiens
ccttctgcaagcccctcttccctgttccccagcccgcacttccaatgagctgtgggccaggaaaccagcccgtcacacttgtccacgctgcgtttaaagcrggaggaaggaggacccaatgcagggcccgaaaggtccactgtgagtgaagtctttttccttatgggacacctaggctggcttctcagaaagtgtgtgcag

SEQ ID NO: 246774 - DNA, 201 bp, Homo sapiens
gctgccttatctaccgggtggtcgagttggcatcttccccggcagaactgtgttggggtgttgtgggtattgtgggtattgtgggggttgtgttgtgggtrttgtgggggttgtgggtgttgtgttgtgggtgttgtaggagttgtgagtgttgtgggggttgtgggggttgtaggggttgcgggtgttgtgggtgttgta

SEQ ID NO: 246775 - DNA, 201 bp, Homo sapiens
atctaccgggtggtcgagttggcatcttccccggcagaactgtgttggggtgttgtgggtattgtgggtattgtgggggttgtgttgtgggtgttgtgggkgttgtgggtgttgtgttgtgggtgttgtaggagttgtgagtgttgtgggggttgtgggggttgtaggggttgcgggtgttgtgggtgttgtagggggtgt

SEQ ID NO: 246776 - DNA, 201 bp, Homo sapiens; identical to SEQ ID NO: 47973

SEQ ID NO: 246777 - DNA, 201 bp, Homo sapiens
tctaccgggtggtcgagttggcatcttccccggcagaactgtgttggggtgttgtgggtattgtgggtattgtgggggttgtgttgtgggtgttgtggggrttgtgggtgttgtgttgtgggtgttgtaggagttgtgagtgttgtgggggttgtgggggttgtaggggttgcgggtgttgtgggtgttgtagggggtgtg

SEQ ID NO: 246778 - DNA, 201 bp, Homo sapiens
ggtcgagttggcatcttccccggcagaactgtgttggggtgttgtgggtattgtgggtattgtgggggttgtgttgtgggtgttgtgggggttgtgggtgwtgtgttgtgggtgttgtaggagttgtgagtgttgtgggggttgtgggggttgtaggggttgcgggtgttgtgggtgttgtagggggtgtgggtgttgtgg

SEQ ID NO: 246779 - DNA, 201 bp, Homo sapiens
acgacaaaggtgatgaccagaggtatttgtttcttgtcttaggaaagcaaaagcctcccttaaagcccccgcagacttctccctggctggacccagggcasatgcccatcccatccctggatcacttgctcaaagaggggatgggattacctttatggcttagatctggggctgggcttccctcccatatccaagggtgag

SEQ ID NO: 246780 - DNA, 201 bp, Homo sapiens
aggctggcttctcagaaagtgtgtgcagtttatttccgggttcttggcggtgttctgaatagtaaacgttgccacctaaatgaagaccctttgagatatcrctgcgtctctactgttcctgatggtggactttctcctccagcgtctgctgacagtaacagtggagctttccccagcacccaagagcccggggctcaccgt

SEQ ID NO: 246781 - DNA, 201 bp, Homo sapiens
acagtaacagtggagctttccccagcacccaagagcccggggctcaccgtggtcccctcctgtgcagccagcacacaaggccctcccgtgccaccacctcrcaggggccaggtctgctcggcccactacaccagagcccttgggtgcggggtgggcgggacagagaagaggaaggggggaaggagggagctgacagccgtt

SEQ ID NO: 246782 - DNA, 201 bp, Homo sapiens
tgtctagagcatcagaaatgatgtgcttttggcatcctgaaatgtctttctcctccgccaactgctgtctgctgagagctagccttgctctcggaagggcrgcttgggcagggcaaagggagaattccagggtttgggagcatctgctgatcccagaatagttgccagtggtgacatcttcttcctggaccccaggaccca

SEQ ID NO: 246783 - DNA, 201 bp, Homo sapiens
taaagaggtgcctctggccaggtggttacctctgtcaccagagatgagtcacccagtctcagctcgcaggccttcctggacgttcccagatagtccccagkgctggaggcctgtcgaaggtgtagctccaccacgccctttgatctcttcctcctctcctcttccccacccgcttccccctccttccccctccttccccct

SEQ ID NO: 246784 - DNA, 201 bp, Homo sapiens
ggggtgtgtgatgatggtaccaggtggtgcagggggcagctggggggacccaaaaaccccaagtctgggtgccaactttattttctagagccggagaacgrggtgatttcctaggaagagaccacagctcccctggaggttccacgctagattgtgtttgtttttcttggtgcacacttggccaggagctgcttctctctg

SEQ ID NO: 246785 - DNA, 201 bp, Homo sapiens
ccttttgtcaggggctgaaacctttctggaagctccaaaagactcctttctctctctcattaactatctctaaggcagtcattaggacgcatcccatgaarccagatgacttctgcatagccattgccttctatacctcaggcaggttcttgttagaagaagtgccaggcagaggttgtgtgggcagccagtcatatttgc

SEQ ID NO: 246786 - DNA, 201 bp, Homo sapiens
gtgccattcaaggcagcgcctgcaaatccctgagaggcagagggtgggggcctgtatggagggcgctctgtggagtcgggacagggggtttcatgggcggrtggggtgggcgcccatggagagccttgctctgggtgcaagaatggccacagtgggggcagctggcggtgtggaacaggggccgccctgggaatgtggaag

SEQ ID NO: 246787 - DNA, 201 bp, Homo sapiens
caggtggttacctctgtcaccagagatgagtcacccagtctcagctcgcaggccttcctggacgttcccagatagtccccagggctggaggcctgtcgaargtgtagctccaccacgccctttgatctcttcctcctctcctcttccccacccgcttccccctccttccccctccttccccctcctccttccccctcctcc

SEQ ID NO: 246788 - DNA, 201 bp, Homo sapiens
tggggctcgttgacctgcatcctggctggccctgtgactctgcctgtttacagtgagcagctcctggccaaaagctgcttattggattagccggtgccccracggcagagcccgcagctgtgcgcaggaggacgaacctgtgtgtatgtcctgcttcagcgcgctcctggggtcccttgagttggtctctgtgactagaag

SEQ ID NO: 246789 - DNA, 201 bp, Homo sapiens
caatttggtataaattggcatatctgtcaccataagtatttgtctcgtctttaagctaaaaacattcaaattcttctctgctatctattttgaaatatacratagattattgtaaactgtagtcaccatactgatctataaacaccgggtcttatttctaggtcttacttcttttatcaagtgtttatctatacccactaa

SEQ ID NO: 246790 - DNA, 201 bp, Homo sapiens
ctccagctatctcaatgttccatacaggttgaggttttgtttccgttctgctttttacctgaagaggatctcgtgtgtgtgtgtgtgtgtgtgtgtgtgtatgtgtgtgtctacctacctactacctatttgtcatctatctataattgacaaaatatgattgtgtatatggagtaccatgtgatctatgtgtacattgta

SEQ ID NO: 246791 - DNA, 201 bp, Homo sapiens
agatcacgctggcctaggatttcagagactcggtcccaaccccgctgtgtctccgggctgggattagatggggtgtttgtgctccaggcctccagtgctcrttggtaaaacgggacactgatgccgcctgctgtttctgcagagggtcaaagggcacaagatgcgtgccagcctctgtccatggggtgtgtgatgatggta

SEQ ID NO: 246792 - DNA, 201 bp, Homo sapiens
cgcccgcccctgcggtggccactggtgttcagtatgtgactctctgagcgtggggttctagaccaggaaccctctgtgctcggtccacatgaaaagagcascttctcgttcatcttcagagacctgttcttaatgggcagcaggggctccgaatgctgagaaaaccccacaggtggcagctgggtgcctggccctgcagcc

SEQ ID NO: 246793 - DNA, 201 bp, Homo sapiens
accctcctgcccctcccagtctgggcagcagataaaagccagggccccacacttctgccacctcctgctgctcacacactccagccagggacctgcccccsgggtccaacaaggtaaggacagcggggctgcccctgagcagaactctctttcttccctggctgactttgaggcacctgagtcattgtgggtagacaaaag

SEQ ID NO: 246794 - DNA, 201 bp, Homo sapiens
cctcttcctgccagggtttgcagtttacactggcagtgatgcagtggcagacacaacttggggaaataactctaggaccctggtctttagttccgattccyggtgagacagtacctggcggggagcttctcgccctcttcagaagtggcctgggggccctggggctactgatccagcccaaagctgcagtcaggagagcgt

SEQ ID NO: 246795 - DNA, 201 bp, Homo sapiens
cagtattctgtcggtattcatttcttgggtgtgctcatggtgtcctagtgagcaggctgtcctgattcgtaggagatgtggacggacatggagggagtgcygtgacgtagcccaggagacctttttagcttaaagcctgtgcataagaaataggcaagtgagttttagatgttcatacatatttcattgcagaatattagt

SEQ ID NO: 246796 - DNA, 201 bp, Homo sapiens
ttgcccgcgtgttctgtctcgggttggaagggacacgcacgtctcctgccttcacatgctgagatgggtttctgtagcatccccagaatttctgctgaatkaagtgtgtcgggttatttggtacgaacatatcgaatgactatatctgctctaagaattttagttttagcgttatattcctgatgtctcatttatttcatt

SEQ ID NO: 246797 - DNA, 201 bp, Homo sapiens
tttacccgttaccaagctccaacagctccctacatggcccctcgtgtgtcctgcccacactgcgccaacaccagagcatgctgacgcgtatttcagcatgyatccctgaaagaaaaggtgtcctgcctccctgcgtatcaaacacatgtgtagctgtgtgtctgtccgtatgtgcctctgtgcgtatgtgtattatacata

SEQ ID NO: 246798 - DNA, 201 bp, Homo sapiens
ttttcaaattaaaatgactgtatttagtgtctcttttttttaaaaaaatatttatttatttatttatttatttatttatttatttatttatttatttattttgagacagtctggctctgtcgcccgggctggagtgcagtagaacgatctcggctcactgcaacctccacttcccaggttcaaatgattctcctgcctcag

SEQ ID NO: 246799 - DNA, 201 bp, Homo sapiens
gttttcaaattaaaatgactgtatttagtgtctcttttttttaaaaaaatatttatttatttatttatttatttatttatttatttatttatttatttattttgagacagtctggctctgtcgcccgggctggagtgcagtagaacgatctcggctcactgcaacctccacttcccaggttcaaatgattctcctgcctca

SEQ ID NO: 246800 - DNA, 201 bp, Homo sapiens
tggtctgcccagcgtgtctgaggctctgctctaaggggcccctgcccaccctgggggggctgcagtgtgtctgggcgagcactgacttctgagcctcgctrtctggactggcactggctctactgctgactccctgtgtggccccatatgatgcacgaagcctctctgtgcttctgtttgctcacctgtcaactggggcag

SEQ ID NO: 246801 - DNA, 201 bp, Homo sapiens
gggtgtgcagtgagcagtgccccggtgttcctgtgagggtgtgggcgtggccaccctgacgctgtccctgtccctgtctttgcaggacggctgtcctcagygaggggccgtgcacccgctcctgagcagcgccatgggcctgctggccttcctgaagacccagttcgtgctgcacctgctggtcggctttgtcttcgtggt

SEQ ID NO: 246802 - DNA, 201 bp, Homo sapiens; identical to SEQ ID NO: 47986

SEQ ID NO: 246803 - DNA, 201 bp, Homo sapiens
gtccagggctgccgtgttggagaggcgtgtgggaatgtgcgttttgggatggcagcccgagcctcctacaacttggcagagttgtcaggatttcaagcccygtgtgtctttgaccttttacctgagctgtgtgagaagaggcattttcttgtttctttgcgagtccttcctcactgcacttcagccagggcgccgacacat

SEQ ID NO: 246804 - DNA, 201 bp, Homo sapiens
ctctaccgccgcctcaactgccgcctcgcctactcactctggagccgtgagtgtctgctgggccagtccctgccgcctggggctcccgtgggggtggcgcrcgaccatgcacggggcagccgtgggctctcaggcaggaagtgagggctatgcaggaggtgccgaggccatctggctggcaggctgtcggaaggcacctgg

SEQ ID NO: 246805 - DNA, 201 bp, Homo sapiens
tggccaagcccctggcctctgtccgacgctgaagtgccaggtgcccctccttctcctccctccagagctccaaggtcctcgctaagaaggagctgctctaygtgcccctcatcggctggacgtggtactttctggagattgtgttctgcaagcggaagtgggaggaggaccgggacaccgtggtcgaagggctgaggcgcc

SEQ ID NO: 246806 - DNA, 201 bp, Homo sapiens
agttttcaaattaaaatgactgtatttagtgtctcttttttttaaaaaaatatttatttatttatttatttatttatttatttatttatttatttatttattttgagacagtctggctctgtcgcccgggctggagtgcagtagaacgatctcggctcactgcaacctccacttcccaggttcaaatgattctcctgcctc

SEQ ID NO: 246807 - DNA, 201 bp, Homo sapiens
agaaggagctgctctacgtgcccctcatcggctggacgtggtactttctggagattgtgttctgcaagcggaagtgggaggaggaccgggacaccgtggtmgaagggctgaggcgcctgtcggactaccccgagtacatgtgggtgagtgcgcggagcagcccgataccctgcatgcctggaggaggccacgccaactcct

SEQ ID NO: 246808 - DNA, 201 bp, Homo sapiens
tagttttcaaattaaaatgactgtatttagtgtctcttttttttaaaaaaatatttatttatttatttatttatttatttatttatttatttatttatttattttgagacagtctggctctgtcgcccgggctggagtgcagtagaacgatctcggctcactgcaacctccacttcccaggttcaaatgattctcctgcct

SEQ ID NO: 246809 - DNA, 201 bp, Homo sapiens
ggaaaacggtgagcgcgtatacactttgtctcatgtaggaaatggtgagcgcatagacactttgtctcatatgggaaatggctggcctgtaaccttgtctscacgatctccttccagttcaggagccggtagcactgctgaaaaggctgtttatgtcagctaacttttcatgcctgcgacaccccactgtctgcagagaga

SEQ ID NO: 246810 - DNA, 201 bp, Homo sapiens
cacatgtttcagagagcacggggttgggggtaaggttatagattaacagcatcccaaggcagaagaatttttcttagtacagaacaaaatggagtctcctrtgtctacttctttctacacagacacagtaacaatctgatccctctttcttttccccacatttcccccttttctattcgacaaaaccgccgtcatcatcat

SEQ ID NO: 246811 - DNA, 201 bp, Homo sapiens
tggaggaggccacgccaactcctgatgcacggctgcccacatcccaggctgggaaaccccatgagagcctctgcacatggggtgctgtttccatggggccrtgactcccccatctgagctgcaggcgtggaggcttctcttgggccacctgcttgctactcgccgcaatcccagctctgaccaggccatcctaaggggatc

SEQ ID NO: 246812 - DNA, 201 bp, Homo sapiens
gtggactgaagatgacccactgtgccccgacttgaaagagaaccaagtagaactgctctcagtgagaactgtagatattttaaagcaaaaacttacagacrggttttgtatcagattagatacagttaatgagaatgggtacagaaccaagtagaactgctctcagtgaaaactgtagatattttaaagcaaaaccgtatg

SEQ ID NO: 246813 - DNA, 201 bp, Homo sapiens
cacagcacatgtttcagagagcacggggttgggggtaaggttatagattaacagcatcccaaggcagaagaatttttcttagtacagaacaaaatggagtytcctatgtctacttctttctacacagacacagtaacaatctgatccctctttcttttccccacatttcccccttttctattcgacaaaaccgccgtcatc

SEQ ID NO: 246814 - DNA, 201 bp, Homo sapiens
tgccgcggaccaagggcttcaccaccgcagtcaagtgcctccgggggacaggtaggccccagactgcccgagccggggccaccgctatgctcacggaaaayagtgatttctttaaaaaaaaaaaaaatgagtgcattccatgtgaaacacagaagaacagaagtgcaaaaggaatcaagtgagggggtcggcgccgcaagg

SEQ ID NO: 246815 - DNA, 201 bp, Homo sapiens
tggtaaacaaaaaaatgagagcttttactgcccatagatcttcacttcaatattttttaaggatgtgtttcagtaagaacaaaaattataaaagtagggtmtaattttcaagaaagaatggtagccaaagaaattaggagatggatgaatctaaaccgtatgtaaaataaaaacagtgctcagccgggcgcagtgggtcac

SEQ ID NO: 246816 - DNA, 201 bp, Homo sapiens
ggtgatgaaggcatgttggcgacagagggtcctcaccaaagggaaaccttccttgttacactgctaagtgaagtggttgttgtgggtttttttttttttttaatgttttttatcaagttgagaaaattcccctccatttcgcatttgccaggaggttctggtttttgtttttaatcacaatcatgattggatgttgccagt

SEQ ID NO: 246817 - DNA, 201 bp, Homo sapiens; identical to SEQ ID NO: 47967

SEQ ID NO: 246818 - DNA, 201 bp, Homo sapiens
gaaaccccatgagagcctctgcacatggggtgctgtttccatggggccatgactcccccatctgagctgcaggcgtggaggcttctcttgggccacctgcytgctactcgccgcaatcccagctctgaccaggccatcctaaggggatctggccgggggagggggcagagcagggtgcccccagtgagccctggctctgcc

SEQ ID NO: 246819 - DNA, 201 bp, Homo sapiens
aggatggcttgaacccggaaggcggaggttgcagtgagcttagattgtgtcattgcactccagcctgagcaatagagtgagaacttgtctcaaaaaaaaaacaaagtttcttattgattttaaaaatcttatctgtacattatttcagatttttaaacatttatttctttaacttttagattttgaagtgcacagtcatgt

SEQ ID NO: 246820 - DNA, 201 bp, Homo sapiens
ctcggggcagcccagctgtccccacctggtggcacggggccgcccttccttagcaaagtgattctctgacggccgtcgcagggaagaggcagcattgagcrcccgctgttaagatgctcccttacggaagcgacttgtgggaggcagggatgtgtgtttttcttttccttttttttttttttaagagaaaaccacatttta

SEQ ID NO: 246821 - DNA, 201 bp, Homo sapiens
ccaggacccttggaacattggtcccaagtacttaggaaaggagggttattagtatttgaaggcagttaaaaatggtgcagtgtttttttttttttttttttaactttgagagaagtttagtgacatggggaaaatgcttttataaatggcttcccagacctttaaaaaaaaaaaagcacaattttaaaagctttgtctagg

SEQ ID NO: 246822 - DNA, 201 bp, Homo sapiens
gaacatattaagaaagaccagaactctcgggagcgcacacatgaccacccttctcatgggaccaggggcgtggcctgcccggttaaatcactcgtgggcascctgggggttaatgctgccgccaccctgcacagaaggccacatcctggcctctcgccgccatgccacgctgactgtgtactcagggcggatgcctgagga

SEQ ID NO: 246823 - DNA, 201 bp, Homo sapiens
tggttgcagtggctcatgcctgtaatcccagcactctgggaggctgaagccagagaatcacttgagcctaggagatcaaggctgtgtgagccatgatggcrtcgctgccctccagcctgggtgacagagtgatattctgtctctataaataaatagatgaaaaataaaaaataaaaatgtagacgtcaacttcacattgtc

SEQ ID NO: 246824 - DNA, 201 bp, Homo sapiens
cacccgccttggcctcccaaagtgctgggattacaggtgtgagccactgcatctggtctttttttttttttttttttttgagatagagtctcactgtgtcrcctaggctggagtgcagtggcacaatcttgactcactgcaacctctgcctcccaggttcaagcagttctctgccttagcctcccgagtagctgggattac

SEQ ID NO: 246825 - DNA, 201 bp, Homo sapiens; identical to SEQ ID NO: 47971

SEQ ID NO: 246826 - DNA, 201 bp, Homo sapiens; identical to SEQ ID NO: 47972

SEQ ID NO: 246827 - DNA, 201 bp, Homo sapiens; identical to SEQ ID NO: 47975

SEQ ID NO: 246828 - DNA, 201 bp, Homo sapiens; identical to SEQ ID NO: 47977

SEQ ID NO: 246829 - DNA, 201 bp, Homo sapiens; identical to SEQ ID NO: 47981

SEQ ID NO: 246830 - DNA, 201 bp, Homo sapiens
ggccagagggcctgcctcccaggtggccccctcaggagtaggaggtcagccccttccgcgcaggaaggacctgccgctcacacatccttgtgatgtggccrtcctgggagcagagccaggcagaaactgtcctttttgtgacctagccttggcaatcacgtagcacatttctgcaaggctgttcatcagatgcaatgacca

SEQ ID NO: 246831 - DNA, 201 bp, Homo sapiens
cacagggtccgggacctggtgactcatcacagtggctgtgggaggcaggggcctggctgttatggaccctggagccaggatccccccacggcctgcgggcytcagagcctggattcttgcactgagctgagggtcgcctccccagagagccgaacggccgccacctggcgccatccccactgcagccccactggctggcgc

SEQ ID NO: 246832 - DNA, 201 bp, Homo sapiens
ggaagccagctgtcatttcaattgtccttcctgtgtcagtagtaagctttttgtctggctgcttttatagtctctttatttctggtgtttttcaacttgaytgtggtctttctagcatggatttctttttgtttatcctgttttggattcattgtactttctgaagataaagtatcatgtctttcagcaattctggaaaat

SEQ ID NO: 246833 - DNA, 201 bp, Homo sapiens
agattttctgactttatatctggacagggcgccgtaatggtagacgatggccgaggttcagggaaccctgtttctgtggttcaggacaggtccagcctttytgagccctgtccccgcagagagccccctttccaggcacccgtgtcttgggtcgccgctggccctgtgaggtgacactctgcagctcttgcactgtccagg

SEQ ID NO: 246834 - DNA, 201 bp, Homo sapiens
tgcacccaccccagctgctctgtggagtgaccctgtctccgtgttgatcctagtttctcctgtactgcgaggggacgcgcttcacggagaccaagcaccgygttagcatggaggtggcggctgctaaggggcttcctgtcctcaagtaccacctgctgccgcggaccaagggcttcaccaccgcagtcaagtgcctccggg

SEQ ID NO: 246835 - DNA, 201 bp, Homo sapiens
aaaaaccccaagtctgggtgccaactttattttctagagccggagaacggggtgatttcctaggaagagaccacagctcccctggaggttccacgctagaytgtgtttgtttttcttggtgcacacttggccaggagctgcttctctctgatctggaagctttctcttctatagatccgattaatgcacttccattgctaa

SEQ ID NO: 246836 - DNA, 201 bp, Homo sapiens
tcacgcgttctccccaggacggggccgggtcccaggtggaacttgcttttccctctggcagtgaccatgcagccgcctgggctgggtcattcaccctcccrtctcctcccacagtcgcagctgtctatgatgtaaccctgaacttcagaggaaacaagaacccgtccctgctggggatcctctacgggaagaagtacgagg

SEQ ID NO: 246837 - DNA, 201 bp, Homo sapiens
agatttcctctggaagacatcccgctggatgaaaaggaagcagctcagtggcttcataaactgtaccaggagaaggtaagcaggctctgctcccgctcagrgtcccggtctcctgaagaggctgtggaaggggtgctggcgagcaggcaggtgacacgtgggaactccgtgggagacaggagtgccacccaggtcctaaat

SEQ ID NO: 246838 - DNA, 201 bp, Homo sapiens
gctatcagattctccaaaaacgtacagccagcttcgcctgcacctgcagcttctgtgatttgtgctcttaattgacgtggcgctttttttaggttgagtcrtttttcattgccaacaatcttctcctgcattgaaataatagcttgtaaagaagcctcacgcttcctttttctctgttgactcttctaggacgcgctccag

SEQ ID NO: 246839 - DNA, 201 bp, Homo sapiens
ataattatggctggtaacatttggtcacatttgtttcattttcttaaaagacattacaggtatgtaacagacatagatggtcactagactccttgtataayagaaacaaattagggatgttagagcattgctttgaaaaccacactcagttcttatttctttcccccacggcttactcagcccaagaactactttctcttt

SEQ ID NO: 246840 - DNA, 201 bp, Homo sapiens
actcagttcttatttctttcccccacggcttactcagcccaagaactactttctctttgttttatacgcacaaatgcatggggcattcgatttccactgtyggccttgtgggagaggagataaccaggaaatcctcccaggatgtaaaaaatatcatcgtaaatgcattgatgggctctcaagaaaataagggaaatcggt

SEQ ID NO: 246841 - DNA, 201 bp, Homo sapiens
ctttgttttatacgcacaaatgcatggggcattcgatttccactgtcggccttgtgggagaggagataaccaggaaatcctcccaggatgtaaaaaatatmatcgtaaatgcattgatgggctctcaagaaaataagggaaatcggtcgggtgctgtggctcatgcctgtaatcccagcactttgggaggccgaggtgggc

SEQ ID NO: 246842 - DNA, 201 bp, Homo sapiens
gcctgggaaccaaggggcctcgaggtgtaaatcccagttgaagggcaggagaagatgagatgagatctgcccacgcaggcaggcaggaagcaaaaggggcrgattctttctccttttgttctactcaggccctcaaggggttggctgaggcccccgtacattaggaagagaagtctgctctactgagcccacagattcaaa

SEQ ID NO: 246843 - DNA, 201 bp, Homo sapiens
ataggtcttggttcatgtggcaccagcaggcagcagcacgtcaccaggagcaggagtggcaaacagtggcctgtgcccaccaccgccacgggcggctcaaraaagctttctgcctctggagggaaagtgcccaagggctcagaacagagtgagtggccagttctgccttacaagcctttccatcacaggccagctttgctt

SEQ ID NO: 246844 - DNA, 201 bp, Homo sapiens
ctgtgcccagccacttaattcacctcttatacgatagcatggtataaaaggaaaaatccaattatttggaacttctagttctgtttgggttaatttttatktttgttttaagtgctttacattcttccttgttttttagggagacattagagaagcaagtattttctctctggaggcagaagatgtttcagcatcgagaaa

SEQ ID NO: 246845 - DNA, 201 bp, Homo sapiens
atgaggggacaggaaggaaccagttcctgtggtgagttaggccatgtggggccacttaccctggctggaatggtttgaatgtgggtttgaaagggttttgwcccctgtccggtgatggaaggggcaagtccactctcaccaggagaggagggcatggaaaaggctgtagagcagtggcctctcactgaccacttctcactg

SEQ ID NO: 246846 - DNA, 201 bp, Homo sapiens
gtttccagctcatcttctaaccttaggggagtagcacttaagttatttctctgttgcagagatggctgagcgattccatcatgtcactgtgctccagatayacttctgtgactggcagcaggcctgggagcggagggagagcttgtacgctcaccatgcccaggtggagaaactggccaggaagatggccctgcggcgcgc

SEQ ID NO: 246847 - DNA, 201 bp, Homo sapiens
agcaagaccctgtctctacaaataataaaaaataagctgagcatggtggcacatacctgtggtcccagctacttgggaggctatggtgagaggactgcttsagcatgggaggttgaggctgcagtgagccgtgatggtgccgcagtacttcagcctggataataacatgagaccctgggtgacagcgtgagaaagaaaaaa

SEQ ID NO: 246848 - DNA, 201 bp, Homo sapiens
cagtttatggttttttggctgtctgctttccttccctttctctttgtgttgctttctccctcatctaagcttattcacctcttttatttttttcagagacrgggtctcactctgttgcccaggctggagtggagtggcgtgatcatagttcaccacagcctcaaactcctgggctcaggcgatccccccacctcagcctcc

SEQ ID NO: 246849 - DNA, 201 bp, Homo sapiens
acggtagctgctttctcctctgtctgcagtgcctggccctgcggggagcggagcggcagaagctgatgcgagcagacctgcaccaccagcacagcgtgctscacagggcgctgcaggcatgggtggtaggaactgctgcttccctcctgatcttgctgtggggacaggggaggtttctggagactttgttttccttccttg

SEQ ID NO: 246850 - DNA, 201 bp, Homo sapiens
aggcaacatgtcgtggacccccagcgtttggccatgaaaccagaaagttcaggatatctaggggatttcacacatatttcctaaattccagagctactgtrctttcggtggtctaattaggttttacaagaaagttgcaacattttaggcaatccacagtccaaaatcagaggttgacaaattttatattagatatcaggt

SEQ ID NO: 246851 - DNA, 201 bp, Homo sapiens
cccggcctaattttttaattttttgtagagatggggtctctctgtgttgcccagctgatctcaactcctagccttaagcaatccacccaccttggcctccygtagtgctgggatgataggcatgagtcactgcctggccaaaagtttttttattttaaacttttaattaattaattttgagactgggttatgacactggct

SEQ ID NO: 246852 - DNA, 201 bp, Homo sapiens
cagggtgcgggcagcagaattccacatggcccagctcctgcgttgggcctggagccagtggagggaggtaaggctttggtgcgaggtgccacccgtgtatracttttggacaggtgggctgtgtgtcagcaggactcacaggcaacatatgggccacaccacctacctctgagctgaaggaggagaacaggcagcatagaa

SEQ ID NO: 246853 - DNA, 201 bp, Homo sapiens
ggtatgcgcctgtagtcccagctactccagaggctgaggcaggagaatcgcttgaacccaggaggcggaggttgcagtgagcattgcaaccactgtgctcyagcctgggcgacagagtgagactccatcttaaaaaaaaaaaaaaaaaaaacattgaaaatgccacagttgccggatgcagtataatcctgcattacaggc

SEQ ID NO: 246854 - DNA, 201 bp, Homo sapiens
atgctgattgtatgttagaagtacattgactctaagagaaagcctaacaatggctgaaacaaattgagatttgttttttctgttttttgtttttttttttwaaattaactttttttttacctttagagacagggtctcactatgttttccaggctggtcttgaactcctgcactcaagcgatcctccctgctctgcctccc

SEQ ID NO: 246855 - DNA, 201 bp, Homo sapiens
gaacctaggaggcggagcttgcagtgagccaagatcgcgccactgcactccagcctgggcgacaaagcgagactccatctcaaaaaaaaaaaaaaaagaaraaaaactatgagtgggttaggaggagtgacatgttagtaacctgcagaaccatgaaaagaaatttaaagtgattgacaggccagtgtggtggctcatgct

SEQ ID NO: 246856 - DNA, 201 bp, Homo sapiens
gaggtgggcgatcacttgaggtcagtagttcaagaccagcctggccaacatggtgaaaccctgactctactaagaatataaaagccagttgtggtggcggrcacctgtaatccccactatttgggaggctgaggcaggagaatcgcttgaacccgggagccgagatcgcaccacagagtgagactctgtctcaaaaaaaaa

SEQ ID NO: 246857 - DNA, 201 bp, Homo sapiens
agaagcctcccttctctctctatcctggtgtcatctgccttccccgcacccatgcatctgcagcggggcattacgtcgctggaaagagaacaccatggccsgagtggatgaagccaaaaaaacctttcaagcaagtactcattacagaaggaccatatgttccaaggtgaggtataaggaggcaagctggtcacccaggag

SEQ ID NO: 246858 - DNA, 201 bp, Homo sapiens
agcatgatttgctatgttttctcctagtctgtgacttgtcttttcattctcttaacagtatcttttgcagaggaaaagtttttaattttgatgaagtccawtctatttttttttaatggattatgtttttttttttttttttttttttttttttttgcgagagtcccactgttgcccaggttggagtgcagtggtgtgagg

SEQ ID NO: 246859 - DNA, 201 bp, Homo sapiens
ctagtctgtgacttgtcttttcattctcttaacagtatcttttgcagaggaaaagtttttaattttgatgaagtccattctatttttttttaatggattatgtttttttttttttttttttttttttttttttgcgagagtcccactgttgcccaggttggagtgcagtggtgtgaggataacccattgcagcctggaact

SEQ ID NO: 246860 - DNA, 201 bp, Homo sapiens
tgaactgggaaatcaaaaaattcatgtgactggctttatttatgtggtctgcagctgaactctcagtatctctgaggtctgcctgtactagtcccagttcygccacttgttagctgggaaccttgagccctccagctgtaaaatgaagttgataaccacttgctgaggtagttatattaaagtaggtagttcatgaaaagt

SEQ ID NO: 246861 - DNA, 201 bp, Homo sapiens
gtaccttatctatagatgttattttgattatagtctatacatttttgattgtgtggtactctcaacattttgttaaaacataacattgataagaaaaaatygattctggatgggtccactgtctgtctgtagttggcacattcctcatgcctatgtgggtttttgccggatgctctgatttcctcccatgtccccacgata

SEQ ID NO: 246862 - DNA, 201 bp, Homo sapiens
tggcagacatgctgctgtgtgcagaagaagctgcccagtttgagatggcagaagagcaccacaggcacagccagctggtaagagccctgcatcctggcacrggtccgcttggcagccttgcttgggtatccactcttgggggaccctgacccctatcaccttcattaaatgcagtcagctatgggtgagttttggtcatga

SEQ ID NO: 246863 - DNA, 201 bp, Homo sapiens
tttcttggactgttttttttttttttttttttgagatggagtttcgctcttgttgcccaggctggagtacagtggtgcgatcttggctcactgcaacctcygcctcctaggtacaagtgattctcttgtttcagcctcccaagtagctcggattacaggcattcgccaccatgccaattttttttttttttttttaagtag

SEQ ID NO: 246864 - DNA, 201 bp, Homo sapiens
catgtcgtggacccccagcgtttggccatgaaaccagaaagttcaggatatctaggggatttcacacatatttcctaaattccagagctactgtgctttcrgtggtctaattaggttttacaagaaagttgcaacattttaggcaatccacagtccaaaatcagaggttgacaaattttatattagatatcaggttcttat

SEQ ID NO: 246865 - DNA, 201 bp, Homo sapiens
cctctatatagtcactacctggatatagtaattgttaatatttgctatgtttgcctcattgttttttgctgaataatttcaaagtaaattatagacatcaygacactttgcacctaaatatttcagcatgcgtcactcagagacattttcttatgtaacgacaatgtcattatcatccctaagaaaagtaacagtgattcc

SEQ ID NO: 246866 - DNA, 201 bp, Homo sapiens
atttggatagtttctgtttgtctccagttatgcaaatgcatgtgattttgatgttgagttttttggatactgtttatatggttttgtttcccaattagatkcagaagtaataatacatagaaatgtgaacattagtacactttttaacttaagtttattgagtttataccaaagtaagtcaagcactgtgctagacactgg

SEQ ID NO: 246867 - DNA, 201 bp, Homo sapiens
tgcagccggaggtcagcccagcagagactgcagctggagagggcagtgcaacaccaccaccggcagctgctgctggaggggctggcccggtggaagacgcwccatctgcagtgtgtcaggaagagggtgaggctgacggtggcaactctccaagttctgcctgcctggcaaggggtgtccaggccaggagaccatttctca

SEQ ID NO: 246868 - DNA, 201 bp, Homo sapiens
gtaagaagctattacaaaattccaggtgagattttccacaaagatgataagaagacggtggttggattctcaatgtctttaaaagatgtaactgacatctytaaaagatgtatggatgagatacgaagttttagcgtccaagatgacttccaagttttggcctaagcagttggaacaatggagtgccatttactgaaatag

SEQ ID NO: 246869 - DNA, 201 bp, Homo sapiens
acagtaccaggccctgtgtgcaggggcaggctagacactgagctggcacggccagtgcctgggaagcccagctcctgcagctgggagcctggtcttccccyacccctgcagggcaggcagtgacaaggacttggtgtccccctccctggcttcctcctagcttccttgctcagcatctacccttctttcctttgcaggtgt

SEQ ID NO: 246870 - DNA, 201 bp, Homo sapiens
tttttcatttgtttttctttttttgccctaacattacaacaaatatttaccctttctgttgccttttttctttcttctcacatctccaggtttctatctgkgataattttccttctcctatcagaacgtcccagggtattctctttcgggtaggtctgctagtgagaaattctctcatattttgtctaattccatcttcac

SEQ ID NO: 246871 - DNA, 201 bp, Homo sapiens
tagtctgtgacttgtcttttcattctcttaacagtatcttttgcagaggaaaagtttttaattttgatgaagtccattctatttttttttaatggattatgtttttttttttttttttttttttttttttttgcgagagtcccactgttgcccaggttggagtgcagtggtgtgaggataacccattgcagcctggaactc

SEQ ID NO: 246872 - DNA, 201 bp, Homo sapiens
gtctgtgacttgtcttttcattctcttaacagtatcttttgcagaggaaaagtttttaattttgatgaagtccattctatttttttttaatggattatgtttttttttttttttttttttttttttttttgcgagagtcccactgttgcccaggttggagtgcagtggtgtgaggataacccattgcagcctggaactcct

SEQ ID NO: 246873 - DNA, 201 bp, Homo sapiens
gagaaccgcttgaacaaacaaggcagacgttgcagtgagtcgagattgtgccactccactgcaccctgggcaacagagtgagactctgtctcgaaaaaatwaaaaaaatggcttccgcgggaggcctacacaccgccagttgtgttcctgctatgtctctagtgatccctgaaaagttccagcgtattttgcgaatactca

SEQ ID NO: 246874 - DNA, 201 bp, Homo sapiens
atcggcctcccaaagtactggtattacaggcgtgagccaccacatccggccgcttggagccaggttttaacctaagcagccagaaagctgcatcatcatcttttatatatatatatatatatgttttgagacagagtattgctcgctctgtcacccagactggagtgcagtggcgcgatcttgcctcactgcaacctctgc

SEQ ID NO: 246875 - DNA, 201 bp, Homo sapiens
tgcattcctgtaatcccagctacatgggaggctgaagcaggagaatcggttgaacccgggaagtggaggttgcagtgagcctagattgcaccactgcattscagcctgggcaacagagcgagactgtctcggaaaaaaaaaaaaagaaaaagaaaaaatgaaaactaggcaaggtgcagtggtgcctgtctgtagtcccag

SEQ ID NO: 246876 - DNA, 201 bp, Homo sapiens
gcctcccaaagtactggtattacaggcgtgagccaccacatccggccgcttggagccaggttttaacctaagcagccagaaagctgcatcatcatcttttatatatatatatatatatgttttgagacagagtattgctcgctctgtcacccagactggagtgcagtggcgcgatcttgcctcactgcaacctctgcctcc

SEQ ID NO: 246877 - DNA, 201 bp, Homo sapiens
ggctatggtgagaggactgcttgagcatgggaggttgaggctgcagtgagccgtgatggtgccgcagtacttcagcctggataataacatgagaccctggrtgacagcgtgagaaagaaaaaaggccaggcatggtggctcatgcctgtaatcgtaacactttgggaggctgaggtgggaggatcacctgagcctgaggag

SEQ ID NO: 246878 - DNA, 201 bp, Homo sapiens
ctagttttcttccctttctaagagccactttgagaggccataaactcattctactgatgctactgttgctcagaacatgtttagaattccccttttcttgtttgttgttgtttgtttttttgttttgagacagtctcactcttttgcccaggctggagtgcagtggcacgatcttggctcactgcaacccctgcctcccgg

SEQ ID NO: 246879 - DNA, 201 bp, Homo sapiens
ccccatcgtctcagcccaaaagcttcttaagctgataaccaacctcagcaaagcctcaggatacagatcaatgtgcaaaaattgcagacattcctgtacamcaacaacaggcaagcagagaaccaaatcatgaatgaattcctattcacagttgccacaaaaataataaaatacctaggaatacagctaacaagggaagtg

SEQ ID NO: 246880 - DNA, 201 bp, Homo sapiens
ataaacaaggcaccatttatctgcttacttactgatggactgttgacttcctctgctttttagaattacgaacagtactaccaagagcattctttttctattttttttttttttttgagactccgtgcagtggcacaatctcagctcactgcaatctccgcctcccaggttcaagcaattcttctgcctcagcttcccatg

SEQ ID NO: 246881 - DNA, 201 bp, Homo sapiens
actgtaaatatcaatatggactctctctctctctatatatatatgtgtgtgtgtgtgtgtgtgtgtgtgtgtgtgtgtgtgtgtatatatatatatatatttttttttttttaccataaatgcatttctggtctggcgcgatggctcccagcactttgggaggcagaggcaggtggatcacccgaggtcaggagttcgaga

SEQ ID NO: 246882 - DNA, 201 bp, Homo sapiens
gggaggccaaggtgggcagatcacttgaggtcaggagtttgagaccagcctggccaacatggtggaatcttgtctctactgaaaaatacaaaaattagttsggtgtggtggcaggtacctgtaatcccagctacttgagaggttgaggcaggagaatcgcttgagcccaggaggtggaggttgcagtgagctgagatcgtg

SEQ ID NO: 246883 - DNA, 201 bp, Homo sapiens
  misc_feature (1)...(201): n = A,T,C or G
taaaaaaaaaagtaatttaaatataatattttaagtcagagacctagcccacattcatctagtgttgaattaaggagagcaggagactaggagctggcatntagttcagaaatgtggctcctgagaggctgcaaatcattttctctcttttttattctctttttcttgtagttagaaggggaagataaaagactttgattc

SEQ ID NO: 246884 - DNA, 201 bp, Homo sapiens
tgacgcggcccttcctggcagaggccccgacagcactggtcccacacagccccctgcctggggccctgtcaagcgcccctggcccgaagcagcccccgacrgcaagcacaggcccggagctgctgctgctgcctctttcctccttcatgccctgcggggcggctgcaccagccagggtacgtcctccaccaccaggcctgg

SEQ ID NO: 246885 - DNA, 201 bp, Homo sapiens
ctaagtgggaggatcacctgagtccgggaaattgaggctgtagtgagctatgattgtaccactgccctctagcctgggcaatggagcaagaacctatctcaaaaaaaaaaaaaaaaaaaattagctgggcatggtggtgcatgcctgtggtcccagctgctcaggaggctgaggcaggaagattgcttaagcccaggaggt

SEQ ID NO: 246886 - DNA, 201 bp, Homo sapiens
gttggatttggtttgctactattttttgaggatttttatgtctgtagtcacgaggtctattggtcttttatttttctttttggtaatatctttgtctttgktatgatggcgatactggtctcaatgaatttggaagtgttcctctattttctggaagagtttatggagcattgttttgatatttatttatttatttattta

SEQ ID NO: 246887 - DNA, 201 bp, Homo sapiens
tcccccaaaaacttaaccaggtagggctatggactatgaggaggaacccatagagggtgccctcactgggtgggggctgcagcactgagctctgccatctmcccacaggaggacgggcagggtgcgggcagcagaattccacatggcccagctcctgcgttgggcctggagccagtggagggaggtaaggctttggtgcga

SEQ ID NO: 246888 - DNA, 201 bp, Homo sapiens
aaaatttttaattactcatttaattttttttacttgttagagatctattaggtttctatttattgtttttgtttgttttttgagatggagtctcactcttktcacccagactggagtacggtggtgtgatctcagctcactgcaacctctgcctccctggttcaagcaattctcctgcctcagcctcccgagtagctgaga

SEQ ID NO: 246889 - DNA, 201 bp, Homo sapiens
aattattttagattccacatataagtgagaacaggtcatatttgtctttgtgtgtttggagtatttcacttaatataatgttctccatttccgaaattcaygttgtcgaaaacgacagaatttcttcctttttttttttttttgagacggagtctcactctgtcgccaggctggagtgcagtggcacaatctcagctcact

SEQ ID NO: 246890 - DNA, 201 bp, Homo sapiens
ctgacagtgtttactacatggtccgcagagtactctttaggcctgctttatttcatcttctcaagcaaattaacgatggccttaatatgaagctctgtggsctctaactctggcatagtttctgttttttttttttttttttttttgagatggagttctgctctgtcgctcaggttggagtgcatggcgcgatctccgctc

SEQ ID NO: 246891 - DNA, 201 bp, Homo sapiens
cggtggcaactctccaagttctgcctgcctggcaaggggtgtccaggccaggagaccatttctcaggaaggggtctttcctgacagcactccatgcagccrgtatgagtggtgggtggtttggggtcctgtaagacaaagctgcaggagcctttctgggcgtttggtggagcctagcgagtagccagccccagaatccagt

SEQ ID NO: 246892 - DNA, 201 bp, Homo sapiens
aaagatgataagaagacggtggttggattctcaatgtctttaaaagatgtaactgacatctctaaaagatgtatggatgagatacgaagttttagcgtccmagatgacttccaagttttggcctaagcagttggaacaatggagtgccatttactgaaataggaaagactgcaggagaagcaggtttgtgggaagagatta

SEQ ID NO: 246893 - DNA, 201 bp, Homo sapiens
aattttatattagatatcaggttcttattgccgtctctcctagaatgaaactagtaagcccatggggtgcctttaactcacaggaagtaactgtaccgcartttacctgccttaaaacaaagttttaaaaacttgaaacctgaaggtgttcttccttttgtttcagaatagcactgctgtgcaaatgtatcgaattgtggc

SEQ ID NO: 246894 - DNA, 201 bp, Homo sapiens
taagtgggaggatcacctgagtccgggaaattgaggctgtagtgagctatgattgtaccactgccctctagcctgggcaatggagcaagaacctatctcaaaaaaaaaaaaaaaaaaaattagctgggcatggtggtgcatgcctgtggtcccagctgctcaggaggctgaggcaggaagattgcttaagcccaggaggtt

SEQ ID NO: 246895 - DNA, 201 bp, Homo sapiens
taatatttgtattttttttttttgagacggagtctagctctgttgcccaggctggagtttagtggcgcaatctcggctcagtgcaagctctgcctcccagsttcatgccattctcctgcctcagcctcccaagtacctgggactacaggcgcctgccaccacgcccggctaattttttgtatttttagtagagagggggtt

SEQ ID NO: 246896 - DNA, 201 bp, Homo sapiens
aggtacatttgggaaattcaggagttcttagtaggcagatggtatgtaaagttactagagtgagcggggtgcggtggctcatgcctgtaaatcccaacactttgggaggctgaggcgggaggattgcttgagcccaagagttcaagaccagcctgggcaacatagagagaccccatctgtttttttaaaaaaagctactag

SEQ ID NO: 246897 - DNA, 201 bp, Homo sapiens
gcgtaggcaaccttcctccaggttccctgtctctccacacttctcttatcacagtgtgagtcacctgtgttgccactgcctggttatgccctgttatcccygtagcacctggagtttggtctccagcagtgctgggtccctcatgcactcttggtgcccagcccagagcagctgctcagtagccatttgttggacatagat

SEQ ID NO: 246898 - DNA, 201 bp, Homo sapiens
aaaattgtagacacaaagtttatcttaaagtgtatatctcctaaaaaggatggtctcccacataaccataatatcattattatattccaagaaatttaatrttgatataatatataacatgcagttcatattaaaactgtatattgttgctattttcatttccatagtctaattaaaggtcacccattgcttttagttgtt

SEQ ID NO: 246899 - DNA, 201 bp, Homo sapiens
attaaggaggaaaatacatcatccttgagtcacatttatttctctttgggcttttatttatatatctgtatctatatctatctagctatctgtagatagattttttttttttttttgagatggagtttcgctcttgtcacccaggctggagtgcagtggcgcaatctcggctcactgcaacctccgtctcctgggttcagg

SEQ ID NO: 246900 - DNA, 201 bp, Homo sapiens
tgtggcaccagcaggcagcagcacgtcaccaggagcaggagtggcaaacagtggcctgtgcccaccaccgccacgggcggctcaagaaagctttctgcctytggagggaaagtgcccaagggctcagaacagagtgagtggccagttctgccttacaagcctttccatcacaggccagctttgcttgttctagcagcacca

SEQ ID NO: 246901 - DNA, 201 bp, Homo sapiens
gaggcataggttgcagtgagccgagatcccgccactgcactccagcctgggcaacagagcgagactccaactcaaagaaaaaaaaaaaaaaacttagtgcgtgtgtgtgtgtgtgtgtgtgtgtgtgtgtgtgtggccttgaacccctgctctctgccagtagtggggttcagcttgtcttaaagatgtttccagctcatc

SEQ ID NO: 246902 - DNA, 201 bp, Homo sapiens
aggggagtagcacttaagttatttctctgttgcagagatggctgagcgattccatcatgtcactgtgctccagatacacttctgtgactggcagcaggccygggagcggagggagagcttgtacgctcaccatgcccaggtggagaaactggccaggaagatggccctgcggcgcgcctttactcactggaaacactgtat

SEQ ID NO: 246903 - DNA, 201 bp, Homo sapiens
ggattttctctttttgaagtacatattcaagtcttattcctgtttttctcatgagttgtatattgagtatttgtactaattaatatataggaggttttctrtttttgaatatgaatcttttgtatgttttatgtgtgataaatatcttctccctctgctctcttcatcatttgatgaattaagatgttttaaattttaagc

SEQ ID NO: 246904 - DNA, 201 bp, Homo sapiens
aggcataggttgcagtgagccgagatcccgccactgcactccagcctgggcaacagagcgagactccaactcaaagaaaaaaaaaaaaaaacttagtgcgtgtgtgtgtgtgtgtgtgtgtgtgtgtgtgtgtggccttgaacccctgctctctgccagtagtggggttcagcttgtcttaaagatgtttccagctcatct

SEQ ID NO: 246905 - DNA, 201 bp, Homo sapiens
tataattaatatgtgttctctcaggtttaaggaatctatttcttccctgatgtcatgaagatattctggtttttgttttttggagacagggtctcgcactrtcacactggctggattgcagtggcacaatcagggtcactgcagcctcaacctcccaggcttgaggagtcctcccatctcagcctcccaaatagatggcac

SEQ ID NO: 246906 - DNA, 201 bp, Homo sapiens
tgcactccagcctgggcaacagagcgagactccaactcaaagaaaaaaaaaaaaaaacttagtgcgtgtgtgtgtgtgtgtgtgtgtgtgtgtgtgtgtgsccttgaacccctgctctctgccagtagtggggttcagcttgtcttaaagatgtttccagctcatcttctaaccttaggggagtagcacttaagttatttc

SEQ ID NO: 246907 - DNA, 201 bp, Homo sapiens
tgatgaggggtaatagctttacctttaaatcttttggtgcctttgatgtcacttcaagtatctctgcagtgaggtatccaaggatggctgcactgttcacrgtggcagtcacgcccctacacatccatgactggtcgtcctacatttgaggtgtctgtctatgaatatggcccacccggaactgtaaggaggctctctgtg

SEQ ID NO: 246908 - DNA, 201 bp, Homo sapiens
ggtagtagaatgttcagatgaaaaggatattcaggaacctgcagacataaaatctgtcattgagtgttttcatttctccacttgtgcctcacaatatgacrctatcaagattcttccagaaaaagtctaaacgtggtccaagaaagaaggaactactcttttttgctattctttttttccccccagattttctggtgaatt

SEQ ID NO: 246909 - DNA, 201 bp, Homo sapiens
cacctccctcccggacggcacggctggccaggtggggggctgacccccccacctccctcccggacggcacggctggccgggcgggggggctgaccccccayctccctcccggatggggcggctggccgggcggggggctgacccccccccacctccttcccggacggggtggctgccgggcggagacgctcctcacctccc

SEQ ID NO: 246910 - DNA, 201 bp, Homo sapiens
tgtgatatggtgtcataacattacaggaggggtttgaacagagtgctgagagtacacagctactcactctgtttacattggagaaggttcaggcatttgcyggccattttaggcaggaagaataatatgaacaaaagaattattatgtacttcctgtacctcatttttgaagtttttaatctcttcactgacaatttatgt

SEQ ID NO: 246911 - DNA, 201 bp, Homo sapiens
tgaggcaggagaattgcttgaacttgggagatggaggttgccgtgagctgagatcgcatcattgcactccagcctgggtgacagggcgagacgccgtctcaaaaaaaaaaaaaaaaaagaaaaaggccgggcctggtggctcatgtctgtaatcccagcactttgggagtccaaggcgggcggatcacgaggtcaggagat

SEQ ID NO: 246912 - DNA, 201 bp, Homo sapiens
  misc_feature (1)...(201): n = A,T,C or G
atctataagataatacacatttcgtacattatgttacagtcaaaaaacattctgagtagtgcatggaaatatcaatcattaaaatttgattctgagcagangtgagtattattttcctgagctttgaagttatatcatccaggttggctggctctcgtgtcttctacttttgatcatggttgctttcagacttttaccttc

SEQ ID NO: 246913 - DNA, 201 bp, Homo sapiens
aaaaacttacttgcaaggccactgagcgaggaggtaggagaacaggtctcaaaccggcctccccaaagataagccttagggatatttgtgggttagggaaktggggtggtttaaggtgtggggaaaggtgattggcagtggggaaaatgcagtaacattcattgcacacaagtgtagtcagggttcatggcatgtcatagg

SEQ ID NO: 246914 - DNA, 201 bp, Homo sapiens
tcatgcgagttgcctgcttcagcctcccaagtagctgagaccataggcatgcgccaccacgcctggctaatttttgtatttttagtagagatgggggtctygccatgttggccaggccggtctcggactgccctcaagtgatccacccaccttggcctcccaaagtgctgggattatagacatgacactgcatccagctga

SEQ ID NO: 246915 - DNA, 201 bp, Homo sapiens
gtggcctgtaaattctttcctggcttctgtgcctctctcctacttgatttattctgttctctccttcctgtcctgcctcaggccatccttcacgcagagcracagcttctgtataggtcttggttcatgtggcaccagcaggcagcagcacgtcaccaggagcaggagtggcaaacagtggcctgtgcccaccaccgccac

SEQ ID NO: 246916 - DNA, 201 bp, Homo sapiens
ggaattgagcatggtggctcatgcctataatcccagcactttgggaggctgaggccagtggaccacccgagctcaggagttcgagaccagcctggccatcrtggcaaaaccccatctttactaaaagtacaaaaattagctgggcatggtggcacacgcctgtagtcccagctactctggaggctgaggcaggagaatcct

SEQ ID NO: 246917 - DNA, 201 bp, Homo sapiens
tgagattactttgaatctatagatcagagtgggaaaaactgacatctgtattgtactgagttctccattttgcctataaaattattagatttactcctatrtttgatatttgtgatgccatttgaaaatagtatataaatatatataactattttttccttattgctagtttatagaaatatagagttgaccctcatttat

SEQ ID NO: 246918 - DNA, 201 bp, Homo sapiens; identical to SEQ ID NO: 48063

SEQ ID NO: 246919 - DNA, 201 bp, Homo sapiens
tgaccaacatggagaaaaccctctctattaataatacaaaaattagccaggcgtggtggcgcaagcatgtaatcccagttactcaggagagtgaagcacgraaattggcatgaacccgggaagtgaaggttgcagtgaaccgagatggcaccgctacactccagcctgtgcaacagagcgagactctgcctcaaacgaaca

SEQ ID NO: 246920 - DNA, 201 bp, Homo sapiens
cttgctgaccttggcctcgcctttcctgactttcagtctccctataaaattggagatcccacagagatctcagacccccctgcagcccctggtcagcccargggaacagaccccatgtttctttccagcaacactgcccactcagcgaggaagcagccgcgacgcccacacttcctgttggagcctgcgcagagccagagg

SEQ ID NO: 246921 - DNA, 201 bp, Homo sapiens
cacggaaattggcatgaacccgggaagtgaaggttgcagtgaaccgagatggcaccgctacactccagcctgtgcaacagagcgagactctgcctcaaacraacaaaagtgaccatagccagggaataaactgatgggcccatattgtgatagctgactgctgcagataagggatagggacagcagctgtggccagtgggt

SEQ ID NO: 246922 - DNA, 201 bp, Homo sapiens
cagcccagtcactatagagactgtcctgctttggggcctttcagtgtccactgtgtgttctgaggatctcactccctgtcgcacactgaccatgtttaacyagtttctcagttgggggcttcacacctgcacatgtgagcttcaatggcacctgaagccctgggaagttgtaggccaaaatttgatcataggtgctttttt

SEQ ID NO: 246923 - DNA, 201 bp, Homo sapiens
tctcccgggcgcctcccaagctccagctggggaacaaggaatgcactccaaaccccagccttttagggggtcctgctgagggccaggtcggggatgatccygggttcctagtcgctaatatcatggtcttggcttttccacttcactcacgggttcgccttcatgtcttaagcccctgctgtgtgcagggcaggaccttgg

SEQ ID NO: 246924 - DNA, 201 bp, Homo sapiens
taggtgggagggtcacttgaaccttgaaggtcaaggccacagtgagccgtgattatgccactgcactccagcctgggcgatggagtgagaccctgtctctmaaaagtaaataaataaaataaatgcctccatccctcatatggagtcccatagagcacccatcccgctcttcagacagggtggaataagcaagaactccct

SEQ ID NO: 246925 - DNA, 201 bp, Homo sapiens
gaaattgtttaaattggcccatagagaaattgaccaagtggttaagttggtttaatagagtttgctccaggacaaaactgaatcagctttggtttggttcygactgtagcgtgtgtgttaatgagcatgtttcaacacacatcctggggacaaaaccctggggtcagccatcccacacggctgcattactgcgccacgaat

SEQ ID NO: 246926 - DNA, 201 bp, Homo sapiens
acagtgcctacctcttggggttgtcgtggagatcaagtgagatgacaggtagagagatacacacttaggacagagcccaggcatcagcatgcagcactaaygtgggtgcctcccacttgtgatctgccgccttccctgcctgcctcagtgggcctggagggctcctcatcttggcatctgtgccctgctctcaaccctgtt

SEQ ID NO: 246927 - DNA, 201 bp, Homo sapiens
ttgggaaacagagttctttgactggaagaaggaactgggggtggggactggtttggggtgaagtgtcaagagtgttttgaaccaggctcttgatgtcaaayttgagagaaagcaaacgttgagtctgaccttcaaggaagaggtcagggccagagattgagaagaatcttcagcacaggccgaaggtaaccccagagccac

SEQ ID NO: 246928 - DNA, 201 bp, Homo sapiens
aaaggtcctctgtgccctcctgcttctctttgtacctccagttctctatttcacactcccttccagctcagatgtcacctcctcccccaggccagtccacstccacccctaccccagaggcatagctttatcagaacattcatcttatagttgttcactggcttctctttccccacaggctgtgaagtcctttagagtaca

SEQ ID NO: 246929 - DNA, 201 bp, Homo sapiens
ttttctttggccatactaataggtgtatacaggcatttaattgtgggtttttaaaaattggtgttacatgagtatactgcataatgatggagatttgactrtccactacccaaatagtgaacgttgtacatgataggtaatttttcaacccttgggcctcttccaccctcccttcccctcgtttggagtccccagtgtcta

SEQ ID NO: 246930 - DNA, 201 bp, Homo sapiens
caacatggtgaaaccccatgtctactaaaaatacaaaaattagcggggcgtggtggtgcatgcttataatcccagctactccggaggctgaggcacaagartcactttaacccaggaggcagaggctacagtgagttgagatggcgccactgcactccagccttggatgacagagcgagactccatctcaaaataaatatc

SEQ ID NO: 246931 - DNA, 201 bp, Homo sapiens
atctcctgacctcgtgatccgcccacctcggcctcccaaagtgctgggattacaggcttgagccactgcgcccagccttttttttttttttcagatggagyctcactttgtcacccaggatggagtgcagagtggcgtgatctcggctcactgcagcctctgcctcctgggttcaagcaattatcttgcctcagactactg

SEQ ID NO: 246932 - DNA, 201 bp, Homo sapiens; identical to SEQ ID NO: 48078

SEQ ID NO: 246933 - DNA, 201 bp, Homo sapiens
agccagatatgtaacaatgagctgcattatcatgggacagatttcactctatgttgtctgtagttgtccactggtgtcctgaatggtaatatattaataaytcacttcctgcctgaaagttgggtattgaacaaagtatggataataggagaggctttgcagctgcacttacttgggtttgaatccctcttccaacctgta

SEQ ID NO: 246934 - DNA, 201 bp, Homo sapiens
gtgattccctggatgcataagaagataagtgataatgtgagatagcttgaggttttgcagtgagtgctgcaagtgagcctggtctaagagaaatctttgtaggttagagtgaccaggaaaagtgagtgtttctgtaaagcacaggttgtaaactcttatttccccatgactcttttcctagagcaaattcgaaaattagta

SEQ ID NO: 246935 - DNA, 201 bp, Homo sapiens
cgggcagcagaattccacatggcccagctcctgcgttgggcctggagccagtggagggaggtaaggctttggtgcgaggtgccacccgtgtatgacttttsgacaggtgggctgtgtgtcagcaggactcacaggcaacatatgggccacaccacctacctctgagctgaaggaggagaacaggcagcatagaaagtgtta

SEQ ID NO: 246936 - DNA, 201 bp, Homo sapiens
aggtgtaagccaccgtaccaggccataacatatcttttaacaaatcaaactgtgtaggtcaaacagagcatgtctgtggtgtctaaagcaggatctgaccrtaggaaccataagtttccaaccattaatgggcagatctgggactttttctcaattgttttgttttatttttttccccagcagtgaatctagagatggtac

SEQ ID NO: 246937 - DNA, 201 bp, Homo sapiens
ttgcctctccaggagccaccgtcacagacctggggtggacccggaagccaggaggtatagtgactcttgctgtgctccttgcctgcccataggtcctggtscagtggcgggaagctgtgtcagtgcagatgtattaccgacagcaggaggactgtgccatctgggaggcccagaaggtgctggacaggggtaagtggggcc

SEQ ID NO: 246938 - DNA, 201 bp, Homo sapiens
agaaacagcagtatactctgatttcctcgttgctgttttcctacagcaaatcagaaaataattggggcagaaaagaaacttaagactgaaaagaaaacctrtcttccttttctttatagttttgattgtcttagagtgttcttttaggcaagccactagctttttttgtcaatcataaatggctaaggcctgtactaaaac

SEQ ID NO: 246939 - DNA, 201 bp, Homo sapiens
gaatcactttaacccaggaggcagaggctacagtgagttgagatggcgccactgcactccagccttggatgacagagcgagactccatctcaaaataaatmtctctctctctctctatctatctgtctatccatctggagggctttgaatgctagtttgaggttagccagaactctggcttccttagtacgaagtccaggg

SEQ ID NO: 246940 - DNA, 201 bp, Homo sapiens
gtccctaccctgcataggtaaccagtattctgatttccgtcatcataggttagttttgcatggtttttttcttgtcgcccaggctggagtgcagtggcgckgtctcagctcactgcaagctctgcctcccaggttcatgccattctcctgcctcagcctcccgagtagctgggactacagacgcctgccaccacgcccagc

SEQ ID NO: 246941 - DNA, 201 bp, Homo sapiens
cctgtaggtggtctcggtctagccatggaggggtgtggggagccctcagtgtgtgctgtccagaaagaccccatctccaccatggctctctacccggctcrgtgctgcttaggaaggcccaagtcgtcagactcacctgtgcacagaggctctgcttcctatgggggggacgataaagttgagcaaaactctaaaaacccg

SEQ ID NO: 246942 - DNA, 201 bp, Homo sapiens
gtggtagatgcacctctgaggcctgcctaaacagggggaagtgtgggcccaagagcagcctcagtcttccttgtcccctacagacttaccagggcagggtrcgaagcatcctccgggaggtggcagccagggagagccagcacaacaggcagctgctgcggtgagtctcccgggcgcctcccaagctccagctggggaaca

SEQ ID NO: 246943 - DNA, 201 bp, Homo sapiens
cagcctcccaaagtgctgggattacaggctctttgaatccaggaggtggaggttgcagtgagccgaattgcaccactgcactccagcctggacaacagagmaaggttgtctcaaaaaaaagaaaagaaaagaaaaaatacccgaagctagcctgtgcctcccttcccctggaagaaggaacacaggaatctttgcttggct

SEQ ID NO: 246944 - DNA, 201 bp, Homo sapiens
actggctagccatattcaaatattgaagctggaccccttctttacaccatatataaaaactaactcaagatgggttaaagacttaaatttaaaacccaaarctataaaaaccctggaagaaaatctaggcaataccattcaagacataggcacaggcaaagatttcatgatgaagatgccagaagcaattgcaacagaatc

SEQ ID NO: 246945 - DNA, 201 bp, Homo sapiens
tgaacctgggaggcagagcttgcagtgagctgagatagcaccactgcactccagcccgggcaacagagcgagactctgtctaaaaaaaaaaaaaaaaaaawatatatatatatatatatatatatatataatcagtgggccgggcatgatggctcacgcctataatcccaggattttgggaggccgaggcaggaggatcac

SEQ ID NO: 246946 - DNA, 201 bp, Homo sapiens
aacctgggaggcagagcttgcagtgagctgagatagcaccactgcactccagcccgggcaacagagcgagactctgtctaaaaaaaaaaaaaaaaaaatatatatatatatatatatatatatatataatcagtgggccgggcatgatggctcacgcctataatcccaggattttgggaggccgaggcaggaggatcactt

SEQ ID NO: 246947 - DNA, 201 bp, Homo sapiens
tatagatgaggccagagaggttaatttacactcacacagatgatgtataaaatggaggcaaagcaggaagccacccccaactcagaccccagcccacggtrgctgctttctcctctgtctgcagtgcctggccctgcggggagcggagcggcagaagctgatgcgagcagacctgcaccaccagcacagcgtgctgcacag

SEQ ID NO: 246948 - DNA, 201 bp, Homo sapiens
gtctgcaccttcaccattatgtagtcactggtggaaatcccacaaaacagcaaactctgacttggatctgccttaggctgtctgcggacctggtttcagcrctggtgggactgcagccggaggtcagcccagcagagactgcagctggagagggcagtgcaacaccaccaccggcagctgctgctggaggggctggcccgg

SEQ ID NO: 246949 - DNA, 201 bp, Homo sapiens; identical to SEQ ID NO: 48049

SEQ ID NO: 246950 - DNA, 201 bp, Homo sapiens
gtctcgatctcctgaccttgtgatccacccgcctcagcctcccaaagtgctgggattacaggtgtgagccaccacgcccggctgtactttttcatgagacrgcaagaatatgtgatttgggaagagatgttagctccaacatcatcatatatatatatgattttttttttgccgtagattttactatgagcagcgattact

SEQ ID NO: 246951 - DNA, 201 bp, Homo sapiens
tcgtccctttgtggctgctgttcttagaaaataactgcttacaaggctgacccttggctggtgtctggaaacttagatttcagaagggttcccaccattcyctaactgatgaatagttaactggacctacactgttgtgtgttcatgcaatgttgtttatgctgaatactagcactccctctaggagtctggaattttggt

SEQ ID NO: 246952 - DNA, 201 bp, Homo sapiens
tccctaccctgcataggtaaccagtattctgatttccgtcatcataggttagttttgcatggtttttttcttgtcgcccaggctggagtgcagtggcgctrtctcagctcactgcaagctctgcctcccaggttcatgccattctcctgcctcagcctcccgagtagctgggactacagacgcctgccaccacgcccagct

SEQ ID NO: 246953 - DNA, 201 bp, Homo sapiens
gacctgggacaacctcagtaaaattttgggtatttccctctgttcagctgtctcctttctagtaccctgaccccaaattccagcccctctggcagtcatgmactccagtctttgcctcctcagctcactgagactgagggaggctctgcttagcctcccttcccctcactgtttagaaggtgcccccaggcagaaagtctg

SEQ ID NO: 246954 - DNA, 201 bp, Homo sapiens
ctttctttgcacagtatttttgctttagagccctaaaagacaatgtgacccacgctcatctccagcaaataagaaggaatcttgctcaccagcagcatggkgtcacggtgagggttgtcttctgtatcaagggacctcttctgaaggccattctctctcgctctttttttcagtcttgccaaattaagcagaactcttttt

SEQ ID NO: 246955 - DNA, 201 bp, Homo sapiens
tcgcaaactcctggcctcaagcaatccacctgcctcggcctcctaaagtgctgggattacagacatgagccaccatgcccggccccaataggaggctttgrttgtgtttctattgtaagtctattcacttccattgtaagtccattataaaacaatggtttgtttacttgatgccaacatatattgtctctactttcttgg

SEQ ID NO: 246956 - DNA, 201 bp, Homo sapiens
gcgtgcaaggcagttacttcctggaccgtgtgtgagaagcaaatggcaacagcttggccttgcctctccaggagccaccgtcacagacctggggtggaccyggaagccaggaggtatagtgactcttgctgtgctccttgcctgcccataggtcctggtccagtggcgggaagctgtgtcagtgcagatgtattaccgaca

SEQ ID NO: 246957 - DNA, 201 bp, Homo sapiens
aatgcattggcatgatcttggctcactgcaacctctgcctcctgggttcaagcgattctcctgcctcagcctcctgagtagctggaattacaggcacctgycactacacccagctaattttgtgtttttagtagagacagggttttgccatgttggccaggctggtctcaaattcctgatctcaggtgattctcccgcctg

SEQ ID NO: 246958 - DNA, 201 bp, Homo sapiens
tgagggtcttgttagttgagcaggctggtcttgaactcctggtctcaagcagtcctcctgccttggcctcccaaagtgctcaccacaacctccgcctcccrggttcaagtgattcttctgcctcagcctcccgagtagctgggattacaggcatgtgtcaccacgcctggctaattttttgtatttttagtagagacaggg

SEQ ID NO: 246959 - DNA, 201 bp, Homo sapiens
ggcaggctagacactgagctggcacggccagtgcctgggaagcccagctcctgcagctgggagcctggtcttcccccacccctgcagggcaggcagtgacraggacttggtgtccccctccctggcttcctcctagcttccttgctcagcatctacccttctttcctttgcaggtgtcagcacagcgggctactcctaggg

SEQ ID NO: 246960 - DNA, 201 bp, Homo sapiens
ggacccagcctggcaggcagtgggtatctccacccctcaggtcctgtcggcggcaagcgagcagcctgcgcaggtggctggagctgaacagagaggagccrgggcctgaggaccaggaagtagagcagcaggtgcagaaagagctggaacaggtgaggccccaggccatccccaggtgtccctggggacgccccgggctgt

SEQ ID NO: 246961 - DNA, 201 bp, Homo sapiens
tgcccttctatgcgttagtgtggcagattcagaaaggcctgctggggtggaggtcctgctgtaaaccatttgttcctgactttgggtttttggctgatcakatgggagatagaatgagcatatttgcattggttcttggccaccatagtctgaagtatgtgcctggtcgctcactgccttggtcctacaggcatcaatatg

SEQ ID NO: 246962 - DNA, 201 bp, Homo sapiens
tagggatactgaaatatatagtactcgggcgtggtgactcgtgctggcaatcccagcactttggtttttcgttttgttttgttttgttttgttttgttttrttttagacagagtcttgctctgtcgcccaggctggagtgcagtggtgcgatctcagctcactgcaacctccgtctcctgggttcaagcgattctcctgcc

SEQ ID NO: 246963 - DNA, 201 bp, Homo sapiens
agttgtagcaacctgccgggtccacgcatgggcgggtcatactccacgggttccggtttccactccctgtgaaccaaaagccagagaggcccacgcacgastccggaagtgagggagggaggactttcgtacgcagccgcctcccagctggaacctcatctttagtgctcggccgcgggcggcgtaactcggggttccgcc

SEQ ID NO: 246964 - DNA, 201 bp, Homo sapiens
cttgtgtcttcctgtacatttgaatgttcatctgtatcatttcccttcagcctaaagatgatcttttagtgtttttatactaaggtcaactggggttgaaygatctcagcttttgtgtctggtctctgccctctggctgggccagagctccgtctttcaaccctgtccagcttctgctgtctctgttcccctcttggccct

SEQ ID NO: 246965 - DNA, 201 bp, Homo sapiens
tatccatctggagggctttgaatgctagtttgaggttagccagaactctggcttccttagtacgaagtccagggagatggttttaggtggtggccacgggraatagaggctgatgaaaggacatctcttgtctcttctggcttctgcagacagagcagctttgcctttacctagtcatgtattgtgggctggtataagatt

SEQ ID NO: 246966 - DNA, 201 bp, Homo sapiens
gccacgggcggctcaagaaagctttctgcctctggagggaaagtgcccaagggctcagaacagagtgagtggccagttctgccttacaagcctttccatcmcaggccagctttgcttgttctagcagcaccatgagctccaagtgcctgtctggaggactgcattaccccagactctggttgtaagttctggaagttcaac

SEQ ID NO: 246967 - DNA, 201 bp, Homo sapiens
  misc_feature (1)...(201): n = A,T,C or G
tcccaagctccagctggggaacaaggaatgcactccaaaccccagccttttagggggtcctgctgagggccaggtcggggatgatcctgggttcctagtcnctaatatcatggtcttggcttttccacttcactcacgggttcgccttcatgtcttaagcccctgctgtgtgcagggcaggaccttggaaagcagctgtta

SEQ ID NO: 246968 - DNA, 201 bp, Homo sapiens
aggaggcagaggctacagtgagttgagatggcgccactgcactccagccttggatgacagagcgagactccatctcaaaataaatatctctctctctctcyatctatctgtctatccatctggagggctttgaatgctagtttgaggttagccagaactctggcttccttagtacgaagtccagggagatggttttaggtg

SEQ ID NO: 246969 - DNA, 201 bp, Homo sapiens
acccgagctcaggagttcgagaccagcctggccatcgtggcaaaaccccatctttactaaaagtacaaaaattagctgggcatggtggcacacgcctgtaktcccagctactctggaggctgaggcaggagaatcctttgaacctaggaggcggagcttgcagtgagccaagatcgcgccactgcactccagcctgggcga

SEQ ID NO: 246970 - DNA, 201 bp, Homo sapiens
ccgtaccaggccataacatatcttttaacaaatcaaactgtgtaggtcaaacagagcatgtctgtggtgtctaaagcaggatctgaccgtaggaaccatargtttccaaccattaatgggcagatctgggactttttctcaattgttttgttttatttttttccccagcagtgaatctagagatggtactatgaaggagag

SEQ ID NO: 246971 - DNA, 201 bp, Homo sapiens
ccatatgaagccctgtcctagaagggtaccctggcagatgagttttgagattccctaggggctggactgctctagctgtttcagttcttatgtgagccctsgtgctggagaggataaaactcatagtttcagctgctggtcttaaattgggcctctgtaccttccaacaacagctcattggctattttagggttctcctgt

SEQ ID NO: 246972 - DNA, 201 bp, Homo sapiens
tccctgcctctccctcaggccttagccctgccttgggtggagggagggcacctggtctgtgggggagctctaagcagggagacctgggcctcacctcctgycctccctggaggtgtgggccacgtggctggcctttgtactggaaaggaggagaaagaaggcgcggctgcagtgggcgctccaggcctaccaggggcagct

SEQ ID NO: 246973 - DNA, 201 bp, Homo sapiens
catcaggtcctgcaaaggtctgtatcattaatcagtgtcatcagtgtcctcagaagacactagcagagtccagggtgatgcgttcagccacaagcacaaaractgctttttctaaagagcaggatgaggtgaatgtgggaacggaaagcagttgtcacgaaggctgtgtggctctgctgggggagaggcatccacagtctg

SEQ ID NO: 246974 - DNA, 201 bp, Homo sapiens
aggaaccataagtttccaaccattaatgggcagatctgggactttttctcaattgttttgttttatttttttccccagcagtgaatctagagatggtactrtgaaggagaggactagagctgagggtctgaggccccacactaactgctcctctctttcctgagtggctttttactgatggattccatctttgatttgctg

SEQ ID NO: 246975 - DNA, 201 bp, Homo sapiens
cagccaccagggctgggcctggactttcaactgcaggtgtgtacctggggcctgtcagggcagaaagcactcaggccactcccggacctgggacttgctayttaccctggtccccgaggggaaaatagtctgaaacaagcttacttctgtcgccataggcagcctggaccttgaggctgaacttgaggagatccagcagca

SEQ ID NO: 246976 - DNA, 201 bp, Homo sapiens
ggcggagcttgcagtgagccaagattgtgccattgcactccagcctgggcgacagagtgatgagactccatatcaaaaaaatatatatatattttgtgacsccatagctgccataggtagtgattcctctgatggatctgggcaaagtaaattgaaaatgttctggaaaggatttctaggtgccattaagaacattcatga

SEQ ID NO: 246977 - DNA, 201 bp, Homo sapiens
agactgcaccactgcactccagcctgggcgacagagcaagactccgtctaaaaaaaaaaaaaaatcattaaaaggagtttgaaaaagttgagtcaggccgmcatggataactgagagactcaagacccgagtggaggaagtaactgcagatatgatagaaaaatcaagcaaactggaattagaaggggagcctaaaaatgt

SEQ ID NO: 246978 - DNA, 201 bp, Homo sapiens
agaaatttaaagtgattgacaggccagtgtggtggctcatgcttgtaatcccagcactttgggaggccaaggtcagcagattgtctgagctcaggagtgcragaccagcatgggcaacatggcgaaaacccgtctctactgaaatacaaaaaattagctcgtttgggtggcgtgtgcctggagtcacagctactcaagaga

SEQ ID NO: 246979 - DNA, 201 bp, Homo sapiens
ccagagtgcagtgacacattcacggctcactacagccttgacctctggggctcaagcgatcctcccacgtaagcctctggaatagctgacaccacaggtgygtgcctccatacttggctaactaaaaaaatttagggggggctggatgtggtgattcaggcatataatcccagcattttgggaggccgaggcaggcagatc

SEQ ID NO: 246980 - DNA, 201 bp, Homo sapiens
cctcagtcttccttgtcccctacagacttaccagggcagggtgcgaagcatcctccgggaggtggcagccagggagagccagcacaacaggcagctgctgyggtgagtctcccgggcgcctcccaagctccagctggggaacaaggaatgcactccaaaccccagccttttagggggtcctgctgagggccaggtcgggga

SEQ ID NO: 246981 - DNA, 201 bp, Homo sapiens
aatggcacctgaagccctgggaagttgtaggccaaaatttgatcataggtgcttttttctgagactgcaagttctttggcagctcttcagagagggtcttkgctcccccaaaaacttaaccaggtagggctatggactatgaggaggaacccatagagggtgccctcactgggtgggggctgcagcactgagctctgccat

SEQ ID NO: 246982 - DNA, 201 bp, Homo sapiens; identical to SEQ ID NO: 48045

SEQ ID NO: 246983 - DNA, 201 bp, Homo sapiens
cggatgtggtggcgggcacccataatcccagctactggggaggctgaggcaggagaatcacttgaacccgggaggcggagcttgcagtgagccaagattgygccattgcactccagcctgggcgacagagtgatgagactccatatcaaaaaaatatatatatattttgtgacgccatagctgccataggtagtgattcct

SEQ ID NO: 246984 - DNA, 201 bp, Homo sapiens
ctggtttttgttttttggagacagggtctcgcactgtcacactggctggattgcagtggcacaatcagggtcactgcagcctcaacctcccaggcttgagkagtcctcccatctcagcctcccaaatagatggcactacaggcatgtgccaccacacccagcgaatttttgtattttttgtagagatgggctttcatcgca

SEQ ID NO: 246985 - DNA, 201 bp, Homo sapiens
ggctgaggcaggagaatcgcttgaacccaggaggcggaggttgcagtgagcattgcaaccactgtgctccagcctgggcgacagagtgagactccatcttaaaaaaaaaaaaaaaaaaaacattgaaaatgccacagttgccggatgcagtataatcctgcattacaggctcatgcctgtaatcctagcactttgggtggc

SEQ ID NO: 246986 - DNA, 201 bp, Homo sapiens
cgcttgaacccaggaggcggaggttgcagtgagcattgcaaccactgtgctccagcctgggcgacagagtgagactccatcttaaaaaaaaaaaaaaaaamaacattgaaaatgccacagttgccggatgcagtataatcctgcattacaggctcatgcctgtaatcctagcactttgggtggctgaggtgggcgatcact

SEQ ID NO: 246987 - DNA, 201 bp, Homo sapiens
gaggttgaggcaggagaatcgcttgagcccaggaggtggaggttgcagtgagctgagatcgtgccactgcactccagcctgggtgaaagagcaagacttcktctcaaaaaaattaaaaaaaaaagtaatttaaatataatattttaagtcagagacctagcccacattcatctagtgttgaattaaggagagcaggagact

SEQ ID NO: 246988 - DNA, 201 bp, Homo sapiens
tgagacagtttcatctcatcacccacggtggaatgcattggcatgatcttggctcactgcaacctctgcctcctgggttcaagcgattctcctgcctcagyctcctgagtagctggaattacaggcacctgccactacacccagctaattttgtgtttttagtagagacagggttttgccatgttggccaggctggtctca

SEQ ID NO: 246989 - DNA, 201 bp, Homo sapiens
gttccatgtctctcactttatatcaaaagctagaaatgacgaagctagaaatgcctatgctctgtaaatgcaacaacaaacccaggatgaccacacatctmtttactgaatgtctttacatcatatttacagtgtggtttactgaatattttaagcctactatcgagacctactgttcagaaaaaaggattcctttcaaga

SEQ ID NO: 246990 - DNA, 201 bp, Homo sapiens
actcctagccttaagcaatccacccaccttggcctcccgtagtgctgggatgataggcatgagtcactgcctggccaaaagtttttttattttaaactttyaattaattaattttgagactgggttatgacactggctaatttttgtatttttggtagagatggggtttcacctgttgcccagggtggtcttgaactcctg

SEQ ID NO: 246991 - DNA, 201 bp, Homo sapiens
tctcctccctctcggtcctccttgtagcctgagaggcaacaatattgaaattaggccaattaatagccccacagtggcccctaagtgttcagtgaaaggargagttccatgtctctcactttatatcaaaagctagaaatgacgaagctagaaatgcctatgctctgtaaatgcaacaacaaacccaggatgaccacacat

SEQ ID NO: 246992 - DNA, 201 bp, Homo sapiens
tttttaaattaaggtatgtacattagttttttagacaatgctattgcacacttaactacaagtgtagacataacttttttttttttttgagacggagtgtwgctctgttgcccaggctggagtgcagtggcgtgatcttggctcactgcaagttctgcctcctgggttcacgccattctcctccctcagcctcccgagtag

SEQ ID NO: 246993 - DNA, 201 bp, Homo sapiens
atttattttcttataatcttttatctcattttgagattgtaaacaaggtttttttttttcttttttgtggacaaatcttctggcatacttgtgtttatatrtgtgttattctgctccttatcttctttcctcatataacttcaaatgcttttttttttttttcctgagaccgcatctcaccctgttgcccaggctggagtg

SEQ ID NO: 246994 - DNA, 201 bp, Homo sapiens
tcagtatcttctcaggaggtagtctgagtaaatcaagtcacatcattctgtcaaacttccagtggcttcctgctgaaagtaaaagcccagagtccttactrtggtctataagaccaaccaactttttgtgtcacctattgagtttgtttttcatttctgctgtcatatttttaatttccgagagcttgttcttgttctctg

SEQ ID NO: 246995 - DNA, 201 bp, Homo sapiens
ttcacagaattagaaaaaactactttaaaattcatatggaacaaaaaagcatgaatagccaggacaatcctaagcaaaaagaacaaagctgcaggcatcaygctacccaacttcaaactatactgcgaggttacagtaacaaaaacagaatggtactggcacaaaaacagaaacatagactaacggaacagaatagagaac

SEQ ID NO: 246996 - DNA, 201 bp, Homo sapiens
catctttgaatttgatatatctcataatatattgctgagcttgagaaggagagtaggaaggatgaggttatgaggtaacagggagccagaacgcagggccwggcaggctgtgcctgataaaaaaggctttgacttttattcctgggaaggtgaagagctgctggctctgagcagaggagtgacatgattatacctacctct

SEQ ID NO: 246997 - DNA, 201 bp, Homo sapiens
tgaattgtttgaaccagtttatactcttgctggcagtgtatgaacatgttcattgacttaccaacactatactaatctggtaggtatgtctcattgttcgtgtgtgtgtgtgtgtgtgtgtttcttttttctttttcttttttttgggacaggatctcattcttttacccaggctggagtacagtggcatgatcatggctc

SEQ ID NO: 246998 - DNA, 201 bp, Homo sapiens
atacctacctcttaacaggattctttgattcatagtgtgctgcttttggggtaagaaagggaaggatatatatgaatgtgtgtctgtgtgtttgtggaggkggggggtgtgtgtgtctgtttgcttatattttcaagaaggaataatggaaaaataaatgaaaaacttaccaaaaaatggttacctataggaggagggaga

SEQ ID NO: 246999 - DNA, 201 bp, Homo sapiens
gaattgtttgaaccagtttatactcttgctggcagtgtatgaacatgttcattgacttaccaacactatactaatctggtaggtatgtctcattgttcgtgtgtgtgtgtgtgtgtgtgtttcttttttctttttcttttttttgggacaggatctcattcttttacccaggctggagtacagtggcatgatcatggctca

SEQ ID NO: 247000 - DNA, 201 bp, Homo sapiens
aattgtttgaaccagtttatactcttgctggcagtgtatgaacatgttcattgacttaccaacactatactaatctggtaggtatgtctcattgttcgtgtgtgtgtgtgtgtgtgtgtttcttttttctttttcttttttttgggacaggatctcattcttttacccaggctggagtacagtggcatgatcatggctcac

SEQ ID NO: 247001 - DNA, 201 bp, Homo sapiens
tcatgcaatcctccttcctcagcctcccagctcatgcaatcctccttcctcagcctcccaagtagctgggactacaaatatgcatcactgtgcctggctckgtgtgtgtgtgtgtgtgtgtgtagacagggtcttgcttggttgcccacgctggtcttgaactccagagctcaagtgatcctcctgcctcaccctcccaaa

SEQ ID NO: 247002 - DNA, 201 bp, Homo sapiens
tattttgaagaaatgccatttactttttttggctcctcaggtattacctgtacaacctgatgttccagacgtggaagacctatgtgcgtcagcagcaggaratgaggaacaagtacattagagccgaggttcatggtgagaaaaagaagtccatgtctgaagaagatgcccacatttactttgcagaaggtcataggaagg

SEQ ID NO: 247003 - DNA, 201 bp, Homo sapiens
gattgtgtataaaaagagtgcttatatatagtttaaaaataataaaatgaacaactatatatcttatcacccaactttcaaaatagaaccttcctagcacrcctatttgctcctccctgactgcgttctttttcttttccctcagaggtaatcccactttcctgattcacattttttggtgttacaatttaagtgcttttc

SEQ ID NO: 247004 - DNA, 201 bp, Homo sapiens
agagaggagccggggcctgaggaccaggaagtagagcagcaggtgcagaaagagctggaacaggtgaggccccaggccatccccaggtgtccctggggacrccccgggctgtgctccctctcagccctgcctgtccctccatggccccaggtggaaatgcagatccagctgctggcagaggagctccaggctcagcgccag

SEQ ID NO: 247005 - DNA, 201 bp, Homo sapiens
ctggtcccacacagccccctgcctggggccctgtcaagcgcccctggcccgaagcagcccccgacggcaagcacaggcccggagctgctgctgctgcctcyttcctccttcatgccctgcggggcggctgcaccagccagggtacgtcctccaccaccaggcctgggcactggggctctcactctggtctgacttctggtg

SEQ ID NO: 247006 - DNA, 201 bp, Homo sapiens
gaattgacttacactattatggaggctgagaagttccatgacctgccatctgcaagctggagactcaggagagtgggtagtgcaattccagtctgtgtccraaggcctgggaaccaaggggcctcgaggtgtaaatcccagttgaagggcaggagaagatgagatgagatctgcccacgcaggcaggcaggaagcaaaagg

SEQ ID NO: 247007 - DNA, 201 bp, Homo sapiens
attcttaggtgtagagtccctgactcaggagtaggggaagaagtaggaatgattcacagaagcctcccttctctctctatcctggtgtcatctgccttccycgcacccatgcatctgcagcggggcattacgtcgctggaaagagaacaccatggcccgagtggatgaagccaaaaaaacctttcaagcaagtactcatta

SEQ ID NO: 247008 - DNA, 201 bp, Homo sapiens
ttgccatacatagtttcagacctggaagatggttgtaaagaggacagggttgattaactcataagtcccagggcctggaaagtgacaggacactggagtasagtggcctaatgcagtgtgagatctcaaagcacctattggtaaagaactgggcttaagttagatactcttcttgattgaataaaatggtcacagaaccac

SEQ ID NO: 247009 - DNA, 201 bp, Homo sapiens
acagatgccagaaaaatccacactgcccctgcccgaaccatgttcctgctgcgtcccctgcccattctgttggtgacaggcggcgggtatgcagggtaccrgcagtatgagaagtacagggagcgagagctggagaagctgggattggagattccacccaaacttgctggtcactgggaggtaggaatgaggtggaactgc

SEQ ID NO: 247010 - DNA, 201 bp, Homo sapiens
gtaaagaccctctctccagccaactaagggcaccttctaaggtactcagggttagaacttcaacataagagttttgggggagttttcagcaatttaacgcrtaacagatatttagcctctgtcttttcttgtgcttattggccaatgtatttttcctttggacaaaggtctattcaaatcctttgcacattttgattgatt

SEQ ID NO: 247011 - DNA, 201 bp, Homo sapiens
ttgatttgcatttccctgattactaataatgttgtattagtttgctagggctgctgtaacaaagcaacacaaactgggttgcttgaacagcagacatttgyctcatgattctagggctaaatgtctgagatcaaggtgtcagggttgcttcctttggagggctgtgagggagaatctgttccatgcctcttgcctagcttc

SEQ ID NO: 247012 - DNA, 201 bp, Homo sapiens
caggaggtcgaggctgcagtgagctgtgatttcaccactgcattccagcctgggtgacagagtgagaccctgtctcaaaaaacaaacaaacaaacaaacaaacttataaccaggatgccatggagacagactagtgagagtgaatgctggtcatagatgattgatatgaccatctcagtgtatgtcagctgaatatcaact

SEQ ID NO: 247013 - DNA, 201 bp, Homo sapiens; identical to SEQ ID NO: 48106

SEQ ID NO: 247014 - DNA, 201 bp, Homo sapiens
ccaggaggtcgaggctgcagtgagctgtgatttcaccactgcattccagcctgggtgacagagtgagaccctgtctcaaaaaacaaacaaacaaacaaacaaacttataaccaggatgccatggagacagactagtgagagtgaatgctggtcatagatgattgatatgaccatctcagtgtatgtcagctgaatatcaac

SEQ ID NO: 247015 - DNA, 201 bp, Homo sapiens
gtgagaccctgtctcaaaaaaaaaaaaaaaagaaaaagaaaaaatagtgcaactggccaggtgtggtggcttatgtctgtaatctcaacactttgggaggstgaggcaggagaattgcttgagcccaagagttcgagaccaacctgagcaacatagtgagacctcctctccgcaaaaaatggctgggtgcacatctgtggt

SEQ ID NO: 247016 - DNA, 201 bp, Homo sapiens
gagctgggtattttgtgtgtgtgttggtggggggtcaaggccaggaggggtgaggagagagccagagcaggtaagatgccaggttctcaccagggcacctstcgtggcttcccgctcatctcattcctcagatgctactttgtaacctgaattgaaaatgggtcaggtcctggcaagggaggggccaaactgcagaccggc

SEQ ID NO: 247017 - DNA, 201 bp, Homo sapiens
agactacctgtgacttgccaatgcctttccctgctctcagggcagaggtagaggaaggcagccaggattgcagtgaccaggttgtcatcagccacaaagcsctctgagttctcatgttgcaggtgactggcccttaggccatgtagtgacattaaagtcctattggtcacaaccctaaactcctctccacagaatgtcttt

SEQ ID NO: 247018 - DNA, 201 bp, Homo sapiens
ttgtgcccaggaggtcgaggctgcagtgagctgtgatttcaccactgcattccagcctgggtgacagagtgagaccctgtctcaaaaaacaaacaaacaarcaaacaaacttataaccaggatgccatggagacagactagtgagagtgaatgctggtcatagatgattgatatgaccatctcagtgtatgtcagctgaat

SEQ ID NO: 247019 - DNA, 201 bp, Homo sapiens; identical to SEQ ID NO: 48107

SEQ ID NO: 247020 - DNA, 201 bp, Homo sapiens
aaccctaaactcctctccacagaatgtctttgaggcttagaagggagggaaggtgtcagtgcttcctccattctggatacccttcttgcaagctcctcatycagggcctgaggctcccacctcgtgtcacctcaagacagccagagaggatgaaatctttggcttgggcttccagggctgtcataggcagagggcaagcca

SEQ ID NO: 247021 - DNA, 201 bp, Homo sapiens
gggtggggacactgccttactgctctggtatggatccccaaaacagcatgtcctgacaaaggtgttcccctaccccctatacggtcctatcagccattgtytcctattcacagggccggtcactccgcgcaagtttgggttcctgttttagaactgccacctaagcccctcttatttcatctttcctgtggtggaaacccc

SEQ ID NO: 247022 - DNA, 201 bp, Homo sapiens
ctcacgcgacgatctttctctcaggctgcccgccgtgagggcagtggttatacagaaaatagcttagagcatttggagtgtcggaaaatggattaaaatgkagctgtgattcagagtcggctgcctggtgtcatttcaaagagctaagatttgagagatgcgccatacttgtgtgtttcctacagggttcattttgtcagc

SEQ ID NO: 247023 - DNA, 201 bp, Homo sapiens
ggcacataacctcacacctacgcacacaccacctatacgcataacacactcacacctacacaccccctacacacaccctcacacctacacaccccacacaycctcgcacctatacacgcacccctccatgcacatacccttgcacctgcacacgtatcctccatgcacacacacttccacctacatgcacctacccctcac

SEQ ID NO: 247024 - DNA, 201 bp, Homo sapiens
gaccccaaacatttctaatattaaccattgaaatgtgagctatacatgcatttatgaatgattaataaaaagttagataattatttacctaattactccakttcagggttgcaggtggtcccctatccgatgggcagctcagggcacaaggcggaaaccagtcctggatgggatgtcttcccatggcagggtgcacccaca

SEQ ID NO: 247025 - DNA, 201 bp, Homo sapiens
agtttttcccacatcctctccaatgcttgtcatcttcctttttttttttttttttttggagatggagtcttgctctgtcacccaggctggagagcagtggygcaatctcagctcactgcaacctccgccttctgggttcaagtgattctacggcctcagccacctgagtaactggtattacagttactcggctcactgcaa

SEQ ID NO: 247026 - DNA, 201 bp, Homo sapiens; identical to SEQ ID NO: 48109

SEQ ID NO: 247027 - DNA, 201 bp, Homo sapiens
tgggcagctcagggcacaaggcggaaaccagtcctggatgggatgtcttcccatggcagggtgcacccacacccacactcactcagactgggaccatttasacacaccagtgagcctaatgtgcatggctttgggatgtggaggaaactagggtactcagagaacacccatgcagacatggggagaacgtgcacactccac

SEQ ID NO: 247028 - DNA, 201 bp, Homo sapiens
cagagcttgcagtgagccgagatcgtgccactgcactccagactgggagagagagtgagactccatctcaaaaacaaaaaaaaacaaaacccagaaattakctgggcgtggtggcgggtgcctgtaatcccagctacttgggaggctgaggcaggagaatcgcttgaacccggaaggtggttttattgttttgaggcatgg

SEQ ID NO: 247029 - DNA, 201 bp, Homo sapiens
ggaccttttaaaaatacaccggggtgcgatgggagagaaagtaggcacccgggagctgcgtggatgcagccagctctgagcctgagcctgagcggggttcrccactggttcgcctgccgtctgctctgctgctatcagctgagatgctgctttgttccttggtttgctcagcaactgggagagaggactcagcttctcttg

SEQ ID NO: 247030 - DNA, 201 bp, Homo sapiens; identical to SEQ ID NO: 48114

SEQ ID NO: 247031 - DNA, 201 bp, Homo sapiens
tgctgctggatctcctcaagttcagcctcaaggtccaggctgcctatggcgacagaagtaagcttgtttcagactattttcccctcggggaccagggtaartagcaagtcccaggtccgggagtggcctgagtgctttctgccctgacaggccccaggtacacacctgcagttgaaagtccaggcccagccctggtggctg

SEQ ID NO: 247032 - DNA, 201 bp, Homo sapiens; identical to SEQ ID NO: 48115

SEQ ID NO: 247033 - DNA, 201 bp, Homo sapiens
tcttctgagtccagctgtctctctttggagttaatgagattgaggctccgagagagggagggatttgctcaagttcacctagccagtttgtagcagagccmggacccccatcaaggtaccccctcacgcgacgatctttctctcaggctgcccgccgtgagggcagtggttatacagaaaatagcttagagcatttggagt

SEQ ID NO: 247034 - DNA, 201 bp, Homo sapiens
tactttaaataattttcttcatgaaacaaagtttttttcttttttttttgagacggagtctcactctgtcacccaggctggaatgcagtggcatgatctcrgctcactgcaagctccacccttgggttcaagcgattctcctgcctcagcctcccaagtagctgggattacaggtgcctattactgcgccagctaattttt

SEQ ID NO: 247035 - DNA, 201 bp, Homo sapiens
ggaaggtcagagttcacatccagcggcctcgcagtagaggtggcggcaaggggactggtggtcagcccccgaggctggaggagcctggcctggggggcctragcaccctgagtcggagagcccgcttcaggtatctttggttccaaccatgaggagggcccagcagggggaggctgccagcgagcctcagacctcatgcct

SEQ ID NO: 247036 - DNA, 201 bp, Homo sapiens
gagttcaagaccagcctggcccacatggtgaaaccttgtctctactaaaaatacaaaaattagccaggcgtggcggcaggcacctgtaatccctgctactygggaggctgaggtgggagaattgcttgaacccaggaggcagaggttgcagtgagccgagatcgtgccattgtactccagcctggttgacagagcgagact

SEQ ID NO: 247037 - DNA, 201 bp, Homo sapiens
catgggctctgcatcctagtagtgaagcagggaggcctgtgtgctctaggctggggcggtcggaccttgtttctggctgcccttgttcgctggtctacatyagttttggagtcagggcattctgtttgtcagggttttgcgtgcctggagggcagaaggttggggtgggagcagccttgtagcttcaagatgggatgcggg

SEQ ID NO: 247038 - DNA, 201 bp, Homo sapiens; identical to SEQ ID NO: 48104

SEQ ID NO: 247039 - DNA, 201 bp, Homo sapiens
tcagcctcccaaagtgttgggattacaggcatgagtcaccgtgccaggcctaaaagcactttttctttttctttttctattttttttttttttttttttttgagatggagtcttgctctgtcacccaggctgaatgcagtggcaatctcagctcactgcaacctctgcttcctaggttcaagcgattctcccacctcagcc

SEQ ID NO: 247040 - DNA, 201 bp, Homo sapiens
gtggcggggacagggccagatttcatgttgaccctggggatgctgtgaatttctcctgcaggagagacatcattgaattttttcaactgtatcagtagcayagtatttttgtatgaaaagtgggagacttctgaacagtaattcatttaattgcaaagcattttgaaataaaaaaaatcaaacttaaaactgtgttctgtt

SEQ ID NO: 247041 - DNA, 201 bp, Homo sapiens
tgagctggggagaaagtcagccccttgcccccaccctcgcccccgggggaagtgcatggcccgcagtcaggccactggacacaggatttggggccctggargtttctgctgaggcttcaagaggggtggtcctggcgttccaggcgcttcccatcagacagcaggagccagttctcagggtccttggctgaacacacaagc

SEQ ID NO: 247042 - DNA, 201 bp, Homo sapiens
ctcagcctcccaaagtgttgggattacaggcatgagtcaccgtgccaggcctaaaagcactttttctttttctttttctattttttttttttttttttttttgagatggagtcttgctctgtcacccaggctgaatgcagtggcaatctcagctcactgcaacctctgcttcctaggttcaagcgattctcccacctcagc

SEQ ID NO: 247043 - DNA, 201 bp, Homo sapiens
ggggagcagcagtgcaggaaaggccttactcagctgggcttgcaggtatgctcactcctgtctgagcgctgcttccttgtttctagcctccgtttagaatwaaaaaaaaatgtatagtacagtattccaattcatcaaaaggaataaagacagatcagcctgtctggtctaccaccattcagcctaagcataaggcagaac

SEQ ID NO: 247044 - DNA, 201 bp, Homo sapiens
tgaccatctcagtgtatgtcagctgaatatcaactcttaataataacagtctaactaggtgccaggccctgagctaaggttttgcatgattgtcttctaaygaggtgagttttgtttttgcaggtggagaaactgaggcttaagattagttaagaaatttcctaaggtcacacagctgctaagaagtggcagcgctgagat

SEQ ID NO: 247045 - DNA, 201 bp, Homo sapiens
gcttgagccaggaggtagaggttgcagtgagttgagattgtgccactgcactccagccggggtgacagagcaagactctgtctcaaaaaaaaaaaaaaaaagtagcttgaaatcgtgttctggaaagctgcttgctgagctgctcaggttgaagacccagagtgttccttttagttccatttagccccgtcgcgtggagtg

SEQ ID NO: 247046 - DNA, 201 bp, Homo sapiens
ggtggcagcctcctgggtcctgcccagagcctggccactgacctggctgtgcatggacctgtgccctgcaggttgcacttcccccagctggccctgaggcrgaggctggggcagctgagctgcatgtccagacccgctctgaaactgcgctcctggcccttgaccgtcctctactacctcctgcccttcggcgccctcaga

SEQ ID NO: 247047 - DNA, 201 bp, Homo sapiens
tgctggtcatagatgattgatatgaccatctcagtgtatgtcagctgaatatcaactcttaataataacagtctaactaggtgccaggccctgagctaagrttttgcatgattgtcttctaatgaggtgagttttgtttttgcaggtggagaaactgaggcttaagattagttaagaaatttcctaaggtcacacagctgc

SEQ ID NO: 247048 - DNA, 201 bp, Homo sapiens
cgggtttcaccattgttggccaggctgttcttgaactcttgacctcaggtgatctgcccacctcagcctcccaaagctgggattacaggtgtgagccaccrcacctggccacaattcctaagtttcaaatgtctccctgttctgagtagcataatgaactctctctctcccacctaggatatgaatcctccctctgtccat

SEQ ID NO: 247049 - DNA, 201 bp, Homo sapiens
atgccatggagacagactagtgagagtgaatgctggtcatagatgattgatatgaccatctcagtgtatgtcagctgaatatcaactcttaataataacartctaactaggtgccaggccctgagctaaggttttgcatgattgtcttctaatgaggtgagttttgtttttgcaggtggagaaactgaggcttaagattag

SEQ ID NO: 247050 - DNA, 201 bp, Homo sapiens
cttggtggcctgggccccactgacccccagcctatcaccacaggacctgcacacaaacagcccaaggcacagcaagggctcctacaatgacttcagcttcstgacgcacaccaatagagagggcgtccccatgcgtaagggcgagcacctgggcgagttcaacctgggctccaccatcgtgctcatcttcgaggcccccaa

SEQ ID NO: 247051 - DNA, 201 bp, Homo sapiens
ggaggtcgaggctgcagtgagctgtgatttcaccactgcattccagcctgggtgacagagtgagaccctgtctcaaaaaacaaacaaacaaacaaacaaacttataaccaggatgccatggagacagactagtgagagtgaatgctggtcatagatgattgatatgaccatctcagtgtatgtcagctgaatatcaactct

SEQ ID NO: 247052 - DNA, 201 bp, Homo sapiens
gcggcattccctgcctctgcaggctccctgatgtcagtgaaccctggcatggctcgctggatcaaagagctcttctgccataacgagcgggtggtcctgaygggggactggaaacatggcttcttctcactgacagctgtgggggccaccaacgtgggctccattcgcatctactttgaccgggtaagcaggatctaggcc

SEQ ID NO: 247053 - DNA, 201 bp, Homo sapiens
acttggtggcctgggccccactgacccccagcctatcaccacaggacctgcacacaaacagcccaaggcacagcaagggctcctacaatgacttcagcttygtgacgcacaccaatagagagggcgtccccatgcgtaagggcgagcacctgggcgagttcaacctgggctccaccatcgtgctcatcttcgaggccccca

SEQ ID NO: 247054 - DNA, 201 bp, Homo sapiens
aggaggtcgaggctgcagtgagctgtgatttcaccactgcattccagcctgggtgacagagtgagaccctgtctcaaaaaacaaacaaacaaacaaacaaacttataaccaggatgccatggagacagactagtgagagtgaatgctggtcatagatgattgatatgaccatctcagtgtatgtcagctgaatatcaactc

SEQ ID NO: 247055 - DNA, 201 bp, Homo sapiens; identical to SEQ ID NO: 48117

SEQ ID NO: 247056 - DNA, 201 bp, Homo sapiens
ggggcccagtcagctcagcatttggagtgacatcggggcaacaggccatgagtccctttgggtcttggctgccatggggtggacacaccgggctctggacrgggagtagcggcattccctgcctctgcaggctccctgatgtcagtgaaccctggcatggctcgctggatcaaagagctcttctgccataacgagcgggtg

SEQ ID NO: 247057 - DNA, 201 bp, Homo sapiens
cttctccctggccttggcccttcctcttaaaggggccctcgggttgggcggacggcccagcaggactggggctcagagggggcggcagctttaagggtggmtggggtcggcctcctgcccccgcccctggtagtctgagtggctggagcccgagccccgcccactcgccccaaggcttcccggctccgggagcgcccctag

SEQ ID NO: 247058 - DNA, 201 bp, Homo sapiens
gcccagtcagctcagcatttggagtgacatcggggcaacaggccatgagtccctttgggtcttggctgccatggggtggacacaccgggctctggacgggragtagcggcattccctgcctctgcaggctccctgatgtcagtgaaccctggcatggctcgctggatcaaagagctcttctgccataacgagcgggtggtc

SEQ ID NO: 247059 - DNA, 201 bp, Homo sapiens
ccttctccctggccttggcccttcctcttaaaggggccctcgggttgggcggacggcccagcaggactggggctcagagggggcggcagctttaagggtgrctggggtcggcctcctgcccccgcccctggtagtctgagtggctggagcccgagccccgcccactcgccccaaggcttcccggctccgggagcgccccta

SEQ ID NO: 247060 - DNA, 201 bp, Homo sapiens; identical to SEQ ID NO: 48111

SEQ ID NO: 247061 - DNA, 201 bp, Homo sapiens
caaccagcctcgcagaggcagaggccctggagcagtgacagcacaggagatctgctggctcgggggaaggggaggaaagaggaaaacaaagggagtgatcragtgagcctcgccccgccctccctgcgccggcccatgatgtgtcagtcagaggcgcggcaaggaccagagctccgcgcggcgaaatggtgagatgctgcc

SEQ ID NO: 247062 - DNA, 201 bp, Homo sapiens
ggtaaagggggtcacctactccctggagtcgttcctgggcccgcgtatgtgcacagaggacctgcccttcccaccaggtgggtcactgcacaggcggggcyaggcagccctgctgctgtgtggctggaccgggagggaggggaatgctggggaaggaactgaggctggcatgtggggcctccctgagaatccatgtgcaga

SEQ ID NO: 247063 - DNA, 201 bp, Homo sapiens
atactgagataacttggggatgtgacccaagtctgaacacaaaatttatttattttattttatttgttttgtttttcttttctttttttttttttttagayggagtctcactctgttgcccaggctggaaggcaatggcgcaatcttggctcactgcaacctccgcctccccggttcaagcgtctcccacctcagccttcc

SEQ ID NO: 247064 - DNA, 201 bp, Homo sapiens
tatatactgagataacttggggatgtgacccaagtctgaacacaaaatttatttattttattttatttgttttgtttttcttttctttttttttttttttrgatggagtctcactctgttgcccaggctggaaggcaatggcgcaatcttggctcactgcaacctccgcctccccggttcaagcgtctcccacctcagcct

SEQ ID NO: 247065 - DNA, 201 bp, Homo sapiens
taatatatcatatattatatttatataatttatataatatatcatatattatatttatataatttatataatatatcatatattatatttatataatttayataatatatcatataaatatattatatatagtattatatatataaaattatactttaagttctagggtacatgtgcacaacgtacaggtttgttacatat

SEQ ID NO: 247066 - DNA, 201 bp, Homo sapiens
atatattatatttatataatttatataatatatcatatattatatttatataatttatataatatatcatatattatatttatataatttatataatatawcatataaatatattatatatagtattatatatataaaattatactttaagttctagggtacatgtgcacaacgtacaggtttgttacatatgtatacatg

SEQ ID NO: 247067 - DNA, 201 bp, Homo sapiens
ggagaagtgctacttccttcagtagaatccttcagattcagggccattatccatttgcctccacttgctttgcgattagcagaatcttctcacctactgtrtttgtttcccttttctcttggaggaggagtctcatttgattattgcaactaccttgtgaggtaagcaggtttggtgatagtcttgtcatccataaaatag

SEQ ID NO: 247068 - DNA, 201 bp, Homo sapiens
gatggcagttcgggatgtcatgcccccatgcgccccccaaccccaccccgccatggccctcaccatggcccactcagggcatgaggctttctgggtgattsctggtattcagtgttgtcagcttcttggacctgtcagtgggggtggggctgcaatgagatgccagttgcaggaagtggtttgcacagccttcctggtgtc

SEQ ID NO: 247069 - DNA, 201 bp, Homo sapiens
agcacgtgtttagcctgtgaggactggtacctgttgtgcaggaagggctgagcactgtccgagggcatatatgagggacgacagccaagcacccgtgtgtrtgtgtgtgtgtgtgtgtgtgtgtgtgtgtgtgtgtctgctaattaccctatgaagattcaaggttccttcctttgggttaagcactgcctgcccagagat

SEQ ID NO: 247070 - DNA, 201 bp, Homo sapiens
ttcggctatgacgtgaagcgggccgtggaggagccccggctgcacaaccagcttctgcccaacgtcacgacagtggagagaaacattgaccaggtgggccrggggttggagaaactgagtcacggtgtggggccccagggcatcctgggctggaggcctggatcatcacagagtggacaattgttggtgtcctctctctag

SEQ ID NO: 247071 - DNA, 201 bp, Homo sapiens
gtaaaataagtgaagggttaaagggctgaattaaaagtacagcctgctctcctagatgtgcatggtcctttggtctgtatctgcaccttccatagggtagycactagctacatgtggccgttgaggacttggaatatggccactgggattgagggactgggtttttttattttaattctattgtgttttagttaagtttaa

SEQ ID NO: 247072 - DNA, 201 bp, Homo sapiens
ttgagtttaaacccagggactctagggcccatgcctctgccatcctgcctctgagttttggagctggacttgttccatcaagtgccaggccagccctgctrctgggtgctcccaggcattcacaagctgacaattctgaagggcccacgcacttggccatgcttcagtctgtgtcctgacatcacaggtgggtgctggaat

SEQ ID NO: 247073 - DNA, 201 bp, Homo sapiens
aggtggtacagtagattgtgagataaaagttggaggatgggagggtctcaacaactcacgcctctaatcctagcactttaggaggccaagtcaggaggagygcatgagcccaggagtttgagacctgcctgggcaacatagcaagactccatctctacaaaaaacggaaaaaaaaattagctaggtgtggcggtgtgtgct

SEQ ID NO: 247074 - DNA, 201 bp, Homo sapiens
taatcctagcactttaggaggccaagtcaggaggagcgcatgagcccaggagtttgagacctgcctgggcaacatagcaagactccatctctacaaaaaamggaaaaaaaaattagctaggtgtggcggtgtgtgcttatgttcccagctacttgggaggctaaggtgggaggatcacttgagcccaggaggttgaggctg

SEQ ID NO: 247075 - DNA, 201 bp, Homo sapiens
cctgccaccacgcccagctaattttttgtattttttagtagagacgggttttcactatgttgcccaggctggtctcgatctcctgacctcgtgatccccckgcctcggcctcccaaagtgctggaattacaggcgtgagccactgtgcccgatcaatctttcatttttttttaatactcattgagaaactcagcatttgta

SEQ ID NO: 247076 - DNA, 201 bp, Homo sapiens
ccccggcctcggcctcccaaagtgctggaattacaggcgtgagccactgtgcccgatcaatctttcatttttttttaatactcattgagaaactcagcatytgtagacatgaagttgctcagggtaagagaatgcgggaatcataggcttggcaccttgtggactcttagaatcatttatttaacttgaatgtattgagta

SEQ ID NO: 247077 - DNA, 201 bp, Homo sapiens
tatattatatttatataatttatataatatatcatatattatatttatataatttatataatatatcatatattatatttatataatttatataatatatyatataaatatattatatatagtattatatatataaaattatactttaagttctagggtacatgtgcacaacgtacaggtttgttacatatgtatacatgt

SEQ ID NO: 247078 - DNA, 201 bp, Homo sapiens
aggtgagggcatgagatggacagatgggcctcatccccctgcttccgttgcctggggtcctcggtcagcctgtttgctcagacccctgaaattgggggtcraggaaggaccctcctggattatgtgactcccttcagtccaggtgaccagggtccttggagtgacagctcctagagccccacctgtagtcctgcaagctgg

SEQ ID NO: 247079 - DNA, 201 bp, Homo sapiens
gagaaactcagcatttgtagacatgaagttgctcagggtaagagaatgcgggaatcataggcttggcaccttgtggactcttagaatcatttatttaactwgaatgtattgagtattctcttaaagaatcagctgttgttcctgaagctggggtgaaaaacaaagatggcagatgaaatctgtgacactccaggtgggagg

SEQ ID NO: 247080 - DNA, 201 bp, Homo sapiens
tttatataatttatataatatatcatatattatatttatataatttatataatatatcatatattatatttatataatttatataatatatcatataaatrtattatatatagtattatatatataaaattatactttaagttctagggtacatgtgcacaacgtacaggtttgttacatatgtatacatgtgccatgttg

SEQ ID NO: 247081 - DNA, 201 bp, Homo sapiens
caggtgagggcatgagatggacagatgggcctcatccccctgcttccgttgcctggggtcctcggtcagcctgtttgctcagacccctgaaattgggggtyaaggaaggaccctcctggattatgtgactcccttcagtccaggtgaccagggtccttggagtgacagctcctagagccccacctgtagtcctgcaagctg

SEQ ID NO: 247082 - DNA, 201 bp, Homo sapiens
gggtgaccctaatggagacaggcagggttctcaggaagcaggttgagcagacactcaggagctcggttttgggcacgttgaagtttgagatgctttcttcragcaggcaggtagatcctcaggtctggtgatcggaggagcagcccaggccagcaggtcaatttgagagttgtcagtgcataaatggaggctgaagctcag

SEQ ID NO: 247083 - DNA, 201 bp, Homo sapiens
aagttctagggtacatgtgcacaacgtacaggtttgttacatatgtatacatgtgccatgttggtgtgctgcacccattaacttgtcatttacattaggtrtatctcctaatgctatccctccccgttcccctcaccccacaacaggccccagtgtgtgatgttccccttcctgtgtccaagtgttctcattgtttaattc

SEQ ID NO: 247084 - DNA, 201 bp, Homo sapiens
tgaatggggcagagcaggtgagggcatgagatggacagatgggcctcatccccctgcttccgttgcctggggtcctcggtcagcctgtttgctcagacccytgaaattgggggtcaaggaaggaccctcctggattatgtgactcccttcagtccaggtgaccagggtccttggagtgacagctcctagagccccacctgt

SEQ ID NO: 247085 - DNA, 201 bp, Homo sapiens
agggtacatgtgcacaacgtacaggtttgttacatatgtatacatgtgccatgttggtgtgctgcacccattaacttgtcatttacattaggtatatctcytaatgctatccctccccgttcccctcaccccacaacaggccccagtgtgtgatgttccccttcctgtgtccaagtgttctcattgtttaattccaaccta

SEQ ID NO: 247086 - DNA, 201 bp, Homo sapiens
aggtacttcagaggctgaggtaggaggatcgcttgagcctgggaagccaaggctgcagtgagccatgattgcaccactgcactccagctgggacaacagartgagaccctgtctcaaaacagacaaacaaacaaaaacccttatagttggatggagaaactgaggctgggagaggggacaggacggaggttaaggctcagt

SEQ ID NO: 247087 - DNA, 201 bp, Homo sapiens
tacaggtttgttacatatgtatacatgtgccatgttggtgtgctgcacccattaacttgtcatttacattaggtatatctcctaatgctatccctccccgytcccctcaccccacaacaggccccagtgtgtgatgttccccttcctgtgtccaagtgttctcattgtttaattccaacctatgagtgagaacatgcatgt

SEQ ID NO: 247088 - DNA, 201 bp, Homo sapiens
tggtccatgtacactcctacctgctgagcccctcctaaaaaaaaaaattaaacatcccctcctaaaaaaaaacaattaaaattaaaaaataaatttaaaarttaaaaatccccttctgctaggtgtgctgttcacgcctgtaatctcagcgactcaggaggctgaggtgggaggatcgcttgaatccaggagttcgagatc

SEQ ID NO: 247089 - DNA, 201 bp, Homo sapiens
tatgtatacatgtgccatgttggtgtgctgcacccattaacttgtcatttacattaggtatatctcctaatgctatccctccccgttcccctcaccccacracaggccccagtgtgtgatgttccccttcctgtgtccaagtgttctcattgtttaattccaacctatgagtgagaacatgcatgtcttatatgctctcag

SEQ ID NO: 247090 - DNA, 201 bp, Homo sapiens
taaaaaaaaaaattaaacatcccctcctaaaaaaaaacaattaaaattaaaaaataaatttaaaaattaaaaatccccttctgctaggtgtgctgttcacrcctgtaatctcagcgactcaggaggctgaggtgggaggatcgcttgaatccaggagttcgagatcgggctgggcaagatggcaagaccccaactcaaaaa

SEQ ID NO: 247091 - DNA, 201 bp, Homo sapiens
attaaaaatccccttctgctaggtgtgctgttcacgcctgtaatctcagcgactcaggaggctgaggtgggaggatcgcttgaatccaggagttcgagatygggctgggcaagatggcaagaccccaactcaaaaaagaaaaaaaaaaaatctttcctcctaagcctcattgccccatctgtaaaatgagtcagggactgt

SEQ ID NO: 247092 - DNA, 201 bp, Homo sapiens
tggtgtgctgcacccattaacttgtcatttacattaggtatatctcctaatgctatccctccccgttcccctcaccccacaacaggccccagtgtgtgatrttccccttcctgtgtccaagtgttctcattgtttaattccaacctatgagtgagaacatgcatgtcttatatgctctcaggcagagaggaaactgctgag

SEQ ID NO: 247093 - DNA, 201 bp, Homo sapiens
ttcctgtgtccaagtgttctcattgtttaattccaacctatgagtgagaacatgcatgtcttatatgctctcaggcagagaggaaactgctgagcaggccrgggcaggggacagagccctgtggctctccactttagacccctcctggctgactgccatggaatgcagccacttagcagggccaaatcccctgatgttcct

SEQ ID NO: 247094 - DNA, 201 bp, Homo sapiens
gagaacatgcatgtcttatatgctctcaggcagagaggaaactgctgagcaggccggggcaggggacagagccctgtggctctccactttagacccctccyggctgactgccatggaatgcagccacttagcagggccaaatcccctgatgttcctgttggctgtctagccttcagggacaggtcatgggaccttggttcc

SEQ ID NO: 247095 - DNA, 201 bp, Homo sapiens
ggctcagacttcttggtgggctggtcagaaacatgcagtaacttggggcagttaccaggtggccaagcctgcactgctgggctctgtgagcttgggccagstcaggccctctctgggccctgcctttctgggctgttcgggtggttccttgggcctggggtgctaatgtttctggatgggcagcagaaccagtctgcactc

SEQ ID NO: 247096 - DNA, 201 bp, Homo sapiens; identical to SEQ ID NO: 48457

SEQ ID NO: 247097 - DNA, 201 bp, Homo sapiens
ggaaatgcaatggccagggtggtgttggaccaggtaacccttcagaacccttctaactggtgtcctagggccctggctactctgtgctatgagcattcacygaccacactgacctggcctcatattttctcttccctttcagtggccgcaagaggaagaggacgtggaatgggacgtggaaacatctttcaaaagcgaaga

SEQ ID NO: 247098 - DNA, 201 bp, Homo sapiens
gcacaccagcggcatgggcggctgccctgggctcgcctcttccagcccagcatccagctggcccgccagggcttccccgtgggcaagggcttggcggcagycctggaaaacaagcggaccgtcatcgagcagcagcctgtcttgtggtatgtctgtgggtgcggccccctgacacaggcagggcaggcacagcccaaggac

SEQ ID NO: 247099 - DNA, 201 bp, Homo sapiens
ggctgccctgggctcgcctcttccagcccagcatccagctggcccgccagggcttccccgtgggcaagggcttggcggcagccctggaaaacaagcggacygtcatcgagcagcagcctgtcttgtggtatgtctgtgggtgcggccccctgacacaggcagggcaggcacagcccaaggaccttgcaggccgtagcagca

SEQ ID NO: 247100 - DNA, 201 bp, Homo sapiens
cggcctgccagcgctgtgggggcacccaccccatctcattgaatggggcagagcaggtgagggcatgagatggacagatgggcctcatccccctgcttccrttgcctggggtcctcggtcagcctgtttgctcagacccctgaaattgggggtcaaggaaggaccctcctggattatgtgactcccttcagtccaggtgac

SEQ ID NO: 247101 - DNA, 201 bp, Homo sapiens
agcagcagcctgtcttgtggtatgtctgtgggtgcggccccctgacacaggcagggcaggcacagcccaaggaccttgcaggccgtagcagcagtggagcrgccctctgccttcaggaccctgtgctgataatgggatgaggagatacagacccttcccaccacgtgtggggacacattctgagcgtggggtcccagtggc

SEQ ID NO: 247102 - DNA, 201 bp, Homo sapiens
cttcggcctgccagcgctgtgggggcacccaccccatctcattgaatggggcagagcaggtgagggcatgagatggacagatgggcctcatccccctgctyccgttgcctggggtcctcggtcagcctgtttgctcagacccctgaaattgggggtcaaggaaggaccctcctggattatgtgactcccttcagtccaggt

SEQ ID NO: 247103 - DNA, 201 bp, Homo sapiens
agtgccaggggcaccactactccaccgcctccagagccatctctgggacactggctgtgagttcagatgttctgaacagggacagggagagccagagggamccagcctggggctcactggaggggctcgtgggcagacagcgccctttggagggaactgagtctgaaaggaaggaaaccctttccccggctcatagcacct

SEQ ID NO: 247104 - DNA, 201 bp, Homo sapiens
gaccctgtgctgataatgggatgaggagatacagacccttcccaccacgtgtggggacacattctgagcgtggggtcccagtggccactgtggctggccaygtgtcctgagtggcaagggacactaggaagctcccggaagggacactaggaagacgagcgctgagtgacagggccacccacctgtgacaggcgctgcccc

SEQ ID NO: 247105 - DNA, 201 bp, Homo sapiens
cctcgatctgagggcttagaggcttcggcctgccagcgctgtgggggcacccaccccatctcattgaatggggcagagcaggtgagggcatgagatggacrgatgggcctcatccccctgcttccgttgcctggggtcctcggtcagcctgtttgctcagacccctgaaattgggggtcaaggaaggaccctcctggatta

SEQ ID NO: 247106 - DNA, 201 bp, Homo sapiens
cctccagagccatctctgggacactggctgtgagttcagatgttctgaacagggacagggagagccagagggaaccagcctggggctcactggaggggctygtgggcagacagcgccctttggagggaactgagtctgaaaggaaggaaaccctttccccggctcatagcacctgccatccagggccctcccagggctgcg

SEQ ID NO: 247107 - DNA, 201 bp, Homo sapiens
tgcccaggccttctacaacggcagcctcacggcccagattgtgaaggacatccaggcggccggtgagtgggtaacctcaggggcctgggtgaggaactctkcagtggaaaccctgagctgtagcccagagctatggggtcctcctgtcttgcctgagcctgcaggaagttcctggtggaggagggtcagtgactggccatg

SEQ ID NO: 247108 - DNA, 201 bp, Homo sapiens
ctctgggacactggctgtgagttcagatgttctgaacagggacagggagagccagagggaaccagcctggggctcactggaggggctcgtgggcagacagygccctttggagggaactgagtctgaaaggaaggaaaccctttccccggctcatagcacctgccatccagggccctcccagggctgcgtgaactttagtca

SEQ ID NO: 247109 - DNA, 201 bp, Homo sapiens
caggtgtaggcaagagccagggctagggaagcactagaatacagcctgaagatccaggaggacttcttggaggaggtggcggctgggctgcagataacttygttaggcagagagaggaagggattcctagcagaggaacagctgggctaaggcccagtagagggcgctttgattcaccaagagggttacaagggatgaggg

SEQ ID NO: 247110 - DNA, 201 bp, Homo sapiens
cactggctgtgagttcagatgttctgaacagggacagggagagccagagggaaccagcctggggctcactggaggggctcgtgggcagacagcgccctttrgagggaactgagtctgaaaggaaggaaaccctttccccggctcatagcacctgccatccagggccctcccagggctgcgtgaactttagtcacgtggtga

SEQ ID NO: 247111 - DNA, 201 bp, Homo sapiens
gccaagcggcagggagactggcaggaattctccagttagaaaaggccctctgagccaggcgcggtggctcacgtctgtaatcccagcactttgggaggccraggcgggtggatcacctgaggtcaggagttcaagaccagcctggccaacatggcgaaaccctgtctctactaaaaatgcaaaattagtcaggcatggtag

SEQ ID NO: 247112 - DNA, 201 bp, Homo sapiens
ctgttaaaagactaaccacgaaattttggcaaagctaagtctaataaaaaatgtgtatccagaatatataaagaatttgtggccaggcaccgtggctcacrcctgtaatcccagcactttgggaggccgaggccagatcacctgaggtcaggagctcgagaccagaaacatggagaaaccccgtttctagtaaaaatacaa

SEQ ID NO: 247113 - DNA, 201 bp, Homo sapiens
cagcctggccaacatggcgaaaccctgtctctactaaaaatgcaaaattagtcaggcatggtaggttgtgcctgtaatcccagctacttgggaggctgtgscaggagaatcgctagaacctggggggctgaggttgcagtgagccgagattgcaccactgcactccacagagtgagattccatctcaaaaaaaaaaaaaga

SEQ ID NO: 247114 - DNA, 201 bp, Homo sapiens
agagccagagggaaccagcctggggctcactggaggggctcgtgggcagacagcgccctttggagggaactgagtctgaaaggaaggaaaccctttccccrgctcatagcacctgccatccagggccctcccagggctgcgtgaactttagtcacgtggtgacaggccgagtcaccatgccaagtcactgtgcgcctcctt

SEQ ID NO: 247115 - DNA, 201 bp, Homo sapiens
tagcccagtgtggtggcacatacctgtaaccccagctactcaggaaggctgaggcaggagaatcgcttgaacccaggaggcggaggttgcggtgagccgasatcgtgccattgcactccagcctgggcaacaagagcaaaactctgtctcaaaaaataaagaatttgcaaagctcaataataagacatggggaaaaaattt

SEQ ID NO: 247116 - DNA, 201 bp, Homo sapiens
ccctgtctctactaaaaatgcaaaattagtcaggcatggtaggttgtgcctgtaatcccagctacttgggaggctgtgccaggagaatcgctagaacctgkggggctgaggttgcagtgagccgagattgcaccactgcactccacagagtgagattccatctcaaaaaaaaaaaaagaaagaaagaaaaggccctctgag

SEQ ID NO: 247117 - DNA, 201 bp, Homo sapiens
gaaccagcctggggctcactggaggggctcgtgggcagacagcgccctttggagggaactgagtctgaaaggaaggaaaccctttccccggctcatagcayctgccatccagggccctcccagggctgcgtgaactttagtcacgtggtgacaggccgagtcaccatgccaagtcactgtgcgcctccttgctgctgtgac

SEQ ID NO: 247118 - DNA, 201 bp, Homo sapiens
tctctactaaaagtacaaaataagctgggtgtggtggcaggagcctgtaatcccagctacttgggaggctgaggcaggagaatcatcggttgaacccgagrggtgcaagttgcagtgagccaagatcacacctctgcactctagcatgggcaacagagcgagactgagactccgtctcaaaaaaaaaaaaaaaaaaaaaga

SEQ ID NO: 247119 - DNA, 201 bp, Homo sapiens
aaaaaaaaaaaaagaaagaaagaaaaggccctctgaggccaagcttggtgtctcatgcctgtaatcccaacactttgggaggctgaggtagaagttgaggycaggaggtccaagacaagcctgggcaacatagtgagtctacaaaaaaaatattgagaaactacataaatatagtgggggtgggggtggggaacaagaaaa

SEQ ID NO: 247120 - DNA, 201 bp, Homo sapiens
ctggaggggctcgtgggcagacagcgccctttggagggaactgagtctgaaaggaaggaaaccctttccccggctcatagcacctgccatccagggccctsccagggctgcgtgaactttagtcacgtggtgacaggccgagtcaccatgccaagtcactgtgcgcctccttgctgctgtgacgtcagcttccccatcctc

SEQ ID NO: 247121 - DNA, 201 bp, Homo sapiens
gccctttggagggaactgagtctgaaaggaaggaaaccctttccccggctcatagcacctgccatccagggccctcccagggctgcgtgaactttagtcaygtggtgacaggccgagtcaccatgccaagtcactgtgcgcctccttgctgctgtgacgtcagcttccccatcctcccagccaggctggacctccgtgaga

SEQ ID NO: 247122 - DNA, 201 bp, Homo sapiens
tgaaaggaaggaaaccctttccccggctcatagcacctgccatccagggccctcccagggctgcgtgaactttagtcacgtggtgacaggccgagtcaccrtgccaagtcactgtgcgcctccttgctgctgtgacgtcagcttccccatcctcccagccaggctggacctccgtgagaggcctgcctgtcctgcaccctg

SEQ ID NO: 247123 - DNA, 201 bp, Homo sapiens
ctcccagggctgcgtgaactttagtcacgtggtgacaggccgagtcaccatgccaagtcactgtgcgcctccttgctgctgtgacgtcagcttccccatcytcccagccaggctggacctccgtgagaggcctgcctgtcctgcaccctgtgcagatgcctcccactgtccgccggggctgctgggcacgccctggctggt

SEQ ID NO: 247124 - DNA, 201 bp, Homo sapiens
  misc_feature (1)...(201): n = A,T,C or G
aaaataacagtgcaacaaattaacattccaatccccctcccctgacacacacagtattggctaatggtcctttagctgaagattaagggacatagggtagnggggacacatgacccatgggagatgctctcttttcattcctagttttacttctgtccatcccatcattcctcctcaccccacatcttgcacatatttgcc

SEQ ID NO: 247125 - DNA, 201 bp, Homo sapiens
  misc_feature (1)...(201): n = A,T,C or G
tgagctgctgtattggacagctcgggcctgtattattctcaaaacgtagtcatctacaattaagggttaaaaaataacagtgcaacaaattaacattccantccccctcccctgacacacacagtattggctaatggtcctttagctgaagattaagggacatagggtagtggggacacatgacccatgggagatgctctc

SEQ ID NO: 247126 - DNA, 201 bp, Homo sapiens
  misc_feature (1)...(201): n = A,T,C or G
aagtttaatttaaatagctacgtgtgtacatgagctgctgtattggacagctcgggcctgtattattctcaaaacgtagtcatctacaattaagggttaanaaataacagtgcaacaaattaacattccaatccccctcccctgacacacacagtattggctaatggtcctttagctgaagattaagggacatagggtagt

SEQ ID NO: 247127 - DNA, 201 bp, Homo sapiens
tgactccaatgctatgatgtttggatttgaagtcagttctatttagccagtttaccaagtgtctccttggtgcaggacaccaggagacacaaaatgtcctrgataatattgggtttctggctcccaggggtccctgagatgttgttccagcggttctggagtatgggccaggcaccgcttgcatctggaccgatccgcatt

SEQ ID NO: 247128 - DNA, 201 bp, Homo sapiens
ggtagtgagctccccattggggaaggtatgtaagccaacctttctgggatgctggaagatcagagagcaaacacttgagattctgtgatcctaatattgamtccaatgctatgatgtttggatttgaagtcagttctatttagccagtttaccaagtgtctccttggtgcaggacaccaggagacacaaaatgtcctggat

SEQ ID NO: 247129 - DNA, 201 bp, Homo sapiens
tcctgacctcgtgatcccccggcctcggcctcccaaagtgctggaattacaggcgtgagccactgtgcccgatcaatctttcatttttttttaatactcaytgagaaactcagcatttgtagacatgaagttgctcagggtaagagaatgcgggaatcataggcttggcaccttgtggactcttagaatcatttatttaac

SEQ ID NO: 247130 - DNA, 201 bp, Homo sapiens
ggcgggaggtggaaatgcaatggccagggtggtgttggaccaggtaacccttcagaacccttctaactggtgtcctagggccctggctactctgtgctatsagcattcaccgaccacactgacctggcctcatattttctcttccctttcagtggccgcaagaggaagaggacgtggaatgggacgtggaaacatctttca

SEQ ID NO: 247131 - DNA, 201 bp, Homo sapiens
ccctgtccaccacagtgcccagcccagggcccgtgcctgccagcctcaccttcttggggcactgcaggtcccgggccaggttcacaagcaggtcatgggakatggggtcgaccgggttgaggaaggccacatctctgtagaggatatcaggaaggagggtcctctcaaggcccaggtcctgtgagtggtgaagagagagtt

SEQ ID NO: 247132 - DNA, 201 bp, Homo sapiens
gccctcctaccctgcctttaccccactttccttgcctcacagtagtctgtccaactcttggctgatttgtttgtatttacctccatgtctcaatatgaacrtgttttcatgactattccttgatggttttttgtttgcttgttttaagacggtctcactcttccccaggcgggagtgcaatggcacaatcatggctcactg

SEQ ID NO: 247133 - DNA, 201 bp, Homo sapiens
actataacaaggactataggagttacgagctgggaaccatagatgaaagctcaagtttaaagatgtaatagtgtgaggggccgggcgcagtggcccatgcmtgtaatcctagcactttgggaggccgaggtgggcagatcacgaggtcaggagttcgagaccagcctggccaacacagtgaaaccccgtctctactaaaaa

SEQ ID NO: 247134 - DNA, 201 bp, Homo sapiens
aggtagaacagggatagtgggtagaagctctagaaaccattcctctagaaactgctcatatacaacaggggcggccccagagcatagttttgtttgttttmtttttgagaggatcttgctctgtggcccaggctagggtgcagtggctccatcacagctccctgcagcctcgacctcccagaaccaagtgatcctttcacc

SEQ ID NO: 247135 - DNA, 201 bp, Homo sapiens
ggtgggggtggggaacaagaaaacaaaaaattcaaagcatagtgaaaagaaatatagcaaaacccggccgggcatggtggctcacgcctgtaatcccagcmctttgagaggccgaggcgtgtggatcacggggtcaggagatcgagaccatcctggctaacacagtgaaacctgtctctactaaaaatacaaaaaaattag

SEQ ID NO: 247136 - DNA, 201 bp, Homo sapiens
gtcctgagtggcaagggacactaggaagctcccggaagggacactaggaagacgagcgctgagtgacagggccacccacctgtgacaggcgctgcccctgytctgctccgttctcctgtgtggacgggtgtgaggggtggtctagctgagtccaccccacctgctgcctcacatgagccccctctgccccagtgaggtgtt

SEQ ID NO: 247137 - DNA, 201 bp, Homo sapiens
acctcgatctgagggcttagaggcttcggcctgccagcgctgtgggggcacccaccccatctcattgaatggggcagagcaggtgagggcatgagatggayagatgggcctcatccccctgcttccgttgcctggggtcctcggtcagcctgtttgctcagacccctgaaattgggggtcaaggaaggaccctcctggatt

SEQ ID NO: 247138 - DNA, 201 bp, Homo sapiens
ggctgcagggccggtccagagggtaccccggtccagtgggtgaccctgccacttggtcattgaatggccagagctgatgcgtgacgtgaggtccaggctcrggagccctcaccttacttcactctcaccacagccttctgaagcagctgctgctattggttattaaacgctccttgaggtgggcaaagtggctcaggcagg

SEQ ID NO: 247139 - DNA, 201 bp, Homo sapiens
agcctctggggctcagcaacatgcacctggctctgatcaaccagggtacaacttctcccgggagagcgtggagacccccgagcagaagggcctgacgtacyaccgcatcgtagaggctttccggtttgcctacgccaagaggaccctgcttggggaccccaagtttgtggatgtgactgaggtaaggggcaggggctggcc

SEQ ID NO: 247140 - DNA, 201 bp, Homo sapiens
aaggaacgtaagcgtgagccttgctaagagtgacaatactggcaggctgcagaccatgtgtggacctcgatctgagggcttagaggcttcggcctgccagygctgtgggggcacccaccccatctcattgaatggggcagagcaggtgagggcatgagatggacagatgggcctcatccccctgcttccgttgcctggggt

SEQ ID NO: 247141 - DNA, 201 bp, Homo sapiens
ctctcatgcccagccaggtcagggctccttgagagaagaatctggaggggccaggatttgatgggagaatgaatgatggaatgaaagaaggaacgtaagcrtgagccttgctaagagtgacaatactggcaggctgcagaccatgtgtggacctcgatctgagggcttagaggcttcggcctgccagcgctgtgggggcac

SEQ ID NO: 247142 - DNA, 201 bp, Homo sapiens
actttagtcacgtggtgacaggccgagtcaccatgccaagtcactgtgcgcctccttgctgctgtgacgtcagcttccccatcctcccagccaggctggayctccgtgagaggcctgcctgtcctgcaccctgtgcagatgcctcccactgtccgccggggctgctgggcacgccctggctggtctcttggactaggtaag

SEQ ID NO: 247143 - DNA, 201 bp, Homo sapiens
caccgcatcgtagaggctttccggtttgcctacgccaagaggaccctgcttggggaccccaagtttgtggatgtgactgaggtaaggggcaggggctggcycactgtgggtgtggggcctgccgtagaggcatcaggtgggctccccagggtggctacagcctcacatatgctttatgaatccattcctgccacagaattc

SEQ ID NO: 247144 - DNA, 201 bp, Homo sapiens
tagtcacgtggtgacaggccgagtcaccatgccaagtcactgtgcgcctccttgctgctgtgacgtcagcttccccatcctcccagccaggctggacctcygtgagaggcctgcctgtcctgcaccctgtgcagatgcctcccactgtccgccggggctgctgggcacgccctggctggtctcttggactaggtaagctca

SEQ ID NO: 247145 - DNA, 201 bp, Homo sapiens
caagtttgtggatgtgactgaggtaaggggcaggggctggcccactgtgggtgtggggcctgccgtagaggcatcaggtgggctccccagggtggctacarcctcacatatgctttatgaatccattcctgccacagaattcgattgcgggcctactgtgtgctcggatggactcgtgggtgacccccagtcttggcttct

SEQ ID NO: 247146 - DNA, 201 bp, Homo sapiens
caagtcactgtgcgcctccttgctgctgtgacgtcagcttccccatcctcccagccaggctggacctccgtgagaggcctgcctgtcctgcaccctgtgcrgatgcctcccactgtccgccggggctgctgggcacgccctggctggtctcttggactaggtaagctcatgagtcctctggccgctcctgctccttccctg

SEQ ID NO: 247147 - DNA, 201 bp, Homo sapiens
ccactgtgggtgtggggcctgccgtagaggcatcaggtgggctccccagggtggctacagcctcacatatgctttatgaatccattcctgccacagaattygattgcgggcctactgtgtgctcggatggactcgtgggtgacccccagtcttggcttctgccccacagaactgacagtgtggggaattagtggccaccct

SEQ ID NO: 247148 - DNA, 201 bp, Homo sapiens
ccacctcagcctcctgagtagctagaaatactggtgcacaccaccatgcctagctaatttttgtattttttgtagagacagggttttgccatgttgcccargctggtcttgaactccggggctcaagtgatctgcccgcctcggcctgctgggattataggtgtgagccactgcacccggccaccattatcttttgaatcc

SEQ ID NO: 247149 - DNA, 201 bp, Homo sapiens
cttgctgctgtgacgtcagcttccccatcctcccagccaggctggacctccgtgagaggcctgcctgtcctgcaccctgtgcagatgcctcccactgtccrccggggctgctgggcacgccctggctggtctcttggactaggtaagctcatgagtcctctggccgctcctgctccttccctgcctctgctcctcctcgga

SEQ ID NO: 247150 - DNA, 201 bp, Homo sapiens
caggtgggctccccagggtggctacagcctcacatatgctttatgaatccattcctgccacagaattcgattgcgggcctactgtgtgctcggatggactygtgggtgacccccagtcttggcttctgccccacagaactgacagtgtggggaattagtggccaccctcctacctcaggtcctttgcacatgctgtggttc

SEQ ID NO: 247151 - DNA, 201 bp, Homo sapiens
gctgctgtgacgtcagcttccccatcctcccagccaggctggacctccgtgagaggcctgcctgtcctgcaccctgtgcagatgcctcccactgtccgccrgggctgctgggcacgccctggctggtctcttggactaggtaagctcatgagtcctctggccgctcctgctccttccctgcctctgctcctcctcggaggt

SEQ ID NO: 247152 - DNA, 201 bp, Homo sapiens
tccattcctgccacagaattcgattgcgggcctactgtgtgctcggatggactcgtgggtgacccccagtcttggcttctgccccacagaactgacagtgyggggaattagtggccaccctcctacctcaggtcctttgcacatgctgtggttcttgagtgctcagtgctgagatgaggaatgcatgggggcattgcagcc

SEQ ID NO: 247153 - DNA, 201 bp, Homo sapiens
gagaggcctgcctgtcctgcaccctgtgcagatgcctcccactgtccgccggggctgctgggcacgccctggctggtctcttggactaggtaagctcatgrgtcctctggccgctcctgctccttccctgcctctgctcctcctcggaggtggccacccccagatcccagtcccaattcggaggccccctgaggagtgctg

SEQ ID NO: 247154 - DNA, 201 bp, Homo sapiens
gaattagtggccaccctcctacctcaggtcctttgcacatgctgtggttcttgagtgctcagtgctgagatgaggaatgcatgggggcattgcagccctcrggcatggtgagatggatgggtgaaagggagagggccaggtgaacagagaccttggccacccactccctgtcactccaaactaacgcttcccagatgccac

SEQ ID NO: 247155 - DNA, 201 bp, Homo sapiens
ctgcctgtcctgcaccctgtgcagatgcctcccactgtccgccggggctgctgggcacgccctggctggtctcttggactaggtaagctcatgagtcctcyggccgctcctgctccttccctgcctctgctcctcctcggaggtggccacccccagatcccagtcccaattcggaggccccctgaggagtgctgcaggggg

SEQ ID NO: 247156 - DNA, 201 bp, Homo sapiens
gggcattgcagccctcgggcatggtgagatggatgggtgaaagggagagggccaggtgaacagagaccttggccacccactccctgtcactccaaactaaygcttcccagatgccaccctcagccctgcaccacctgacccactcactcagtagttgccccagctccacactgggtccctataagaccctgtcatatccct

SEQ ID NO: 247157 - DNA, 201 bp, Homo sapiens
agcaggtctcagacagggacagtgacttgcctaaggccacacagcaagccgcagaaggacctagcctcccagtccccagccctgggctctgttggcccccmtgtccaccacagtgcccagcccagggcccgtgcctgccagcctcaccttcttggggcactgcaggtcccgggccaggttcacaagcaggtcatgggagat

SEQ ID NO: 247158 - DNA, 201 bp, Homo sapiens
gcctctctctccccacgccccacccctcctgcatctctgctcgccccccatgccacgtctttccatcactgagctcctgaggtgtgtccctgcgtcacagytcaccatgtcctgaaggaggcagtgcagagcaacagggctgaagcgggcaatgctcaagggttggaggaggaacaggagtcatcaggagggagagaggtg

SEQ ID NO: 247159 - DNA, 201 bp, Homo sapiens
ctgacctggcctcatattttctcttccctttcagtggccgcaagaggaagaggacgtggaatgggacgtggaaacatctttcaaaagcgaagataattttytaagttgaacagaactttgtccttttttctttcaggttatctgagttcattggagtgggtgcttgtgcatatatgctaggtatcttttgccatctttctc

SEQ ID NO: 247160 - DNA, 201 bp, Homo sapiens
cctgtgcagatgcctcccactgtccgccggggctgctgggcacgccctggctggtctcttggactaggtaagctcatgagtcctctggccgctcctgctcyttccctgcctctgctcctcctcggaggtggccacccccagatcccagtcccaattcggaggccccctgaggagtgctgcagggggccacaggcgtggctc

SEQ ID NO: 247161 - DNA, 201 bp, Homo sapiens
atagactagattactgtggaacttttccctgaaagtaatcctcttgcatttttatttgcttggttttctatttgtcactaattcaaccccaatcatatctraagatcatgacatcatttatcagttattattcttgacccaccccaatctggactggtttctccccgtgcttggtgtgtcactgtcaccctgggcactccc

SEQ ID NO: 247162 - DNA, 201 bp, Homo sapiens
ggcacgccctggctggtctcttggactaggtaagctcatgagtcctctggccgctcctgctccttccctgcctctgctcctcctcggaggtggccaccccyagatcccagtcccaattcggaggccccctgaggagtgctgcagggggccacaggcgtggctctgagccactctggagagtggcggggggcccagccagtt

SEQ ID NO: 247163 - DNA, 201 bp, Homo sapiens
ggtgattctcccacctcagcctcctgagtagctagaaatactggtgcacaccaccatgcctagctaatttttgtattttttgtagagacagggttttgccrtgttgcccaagctggtcttgaactccggggctcaagtgatctgcccgcctcggcctgctgggattataggtgtgagccactgcacccggccaccattatc

SEQ ID NO: 247164 - DNA, 201 bp, Homo sapiens
ccgctcctgctccttccctgcctctgctcctcctcggaggtggccacccccagatcccagtcccaattcggaggccccctgaggagtgctgcagggggccrcaggcgtggctctgagccactctggagagtggcggggggcccagccagttctgtggctgggactttcccaggcagacaagtctgtctcttcctccccagc

SEQ ID NO: 247165 - DNA, 201 bp, Homo sapiens
gcaaggcagcgattgctcgttagaagagtctagcatggggcagaaatgggcggactggcacccccggtgtgttcaggctggcaacatggggagagagtagyctcaagttgaatgccatggtggactgcaaagatggagattgtcggctgcctgcactcctcatagcctgttctcttttgaagggagatgtgagcagcacac

SEQ ID NO: 247166 - DNA, 201 bp, Homo sapiens
tcttcctccccagcgggtgcagcccagaactgtcttctgaggaagaggtgctctcctgggcccccactgtccccaggcctcaggtaagcccatcagggtcmcaaggaagggggtctgggtttgaggccaaccatggcagctgacctactttctagcctcagtttcccctagtgtgtgcagctctcacgctgtttgggtgag

SEQ ID NO: 247167 - DNA, 201 bp, Homo sapiens
caggcgtggctctgagccactctggagagtggcggggggcccagccagttctgtggctgggactttcccaggcagacaagtctgtctcttcctccccagcrggtgcagcccagaactgtcttctgaggaagaggtgctctcctgggcccccactgtccccaggcctcaggtaagcccatcagggtcccaaggaagggggtc

SEQ ID NO: 247168 - DNA, 201 bp, Homo sapiens
tggcgggcgcctgtagtcccagctactcgggaggctgaggcaggagaatggcgtgaacccaggaggcagagcttgcaatgagccaagatcgcgccactgcrctccagcctgggcgacagagcaagactccatctccaaaaataaaaaatatattatctggatgtgatggcttatgcctgtagtcccagctactccataggc

SEQ ID NO: 247169 - DNA, 201 bp, Homo sapiens
attgaatggccagagctgatgcgtgacgtgaggtccaggctcgggagccctcaccttacttcactctcaccacagccttctgaagcagctgctgctattgrttattaaacgctccttgaggtgggcaaagtggctcaggcaggtgttaaccctctgagcccctcagagcctctggggctcagcaacatgcacctggctctg

SEQ ID NO: 247170 - DNA, 201 bp, Homo sapiens
gcttccccatcctcccagccaggctggacctccgtgagaggcctgcctgtcctgcaccctgtgcagatgcctcccactgtccgccggggctgctgggcacsccctggctggtctcttggactaggtaagctcatgagtcctctggccgctcctgctccttccctgcctctgctcctcctcggaggtggccacccccagatc

SEQ ID NO: 247171 - DNA, 201 bp, Homo sapiens
cccctcaggcatgggggcatgattccacctcgctagcccacatgtgttcttcacggagggctgctggcccgtctccctggggttaccctgagcagcagagstgtgtttgttgagactccatggggtggagggattgcgatgttgtcctctcagttcccggggctgatgtggaagctcaagggcttgccctggattcttcag

SEQ ID NO: 247172 - DNA, 201 bp, Homo sapiens
ggaggggcgtcagctgcccaggtggtgtcttctctttccccgtgagcattctgcacctctgactcccgctgcagccagtgacctggtgtcttgtctctctraggggacagagccactgcagtgtgtccctctgccctcctttttggctaaggccagctccttcatctactcgctggctcggggtgctgttcctacaatgct

SEQ ID NO: 247173 - DNA, 201 bp, Homo sapiens
cttggcaccacaggtttcctccctggcaaacctgcatgacggccttgcgtgccctcccccagggccaaggcgctgttgctgaactgaagtggcaacctacscggtcagagctttaagctgcagctctgatgccccagggacctctcagacccccctgcccagagcaggcagcccggtaagccctcctcctcttcccctgca

SEQ ID NO: 247174 - DNA, 201 bp, Homo sapiens
ttggccacccactccctgtcactccaaactaacgcttcccagatgccaccctcagccctgcaccacctgacccactcactcagtagttgccccagctccayactgggtccctataagaccctgtcatatcccttcccgctgaggatcctcacatccctccttacctacttgggtccttggcattcctgggcggatctgcag

SEQ ID NO: 247175 - DNA, 201 bp, Homo sapiens
ggaagctcccggaagggacactaggaagacgagcgctgagtgacagggccacccacctgtgacaggcgctgcccctgttctgctccgttctcctgtgtggrcgggtgtgaggggtggtctagctgagtccaccccacctgctgcctcacatgagccccctctgccccagtgaggtgttctgccgggatagaaaggtgcttc

SEQ ID NO: 247176 - DNA, 201 bp, Homo sapiens
cacatccctccttacctacttgggtccttggcattcctgggcggatctgcagacccccccacactgaccagtgacctcccaggaggggcgtcagctgcccrggtggtgtcttctctttccccgtgagcattctgcacctctgactcccgctgcagccagtgacctggtgtcttgtctctctgaggggacagagccactgca

SEQ ID NO: 247177 - DNA, 201 bp, Homo sapiens
gtggtgtcttctctttccccgtgagcattctgcacctctgactcccgctgcagccagtgacctggtgtcttgtctctctgaggggacagagccactgcagygtgtccctctgccctcctttttggctaaggccagctccttcatctactcgctggctcggggtgctgttcctacaatgctcctttctgcctctgatgattt

SEQ ID NO: 247178 - DNA, 201 bp, Homo sapiens
ctctgactcccgctgcagccagtgacctggtgtcttgtctctctgaggggacagagccactgcagtgtgtccctctgccctcctttttggctaaggccagstccttcatctactcgctggctcggggtgctgttcctacaatgctcctttctgcctctgatgatttacttctttatcacggcttattcccgaaagaaaggc

SEQ ID NO: 247179 - DNA, 201 bp, Homo sapiens
cagccagtgacctggtgtcttgtctctctgaggggacagagccactgcagtgtgtccctctgccctcctttttggctaaggccagctccttcatctactcrctggctcggggtgctgttcctacaatgctcctttctgcctctgatgatttacttctttatcacggcttattcccgaaagaaaggcagctgttgttgctct

SEQ ID NO: 247180 - DNA, 201 bp, Homo sapiens
tctactcgctggctcggggtgctgttcctacaatgctcctttctgcctctgatgatttacttctttatcacggcttattcccgaaagaaaggcagctgttrttgctctagaaacttctatctgctgcctccttctgtcctttgctcctcttagagcaaacatggctgggctatgtcctctctcccttcagggtatcccctc

SEQ ID NO: 247181 - DNA, 201 bp, Homo sapiens
tctgtcggatttcctaactctctccgtctccacccacatctattgggattcgtgtttttctgagggattccacagtaggttactgatgtcgcacctcaggrtgtgtctcaaaagtgagacttgaacatagcacagcaggatgtcggggtgacacaacctgttgtcccttctctttacctacagtaggctcccttggctgtt

SEQ ID NO: 247182 - DNA, 201 bp, Homo sapiens
actctcatgcccagccaggtcagggctccttgagagaagaatctggaggggccaggatttgatgggagaatgaatgatggaatgaaagaaggaacgtaagygtgagccttgctaagagtgacaatactggcaggctgcagaccatgtgtggacctcgatctgagggcttagaggcttcggcctgccagcgctgtgggggca

SEQ ID NO: 247183 - DNA, 201 bp, Homo sapiens
ctgggaccagaggcacgtgccaccaaacctggataatttttgtattttttttagagacagggtcttgcccagactggtctcaaactcccgggatcaaactrtcttcccacctcagcctcccaaagcgctgggattacaggtgtgtttttttttttgagacagagtctcgctctgttgcccaggctggagtgcagtggcgct

SEQ ID NO: 247184 - DNA, 201 bp, Homo sapiens
cccagggcagtagtcttggaaaatgtcccacatcgtggatttgcctttctgtttccttgagggcagattcagacagaacacctttccctgggattggtcarctaatccgtggggtgttgctgaaactttattttattttattttatttttgagacggagtctcgctctgtcccccaggctgtcccccaggctggagtgcag

SEQ ID NO: 247185 - DNA, 201 bp, Homo sapiens
tgtttttcttggcatgagagcaggacctaagtgtctgttccctgttgattccccagtgccaggcatgcagtgcaaactctagaaatattttttgcatgaargaatgagtgattgaatgcagcaagggtctggaggctgaggaccaggcagacagacattcagagttgctggaacgcgacagagacagggagtcagactggt

SEQ ID NO: 247186 - DNA, 201 bp, Homo sapiens
ggtggccacccccagatcccagtcccaattcggaggccccctgaggagtgctgcagggggccacaggcgtggctctgagccactctggagagtggcggggkgcccagccagttctgtggctgggactttcccaggcagacaagtctgtctcttcctccccagcgggtgcagcccagaactgtcttctgaggaagaggtgct

SEQ ID NO: 247187 - DNA, 201 bp, Homo sapiens
tgagccactctggagagtggcggggggcccagccagttctgtggctgggactttcccaggcagacaagtctgtctcttcctccccagcgggtgcagcccaraactgtcttctgaggaagaggtgctctcctgggcccccactgtccccaggcctcaggtaagcccatcagggtcccaaggaagggggtctgggtttgaggc

SEQ ID NO: 247188 - DNA, 201 bp, Homo sapiens
tgggagagatgaggccatgccctccagggcactcagcatgacccggcccagtggacgggactgggtagcttccttggtgcagggggctgtcatgctaggayggggtcactgaccaggccaggcccctgccccatgacttgtggtggaaatgtccttttgtttttgtttttttgcattttttttgagacggagtttcactct

SEQ ID NO: 247189 - DNA, 201 bp, Homo sapiens
gtggagatgggggtttcaccatgttggccaggctgttctcaaactcttcacctcaggtgatccacctgcctctgcctcccaaagtgctgggattataggtrtgagccactgcacccggccatgtgatgggaatgttctgtgtccataatagatgctgcatattgctggcccagctcctgaggctctttggacctccaggaa

SEQ ID NO: 247190 - DNA, 201 bp, Homo sapiens
ataatagatgctgcatattgctggcccagctcctgaggctctttggacctccaggaatcggtgtctctatcaggaacccttaaccctgacccggactcccrgctgggacccggggtgtcggagtggcaagagcactgtcaggcctggtgaagggtgtgagctgtccaacggggcagggaggaggcagggcctgttctgcag

SEQ ID NO: 247191 - DNA, 201 bp, Homo sapiens; identical to SEQ ID NO: 48225

SEQ ID NO: 247192 - DNA, 201 bp, Homo sapiens
attcagggccattatccatttgcctccacttgctttgcgattagcagaatcttctcacctactgtatttgtttcccttttctcttggaggaggagtctcakttgattattgcaactaccttgtgaggtaagcaggtttggtgatagtcttgtcatccataaaatagggagaatgagattaaagggctcatcactctgatga

SEQ ID NO: 247193 - DNA, 201 bp, Homo sapiens
tcaggaacccttaaccctgacccggactcccagctgggacccggggtgtcggagtggcaagagcactgtcaggcctggtgaagggtgtgagctgtccaacrgggcagggaggaggcagggcctgttctgcagttggacagacagagccctctagctgctttctggaagactgaagggcaggtgatgttggagggagggagt

SEQ ID NO: 247194 - DNA, 201 bp, Homo sapiens
gagccaccatgcccagcttgcttgcttttttttttttttttttttttttttttttttttttttgagagtctcactctgtcgcccaggctggagtgcagtgrcatgatctcagctcactgcaacctctgcctcctgggttcaagcacttctcatgcctcagcctcctgagtagctgggactatgcccagctagtttttcgta

SEQ ID NO: 247195 - DNA, 201 bp, Homo sapiens
ggaggaggcagggcctgttctgcagttggacagacagagccctctagctgctttctggaagactgaagggcaggtgatgttggagggagggagtgcaggcrggggctgtgagggagttcaggtcagaaacaggtggcgcctggattcaggctgtggtggtcacggtggggatgaggggctgctttggattgtgctggggat

SEQ ID NO: 247196 - DNA, 201 bp, Homo sapiens
gctagtttttcgtatttttagtagagatagggtttccccatgttgcccaggctggtctcaaactcctgagtttgcctcagcctcccaagtgctaggattayaggcgtgagccactgcacctggcccttttttttttttttttttttttttgagacagaatcttgctctgttgtccaggctggagtacagtggcacaatctc

SEQ ID NO: 247197 - DNA, 201 bp, Homo sapiens
aggcaggggctgtgagggagttcaggtcagaaacaggtggcgcctggattcaggctgtggtggtcacggtggggatgaggggctgctttggattgtgctgrggatgtggggtggtgcgctgctgcatgactactgccaggtctctctgctcttagtgtctgcatccagggctgggagggggtcaaatgaatcacactatcg

SEQ ID NO: 247198 - DNA, 201 bp, Homo sapiens
gatagggtttccccatgttgcccaggctggtctcaaactcctgagtttgcctcagcctcccaagtgctaggattataggcgtgagccactgcacctggccyttttttttttttttttttttttttgagacagaatcttgctctgttgtccaggctggagtacagtggcacaatctcagctcactgcaacctccgtcttccc

SEQ ID NO: 247199 - DNA, 201 bp, Homo sapiens
agaaacaggtggcgcctggattcaggctgtggtggtcacggtggggatgaggggctgctttggattgtgctggggatgtggggtggtgcgctgctgcatgrctactgccaggtctctctgctcttagtgtctgcatccagggctgggagggggtcaaatgaatcacactatcggccccaggcccaccaagcctggggaggt

SEQ ID NO: 247200 - DNA, 201 bp, Homo sapiens
atagggtttccccatgttgcccaggctggtctcaaactcctgagtttgcctcagcctcccaagtgctaggattataggcgtgagccactgcacctggcccttttttttttttttttttttttttgagacagaatcttgctctgttgtccaggctggagtacagtggcacaatctcagctcactgcaacctccgtcttcccg

SEQ ID NO: 247201 - DNA, 201 bp, Homo sapiens
gaggatgggagggtctcaacaactcacgcctctaatcctagcactttaggaggccaagtcaggaggagcgcatgagcccaggagtttgagacctgcctggrcaacatagcaagactccatctctacaaaaaacggaaaaaaaaattagctaggtgtggcggtgtgtgcttatgttcccagctacttgggaggctaaggtgg

SEQ ID NO: 247202 - DNA, 201 bp, Homo sapiens
tagggtttccccatgttgcccaggctggtctcaaactcctgagtttgcctcagcctcccaagtgctaggattataggcgtgagccactgcacctggcccttttttttttttttttttttttttgagacagaatcttgctctgttgtccaggctggagtacagtggcacaatctcagctcactgcaacctccgtcttcccgg

SEQ ID NO: 247203 - DNA, 201 bp, Homo sapiens
atgttgcccaggctggtctcaaactcctgagtttgcctcagcctcccaagtgctaggattataggcgtgagccactgcacctggccctttttttttttttyttttttttttgagacagaatcttgctctgttgtccaggctggagtacagtggcacaatctcagctcactgcaacctccgtcttcccgggtttaagcaact

SEQ ID NO: 247204 - DNA, 201 bp, Homo sapiens
agcaggacctaagtgtctgttccctgttgattccccagtgccaggcatgcagtgcaaactctagaaatattttttgcatgaaggaatgagtgattgaatgyagcaagggtctggaggctgaggaccaggcagacagacattcagagttgctggaacgcgacagagacagggagtcagactggtcatgcaagatcctgggcc

SEQ ID NO: 247205 - DNA, 201 bp, Homo sapiens
ggaccaggctgggccaggcaaggtcgggcactgtctgacctggctgggcggtagctttggctccaaggtccgctccccggtcagcgggatcctgttcaatratgaaatggacgacttcagctctcccagcatcaccaacgagtttggggtacccccctcacctgccaatttcatccagccaggtatggggtggaggtccgg

SEQ ID NO: 247206 - DNA, 201 bp, Homo sapiens
  misc_feature (1)...(201): n = A,T,C or G
ttaattctattgtgttttagttaagtttaatttaaatagctacgtgtgtacatgagctgctgtattggacagctcgggcctgtattattctcaaaacgtantcatctacaattaagggttaaaaaataacagtgcaacaaattaacattccaatccccctcccctgacacacacagtattggctaatggtcctttagctga

SEQ ID NO: 247207 - DNA, 201 bp, Homo sapiens
ggccaggcaaggtcgggcactgtctgacctggctgggcggtagctttggctccaaggtccgctccccggtcagcgggatcctgttcaataatgaaatggaygacttcagctctcccagcatcaccaacgagtttggggtacccccctcacctgccaatttcatccagccaggtatggggtggaggtccgggggtgggggac

SEQ ID NO: 247208 - DNA, 201 bp, Homo sapiens; identical to SEQ ID NO: 48203

SEQ ID NO: 247209 - DNA, 201 bp, Homo sapiens; identical to SEQ ID NO: 48204

SEQ ID NO: 247210 - DNA, 201 bp, Homo sapiens
gctgtggtggtcacggtggggatgaggggctgctttggattgtgctggggatgtggggtggtgcgctgctgcatgactactgccaggtctctctgctcttrgtgtctgcatccagggctgggagggggtcaaatgaatcacactatcggccccaggcccaccaagcctggggaggtggccacccttccatgatggcatttg

SEQ ID NO: 247211 - DNA, 201 bp, Homo sapiens
tggattgtgctggggatgtggggtggtgcgctgctgcatgactactgccaggtctctctgctcttagtgtctgcatccagggctgggagggggtcaaatgwatcacactatcggccccaggcccaccaagcctggggaggtggccacccttccatgatggcatttggatgttccctgtgtgtggggagggcacagggactc

SEQ ID NO: 247212 - DNA, 201 bp, Homo sapiens
tctctgctcttagtgtctgcatccagggctgggagggggtcaaatgaatcacactatcggccccaggcccaccaagcctggggaggtggccacccttccaygatggcatttggatgttccctgtgtgtggggagggcacagggactccattcgtagaccacctctgggacagtgtgtctgcctctgaggtcagacgctctg

SEQ ID NO: 247213 - DNA, 201 bp, Homo sapiens
ttttttttttttttttgagacagaatcttgctctgttgtccaggctggagtacagtggcacaatctcagctcactgcaacctccgtcttcccgggtttaarcaactctcttgcctcagcctcctgagtagctggggttataggcatgggccaccgtaccccactaatgttaatattttttgtatttttaatagagatggag

SEQ ID NO: 247214 - DNA, 201 bp, Homo sapiens
actatcggccccaggcccaccaagcctggggaggtggccacccttccatgatggcatttggatgttccctgtgtgtggggagggcacagggactccattcrtagaccacctctgggacagtgtgtctgcctctgaggtcagacgctctgcactgggacagggtggagtggagggaaatccagcttggggctcattggaggg

SEQ ID NO: 247215 - DNA, 201 bp, Homo sapiens
catgcctgtaatcccagcactttgggaggctgggccagggggatcacttgatcccaagagtttgggaccaccctgggcaacacagtgagaccctgtctcatgtgtgtgtgtgtgtgtgtgtgtgtgtgtgtgtgtatgtatgtatatgtatgtgtatatatgtatgtatatatatgtgtgtgtgtgtgtatatatatatat

SEQ ID NO: 247216 - DNA, 201 bp, Homo sapiens; identical to SEQ ID NO: 48431

SEQ ID NO: 247217 - DNA, 201 bp, Homo sapiens
acacattctgagcgtggggtcccagtggccactgtggctggccatgtgtcctgagtggcaagggacactaggaagctcccggaagggacactaggaagacragcgctgagtgacagggccacccacctgtgacaggcgctgcccctgttctgctccgttctcctgtgtggacgggtgtgaggggtggtctagctgagtcca

SEQ ID NO: 247218 - DNA, 201 bp, Homo sapiens
tggcaagggacactaggaagctcccggaagggacactaggaagacgagcgctgagtgacagggccacccacctgtgacaggcgctgcccctgttctgctcygttctcctgtgtggacgggtgtgaggggtggtctagctgagtccaccccacctgctgcctcacatgagccccctctgccccagtgaggtgttctgccggg

SEQ ID NO: 247219 - DNA, 201 bp, Homo sapiens
ggctgggccagggggatcacttgatcccaagagtttgggaccaccctgggcaacacagtgagaccctgtctcatgtgtgtgtgtgtgtgtgtgtgtgtgtrtgtgtgtatgtatgtatatgtatgtgtatatatgtatgtatatatatgtgtgtgtgtgtgtatatatatatatatttttttttttaaaggaagaagagga

SEQ ID NO: 247220 - DNA, 201 bp, Homo sapiens
agttcagtgatttgcctgaggccccacagcaggtgagtggcaagtccagcatcagagcagggcaggctggcggtgccccctgagccccctttgccatgctkaccacatgcacatcctgggcttctgcaggaatgccctgtcccctacctgccctgctccgtgcaaaaccctctttgagctgtgcctgggagacatgctgag

SEQ ID NO: 247221 - DNA, 201 bp, Homo sapiens
gcagagatgaggcccagagcttctggcagagggcatggcctgcgcaaaggtctgggggccggacagcctgcacgtattctgggaagcgggaaggagacacmggccttgtgtttctgaggcccgactttagactgtgccctgttggggaggggccagggaatgtctgaggctaggcctgaccctgcttcttaccccgtgggt

SEQ ID NO: 247222 - DNA, 201 bp, Homo sapiens
agggtgaccagcagctcagcacagtggcttgcttccagcactctgggaggctgaggtagaggattgtttgagaggagttcaaaaccagcccgcgagacatrgtgagaccctgtctctacaaaaaattttaaaaattaacttggcatggtggtgcacacctgtagtcctcgctactagggaggctgaggtgggaggatcact

SEQ ID NO: 247223 - DNA, 201 bp, Homo sapiens
tctggcagagggcatggcctgcgcaaaggtctgggggccggacagcctgcacgtattctgggaagcgggaaggagacacaggccttgtgtttctgaggccygactttagactgtgccctgttggggaggggccagggaatgtctgaggctaggcctgaccctgcttcttaccccgtgggtgcagcagagccatgaagaaga

SEQ ID NO: 247224 - DNA, 201 bp, Homo sapiens
gagcccaggagtttgagacctgcctgggcaacatagcaagactccatctctacaaaaaacggaaaaaaaaattagctaggtgtggcggtgtgtgcttatgktcccagctacttgggaggctaaggtgggaggatcacttgagcccaggaggttgaggctgcagtgagccatgattgtaccactacactctagcttgggcaa

SEQ ID NO: 247225 - DNA, 201 bp, Homo sapiens
tggtggcttatgcctgtaatcccagcactttgggaggctgaggtgggcagatcacctgaagtcaggcattcaagaccagcctggccaacatgacaaaaccstgtctctactaaaaatacaaaaattagctgggtgtggtggcacatgcctgtaatctcagttactggggaggctgaggcaggagaatcgcttgaacccagg

SEQ ID NO: 247226 - DNA, 201 bp, Homo sapiens
gggcctgctggccgtggtcctggtgctggtcattgtcggcctctgtctctggctgccctcagcctccaaggaacctgacaaccatgtgtacaccagggctrccgtggccgcggatgccaagcagtgctcgaagattgggaggtgagcagggcagggcatgggacatgggccctgaaaactgggcaagtggacctgagcaat

SEQ ID NO: 247227 - DNA, 201 bp, Homo sapiens
ttgtgtagtgctcggaatgtctactttttgtgtttcaattatacctcaatgaagggttattttaaaaaataaaatatttttaaaaaacaagccgagcgcartggctcatgcctgtaatcccagcactttgggaagccaaggcgggcagatcacaaggtcaggagttcaagaccggcctggctaatatggtgaaaccctgtc

SEQ ID NO: 247228 - DNA, 201 bp, Homo sapiens
gtcattgtcggcctctgtctctggctgccctcagcctccaaggaacctgacaaccatgtgtacaccagggctgccgtggccgcggatgccaagcagtgctygaagattgggaggtgagcagggcagggcatgggacatgggccctgaaaactgggcaagtggacctgagcaataccttcacccccctgagactcagtttcc

SEQ ID NO: 247229 - DNA, 201 bp, Homo sapiens
caggctggagtgcagtggcacaatctcggcttacggcaacctctgcctcccggattcaagcgattctcctgcttcagcctcccaagtagctgggattaaaggcatgtgccaccacgcctggctaattttgtatttttagtagaggcggggtttctccatctttgtcaggctggtctcgaactcctgacctcaggtgatctg

SEQ ID NO: 247230 - DNA, 201 bp, Homo sapiens; identical to SEQ ID NO: 48458

SEQ ID NO: 247231 - DNA, 201 bp, Homo sapiens
cccaaaacacattttagctgtcaatcagatttagcatgtactgagtctctattatgtattaggcaatagagacagcatttagacatactttgccttgttcwtttttttttttttttttttgacagggtcttactctgttgcccaggctggaatgcagtgtcataatcatagctcactgcagccttgaactcctgggctcca

SEQ ID NO: 247232 - DNA, 201 bp, Homo sapiens
tccgctttctgattttgcctgacatgctgaagaacgcacccatgttaaagagcatgaaaaataaaaaccaaggctcaggggctggccgaggaaaagctgcyattctcaaggcccaaggtaggtgcttttcatgcacaggttttaaaatataggtttgtcttgtgtcttgtagaaaggggccctattactgcctggagacag

SEQ ID NO: 247233 - DNA, 201 bp, Homo sapiens
ggagttggagaccagcctggccaacatggtgaaactccatctctactaaaagtacaaaataagctgggtgtggtggcaggagcctgtaatcccagctactygggaggctgaggcaggagaatcatcggttgaacccgaggggtgcaagttgcagtgagccaagatcacacctctgcactctagcatgggcaacagagcgag

SEQ ID NO: 247234 - DNA, 201 bp, Homo sapiens
ccaagcaagcagtcagttctgcagtagacaccagctgggtgtccttcagttctgacactatctacctggagatagcctgaaaaaccacaggttgagggctyggtcccacaagacagcccctgcaccccccactattattcataagcacaggcctccagaacatctgaatggcttcaagccagggttctcacgtctcactcc

SEQ ID NO: 247235 - DNA, 201 bp, Homo sapiens
aactagcctcagcatcttcagcatggggagagccaggcacatggctgggggccaggggaaggttcacaccaagctctgccccttcccaccctgatccctcrgactttggggccaggccctcccttactggggctgggcagtgacactacctaggatcagccaccagggggtaccacgaccctggcactttcttaggcagag

SEQ ID NO: 247236 - DNA, 201 bp, Homo sapiens
ctactaaaaatacaggaaattagccgggcgttgtggttcacggctgtagtcccagctactcaagtaggaggctgagacatgagaatcgcctaatcccaggaggtggagattgcagtgagccgagatcatgccactgcactccagcctgggtgacagagtgggactccgtctcaaaaaataaaaaaaaaaaaaggcgggagg

SEQ ID NO: 247237 - DNA, 201 bp, Homo sapiens
tcagaggactcctggacagtgccaggctctaggctggggtgggggacacaggagaaaccaggccaggcccatccctactggagcttctccctaagcagtgraggctcagccactgtaaggaggtaggcaaggccctgcagaaagaggggtgtggaaatctgggggctcccaggaagggccgctgctggagatggggttctt

SEQ ID NO: 247238 - DNA, 201 bp, Homo sapiens
ggcttttagaatattgctcattgaacagattattcaagtaatgaaagaggaggggaaaaaaatccagcacattagttaacctggcatcaattaatgaggtkctaataagctttgtcttatgatactacctggaggttacagagctggtattctgaggaataagcatcagtgagttggtcagatacaatagacgtttaaaat

SEQ ID NO: 247239 - DNA, 201 bp, Homo sapiens
gcaagggacactaggaagctcccggaagggacactaggaagacgagcgctgagtgacagggccacccacctgtgacaggcgctgcccctgttctgctccgktctcctgtgtggacgggtgtgaggggtggtctagctgagtccaccccacctgctgcctcacatgagccccctctgccccagtgaggtgttctgccgggat

SEQ ID NO: 247240 - DNA, 201 bp, Homo sapiens
gccttcaagcatttgtttaacaaagcacatcctgcacagccctgaatccattaaaccttgagtcgacacagtacttgtttctgtgagcacagggttggggmtagggttacagattaacagcatctcaaggcaaaagaatttttcttactacagaacaaaatggagcctcttacgtctacttctttctacatagacacagta

SEQ ID NO: 247241 - DNA, 201 bp, Homo sapiens
gtagacctaaagccgtattttgaccctgtactagtatgttattttagtataatcattactgaattcatcatacttttacagtaaacagtacttactttgartaataacacattacacttaatagtagtgaactgcatcctcgatatcaaaagcgacttttgatgtagttcactctggacccgtacaggaacaccagccttg

SEQ ID NO: 247242 - DNA, 201 bp, Homo sapiens
tggaacagtgcttggcgtcatgctaggctgagactaaacattttcctatcagtcagacaagaaattcacaggatatggagtacagtgttgttttaagatgyaccatatctgattttgttttaatcaggtatggtaagacccagagacagctgccttgaaagaatgtattacagttctcaaagaagggggcaaaccacgtta

SEQ ID NO: 247243 - DNA, 201 bp, Homo sapiens
aggctctgagaggaccacatcgccagcaagtgacaggctgggaccaaggccaggcctgtctgcctcctagactaggcctgagtgaggaccggcctgagtayggcccacctgcttcctcctccgtttagagcttgggctggagctgtcctggccagtgctctctgcctcaccaggctgcatgagccacaagctgccacttgt

SEQ ID NO: 247244 - DNA, 201 bp, Homo sapiens
ggacctctcagacccccctgcccagagcaggcagcccggtaagccctcctcctcttcccctgcagcctcagggctggagccacagctgggagggctcccaratcctgaccatatcctcccagaggctgagccaggcctgggcactgtcccctcaaatgtgagaatactgggcagggggaggggagaaaggagggaatggag

SEQ ID NO: 247245 - DNA, 201 bp, Homo sapiens
gccactctgtgcagcacatggagagaataattattatgctagcagacctcatggaccagggctcactggggcccacactctgctctgtgcttttcacccaygagcctctcacaaccctccctgctcctttgggctaggggatgctgtgtggattcccattttacagggtggggatgctgaggctcagacaggtcacgcaaa

SEQ ID NO: 247246 - DNA, 201 bp, Homo sapiens; identical to SEQ ID NO: 48206

SEQ ID NO: 247247 - DNA, 201 bp, Homo sapiens
gctcccggaagggacactaggaagacgagcgctgagtgacagggccacccacctgtgacaggcgctgcccctgttctgctccgttctcctgtgtggacggktgtgaggggtggtctagctgagtccaccccacctgctgcctcacatgagccccctctgccccagtgaggtgttctgccgggatagaaaggtgcttcggga

SEQ ID NO: 247248 - DNA, 201 bp, Homo sapiens
cattgtcggcctctgtctctggctgccctcagcctccaaggaacctgacaaccatgtgtacaccagggctgccgtggccgcggatgccaagcagtgctcgragattgggaggtgagcagggcagggcatgggacatgggccctgaaaactgggcaagtggacctgagcaataccttcacccccctgagactcagtttcccc

SEQ ID NO: 247249 - DNA, 201 bp, Homo sapiens
gggaggtgagcagggcagggcatgggacatgggccctgaaaactgggcaagtggacctgagcaataccttcacccccctgagactcagtttccccatgtgyaagcttcgcttggactctctcagtagcctttgggaaggggacagtgactccgagagcagggtgtgggtctctagagccaaacagggccccttttctcagt

SEQ ID NO: 247250 - DNA, 201 bp, Homo sapiens
cggggagcctgccggctactgagtgctccaggaggacaaggctgacaagcaatccagggacaagatactcaccaggaccaggaaggggactctgggggacyggcttcccctgtgagcagcagagcagcacaataaatgaggccactgtgccaggctccaggtggcctccctgccctgtctccccactctctgggcctcagt

SEQ ID NO: 247251 - DNA, 201 bp, Homo sapiens
tatctatctatctatctatctatctatctactatctatctatctatttatttagagatggagttttgctctgttgccaggctggagtgcagtggtgcaatytcagttaactgcaacctccgcctcccaagttcaagtgattctcatgcctaagtctcccaagtagctgggattacaggcgtgcgccaccacgcccaacaaa

SEQ ID NO: 247252 - DNA, 201 bp, Homo sapiens
cagggaaggggactgaagctgacctaccagcctgcctgcattgagaaacgagagctaagagttcagagaagccaccaaggcagctaggactataggacagratgtcaagagaagaaagccacacagagaacccaagagatctgcagcgggttgcttttgaacattcagcagaatactgatgagcacaccgatgtgaggaag

SEQ ID NO: 247253 - DNA, 201 bp, Homo sapiens
tgaggtaggagaatcaattgaacctgggaggcggaggttacagtgagccgagatggcgccaccgcactctaccctgggtgacagagcaaaactctgtctcaaaaaaaaaaaaaagaaaagaaaagaaatctctgcagctggcagttgtggtgtaggacctgctcacgctacatggacactcctgcactggcaaatatttac

SEQ ID NO: 247254 - DNA, 201 bp, Homo sapiens
ctccgcctcccaagttcaagtgattctcatgcctaagtctcccaagtagctgggattacaggcgtgcgccaccacgcccaacaaatttgtgtgtgtgtgtrtgtgtgtgtgtgtgtgtgtgtgtgtgtgtgtgtttccaagacagagtatcgctctgttacccaggctggagggcagtggtgcaatcttggcttactgcaa

SEQ ID NO: 247255 - DNA, 201 bp, Homo sapiens
atataaagaatttgtggccaggcaccgtggctcacacctgtaatcccagcactttgggaggccgaggccagatcacctgaggtcaggagctcgagaccagmaacatggagaaaccccgtttctagtaaaaatacaaaattagcccagtgtggtggcacatacctgtaaccccagctactcaggaaggctgaggcaggagaa

SEQ ID NO: 247256 - DNA, 201 bp, Homo sapiens
gcacgtgtttagcctgtgaggactggtacctgttgtgcaggaagggctgagcactgtccgagggcatatatgagggacgacagccaagcacccgtgtgtakgtgtgtgtgtgtgtgtgtgtgtgtgtgtgtgtgtctgctaattaccctatgaagattcaaggttccttcctttgggttaagcactgcctgcccagagatg

SEQ ID NO: 247257 - DNA, 201 bp, Homo sapiens
ctctattgcccaggctggtcttgaactcctggcctcaagtgatcctccaccttggcctcccaaagtgctgagattacaggtgtaagccaccatctctagcmgggaaaaaaaatgttattaataaagtatagcaatttccctttttgtcccagttataaaagtcatgtacatttgtttgcttgataaagaggaaactgtctg

SEQ ID NO: 247258 - DNA, 201 bp, Homo sapiens
ttggtagccattcagagatgcagtcaacatgacacaaagtgcacagaccttggtgtccgacagacctggaatcagcttgtagcctgccccctagggtgacytggggcgagcttagctttggacctccttcatcctctggtccctcctctaaatcagggataaaaatagcaccttggcctcagaaggaaccacgcctgacca

SEQ ID NO: 247259 - DNA, 201 bp, Homo sapiens
cacgtgtttagcctgtgaggactggtacctgttgtgcaggaagggctgagcactgtccgagggcatatatgagggacgacagccaagcacccgtgtgtatgtgtgtgtgtgtgtgtgtgtgtgtgtgtgtgtgtctgctaattaccctatgaagattcaaggttccttcctttgggttaagcactgcctgcccagagatgg

SEQ ID NO: 247260 - DNA, 201 bp, Homo sapiens
aaattggctgggcatggtggcatgtgcccatagtcccagctacttgggaggctgagatgggagggtcaattgagcccaggagactgaggctgcagtgatcygagatcacaccactgcactccagcctgagcaacaaagagagactttgtctcaaaaaaaaaaaaaaaaaaaaaaaaaaaaagaggccaaggcaggcggatc

SEQ ID NO: 247261 - DNA, 201 bp, Homo sapiens
actatgcccagctaacttttttatttttgtagagatggggtctctctattttgcccaggctggtcgtgaactcctgggctcaagccatccacccacctcgccctcccaaagcgctgggattataggcatgagccactgcacctggccatggatgagttcttgttccccttcctgtcagcctccacatgaaactccccaaac

SEQ ID NO: 247262 - DNA, 201 bp, Homo sapiens
tagggtgacttggggcgagcttagctttggacctccttcatcctctggtccctcctctaaatcagggataaaaatagcaccttggcctcagaaggaaccaygcctgaccaatggtgggggacagccacctgcctccctgcttgtatttgtatgctagtgctaccataacaaagtttcacagactgggcagcttagacaaca

SEQ ID NO: 247263 - DNA, 201 bp, Homo sapiens
aattggctgggcatggtggcatgtgcccatagtcccagctacttgggaggctgagatgggagggtcaattgagcccaggagactgaggctgcagtgatctragatcacaccactgcactccagcctgagcaacaaagagagactttgtctcaaaaaaaaaaaaaaaaaaaaaaaaaaaaagaggccaaggcaggcggatca

SEQ ID NO: 247264 - DNA, 201 bp, Homo sapiens
agccactgcacctggccatggatgagttcttgttccccttcctgtcagcctccacatgaaactccccaaaccctgtcctcttgggccttttttaaaaaaawtaattaagaaattaaagacagggtctctctatgtttcccaggctgctcttgaactcctagtctcaagtgatccacccacctcgtcctcccatagtgctgg

SEQ ID NO: 247265 - DNA, 201 bp, Homo sapiens
gctacatggacactcctgcactggcaaatatttactgcctcctgcttcttggtttggggcaggcccccacctctgaccccagcctgggaaataaaccggaygaagagtcaggttaaccgttaagcccagctctgggcaagctggcagcaggcgggctgtatctgccgctggcttcagtctgcctccctgacaaggggtggg

SEQ ID NO: 247266 - DNA, 201 bp, Homo sapiens
agctacttgggaggctgagatgggagggtcaattgagcccaggagactgaggctgcagtgatctgagatcacaccactgcactccagcctgagcaacaaaragagactttgtctcaaaaaaaaaaaaaaaaaaaaaaaaaaaaagaggccaaggcaggcggatcatgaggtcaagagatagagaccagcctggccaacatg

SEQ ID NO: 247267 - DNA, 201 bp, Homo sapiens
ggtgggagcagctggacaggcccagtgaggatgcaggggtagctgcccagggctagactctggctgctctggtggcagttgcttagctcaggcttgggcaygtccacctggcgcatctgaaacattagccagcagggcgcagactcgtcagtgagagcattcctgagcccagcatccaagaagcgagggaggtcgggaagg

SEQ ID NO: 247268 - DNA, 201 bp, Homo sapiens
ctacttgggaggctgagatgggagggtcaattgagcccaggagactgaggctgcagtgatctgagatcacaccactgcactccagcctgagcaacaaagaragactttgtctcaaaaaaaaaaaaaaaaaaaaaaaaaaaaagaggccaaggcaggcggatcatgaggtcaagagatagagaccagcctggccaacatggt

SEQ ID NO: 247269 - DNA, 201 bp, Homo sapiens
gagcagctggacaggcccagtgaggatgcaggggtagctgcccagggctagactctggctgctctggtggcagttgcttagctcaggcttgggcacgtccrcctggcgcatctgaaacattagccagcagggcgcagactcgtcagtgagagcattcctgagcccagcatccaagaagcgagggaggtcgggaaggtgctg

SEQ ID NO: 247270 - DNA, 201 bp, Homo sapiens
cctgagcaacaaagagagactttgtctcaaaaaaaaaaaaaaaaaaaaaaaaaaaaagaggccaaggcaggcggatcatgaggtcaagagatagagaccarcctggccaacatggtgaaaccccgtctctactaaaaatacaaaaattagctgggcgtggtggcatgcacctgtagtcccagctactcaggaggctgaggc

SEQ ID NO: 247271 - DNA, 201 bp, Homo sapiens
ttgggcacgtccacctggcgcatctgaaacattagccagcagggcgcagactcgtcagtgagagcattcctgagcccagcatccaagaagcgagggaggtmgggaaggtgctgctatgaggcagggggaggtccccaaaagtccaggtgagagcatggcatgcgtggaaagtgctgcgcagttttggcatcagtgaagtca

SEQ ID NO: 247272 - DNA, 201 bp, Homo sapiens
atgccaaacgggtcactcagagggtgcagcttggcttggggagcatctgctaccacgggccaggctgacttccagggtagggccctcatgcggaccaggtragggcctcaccaggtgggatttcagcaccagcctcttggtgagagtgcaggtgtcaacctgagaagggaccttggagcagcagtgaggaggggcagtggc

SEQ ID NO: 247273 - DNA, 201 bp, Homo sapiens
ccacgcacttggccatgcttcagtctgtgtcctgacatcacaggtgggtgctggaataacaaatgctacaaatggcactgggggtgttggccaggctctgrgggcacaggagttctgcccatgcccacagctggcctgtgctgacctccctccatcacagctgagtagcaccagcacttccattgagctgaagtcttcctc

SEQ ID NO: 247274 - DNA, 201 bp, Homo sapiens
atttcagcaccagcctcttggtgagagtgcaggtgtcaacctgagaagggaccttggagcagcagtgaggaggggcagtggctgggctacccttaccagckctgggtcttcctctggcgcaggctggacccttgctgctgcttcgagtgaggggtgaggtggtagatgagctgtcggcagatcttgtccgaggacttccag

SEQ ID NO: 247275 - DNA, 201 bp, Homo sapiens
ccatgtgtggacctcgatctgagggcttagaggcttcggcctgccagcgctgtgggggcacccaccccatctcattgaatggggcagagcaggtgagggcrtgagatggacagatgggcctcatccccctgcttccgttgcctggggtcctcggtcagcctgtttgctcagacccctgaaattgggggtcaaggaaggacc

SEQ ID NO: 247276 - DNA, 201 bp, Homo sapiens
tccagcctgctgaatccagagttggaggaggtggagaagggaagggaggaagaagggctctggccctggcttgccccacattttctctgtgggccctgggrtgaccacttcgctccatgcctcagtttccccatttctaatctaccttctgcaggccgaacacctgcatggctgacttcctgctcacaggatggggcaggt

SEQ ID NO: 247277 - DNA, 201 bp, Homo sapiens
tccttggagtgacagctcctagagccccacctgtagtcctgcaagctggggagagggcctgttaggagaggcatcccctgccctggggttgtagaggtgawctaggctcctcagaccttgtggggcctcagatgcttacatctccagcccctcctggcgtgggcatctggctgcagcccagctctgtggccccatctccca

SEQ ID NO: 247278 - DNA, 201 bp, Homo sapiens
ggcctgcgcaaaggtctgggggccggacagcctgcacgtattctgggaagcgggaaggagacacaggccttgtgtttctgaggcccgactttagactgtgycctgttggggaggggccagggaatgtctgaggctaggcctgaccctgcttcttaccccgtgggtgcagcagagccatgaagaagaagttagtggtgctgg

SEQ ID NO: 247279 - DNA, 201 bp, Homo sapiens
ctctgggcaagctggcagcaggcgggctgtatctgccgctggcttcagtctgcctccctgacaaggggtgggggtggcggcaggcagagtgagatgggggycctggctcctctgaggaccagggtgaggtacggacccacccagctcaaggtgtatcccacttcccagggctccctcagcagaagcctaggtctctgctgc

SEQ ID NO: 247280 - DNA, 201 bp, Homo sapiens
aagggttaaaaaataacagtgcaacaaattaacattccaatccccctcccctgacacacacagtattggctaatggtcctttagctgaagattaagggacrtagggtagtggggacacatgacccatgggagatgctctcttttcattcctagttttacttctgtccatcccatcattcctcctcaccccacatcttgcac

SEQ ID NO: 247281 - DNA, 201 bp, Homo sapiens
ccagggctccctcagcagaagcctaggtctctgctgcaggcctgctgggcccctgcagccccaatcccggctctgggacgctcacatctcctgcgtggggracgtttgaggcactgatctgcagttcccacttctctaagcaaggagcacgtgtttagcctgtgaggactggtacctgttgtgcaggaagggctgagcact

SEQ ID NO: 247282 - DNA, 201 bp, Homo sapiens
ctaagcaaggagcacgtgtttagcctgtgaggactggtacctgttgtgcaggaagggctgagcactgtccgagggcatatatgagggacgacagccaagcwcccgtgtgtatgtgtgtgtgtgtgtgtgtgtgtgtgtgtgtgtgtctgctaattaccctatgaagattcaaggttccttcctttgggttaagcactgcct

SEQ ID NO: 247283 - DNA, 201 bp, Homo sapiens
gcactgcctctgggcccttctctacccacccagtagtattgttcaagcccaggagggaaaaaggccagctcagggttaatgttacctcagcaagtagctgrgtggcactgagcctcctggtagccactgtaaagaaggacacagaatggtttgggggcattcgctaggaggaaggaagcagatggatactctatggagaca

SEQ ID NO: 247284 - DNA, 201 bp, Homo sapiens
tttcctaagaacaaagataggtagatggccttagttggtattcgtattatagcagtggcatccaagcgcctctgcctttgtgtatgtgtgaaattgtcctraagaatgcatttctggtgtattgacaggcctgagacaccccaacacaccttcacagtcctggagctagctttctccatcttggccccaggtatctaagaa

SEQ ID NO: 247285 - DNA, 201 bp, Homo sapiens
ccctgttgtgtgtggggctcatgaatgcccacagcatgggcatcgggggtggcctcttcctcaccatctacaacagcaccacacgtgagtgcctcgggagmggagagggagaggggcagggggtgtgggttgggccgaggcacagctgggcggtccccaggctcacgtggcataaagggtttgggtgggcgggcctgccta

SEQ ID NO: 247286 - DNA, 201 bp, Homo sapiens
agtccccccactgaccacagacagtgacctgtcgggaacagcccaggcctacagtctggcaaagccagattcaaactgtgtctttcgtattttttgagacwaagtttcgctctttttgtccaggctggagtgcagtggcacaatctcggcttacggcaacctctgcctcccggattcaagcgattctcctgcttcagcctc

SEQ ID NO: 247287 - DNA, 201 bp, Homo sapiens
attctgagcgtggggtcccagtggccactgtggctggccatgtgtcctgagtggcaagggacactaggaagctcccggaagggacactaggaagacgagcrctgagtgacagggccacccacctgtgacaggcgctgcccctgttctgctccgttctcctgtgtggacgggtgtgaggggtggtctagctgagtccacccc

SEQ ID NO: 247288 - DNA, 201 bp, Homo sapiens
cgtggtggcatgcacctgtagtcccagctactcaggaggctgaggcaggagaatggcttgaacccgggaggcagaggttgcagtgagctgagatcgtgccmctgcactccagcctggcaatagagcaagactccatctcaaaaaaaaaaaaaaaaagaaagaaagaaactaaaaacaaaaaccccaaaactcgaatggact

SEQ ID NO: 247289 - DNA, 201 bp, Homo sapiens
tggaaacttgtgccaggcttcagggtgggagaggcagttctagagccacagctgccaagccaagccaaatggccccatcatctctcgcaagagcaggagartccctgggggcagaggccatagttgtacctttctgggcaaagggtcagtgtctgtagtgtccttatgggcagcggggctcaggggggaagcaggcccagg

SEQ ID NO: 247290 - DNA, 201 bp, Homo sapiens
cttctctcgcctggcgcaggaggcgcagcagctgccgggcgcgctccggccgccgctcgcggagcgtggactggatctcgcggagccaccgcacccggcgytcgtagggcgcgggcccgcagccggccgccgccccggcctcagagccagcctcgggcccggcccgccggcccagccgcgcccccatggccgccgcgcgat

SEQ ID NO: 247291 - DNA, 201 bp, Homo sapiens
ggcagggatgcactgcgggacggtggctctgcggtggatgcagccattgcagccctgttgtgtgtggggctcatgaatgcccacagcatgggcatcggggktggcctcttcctcaccatctacaacagcaccacacgtgagtgcctcgggagaggagagggagaggggcagggggtgtgggttgggccgaggcacagctgg

SEQ ID NO: 247292 - DNA, 201 bp, Homo sapiens
cctcccgtgctcaagtgatcctcccccctcagcctcccaagtagctgggaccacaggcatgtgccactatgcccagctaacttttttatttttgtagagayggggtctctctattttgcccaggctggtcgtgaactcctgggctcaagccatccacccacctcgccctcccaaagcgctgggattataggcatgagccac

SEQ ID NO: 247293 - DNA, 201 bp, Homo sapiens
tggatgcagccattgcagccctgttgtgtgtggggctcatgaatgcccacagcatgggcatcgggggtggcctcttcctcaccatctacaacagcaccacwcgtgagtgcctcgggagaggagagggagaggggcagggggtgtgggttgggccgaggcacagctgggcggtccccaggctcacgtggcataaagggtttg

SEQ ID NO: 247294 - DNA, 201 bp, Homo sapiens
ggcctgccagcgctgtgggggcacccaccccatctcattgaatggggcagagcaggtgagggcatgagatggacagatgggcctcatccccctgcttccgytgcctggggtcctcggtcagcctgtttgctcagacccctgaaattgggggtcaaggaaggaccctcctggattatgtgactcccttcagtccaggtgacc

SEQ ID NO: 247295 - DNA, 201 bp, Homo sapiens
gatgcagccattgcagccctgttgtgtgtggggctcatgaatgcccacagcatgggcatcgggggtggcctcttcctcaccatctacaacagcaccacacrtgagtgcctcgggagaggagagggagaggggcagggggtgtgggttgggccgaggcacagctgggcggtccccaggctcacgtggcataaagggtttggg

SEQ ID NO: 247296 - DNA, 201 bp, Homo sapiens
tgggggcacccaccccatctcattgaatggggcagagcaggtgagggcatgagatggacagatgggcctcatccccctgcttccgttgcctggggtcctckgtcagcctgtttgctcagacccctgaaattgggggtcaaggaaggaccctcctggattatgtgactcccttcagtccaggtgaccagggtccttggagtg

SEQ ID NO: 247297 - DNA, 201 bp, Homo sapiens
ccttcctgtcagcctccacatgaaactccccaaaccctgtcctcttgggccttttttaaaaaaattaattaagaaattaaagacagggtctctctatgttkcccaggctgctcttgaactcctagtctcaagtgatccacccacctcgtcctcccatagtgctgggattacaagattagagatgccagctgtcaggtggct

SEQ ID NO: 247298 - DNA, 201 bp, Homo sapiens
cagccctgttgtgtgtggggctcatgaatgcccacagcatgggcatcgggggtggcctcttcctcaccatctacaacagcaccacacgtgagtgcctcggragaggagagggagaggggcagggggtgtgggttgggccgaggcacagctgggcggtccccaggctcacgtggcataaagggtttgggtgggcgggcctgc

SEQ ID NO: 247299 - DNA, 201 bp, Homo sapiens
accccatctcattgaatggggcagagcaggtgagggcatgagatggacagatgggcctcatccccctgcttccgttgcctggggtcctcggtcagcctgtytgctcagacccctgaaattgggggtcaaggaaggaccctcctggattatgtgactcccttcagtccaggtgaccagggtccttggagtgacagctcctag

SEQ ID NO: 247300 - DNA, 201 bp, Homo sapiens
ccttttcaacaggcatcccattcactcatttgttcatttgtggggatggtgctctagaatgtgaggtggagtctctcttttctaatctggtcttaagtggrgaggaggcccccaaattccccaggtacctgaagggaagccactgtccatccaggaagccactgtctgtcctcaaaggtggtacagtagattgtgagataa

SEQ ID NO: 247301 - DNA, 201 bp, Homo sapiens
aaattgggggtcaaggaaggaccctcctggattatgtgactcccttcagtccaggtgaccagggtccttggagtgacagctcctagagccccacctgtagycctgcaagctggggagagggcctgttaggagaggcatcccctgccctggggttgtagaggtgaactaggctcctcagaccttgtggggcctcagatgctt

SEQ ID NO: 247302 - DNA, 201 bp, Homo sapiens
cagatgggcctcatccccctgcttccgttgcctggggtcctcggtcagcctgtttgctcagacccctgaaattgggggtcaaggaaggaccctcctggatyatgtgactcccttcagtccaggtgaccagggtccttggagtgacagctcctagagccccacctgtagtcctgcaagctggggagagggcctgttaggaga

SEQ ID NO: 247303 - DNA, 201 bp, Homo sapiens
ctaatctggtcttaagtggagaggaggcccccaaattccccaggtacctgaagggaagccactgtccatccaggaagccactgtctgtcctcaaaggtggyacagtagattgtgagataaaagttggaggatgggagggtctcaacaactcacgcctctaatcctagcactttaggaggccaagtcaggaggagcgcatga

SEQ ID NO: 247304 - DNA, 201 bp, Homo sapiens
atggtgaaactccatctctactaaaagtacaaaataagctgggtgtggtggcaggagcctgtaatcccagctacttgggaggctgaggcaggagaatcatmggttgaacccgaggggtgcaagttgcagtgagccaagatcacacctctgcactctagcatgggcaacagagcgagactgagactccgtctcaaaaaaaaa

SEQ ID NO: 247305 - DNA, 201 bp, Homo sapiens
gtcccagatcacagcctcagggatgggaccaggagccagcccacatcccacctgcagcagttcctgtgcctttaaagcctcccctccccccgccccgcccscaggccactaggggagggaaggaggagctgggtcacagcagggaatcttagcttggttttggtgtgctgctggatgaccagaccgggcgtcgggtgagcc

SEQ ID NO: 247306 - DNA, 201 bp, Homo sapiens
tctggtcttaagtggagaggaggcccccaaattccccaggtacctgaagggaagccactgtccatccaggaagccactgtctgtcctcaaaggtggtacartagattgtgagataaaagttggaggatgggagggtctcaacaactcacgcctctaatcctagcactttaggaggccaagtcaggaggagcgcatgagccc

SEQ ID NO: 247307 - DNA, 201 bp, Homo sapiens
ggatagcgactccaggctgggggctggcagggtaaggggtgggtgggtcctgggcttacccgcaggtctgcagacttcctggggccagctgacctcgtaawatcccttttgtctaagcttcagtttcctgcctgtgaatggggttggggctgtgctctggtttcacccttgtggctctggggttgtggtgacaaagccatc

SEQ ID NO: 247308 - DNA, 201 bp, Homo sapiens
tcttaagtggagaggaggcccccaaattccccaggtacctgaagggaagccactgtccatccaggaagccactgtctgtcctcaaaggtggtacagtagaktgtgagataaaagttggaggatgggagggtctcaacaactcacgcctctaatcctagcactttaggaggccaagtcaggaggagcgcatgagcccaggag

SEQ ID NO: 247309 - DNA, 201 bp, Homo sapiens
ttgaaggattaaccaggaaacttcagactggctgccgtgtctacctcttcctcatactcctctctctgctgcatcctgggaagctgctctgctcagcctaratgaggctcagttgtgtgtgtgcgcacgtgcttgcacgtgtgttggaagtgggtgatactgacaccagagtctgtgtctctgggtgagtgaggcttgcac

SEQ ID NO: 247310 - DNA, 201 bp, Homo sapiens
ggaagccactgtccatccaggaagccactgtctgtcctcaaaggtggtacagtagattgtgagataaaagttggaggatgggagggtctcaacaactcacrcctctaatcctagcactttaggaggccaagtcaggaggagcgcatgagcccaggagtttgagacctgcctgggcaacatagcaagactccatctctacaa

SEQ ID NO: 247311 - DNA, 201 bp, Homo sapiens
cagactggctgccgtgtctacctcttcctcatactcctctctctgctgcatcctgggaagctgctctgctcagcctaaatgaggctcagttgtgtgtgtgygcacgtgcttgcacgtgtgttggaagtgggtgatactgacaccagagtctgtgtctctgggtgagtgaggcttgcacatttctcgggacagggaactcac

SEQ ID NO: 247312 - DNA, 201 bp, Homo sapiens; identical to SEQ ID NO: 48524

SEQ ID NO: 247313 - DNA, 201 bp, Homo sapiens; identical to SEQ ID NO: 48525

SEQ ID NO: 247314 - DNA, 201 bp, Homo sapiens
tgaatgtatatttttacctacttaaacaaacaattttaagaatataacaaagaatcctactgttttgtggaaaaaaatctgcattttacaaagaatattcmgaaaatatcctagataaaacacagatttttgtgatataaataattaaaaaacattctctgtttgttaccagaccgatgcacactccctcctcctttggga

SEQ ID NO: 247315 - DNA, 201 bp, Homo sapiens
acaattttaagaatataacaaagaatcctactgttttgtggaaaaaaatctgcattttacaaagaatattcagaaaatatcctagataaaacacagatttytgtgatataaataattaaaaaacattctctgtttgttaccagaccgatgcacactccctcctcctttgggaaaccgctgcagccgatcccgtctctttgc

SEQ ID NO: 247316 - DNA, 201 bp, Homo sapiens
tgtataatctttcaaaaattagaaaaaaaaacccttatatttacctagagatggtaggttaaactgattaaaatattataatttttattgagaactttttycctccttactgtaccttctccagcaagctattgttttagtaattatgttcttttaagatgggcctcttcttggtcttgctcagtctctggttgctttctc

SEQ ID NO: 247317 - DNA, 201 bp, Homo sapiens
gttatgtgtactatgcaagacagctgtgagatgacatttgacagaatacttggttagtagtgaaaaacattccagaacttattacaagccccaaggcaacmaccagcttggtgtgatggaaaaaagcctagtggggtcaaaatctataaacctggagatgagtcaaccaagaccagttcacatagggcaggggtgtccaac

SEQ ID NO: 247318 - DNA, 201 bp, Homo sapiens
gtcaaccaagaccagttcacatagggcaggggtgtccaaccttttggctgccctggcccacactgaagaattgtcgtgggccacacataaaatacactgayagcttatgagcaaaaacaaacaaaaagacacttcatatgttttaagaaagtttacaaattcgtgttgggccacaaagccatcctgagccgcgggttggac

SEQ ID NO: 247319 - DNA, 201 bp, Homo sapiens
ccccctctctggccagcctcatgcccctgcgtgcagggcagggcgctccaggtgtctgctcagggtggggactccggcgtgggggtccttgaaactttgcrgagctccacttccaaaaacaatgtaaagttgtataaaatcagaggaggaggacccctcgagatgatgggaggcgggtgggtttgttcctgcacagacgcc

SEQ ID NO: 247320 - DNA, 201 bp, Homo sapiens; identical to SEQ ID NO: 48529

SEQ ID NO: 247321 - DNA, 201 bp, Homo sapiens
aagctgaagtactgtggtgtgatctcggctcactgcaacctccacctcccaggttcaagcgattctcctgcctcagcctcctgagtagctgggattacagscacgcaccaccacacccggctaatttttgtatttttagtagagacggggtttcgccatgttggccaggctggtcttgaacgcctgacctcaggtgattca

SEQ ID NO: 247322 - DNA, 201 bp, Homo sapiens
aaagagaaggtaaaggacatgccaacaacaggtgggaagcacgaatgcagatgacagcaagaggaaagaaggtgaagttagtaaccactctgaacagaaamaaaaaaagactcatcccaacagagtaaaagaggattactgattcctgggacatgcataggaaataggatctttattggctgtagaatcctaagggaatcc

SEQ ID NO: 247323 - DNA, 201 bp, Homo sapiens; identical to SEQ ID NO: 48530

SEQ ID NO: 247324 - DNA, 201 bp, Homo sapiens
actgtggtgtgatctcggctcactgcaacctccacctcccaggttcaagcgattctcctgcctcagcctcctgagtagctgggattacaggcacgcaccaycacacccggctaatttttgtatttttagtagagacggggtttcgccatgttggccaggctggtcttgaacgcctgacctcaggtgattcacccacctcgg

SEQ ID NO: 247325 - DNA, 201 bp, Homo sapiens
tgccagtggatgcctgaaaccacgggttaaaccaaaccctatatatatactgtttcttccatctgataaccaagactgctgtccgggcacagtggcttacrcctgtaatcccagcactttgggaggccgaagtgggcagtcacttgaggtcaggagttcgagaccagcctggccaacacggtgaaaacccatctctactaa

SEQ ID NO: 247326 - DNA, 201 bp, Homo sapiens; identical to SEQ ID NO: 48531

SEQ ID NO: 247327 - DNA, 201 bp, Homo sapiens; identical to SEQ ID NO: 48532

SEQ ID NO: 247328 - DNA, 201 bp, Homo sapiens; identical to SEQ ID NO: 48533

SEQ ID NO: 247329 - DNA, 201 bp, Homo sapiens; identical to SEQ ID NO: 48534

SEQ ID NO: 247330 - DNA, 201 bp, Homo sapiens; identical to SEQ ID NO: 48535

SEQ ID NO: 247331 - DNA, 201 bp, Homo sapiens; identical to SEQ ID NO: 48536

SEQ ID NO: 247332 - DNA, 201 bp, Homo sapiens; identical to SEQ ID NO: 48537

SEQ ID NO: 247333 - DNA, 201 bp, Homo sapiens; identical to SEQ ID NO: 48538

SEQ ID NO: 247334 - DNA, 201 bp, Homo sapiens
aagaatataacaaagaatcctactgttttgtggaaaaaaatctgcattttacaaagaatattcagaaaatatcctagataaaacacagatttttgtgatakaaataattaaaaaacattctctgtttgttaccagaccgatgcacactccctcctcctttgggaaaccgctgcagccgatcccgtctctttgccttttatt

SEQ ID NO: 247335 - DNA, 201 bp, Homo sapiens
taaataattaaaaaacattctctgtttgttaccagaccgatgcacactccctcctcctttgggaaaccgctgcagccgatcccgtctctttgccttttatwtttggcggcctcctttcgaaaactccgccttctgacacgggaccactggagcgcggggagcatgcatcaagggtccgtggcagtgagaagtccccacaca

SEQ ID NO: 247336 - DNA, 201 bp, Homo sapiens
agaaaaaaataattaataaaaaaaaatgtaagttacatccaaagggtcagactgcatctattgcccagactggattaatttcaagggagaaaggggagatyaaaaaaaaaaaattagctgttgttacagggcttgtgaagaaggggcattatgtctgtttcttattacaataaaggctcctcggtctttactgacccctaa

SEQ ID NO: 247337 - DNA, 201 bp, Homo sapiens
tgtctcaaaaaataaataaataaataaaaagtggccaaaggacactaaggagcatgacaacaaaatgcagcatggattccgggatggaatccaggaatggraaaagggcagcagtgggaaaactggtgaaatcagaataaagcctggagttcagtcaacagtgctctactgatgttgatttctttgttttgataaagtact

SEQ ID NO: 247338 - DNA, 201 bp, Homo sapiens
ggaggatcacttgggcccaggagtttgagaccaggctgggcgacatagtgaaactctgtctctacaaaaataataataataataattaataataaaatttkccagtctgatggtttgtgtctgtagttaccagctactcgggaggctgagataggagaattgtttgagtccaggagatagaggctgcagtgagctatgatt

SEQ ID NO: 247339 - DNA, 201 bp, Homo sapiens
tgagtccaggagatagaggctgcagtgagctatgattgcaccactgcaccccagcctgggagacagagtaagaccctttctctaaaaagaaaaaaataaaaaagaaagaaacatcatggagagtatgaacccttttttgtcaactcagtgcatccatgtgcatcatatgtgtacacataggtgtcatgtgtgtacatgttc

SEQ ID NO: 247340 - DNA, 201 bp, Homo sapiens
gagtccaggagatagaggctgcagtgagctatgattgcaccactgcaccccagcctgggagacagagtaagaccctttctctaaaaagaaaaaaataaaaaagaaagaaacatcatggagagtatgaacccttttttgtcaactcagtgcatccatgtgcatcatatgtgtacacataggtgtcatgtgtgtacatgttca

SEQ ID NO: 247341 - DNA, 201 bp, Homo sapiens; identical to SEQ ID NO: 48526

SEQ ID NO: 247342 - DNA, 201 bp, Homo sapiens; identical to SEQ ID NO: 48527

SEQ ID NO: 247343 - DNA, 201 bp, Homo sapiens
agtccaggagatagaggctgcagtgagctatgattgcaccactgcaccccagcctgggagacagagtaagaccctttctctaaaaagaaaaaaataaaaaagaaagaaacatcatggagagtatgaacccttttttgtcaactcagtgcatccatgtgcatcatatgtgtacacataggtgtcatgtgtgtacatgttcac

SEQ ID NO: 247344 - DNA, 201 bp, Homo sapiens; identical to SEQ ID NO: 48528

SEQ ID NO: 247345 - DNA, 201 bp, Homo sapiens
gtccaggagatagaggctgcagtgagctatgattgcaccactgcaccccagcctgggagacagagtaagaccctttctctaaaaagaaaaaaataaaaaagaaagaaacatcatggagagtatgaacccttttttgtcaactcagtgcatccatgtgcatcatatgtgtacacataggtgtcatgtgtgtacatgttcaca

SEQ ID NO: 247346 - DNA, 201 bp, Homo sapiens
cacttgagtggtttcatttacgtgaaggaggaggagggggaggaggaggagggtattggtaggcagtctgccccatgtaacctatcatattggtagctccyggaggctgtgcaaactgttgtgacatcagtggctgtggctgctgcccagaccggcctatcccactaaactgctggctagagctctgtgaacttctcccag

SEQ ID NO: 247347 - DNA, 201 bp, Homo sapiens
aatttaagaaatttagctgggcgtagtggtgctcatctgtggtcccagctactcaggaggctgaggtgggacaatcacctgatcttggtagatcaaggctrcagtgagccatgatcatgccactgtactccagtctgggcaacagagtgagatcccgtctcaagaaaaaaaaaattatttaggtgatagagaaggattaga

SEQ ID NO: 247348 - DNA, 201 bp, Homo sapiens
gctgcccagaccggcctatcccactaaactgctggctagagctctgtgaacttctcccagttgaggtggtgctactagctccataagtgccagcaccatattcttgagctgtatagctactggtgccataagcagctgccccataggtgccttgaccataggtgtattggcctgcttgtgctccaaaggcagaatttggac

SEQ ID NO: 247349 - DNA, 201 bp, Homo sapiens
accatgtccagctaatttttgtatttttaggagagacagggtttctccatgttggccaggctggtctcacgctcctgacctcaagtggtccacccacctcracctcccaaagtgctgggattatgggtgtgagccaccatgcccagccaagatgtagattttagttggacacattatctaataggaatcttatttcttgtg

SEQ ID NO: 247350 - DNA, 201 bp, Homo sapiens
cactgcagtctctgcctcccgggttcaagttatttatttatttattgtttagacagaatctagctctgtcgcccagggtggagtgcagtggcgcgatctcrgctcattgcaacctccacctcccaagttcaagagattctgcctcagcctcccgagtagctgggattacagatgtgtgccaccatgcctggctaacttttt

SEQ ID NO: 247351 - DNA, 201 bp, Homo sapiens
ggacccaagataaattgcaaacacatttaacctcttcatgttacattatggcagaacactgacccttaggtttggtaggctaggagcgtagtaaataggcygggaaatgacttcatagattcgattcccatgtctctctccccttttaggtggtttttctcctctgtgcctatgttacagtgtacatgatatatgggaaat

SEQ ID NO: 247352 - DNA, 201 bp, Homo sapiens
tctgagctgtttggatagtcatagttgatcacaaacttgacatcttccacatcttccacgtcaatgatgagtcagtgtgtaggttgatgtggcagggaaaragaaggtaaaggacatgccaacaacaggtgggaagcacgaatgcagatgacagcaagaggaaagaaggtgaagttagtaaccactctgaacagaaacaaa

SEQ ID NO: 247353 - DNA, 201 bp, Homo sapiens
gggcagctgggtggcagggatgggcctgtgtgtgcacagagagaagtcagaggtgatggaggcagggcctggtatgacctcaacagacccagccccaaagrccagagacttgggcttcactctcactcctccccttgactcgctgtgtgaccctgggcctgtgttttcccatttgtcaaatgggagtgagggctgcccctg

SEQ ID NO: 247354 - DNA, 201 bp, Homo sapiens
tagctgggattacaggcacgcaccaccacacccggctaatttttgtatttttagtagagacggggtttcgccatgttggccaggctggtcttgaacgcctracctcaggtgattcacccacctcggcctccgaaagtgctggtgctgggattgtaggcgtgggccactgcgcccacttctttttttttttttttgagacag

SEQ ID NO: 247355 - DNA, 201 bp, Homo sapiens
tggatcaggcggtaccagactgagaatttctatgaccaaattgcagtcgtgtctggagtagtacaaaccatcttctactgtgacttcttctacttgtatgkgaccaaaggtaggtcctgggatgacagcaatgctgacactggcctaaggagttactcatccatttaataagtattccagcagatacagatgtgaacagtc

SEQ ID NO: 247356 - DNA, 201 bp, Homo sapiens
accttttggctgccctggcccacactgaagaattgtcgtgggccacacataaaatacactgacagcttatgagcaaaaacaaacaaaaagacacttcataygttttaagaaagtttacaaattcgtgttgggccacaaagccatcctgagccgcgggttggacaagcttgacctagcgcctcgtaggccagggtaaggggc

SEQ ID NO: 247357 - DNA, 201 bp, Homo sapiens
tgccatgtggaatttgcagtgagctccagtgggagaatcacagcacaggccctccagccctgcacttagcagggctaagtgcagtctgcagtaatgaattrcatgtgttttgtaaaacaacttctgcagtgctgttggccctagcggaggaccataagatacctgttgaccacacattcacatctgcctatcacaaggtaa

SEQ ID NO: 247358 - DNA, 201 bp, Homo sapiens
agcatgttccacttctggcctatgtcgttggtctacagaaggctgccacctttgaatgcagcctggcgtagaaaagtcatctgggctgcagtgaaaacagycctgctgcttgggccataagactcggcagaatttaggggactggaggggtcggtggtaagaaaagatgccatgtggaatttgcagtgagctccagtggga

SEQ ID NO: 247359 - DNA, 201 bp, Homo sapiens
ctatctgccccacctctccctgagcactgaataaggatcttttgctgagggtcttgtgggtaggaagggctaacaggcagtgagactctgtctgccccacrgaaggacctgggagggaaagctgctgggacagctggtaggcctgtgagcaggggctctgctaggctagagaggacccttctctgagtgcccatcacagtc

SEQ ID NO: 247360 - DNA, 201 bp, Homo sapiens
ctagcatgttggaggccttcataagaaacatgcactataaagggtaggagataatctgtatgaagattcagggaactgtcacgtgagtacagttttgagtkcctaagtggtcaaggcaggatgggtcagatcgtccaaacataatgcctggcagaactcttcaggttttgggaacagcatgttccacttctggcctatgtc

SEQ ID NO: 247361 - DNA, 201 bp, Homo sapiens
atttggggttctagtgctgctgctcaaccatcaggggtcactggactgtttggggtgattgatccagactgctggagaaaagtcagggttttttcttttcyttttttttttttttttttggtgtttttgagacagagtcttgctctgttgcccaggctggagcacagtggcacgatctcggctcactgcagcctctgcctc

SEQ ID NO: 247362 - DNA, 201 bp, Homo sapiens
catgatcatgacactgcactccagtctaggggacagaaaagaccctgtctcaaaacattttttaaaaggggaagaaaagggactacacaccagaggagccrtaagacctaaccagcaggtaccagcaggagtcaagggactaggcatgggactggatcatgagggtgggtgatagagggggaccagaacatgaagattaga

SEQ ID NO: 247363 - DNA, 201 bp, Homo sapiens
ctaataaaaatcacgtaagaatacagaaacagataaatttgtttatgatatggtaacacacatgcgtgtgcacgtgtgcacgcgcacgcgcgcgcgcgcgacacacacacacacacacacacacctgtcttggtccggagtcatcatcttactgcatggaggacattttccctgagatcaaaaaaatgcaaaggtacccct

SEQ ID NO: 247364 - DNA, 201 bp, Homo sapiens
cctaataaaaatcacgtaagaatacagaaacagataaatttgtttatgatatggtaacacacatgcgtgtgcacgtgtgcacgcgcacgcgcgcgcgcgcsacacacacacacacacacacacacctgtcttggtccggagtcatcatcttactgcatggaggacattttccctgagatcaaaaaaatgcaaaggtacccc

SEQ ID NO: 247365 - DNA, 201 bp, Homo sapiens
tatccctaataaaaatcacgtaagaatacagaaacagataaatttgtttatgatatggtaacacacatgcgtgtgcacgtgtgcacgcgcacgcgcgcgcrcgcgacacacacacacacacacacacacctgtcttggtccggagtcatcatcttactgcatggaggacattttccctgagatcaaaaaaatgcaaaggta

SEQ ID NO: 247366 - DNA, 201 bp, Homo sapiens
atctatccctaataaaaatcacgtaagaatacagaaacagataaatttgtttatgatatggtaacacacatgcgtgtgcacgtgtgcacgcgcacgcgcgygcgcgcgacacacacacacacacacacacacctgtcttggtccggagtcatcatcttactgcatggaggacattttccctgagatcaaaaaaatgcaaag

SEQ ID NO: 247367 - DNA, 201 bp, Homo sapiens
ttaatatctatccctaataaaaatcacgtaagaatacagaaacagataaatttgtttatgatatggtaacacacatgcgtgtgcacgtgtgcacgcgcacgcgcgcgcgcgcgacacacacacacacacacacacacctgtcttggtccggagtcatcatcttactgcatggaggacattttccctgagatcaaaaaaatg

SEQ ID NO: 247368 - DNA, 201 bp, Homo sapiens
aaattttaatatctatccctaataaaaatcacgtaagaatacagaaacagataaatttgtttatgatatggtaacacacatgcgtgtgcacgtgtgcacgygcacgcgcgcgcgcgcgacacacacacacacacacacacacctgtcttggtccggagtcatcatcttactgcatggaggacattttccctgagatcaaaa

SEQ ID NO: 247369 - DNA, 201 bp, Homo sapiens
aatatctatccctaataaaaatcacgtaagaatacagaaacagataaatttgtttatgatatggtaacacacatgcgtgtgcacgtgtgcacgcgcacgcgcgcgcgcgcgacacacacacacacacacacacacctgtcttggtccggagtcatcatcttactgcatggaggacattttccctgagatcaaaaaaatgca

SEQ ID NO: 247370 - DNA, 201 bp, Homo sapiens
ctgtaatcccagctacttaggaggctgaggcaggagaattgcttgaatctgggaggcggaggttgtggtgagctgagatcaggccactgcactccagcctrggcaacaacaacaacaacaaaaagatcagcatcttggccagcagtggtgactcaatgcctgtaatcctagcacttggggaggccaagacaggaggattgc

SEQ ID NO: 247371 - DNA, 201 bp, Homo sapiens
gattcaaaatccaaaacctcaggttttgaaaatgatctcaagtccaaggatgcttacttacaaatgaggaactgtgggctcgactggaagaactggagagrcaagaaaacctgctgggtgaactcaaccatgatcctgggatggagttcacaaacagaggggaaggggctgggtgcagtgcctcatgcctgtaatcccaac

SEQ ID NO: 247372 - DNA, 201 bp, Homo sapiens
tctctaggtgccaagatgaaattgcacactggcaaaaggtaaagggggactgtaataccctccaagagcgactccaaaccttgcccaataggctgtcttaygagctcatggtgccaactgggcctcttgccttctataccaggaaggcttgtggataccagcaaaatcactcttctcctcggggacaactggttttgccag

SEQ ID NO: 247373 - DNA, 201 bp, Homo sapiens
caaattttaatatctatccctaataaaaatcacgtaagaatacagaaacagataaatttgtttatgatatggtaacacacatgcgtgtgcacgtgtgcacrcgcacgcgcgcgcgcgcgacacacacacacacacacacacacctgtcttggtccggagtcatcatcttactgcatggaggacattttccctgagatcaaa

SEQ ID NO: 247374 - DNA, 201 bp, Homo sapiens
gaatgatttatcttttgaagggactgaggagctgggagcactgattgcaggaaggatctcatgaggactcagctggaggaagttgggcactgcagtcgccmtgactgggggcagcagcctgagcagtgccgaccacagcgcacacgcagaaccaggagccatggagccccaccgtgtgccccaccgtgcagcctcctcggc

SEQ ID NO: 247375 - DNA, 201 bp, Homo sapiens
gatctcggctcactgcagcctctgcctcctcccaggttcaagagattcttgagtctcagcctcccaagtagctgggactacaggtgtgtgccaccatgccycgccagggttgtttttttttgtttttttttttttctttttttgtatttttagtagagacggggtttctttatgttgaccaggctggtctcaaactcctga

SEQ ID NO: 247376 - DNA, 201 bp, Homo sapiens
gatagggtcatgccacgttgcccaagctattctcaaactcttgggctcaagagattctcccgtcttggcctcccaaagtgtcgggattacaggtgtaagcycccactccctaccttttctggtatttagatacaaataggatataaaaatacctccctcctcctctctttctctcatttaaattactactaagagtcagat

SEQ ID NO: 247377 - DNA, 201 bp, Homo sapiens
tactaaaaatacaaaaaaattagctgggcgtggtgatgcatgcctgtagtcccagctcctcaggaggctgaggcatgagaatcacttgaaaccaggaggcrgagattgcagtgagccaagatcgtgtcactgcattccagcctgggtgacaaagcgagactcagtctcaaaaaaataaaagaagaagaaagctggaacctc

SEQ ID NO: 247378 - DNA, 201 bp, Homo sapiens
gtaataccagcactttgggagcctgaggcaggtggatcacctgaggtcaggagttcaagaccaacctgggcaacatggagaaacccctctctactaaatayacaaaaagtagccgggcgtggtggcgcatgcctgtaatcccagctacttaggaggctgaggcaggagaattgcttgaatctgggaggcggaggttgtggt

SEQ ID NO: 247379 - DNA, 201 bp, Homo sapiens
agagactgaaaaatcctctggagaagaaagaagaaagaggacatcctcagccagagctctcaccctcaccaggaacaggagagtcttttcctgggattgtsgtagaaaaataattcttacctccatctctgatgccacaccatgcctctgttctcaggtgtcacctaccttcccagagagaaaagatgctgtgtcagaaga

SEQ ID NO: 247380 - DNA, 201 bp, Homo sapiens
aatgcctggcagaactcttcaggttttgggaacagcatgttccacttctggcctatgtcgttggtctacagaaggctgccacctttgaatgcagcctggcrtagaaaagtcatctgggctgcagtgaaaacagtcctgctgcttgggccataagactcggcagaatttaggggactggaggggtcggtggtaagaaaagat

SEQ ID NO: 247381 - DNA, 201 bp, Homo sapiens
ggggaagaaaagggactacacaccagaggagccataagacctaaccagcaggtaccagcaggagtcaagggactaggcatgggactggatcatgagggtgsgtgatagagggggaccagaacatgaagattagataagggtgagttttattgatgtgggagcattctgccatctgagcaccccacaaaatatcccattgat

SEQ ID NO: 247382 - DNA, 201 bp, Homo sapiens
agcctaagagtttggggcaggaagatcacttgagcctagcagtttgagaccaacctgggcaacatagcggaacattcacttctacaaaaaaaaaaaaaaaattttttttaattagccaggcttggcggctcacacatgtagtcccagctactcaggagactgagacatgaggatcacttgaccccaggaggtcaaagctgc

SEQ ID NO: 247383 - DNA, 201 bp, Homo sapiens; identical to SEQ ID NO: 48575

SEQ ID NO: 247384 - DNA, 201 bp, Homo sapiens
aaggggatagaggagggtctggcaggggcaggagagggagccgagcacacgtgttctttcctggaaggaaccaggcttcacagtggggtggggagctgtgrcagggatctgggaggtgggtcacagctggccactccccacccccaggttcttgatgctgttctgcccgtcatgaacaaggcccatggtggcgagaagacc

SEQ ID NO: 247385 - DNA, 201 bp, Homo sapiens
caaaacgcctcagcctccgctgcgcccctctgccaggaaacttcctctgggtgggagagtggaatcctggggactgggagcctcccctggggatcgtgacrggccttgcagagagggaggaggtgggagacaggaagtggacagaattgtccaggtttaggggagggcagctctgcagtgagcttgtaagcacctccgtgt

SEQ ID NO: 247386 - DNA, 201 bp, Homo sapiens
caggaaaatcgcttgaaccagggaggcagaggttgcagtgagtcgaggtcatgccactgcagtacagcctgggtgacagggtgagactccgtgtcaaaaawaaataataataataataaggggcaaaggggaattaaggttgctaatcaactgatttagagagatgatgctggactatctgggtgggcccaatggcatcag

SEQ ID NO: 247387 - DNA, 201 bp, Homo sapiens
tctggagctgagtgagcaagaggatgcagcagtcgggggacccacccggtgagcgggcacccccagtcagcgtccaccaccgtcctccatcctcatcctcrtcctcattactggaggagggagcgcatgtccaggcaggcaggacagagcaccgagccagaccaggaatcagcgggagtgaggcatctgcccacattcacc

SEQ ID NO: 247388 - DNA, 201 bp, Homo sapiens
ttctgcgagtgttgttggacatgatgtgataccacaaaggtacttacgtggtggttttcccttttttttttttttttttttttgtttgagatggagtctcrctctgttgtacaagctggagtgcaatagcatgatctcggctcactgcaacctccacttcctgagttcgagcgattctcatgcctcagcctcccaagcagc

SEQ ID NO: 247389 - DNA, 201 bp, Homo sapiens
tcaccctggcctttcctgcactcattggcactgagacgagagaccctggatgtagctggggcactgcttaggcctcagccagtggtgccaccctctctctstgtcagaatcgagcaggcaaccctagtccaccctcaggacctgggcacaggtgtgcagtgctccctctggagctgagtgagcaagaggatgcagcagtcg

SEQ ID NO: 247390 - DNA, 201 bp, Homo sapiens
ggacaggaggttgtgcaggatggtgggagccgcagccagaaagaaaccactgaggcatggaggcttgtgttcccttcctccgcatttgcttttttttttttctttttttgagacagagtcttgttctgtcacccaggctggagtgcagtggcccgatctcggctcactgcaacctctgcctcccaggttcaagcagttcac

SEQ ID NO: 247391 - DNA, 201 bp, Homo sapiens
aacacccactccaggtgattgcttggactgtttgttttgcgttccatccagacatatcgcctcttcataatcaagtgcacacgtgtgcacacatatgtgtsatcacagatggcagtgctctctacacaccgttacatgcccagctttcttagcatgatttatttcagtgatctgatccacgttagtatgtaccaagcagat

SEQ ID NO: 247392 - DNA, 201 bp, Homo sapiens
gcacgggttctagaacaaccaagtccagccactggagctctggtctctctgaccccacagtcccagtctaggccaataaaatggcagcacctattagcatycctgcctaggatgctggcaggactgcctggtccctggtgtgtcctcattatgtcatacataattgctgactactctgtggcatagacatgagaaaatctg

SEQ ID NO: 247393 - DNA, 201 bp, Homo sapiens
actgctgacgccagatgcagtcttcaggaggggaggggcaggggtcagagcaagtagactaagggggaaaagtggcctaggccgaagcctgctggcgcacrgggaggaaaggtgggtgcgcagcagagccttgggagatgcagctggagctgtcatgggccagagagctcatctgcagacagtgtcgtcattccacaaggc

SEQ ID NO: 247394 - DNA, 201 bp, Homo sapiens
ggctgctgctgttgccaagttgaccgtcatctgtcggtcatttggtggctgtcgttgtcattcctatattgttactgttatcaattaccttggaagcgccrgtattagtgacctgctgggtgtaggtttggggccatgtggttggcaagagtctgatccaggcttttccccctgctctgccggctcactggctggggatgt

SEQ ID NO: 247395 - DNA, 201 bp, Homo sapiens
tcctggcaatgtgccaaagctggggttcccataaggcacaaggcacaatttacaatgaaattgaaggacagtcattatccatatgctgggcctggtggggmtattaggtacaggtagtagaaaccagccctggaaggaaggagacgcagccaggactacaccccagtcaaggtctgatgaggctatgccccaggcattgtc

SEQ ID NO: 247396 - DNA, 201 bp, Homo sapiens
cctgtgatctcttaagtggggaacaaggttgacagcccaaggccgaccttggacctcttcccctgcacagcatgatgagcagcagaagcccctttagtgarggagttcctttggcatcctttctgaacaatgccctttacaaccctcctttatttttctggttttattgtaaagtcccttgtcttagttcttgtccctcag

SEQ ID NO: 247397 - DNA, 201 bp, Homo sapiens
cacccaggcccctctgtaattcctgtttgagcctcccaccctctgggagttgcttctttgactcccacttcctgctcttgtgcctcacttcctggaccccrcagagcacaccctctgtggaccctccccaaccctcacctccctcttcacccaactcagagtcaggttctgtccttgtaatctctcccctcgaaccctgac

SEQ ID NO: 247398 - DNA, 201 bp, Homo sapiens
gagaaagtacagctgagtatggtcagtggagagggtgagaattcgataattagaaggtccctggtaaccgagagtagatctggagtctgttttagtaaacratgaataacgtttcaatgaagtgaggcaaaaatggaattgaagagtgaaaacataaatacagagaaagagcccacccctgcctgctcctggctcccggca

SEQ ID NO: 247399 - DNA, 201 bp, Homo sapiens
gaagggcttgacctgtgcaggcatttaagagaaggctgctgctgttgccaagttgaccgtcatctgtcggtcatttggtggctgtcgttgtcattcctatrttgttactgttatcaattaccttggaagcgccagtattagtgacctgctgggtgtaggtttggggccatgtggttggcaagagtctgatccaggcttttc

SEQ ID NO: 247400 - DNA, 201 bp, Homo sapiens
aggccttctgcttttaaaatagcttgtttggtcggggggtttttctccttaattttaaaacaaatgcatacagattatggaaaattagaaagtgcagatargtagaaagacagaaaaattatgcataatcatattacccaagacgactgctgttatcatttagggttatttcattttaacccttcttctgggcagttttgg

SEQ ID NO: 247401 - DNA, 201 bp, Homo sapiens
tccccatgccctcatctgctgtgtgtgcaacgactttgagtctctccctatgtgataagcacaagctcattgtagttctgagtttcttctgcgagtgttgktggacatgatgtgataccacaaaggtacttacgtggtggttttcccttttttttttttttttttttttgtttgagatggagtctcgctctgttgtacaag

SEQ ID NO: 247402 - DNA, 201 bp, Homo sapiens
gggatgtgcactcggactttgagagggatccctgaattgctgcacatagaggttgttcccatttaacttccccatgccctcatctgctgtgtgtgcaacgrctttgagtctctccctatgtgataagcacaagctcattgtagttctgagtttcttctgcgagtgttgttggacatgatgtgataccacaaaggtacttac

SEQ ID NO: 247403 - DNA, 201 bp, Homo sapiens
aaacaaatgcatacagattatggaaaattagaaagtgcagataagtagaaagacagaaaaattatgcataatcatattacccaagacgactgctgttatcmtttagggttatttcattttaacccttcttctgggcagttttggggtataagatcatgttgcatttatacttttttttttggtccaaaaaacatcaattat

SEQ ID NO: 247404 - DNA, 201 bp, Homo sapiens
gaccaggacaggagtgaagaggtagcagcaggtgctgttgcagggaggcaagggggcagacgccacaggggacatgaatgaaaccagggtagagagtggcrgtgtgggggagggggcagcacacctcctacctcccagctggcctaaggtggtaccagtggtccgagtgccaggagaaggcaaatgaggaagggagagcag

SEQ ID NO: 247405 - DNA, 201 bp, Homo sapiens
acggacagagaccacccactaccctgagaactttgacctgaagggctctctgcggcagcaggccaaccacccctactgggccgacacggtgagtggagccrggccggcctcagcatgtgtgtgtgtcactgaggccttgggaccaggtctggtacgtcagccaaacccaggcaggcagccgagcccagccacagactctgc

SEQ ID NO: 247406 - DNA, 201 bp, Homo sapiens
caccacgcccggccttcctgcacattttctttcctccttccccaggatttgcagtgtgtcctgcacagcggctctgtaagcaggagcttgctgctcgagcragagtactgggggctcctcacggccagagcccccagctggctcccaactgactagccctggcctgttgcagggggtgacgcgtggcggctctatgagtac

SEQ ID NO: 247407 - DNA, 201 bp, Homo sapiens
taggagtcagcattggtaatagtgctgtgctgcggaagagtggagtctaaactttttcattgccagtgccccgaaactggagtgtgaaggaccgagacaaratgaagactgtgctcatggttgctgaaaagccgtccttggcacagtcaattgccaaaatcctctctagaggtaggagagaccagccctgctttggtctgt

SEQ ID NO: 247408 - DNA, 201 bp, Homo sapiens
tgtggagatgctgcgtgtggccagctcttctctgggtatgtagggacatttctctcaagtcaccagaaggcttcctgaggcaggttcagcctggagcagcragtgcccagggttgcaggatggtgcccaaggcttcaaggggatctgagcctcaggaggatttcacttatccttaggttgtaaaggtggtaaagttggtca

SEQ ID NO: 247409 - DNA, 201 bp, Homo sapiens
gagtggcaggaccccaacaaagcacagctcatagatgcactccactaacctgcatggtgtttacacaaattccagaatagttaccagcacttaaaaattaygagatttcatactaaaattctgccttctagcttctcttgaaaaatcagaagaggtagcaatactagcaggtgcaggcagcagccctccccacaacaagga

SEQ ID NO: 247410 - DNA, 201 bp, Homo sapiens
agctgccccgccagccctgtgtgcccagcccagcacccctccatgggctggtatctggaaactggtgacccagtgtgtggccagccaggcaggtccacagygggcatcccctcctgaggcctccattcaggacctggccttccctgtgaaggcccagatgtgccctcgtgcactgtggggtgtgcacacaccgactaacgc

SEQ ID NO: 247411 - DNA, 201 bp, Homo sapiens
gtcccaggcacagggctccccaaagggtgaccaggaagtttccacgcaaaaatgggcagcccagggagtttatcaaagcaaaagtgtagtcaccagtgcayactcctcacaggagtggtggcctcacaagtccccaggcctggagctgtgagatgtctcacatgttgggggccagcctcactgccggagccttctccccag

SEQ ID NO: 247412 - DNA, 201 bp, Homo sapiens
acctgaggggacctcctgatgttagagtccctgagcagctatccctggtgaggggagaggccccagccagatgtcaccttcagggaaccagtgtgaacgtygcccctcagcctcatctcctcagtcttttctccttagtaacgaggagggggttgggctggaaagctggtggtctctggcagctgtcagcccctaggcatt

SEQ ID NO: 247413 - DNA, 201 bp, Homo sapiens
aagggctctctgcggcagcaggccaaccacccctactgggccgacacggtgagtggagccgggccggcctcagcatgtgtgtgtgtcactgaggccttggdaccaggtctggtacgtcagccaaacccaggcaggcagccgagcccagccacagactctgctctgtcttctctccctcaggtgaagcggttgttagcagaa

SEQ ID NO: 247414 - DNA, 201 bp, Homo sapiens
ctgcacgcgtggagcaagagccagagactcatgctccttgcctggcagtgtgtcacaggttctgcatgacagattacatactttgtattatgagaggagtrggggtgggtgccaagtcggtggccccagtgaccctcacgccacctgcctggcattgccgcaggccaagccaagccgcctgcactgctcccactgcgatga

SEQ ID NO: 247415 - DNA, 201 bp, Homo sapiens
aagtggtggagagggccagatgtcagcttgcgtatctgcccacctgaacaggtacagctgtgagccattacagccagggctatttggctcccagacaaggwccagcttcatctgtcctggttcttcctggcgttgggctcacctggagactttttcttgtgcgttcaccctttatcctttttcctgcaggttaacactgac

SEQ ID NO: 247416 - DNA, 201 bp, Homo sapiens
acccacccttccgagacatgaagaaaggtgagtgcagccactccctcctgtccacaggtagctgcagtctcttttcagtgccaacccctgccttgcaccasgctggactctgaggggacccctcaccctggcctttcctgcactcattggcactgagacgagagaccctggatgtagctggggcactgcttaggcctcagc

SEQ ID NO: 247417 - DNA, 201 bp, Homo sapiens; identical to SEQ ID NO: 48581

SEQ ID NO: 247418 - DNA, 201 bp, Homo sapiens
gacgaacccacccgactacctgacggaggccgagctcatcacgctcatggagaagcatggcatcggtgggtgcgcctgcccaggccccagagccggctccrtctccagtactcaggcttcgagtctactcacaaagctgccccgccagccctgtgtgcccagcccagcacccctccatgggctggtatctggaaactggtg

SEQ ID NO: 247419 - DNA, 201 bp, Homo sapiens
tccctgtgcacaccccatgccccatgcttgccccggccatggtgccctcacagtggccatgactgctggtctcacttggtgcccttcagactgttgttccctatgggtcgcccccgtgctcctgtacccccagctctcacccgtggctcaagagctggtcagtgagacagagctgaggcacctggcgttgcagtacagcac

SEQ ID NO: 247420 - DNA, 201 bp, Homo sapiens
ctccctgtgcacaccccatgccccatgcttgccccggccatggtgccctcacagtggccatgactgctggtctcacttggtgcccttcagactgttgttccctatgggtcgcccccgtgctcctgtacccccagctctcacccgtggctcaagagctggtcagtgagacagagctgaggcacctggcgttgcagtacagca

SEQ ID NO: 247421 - DNA, 201 bp, Homo sapiens
gatgcaagaaatggggcctggggaggatcgcttgagcccaggagttcaagactagtctggacaacatagtgagacccctgtctctacaaaaaaaaaaaaaacaaaattctttttaaatcagctggcatggtggtgcgcacctgtagtcttgggaggctgaggtgggaagatggactgaggctgggaggtcgagactgcagt

SEQ ID NO: 247422 - DNA, 201 bp, Homo sapiens
tttttttttttttttgtttgagatggagtctcgctctgttgtacaagctggagtgcaatagcatgatctcggctcactgcaacctccacttcctgagttcragcgattctcatgcctcagcctcccaagcagctgggattataggcacccaccaccacacccagctaatttttgtatttttattagagatggggttttgcc

SEQ ID NO: 247423 - DNA, 201 bp, Homo sapiens
ctggcaggtgcaggaaaggggatagaggagggtctggcaggggcaggagagggagccgagcacacgtgttctttcctggaaggaaccaggcttcacagtgrggtggggagctgtggcagggatctgggaggtgggtcacagctggccactccccacccccaggttcttgatgctgttctgcccgtcatgaacaaggcccat

SEQ ID NO: 247424 - DNA, 201 bp, Homo sapiens
ccccatcaggattacccagggctctgtttgccagaccctacagtcaggtctcagctgccatctcgcctggcctgtcagtgtcccccacatggtgataactrccctgaagtgctctttcctgtggctttcaggaccttacccctcctgactcaccctgctagctcctcatctcccgacccccagcctgggctccttccacat

SEQ ID NO: 247425 - DNA, 201 bp, Homo sapiens; identical to SEQ ID NO: 48579

SEQ ID NO: 247426 - DNA, 201 bp, Homo sapiens
tcactgcagcagttccttcccctccggcacgcagcttctcttttccttctcgccagagcagtcccatcagcggagaacatgctggcacagccaccatcctraaacaagaggggacagtgcaccagccttctcccatctcccaggttttgttgagctcaccccatgcagctttcatctgtcactcaccacatggccccatca

SEQ ID NO: 247427 - DNA, 201 bp, Homo sapiens
cccaggagttcaagactagtctggacaacatagtgagacccctgtctctacaaaaaaaaaaaaaacaaaattctttttaaatcagctggcatggtggtgcrcacctgtagtcttgggaggctgaggtgggaagatggactgaggctgggaggtcgagactgcagttagccgtgatcgtatcactgtacttcatcctgggtg

SEQ ID NO: 247428 - DNA, 201 bp, Homo sapiens
acccacggacagagaccacccactaccctgagaactttgacctgaagggctctctgcggcagcaggccaaccacccctactgggccgacacggtgagtggmgccgggccggcctcagcatgtgtgtgtgtcactgaggccttgggaccaggtctggtacgtcagccaaacccaggcaggcagccgagcccagccacagact

SEQ ID NO: 247429 - DNA, 201 bp, Homo sapiens
tggaaacaaacaactcataatgagcctgggactgtgcctccttcccggacggatgagcctgcctgggcagtctgggtttgcatccctgctctgtcacttascagctattgacggcagaagttgcttaatttctgggcgctgtgacctagggattgctttccccatccagccgcccacccaaagctgcagaagagaagcaag

SEQ ID NO: 247430 - DNA, 201 bp, Homo sapiens
gggggagcctgagtgcataggccagggcaggcagctggccatccccacgtacctggccctctgagaacctcctgtctctcgcaggcatggggccgcagcaygccatgcagacggctgagcggctctacacgcaaggctacatcagctacccacggacagagaccacccactaccctgagaactttgacctgaagggctctc

SEQ ID NO: 247431 - DNA, 201 bp, Homo sapiens
gcctggatgctgaccggctgcctctcttgcccctcaccctcccaaggccatcactgcagcagttccttcccctccggcacgcagcttctcttttccttctygccagagcagtcccatcagcggagaacatgctggcacagccaccatcctgaaacaagaggggacagtgcaccagccttctcccatctcccaggttttgtt

SEQ ID NO: 247432 - DNA, 201 bp, Homo sapiens
tcaccctgctagctcctcatctcccgacccccagcctgggctccttccacattgctgccacctcctccaggccacccaggctgtccaatgggcaggtcccrtttaacacacctgaagtcccacatcagactgccagtcccttcctgtcatgcctaagccaaagccatgggttgttccttttgcttttttgtaaagatgagg

SEQ ID NO: 247433 - DNA, 201 bp, Homo sapiens
caggcgctgtggttaatacttttcttcttcgaaccctcccacagctctttagggtgagatctgctgtaccagtctcacaggtagggaaactgaggctcagrgaagctgtgcagccaccggggcccagatcggtgcggtacacacccaggcagcttccactcgccgccccctaggccctggctgggttttgagggcacccag

SEQ ID NO: 247434 - DNA, 201 bp, Homo sapiens
gcctttctgacaccagccccaaactgacaccagcagtcagtcacatcactcctggggccaaaggagggagtaaactgtaccggtttaaaaacacctctccmctccctttattctgaaactccacagatacttttaactgcataggctctattaaaggtggtcagttgttcctccgcttgctgaggcctcaacggtatgagt

SEQ ID NO: 247435 - DNA, 201 bp, Homo sapiens
tatcctgagtgtcttttcttctctttaggagtcagcattggtaatagtgctgtgctgcggaagagtggagtctaaactttttcattgccagtgccccgaamctggagtgtgaaggaccgagacaagatgaagactgtgctcatggttgctgaaaagccgtccttggcacagtcaattgccaaaatcctctctagaggtagg

SEQ ID NO: 247436 - DNA, 201 bp, Homo sapiens
ttgcttggctcctgtggttggccggggtgtggtgggtccgctcagcagccgagcagaaaggaggctggatgggagggggttaccaaaggcctgaacccacwtcctggctctgcctctgatcatcaggatgaccctgggcaaattgttctccaagctttcccctcctcatttgtgggatgaggccaacatcctcctggggtt

SEQ ID NO: 247437 - DNA, 201 bp, Homo sapiens
ctcctggcaatgtgccaaagctggggttcccataaggcacaaggcacaatttacaatgaaattgaaggacagtcattatccatatgctgggcctggtgggkctattaggtacaggtagtagaaaccagccctggaaggaaggagacgcagccaggactacaccccagtcaaggtctgatgaggctatgccccaggcattgt

SEQ ID NO: 247438 - DNA, 201 bp, Homo sapiens
tttttcctaatgtgattccaccctggctggggtagatttggttcgggtcggcaggtggtaatgaagcatctcagtatgtcacagtggggtgcatttgcttscactcctggcaatgtgccaaagctggggttcccataaggcacaaggcacaatttacaatgaaattgaaggacagtcattatccatatgctgggcctggtg

SEQ ID NO: 247439 - DNA, 201 bp, Homo sapiens
ccacctgaacaggtacagctgtgagccattacagccagggctatttggctcccagacaaggaccagcttcatctgtcctggttcttcctggcgttgggctyacctggagactttttcttgtgcgttcaccctttatcctttttcctgcaggttaacactgacaaagacagatctctccttttggactgggaccgagtaaga

SEQ ID NO: 247440 - DNA, 201 bp, Homo sapiens
actacatcgtgctgtggctggactgcgacaaggagggggagaacatctgctttgaggtgagtgtgaggctcactttgttcctcacttttggcctttctgayaccagccccaaactgacaccagcagtcagtcacatcactcctggggccaaaggagggagtaaactgtaccggtttaaaaacacctctcccctccctttat

SEQ ID NO: 247441 - DNA, 201 bp, Homo sapiens
cctggatgggagcactgggggcgggtggcacagaccgggtctgcagcaggtacgtgtgaacctgtgctgtgtggcaggtggagggcagaggctgcgactayatcgtgctgtggctggactgcgacaaggagggggagaacatctgctttgaggtgagtgtgaggctcactttgttcctcacttttggcctttctgacacca

SEQ ID NO: 247442 - DNA, 201 bp, Homo sapiens
gctcatggagaagcatggcatcggtgggtgcgcctgcccaggccccagagccggctccgtctccagtactcaggcttcgagtctactcacaaagctgcccygccagccctgtgtgcccagcccagcacccctccatgggctggtatctggaaactggtgacccagtgtgtggccagccaggcaggtccacagcgggcatcc

SEQ ID NO: 247443 - DNA, 201 bp, Homo sapiens
ctgactagccctggcctgttgcagggggtgacgcgtggcggctctatgagtacatcaccagacacttcatcgccacggtcagccatgactgcaagtacctkcagagcaccatctccttcagaattgggcccgagctcttcacctgctccgggaagaccgtcctctcaccaggtcacaccacgggcccagccttcctcctct

SEQ ID NO: 247444 - DNA, 201 bp, Homo sapiens
tggtggcctcacaagtccccaggcctggagctgtgagatgtctcacatgttgggggccagcctcactgccggagccttctccccaggtggcactcgcgccrctgggcactgcctgttccctggggcactacccctggctgacaggctctggagacctgtgggatgtcacagccactgtgtccaggctctgctccagcagtg

SEQ ID NO: 247445 - DNA, 201 bp, Homo sapiens
aggctacatcagctacccacggacagagaccacccactaccctgagaactttgacctgaagggctctctgcggcagcaggccaaccacccctactgggccracacggtgagtggagccgggccggcctcagcatgtgtgtgtgtcactgaggccttgggaccaggtctggtacgtcagccaaacccaggcaggcagccgag

SEQ ID NO: 247446 - DNA, 201 bp, Homo sapiens
aacacccgctgaaggggtgctgccccaggacccccaggacctgcccagagcaggagctcagtgtgtttgaaggctgaacagatgtgtgagggaaccaaaargggaggcgaagttgcctcagccctgttccctggaggttccccaggggccaaggggagagggaggagcacaaaactggcccaagggcggcctggagctcat

SEQ ID NO: 247447 - DNA, 201 bp, Homo sapiens
atacctaccttgaaaggttattggcttgggctcctataaaaaatgtgaataagctctgaagcattatagaagcactggaatgacatgaggaatgacatcaytgcagttgttaatcagcattgcagctgttaatcagcattgcagttgttaatcagcattgctgctactaagtcaaacatgccatggaacacgtttttaacc

SEQ ID NO: 247448 - DNA, 201 bp, Homo sapiens
gtcttgttctcttttagaacatggcattgtgccagttaccagtgattgccagtacctcttccctgccaaggttgtctctcgcctggtgaaatgggtgacarttgcccatgaggattacatggtaggtgaaggagtgacaagttacccttactgtcctgaggattgcaggaccatgtcacctttcagctcctgccacctcac

SEQ ID NO: 247449 - DNA, 201 bp, Homo sapiens
cgggccgtgctccccatcagcactgctgagtttgttttgtcccaaggtagggaacttgtcattctggacagtacttactgtgttggcatatttgcttattkaaatgccagcaggaatttaccctggagcagttatctggctcttctccctgacacacaacacttcagttgtttcctccatcaaggtcagctatgaaaacac

SEQ ID NO: 247450 - DNA, 201 bp, Homo sapiens
atgcatgagccaccacacccagctaattttcgtatttttagtaaagacagggtttcaccatgttggccaggctggtctcaaactcctgacttcagatgatscacccatttcgacctcccaaagtgctagaattacaggcatgagccactgtgcccagccctgatgctgatttttgagaggcatctttatctgttccacaaa

SEQ ID NO: 247451 - DNA, 201 bp, Homo sapiens
ctcccaggttcaagcgattctcctgcctcagcttctcgagtagctgggattacaggcacgtgccaccatgcccagctaattttgtagttttagtagagacrgggtttctccacattggtcaggctagtctcgaactcctgacctcaggtgatctgcccaccttggcctcccaaagtgctggaattacaggcgtgagccacc

SEQ ID NO: 247452 - DNA, 201 bp, Homo sapiens
ttatcatgtatcacttttataaataatgatttacggtcactaagtagccactttttcctgtgtggactggctaaaaaaggaagaacaaaaatctgtctctygtgtgcaggcttcccttccggtgcaggagtacctgtttatgccattcgaccaggctcacaagcagtatgagacagccagacacctgccgcctcccctcta

SEQ ID NO: 247453 - DNA, 201 bp, Homo sapiens
cagtcactgctgcaggggcaccctccctagttctgactgtaagggtttttctttggcaggctatcatttgcattaaagagaaagcaccataagtgctggcrctggatctggccacaagcacatagcactgggtgaaggtcaggttgacatgcttgcattcctggcacgtgttgacctgggtacttcctgagtaccaggtat

SEQ ID NO: 247454 - DNA, 201 bp, Homo sapiens
accaaagacattgtggatgcgggactggctggggacaccaatctctactacatggcgctcatcgaaaggggcacaggtaattgctctgctgattacagggrttctagacaaagggcgctgccaagaatcaaacactctccggggctgcccaaagcagaagatcctggagtcctgcaaggacttaacagataataatgatcg

SEQ ID NO: 247455 - DNA, 201 bp, Homo sapiens
ggtggttgggattcgtcccccagggacaccaggtcaccatccaagggcagtcctggtctttggagaactagctggactagttctgtgtagcaggaagcttsacttgaatgtcttagcaccctggagtagacaggaaagagagctcacttcccggagtcacaaggtgcggcccgtggatttcagccctgccactcactagct

SEQ ID NO: 247456 - DNA, 201 bp, Homo sapiens
tttgggaggccgaggcgggcagatcacctgaggtcaggagttcgacctggccaacgtggtgaaaccctgtctctactaaaaatacaaaaattagttgggcrtggtggcagatgcctgtaatcccagctacttgggagactgagacaggagaatcacttgaacccggggggcggaggttgcagtgagctgagatcgtaccat

SEQ ID NO: 247457 - DNA, 201 bp, Homo sapiens; identical to SEQ ID NO: 48607

SEQ ID NO: 247458 - DNA, 201 bp, Homo sapiens; identical to SEQ ID NO: 48608

SEQ ID NO: 247459 - DNA, 201 bp, Homo sapiens
ctacacagtgccttatctctccctcaccttgttctctgttccctgtcagtctaagcagtgccttacctctccctcaccttgttctctgttccctgtcagtstaagcagtgccttacctctccctcaccttgttctctgttccctgtcagtctaagcagtgccttacctctccctcaccttgttctctgttccctgtcagtc

SEQ ID NO: 247460 - DNA, 201 bp, Homo sapiens
gtgaaatagcttccattcacaagagcactgccctgacctagtcccactgtcagctgcagaaagaccactgaggcttagggaggtacagctctggtgcctgktagagcagggctctttccacccctgccagttctccatgatgctggtgtctcttgggttttagactgcccttagagtccacatccccttcaggccatagca

SEQ ID NO: 247461 - DNA, 201 bp, Homo sapiens
tggctggggacaccaatctctactacatggcgctcatcgaaaggggcacaggtaattgctctgctgattacaggggttctagacaaagggcgctgccaagratcaaacactctccggggctgcccaaagcagaagatcctggagtcctgcaaggacttaacagataataatgatcgtgagagcctgttcagcaaggactca

SEQ ID NO: 247462 - DNA, 201 bp, Homo sapiens
ggcagggaaagctatgggtcagaatcaggaagacctcattgtcttgatgagggggcctgaggacaagccagtctagcttgatctgatggcctagcccctgrcccagcccctgcagaggcatcagcgctcgggcccatccagggacggaagcctggccagtgtggtcccccacatgcaggaaggtagtgctgagatgctggc

SEQ ID NO: 247463 - DNA, 201 bp, Homo sapiens
  misc_feature (1)...(201): n = A,T,C or G
aatatactctgcagcattcagattaataggagacatctgagctagcctcaggggtgcagtggggaggctgccatggctggcaagctgagtcttagaactgngcatttcccctctctcctctcttcccagccaaactgcaggccgctgtggtgttgaaccctggctactcctccatcccacctgttttccagctctgtttga

SEQ ID NO: 247464 - DNA, 201 bp, Homo sapiens
ggcagaacccactgcagctgaggacttgggcactgccttaattcccaaaacagaaggttgtgccaggatttgcagaatttgctggagcttgtgtggtgtamtagaggaaagagcccagacctacttgcctaccttggggtccacaggtttccccacttagagagtaaggagaaatacctaccttgaaaggttattggcttg

SEQ ID NO: 247465 - DNA, 201 bp, Homo sapiens
ctacattttttgtaccttgaagttcagtccctcacatagtcagctgaatcatgttgagctgtacgctgggagtagggttcaagaatctacattttaataamcttgtaagaaccattgatccatctcctatggagagcaccacagttgttagacaattccttcttcttggctgggcgcggtggctcatgcctgtatcccagc

SEQ ID NO: 247466 - DNA, 201 bp, Homo sapiens
aataactaaaaaggaatggcatacctatcccacttgagaagataaatgtcttcctgttgaaaaaggcaaaggctttcaccagagaataaatgagtatgttmaaaaacacaaatattttgtttaatgattatgaacacagctttgatatcagccagttctggttaaactcagcactgctaccttccaactatttgatggtag

SEQ ID NO: 247467 - DNA, 201 bp, Homo sapiens
tcagatacagttgaggcctccctatcccactttattccctttctcctaataagtgaccactatttggattttatgcatttgctttccatcctttccccgcyacacccttttttttttttttttcagtagagataaggtcttgctttgtcgcccaggctggagtgcagtggcacgatcatagctcactgcaatcttgaactc

SEQ ID NO: 247468 - DNA, 201 bp, Homo sapiens
caaagggcgctgccaagaatcaaacactctccggggctgcccaaagcagaagatcctggagtcctgcaaggacttaacagataataatgatcgtgagagcytgttcagcaaggactcattctgcaacacagtcacacacacgctgtgtatcactgaaccctcactgcagtcctaggggtggtgctttcatttctattttac

SEQ ID NO: 247469 - DNA, 201 bp, Homo sapiens
cactctctacctacactttacacactcaattttctaactcaattgtactttggcactctgtccctgatttgcattaaagagtactaagaaactaagcttcycttcccacaattcttttctctcttctgatcactaggagtctgcacacagcaacatgagattcataaattatatgccattctctcccaaagtcattttcaa

SEQ ID NO: 247470 - DNA, 201 bp, Homo sapiens
gtcttgggttgcttcctcttgagagagctgaagctcatgcgggaagcgatggccccggccatggcgcggggctcaggcccgggaccctcgcgccccacggsctgcactctgagccctttagcccccctggagttgctgcacaggcctcagggccaccatggtggccggctggccggcccgggaacggtctgggctgcgcgg

SEQ ID NO: 247471 - DNA, 201 bp, Homo sapiens
aaagaaaaacccattttttgcggagaaattcaagttggttgcagaaatttgcataagtagcaaggagcctaatgttaatccccgtgggggattaacaccayggggaaagtgtctccaggccatgtcagagacctcacggcagccccttccctcaaaggcccagaggcccaggaggaaaaagtggttttctgggccaggtcc

SEQ ID NO: 247472 - DNA, 201 bp, Homo sapiens
ttctgacttaggtcttattttgagactgcttccctgcacacctctgttttcctggctgtgggcatatgaggcagggaaagctatgggtcagaatcaggaaracctcattgtcttgatgagggggcctgaggacaagccagtctagcttgatctgatggcctagcccctggcccagcccctgcagaggcatcagcgctcggg

SEQ ID NO: 247473 - DNA, 201 bp, Homo sapiens
cccattttttgcggagaaattcaagttggttgcagaaatttgcataagtagcaaggagcctaatgttaatccccgtgggggattaacaccacggggaaagygtctccaggccatgtcagagacctcacggcagccccttccctcaaaggcccagaggcccaggaggaaaaagtggttttctgggccaggtccagggtccct

SEQ ID NO: 247474 - DNA, 201 bp, Homo sapiens
tttcttctttttgtctgtttctctgtccttgaatctgtcaacttcatttgtgacttagctatttaaaaaaaattttttttgagacagggtctcactgtgtygctcacgtcggagtacagtggcacgatttctgctcactgcagactgcatttcctgggctcaagcgatcctcccacctcagtctcccaagtagctgggacc

SEQ ID NO: 247475 - DNA, 201 bp, Homo sapiens
aagtagcaaggagcctaatgttaatccccgtgggggattaacaccacggggaaagtgtctccaggccatgtcagagacctcacggcagccccttccctcamaggcccagaggcccaggaggaaaaagtggttttctgggccaggtccagggtccctgtgctatatgcagcctagggacttggtgccctgtgtcccagccag

SEQ ID NO: 247476 - DNA, 201 bp, Homo sapiens
atttttaccaagttcagttgtcttagccatatgttgcagatataaattttgccaagaaggtgattccttcatcaggttttgtcaattaataaccttcatcrtgggcagttttagttctgttttatttatttactaatagattgaatcaatctattagtaatagtccctaaacacttgctaaaagactgaaaagttttattt

SEQ ID NO: 247477 - DNA, 201 bp, Homo sapiens
ggtggggtgggtagagggcaggactgtatcatggctgttgttgaatacttccatcaagaggcacaggctctctttatttttgtgatgttactgtcttgacractgttgcctagatccattaattcattagagaatttttaaaaatcctccctgacagagttaatgtttttattttattatttatttatttatttatttatt

SEQ ID NO: 247478 - DNA, 201 bp, Homo sapiens
agaattgaggtttgggaacctccgcctggatttcagaagatgtacggaaacacctggatgcccaggcaaaagtttgctgctggcgcgctcatggagaaccyctgctagggcagtgtggaagggaaatgtggggtcagagcccccacacagtccctactgaggcactgcctagtagagctgtgagaagagggccaccgtccc

SEQ ID NO: 247479 - DNA, 201 bp, Homo sapiens
ggagtacagtggcacgatttctgctcactgcagactgcatttcctgggctcaagcgatcctcccacctcagtctcccaagtagctgggaccacagctgcaygccaccatgcccagctaattttgtattttttgtagatatgaggttttgccacgttacccaggttggtctcaaactcctgagcttaagtgatctacctgcc

SEQ ID NO: 247480 - DNA, 201 bp, Homo sapiens
tgtggttgttaattgtaatatcccctcccagggtgcttgtgaagagtcaggtcaagtgcttagcatagaggaagcacttggtaaaggacagctgatttatwatcattgactcttgtaactttcacaatagctctatgaggtgagttaactgaggctctggacagttaaggggtagcctcaaggtcacaggtagagagtgga

SEQ ID NO: 247481 - DNA, 201 bp, Homo sapiens
actcagatgccgaggaggagcagactacggtgagaaccatttcctcttgtgggggcatcaagcagctgcatgcactggggcatgcttgttcgcaggtgccrtcctccctagaagcagaagaggtgtgaaagaaggtgctgctgggaggggagtctgacaacccagctagctgaagcagcaggtgccaggcagtagggctga

SEQ ID NO: 247482 - DNA, 201 bp, Homo sapiens
ccgactgattttttgtatttttagtagagacggggtttcactgtgttagccaggatggtctcgatctcctgacttcatgatctgcccaccttggcctcccrgagtgctgggattacaggtgtgagccaccgcgcctggccgattttgtttttatagtaaatgattgtaaaagtctctgaatttttctataattctgttttt

SEQ ID NO: 247483 - DNA, 201 bp, Homo sapiens
aaggtgctgctgggaggggagtctgacaacccagctagctgaagcagcaggtgccaggcagtagggctgaggcctggctggttgggagagggaaggggagrttgctatgactgatgctcatcagcttggcactttcctttgtccagaagcgccggagacccacactgggggttcagttggacgacaaacgcaaggagatgc

SEQ ID NO: 247484 - DNA, 201 bp, Homo sapiens
tttgccaggtctattaccctaaattagagtatagtataaggatggccttgtctgcatccctacccagttggtgtgataagcttgtgtctgggaggaagaaktgctggcctcaggaatatatacacacattgacctgggtgttttcatccagaggccttctctgggtaacgtactttctcagactgtgtaaatttagtttac

SEQ ID NO: 247485 - DNA, 201 bp, Homo sapiens
ggagcaaggacttttgcccttccacccttagtcagcaaggagctgggcagaggtgggagaaatgcagccccagagctggcctactcacactgcttagcagctttcctcagcagctttcctaacagacttcttcttgccccccagataagacgttatctgtggcaatcgaaggcagtgtggatgaagccaaggctctgttca

SEQ ID NO: 247486 - DNA, 201 bp, Homo sapiens
agctgagtcttagaactgcgcatttcccctctctcctctcttcccagccaaactgcaggccgctgtggtgttgaaccctggctactcctccatcccacctrttttccagctctgtttgaactggaaaggggagaaaaccaacagcaacgatgacaacattcgggtaagacccagctggggatgacaggaggagcaggcaga

SEQ ID NO: 247487 - DNA, 201 bp, Homo sapiens
cagaagctttcttccctctgcattgcccagcatggctgctctgaccagctggcctaaggctggattaacctgatgggtatttcacaatgggtggctttgartcattcgtgagcctggctggacagctcttgggtgcagaacccaggcagcctgtctgggctcccaggtgctcaccccatcaaggcacgcttggcagttaga

SEQ ID NO: 247488 - DNA, 201 bp, Homo sapiens
aaataagtgatgcgcccaaggtcacacggtggagctctgcctagaagcctggtgttcagacatcggtttagggatcttgatgattttacacaagtaaaacratgcaggaaccagacaagagaaagtgcactgacttcctgagctcaactctggccagcttgatccaacttcccttctgcctgactgacttcggagactgag

SEQ ID NO: 247489 - DNA, 201 bp, Homo sapiens
gtctagcctcttaagttaactcggggagatggctagcttctagggacattcattcccttgaaattttgttgttgattttttttttaaatcattactttgcyctttgataaaaggctagtattcctttaaataagactggttttactacaagtttttttttaatataaagaaatcataatcaaagtcataaatcatggagaa

SEQ ID NO: 247490 - DNA, 201 bp, Homo sapiens
tcagcacgcacgcactcatcactcacccctgcctgtcctagacctgagtagtggcacccatgccatccataggcactacttaaaacccatgggagaggtcrggcacggtggctcatgcctgtaatcccagcactttgggaggccgagccaggcagatcatgaggtcaggagttcaagaccagcctgaccaacatggtaaga

SEQ ID NO: 247491 - DNA, 201 bp, Homo sapiens
gtaagtctgtttcttttttttttttgagacggagtcttgccctgtcacccaggctggagtgcagtggcgcaatctcagctcactgcaacctccacctcccrggttcaagcaattctcctgcctcagccttctgagtagctgggattgcaggcgcccacctccacatccagctaatttttgtatttttagtagagacggggt

SEQ ID NO: 247492 - DNA, 201 bp, Homo sapiens
tttatactgtcagtctccttaattttggctactctggagggtatctcattatagttttaatttttatttccctgaggactagtgatgttgaacacagcacrttttgccttttggataacctcttgtgatgggtctaggcaagtcttttgcctgttttctgttgggttgcctggagatgagttttttcccaggtcttcccca

SEQ ID NO: 247493 - DNA, 201 bp, Homo sapiens
gtctggcttcttttgttcagcagtatgtttctaagattcatctgtgctattgtgagtacaagagtttgttttcattgatgtttagtaattggttgtttccrgtttagggccatttcaataatgctgctatgagcattcttatacatgtgttttggcatacatgtgtacatctgtctgttgaatatatacccaggaatgaaa

SEQ ID NO: 247494 - DNA, 201 bp, Homo sapiens
tatatactcctatgtctggcttcttttgttcagcagtatgtttctaagattcatctgtgctattgtgagtacaagagtttgttttcattgatgtttagtarttggttgtttccggtttagggccatttcaataatgctgctatgagcattcttatacatgtgttttggcatacatgtgtacatctgtctgttgaatatata

SEQ ID NO: 247495 - DNA, 201 bp, Homo sapiens
ttgattgttttgttttttgtctttttttttttttttttttgagacagggtctcactcctgtcacccaggctggtgtggtggcacaatcctggctcactgcmgccttgacttgacttggctcagatgatcctcccatttcagcctcctgagtagctgggactattggcatgcaccaccatgcctggctaattttttgtattt

SEQ ID NO: 247496 - DNA, 201 bp, Homo sapiens
cctttattccccctcgcagtccctatcttccctcacaccccagtaaccataatcttgacatcttaacatcataggttagttttgcctatttttgaactctrtacaaagagaatcatagtatatactcctatgtctggcttcttttgttcagcagtatgtttctaagattcatctgtgctattgtgagtacaagagtttgtt

SEQ ID NO: 247497 - DNA, 201 bp, Homo sapiens
tacagcctaggcccaggctgtagtgtttttatttgactttttagctagtagttctcctgctcagcttggagacatttgtaaatttgataagaatcccttcygagtctttaattcatgggtaaaaaggttggacagcatggataaggatcctatggcatgtcaccaactacctttcttcacactgaaatatctgctaatgag

SEQ ID NO: 247498 - DNA, 201 bp, Homo sapiens
cacccaaatggaaactgacaaacccagaatacagtggaacttgcgcctgttgggaggcagacggccacatggaaggagcataggccttgaagttacacagmctgggttcaaatcccagcttggccactccctagctgtggaccttgggcaagctgcttactgatagaagcctccatctcagtcaaaaaatggagattaaaa

SEQ ID NO: 247499 - DNA, 201 bp, Homo sapiens
cccacacttggccaatttttgtatttatagcagagattgggtttcaccatgttggccaggctggtctcaaactcctgacctcaggtgatccacctgcctcrgcctcccaaagtgctgggattacaggcatgagccactgcacccagcctgcttgtttattattttttgtttgttttttgagacagagttttgctcttgttg

SEQ ID NO: 247500 - DNA, 201 bp, Homo sapiens
tatttttagtagtgatagggttttgccatgctgggctagtctcaaactcctggttgcaaatgatccacctgccttggcctcccaaaagggtaagattaaakgtgtaagccaccaagcctggcctgatgctgatttttttcttttcttttcttttcttttttttttaaagataaagtctcgctctgttgcccaggctggagt

SEQ ID NO: 247501 - DNA, 201 bp, Homo sapiens
atgcaccaccatgcctggctaattttttgtatttttagtagtgatagggttttgccatgctgggctagtctcaaactcctggttgcaaatgatccacctgmcttggcctcccaaaagggtaagattaaaggtgtaagccaccaagcctggcctgatgctgatttttttcttttcttttcttttcttttttttttaaagata

SEQ ID NO: 247502 - DNA, 201 bp, Homo sapiens
gttccacgctcccattttaccgaggtggatcctgaggcccagagtgggcaaagggcttgccaaggtcgcagagcgcgcagaggattagaaccctgacttcygtccagcacctgcggagttggagacgcccacaggaaacgcccacctgaccgggtgagtgagggggcgggcgagccggaggggtggagtttattcgcgccc

SEQ ID NO: 247503 - DNA, 201 bp, Homo sapiens
cacttggccaatttttgtatttatagcagagattgggtttcaccatgttggccaggctggtctcaaactcctgacctcaggtgatccacctgcctcggccycccaaagtgctgggattacaggcatgagccactgcacccagcctgcttgtttattattttttgtttgttttttgagacagagttttgctcttgttgccca

SEQ ID NO: 247504 - DNA, 201 bp, Homo sapiens
ggtgggagaaatgcagccccagagctggcctactcacactgcttagcagctttcctcagcagctttcctaacagacttcttcttgccccccagataagacrttatctgtggcaatcgaaggcagtgtggatgaagccaaggctctgttcaaacctccagaggactcccaaggtaatgtggtggttgggattcgtcccccag

SEQ ID NO: 247505 - DNA, 201 bp, Homo sapiens
ggggccaacatgggaggttgcttgaggtcaggttcaagaccagcctgggtaacacagggagactctgtctctacaagaaattaaaaaacaaacaaacaaamaaaaaaagctagggatgatcgcgcatgcctgtggtctgagctgcttgggaggctgatataggaggatcacttaagcctggaaggtctaggctgcactgag

SEQ ID NO: 247506 - DNA, 201 bp, Homo sapiens
tgaggtcaggttcaagaccagcctgggtaacacagggagactctgtctctacaagaaattaaaaaacaaacaaacaaaaaaaaaaagctagggatgatcgygcatgcctgtggtctgagctgcttgggaggctgatataggaggatcacttaagcctggaaggtctaggctgcactgagatatgattgcaccactgcactt

SEQ ID NO: 247507 - DNA, 201 bp, Homo sapiens
ggacaccatcacatgcatgttcatccattacattccggtggagataatcgaccccagagtctagcatccagaggcactgggcccctaaattggccaggtarcattgaggatggacaggccaatcttgcagcccgatgccatactactggttcccaagggcaagttaccccacgagtcccctcaattactaatttaatatct

SEQ ID NO: 247508 - DNA, 201 bp, Homo sapiens
gctgcctttggccacatgaagacagcaacctggcatacagttttattgatttatctattaaaacataaagggtatattctcacactaattcttgaatctcrtactatcattctaatttccctgatttttttcatatattttttgggggagggagttttcagacaaacaattttttttaatagttttgtgttttgagtctgg

SEQ ID NO: 247509 - DNA, 201 bp, Homo sapiens
aatttttaaaaatcctccctgacagagttaatgtttttattttattatttatttatttatttatttattttgagaaggagtctctgtgtgtcgcccaggcyggagtgcagtggtgagatcttgactcactgcaacctccacctccctggttcaagtgattctcctgcctcagcctctcgagtagctgggattacaggcatg

SEQ ID NO: 247510 - DNA, 201 bp, Homo sapiens
ctgtgtcatgtaactctgcctcttctttttcccttgtgtgaatgaaccataatttattttatcagcctagaaggtgtgttattaacaactccgttctcctrtttctctaggggtcctagcaggatgaagccatttaaatacaaccatcctcagggattcttcagccatcgctgatctcccgcgcagaccgttgtttccccc

SEQ ID NO: 247511 - DNA, 201 bp, Homo sapiens
gtcccaccttgtttcccttcatctggagcaaggacttttgcccttccacccttagtcagcaaggagctgggcagaggtgggagaaatgcagccccagagcyggcctactcacactgcttagcagctttcctcagcagctttcctaacagacttcttcttgccccccagataagacgttatctgtggcaatcgaaggcagtg

SEQ ID NO: 247512 - DNA, 201 bp, Homo sapiens
ttcccttcatctggagcaaggacttttgcccttccacccttagtcagcaaggagctgggcagaggtgggagaaatgcagccccagagctggcctactcacrctgcttagcagctttcctcagcagctttcctaacagacttcttcttgccccccagataagacgttatctgtggcaatcgaaggcagtgtggatgaagcca

SEQ ID NO: 247513 - DNA, 201 bp, Homo sapiens
tgccaaatttaatgttcctgggaggacatccagctggacatatgggtttgaatcccagaagggaggtcagggccaggaataaaaatcgatgtgatagaatmttatgctggtattaaaagtgccattcacaggctggacacagtggcttacacctgtaatcacagcactttggaagaccaaggttggaggatcacatgaggc

SEQ ID NO: 247514 - DNA, 201 bp, Homo sapiens
gggaggtggagctggtggccagatgctggcaccttctaggacttgctctctccctagagggcttgtgtgagacctctgctcttctcacctgcccagcccaytctagcacattgccagggtgggaattctcacatggccagcattgatttcctcttctccagtggttcccaaaggacccatttctttttcttttttcttttt

SEQ ID NO: 247515 - DNA, 201 bp, Homo sapiens
cttttatgagccctttgttttccagataaaaatatcaagattggggaagggatagaatggattggtggtaaaaccatttgtgtggcaaacacccagaggcygtaaaaggagcatgggtctcagagtcagcctgctgcccctcactcagtgaccctggatgagttgctgaacctccgtcagcctcagtttccttttctgtaa

SEQ ID NO: 247516 - DNA, 201 bp, Homo sapiens
catgtgacccacataatgttgaggctcaaagggctctgggaagatcatcttttatgagccctttgttttccagataaaaatatcaagattggggaagggayagaatggattggtggtaaaaccatttgtgtggcaaacacccagaggccgtaaaaggagcatgggtctcagagtcagcctgctgcccctcactcagtgacc

SEQ ID NO: 247517 - DNA, 201 bp, Homo sapiens
taatccttgtactttgggaggctgaggcaggtggatcacctgaggtcaggagtttgagaccagcctggccaacatgatgaaaccccatctctactaaaaayacaaaaaattagctgggtgtggtggcacgttcctataatcccagctattcaggaggctgaggcaggagaatcacttgaaccagggaggcagaggttgcgg

SEQ ID NO: 247518 - DNA, 201 bp, Homo sapiens
tgaggtagggagttcaagaccagcctgaccaacatggagaaaccctgcctctactaaaaatacaaaattagccagacatggtggcgcaagcctgcaatccmagctacttgggaggctgatgtgggagaatcgcttgaacccgggaagcagaggctgcggtgaggcgagatcacaccattgcactccagtttgagcaacaag

SEQ ID NO: 247519 - DNA, 201 bp, Homo sapiens
ttttgcattttctctgagcctagtagccttttagacccaggcaacttgagtccttgctctgggactcatgtctgcaggctctgctgcccttgttcttgtgygcaagtaccaaatatgaggcatgagcagaaatccagggggcctggccccttagcagaagcctgcctttcctcaggagttggacacagcttctcaagaacg

SEQ ID NO: 247520 - DNA, 201 bp, Homo sapiens
gctccgggactgaggtgctgatcgcccaaagggcgcccctgggctggggtctgacccggcttctcctccctcactacccgcggtccccggcctctcggcgytgcgctgttacctcatccgaaaagtgttcgctgcagcatcctcaggcttcacgttggagcctcttgattgtggtaatgtagcctgatgggggtgggggtg

SEQ ID NO: 247521 - DNA, 201 bp, Homo sapiens
ggctccctgctgaagtcctgggatgttgtgtttgggccgttgtgctgttgtcccacccaagccgcagcaagcctggcactgcccgtgggatctgacacccycaagacttggtgctgagctgaggaagttgtctgtagttctaagacagttccagaactgtaaggaaaggctgaactctttggtatcagagtttctgtcctc

SEQ ID NO: 247522 - DNA, 201 bp, Homo sapiens; identical to SEQ ID NO: 48639

SEQ ID NO: 247523 - DNA, 201 bp, Homo sapiens
taggtggtggcatttgggggcttcttttagtttattcactcagtaagtggttgtcaaatgcttaccatgtggcagggggatggggtcaagatttttctgayctaaaagagtctctgggacaggcgcagtggctcttgcctgtaatcacagcactttgggaggccaaggcagacagatcacttgaggtcaggagttcaagac

SEQ ID NO: 247524 - DNA, 201 bp, Homo sapiens; identical to SEQ ID NO: 48623

SEQ ID NO: 247525 - DNA, 201 bp, Homo sapiens
gctccgtctcccgggttcacaccattctcctgcctcagcctcccaagtagctgggactataggcgcccgccaccatgcccagctaattttttttttttttttgtatttttagcagagacggggtttcaccgtgttagccaggatggtctcgatctcctgacctcatgatccgcccgtctcggcctctcaaagtgctgggat

SEQ ID NO: 247526 - DNA, 201 bp, Homo sapiens
ttggcctctctaagtgctgggattataggcacaagccaccatgcctggccaacaggtaactattaaaatttaagaaaatgttattctcatcaccaccaaastcctgtcttatcccataatttgagggatctggtgctcttcatgggcccttccacgagggcaatgggacattcctgtcgcagcatctggggcctcctcctg

SEQ ID NO: 247527 - DNA, 201 bp, Homo sapiens
ttatttactaatagattgaatcaatctattagtaatagtccctaaacacttgctaaaagactgaaaagttttattttattttattttattttattttatttatttttttgagacagagtctcgctctgtcacccaggctagagtgcagtggtgcaatcttggcttattgccagctccgtctcccgggttcacaccattctc

SEQ ID NO: 247528 - DNA, 201 bp, Homo sapiens
tttatttactaatagattgaatcaatctattagtaatagtccctaaacacttgctaaaagactgaaaagttttattttattttattttattttattttatttatttttttgagacagagtctcgctctgtcacccaggctagagtgcagtggtgcaatcttggcttattgccagctccgtctcccgggttcacaccattct

SEQ ID NO: 247529 - DNA, 201 bp, Homo sapiens
cgccaccacgcccggctaatttttgtgttttagtagagacggggtttcaccatcttggcctggttggtcttgaactcaggaccttgtgattcacccacctyggcctcccaaagtgctgggattacaggcgtgagccaccacgcctggccatttgttaatttttcattcattaatatcctcacccgtcactaaatattttat

SEQ ID NO: 247530 - DNA, 201 bp, Homo sapiens
atttatttactaatagattgaatcaatctattagtaatagtccctaaacacttgctaaaagactgaaaagttttattttattttattttattttattttatttatttttttgagacagagtctcgctctgtcacccaggctagagtgcagtggtgcaatcttggcttattgccagctccgtctcccgggttcacaccattc

SEQ ID NO: 247531 - DNA, 201 bp, Homo sapiens
attgttactttttttttttttctttgagacacagtcttgctctgtcacctaggctggagtgcagtagtgtgatctcagctcactgcaacctccgcttcccragttcaagtgattctcgtgcctcacgctcctgagtagctgggattacaggcatgcagtaccatgcccaactaatttttctatttttagtacagagtttcg

SEQ ID NO: 247532 - DNA, 201 bp, Homo sapiens
gcaacgttaattttttttttttggtagagacagttttgtgatgttgcccaggctggtctccggggttcaagccatttttctgtctcagcctcccaaagtgstggaattacagatgcgagccactgtgcttggcctgtatgttactttaagccactaaatgtatagcaatttattgcacagcaatagaaagcagccagaaag

SEQ ID NO: 247533 - DNA, 201 bp, Homo sapiens
tatttatttactaatagattgaatcaatctattagtaatagtccctaaacacttgctaaaagactgaaaagttttattttattttattttattttattttatttatttttttgagacagagtctcgctctgtcacccaggctagagtgcagtggtgcaatcttggcttattgccagctccgtctcccgggttcacaccatt

SEQ ID NO: 247534 - DNA, 201 bp, Homo sapiens
caaaaaaaaagaagaaaaaaaaaaaaggcagggagagatgatggtgaaaaacataggggatctacattggtctaggtagacaaataatgcctctctgaggragtaaaatgtaagctgagagctaaaggatgagaaggagccagctgtgaattgctaggcaaaagcattccaagtagacagagcagcacatgcaaaggccct

SEQ ID NO: 247535 - DNA, 201 bp, Homo sapiens
ttacctgcaaaggtctgcagcttaagtcctgaagccagcgagactacgaacccaccgggagaaaggaacaactccagaagcgccgccttaagagctgtaasagtcactgcggaagtgtggagtttcacttctgagccggtgaccatgaacccaccagaaggaagaaacgcggaacacatcagaacattagaaggaacaaac

SEQ ID NO: 247536 - DNA, 201 bp, Homo sapiens
ttatttatttactaatagattgaatcaatctattagtaatagtccctaaacacttgctaaaagactgaaaagttttattttattttattttattttattttatttatttttttgagacagagtctcgctctgtcacccaggctagagtgcagtggtgcaatcttggcttattgccagctccgtctcccgggttcacaccat

SEQ ID NO: 247537 - DNA, 201 bp, Homo sapiens
  misc_feature (1)...(201): n = A,T,C or G
acctagactggggcttctggcttctccctccctatgggctcagagcagagttgtatacacatgtgtgcaaacatgcacaccaggtgtgtgtcagggcctgngaatgaggccaaatggccgctgcagcttgggaggtggggagacagggcagtttcccttccttgccaagctgtgatgctatgaatctgaggtgggggctca

SEQ ID NO: 247538 - DNA, 201 bp, Homo sapiens
atttgcaaattgagtaggtggggcagagcaccagctttttgctaccagtggaaagtgtgtgaatataaaatgagatttggcagacattattaggttgccarattcaggccactctttcccttttctctttctatcccaaggtgctgggatttttgctccccagctcagcccaagcccatgtccttatctgggtggtgggag

SEQ ID NO: 247539 - DNA, 201 bp, Homo sapiens
tcacagcctataaagacctgcagtctcgggaggagactcgaaacgctgcctggaggaagagaggctgggatgaaaatgtctactatacaggtgagtgaagsctttggaggtcttctgctgagaaccctgtctgaggatggaatcctctctgcaaggagatctagtctttcttgattacctccagtgatggggaactcactt

SEQ ID NO: 247540 - DNA, 201 bp, Homo sapiens; identical to SEQ ID NO: 48609

SEQ ID NO: 247541 - DNA, 201 bp, Homo sapiens
gagaggctgggatgaaaatgtctactatacaggtgagtgaagcctttggaggtcttctgctgagaaccctgtctgaggatggaatcctctctgcaaggagwtctagtctttcttgattacctccagtgatggggaactcacttttaagacaatgagttaatgggtttctatccaagtggcacactccataggataccagca

SEQ ID NO: 247542 - DNA, 201 bp, Homo sapiens
ccaatcagcaggatgtgggtggggccagataagaaaataaaagcaggctgccggtgctagcagtgataacctgtgcagcttgtttcatatattgtgggagytttgtttgtttgctccttgtttgggtccacagtgcttttatgagctgtaatattacctgcaaaggtctgcagcttaagtcctgaagccagcgagactacg

SEQ ID NO: 247543 - DNA, 201 bp, Homo sapiens
cacttagagcggccggcccgccggcaagccccgggcagtgaggggcttagcacctgggccaccagctgctgtgctcgatttctcgccggtcttagctgccyctccgcggagaagggcttgggacctgcagcccgccatgcctgaacctctctgccaccgccgtgggctcctgcgcagccggagcctccccgacgagcgccg

SEQ ID NO: 247544 - DNA, 201 bp, Homo sapiens
agcgcgaattgcgggtgggcgtgggctcagcgggccccgcacttagagcggccggcccgccggcaagccccgggcagtgaggggcttagcacctgggccascagctgctgtgctcgatttctcgccggtcttagctgcccctccgcggagaagggcttgggacctgcagcccgccatgcctgaacctctctgccaccgccg

SEQ ID NO: 247545 - DNA, 201 bp, Homo sapiens
tcagcccgccgctgcactgtgggagtccctttctgggctggccacggccggaaccggctccctcagcttgcggggaggtgtagagggagaggcacgggcargaactggggctgcgcgcggcgcttgcgggccagcgcgaattgcgggtgggcgtgggctcagcgggccccgcacttagagcggccggcccgccggcaagcc

SEQ ID NO: 247546 - DNA, 201 bp, Homo sapiens
agccctcgcagccctcgctcgctctcggtgcctcctcggccttggcacccactctggccgcgcttgaggagcccttcagcccgccgctgcactgtgggagyccctttctgggctggccacggccggaaccggctccctcagcttgcggggaggtgtagagggagaggcacgggcaagaactggggctgcgcgcggcgcttg

SEQ ID NO: 247547 - DNA, 201 bp, Homo sapiens
ggctcagcctagaccttcactggatcaagtgatccctccgcctcagcctcccgcgtagctgggactgagaggtgaggtcatgctggcagccctcgcagccytcgctcgctctcggtgcctcctcggccttggcacccactctggccgcgcttgaggagcccttcagcccgccgctgcactgtgggagtccctttctgggct

SEQ ID NO: 247548 - DNA, 201 bp, Homo sapiens
gacactgatgattggtaatagctcatttttatgaaaagacttgccaggtgctaggcactgggctaattggccccaaatgccaaatttaatgttcctgggargacatccagctggacatatgggtttgaatcccagaagggaggtcagggccaggaataaaaatcgatgtgatagaatattatgctggtattaaaagtgcca

SEQ ID NO: 247549 - DNA, 201 bp, Homo sapiens
ggaggtggaggttgcagtgagcagagatcacgccactgcactccagcctgggcgacagagcgagtctctgtctcaaaaaaaaaaaaaaaaaaaaaaaaaaatacagggtcttccaaaactgaactgtcagtgagagggaagcggattgtaaaagtcaaagaaacaatgtcgtctgaacagttaactaacttttcaaaatcc

SEQ ID NO: 247550 - DNA, 201 bp, Homo sapiens
ctgtggggactttatgtcctgccttctgctagcaaattctccccaccaaaactgattgctcagggcagtatgggcttggcatgggagtgtcttcattatcrttgcttcatttcttccccgcaggtgggagaaccgggctgggttttctgggctccccacagggacaacaaatggctgctgataaaaatacgtgacaccggg

SEQ ID NO: 247551 - DNA, 201 bp, Homo sapiens
taggctcggcgttgagtggctacagtggcagtcactctgaatgcttttgtgcctactctaacaagactggttgaggcggcggacctctgctgaccttaccsgggaaaccacttagaggctggatccggggcgaggggaattgggtccttcgttggcccagggagggactcttcggttcaagtaggctccgagtgtggcgcc

SEQ ID NO: 247552 - DNA, 201 bp, Homo sapiens
ccgagatctcaccactgcactccagcctggcaatagagcaagaaaagagaaagaaagaaaaagaaagaaagaaagaaagaaagagagagagagagagagaraaagaagagagagacagaaagaggagagaaagagaaagaaagaaagaaagaaagaaagaaagaaagaaagaaagaaagaaagaaagaaagaaagaaagag

SEQ ID NO: 247553 - DNA, 201 bp, Homo sapiens
ttgaacccaggaggcagagattgccatgagctgagatggcgccactgtactccagcctggtgacagagttagactccatctcaaaaaaaaaaaaaaaaaaagtctgcagatggatgagaactaccgtgggctgaagactaacatatttatgagactgatttaatctcaaaatcaatatgattaagcaagtagggagatgca

SEQ ID NO: 247554 - DNA, 201 bp, Homo sapiens
gaacttgggaggcagaggttgcagtaaaccaagatcacgccactgcactccagctagggtgacagagcaagactatctcaaaaaaaaaaaaaaaaaaaaaagatgtcacaaacttgaaagctcctctttgcaaaaaatcccaactgtaatctcttgccctgtcagtttctgccataatcaactacagcaagtaattttctt

SEQ ID NO: 247555 - DNA, 201 bp, Homo sapiens
ccagctacttgggaagctgaggcaggagaatcgcttgaacttgggaggcagaggttgcagtaaaccaagatcacgccactgcactccagctagggtgacaragcaagactatctcaaaaaaaaaaaaaaaaaaaaaagatgtcacaaacttgaaagctcctctttgcaaaaaatcccaactgtaatctcttgccctgtcag

SEQ ID NO: 247556 - DNA, 201 bp, Homo sapiens
gacagagcgagattccgtctcaaaaaaaaaaaaaaaatttaactcgcataatccactgacccactgctatcgcatactacttattgttttatgatttgttwattttattttttttgagacggagtcttagctgggctggagtgcagtggcgcaatcttggctcactgcaacctcctcctcctgggttcaagcagttctctg

SEQ ID NO: 247557 - DNA, 201 bp, Homo sapiens
ttgagaaaattttggagactctgccttttgccctaatgcagctttcacccagcacctacattttctcccccaccccaccccacctcatcagacagacatayaccgcaccagtgcttgcttctcctcccaccttgggcaccaacacattactgtctcttcttgtgtcttcctcgtccttctggtcctcccctcccctttgtt

SEQ ID NO: 247558 - DNA, 201 bp, Homo sapiens
accagcagggattcccatgtgattatttagattactgtgtacatatgtgaacacaattcgaacacttaagctttgagtcaaactggtaaaaaaaaaaaaaataggaagctttcattatttattatgctcaggtaggcaactggagggggcatcatttggggtaagaattagacattgacttactttgaagttcaggtgtct

SEQ ID NO: 247559 - DNA, 201 bp, Homo sapiens
aaaaaaaaaatttaactcgcataatccactgacccactgctatcgcatactacttattgttttatgatttgttaattttattttttttgagacggagtctyagctgggctggagtgcagtggcgcaatcttggctcactgcaacctcctcctcctgggttcaagcagttctctgcctcagcctcccgagtagctgagatta

SEQ ID NO: 247560 - DNA, 201 bp, Homo sapiens
gcatagcatgaagcacgatgtctgaagtaccacatatgggggacaaaccaagtgtcactagagctctgaagtcctctttttttttttttttttttttttttaagacagagtctcactctgtcacccaggctagagtgaagtgactcaattttggctcactgcaacctccgcctcctgggttcaagtgattctcctgcctca

SEQ ID NO: 247561 - DNA, 201 bp, Homo sapiens
gcacattttgccttttggataacctcttgtgatgggtctaggcaagtcttttgcctgttttctgttgggttgcctggagatgagttttttcccaggtcttycccattctgtaacctcctgccttttcactttgctaatggtatcttttaatgagtgcatgttcctaattttactaattattcttttcctttatggttagta

SEQ ID NO: 247562 - DNA, 201 bp, Homo sapiens
agcatagcatgaagcacgatgtctgaagtaccacatatgggggacaaaccaagtgtcactagagctctgaagtcctctttttttttttttttttttttttttaagacagagtctcactctgtcacccaggctagagtgaagtgactcaattttggctcactgcaacctccgcctcctgggttcaagtgattctcctgcctc

SEQ ID NO: 247563 - DNA, 201 bp, Homo sapiens
tggcctcccaaagtgctgggagtacaggcatgagccacagtgcctggactattcacttttctattttggcatagatgtcacctcctcctggaaggctgccragatttcctccacgcgggctgggtcaggcaccttccttagctctccaggcctcagtaattacctcctcacgccctgatcatgtacccctatagctgcctg

SEQ ID NO: 247564 - DNA, 201 bp, Homo sapiens
tgtagagatggggtttcaccatgttggctaggctgatctcaaactcctgacctcaagtgatctgcctgccttggcttcccaaagtgctgggattacagacrtgagccactgtgcctggcccttttttttttttttttttttttttttccaaagagatggcgtttcactctattgctcaggatggagtgctgtggcactatc

SEQ ID NO: 247565 - DNA, 201 bp, Homo sapiens
aactttctaatcccttggtttcatttccaaagagaggggggaaaaagcaacgctatagaaaaactgcaagaacatcccttttcttttgagaaggagtttcrctctggttgcccaggctggagtgcaatggcgcaatctcggctcactgcaacctccacctcccgggttcaagtgattcccctgcctcagtctcccaagtag

SEQ ID NO: 247566 - DNA, 201 bp, Homo sapiens
ttttttttgagacggagtcttagctgggctggagtgcagtggcgcaatcttggctcactgcaacctcctcctcctgggttcaagcagttctctgcctcagyctcccgagtagctgagattataggtgcccgccaccacgcccggctaatttttgtgttttagtagagacggggtttcaccatcttggcctggttggtcttg

SEQ ID NO: 247567 - DNA, 201 bp, Homo sapiens
actaatttattttaaattttttgtagagacgggatctccctatgttacccagggtggtctcaaactcccgggctcaagcgatccttccactttggcctccsaaagtgctgggagtacaggcatgagccacagtgcctggactattcacttttctattttggcatagatgtcacctcctcctggaaggctgccgagatttcc

SEQ ID NO: 247568 - DNA, 201 bp, Homo sapiens
ttatgattaaatcacactggatagtttaaacttcaccaacctcatcatggatggggttggggttataattgcttaagggtttttttttttttttttttttkgagatggagtctcactctgtctcccaggctggagtgcggtggtgtgatctcagttcactgcaacctctgcctcccaggttcaagtgattctcagtcctca

SEQ ID NO: 247569 - DNA, 201 bp, Homo sapiens
taaaagtgattttacattcttagagagaaaatgaaacctgagatgtttctcaagcagtgcaactttctaatcccttggtttcatttccaaagagaggggggaaaaagcaacgctatagaaaaactgcaagaacatcccttttcttttgagaaggagtttcgctctggttgcccaggctggagtgcaatggcgcaatctcgg

SEQ ID NO: 247570 - DNA, 201 bp, Homo sapiens
tgctgcccaagcttcacctggatgaggactacccatgctcactcgtgggcaactggaacacgtggtatggggagcaggaccaggcaggtaaggcgctcacstccctagtgccattgccactgcccagccctggcctccagcacctttcacacctggctgttctccactccctctccacaacagcacctggtggggctctta

SEQ ID NO: 247571 - DNA, 201 bp, Homo sapiens
cactggcacgtctggactgggagctggagcagcggaaaaggtagcatttcctccttcctgaccttttaaccacaaagtgtcagtgctttgtcatgacccakgataaggcagcaaaacactgtgcaactctcagaatagtttctaagaccaaatcccattttatgattaaatcacactggatagtttaaacttcaccaacct

SEQ ID NO: 247572 - DNA, 201 bp, Homo sapiens
ccagcaacctctataagatccagtgtgagtggctgctgagctgaccaatttctgccctttcaggggctctgggggcctgtgaggctccaggaaggagatgsgagggtctggaatgtcctcagctgtcctgggacccctggccttgatgggctcccctcaccccaagttcttccctgtgtacacaccctacctcacttcttg

SEQ ID NO: 247573 - DNA, 201 bp, Homo sapiens
ccggctaatatttcgtgtttttagtagagacagggtttcaccgtgttagccaggatggtctcgatctcctgatcttatgatccgcctgcctcagcctcccraagtgctgggattacaggcgtgagccaccacacccggtgggtccggaatatttttaataatcatgatactgattgattgttttgttttttgtcttttttt

SEQ ID NO: 247574 - DNA, 201 bp, Homo sapiens
tgacatatgcaggggccctattagacattgggtccaggatatatatatatatatatatatatatatatttttttttttttttttttttttttttttttttkgagatggagtcttgctctgtcgcccaggctggagtgcagtggcgtgatctcggctcactgcaagctccgcctcccgggttcacgccattctcctgcctca

SEQ ID NO: 247575 - DNA, 201 bp, Homo sapiens
ttttctcttgccgccgccacataagaagtgcctttcacctctcgccatgattctgaggcctccccagctatgtgggactgtaagtccaattaaacctcttyttgttcccagtttcaggtgtgtctttattggcagcgtgaaaatggactaatgcagatgggaagttgcacttaacagcatggacagtatgatcccgttttg

SEQ ID NO: 247576 - DNA, 201 bp, Homo sapiens
gtcaggtccctcagtgcccaacctgaggtggggattggctttcaaggaaagagcgctgggttcttaactctgccctctgattttctgtgcggccttgggcragtcccttaaactctctgggcttctttccattttatcctcgcgagaatgggaatactaatagtaccaatactataagatcattgcatagaatcagtgaga

SEQ ID NO: 247577 - DNA, 201 bp, Homo sapiens
gaagacctcattgtcttgatgagggggcctgaggacaagccagtctagcttgatctgatggcctagcccctggcccagcccctgcagaggcatcagcgctygggcccatccagggacggaagcctggccagtgtggtcccccacatgcaggaaggtagtgctgagatgctggctttcctatcacacaggccatggagggcg

SEQ ID NO: 247578 - DNA, 201 bp, Homo sapiens
cggctggccggcccgggaacggtctgggctgcgcgggtccccagcggccagcatgggccgcgaggaccctgcctgagcggaaaggggagttgggggacggkccctgacggctgcagggagggcacaggagccgggaccttcggtgcaggcgcgacccggcactccgggattcgggccggagatgccggggacgcctcggga

SEQ ID NO: 247579 - DNA, 201 bp, Homo sapiens
caggaagacctcattgtcttgatgagggggcctgaggacaagccagtctagcttgatctgatggcctagcccctggcccagcccctgcagaggcatcagcrctcgggcccatccagggacggaagcctggccagtgtggtcccccacatgcaggaaggtagtgctgagatgctggctttcctatcacacaggccatggagg

SEQ ID NO: 247580 - DNA, 201 bp, Homo sapiens
tggctcacgcctataatcccaacactttgggaggccgaggcaggtggatcacctgaggtagggagttcaagaccagcctgaccaacatggagaaaccctgyctctactaaaaatacaaaattagccagacatggtggcgcaagcctgcaatcccagctacttgggaggctgatgtgggagaatcgcttgaacccgggaagc

SEQ ID NO: 247581 - DNA, 201 bp, Homo sapiens
tggaaagagattaggagctatctgttttagggcctgcttctctcctgaggcaaaatcccggagccaaggctctggagctgtggggaaggaccctggaaagmttctctctgagaaataccctcactctaggaactgagcacttggtggaaggaggcaggggaccgcaataacctgaggctcagcctgcaagaactgggggat

SEQ ID NO: 247582 - DNA, 201 bp, Homo sapiens
ctgagttgcttgtatcctggggatcatggaaagaaaactccgaatccagccaatcagtatcagtttgataaagttgggtgagtcagcagtttcctcctctycgagctctctacttctgagtttctctggtggctcaagctaaatgctggagacctgttagggccagaggtgacccagaggataggaaagaccacagggtag

SEQ ID NO: 247583 - DNA, 201 bp, Homo sapiens
tgaccacacccagctatgaagctccactaattgtggcatattgttctattattttcaacaacacactgaggcataacttgctcttactctacaaactgatrcaatcaaattgtggctgtttggaggaaagcatttttttccacctctgccacataccttacttttcaaattgttttttattgattcataatagttgtacac

SEQ ID NO: 247584 - DNA, 201 bp, Homo sapiens
tctgccaggactcagcgtctggcctgtcatagcagataaaccttgccatgtctaaagggtacccatcttggggcatggataatccagggtgccgcagacargcaggtcccaggagagagatggtgcccggaggaagggatgggggagcacacgtgtatgtgtctcattgtcactcacagcaaacagtgattgctgaccact

SEQ ID NO: 247585 - DNA, 201 bp, Homo sapiens
ttctcagtttcctcgagatgaaagatgtactgattggctcctcttatagccattggctttacccactgttctggcttggacaccatcacatgcatgttcayccattacattccggtggagataatcgaccccagagtctagcatccagaggcactgggcccctaaattggccaggtagcattgaggatggacaggccaatc

SEQ ID NO: 247586 - DNA, 201 bp, Homo sapiens
gtcttttcctggtttttggcaacagggtaataccagtctcataaaattcgtttgtaagtattttctcctctttttcatttttgaagactttgtgaagaacygtattaatttttcttgaaatgtttgatagaattcagtggtgaagttatcaggacctctagtaggtacaggcctgggctttgctttgcttttctttcttct

SEQ ID NO: 247587 - DNA, 201 bp, Homo sapiens
ttttattttttattttatttatttgtttgttttgttgagacggagtttcgctcttgtttcccaggctggagtgcaatggcgcgatcttggctcactaaaayctctgcctcctgggttcaagtgattctcctgcctcagcctcctgagtagctgggattgcaggcacatgccaccacatccggctaatttttatatttttag

SEQ ID NO: 247588 - DNA, 201 bp, Homo sapiens
ctcttttgttataagtatttttattttttaggttattgtaaatggaattttcttaatttccttttcagattgttcattccaagtggatacatttacaactragttttgtgtaatgatcttgtatcctataaccttactaaactaataatttattagttccaatactttggtagtggattcctcagggtctatatgcaagat

SEQ ID NO: 247589 - DNA, 201 bp, Homo sapiens
ctcctccctgtccttgggtccagcttgctgtggcctgactgccaaatgccctctaccacatagccaacgtgctgctactcggcctctgttgacacaattcratgacatgccaccaaggcagcccattccattgttagaaaattattccagccaggtgcggtggctcacacttgtaattccagcactttgggaggctgaggt

SEQ ID NO: 247590 - DNA, 201 bp, Homo sapiens
tatggggaaaatcaagtcagtcacacaagagacaggcagtgcttccaagtacttacaagaaagccatttctataacattaggacattctgggacctaggasattgttaggtgtttacgttcaaacacaaaaattcttcttaggttttaaaagtgattttacattcttagagagaaaatgaaacctgagatgtttctcaagc

SEQ ID NO: 247591 - DNA, 201 bp, Homo sapiens
gaggctgcaggtcagtcctccctcattctcctcacctgggaggcagtgtgaggcagccaggaatgccaaggctttggtgagagcctctcaccctaaaccascaaggccggctcctccctgtccttgggtccagcttgctgtggcctgactgccaaatgccctctaccacatagccaacgtgctgctactcggcctctgttg

SEQ ID NO: 247592 - DNA, 201 bp, Homo sapiens
gggaggtgaggagcatctctgcccggccgccccgtctgagaagtgaggagaccctctgcctggcaaccgccccgtctgtgaagtgaggagctcctccgccyggcagccgccccgtatgagaagtgaggagcccctccgcccggcagccaccccgtctgggaagtgaggagcgtctccgcccggcagccaccccgtccggga

SEQ ID NO: 247593 - DNA, 201 bp, Homo sapiens
ccaccttttttcaccctcctgccctatttggctggacagagatggaaaacccttcttagaaatgctaagacccacaggaggaggctgcaggtcagtcctcyctcattctcctcacctgggaggcagtgtgaggcagccaggaatgccaaggctttggtgagagcctctcaccctaaaccaccaaggccggctcctccctgt

SEQ ID NO: 247594 - DNA, 201 bp, Homo sapiens
aggaagtgaggagcgtctctgcccggccgcccatcgtctgggatgtggggagcgcctctgccccgccgccccgtctgggatgtgaggagcgcctctgcccsgccgccaccccgtctgggaggtgaggagcatctctgcccggccgccccgtctgagaagtgaggagaccctctgcctggcaaccgccccgtctgtgaagtg

SEQ ID NO: 247595 - DNA, 201 bp, Homo sapiens
atcacacaagtgccctctccctctccctctccccatggtctccctctccccatggtctccctctccctctctttccacggtctccctctcatgccgagccraagctggactatactgctgccatctcggctcactgcaacctccctgcctgattctcctgcctcagcctgccgagtgcctgcaattgcaggcgcgcgccac

SEQ ID NO: 247596 - DNA, 201 bp, Homo sapiens
cacggggaaagtgtctccaggccatgtcagagacctcacggcagccccttccctcaaaggcccagaggcccaggaggaaaaagtggttttctgggccaggyccagggtccctgtgctatatgcagcctagggacttggtgccctgtgtcccagccagtccaggcatggctgaaaggggccaatctagagcttggcctgtgg

SEQ ID NO: 247597 - DNA, 201 bp, Homo sapiens
aatcacacaagtgccctctccctctccctctccccatggtctccctctccccatggtctccctctccctctctttccacggtctccctctcatgccgagcygaagctggactatactgctgccatctcggctcactgcaacctccctgcctgattctcctgcctcagcctgccgagtgcctgcaattgcaggcgcgcgcca

SEQ ID NO: 247598 - DNA, 201 bp, Homo sapiens
agcattccattttaaaaggaaaacagagcataaaagtttggaaaatttgtagcctgatgacacagtagaaaagaaaaacccggctgggcacggtggctcaygcttgtaatcccagcactttgggaggccgagctgggtggatcacttgaggtcagaagttcgagaccagcctgggcaacatggtgaaaccccatctctact

SEQ ID NO: 247599 - DNA, 201 bp, Homo sapiens
aggcaatactctggcctcagcctcccgagtagctgggactacaggcacacaccaccagctaatattttaaaattatttttatagagatggggtcttcctawgttacccaggctggtcttaaactctggcctcaagtgatcctcctgcctcagcttcccaaagtgctgggattataggtgtgagctactgtgctcagccaca

SEQ ID NO: 247600 - DNA, 201 bp, Homo sapiens
tcaatatacaatccaacaggtgacttaaacattgcaagatggtttagtgtgtcatgtgactgcaccaaaaaaaccctgactacatttttttttttttttttgagatggagtctcactttgtcacccaggctggagtgcaatggctcaatctcagctcactgtaacctccacctcccaggttcaagcaatcctcctgtctca

SEQ ID NO: 247601 - DNA, 201 bp, Homo sapiens
tgggaggccgaggcaggtgaaccacttgaggtcaggagtttgagaccagcctggccaacatggcaaaaccctatctctactaaaaatacaataaaaattarccagacatggtggtgggcccctgtaatcccagctacttgggaggctgaggcaggagaatcgcttgaacccgggaggcagaagttgcagtgagctgagatt

SEQ ID NO: 247602 - DNA, 201 bp, Homo sapiens
tggggttcacctcttctgtcaattctatgcaattcttcttctagacacctaccttttttaatttttttactttatttatttatttatttatttatttattwtgagatggagtctcactctgtcgtccaggctggagtgcagtggtgtgatcttggctctctgcaacttctgcctcccggattcaagcgattcttctgcctc

SEQ ID NO: 247603 - DNA, 201 bp, Homo sapiens
ttagagatttgtggaactttgaacttgagagagaggatttagggtatctggtggaggaaatttctaagtagcaaaccattcaaaaggtgacagggccatgygcagtggctcacgcctataatcctagcactttgggaggccgaggcaggtgaaccacttgaggtcaggagtttgagaccagcctggccaacatggcaaaac

SEQ ID NO: 247604 - DNA, 201 bp, Homo sapiens
tacaggcgcccgcctccactcccggctaatttttgtatttgtggtactgacggggtttcaccatgttggccaggctggtctcaaactcctgacctcaggtsatccacccgcctcagcctcccaaagtgctgggattacaggcctgagccactgcgcccagccaagtcactttttaaactcaaatttactttgagagaaaac

SEQ ID NO: 247605 - DNA, 201 bp, Homo sapiens
ttgggattacaggtgtgagccatggtgttgggcccagtcactttttttgttgttgttgagactgaatctcgctctgttgcccaggctggagtgaagtggcygcgatctcggctcattgcaacctctgctccctgggttcaagtgattctcctacctcagcctcctgagtagctgagattacaggcgcccgcctccactccc

SEQ ID NO: 247606 - DNA, 201 bp, Homo sapiens
aggggctcctcacctctcagacggggcagccgggcagagacgctcctcacctcccagacggggtcgcagccgggcagaggtgctcctcacatcccagacgsggcggcggggcagaggtgctccccacatctgagatgatgggcggccgggcagagacactcctcacttcctagacgggatggggtccgggaagaggtgctc

SEQ ID NO: 247607 - DNA, 201 bp, Homo sapiens
ggaggggctcctcacctctcagacggggcagccgggcagagacgctcctcacctcccagacggggtcgcagccgggcagaggtgctcctcacatcccagayggggcggcggggcagaggtgctccccacatctgagatgatgggcggccgggcagagacactcctcacttcctagacgggatggggtccgggaagaggtgc

SEQ ID NO: 247608 - DNA, 201 bp, Homo sapiens
acggggcggctgctgggtggaggggctcctcacctctcagacggggcagccgggcagagacgctcctcacctcccagacggggtcgcagccgggcagaggygctcctcacatcccagacggggcggcggggcagaggtgctccccacatctgagatgatgggcggccgggcagagacactcctcacttcctagacgggatg

SEQ ID NO: 247609 - DNA, 201 bp, Homo sapiens
ggggctgccccccacctcccggacggggcggctgctgggtggaggggctcctcacctctcagacggggcagccgggcagagacgctcctcacctcccagayggggtcgcagccgggcagaggtgctcctcacatcccagacggggcggcggggcagaggtgctccccacatctgagatgatgggcggccgggcagagacac

SEQ ID NO: 247610 - DNA, 201 bp, Homo sapiens
gccatgtctaaagggtacccatcttggggcatggataatccagggtgccgcagacaggcaggtcccaggagagagatggtgcccggaggaagggatggggragcacacgtgtatgtgtctcattgtcactcacagcaaacagtgattgctgaccactcgctgagcgccagccacatggagaccaccatgaaacttctgaag

SEQ ID NO: 247611 - DNA, 201 bp, Homo sapiens
gtaagtccaattaaacctcttcttgttcccagtttcaggtgtgtctttattggcagcgtgaaaatggactaatgcagatgggaagttgcacttaacagcayggacagtatgatcccgttttgtttacaaataaaatgtttatttatccacaatcttcactcagtttcggactgagaggcgaaattataggcaatttttcca

SEQ ID NO: 247612 - DNA, 201 bp, Homo sapiens
tgctttgttgcccaggttggagtgcagtagcacaatctgagctcactgcaacctccacctcccgagttcaagtgattctcatgtctcagcctccagagtaratggcactacaagagcatgccaccacggctggctaatttttgtatttttagtagagatggggttttgctatgttggccaaggtagtcttgaactcctgtc

SEQ ID NO: 247613 - DNA, 201 bp, Homo sapiens
gctaatgtcttgaacttaagtgcagacccttgtatttattcctgttaaattatgtcttgctttcaaccctacagcctaggcccaggctgtagtgtttttayttgactttttagctagtagttctcctgctcagcttggagacatttgtaaatttgataagaatcccttccgagtctttaattcatgggtaaaaaggttgga

SEQ ID NO: 247614 - DNA, 201 bp, Homo sapiens
tctgaatgtcactactattatccttttctatagatcagtggttctcaatgtggtcatggaggttgggtagggagaaagaggagattggagggtgtcctccstaccccagggacacttgacaatgtctgaagacatttttggttgtcacaacaactgggatggggtgggggaatgctactggcatctagtaggtagaggcca

SEQ ID NO: 247615 - DNA, 201 bp, Homo sapiens
gagctatgtaacttgtccaaagtagaagtattttagctagaattcaagcccaggtctgtcttctttcaaagccgatgcactttctactactgctctgctaytcaaagtgtggtccttgggccggtggcacaggtatcatcacctgagagtttgttattaatacaaaattctcacttccatcccagaactactgaatcagaa

SEQ ID NO: 247616 - DNA, 201 bp, Homo sapiens
gagcataaaagcccattaataaggagcaggtgacactgccacagctgggtaatttgtctctttgctcgtctgcagcccatttggtgatgatctatttgtcygagggaatggatgatggcaggtttgtcaatattttacacttatgaacctgcctgttcttctctgcctggctctgcccaactgtctttgtccctggctcct

SEQ ID NO: 247617 - DNA, 201 bp, Homo sapiens
gatctcttacaacttcctatttggcttttcttactgatagattgaattattagagtaaaattccagcctagataagaaataacatagccgtttagcctccyggcaaattacactcagcacccactttctcaaaatgacaaacaacaaatctttcaagtggaaaaatcttccaaagcatccagccaattgagcaatgcagca

SEQ ID NO: 247618 - DNA, 201 bp, Homo sapiens
caaaatgacaaactagacactgaggtaatgtagcacggatcgttagtcatgtcattcatccggcaaaaatgtaagccactggcaagtttacaaaatgcttytgagatagtatcatacaccaaatgcaataaaataatgccataggcaaatagttgttaagttgaggaagtccttcaaatgatctcttctttccactttctt

SEQ ID NO: 247619 - DNA, 201 bp, Homo sapiens
gaaggatccaaccaggaggtgaggatctcctagaaggttgtgacccctccgttggtagaacaccccgccatcagtcctttctctcagcatcccggaggacygtgggttccacctaggcccctcctgtgaagtgtggccaaggaatcagcctcagtaccctctgcaccagccctggcttctgccccatattattgtgccttc

SEQ ID NO: 247620 - DNA, 201 bp, Homo sapiens
gattcaaaactttgtgttccaagaatacgagtaggagatgaaatgcactcacataactcataaatctgcacaaccatctgaccacatttttgcttttgatsctgctttgtatctttgcagcattatctgtacctgcgggcagtctcctaaattaacagcaccacctgtcatggaggtggtttggtcttcttcatggtgtct

SEQ ID NO: 247621 - DNA, 201 bp, Homo sapiens
tttgaggaaacacaattcaacccatagctccctgcttgcaggagtggactcaagtggccatatttatgctggggaggaccaggaatgtcatatttatttgkttgtttgttttttgagacagagtctagctctgtcacccaggctggagtgcagtggcaccatctcggctcgctgcaacctccacctcccaggttcaagtgc

SEQ ID NO: 247622 - DNA, 201 bp, Homo sapiens
aagaccagcctgaccaacatggtgaaaccccgtctttactaaatacaaaaaaattagccaggtgtggtggctcatgcctgtaatctgagctacttgggagrttgaatcacttgtacctgggaggctgaggttgcagtgagctgaggttgcgctattgcactccagcctgggcaataagagcaaaactccatctcaacaaca

SEQ ID NO: 247623 - DNA, 201 bp, Homo sapiens
gaataaagaaaaatttagccatctcctattcctctttcccaggtaagcagtattaacagtttgggacaagtaatttattttcttttctttttctttctttytttttctttcttttcttttttttttttttttgtgaagatggagtctcactctgtcatccaggctggcgtgcagtggcgtgatcttggctcactgcagcct

SEQ ID NO: 247624 - DNA, 201 bp, Homo sapiens
agctactagggaggctgaggcaggaaaatctcttgaacctgggagtcagaggttgcagtgagccgagatcacaccattgcactccagcctgggcaacgagygaaactccgtctaaaaaaaaaaaaaaaaaaattatcaagcacctcctatgtccaaggtgctgtgttacctcaaaaagattttttaccatttcctggcctt

SEQ ID NO: 247625 - DNA, 201 bp, Homo sapiens
cccagacggggtggcggccaggcagaggggctcctcacctcccagaaggggcggccgggcagaggcgccccccacctcccggacggggtggcggccaggckgaggcgcccccctacccccgacccgacggggcggctggccgggctggggctggcccccacctcccccccggacggggcggctggccgggcgggggctgcc

SEQ ID NO: 247626 - DNA, 201 bp, Homo sapiens
tctaggatgtcagttgatggtggaggcagacaggcctgaggtagaatttctatttctctgtgaccttgggcaatttaacttctctgagtttcagttacccygtttgtaaaaatggtaatactgtaataataaatgctatgacaagtttaaaacccctcgtaaaccataattaatatttatcggccgggcgcggtggctcat

SEQ ID NO: 247627 - DNA, 201 bp, Homo sapiens
ccgcagtgtttgtgtccctgggtacttgagattagggagtggtgatgactcttaaggagcatgctgccttcaagcttctgtttaacaaagcacatcttgcmccgcccttaatccatttaaccctgagtggacacagcacatgtttcagagagcacggggttgggggtaaggctatagaccaacagcatcccaaggcagaag

SEQ ID NO: 247628 - DNA, 201 bp, Homo sapiens
taagaagcagcaagttaatttattatttattacagagaaacttatttacaaaagacagagtcagggcccctttatgccatgtgggttggagtgctttaggragcatttggagccccctcacctctagctgccttctctctgtggctgcagatgacgagagtgactcagatgccgaggaggagcagactacggtgagaacca

SEQ ID NO: 247629 - DNA, 201 bp, Homo sapiens
aaagaaaactccgaatccagccaatcagtatcagtttgataaagttgggtgagtcagcagtttcctcctctccgagctctctacttctgagtttctctggkggctcaagctaaatgctggagacctgttagggccagaggtgacccagaggataggaaagaccacagggtagaaggaaatgtttgttctttcttgcttaca

SEQ ID NO: 247630 - DNA, 201 bp, Homo sapiens
gggacattcctgtcgcagcatctggggcctcctcctgcccactcaaaggccagcatgtgtgggtggggccaggggaggttgttggcttgcttgagccccctgtgtgacctctgccttctctctccgcagtccccctggtgcgacacatggagtctaggatcatgatccccttgaagatctcgcctctgcagtgatgctgcc

SEQ ID NO: 247631 - DNA, 201 bp, Homo sapiens
tgggacattcctgtcgcagcatctggggcctcctcctgcccactcaaaggccagcatgtgtgggtggggccaggggaggttgttggcttgcttgagccccctgtgtgacctctgccttctctctccgcagtccccctggtgcgacacatggagtctaggatcatgatccccttgaagatctcgcctctgcagtgatgctgc

SEQ ID NO: 247632 - DNA, 201 bp, Homo sapiens
tcagaactggggggtagccttgactgatgtacctgtaagaagaataaatgttgtgtgatctcctgaaccagctcctcttcagcattctcaggataaaattwggccaagaagtgaaaggtgactggttcttcctttgaaacatcatgatccagtacctgcagaattgcagagcaaaagacaaacacactatattggcacttc

SEQ ID NO: 247633 - DNA, 201 bp, Homo sapiens
tcatctgtcttgttctcttttagaacatggcattgtgccagttaccagtgattgccagtacctcttccctgccaaggttgtctctcgcctggtgaaatggrtgacagttgcccatgaggattacatggtaggtgaaggagtgacaagttacccttactgtcctgaggattgcaggaccatgtcacctttcagctcctgcca

SEQ ID NO: 247634 - DNA, 201 bp, Homo sapiens
ggtcaggctagtctcgaactcctgacctcaggtgatccgcctgtcttggcctctctaagtgctgggattataggcacaagccaccatgcctggccaacagrtaactattaaaatttaagaaaatgttattctcatcaccaccaaactcctgtcttatcccataatttgagggatctggtgctcttcatgggcccttccacg

SEQ ID NO: 247635 - DNA, 201 bp, Homo sapiens
agtgtttttcttttctttttttttgagacggagttttgctcttgttgcccaggctggagtgcaatggcctgatctcggctcacagcaacctctgactcccrggttcaagcgattctcctgcctcagcctcccgagtagctaggattacaagcatgtgccactacgcccggctaattttgtatttttagtagagagagggtt

SEQ ID NO: 247636 - DNA, 201 bp, Homo sapiens
tcgctatgttggccagactggcctcgaactcctggcctcaagcagtccaccagcctcggcctcccaaagtgctgggattataggcatgagccaccgcaccyagccggaagtgttacactaaaaatgctgacacaccaaagtagagatgtcaagtaggcagtagatggatataggagtctggagcccttgggagtgtttgcg

SEQ ID NO: 247637 - DNA, 201 bp, Homo sapiens
ttttctttgagacacagtcttgctctgtcacctaggctggagtgcagtagtgtgatctcagctcactgcaacctccgcttcccgagttcaagtgattctcrtgcctcacgctcctgagtagctgggattacaggcatgcagtaccatgcccaactaatttttctatttttagtacagagtttcgctatgttggccagactg

SEQ ID NO: 247638 - DNA, 201 bp, Homo sapiens
ccgggaggtggaggttgcagtgagctgagatcacgccattgcactccagcctggcaacagagcgagactccgtctcaaaaaaaaagaagaaaaaaaaaaaaggcagggagagatgatggtgaaaaacataggggatctacattggtctaggtagacaaataatgcctctctgagggagtaaaatgtaagctgagagctaaa

SEQ ID NO: 247639 - DNA, 201 bp, Homo sapiens
ccccgccgcgctaccaggttctttcgtgttatcttggacataacacaacattaattcaactactcggtggagcgcccactagctgctggacactctcttakgccctgggcacagtgaacgagaagcatgtgtctttgtttttacagtctcaccacgccaccacctccctcgggggcctccgcgctgagcttccggcctcta

SEQ ID NO: 247640 - DNA, 201 bp, Homo sapiens
caagctggtctcgaactcctgacctcaggtgatccgcctgcctcggcctcccaaagtgctgtgattacaggcatgagccaccacatctggcccacaaactsatttatgaaaagtgctttctccagtgtctgtcacaaaggaagcatgcaggaaatgtttttgaataaggtttttgtttttgtagagatgcagtcttactat

SEQ ID NO: 247641 - DNA, 201 bp, Homo sapiens
agcaggcctaggtgagtactctaggggatgataacatagccagggccacgcctctgcctaggagatgtggattagcaaacgcccattgtgaccttgggcayggttctttacctcgctgaggctgttccctcgtctgtaagatagtgatggtgatagtgcttctgtcagagggctataacggaagattctacaaactatttt

SEQ ID NO: 247642 - DNA, 201 bp, Homo sapiens
cacatgcaaaggccctgtggtggggaaaggccttcggggttttgaggtgtggcaaggaggccagtgtggagtgagtagggaagaatgtggggagatggaayaggagagggggaatgagttgggatttattgtaaatgcaatgagagactatttgtttcaaatagcagtgacacgacctgatttttgttctagtatgatttc

SEQ ID NO: 247643 - DNA, 201 bp, Homo sapiens
aaaaaggcagggagagatgatggtgaaaaacataggggatctacattggtctaggtagacaaataatgcctctctgagggagtaaaatgtaagctgagagstaaaggatgagaaggagccagctgtgaattgctaggcaaaagcattccaagtagacagagcagcacatgcaaaggccctgtggtggggaaaggccttcgg

SEQ ID NO: 247644 - DNA, 201 bp, Homo sapiens
aaactattgaaacaagaagactaaaacaggcaaggtggagggaaaagctataagcaacataactcactaagagaaagtttatatgaagttttcaaagctcrgtccaaatttggcaaagaagcaaaaaagagaacagtggcaaaagagttggaagagaaaaggctgtctttaaaaatgatgcagtctggcaccacctagtgg

SEQ ID NO: 247645 - DNA, 201 bp, Homo sapiens
agatcgagaccatcctggccaacatggtgaaaccctgtctctactaaaaatacaaaaattagctgggcgtggtagcaagcacctgtagtcccagctactcrggaggctgaggcaagagaatcgcttgaacccaggaggcagagattgccatgagctgagatggcgccactgtactccagcctggtgacagagttagactcc

SEQ ID NO: 247646 - DNA, 201 bp, Homo sapiens
tggttggttgacgatgttgatgataatcatgataactagatgaggcttctgagcagaacagtcttccaattaatgattgcaatgaagcaagaatttatgamactcgttattaaaaatgtaattgcataattaggccttaaggtatatattttacccctttggtgaaacatactgatttcctctctctaaaaataccttggc

SEQ ID NO: 247647 - DNA, 201 bp, Homo sapiens
ccatttatttgtaactagacctttctaagatctatccctttgtctccctgctgtccatgtcccccaatgccacatacatgaatcagtatgggctttacacrtattgaaaaatgaggtacttgtctttccccaagttttctgtctttcctccagttctgcagatcacaaactccttgaaggcaagggtgtacacacacacac

SEQ ID NO: 247648 - DNA, 201 bp, Homo sapiens
ctttgccctttgataaaaggctagtattcctttaaataagactggttttactacaagtttttttttaatataaagaaatcataatcaaagtcataaatcayggagaaaaagaaccatgagagaccagacagtccaatcacaggtctgtcctgtcaaggatgcctaactgaggccaaaggggaagctactcacccagtcacc

SEQ ID NO: 247649 - DNA, 201 bp, Homo sapiens
agccagaagcaatcaggctggtaacaatgggtaaagaagccagggccagcagcagtctaatcctggtaacttctgcttgcccaggagagcctgtgaggagwaggaaactggtagcatctctacgtcctgctttctgcatgacttaattcaggaatgtgcccccttctctactatacagctacagcgccccagtgatgagct

SEQ ID NO: 247650 - DNA, 201 bp, Homo sapiens
catcatgatccagtacctgcagaattgcagagcaaaagacaaacacactatattggcacttcctcctgtgctaccctcaaagaagcctttgcaaggcgtgmattaaatttttttcccactaaatttatcacatttcctgaaagttgtgattttacagtttgaagtattcacaaagtcacctatagcaagaggtaatattca

SEQ ID NO: 247651 - DNA, 201 bp, Homo sapiens
ctactgtgtacttaatgaggcttgcctttaaggggcttacaatctaatgaggaattaaggaagaaataggacaattagagacacagcatagcatgaagcaygatgtctgaagtaccacatatgggggacaaaccaagtgtcactagagctctgaagtcctctttttttttttttttttttttttttaagacagagtctcac

SEQ ID NO: 247652 - DNA, 201 bp, Homo sapiens
tccctgatcccagcagggagacttttaccccatgcacacagagcctttatccttacctctacaggaaggtaaatactacagtgaggaggccgaggtggatstgcgggaccctggcagagactatgagttatacaagtacacctgccaggagctacagaggctgatggctgagatccaagacctgaagagcaggggtggcaa

SEQ ID NO: 247653 - DNA, 201 bp, Homo sapiens
cacaggcctccattctgtgtcccaggggcatctactgtcaatctctttttttttgagacggagtttcgctcttgttgcccaggttggagtgcgatggcacratcttggctcaccgccacctctgcctcccaggttcaagtgattctcctgcctcagcctcccaagtagctgggattacaggcatgcgccaccacacctggc

SEQ ID NO: 247654 - DNA, 201 bp, Homo sapiens
ttcaaatgctcactcatacacacacaggctcatgcagaaagtacttttggacagtactggtttagagtgtctgcatagcacagccataacagatggtcctytaaacttcccttgaacactcctagccatgaagagttcacttgtaagccaatctatttcatcctttgacagccctgataatcgtgtctttgaaaataatct

SEQ ID NO: 247655 - DNA, 201 bp, Homo sapiens
ggtgcccgccaccacgcctggctaattttttgtatttttagtagagacggggtttcactgtgttagccaggatggtctcgatctcctgacctcgtgatccwccttcctcagcctcccaaagtgctgggattacaggcgtgagccaccgtgcccggcccaggatttttataaattctaacagtacaaagagttttccatgca

SEQ ID NO: 247656 - DNA, 201 bp, Homo sapiens
ctacctcctgggttcaagcgattctcctgcctcagcctcccgagtaactgggattataggcatgtgccaccacacccaactaattttttttttttttttttaagatggagtctcgctctgttgtccaggctggagtgcagtggcatgatctcggctcactgcaagctctgcctcctgggttcatgccattctcctgcttca

SEQ ID NO: 247657 - DNA, 201 bp, Homo sapiens
tgaggccaggagtttgaaaccagcctgggcaacatagtgagactttgcttctataaagaaaatacatattaaaaaaaaaaagaagaaaagattttaaaaaagaaaaaattcagtttcttagtcatactagctacatttcaaatgctcactcatacacacacaggctcatgcagaaagtacttttggacagtactggtttag

SEQ ID NO: 247658 - DNA, 201 bp, Homo sapiens
gctgaggtgggaggaacacttgaggccaggagtttgaaaccagcctgggcaacatagtgagactttgcttctataaagaaaatacatattaaaaaaaaaaagaagaaaagattttaaaaaagaaaaaattcagtttcttagtcatactagctacatttcaaatgctcactcatacacacacaggctcatgcagaaagtact

SEQ ID NO: 247659 - DNA, 201 bp, Homo sapiens
atgttggtcaggctggtctcgaacttctgacctcaggtgatccacctgcctcggcctcccaaagtgctgggattacaggagtgagccaccactcccggcctttttttttttttttttttttttgagacagggtcttgctctgtcacacaggctggagtgcagtggcataatcttggctcactcgagcctcaatttcccagg

SEQ ID NO: 247660 - DNA, 201 bp, Homo sapiens
cccgggaggccgaggttgcagtgagccgagatcgcaccactgcactccagcctgagcaacaagagcaagactctgtctcaaaaaaaaagaaaagaaaaaaagaaaagaaaggatagggcttcctgtgacctcacttggaaaaaacaaaagagaaaaaagaaaaaagggataaggcttgctgccactcagggatccctcttg

SEQ ID NO: 247661 - DNA, 201 bp, Homo sapiens
gcaatttttttatttattgcagagacagggcttcagactcctgagctcaagtgatccgcctgcctcggcctcccagagtgctggaattataggcgtgagcyaccatgcccggcccatttctcatttttatgcttatacaaacatatcaccactttggcccagcgcagtggctcatgcttgtaatcctagcactttgagagg

SEQ ID NO: 247662 - DNA, 201 bp, Homo sapiens
atcttcccacctcagcctcctgagtagctgggactacaggcgcacttgacactcgaccacacctggctaattttttttttttttgagacagagtttcactyttgttgcccaggctggagtgcaatggcctgatctcggcttactacaacctccacctcctgggttcaagcaattctcctgccccagcctcctgagtagctg

SEQ ID NO: 247663 - DNA, 201 bp, Homo sapiens
ctttttttgttttgttttgttttgttttgttttttgagacagggtctgctctgttgcccaggctggagtgcagtggcccgatctcagcttgctgcaacctmcgcctcctgggttcaagcgatcttcccacctcagcctcctgagtagctgggactacaggcgcacttgacactcgaccacacctggctaattttttttttt

SEQ ID NO: 247664 - DNA, 201 bp, Homo sapiens
ccagaaagaaaaacattttttggtaaagaaatgggaactcactctcacccaagctggagtgctgctgtgacacgatcatagctaattgtggctctgagttyctagggtcaagagatccttgcacctcagcctcccaattagcgggggctaaaggcaccaccatgccatgctaatttttaaaaaattttttgtagagacaag

SEQ ID NO: 247665 - DNA, 201 bp, Homo sapiens
aaaaaaaggcagggagagatgatggtgaaaaacataggggatctacattggtctaggtagacaaataatgcctctctgagggagtaaaatgtaagctgagrgctaaaggatgagaaggagccagctgtgaattgctaggcaaaagcattccaagtagacagagcagcacatgcaaaggccctgtggtggggaaaggccttc

SEQ ID NO: 247666 - DNA, 201 bp, Homo sapiens
cacctgccccaccaaggcccctggtgggccaccttttccagggccatatcacagggaactctttaccttctgcccctcatggatctgggagaaggatccarccaggaggtgaggatctcctagaaggttgtgacccctccgttggtagaacaccccgccatcagtcctttctctcagcatcccggaggaccgtgggttcca

SEQ ID NO: 247667 - DNA, 201 bp, Homo sapiens
tcctggtagccatgcctttaccaccatgcccacaggagtacctggagttccgaagggagcggagccagatgctgctgtccaggagaaaccagctgctcctygagttcagcttctggaatgagccacagcccagaatgggtcccaacatctatgagctgaggacatacaagctcaaggtgcctccctccgacagaccccctc

SEQ ID NO: 247668 - DNA, 201 bp, Homo sapiens
  misc_feature (1)...(201): n = A,T,C or G
gcatggtcttccaccaaggcagagggaactcagggagtcttgctgctacagggaaccaggccaccccgcctcccccgtccccaccacttagccaaccttgnggaggtcatctgctgggggtcccagcagctcactgacctatacctctcacccccaacagtgcacctgtggcgattctcaggtggctacccagccctcatg

SEQ ID NO: 247669 - DNA, 201 bp, Homo sapiens
  misc_feature (1)...(201): n = A,T,C or G
cctagacttgtgtctagggtcatcccctccccagcatggtcttccaccaaggcagagggaactcagggagtcttgctgctacagggaaccaggccaccccncctcccccgtccccaccacttagccaaccttggggaggtcatctgctgggggtcccagcagctcactgacctatacctctcacccccaacagtgcacctg

SEQ ID NO: 247670 - DNA, 201 bp, Homo sapiens
gagtctcaccctgccacccaggctggagtacactggcacaatcttgactcactgcaacctctacctcctgggttcaagcgattctcctgcctcagcctccygagtaactgggattataggcatgtgccaccacacccaactaattttttttttttttttttaagatggagtctcgctctgttgtccaggctggagtgcagt

SEQ ID NO: 247671 - DNA, 201 bp, Homo sapiens
actcagtgcagataatatgatttttatttatttttatttttatttatttattttttgagacggagtcttgctcttttgcccaggctggagtgcagtggtgygatctcagctcaccacaacctttgcatcccaggttgaagcgattctcttgcctcagcctcctgagtagctaggattacagatgtgcatcaccacgcccag

SEQ ID NO: 247672 - DNA, 201 bp, Homo sapiens
tttgaggggacattgttcaactcagtgcagataatatgatttttatttatttttatttttatttatttattttttgagacggagtcttgctcttttgcccrggctggagtgcagtggtgcgatctcagctcaccacaacctttgcatcccaggttgaagcgattctcttgcctcagcctcctgagtagctaggattacaga

SEQ ID NO: 247673 - DNA, 201 bp, Homo sapiens
ggtatgacggctatgcataaaaaccccttatctcttctcttcatgatcaatgctgaagagtaaaaacggtctctgtagttacaacagaggctgtgtgacasagcgctatgaactcaagaagtgtcaagagcagctctggggatgactacagcctcagcccctttgaatatgcatggccccagaggaaatggatctactttt

SEQ ID NO: 247674 - DNA, 201 bp, Homo sapiens
caggtctcctctatggagagtgtggagcaggatgtgggtggaggcagggcagggagaggttgaagtagatgattccgaggtcagtgggagtgggtggtgaygcctttttaaaagagaaggtggagtttgttttggacaggctgagagatgcttccctgttgtattacagagggttaaattgaggctttgaggggttaaatg

SEQ ID NO: 247675 - DNA, 201 bp, Homo sapiens
gccaggagcacagaagcctcaggagggcagtagatcttttcatctaaaatctgcttctttacctgaaaggagcaacaagggagacatgatactctgtgagkggaagtgaggtgtgtaggctgatcacaacagatggcctcacggcgttctaatgagggctgccagagcagcctgttaataattttctgacaaagggtacaa

SEQ ID NO: 247676 - DNA, 201 bp, Homo sapiens
acactgaccctctgctgcacatcccggacagccttgttaagaacccttggtaggctgggcatggtggctcacgcctgtaatcccagcactttgggagcackaggcaggcagatcacgaggtcaggagatcgagaccatcctggctaacacggtgaaaccccgtttctactaaaaatacaaaaaattagctgggcgtggtgg

SEQ ID NO: 247677 - DNA, 201 bp, Homo sapiens
tttaatcaaagtgccaatgactgcttcatcactgtcggggtgatactgattgaaaggacacatttttcctcttactaatattcttgatcaaagcataaaakgaagcatatgttttagttgaatgagggcccattttctgttttctcaattactaatttttcaggaaagtagaatattggaggcacaaaatgcaatctcaaa

SEQ ID NO: 247678 - DNA, 201 bp, Homo sapiens
cggacagccttgttaagaacccttggtaggctgggcatggtggctcacgcctgtaatcccagcactttgggagcacgaggcaggcagatcacgaggtcagragatcgagaccatcctggctaacacggtgaaaccccgtttctactaaaaatacaaaaaattagctgggcgtggtggcagacgcctgtagttccagctact

SEQ ID NO: 247679 - DNA, 201 bp, Homo sapiens
atgaaaaaaagggatatgcagagtatagcaccatctaatcaactttttatctcctggatatttttaaatcagtcagcccccatccaaccaaccacctgaartgtgaacctaatattctctcaccagggcaactatcacagccttctaataggtctccctgtttccaaagttgtctcactccaatctgtccatcacacagcc

SEQ ID NO: 247680 - DNA, 201 bp, Homo sapiens
ggatacatctcaaagtagatgctgagtgggaagaaaaataccattctgtaaaaggatatgaaaaaaagggatatgcagagtatagcaccatctaatcaacyttttatctcctggatatttttaaatcagtcagcccccatccaaccaaccacctgaagtgtgaacctaatattctctcaccagggcaactatcacagcctt

SEQ ID NO: 247681 - DNA, 201 bp, Homo sapiens
gtgggtgttaattaagccctcactgtgtgccgggaactgtggtaggtaggtggttgaggggcacataaatgaacaagagcctgtccttgccattgagaagyttacagtgatcacttaccaggtggtatgagggagaatgtgtctgctgaaggagttagcaggagccttgctattcagtgtggtcccagctgggtatggtgg

SEQ ID NO: 247682 - DNA, 201 bp, Homo sapiens
tctttcccaggtaagcagtattaacagtttgggacaagtaatttattttcttttctttttctttctttctttttctttcttttcttttttttttttttttktgaagatggagtctcactctgtcatccaggctggcgtgcagtggcgtgatcttggctcactgcagcctccgcctcctggattcaagcagttctgcctcag

SEQ ID NO: 247683 - DNA, 201 bp, Homo sapiens
catctcctattcctctttcccaggtaagcagtattaacagtttgggacaagtaatttattttcttttctttttctttctttctttttctttcttttctttyttttttttttttgtgaagatggagtctcactctgtcatccaggctggcgtgcagtggcgtgatcttggctcactgcagcctccgcctcctggattcaagc

SEQ ID NO: 247684 - DNA, 201 bp, Homo sapiens
cgcggggctcaggcccgggaccctcgcgccccacggcctgcactctgagccctttagcccccctggagttgctgcacaggcctcagggccaccatggtggscggctggccggcccgggaacggtctgggctgcgcgggtccccagcggccagcatgggccgcgaggaccctgcctgagcggaaaggggagttgggggacgg

SEQ ID NO: 247685 - DNA, 201 bp, Homo sapiens
aaatttagccatctcctattcctctttcccaggtaagcagtattaacagtttgggacaagtaatttattttcttttctttttctttctttctttttctttyttttcttttttttttttttttgtgaagatggagtctcactctgtcatccaggctggcgtgcagtggcgtgatcttggctcactgcagcctccgcctcctg

SEQ ID NO: 247686 - DNA, 201 bp, Homo sapiens
agaaaaatttagccatctcctattcctctttcccaggtaagcagtattaacagtttgggacaagtaatttattttcttttctttttctttctttctttttytttcttttcttttttttttttttttgtgaagatggagtctcactctgtcatccaggctggcgtgcagtggcgtgatcttggctcactgcagcctccgcct

SEQ ID NO: 247687 - DNA, 201 bp, Homo sapiens
cagtgatgagctaggcgcctgctcagggaaaaactggaaagctcacgtcagccccaccagtttcatcgagttctagcccaaccttcttgtccattttgagycaggccactgtgtccttgattgtgtactgcagtccaaagaaccaggtttctcggagccccagagtccggcacaccaaatcaaagaggtccttccctttcc

SEQ ID NO: 247688 - DNA, 201 bp, Homo sapiens
caatggcacgatctcagctcactgcaacctccgcctcccgggttcaagtgattctcctgcctcagcctcccgagtagctgggattacaggattgcaccacyatgcccagctaatttttgtatttttagtagagactgagtttcaccatgttggccaggctagcctcaaactcctgacctcaggcaatccgcccgcctcggc

SEQ ID NO: 247689 - DNA, 201 bp, Homo sapiens
gccttgagtttttcctctataaaatggaaatgataatcctccctcatagggttgtaaggatgcaatgacctcaagcatataaacggtctggcccacagaargccttcaataaatggtggcattggtcatcagtgagacgtggcattaccatccccaaatgcccaagcctatgttgaagaaagatgttggctgcattctcac

SEQ ID NO: 247690 - DNA, 201 bp, Homo sapiens
gcactttgggaggctgaggcaggaggatcacctgaggtcaagagttcgagaccagcctggctaacatggtgaaaacccatctctactaaaaataaaaaatkagctggatgtggtggcacatgcctgtagtcccagctacttgagaggctgaggctggagaattgcttgaacctgggaggcggaggttgcagtgagcccaga

SEQ ID NO: 247691 - DNA, 201 bp, Homo sapiens
ctcccagcttggcattcgaaagtgctggggttacaggtatgagtcacccagctcacctcgcccgaccaagaaaaacaactgttggggctgagcgcagtggytcactcctgtaatcccagtattttgagaggcggaggcgggtggatcaccagatcgggagtttgagagcagcctgaccaacatggtgagaacctgtgtctt

SEQ ID NO: 247692 - DNA, 201 bp, Homo sapiens
aataataatagtatttatcttgcaggactcttacagggatttaattaaataagaccagcaaagtttttaaaactatgcttggctgggcgtggtggctcacrcctgtaatcccagcacttttgggaggcctaggcgggcagatcacctgaagttgagagtttgagagcagcctgaccaaatggagaaacccgtctctactaa

SEQ ID NO: 247693 - DNA, 201 bp, Homo sapiens
aaaaattagccgggtgtggtagcacgcacctgtagtcccagctactcaggaggctgaggcaagagaatcgcttgaacccaggaggtggaggttgcagtgasctgagattacgccactgcactccagcctgggcaacagagtgaaactccatctcaaaaaaatacaaaaaaaaaaaaaggccaagtgtggtagctcatgtct

SEQ ID NO: 247694 - DNA, 201 bp, Homo sapiens
ttatcaacttaagattttttttatattggggttcacctcttctgtcaattctatgcaattcttcttctagacacctaccttttttaatttttttactttayttatttatttatttatttatttattttgagatggagtctcactctgtcgtccaggctggagtgcagtggtgtgatcttggctctctgcaacttctgcctc

SEQ ID NO: 247695 - DNA, 201 bp, Homo sapiens
gttcgagaccagcctgaccaacatggtgaaaccccgtctctactaaaacatacaaaaattagccgggtgtggtagcacgcacctgtagtcccagctactcrggaggctgaggcaagagaatcgcttgaacccaggaggtggaggttgcagtgagctgagattacgccactgcactccagcctgggcaacagagtgaaactc

SEQ ID NO: 247696 - DNA, 201 bp, Homo sapiens
tcgatattaagttaaagggtgtgcccatctattctccctattctctcactacctacctgtccctgtcctattctgcctctttcagaatagatagtggctgsactaagcctttaagcatgctatgtatcctgtctgagcctctgtttccccacttaaagatgaagtcagttacagaacctaggtccaaagtagtccttgatc

SEQ ID NO: 247697 - DNA, 201 bp, Homo sapiens
gaaaagattttaaaaaagaaaaaattcagtttcttagtcatactagctacatttcaaatgctcactcatacacacacaggctcatgcagaaagtacttttrgacagtactggtttagagtgtctgcatagcacagccataacagatggtcctctaaacttcccttgaacactcctagccatgaagagttcacttgtaagcc

SEQ ID NO: 247698 - DNA, 201 bp, Homo sapiens
aaagaaaatacatattaaaaaaaaaaagaagaaaagattttaaaaaagaaaaaattcagtttcttagtcatactagctacatttcaaatgctcactcatayacacacaggctcatgcagaaagtacttttggacagtactggtttagagtgtctgcatagcacagccataacagatggtcctctaaacttcccttgaacac

SEQ ID NO: 247699 - DNA, 201 bp, Homo sapiens
ggagtgcagtagtgcaatctcggctcactgcaacctccgcctccccagtttaagcaattctcttgtctcagcctcctgagtagctgggattacaggcatgygccaccacgcccagctaattttgtatttttagtagagacgggatttcaccatgttggtcaggctggtcttgaactcctgatctcaggtgatccacctgcc

SEQ ID NO: 247700 - DNA, 201 bp, Homo sapiens
aaaatctttataaaaaattacaatgaataaagaaaaatttagccatctcctattcctctttcccaggtaagcagtattaacagtttgggacaagtaatttmttttcttttctttttctttctttctttttctttcttttcttttttttttttttttgtgaagatggagtctcactctgtcatccaggctggcgtgcagtgg

SEQ ID NO: 247701 - DNA, 201 bp, Homo sapiens
ctcaggcccgggaccctcgcgccccacggcctgcactctgagccctttagcccccctggagttgctgcacaggcctcagggccaccatggtggccggctgsccggcccgggaacggtctgggctgcgcgggtccccagcggccagcatgggccgcgaggaccctgcctgagcggaaaggggagttgggggacgggccctga

SEQ ID NO: 247702 - DNA, 201 bp, Homo sapiens
gactgtcaccgcagcagtcggggctgccggccggttacctcgcaattgaactccatctcggcgtccatggtgacgatcctcacggtgaacgtcttgggttrcttcctcttgagagagctgaagctcatgcgggaagcgatggccccggccatggcgcggggctcaggcccgggaccctcgcgccccacggcctgcactctg

SEQ ID NO: 247703 - DNA, 201 bp, Homo sapiens
cctgggaggtggaagttgcagtgagccgagatcgtgccattgcactccagcctgggcaacagagtaagactccatctcaaacaacaacaaaaattagccaracgtggtggtgctcacctgtggtctcagctacttgggaggctgaagtgggaggatcatttgagtctgggagatagaggatgcagtgagccatgattgtgt

SEQ ID NO: 247704 - DNA, 201 bp, Homo sapiens
ggcctcccaaagtgctgggattacaggcatgagccactacgcctggagacttgtcaatttctacaatgaaataaactgggattctgacagggattatgtcraacgtgtagatcaatttccaaaatactgccaatttgacaacgttatgtcttatgatccatgaacaagagctattttctatttatttatttatttatatct

SEQ ID NO: 247705 - DNA, 201 bp, Homo sapiens
aaggacccctgatccctgagtgaagtcactctgggtcaaggtctacctttttttttttttttgagacggagtctcattctgtcagccaggctggagtgcastggcgcgatttcggctcactgcaacctctgccctctgagttcaagcgattctcctgcctcagcctcccaagtagctgggattacaggcgcctgccaccgc

SEQ ID NO: 247706 - DNA, 201 bp, Homo sapiens
tttttgtatttatgaccattcttgttttctcttctataaagtgcatgtttcatgccctgtttatagcatttgtctttttatcaacttaagattttttttayattggggttcacctcttctgtcaattctatgcaattcttcttctagacacctaccttttttaatttttttactttatttatttatttatttatttattta

SEQ ID NO: 247707 - DNA, 201 bp, Homo sapiens
gctggacatatgggtttgaatcccagaagggaggtcagggccaggaataaaaatcgatgtgatagaatattatgctggtattaaaagtgccattcacaggytggacacagtggcttacacctgtaatcacagcactttggaagaccaaggttggaggatcacatgaggccaggagttcgagaccatcctgggcagcatagt

SEQ ID NO: 247708 - DNA, 201 bp, Homo sapiens
ctgtctctacaaaaaacacaaaaattagcagggcatacgctgaggctgaggtgggaggatcccttgagcctgggaggcagaagttgtagtgggtggagatygtgccacctgggtgacagagagagactgctgtctcaaaaagaaaaagaaaatgaagtgggtctatctgttgtgacagttttaagtgaaaaggatgtgtgt

SEQ ID NO: 247709 - DNA, 201 bp, Homo sapiens
cacgtcagccccaccagtttcatcgagttctagcccaaccttcttgtccattttgagccaggccactgtgtccttgattgtgtactgcagtccaaagaacyaggtttctcggagccccagagtccggcacaccaaatcaaagaggtccttccctttccacttcatctgcaataacaaaccaatggggaaggacactgtgag

SEQ ID NO: 247710 - DNA, 201 bp, Homo sapiens
agatatgcaaagttaaagctgtaaattcaggttccaaaggcatgcaagattaacaacccccattattataccaagttctcagctagtccactgatcaaatrcatcacatttgagcaatgcagaggtggcaaagaccctgctgaaagaacttctccactggactaactctgcttccaacattaaagccaccttgatgtatgt

SEQ ID NO: 247711 - DNA, 201 bp, Homo sapiens
aaagctcacgtcagccccaccagtttcatcgagttctagcccaaccttcttgtccattttgagccaggccactgtgtccttgattgtgtactgcagtccaragaaccaggtttctcggagccccagagtccggcacaccaaatcaaagaggtccttccctttccacttcatctgcaataacaaaccaatggggaaggacac

SEQ ID NO: 247712 - DNA, 201 bp, Homo sapiens
aaccactcctgggcaagttctctcagaactggggggtagccttgactgatgtacctgtaagaagaataaatgttgtgtgatctcctgaaccagctcctctycagcattctcaggataaaatttggccaagaagtgaaaggtgactggttcttcctttgaaacatcatgatccagtacctgcagaattgcagagcaaaagac

SEQ ID NO: 247713 - DNA, 201 bp, Homo sapiens
aaatgtgggcatgttttctaaccctcaaagaaagcagtcacttccaaaacagtagcttttgaattaaaacaccaaatcacaactgtgaaagttgtgattarcaacatatgataagagtcttacctataaattcttataagtgactggtaattggagcccattactagggggatccaggaataatgcaggcagtagttttaa

SEQ ID NO: 247714 - DNA, 201 bp, Homo sapiens
agcgccccagtgatgagctaggcgcctgctcagggaaaaactggaaagctcacgtcagccccaccagtttcatcgagttctagcccaaccttcttgtccaytttgagccaggccactgtgtccttgattgtgtactgcagtccaaagaaccaggtttctcggagccccagagtccggcacaccaaatcaaagaggtccttc

SEQ ID NO: 247715 - DNA, 201 bp, Homo sapiens
tgaatcagtatgggctttacacatattgaaaaatgaggtacttgtctttccccaagttttctgtctttcctccagttctgcagatcacaaactccttgaargcaagggtgtacacacacacacacacacacacacacacacacacacacacacacagattaagtctcccagaaccctggcaagtgctgcataatctgtgga

SEQ ID NO: 247716 - DNA, 201 bp, Homo sapiens
acataataagccaaaaagtatagtgtttttttttgtttttaatttttagtagagatgaggtcttgctatgtttcccaggctggtctcaaactcctgggttyggccgggcatggtggatcatgcctgtaatcccatcactttgggaggccaagtcaggcagatcacttgaggtcaggagttcgagaccagcctgaccaacat

SEQ ID NO: 247717 - DNA, 201 bp, Homo sapiens
cagtatgggctttacacatattgaaaaatgaggtacttgtctttccccaagttttctgtctttcctccagttctgcagatcacaaactccttgaaggcaarggtgtacacacacacacacacacacacacacacacacacacacacacacagattaagtctcccagaaccctggcaagtgctgcataatctgtggatactc

SEQ ID NO: 247718 - DNA, 201 bp, Homo sapiens
ttgaacccggggggcggaggttgcagtgagctgagatcgtaccattgcactccagcctggggaacaagagcgagacttcgtctcaagaaaaaaaaaaaaaattagccaggcatggtgacacatgtctatagtcccaactactccggaggctgaggcaggagaatcccttgaacctgggaggtggaagttgcagtgagccga

SEQ ID NO: 247719 - DNA, 201 bp, Homo sapiens
ccctgtctctactaaaaatacaaaaattagttgggcgtggtggcagatgcctgtaatcccagctacttgggagactgagacaggagaatcacttgaacccrgggggcggaggttgcagtgagctgagatcgtaccattgcactccagcctggggaacaagagcgagacttcgtctcaagaaaaaaaaaaaaaattagccag

SEQ ID NO: 247720 - DNA, 201 bp, Homo sapiens
aacaaaacaaaacaaaacaaaacaaaaaaacatgccgggtgcgttggctcacacctgtaatcccagcactttgggaggccgaggcgggcagatcacctgargtcaggagttcgacctggccaacgtggtgaaaccctgtctctactaaaaatacaaaaattagttgggcgtggtggcagatgcctgtaatcccagctactt

SEQ ID NO: 247721 - DNA, 201 bp, Homo sapiens
ctcaaaaaaaaaaaaaaaaaaaaattaggcatggtggtgtgttcctgtattcccagctattctggaggctgaggcaggagaatcgcttgaactggggagcyggaggttgcagtgagccaagatcgcgccactgcactccagcctgggcaacagagggagactccgtatcaaaaaaacaaaacaaaacaaaacaaaacaaaa

SEQ ID NO: 247722 - DNA, 201 bp, Homo sapiens
  misc_feature (1)...(201): n = A,T,C or G
ggaggcggagcttgcagtgggccgagatcgcgccactgcgctccagcctgggcgacagagcgagactccgtctcaaaaaaaaaaaaaaaaaaaaaaagaanccttggtattattgttccacgctcccattttaccgaggtggatcctgaggcccagagtgggcaaagggcttgccaaggtcgcagagcgcgcagaggatta

SEQ ID NO: 247723 - DNA, 201 bp, Homo sapiens
cccaggaggcggagcttgcagtgggccgagatcgcgccactgcgctccagcctgggcgacagagcgagactccgtctcaaaaaaaaaaaaaaaaaaaaaaagaacccttggtattattgttccacgctcccattttaccgaggtggatcctgaggcccagagtgggcaaagggcttgccaaggtcgcagagcgcgcagagg

SEQ ID NO: 247724 - DNA, 201 bp, Homo sapiens
ttctaaacctccccagttgctcctagggataacatcactactgtaaaacctaagattggtgctcaagatatttttccgatcctgcactcaatggatccgcwggcgatacacagattaagaaaccggatcatccggttttgtggcccccacccagagatccactcagcacaagaggacggcttccactccctatgattgcat

SEQ ID NO: 247725 - DNA, 201 bp, Homo sapiens
tccatcaacccacctgggtttttcctgagtggctttgactggggactctgctaagatcatactgactttgatttttttttttttttcgagatggaatctcyatcacccaggctggagtgcagtggcgcgatcttggctcactgcaacctctgcctcctgggtttaagccatgttcctgactcagtctccggagtagctggg

SEQ ID NO: 247726 - DNA, 201 bp, Homo sapiens
gtgatcctcctgcctcagcttcccaaagtgctgggattataggtgtgagctactgtgctcagccacatttttactggtggaattttttttttttttttttktttggagacagggtctgactctgtcacccaggctggagtgcagtgatatgatattggcttactgcaacctccgcctcctggattcaagccatcctcccac

SEQ ID NO: 247727 - DNA, 201 bp, Homo sapiens
accagctgctcctcgagttcagcttctggaatgagccacagcccagaatgggtcccaacatctatgagctgaggacatacaagctcaaggtgcctccctcygacagaccccctcctgccccccaatttccctgctgcaatgctgctttgcagctgccccaacacctagactggggcttctggcttctccctccctatgggc

SEQ ID NO: 247728 - DNA, 201 bp, Homo sapiens
ccaccagtttcatcgagttctagcccaaccttcttgtccattttgagccaggccactgtgtccttgattgtgtactgcagtccaaagaaccaggtttctcrgagccccagagtccggcacaccaaatcaaagaggtccttccctttccacttcatctgcaataacaaaccaatggggaaggacactgtgagcaaaaatcat

SEQ ID NO: 247729 - DNA, 201 bp, Homo sapiens
ggagctgcacttcaccaaagacattgtggatgcgggactggctggggacaccaatctctactacatggcgctcatcgaaaggggcacaggtaattgctctsctgattacaggggttctagacaaagggcgctgccaagaatcaaacactctccggggctgcccaaagcagaagatcctggagtcctgcaaggacttaacag

SEQ ID NO: 247730 - DNA, 201 bp, Homo sapiens
gctgctttgcagctgccccaacacctagactggggcttctggcttctccctccctatgggctcagagcagagttgtatacacatgtgtgcaaacatgcacrccaggtgtgtgtcagggcctgcgaatgaggccaaatggccgctgcagcttgggaggtggggagacagggcagtttcccttccttgccaagctgtgatgct

SEQ ID NO: 247731 - DNA, 201 bp, Homo sapiens
gtctgctattacgttccttactcctaataatcatgagttgactgtataatgatgaactctctgatgtagtaaaattgggaatgataatgctgctgaaaaayagaagttcttatcacctagcatgttattgatattcagtgattggcaatgattacaaatgtgtgatatactgagaataattttgcagagcactacaaatag

SEQ ID NO: 247732 - DNA, 201 bp, Homo sapiens
caaatttaatgttcctgggaggacatccagctggacatatgggtttgaatcccagaagggaggtcagggccaggaataaaaatcgatgtgatagaatattwtgctggtattaaaagtgccattcacaggctggacacagtggcttacacctgtaatcacagcactttggaagaccaaggttggaggatcacatgaggccag

SEQ ID NO: 247733 - DNA, 201 bp, Homo sapiens
cttgaacctgggagtcagaggttgcagtgagccgagatcacaccattgcactccagcctgggcaacgagtgaaactccgtctaaaaaaaaaaaaaaaaaaattatcaagcacctcctatgtccaaggtgctgtgttacctcaaaaagattttttaccatttcctggccttcgttccatcatcacttaaaaaggagagaata

SEQ ID NO: 247734 - DNA, 201 bp, Homo sapiens
tcttgaacctgggagtcagaggttgcagtgagccgagatcacaccattgcactccagcctgggcaacgagtgaaactccgtctaaaaaaaaaaaaaaaaaaattatcaagcacctcctatgtccaaggtgctgtgttacctcaaaaagattttttaccatttcctggccttcgttccatcatcacttaaaaaggagagaat

SEQ ID NO: 247735 - DNA, 201 bp, Homo sapiens
gcttgaggagcccttcagcccgccgctgcactgtgggagtccctttctgggctggccacggccggaaccggctccctcagcttgcggggaggtgtagaggsagaggcacgggcaagaactggggctgcgcgcggcgcttgcgggccagcgcgaattgcgggtgggcgtgggctcagcgggccccgcacttagagcggccgg

SEQ ID NO: 247736 - DNA, 201 bp, Homo sapiens
tggcttggtgctgggtgcctgtaatcccagctagtcgggaggctgaggcaggagaatctcttaaacccaggaagcagaggttgcagtgagccgagatcgcrtcattgcactctagcctgggcaacaagagtgaaaatccatctcaaaacaaaaaataataataaataaataaacacagatgataattatatgcaccagata

SEQ ID NO: 247737 - DNA, 201 bp, Homo sapiens
atggcgtgaacccgggaggtggagcttgcagtgagccgagatcgcgccactgcactccagcctgggcaacagagcgagactccgtctcaaaaaaaaaaaawaaaaaaaagaataaatacggccaggcacagtggctcacacttctaatcccagcaatttgggaggccgaggtgggtggatcacctgaggtcaggagttcaa

SEQ ID NO: 247738 - DNA, 201 bp, Homo sapiens
ctcctggcctcaaaggatcctcctgccttgacctcccaaagtgctgagattacaggcaacagccactgtgcccaggtctctctctctctctctctctctcyaattatttatttattttttaagggtatactatcctacccaaacttatatttttaaattccattagactcatattaccaagcatataaacaaatcacacat

SEQ ID NO: 247739 - DNA, 201 bp, Homo sapiens
gctcacccctgggttcaagcgattctcctgcctcagcctcccaagtagctgtgattacaggtgcccgccaccatgcccagctaatttttttttttttttttagatggagtctccctctgtcgcccaggccggagtgcagtagtgcgatctcggcttactgcaagctccacctcctggattcacgccattctcctgcctcag

SEQ ID NO: 247740 - DNA, 201 bp, Homo sapiens
agactccatctcaaaacaaacaaacaaacaaacaaacaaaaaaaacccatgggagagcacagcggtaaaaaggtagataacaggccaggcgtagtggctcrtgcctgtaatcccagcactttgggaggccaaggcaggtggatcacctgaggtcaggagttcgagaccagcatgaccaacatggagaaaccctgtctttac

SEQ ID NO: 247741 - DNA, 201 bp, Homo sapiens
acggtggctcatgcctgtaatcccagcactttgggaggccgagccaggcagatcatgaggtcaggagttcaagaccagcctgaccaacatggtaagaccccatctctactaaaaatacaaaaattagcctggcatgatggcaggcacctgtaattccagctactcaggaggttgaggcaggagaattgcttgaacccagga

SEQ ID NO: 247742 - DNA, 201 bp, Homo sapiens
gaaaggtgactggttcttcctttgaaacatcatgatccagtacctgcagaattgcagagcaaaagacaaacacactatattggcacttcctcctgtgctaycctcaaagaagcctttgcaaggcgtgcattaaatttttttcccactaaatttatcacatttcctgaaagttgtgattttacagtttgaagtattcacaaa

SEQ ID NO: 247743 - DNA, 201 bp, Homo sapiens
gcctgaatacctggatgcctacaacagcctcacgtgagcaccctgcatccatacatcccatcccctgcttgggtggggaacacactttcagcaaatttgcrgaacatcctccaccctgttcttttctgtagaaatccaggagatgtagatttcttttatttctgcctttttctttctttctttctttctctctttcttttt

SEQ ID NO: 247744 - DNA, 201 bp, Homo sapiens
cactgcgccctggcctcacatgtagctattgaaatttatattagttaaaattacataaaatttaaagttcaagctgtgtgccaaggtgctcacctgtagtyctagctacttgggaggctgagttgggaggactgcttgagcccaggagttcgaggccgtgattgaataccatcacacctatgaatagccactgcactccag

SEQ ID NO: 247745 - DNA, 201 bp, Homo sapiens
caaacccatgagtgggaaaataccaattagagcttaatggcttaatcactgcaaagcatacacaatacatcccttggacagttccttacggattttaacakctccaaagctgctaatttaggaaagctggtaaataagcatcctcatttaggagagtctagcctcttaagttaactcggggagatggctagcttctaggga

SEQ ID NO: 247746 - DNA, 201 bp, Homo sapiens
atggaacacgtttttaaccaacatcttctgacttaggtcttattttgagactgcttccctgcacacctctgttttcctggctgtgggcatatgaggcaggraaagctatgggtcagaatcaggaagacctcattgtcttgatgagggggcctgaggacaagccagtctagcttgatctgatggcctagcccctggcccagc

SEQ ID NO: 247747 - DNA, 201 bp, Homo sapiens; identical to SEQ ID NO: 48603

SEQ ID NO: 247748 - DNA, 201 bp, Homo sapiens; identical to SEQ ID NO: 48605

SEQ ID NO: 247749 - DNA, 201 bp, Homo sapiens
aaaaatgtgaataagctctgaagcattatagaagcactggaatgacatgaggaatgacatcactgcagttgttaatcagcattgcagctgttaatcagcaytgcagttgttaatcagcattgctgctactaagtcaaacatgccatggaacacgtttttaaccaacatcttctgacttaggtcttattttgagactgcttc

SEQ ID NO: 247750 - DNA, 201 bp, Homo sapiens
catgatctcggcttgctgcaacctctgcctcctggtttgaagtgattctcctgcctcagcctcccaagtagctgggactacaagcgtgcaccaccacgccyggctaattttgtatttttagtagacactggatttcaccatgttggccaggatggtctcaaactcctgacctcaagtgatctgcctgcctccacctcccaa

SEQ ID NO: 247751 - DNA, 201 bp, Homo sapiens
atgatctcggcttgctgcaacctctgcctcctggtttgaagtgattctcctgcctcagcctcccaagtagctgggactacaagcgtgcaccaccacgcctrgctaattttgtatttttagtagacactggatttcaccatgttggccaggatggtctcaaactcctgacctcaagtgatctgcctgcctccacctcccaaa

SEQ ID NO: 247752 - DNA, 201 bp, Homo sapiens
ctcctggtttgaagtgattctcctgcctcagcctcccaagtagctgggactacaagcgtgcaccaccacgcctggctaattttgtatttttagtagacacyggatttcaccatgttggccaggatggtctcaaactcctgacctcaagtgatctgcctgcctccacctcccaaagtgctgggattacaggcatgagctacc

SEQ ID NO: 247753 - DNA, 201 bp, Homo sapiens
aagtgattctcctgcctcagcctcccaagtagctgggactacaagcgtgcaccaccacgcctggctaattttgtatttttagtagacactggatttcaccrtgttggccaggatggtctcaaactcctgacctcaagtgatctgcctgcctccacctcccaaagtgctgggattacaggcatgagctaccctgcccaccca

SEQ ID NO: 247754 - DNA, 201 bp, Homo sapiens
tcactcatacacacacaggctcatgcagaaagtacttttggacagtactggtttagagtgtctgcatagcacagccataacagatggtcctctaaacttcmcttgaacactcctagccatgaagagttcacttgtaagccaatctatttcatcctttgacagccctgataatcgtgtctttgaaaataatctgtgacctgc

SEQ ID NO: 247755 - DNA, 201 bp, Homo sapiens
aaaataaagaaaattccttcctcttgccaatgatgctgtccttgtaacttttctccgttaatccgttttccacaggtcattcctggttttggtagatttcyatccatacagtacttttgccatttcctttgggaaaaagacctttaaaccatagggtcaggccattttgcagatgggaaaatcaaggcacagatggagtca

SEQ ID NO: 247756 - DNA, 201 bp, Homo sapiens
ttcctgtttcttcactaaagctgagtgtccacatctggtttagctgcagcatctccaaaaccaacaagcctgtattagacatgattatacctacccagagwatgtattccagtatgatatgtgtctccagttttcctgatggtcagaagaaggtagtccatctgcagcatggcactggagcttcaggaatccctcggtgtg

SEQ ID NO: 247757 - DNA, 201 bp, Homo sapiens
gaagcgattctcttgcctcagcctcctgagtagctaggattacagatgtgcatcaccacgcccagctaatttttgttttagtagagatggggtttcgccawgttggtgaggctggtctcaaatttccgacttcaggtgatccacctgcctcagcctcccaaagttgattatttatttacttgagacggagtctcaccctgc

SEQ ID NO: 247758 - DNA, 201 bp, Homo sapiens
aggattacagatgtgcatcaccacgcccagctaatttttgttttagtagagatggggtttcgccatgttggtgaggctggtctcaaatttccgacttcagrtgatccacctgcctcagcctcccaaagttgattatttatttacttgagacggagtctcaccctgccacccaggctggagtacactggcacaatcttgact

SEQ ID NO: 247759 - DNA, 201 bp, Homo sapiens
cagctaaggtctagaggtccctgaatatagaccctctccaaaaggcagtcattccagggggtccaggcagaaggtgggaggagctgccacacatgccccayggcacttataggttcagcaggcaggacccatgtgaccccagcttggcatcttcccagacacagccactggcagtatctatgaccaggctgaatttagaca

SEQ ID NO: 247760 - DNA, 201 bp, Homo sapiens
atccaaatgagcttaggaattatcattctataaacttgcatgtaacttgaacctgaaactaagttaactggagagagagaatgcaggtagggcattcattktgctgatgtggattgtggcagattgattttgtagtccccaatcagtactggtttctggcccagtagcttcctgtggcaggagtggtggcaggttctttca

SEQ ID NO: 247761 - DNA, 201 bp, Homo sapiens
tcttttttgaggcagggtttcactttgtcactcaggctggagtgcagtgatgcgatcatgggtcactgcagcctcgacttcctgggctcaagcaatccccycccacctcagcctcctgaatagctgggactacaggtgcatgccaccaagcctggctaattaaaaaaaaaaaaaattgtaaagacagtcttgctatgttgc

SEQ ID NO: 247762 - DNA, 201 bp, Homo sapiens
gttgtggccttttcactacttgcagttcctttccccgacttggctttactttctggtgtccaggggtctgggccagatgctgagattcctctcagctgacwggtgtgggttatgggcaaacccttccctggaggacataaggcaccggattggactgctgatgggttgctgttggagttgtcagggccttggaatagtctt

SEQ ID NO: 247763 - DNA, 201 bp, Homo sapiens
tggctccagattgagaggagagcccagaggacacaggtggctgccccagcctggaggtgaaagtcttaaaataaaatgccagatgcctagaccattctaawcctttcttagaagctgaaatcatcccttctggaagcgctctagttctaaaaggacagatatacagcaagatcttcctggggctaatatggagtttatagg

SEQ ID NO: 247764 - DNA, 201 bp, Homo sapiens
tttgttcaaagggaagactctgatctagagatgggcacttggaccagcaaacagcagctacaggtagccagggcacccgaggagcacttgctcatgagccrgtttccctggtttttatgggggctgtcgctgagcgtctgccagggtttgtgtcctagcacttgctggtctttgctgggctctcagctctcaggtgtttct

SEQ ID NO: 247765 - DNA, 201 bp, Homo sapiens
tcatctcccagcctgtccactgttccaggatccacacttaggcctataggaatgccccgtcagagcttctgctgccgctgatctgttactgtttcatgcarcccactcggcctagttccttcctcttactgtctcagtgggcacagaaaagcatacagagggtgtttcagcaaacattgccactggctgcagacctgcccc

SEQ ID NO: 247766 - DNA, 201 bp, Homo sapiens
gattgagaggagagcccagaggacacaggtggctgccccagcctggaggtgaaagtcttaaaataaaatgccagatgcctagaccattctaatcctttctkagaagctgaaatcatcccttctggaagcgctctagttctaaaaggacagatatacagcaagatcttcctggggctaatatggagtttataggcaagtagg

SEQ ID NO: 247767 - DNA, 201 bp, Homo sapiens
cagattctttatcttgccctcttttgaatagagaggggctctgttcccatcttcaagccctttggaaattctcatctgaattcaagctcctttgacatagractgggcttgggtagctaagagctttgatgagactggaaacaagtgtatgggagtcttaaagcatgcaaagccaggtgagcgttcatcctccagtgggga

SEQ ID NO: 247768 - DNA, 201 bp, Homo sapiens
atccgcaggtgaggaatgcaaagccaggtgagcattcattttcaggcagagattgtttaaagggaagagagtggtctgtgtataattttcttttctctgtycatttttaaaaagatcccagagggaccctgggtgttttttttaactctttattgtgactcaaactgggtctctaaataaactcctcttaggaggcctaag

SEQ ID NO: 247769 - DNA, 201 bp, Homo sapiens
cctgggctacagagcaagacccagtttaaaaaaaaaaaaaaaagatattcaaaccatgggtcccaacgtagttattatatttgaccatttgcaaaagctgraagcaaaacatgttacacattttcagagaggaaaatacacagtagttcctgagtgtaagttgtttttcttgacctcattcttaaattgcttcatgagggt

SEQ ID NO: 247770 - DNA, 201 bp, Homo sapiens
ttattgtgactcaaactgggtctctaaataaactcctcttaggaggcctaagacacatatctagaaaaaatgtgtcatttaaagtgcttttttgaagtcaygtgatgaattatcagagcaagaatctcctcactgcccactgagctctgtaccttctttggctcagatgtaggaaagaaactttcttttcttcctctctct

SEQ ID NO: 247771 - DNA, 201 bp, Homo sapiens
gtggcatgatctcggctcactgcagcctccacttcccaggttccagcgattctcctgcctcagcctcccaggtagctgggatcacaggcaagtgccaccaygcccagctaatttttgtatttttaatagagacatggttttaccatgttggccaggctggtctcgaactcctgacctcaggtgatccacccatctcagcct

SEQ ID NO: 247772 - DNA, 201 bp, Homo sapiens
tgatgtgatcttgggttccataaacagagacagaaattcaaaaattaggaaggtgacagtccagcctattccttgttagttagatcccactggaattgttrtgtcccatataataattataaaatagcaattcagcagttattatgtgccgggcattgaaaacacatgattttaactcctctccacccctctcttactgct

SEQ ID NO: 247773 - DNA, 201 bp, Homo sapiens
aacctgtgaatatgttacctcacatgacaaaagggattctgcatctgtgatcaaaggaaggatcctgaaatggggaggttatcctgggttacctgggtgarcttgggccataaagttctcataagagggaggagggagagtcaaagaaggagctgtgatgatgaaagcagagtggggggtgatgcaggcctggatcccagg

SEQ ID NO: 247774 - DNA, 201 bp, Homo sapiens
cctccaccctacagcaaaagcctgtcctgagcaaacttccctgggctcactttccttttcctgcttttcctcctcccttcttctgctgctccctcttcttytctcctcccctatgggtgagacagcccagctgctgggggctaaccctacccttccccaacctggcctaactgctgatgtcagctctgtccaggctgttcg

SEQ ID NO: 247775 - DNA, 201 bp, Homo sapiens
ggtggctctccatcccctgctcttctgtcaggttttcttgtaggtttatggaaacctttgttacttgtgcaggtggcagagaagcagagaggatagctgcrcgccacccacacagctaggatttattggcgtactcccatgtgcatggcagccaagtggacacaactctgtgatgaatcctcccaagagaactgaggggcc

SEQ ID NO: 247776 - DNA, 201 bp, Homo sapiens
agtgggtgaaatgcttaagaaccaaccttgagtggtctgggaaggcttcctgggagggtggtgtttgagctaaggccaggcagctgttagatttgttagaytgaagcccttgcagacttagagagcttgtgctcttcccagaatgacgggtgagccacgtacagtaaatggtgcttctcatttctagcccaaggggcctca

SEQ ID NO: 247777 - DNA, 201 bp, Homo sapiens
cttcctcctcatccaggacatattggtcagaggagggcaagaccattgtagggtaccagacctactgctatttgaatctgcttggctcaactcttatcaaycctgaaggctttctgtggctgctatatttggatttaaaacactggaagctgggttttgatggggccccaggagtggggagcaggagaggtttctgaggga

SEQ ID NO: 247778 - DNA, 201 bp, Homo sapiens
tgatttcataagagaaaggacattttaatattcaaagagtaagaagcacttaatcttggaagaaagggcattcctatactttgattacctttagtttaatkaaaaaacacctacatggtctttacttctgtgatttcattcctgggctagtgaaacattgtcacaataaagcatcaggccaacgcttctttcgacccactg

SEQ ID NO: 247779 - DNA, 201 bp, Homo sapiens
tgaggatcttcttccctgccccagagggtctgctgcctgagctctgtgatagcgcagagagtaaaaggatcaagcttgattgaggcctatctctcaatgcraaagtttgctagttaagaggagagtgggaagggcatttctggcaaagagaaaagtgtggacaggcatggcttaagggatggggagggagacagacagagc

SEQ ID NO: 247780 - DNA, 201 bp, Homo sapiens
gtttttcgactgcacaacttctcagagcctttggtgtgtgtcgtgactttgcagaagcaggatttaatacgcagcattcccgttcttatttgaccacgagwcatgtttttccattaagcatcttgctgggtctgatgttttctggaacccattttgaggcggtctggtctgcagagagtatggggagcctgggttcaagtc

SEQ ID NO: 247781 - DNA, 201 bp, Homo sapiens
ttttcctcatccctcttcccacctgccgttacctcacaatccacaatctgcacctcatccatttttcttctgaggcaagcactctcttactaacttacttmtctcatctgcatccatgttcttctaggccagaaacttgggagtcatccctccctctttgttacttcttcttcctctttgttactttatcccctctgttac

SEQ ID NO: 247782 - DNA, 201 bp, Homo sapiens
gtccccaatcagtactggtttctggcccagtagcttcctgtggcaggagtggtggcaggttctttcatgatcagtgatggcagaaccgtgatgattcttaggtttcacaattatttctggaagctccattttaagtctacccctccagccctgctagtaatgttgtaagacagaacttttcaaactttaatgttcatatga

SEQ ID NO: 247783 - DNA, 201 bp, Homo sapiens
agctacatttacccccaggctgcccttgaccttgacccaaaatgccccctcctcactcagcccaggcagtagtctgaaatgtgcaaaaaacaaaaacaaamacaaacaaacaaaaaccaaacttcttcagagcaggcttttcagtgttcccaactgctcaaggagtaggtaggtgtaggtgccaggctgggcgtaagcagg

SEQ ID NO: 247784 - DNA, 201 bp, Homo sapiens
catgccagcccctggtgaaatatctggagaagtctgattcgtgggccatctgagagttatgtggactgggccgagtctgagaaaaagtttctcactgctcrtctgatccatatgtgttgggctttagccctgcttaggaaagtaatgctaaggataggtcaactttcatcaccatggcatggagaatcagattgatctaag

SEQ ID NO: 247785 - DNA, 201 bp, Homo sapiens
gctggggccagtgagcagggaccttaaggcagaaaggagccttgcatgttcctggaaattgagatgcccactggggtaggaaagcaccagaagctctgggrccaggtgtcagagttaagcctgtgaggcaggagagagcagaacaagccctgttacaaggaaactgaagcaggagagcaggtggtgggcaaaccccttgag

SEQ ID NO: 247786 - DNA, 201 bp, Homo sapiens
aggctgctcagaactttctggaaagggatgattatctgagttccagcctcaccccagcccccggactctgagtccctcatgtctgcctcccttctttctcyctgaccacacagctggtacatagtcagtacagacgcagtcagtgagtggagcacggggcttctctccaggattcctgcccctttgtttatccctagtctc

SEQ ID NO: 247787 - DNA, 201 bp, Homo sapiens
ctcggctatagacttgtattacatggccctttaaaaaaacatcctcccctgctttctagctggaataaagctcctcctggagacactttatctccagatastttctggagtcctttgtcttttagcagactgagcatcaacaggcttccatgttcgcttctctctaggtttcctaacctccccctctcagccactgcagag

SEQ ID NO: 247788 - DNA, 201 bp, Homo sapiens
aaatatatacttgggtaaagaggataaaagagttagcgatgatgctgaatttttgaactgaggtggctgttttcaaggaagactggagggtgggatgctaygtctagatatgttgcagtttaggtgaatgtgagacttccctgttttgaagtcaaatattggaccagtaaaatctagccatcagcttaaattcctatgata

SEQ ID NO: 247789 - DNA, 201 bp, Homo sapiens
gggaaggaaactgaaaaccgcaacatcaataaccacagcacaacaaaactaaatataaagagatcccaacacccacctgacagcagtttccctgcccctgmctctggaagacggtctgtgtgcgaagcatcccccagcagggaccatatgtgtgtgccctccagagtccagagaaggtgaggtgagctcccaatgcccagg

SEQ ID NO: 247790 - DNA, 201 bp, Homo sapiens
ccttcagtaaataccagccgttactaggagggtccactcctgcctctccactctccattcatcctgcctgtttcctctgcctgcttcctctgcctgcttcygtggtggtgaattcttcatggctcccaccgcctcctgctgcacccccactcagggcccgcatcaggacccttcctcctattggtttgaactccttggagt

SEQ ID NO: 247791 - DNA, 201 bp, Homo sapiens
tccatgtaagtctgaaagtctgaatctgctaaggagtgtgtaacaattgacctgccaaaaaaaaaaaaaaaaaaccggaaaggaaaaagaggctgggcatrgtggctcacacttgtaatcactttgggaggctgaagtgtgcggatcgcttgagcccaagagtttgccaccagcctgggcaatatagggagacccatctct

SEQ ID NO: 247792 - DNA, 201 bp, Homo sapiens
cttcatggctcccaccgcctcctgctgcacccccactcagggcccgcatcaggacccttcctcctattggtttgaactccttggagtcagagggtaatggrtagtggagtgagccaggtggcagaatctcagaggccatcccgggcctataagcctcttcaaaatagggccacgtatcaagctttacacacaggagtgaac

SEQ ID NO: 247793 - DNA, 201 bp, Homo sapiens
acaattgacctgccaaaaaaaaaaaaaaaaaaccggaaaggaaaaagaggctgggcatggtggctcacacttgtaatcactttgggaggctgaagtgtgcrgatcgcttgagcccaagagtttgccaccagcctgggcaatatagggagacccatctctacaaaatacattttaaaaaattagccacatgtattggcatgc

SEQ ID NO: 247794 - DNA, 201 bp, Homo sapiens
gaatctcagaggccatcccgggcctataagcctcttcaaaatagggccacgtatcaagctttacacacaggagtgaactttcacaagttgttatgactcayactctgtctatagtaagctgttaaccactcccatttggcttatgcctctgtaattattgtactaacttatatcttaaaataaggatattgaaggaatgag

SEQ ID NO: 247795 - DNA, 201 bp, Homo sapiens
gcccaagcttagcatccgagaccctgacctacctccagccacttcctcctcctctccacttcactggactccccatctccacccagacacctctgttctcmcctctgtgtgcctttgcttatgctgtcccctgtgttcctagtgtgtctctggctatcttttaagcttccctccccaacctcattagttctgtggagcccc

SEQ ID NO: 247796 - DNA, 201 bp, Homo sapiens
agcttagcatccgagaccctgacctacctccagccacttcctcctcctctccacttcactggactccccatctccacccagacacctctgttctcccctcygtgtgcctttgcttatgctgtcccctgtgttcctagtgtgtctctggctatcttttaagcttccctccccaacctcattagttctgtggagcccctggaa

SEQ ID NO: 247797 - DNA, 201 bp, Homo sapiens
ttttctacctcagctgtcagtgcacagattgatgtgtgtgggaacggagcttgggaggagtggggtagggctggtcctgtcctgtagcctccccttccttygggcacttggaccctttggagcttgccggggtggggaatgggagtgggaaggccagggagtgtctctgcaccatcactgtttgagtgttgcccctttgct

SEQ ID NO: 247798 - DNA, 201 bp, Homo sapiens
ttgcccctttgctgtgtgccccacctagtctatgtgtgtctctgttctctggggactcaatttgctggtgaattgcttccatggacattgttctgggaaaygccattttttctgctcacccatgactctgtgacaaggaatgacagcttattaggaatttgtttttgcattggaacagtggtcatcagaatgggccccttt

SEQ ID NO: 247799 - DNA, 201 bp, Homo sapiens
agttcctctctgatctgcttcttattctccacctaccttctcttctgtactttccgcctcctagagagagagagagagagaggaatgccgacctaactacygctgccactgctgctgccaccaccgctgccaccaccaccctggtaatgttcacatgtcctcaaatcaacccagagccagggccctgctggtcagggggag

SEQ ID NO: 247800 - DNA, 201 bp, Homo sapiens
gaatagcaaatctaaattctcaggagaaatcatctgattagcccaacttgggtcacatgctcacccctggcccagacagctgtggctggaggctggggtcaagcagtatcaacatggctacccaggacccttcctaaagaggggcaagtttgtggagaaaggagtcaccctgagctggctagacatgtttgctctctatca

SEQ ID NO: 247801 - DNA, 201 bp, Homo sapiens
tgtaagacttttttgttgccgtttctcaaatgttatattagttattttttgtactctattagtatattattggcatatagtaatatatgggtagcaatttaaaaaaaaatgttagatttgggggtacgtgtacaggtttgttatatgagtatattgcatgatgctgaggtttgggcttctaatgatcctatcacccagcag

SEQ ID NO: 247802 - DNA, 201 bp, Homo sapiens
cctgtgtgagctacccaggtgtgggcatcccctccagggagacctggtctggactgagccagctccacagcctgtcctgggcccctcagccacccaactcyatgtcccaggtctagagcccacctgcccattccacttggtccagagctgtagggggcaggcaatgggaggacactactttaaggagaggtttcatctact

SEQ ID NO: 247803 - DNA, 201 bp, Homo sapiens
ctgggctcaagcaacccttctgtctcagcctcccaaagtgttgggattacaggcttgagccactgcaactggacagaaccatgttttaaagatttcttgamcttttgtgtgtatctaattcattgcttgttactgtggtagaatattctgtagtgtgcttatgtcacattttacttacattcatttccccaatgatgaatg

SEQ ID NO: 247804 - DNA, 201 bp, Homo sapiens
ttgctcaggctggtttcatactcctgggctcaagcaacccttctgtctcagcctcccaaagtgttgggattacaggcttgagccactgcaactggacagamccatgttttaaagatttcttgaccttttgtgtgtatctaattcattgcttgttactgtggtagaatattctgtagtgtgcttatgtcacattttacttac

SEQ ID NO: 247805 - DNA, 201 bp, Homo sapiens
caagcaacccttctgtctcagcctcccaaagtgttgggattacaggcttgagccactgcaactggacagaaccatgttttaaagatttcttgaccttttgkgtgtatctaattcattgcttgttactgtggtagaatattctgtagtgtgcttatgtcacattttacttacattcatttccccaatgatgaatgcctcatt

SEQ ID NO: 247806 - DNA, 201 bp, Homo sapiens
ttagccacatgtattggcatgcacctgtggtcccaactacttgggaggctaagttgggaggattgtttgagtctgggaggtcgaggctgcagtgagctgtkatcacaccactgcactccagcctgggcaacagaacaagaccctctctcattaaaaaaaatggaagaaaagaaaaattataattacgaaagtaattcatgt

SEQ ID NO: 247807 - DNA, 201 bp, Homo sapiens
ctcccaaagtgttgggattacaggcttgagccactgcaactggacagaaccatgttttaaagatttcttgaccttttgtgtgtatctaattcattgcttgytactgtggtagaatattctgtagtgtgcttatgtcacattttacttacattcatttccccaatgatgaatgcctcattgcatccagctctccagccatca

SEQ ID NO: 247808 - DNA, 201 bp, Homo sapiens
aactacttgggaggctaagttgggaggattgtttgagtctgggaggtcgaggctgcagtgagctgttatcacaccactgcactccagcctgggcaacagarcaagaccctctctcattaaaaaaaatggaagaaaagaaaaattataattacgaaagtaattcatgttcattacagaaaaattagaaaatacagaaaaata

SEQ ID NO: 247809 - DNA, 201 bp, Homo sapiens
ggcgtggtggcgggcacttgaaaagtcccagctactcgggaggctgaggcaggagaatgatatgaacccgggaggcggagcttgcagtgagccgagatcgygccactgcactccagcctgggcgacagagtgagactccattttaaaaaaacaaacaaacaaaacaaaaaaacaaacaaacaaaaactgtctcttctgtgc

SEQ ID NO: 247810 - DNA, 201 bp, Homo sapiens
actgcaactggacagaaccatgttttaaagatttcttgaccttttgtgtgtatctaattcattgcttgttactgtggtagaatattctgtagtgtgcttakgtcacattttacttacattcatttccccaatgatgaatgcctcattgcatccagctctccagccatcacaaataacttggtgataaaatatcctcttatg

SEQ ID NO: 247811 - DNA, 201 bp, Homo sapiens
cgcaatcttggctcactgcaacctccacctcccggcttcaagtgattctcctgcctcagcctcctgagtagctaggaatccaggcgcccgccaccacaccsagctaatttttgtatttttagtagagacgggctttcgccatgttggccaggctggtctcaaactcctgacctgaggtgatccaccgccttggccttccaa

SEQ ID NO: 247812 - DNA, 201 bp, Homo sapiens
gccagttttattccccttgaatctggcctgccctataaacttgttttaagcaaaagaatgctttagaagtgatgctaaggctgggctttcagggatctccwtcttctgtatttttgaaatgctcctttttggaatgcttcctctagtttgtgaggaaacccaagcagccacatggagagtcctttgtggagagatccaagt

SEQ ID NO: 247813 - DNA, 201 bp, Homo sapiens
agtagagacgggctttcgccatgttggccaggctggtctcaaactcctgacctgaggtgatccaccgccttggccttccaaagtgctaggattacatacgygagccactgtgcccggcaattttttgtgtttttagtagagatggggtttcaccatgttggccaggctggtctcgaactcctgacctcaagtgatctgccc

SEQ ID NO: 247814 - DNA, 201 bp, Homo sapiens
gtaggtttatggaaacctttgttacttgtgcaggtggcagagaagcagagaggatagctgcgcgccacccacacagctaggatttattggcgtactcccaygtgcatggcagccaagtggacacaactctgtgatgaatcctcccaagagaactgaggggccctgatggaggagctgcttctttgcaaagctttccttgac

SEQ ID NO: 247815 - DNA, 201 bp, Homo sapiens
attaaaaaaaatggaagaaaagaaaaattataattacgaaagtaattcatgttcattacagaaaaattagaaaatacagaaaaatataaggaaaaaaatcytgcccctaattccaccatctaaaggcatctctttatacattttggtgaatttcttacaagtttttttcctacgcatatttgtgtacatatttaacatagt

SEQ ID NO: 247816 - DNA, 201 bp, Homo sapiens
tataattacgaaagtaattcatgttcattacagaaaaattagaaaatacagaaaaatataaggaaaaaaatcctgcccctaattccaccatctaaaggcayctctttatacattttggtgaatttcttacaagtttttttcctacgcatatttgtgtacatatttaacatagttgacagatcataatgaccatacgtttca

SEQ ID NO: 247817 - DNA, 201 bp, Homo sapiens
atacagaaaaatataaggaaaaaaatcctgcccctaattccaccatctaaaggcatctctttatacattttggtgaatttcttacaagtttttttcctacrcatatttgtgtacatatttaacatagttgacagatcataatgaccatacgtttcatgccctactttttcacttagcagtacgttataagcttttactcat

SEQ ID NO: 247818 - DNA, 201 bp, Homo sapiens
tcatgcctgtaatcctaacacttgggaggctgaggcaggaggattgcttgagcccagaaattagagaccagcctgggcaatatagcaagaccccaactctaaaaaaaatttttttttttaattaaaaaaagaacagtccctttggggacaccagccatccagtcacctctacagacccatagaagccccagacctgtggcc

SEQ ID NO: 247819 - DNA, 201 bp, Homo sapiens
gccttggcacactgaacatgatttgtatatcaatctctccctttcattcatgctcctgtcattcatgccataggaagaatgctagttttcttccttatagmcactatcccaccttccttactcctatattgggggcagcaatgtgcctagtcttagctaagactacattttccttgcagatagggatggctaatgagaagt

SEQ ID NO: 247820 - DNA, 201 bp, Homo sapiens
tgcagtggtgccgtcatggctcactgcaacctcaacctccctgggatcagttgagcctcctacctcagcctccagagtactagggaccaccatgcctggcwaatttttgtaattttttgtagaggcagagtctcaccatgttgctcaggctggtctcgagctcctagactcaagtgatctgcccaccttggcctcccaagt

SEQ ID NO: 247821 - DNA, 201 bp, Homo sapiens
agctcctagactcaagtgatctgcccaccttggcctcccaagtgttaggattacaggtgtgagccaccatgcccagcccaggtcatcttttgagggcatgkagagaagactttgagcatcccacttttgagattgtgtaccagtcgcaagcccctatgacacactttttccccaaagtagagggctctgactatgttgatc

SEQ ID NO: 247822 - DNA, 201 bp, Homo sapiens
ggtgtgagccaccatgcccagcccaggtcatcttttgagggcatggagagaagactttgagcatcccacttttgagattgtgtaccagtcgcaagcccctrtgacacactttttccccaaagtagagggctctgactatgttgatcccaagagagatgggaaagagcattgaatgaggattccaaagtattgggccttagt

SEQ ID NO: 247823 - DNA, 201 bp, Homo sapiens
gactatgttgatcccaagagagatgggaaagagcattgaatgaggattccaaagtattgggccttagttcgtttcctcatgttggtgttgtgaagattctkgttaggataacagcatgtgtgcaggaggctttgtgaactgctgagagtgaggcgtggcaatgtcagtgctaggtttgtccttactaacctggggccatgg

SEQ ID NO: 247824 - DNA, 201 bp, Homo sapiens
ctgaaagaaaacaaataaaacatacatgtaatcctagcactttgggaggccaaggcaggcggatcacttgaggtcaggaatttgaaaccagcctggccaaygtgaaacccatctctactgaaaattaaaaaaaaaaaaaaaaaaagccgggcatggtggcacatgcctgtaatcccagctactcgcgaggctaaggcagga

SEQ ID NO: 247825 - DNA, 201 bp, Homo sapiens
acatgatacactgggtcagggtgacctgtacggtctcttattcctacaaacagtccattctgtcagccttatggtctcaattttaatattaatgctgatcwgttgttctgtctacattgcaaaagagagggggtataacgaggcttgtctgacctgtcctgtcatgactgggaactccatttttaaggtttttctggggtc

SEQ ID NO: 247826 - DNA, 201 bp, Homo sapiens
aattctacaatggtttcttccctttctctcttcagggatcttcttcctatgtttgtcccttaaatattgatgtatgccaggactcaagcttaggatcattstagaaactcttccaggatgatctcctttattctcctggctttaatcactattaatcccaaattcatatctataatctatcctctttcctaagccccaaat

SEQ ID NO: 247827 - DNA, 201 bp, Homo sapiens
ccttaaatattgatgtatgccaggactcaagcttaggatcattctagaaactcttccaggatgatctcctttattctcctggctttaatcactattaatcycaaattcatatctataatctatcctctttcctaagccccaaattccagtattcatagctgaccagaactgagttctacagatgagcagtgcgtgaaagaa

SEQ ID NO: 247828 - DNA, 201 bp, Homo sapiens
ccccaaccctcctgcccattctctcccatttcatcccacacaaacacacaaatctcaagagctcaacactaatccctcccagacctgggatctgggatgcyacccactggactctcttgaatcacctctgctgcagttcatacccaggacactgggctcaggaaaccactcaggctcctgagctgtatgggggacctgctt

SEQ ID NO: 247829 - DNA, 201 bp, Homo sapiens
ccaaattccagtattcatagctgaccagaactgagttctacagatgagcagtgcgtgaaagaaaggttctgtggtcaaataagcttgggaaatgctggatyaaataaaaagaaactggtttccttgctgaggtacttctagaactgttaaatgtgctaatatgcattgcggatttctaagaggcggcatgtagtacctagt

SEQ ID NO: 247830 - DNA, 201 bp, Homo sapiens
agtattcatagctgaccagaactgagttctacagatgagcagtgcgtgaaagaaaggttctgtggtcaaataagcttgggaaatgctggattaaataaaawgaaactggtttccttgctgaggtacttctagaactgttaaatgtgctaatatgcattgcggatttctaagaggcggcatgtagtacctagtgtttcttaa

SEQ ID NO: 247831 - DNA, 201 bp, Homo sapiens
caccatctaaaggcatctctttatacattttggtgaatttcttacaagtttttttcctacgcatatttgtgtacatatttaacatagttgacagatcatartgaccatacgtttcatgccctactttttcacttagcagtacgttataagcttttactcattaacgtttgctgtaatcataattaaatattccatcctata

SEQ ID NO: 247832 - DNA, 201 bp, Homo sapiens
tatacattttggtgaatttcttacaagtttttttcctacgcatatttgtgtacatatttaacatagttgacagatcataatgaccatacgtttcatgcccyactttttcacttagcagtacgttataagcttttactcattaacgtttgctgtaatcataattaaatattccatcctataatcctctaaattagttagtca

SEQ ID NO: 247833 - DNA, 201 bp, Homo sapiens
tttcctacgcatatttgtgtacatatttaacatagttgacagatcataatgaccatacgtttcatgccctactttttcacttagcagtacgttataagctyttactcattaacgtttgctgtaatcataattaaatattccatcctataatcctctaaattagttagtcacatccctgagagtggtgacagatttatatca

SEQ ID NO: 247834 - DNA, 201 bp, Homo sapiens
tttatatcacacttcgactaagaatgtgcagagaaactgtgatttctatattctttctccctaactgatgtagtcttcttcacaatgtcccacccactggytaatagggaaaaatgacaacgggcctaactaaagaaaaatctgaagcaataacctaaatagcctgtatttaaggcttttgtttttcttttttatttttat

SEQ ID NO: 247835 - DNA, 201 bp, Homo sapiens
cacaatgtcccacccactggttaatagggaaaaatgacaacgggcctaactaaagaaaaatctgaagcaataacctaaatagcctgtatttaaggcttttstttttcttttttatttttatttgtatttttttagatggagtctcactctatcgcccaggctggagtgcagtggcacgatctcggcttactgcaacctctg

SEQ ID NO: 247836 - DNA, 201 bp, Homo sapiens
agcctggccaacgtgaaacccatctctactgaaaattaaaaaaaaaaaaaaaaaaagccgggcatggtggcacatgcctgtaatcccagctactcgcgagrctaaggcaggagaatcgcttgaatcctggaggcagaggttgcagtgagccaagatcataccattatactccagcctcagtgatgaagcaagactccatct

SEQ ID NO: 247837 - DNA, 201 bp, Homo sapiens
atcttcaacaaagaacagtaaatttttagagaagtggcaagacaagggaaaagggcattgaacttctaagggcagcaaattgtgggacggcaaataagtgkcagttacaggctatttagtagagcttgctacgtagattcctttggtgccatctccaggctgttaagctctaaagttgtctctggtggttaacttttgtct

SEQ ID NO: 247838 - DNA, 201 bp, Homo sapiens
aggaaatgcagtcctggcagctcaagagtgcctctttaagctctggagcagaatgcctcctctgagaaatgggtgctttgtattagttgagatggaaagargagaccagaaatgcctgtagtctctgcacatccagacaaaaacaaattttccccccttttttttttttgtttgttttttgagacagggtctggctctgtc

SEQ ID NO: 247839 - DNA, 201 bp, Homo sapiens
agtgagatactgtctctaaacagaaaaaggaaaaggaaaaaaaaaagaaagtaattttgtgggaagaagaatgtgttgattggacgtatacatggggcacktatgtcaggaagaagagaatccatcatgtctttcagcacacccagtttcttactccagtggggatagttgctacctggggcattcactggtttggtgcgg

SEQ ID NO: 247840 - DNA, 201 bp, Homo sapiens
gaatgcctcctctgagaaatgggtgctttgtattagttgagatggaaagaagagaccagaaatgcctgtagtctctgcacatccagacaaaaacaaatttyccccccttttttttttttgtttgttttttgagacagggtctggctctgtcacccaggctggagtgcagtgccgtgatcttggctcaccgcaacctctgcc

SEQ ID NO: 247841 - DNA, 201 bp, Homo sapiens
cctctgagaaatgggtgctttgtattagttgagatggaaagaagagaccagaaatgcctgtagtctctgcacatccagacaaaaacaaattttcccccctyttttttttttgtttgttttttgagacagggtctggctctgtcacccaggctggagtgcagtgccgtgatcttggctcaccgcaacctctgcctcccgggt

SEQ ID NO: 247842 - DNA, 201 bp, Homo sapiens
gtggcaccatgcctggcctaagaacagtttttagcatttgggaggggctctcatctttaagctccaaatgatactgtattttcttgcttttttctttctcytgccccacaagttttggaaagtaaattggaatagttttcccccactgaattatttagcttgtatacctcagcagatgttccttggcctgttttgttttgt

SEQ ID NO: 247843 - DNA, 201 bp, Homo sapiens
ggagtgcagtgacacaatcatggctcactgcagccttgactgcctgggctcaatccatcctgcagcctcagcctcctgagtagttgggactacaggcatgwgccagcatgtccagctaattttttatttttagtggagatgaggtctggctatgttgcccaagctgggcttgaactcttgggctcaagtgatcctctcacc

SEQ ID NO: 247844 - DNA, 201 bp, Homo sapiens
atgtctcactatgttacccaggctggtcttgaactcctgggggctcaagcaatcctcctgctttgacctcccaaagtactgggatgacaggcatgaactastgcacctgctgagatgcaacagctttctgtcagactcattttattctcatcatttcttcctgtcctcccttgctgggagcatgagagctgtgatgggaat

SEQ ID NO: 247845 - DNA, 201 bp, Homo sapiens
aaccttacttttagactcttcagaaatccttctatacccttccgtccccgctttcacccttcctccctctccgtgtgtgtatcttcttctcttgaaacacrcaggtttataccctgacccctcttgattcatcccttgaagcacagtggtgaacaaggaaggggcccgtgatgccctaattctttgccacagcaccatgtt

SEQ ID NO: 247846 - DNA, 201 bp, Homo sapiens
accttacttttagactcttcagaaatccttctatacccttccgtccccgctttcacccttcctccctctccgtgtgtgtatcttcttctcttgaaacacasaggtttataccctgacccctcttgattcatcccttgaagcacagtggtgaacaaggaaggggcccgtgatgccctaattctttgccacagcaccatgttt

SEQ ID NO: 247847 - DNA, 201 bp, Homo sapiens
aagccaagagaactctcagagagtgtatggtgtgtggaaatcctcactggatgaagttagggtcgatgtccttccatattctctctgatgctgaaatctgrtgaagtccatagcgcaggttgggaagaacaggaaactggaggaaaagagaccagatttattacaaattgtgagctgttctggagtacaattcccagccac

SEQ ID NO: 247848 - DNA, 201 bp, Homo sapiens
ccagcaaggctaaggtagtgaataagaaatgacaaaacactcagggactagaaatgtgggagagcatcgctaccctgaggcccaaaggagcaacaatacaractgcagcgatgggtgagggacagctcgaaaggaatttaggtggagaaatgcagtcgtttcttacctgtggtctggcagagggggagctagggcaataaa

SEQ ID NO: 247849 - DNA, 201 bp, Homo sapiens
cctcacgttctttccagtacctcccatttgcagaactgaaatggaaggcagagaggtaagtatattccgcagaaaggtggcctcccagtgcacaaagcagrgtggaaaatggtggaccatggatctgaagaagcaggtggaaaataaccagcccatgagatttgtgctgaaggggaaaagacaaaagaaacaagaacatta

SEQ ID NO: 247850 - DNA, 201 bp, Homo sapiens
attgtctcaaaaggggacgtctttcaaactctaaaggttccaatgaaatgaatacacagtgagaggaggcgcagtatctcccagagtcagattgtattagwtaaggatcctttggttgtgaattatagaaacacactagaaggcccagcatggtggctcacacctgtaaacctagcactttgggaggccgaggcggtctga

SEQ ID NO: 247851 - DNA, 201 bp, Homo sapiens
agacattgttggagcaggtatggctgtggttcactggattgtaaagaagtccatgtggcgctgtgttgatggaacttgctggaaatctaccctctgggatkcttgggaggtgtctgtcagagtcactcctataaaactacctgtagtagggagtgccaggggaagctgctgctggcctttggttgatgctggccaccatgc

SEQ ID NO: 247852 - DNA, 201 bp, Homo sapiens
ggtatggctgtggttcactggattgtaaagaagtccatgtggcgctgtgttgatggaacttgctggaaatctaccctctgggattcttgggaggtgtctgycagagtcactcctataaaactacctgtagtagggagtgccaggggaagctgctgctggcctttggttgatgctggccaccatgcatggtaggagccagac

SEQ ID NO: 247853 - DNA, 201 bp, Homo sapiens
ctgtagtagggagtgccaggggaagctgctgctggcctttggttgatgctggccaccatgcatggtaggagccagaccctggagaagccatctgtctttgygggaacctgatgctaaagaagttgcttgcactgcagacgctggatactggagaagtttatctatagaacccaggtgttgcatgctgaaacatgcagggga

SEQ ID NO: 247854 - DNA, 201 bp, Homo sapiens
cgccccttccctgcacaaatgaaggccaggggctatataattggctgttgctgaattctttggcagtgattttaaagtctggtctgggtgtgttatgtagmtgcttctctatccactccccacacccgctgcttctccagagcccctcacaaagcccaggcagagagagagagagagagagagagaatgacttgcctcaca

SEQ ID NO: 247855 - DNA, 201 bp, Homo sapiens
tggtctcagactcttgggctcaagtggtcctcccacctcaaccttccaaagcactgggattaaaggcgtgagccactgcacccagctatccgtatctcccrtccctgaacctgaggaatatacctgtgaaactgtgtcccaaagagttaaagaaaacaatgactaacagaaattcctgagtttgcaggatggcagataaga

SEQ ID NO: 247856 - DNA, 201 bp, Homo sapiens
accatgcatggtaggagccagaccctggagaagccatctgtctttgcgggaacctgatgctaaagaagttgcttgcactgcagacgctggatactggagargtttatctatagaacccaggtgttgcatgctgaaacatgcaggggatccgctaagcagagcacaccagaataacgaaaaaagaaaaatttctttctccta

SEQ ID NO: 247857 - DNA, 201 bp, Homo sapiens
atggccaataatcatcattggggtctactcatggactctcttgcctcatgtatttgttttattttgtcctcattcccacttctatttcccaggtatatcayaggcaactattctaacgtatttatagtttgtgtatctgtttttgctcttgccaaaatggaagccactgctttatacatagatgtattcttaactttaaaa

SEQ ID NO: 247858 - DNA, 201 bp, Homo sapiens
tggtgaacaaggaaggggcccgtgatgccctaattctttgccacagcaccatgtttgtttcacaaggagcctggcaggtttgggcttggggcagatagggragagaaagcagcagagacagcaaaaccaaatcatgtcagcttggcatgtacttccctctgaaatagctaagaatccatttctgtaaaagcactgattatc

SEQ ID NO: 247859 - DNA, 201 bp, Homo sapiens
gctgacttccccctcaaagtctgagttagagttttccttaatttatgtgatgggtttggtctttttggattccagaaagagctgggtgtggtttggagctrcactcagagtcacacaaaaccacagcctttagagaacccacaggaaggctttggggcacgtcctgattcttgacatttctcatcagtgctgactttgtat

SEQ ID NO: 247860 - DNA, 201 bp, Homo sapiens
agtgctggggttacaggccagagccaccaagcccgactttgaagtttaatatattttaattcaatctaccttataaattaacaaatcaagtcatctatatmcttatttactgtatggtttactgatgagtcgtgggctaagagaaatgaattaaaatttccttctattattatatttctgtttctccatgtagttcccatt

SEQ ID NO: 247861 - DNA, 201 bp, Homo sapiens; identical to SEQ ID NO: 48690

SEQ ID NO: 247862 - DNA, 201 bp, Homo sapiens
ctgcccaagtcccaaaccacagcctttcagagagatcgggagctcagaagacctcggccaggtctctcttagcatccaccaccctgcacccagcatacttrtcagtctctcctgagagctgggacctacctgctcccttctgtccccacagcctccagcccaatagttgctcagtgcagctttgaactggaacaatgccct

SEQ ID NO: 247863 - DNA, 201 bp, Homo sapiens
tgaattcgctcacaagagcccagggcttcataaagctggcccaacaagggcctcctgatggctcctggacacaggggtgccgttgtccagagtaacagctyccagactcatgttggagtcctgagtgctgcctcccttctgggctgtgccaggggtgggccaggaggcagccatgccatcagaacctgggctctggagtct

SEQ ID NO: 247864 - DNA, 201 bp, Homo sapiens
gtataggagcaacagtgtctctcttatcacgtagaagttctgactcattgcgagtcttggctttgggttaatggttccagccatgttgctgctgtgtcttktggtgcaggagaggctgggcacagttggtccctaagccattatggataagggatgtgtctgctgatatacacacatggacctgacatccagggaaggcag

SEQ ID NO: 247865 - DNA, 201 bp, Homo sapiens
aatacttatgaagtatctaccatattctgtgcactgttctgagtcaccagggggtcagctataaataagatggagaaagtccctgtcttaaggagcttacrttctagtggggtgatagacaacaaagaaagacaacaataaacacatgacatgtgatgtggaagagaaatcaagtggccaagaggagagtgacaaaggaga

SEQ ID NO: 247866 - DNA, 201 bp, Homo sapiens
cattatggataagggatgtgtctgctgatatacacacatggacctgacatccagggaaggcagggtgattggacagaacagttcttccagaagctgttggracttggacaagagtggcccttggctttctgtagttggtcatctgtcccctgttgcaatcaggggaaggccacacttgccttccttaaccacagttaggat

SEQ ID NO: 247867 - DNA, 201 bp, Homo sapiens
aaaactttgtcagaggctttaaaaaaggagctcttgtgtgtaaaatgtttccttgattctctttctggtgcctctctttctctaagtggtttgcttccccragttccccacctgagtctgggtggctgtggcacatctgtgcattctgtacgcacacaggcagccttttggagtgccagtttccaggtcttggttttattt

SEQ ID NO: 247868 - DNA, 201 bp, Homo sapiens
ctaagagacatttggaatggtctgactgttcaagatggatgggaaagcctcttcctgtaatgatagtagccaacatttgttgtcaggcagtggggccccayttttgagatggggtctctgtcacccaggttggagtgcggtggtgctgtcatggctcactgcaacctcagcctccccgggctgggtcttcttaattctgaa

SEQ ID NO: 247869 - DNA, 201 bp, Homo sapiens
caaagcagcctagaaaatgcttgacttttctgtcattccggggaggacactttcctcctccactgttctgctggcctggtgtacccacggcccctgatagrtgatagcacctgctaaagtgcaccatgcccttccgtctcactgcatcccacagatgaggccaggctgggatgagggagaaagggagggatatatagttca

SEQ ID NO: 247870 - DNA, 201 bp, Homo sapiens
cacctgtaatcccagcactttgggaggaggctgaggcgggtgcattcacttgaggtcaggagttcgagaccagccctggtcaacatggtgacacccatctytaccaaaaatacaaaaaattagccaggcgtggtggcgcatacctgtaatcccagctactcaggaggctgaggcaggagaattgcttgaacctgggaggtg

SEQ ID NO: 247871 - DNA, 201 bp, Homo sapiens
gattagtgttcatgattagtattctttttgctattttgttttttgtatttcaaatgttcccttaggatggatgatcagaattagggataaattgatatcawatcctttcctcctatattttttggggaaaagtaagaacatttcagagacacttgagacctactgcccaaggatttcagaagcatattaccaattacagtc

SEQ ID NO: 247872 - DNA, 201 bp, Homo sapiens
ggctgaggcaggagaattgcttgaacctgggaggtggagggtgcagtgagccaaggttgtgccactgcattccagcctggtgacagagcgagaaactgccwaaataaataaataaataaataaataaataaaaataggcttggtgtggtggctcacgcctgtaatcctagcactttgggaggccaagctgcatggatcacc

SEQ ID NO: 247873 - DNA, 201 bp, Homo sapiens
ggcagtgattttaaagtctggtctgggtgtgttatgtagctgcttctctatccactccccacacccgctgcttctccagagcccctcacaaagcccaggcrgagagagagagagagagagagagaatgacttgcctcacagagatgttggggatagggataggggtatgggtctttgcttttgccttttgaggggggataa

SEQ ID NO: 247874 - DNA, 201 bp, Homo sapiens
gggataaattgatatcaaatcctttcctcctatattttttggggaaaagtaagaacatttcagagacacttgagacctactgcccaaggatttcagaagcmtattaccaattacagtcgcatgagaaaccatttcaggacatcctgacacacatagagtcttacagtgtaaaatgtgtgtatgtgtgtatacatatataca

SEQ ID NO: 247875 - DNA, 201 bp, Homo sapiens
aatcctagcactttgggaggccaagctgcatggatcacctgaggtcaggagttcgagaccaggctggctgacatggtgaaaccccatctctactaaaaatmcacacacacacacacacacacacacacacacacacaaattagctgggtgtggtggcgtgtgcctgtaatctcagttacttgggaggctgagggaggagaa

SEQ ID NO: 247876 - DNA, 201 bp, Homo sapiens
atcctttcctcctatattttttggggaaaagtaagaacatttcagagacacttgagacctactgcccaaggatttcagaagcatattaccaattacagtcrcatgagaaaccatttcaggacatcctgacacacatagagtcttacagtgtaaaatgtgtgtatgtgtgtatacatatatacatggagacatatacaatct

SEQ ID NO: 247877 - DNA, 201 bp, Homo sapiens
cgtgctaagctcctcaatgttggctttcaagaagccttgaaggactatgactacacctgctttgtgtttagtgacgtggacctcattccaatgaatgaccrtaatgcgtacaggtgtttttcacagccacggcacatttccgttgcaatggataagtttggattcaggtaagagatactcagtcagaatctgtggtaaaca

SEQ ID NO: 247878 - DNA, 201 bp, Homo sapiens
atatatttttttttctttttctttttgagacagggtttttgctctgtcacccaggctggagtgcagtgatcacggctcactgcagcctcgacctctcgggmtaagcgattctcccacttcagtctcccgagttgctgggaccacaggtgcacaccgccatgcctgactaatttttgtattttttgtagagatggggttttg

SEQ ID NO: 247879 - DNA, 201 bp, Homo sapiens
aggtaccctctatgttgggtacccctggtttaggctgactagtacagtgtggttggctcatgtagacagcagaccctttattttagatacaactttttttytttttcttttattttttttgagacagagtcttgcttgtcacccagcctggagtgcagtggcgtgatcatggctcactatagccttaaactccctggctca

SEQ ID NO: 247880 - DNA, 201 bp, Homo sapiens
tcatgggccttggctgcagaggtgctcattcgtggttccaaaattccaattcctgggagaggaaaaatgcttagttcagtctcagttaggcctctgcttakatcaaacagccaaggccagtaggcccagtcctatggtagagacatggcctcaaagagccctctgctgcagttgttggggagtgtaccaagagaagggagc

SEQ ID NO: 247881 - DNA, 201 bp, Homo sapiens
atgcttagttcagtctcagttaggcctctgcttagatcaaacagccaaggccagtaggcccagtcctatggtagagacatggcctcaaagagccctctgcygcagttgttggggagtgtaccaagagaagggagcattgtcctgggctgggcagccctgggggtctagtgcatagatgtagaaaggctctgttggtatacc

SEQ ID NO: 247882 - DNA, 201 bp, Homo sapiens
tctagtgcatagatgtagaaaggctctgttggtatacctccctttgcttgttggaaagtgctcaacggggctgaattgtgtttgacagtgtaagtctgggytggggtgagggttgttacaagattgtcaagatgattaaatgaaatgccatttgaaacacttatccatgccttgtgtacggtatccccaccagtgaatatt

SEQ ID NO: 247883 - DNA, 201 bp, Homo sapiens
gcatgctgtggacagccccggcatgggagcgagtgggcgtgtgtgtgtgtgtatgtgagggtgagagagcgttagtgtgtgtgttggggttggggagagargagggggaatagaagatggaccacccgggtatcagcttctgccctggggagatggtggtgtcagttgctgagggaatcctgagaagcaggtctggctgta

SEQ ID NO: 247884 - DNA, 201 bp, Homo sapiens
gtgataaagctctgcacagagccattggaggagcaagctccttgaccatccttaaaccagggtaattttcatttaggttctgccacacgctcagcagggarctcctggaaggcaggatttgtcttgtccatcctccctccctacctcaacccactcctccttgggctggcacacagtaggtacccagaaagtatcaattga

SEQ ID NO: 247885 - DNA, 201 bp, Homo sapiens
tcaggaggcctcctggctggcactcgacccaattagtcattcaacgccaggtctggggctgctgtctgttgtctcaaaggtgtgagctgcaagatccttasagttgtggagaaaaaattgccagattggcaagaagggcaggattgggggtcaaggtgtctcagtgtgttggaagcatgatgggggttgtgcaaggggcac

SEQ ID NO: 247886 - DNA, 201 bp, Homo sapiens
acccaagacatatcatgtcagcattaagaatagactattcctgttttctggtcactgagttgtatgttttgacatccttattttggaagatacttccttaytaggaatgggatagggagggggtcacctttcccatctgtgggtcatattttaaaatatttattgttcaagtttaaagatataaccaaaggtataaagaaa

SEQ ID NO: 247887 - DNA, 201 bp, Homo sapiens
gctgccctctccctgtggtgggtgtgatctgggcatggtcccctgcccagggtctcctgcccacctctttcttcccagcctcgaggaggggtccttagatycgcacaaggagttccccctcttagcctcttaacctggccttataattctatctattttacagacgagaaaattaaggctcagaaagattaaatgacaagt

SEQ ID NO: 247888 - DNA, 201 bp, Homo sapiens
ggctctccacctgccactccaaatcactctgcacgcagcgtcccggacaagcgtcctaaagagcaaagctgaccaggtcatcttgcccaaaacactgtaayggcgtccactgccaacaggaagaagcccaaactccttagcctggtgaccacaccccttcaacatctgatcccaacccatctttccagcttcaccttcacc

SEQ ID NO: 247889 - DNA, 201 bp, Homo sapiens
agaaaagtgagttcagcacacttttgcactcttgctttcacccctcttgcctttccacctttcatgaggggatgatgcagcatgaaggccctcaccagatrccaacaccttgatattggacttcccagcctcctgaactgtgagaaataaatttctttataaactacccagcctgagatgttctgttatagcaatacataa

SEQ ID NO: 247890 - DNA, 201 bp, Homo sapiens
atgatgcagcatgaaggccctcaccagatgccaacaccttgatattggacttcccagcctcctgaactgtgagaaataaatttctttataaactacccagyctgagatgttctgttatagcaatacataatgaactgagacatctgttaaatgaccatgctcatgtcctgccccctttaaggacctcagtttcctcatttg

SEQ ID NO: 247891 - DNA, 201 bp, Homo sapiens
tttccaggcttgaccaacagtagcctatgcagaaatgtgcaagtcacaagctgaatccttcttttgtgaaggaattgagctggtgacctgagagagctggggtgtgtgtgtgtgtgtgtgtgtgtgtgtgtgtgtgtgtgatttccaattgcctccaatttctccacattctcaacattttaacattctagtgagtgtaaa

SEQ ID NO: 247892 - DNA, 201 bp, Homo sapiens; identical to SEQ ID NO: 48679

SEQ ID NO: 247893 - DNA, 201 bp, Homo sapiens
tctcaagcacccatggtatctctaaatactggcattattgggggaaaatggttcaggggagtaaacaaagaatcggattagaaactatcagaggcctctgscaagggccctcaagacccattggaggtgctagggatccaggcatcaatctaaggaaatgctagagctatggtcaaggagccagtgctggggcagggatga

SEQ ID NO: 247894 - DNA, 201 bp, Homo sapiens
ttccaggcttgaccaacagtagcctatgcagaaatgtgcaagtcacaagctgaatccttcttttgtgaaggaattgagctggtgacctgagagagctggggtgtgtgtgtgtgtgtgtgtgtgtgtgtgtgtgtgtgtgatttccaattgcctccaatttctccacattctcaacattttaacattctagtgagtgtaaag

SEQ ID NO: 247895 - DNA, 201 bp, Homo sapiens; identical to SEQ ID NO: 48698

SEQ ID NO: 247896 - DNA, 201 bp, Homo sapiens
ctcaagcacccatggtatctctaaatactggcattattgggggaaaatggttcaggggagtaaacaaagaatcggattagaaactatcagaggcctctggsaagggccctcaagacccattggaggtgctagggatccaggcatcaatctaaggaaatgctagagctatggtcaaggagccagtgctggggcagggatgag

SEQ ID NO: 247897 - DNA, 201 bp, Homo sapiens
ctgtgaatccttttacttctctctttgcaaaatagcaagtgttgtttgagatgtgttttaaatttacaaaatagtattgctgactaagatttggatgtccttttttttttttttttcattctcaaaggaggtgaccaaattgttaatctggatttttttatactgaataaatttctctcaatttttttgtggtatagcaac

SEQ ID NO: 247898 - DNA, 201 bp, Homo sapiens; identical to SEQ ID NO: 48683

SEQ ID NO: 247899 - DNA, 201 bp, Homo sapiens
ggacgatttttaatataaggggattgagttctaaggcacagaaaccatgggcagaaatgctaataggcttcaggaaagaccagaatgggggcaaagaagcytcaggaatatgggtatttctctttcatttctatgtccacttctctgtctgtggtctgtttcattctctcagctttctttgcttctctgtgcattggcaga

SEQ ID NO: 247900 - DNA, 201 bp, Homo sapiens
aatgttatgttgtttatgattatcctaattatcttttgttgctgtctagtatccttatagatattccattagcatacactattccaggtttcactatcgtmgataatctagatatgaacatttttgtagtgtgtagctctttgcttcagttgaattactttcctgggataaattcctggggaagaatttctaggccagagg

SEQ ID NO: 247901 - DNA, 201 bp, Homo sapiens
agtttcagttcctatcttctctcctggtgcatggactcttggcttgatcacctccaaccataagggattatcatacagacccaccgaggagtggggctgckcaagagacctggtgttctgggaccttgtgccatccaaacatttccattcatggacataaccagtggctcaagtcctctgagcatacatacaaaagagctt

SEQ ID NO: 247902 - DNA, 201 bp, Homo sapiens
atcctctactgaattctctctatcaagaatgacttggccgggcatgggggctcatgcctgtaatcccagcattctgggaggccgaggtgggcagatcaccygaggtcagaagttcaagaccagcccggccaacacggtgaaaccctgtctctatgaaaatacaaaaatcagctgggcgtggtggcaggtgcctgtaatccc

SEQ ID NO: 247903 - DNA, 201 bp, Homo sapiens
taacccttctccccagcctcggtgatttggctcatcgctgccttcatgtttcattctggcttcactcattcggaatttcttgtagttccttggctgttctyttttccttaccgcctttacaaatgctctcaccatgcatgcttttctctgctcctacagatgccttctctcccagcaccgcctccagagtctatgtctggt

SEQ ID NO: 247904 - DNA, 201 bp, Homo sapiens
ccaatggacacccattttttttgtcttcctaaaacctcttttccaggaaacaactctcccatacccaaaccacaaggttgtagtgggagctgccatgtttstacaatatgaccctgaccctttgtcacttgattggtccagggtcaggcacctgagccatgctggaatattgaagaaagagagaacagagagctatattaa

SEQ ID NO: 247905 - DNA, 201 bp, Homo sapiens
cctcttagttgaacaagtgcagtgtgggtcaatacatgattgctgctcttgctgccaggaactgtcccagcatagaaaggaatgggacacaatccctgccrtcaagattctaagggaggaagcaggcaggtcgactggtgcctcatctctgcagggctccagccaaggtttgtgaaggattttgcaggcatatggagtggg

SEQ ID NO: 247906 - DNA, 201 bp, Homo sapiens
caatcagtactggtttctggcccagtagcttcctgtggcaggagtggtggcaggttctttcatgatcagtgatggcagaaccgtgatgattcttaggtttyacaattatttctggaagctccattttaagtctacccctccagccctgctagtaatgttgtaagacagaacttttcaaactttaatgttcatatgaatggc

SEQ ID NO: 247907 - DNA, 201 bp, Homo sapiens
ggcagaaggtggaatgtttacatcatctcaattccagccacacccaggggccgactagctttccggaatagcaaatctaaattctcaggagaaatcatctrattagcccaacttgggtcacatgctcacccctggcccagacagctgtggctggaggctggggtcaagcagtatcaacatggctacccaggacccttccta

SEQ ID NO: 247908 - DNA, 201 bp, Homo sapiens
gccaacttactccctttggctgcctgtgaaaaagtacaggaagaagaaactattttgtttcaagcaaaattttgagaaactatagagggcccagggcattrtatacagccagaaaaaagaaatgctcaaagtaaattaaaacctagagggaatattaattctaagaccttccccgtaaaatggggccttaaggtcacggat

SEQ ID NO: 247909 - DNA, 201 bp, Homo sapiens
tacctccttggctatatacctcaaactgctgctatatatcactgctgctctcaagatggctgatatggtttggatctgtgtccccacccaaatcccatgtygaattgtaatccccaatgttgaaggtggggcctggtgggaggtgattggatcatggggatggatttctcatgcatgctttaacaccatcctcttggtatt

SEQ ID NO: 247910 - DNA, 201 bp, Homo sapiens
atgttagatttgggggtacgtgtacaggtttgttatatgagtatattgcatgatgctgaggtttgggcttctaatgatcctatcacccagcaggtagtacmtgatgggcagtttttcaactcttgtccctccacctctgctggagtccccagtgtctactgttcccacctttgtgccgagtgtactcaatgtttagctccc

SEQ ID NO: 247911 - DNA, 201 bp, Homo sapiens
tgtcccctgttgcaatcaggggaaggccacacttgccttccttaaccacagttaggattttcttggggattagaccagattctagcacctgtcctgaacctctcgccccgcccctacaaaggctgcttgcaagtgtagtgcacatacacagggagcaggtggggcatggaagtggaagtggagcccctgcctttggccctt

SEQ ID NO: 247912 - DNA, 201 bp, Homo sapiens
cggggaaacacagagagacctcattgcaattaaaaagtaagaatcaataaattaaaagtcaattaaagccacacgacaatattttgtgattatatgtaagrgttaggttctaggctcatgtaattgtaatgtcagacaaatgaatgatgaaccatatgaaaggtgtggggaacaagcaacaatttatcattgtgtgggagt

SEQ ID NO: 247913 - DNA, 201 bp, Homo sapiens
cctatggtagagacatggcctcaaagagccctctgctgcagttgttggggagtgtaccaagagaagggagcattgtcctgggctgggcagccctgggggtytagtgcatagatgtagaaaggctctgttggtatacctccctttgcttgttggaaagtgctcaacggggctgaattgtgtttgacagtgtaagtctgggct

SEQ ID NO: 247914 - DNA, 201 bp, Homo sapiens
gtgctcaacggggctgaattgtgtttgacagtgtaagtctgggctggggtgagggttgttacaagattgtcaagatgattaaatgaaatgccatttgaaamacttatccatgccttgtgtacggtatccccaccagtgaatattcacagtatattataataattccaacaacttcataattttcatatgcaatttctaaac

SEQ ID NO: 247915 - DNA, 201 bp, Homo sapiens
ttccccgagttccccacctgagtctgggtggctgtggcacatctgtgcattctgtacgcacacaggcagccttttggagtgccagtttccaggtcttggttttatttatttatttatttatttttttgagatgggggtctcactctgccgcccaggctggagtgcagtggtgccgtcatggctcactgcaacctcaacctc

SEQ ID NO: 247916 - DNA, 201 bp, Homo sapiens
tccccgagttccccacctgagtctgggtggctgtggcacatctgtgcattctgtacgcacacaggcagccttttggagtgccagtttccaggtcttggttttatttatttatttatttatttttttgagatgggggtctcactctgccgcccaggctggagtgcagtggtgccgtcatggctcactgcaacctcaacctcc

SEQ ID NO: 247917 - DNA, 201 bp, Homo sapiens
ggagaccttccaggtgctggggaagaaaatgataagagaagagaaaggtaagccgaaagcagagaggagagaatttctgaaaatgggaaacaagaagttaytctgaagctttaccttcaagcaggttagtaacttaataaaagtcaagaactgtgcatgcataatttcatttaattttttacaattttaggtaaaaggaaa

SEQ ID NO: 247918 - DNA, 201 bp, Homo sapiens
agatttgggggtacgtgtacaggtttgttatatgagtatattgcatgatgctgaggtttgggcttctaatgatcctatcacccagcaggtagtacctgatrggcagtttttcaactcttgtccctccacctctgctggagtccccagtgtctactgttcccacctttgtgccgagtgtactcaatgtttagctcccactta

SEQ ID NO: 247919 - DNA, 201 bp, Homo sapiens
ccccgagttccccacctgagtctgggtggctgtggcacatctgtgcattctgtacgcacacaggcagccttttggagtgccagtttccaggtcttggttttatttatttatttatttatttttttgagatgggggtctcactctgccgcccaggctggagtgcagtggtgccgtcatggctcactgcaacctcaacctccc

SEQ ID NO: 247920 - DNA, 201 bp, Homo sapiens
aatttcatttaattttttacaattttaggtaaaaggaaatataagccttgttttacaattgagaaagtggaaactcaaagaagttaaaaatatacccatakgagtcaggtacagtgggctcacgccgatagtcccagccacacaggaggctgacgcagggggatcacttgagcccaggagttcatgacacccacctgggca

SEQ ID NO: 247921 - DNA, 201 bp, Homo sapiens
ggtagtacctgatgggcagtttttcaactcttgtccctccacctctgctggagtccccagtgtctactgttcccacctttgtgccgagtgtactcaatgtytagctcccacttatcggtgagaacatgtggtacttggttttctgttcctgcattaatttgcttaggataatggcctccagctgcatctatgttgctgcaa

SEQ ID NO: 247922 - DNA, 201 bp, Homo sapiens
cccgagttccccacctgagtctgggtggctgtggcacatctgtgcattctgtacgcacacaggcagccttttggagtgccagtttccaggtcttggttttatttatttatttatttatttttttgagatgggggtctcactctgccgcccaggctggagtgcagtggtgccgtcatggctcactgcaacctcaacctccct

SEQ ID NO: 247923 - DNA, 201 bp, Homo sapiens
aggtaaaaggaaatataagccttgttttacaattgagaaagtggaaactcaaagaagttaaaaatatacccataggagtcaggtacagtgggctcacgccratagtcccagccacacaggaggctgacgcagggggatcacttgagcccaggagttcatgacacccacctgggcaacgtggtgagatcttgtctcaaaaaa

SEQ ID NO: 247924 - DNA, 201 bp, Homo sapiens
taggaattatcattctataaacttgcatgtaacttgaacctgaaactaagttaactggagagagagaatgcaggtagggcattcattgtgctgatgtggattgtggcagattgattttgtagtccccaatcagtactggtttctggcccagtagcttcctgtggcaggagtggtggcaggttctttcatgatcagtgatgg

SEQ ID NO: 247925 - DNA, 201 bp, Homo sapiens
tgtaatcctagcactttgggaggccaaggcaggcggatcacttgaggtcaggaatttgaaaccagcctggccaacgtgaaacccatctctactgaaaattaaaaaaaaaaaaaaaaaaagccgggcatggtggcacatgcctgtaatcccagctactcgcgaggctaaggcaggagaatcgcttgaatcctggaggcagag

SEQ ID NO: 247926 - DNA, 201 bp, Homo sapiens
gacagagtgaaaccctatctaaaaaaaaaaaaaagaaagaaaagaaaaagaagaagaagcctgtccctgctgacaccttgatattttggacttttagcctscagaactgtaagagaatcaatttctgttgtttgaagccaccaagtctggataatttgttagaggagtccttggaaactaatacagcacccttgctactcc

SEQ ID NO: 247927 - DNA, 201 bp, Homo sapiens
atatccagcaactcccaacagtcgctgattgagggctgctggaagagagaccattaactccctggcactatcggctagctcctttcatgtctctgggctcytagagaaagcctccgggcaaaggattgcaagggttgcacagggaggccgcaggtatgcacaagaatggggagtggtaaacagtgtgggtgggacactgac

SEQ ID NO: 247928 - DNA, 201 bp, Homo sapiens
accactccctatatccagtccctttgtcatgtgactttgaagtttctcccactagaggcagaatatgataatgttgggttggccaatcaacttgttttggytcatagaatgtgggtggaagtgaccattccaaccacaggctttatgagatattggggctttttgttcacccatcttgtgccatgtgaaaaacatgccctt

SEQ ID NO: 247929 - DNA, 201 bp, Homo sapiens; identical to SEQ ID NO: 48677

SEQ ID NO: 247930 - DNA, 201 bp, Homo sapiens
gtaatcctagcactttgggaggccaaggcaggcggatcacttgaggtcaggaatttgaaaccagcctggccaacgtgaaacccatctctactgaaaattaaaaaaaaaaaaaaaaaaagccgggcatggtggcacatgcctgtaatcccagctactcgcgaggctaaggcaggagaatcgcttgaatcctggaggcagagg

SEQ ID NO: 247931 - DNA, 201 bp, Homo sapiens
taatcctagcactttgggaggccaaggcaggcggatcacttgaggtcaggaatttgaaaccagcctggccaacgtgaaacccatctctactgaaaattaaaaaaaaaaaaaaaaaaagccgggcatggtggcacatgcctgtaatcccagctactcgcgaggctaaggcaggagaatcgcttgaatcctggaggcagaggt

SEQ ID NO: 247932 - DNA, 201 bp, Homo sapiens; identical to SEQ ID NO: 48678

SEQ ID NO: 247933 - DNA, 201 bp, Homo sapiens
tcctctgagaaatgggtgctttgtattagttgagatggaaagaagagaccagaaatgcctgtagtctctgcacatccagacaaaaacaaattttccccccytttttttttttgtttgttttttgagacagggtctggctctgtcacccaggctggagtgcagtgccgtgatcttggctcaccgcaacctctgcctcccggg

SEQ ID NO: 247934 - DNA, 201 bp, Homo sapiens
tgagaaagtggaaactcaaagaagttaaaaatatacccataggagtcaggtacagtgggctcacgccgatagtcccagccacacaggaggctgacgcaggrggatcacttgagcccaggagttcatgacacccacctgggcaacgtggtgagatcttgtctcaaaaaaaagaacccaaagtcagcagtggcagggatagga

SEQ ID NO: 247935 - DNA, 201 bp, Homo sapiens
  misc_feature (1)...(201): n = A,T,C or G
tgacaccagagagatattgccaggagtacttggctggctgagtgcccagatggcccataggagtagtgggccctccacagtccaaggtctggttctaggtngagagagaaggatgtgctcgtagtcagcaccgcagctccagaaaatctgctggggctccaaaactgattagaggggcagctgactcagtaataaaactcc

SEQ ID NO: 247936 - DNA, 201 bp, Homo sapiens
tacaactttttttctttttcttttattttttttgagacagagtcttgcttgtcacccagcctggagtgcagtggcgtgatcatggctcactatagccttaractccctggctcaagtgatcctctcacctcggctttcctagtagctgggaccacaggtgtgggccagcacccctggctgatttaaaaaaaaaaaaatttt

SEQ ID NO: 247937 - DNA, 201 bp, Homo sapiens
gggatgcagccggcagcaccagaggcggggagggaggggacactaggtgcagcctctcgctgaaggatgcccagaggcaccccagtgtggagcagcccaamgggaaggacttaacagcatctactctggctgagcctaaatcatcctccagcctcctttattccaggttcccactatccccttgtttctgagacagcatca

SEQ ID NO: 247938 - DNA, 201 bp, Homo sapiens
  misc_feature (1)...(201): n = A,T,C or G
ctgggcttaagcgatcctcccacctcagcctcctgagtagttgggactacaggtatgcaccaccagacttggctaattttattttattttttagagatggnagtcttaatatgttgctcaggccaatcttgaactcctggcctcaagcaatctttccacctcagcctcctgcatctattatatatatgttcactttgctca

SEQ ID NO: 247939 - DNA, 201 bp, Homo sapiens
tcactgtgaaacaagtttccttgagcagaatcctaactgtcttcacagaagctttgtgttatatttttattttggagtattttcacatatacaaaagagayactgtagtataataaacctttgaggacctatccagccccagcaaccattatggcatggtcagttctgtcccatccacatcctggggctctttttaagctg

SEQ ID NO: 247940 - DNA, 201 bp, Homo sapiens
tacactccattgcagctggcaatccaaatgagcttaggaattatcattctataaacttgcatgtaacttgaacctgaaactaagttaactggagagagagratgcaggtagggcattcattgtgctgatgtggattgtggcagattgattttgtagtccccaatcagtactggtttctggcccagtagcttcctgtggcag

SEQ ID NO: 247941 - DNA, 201 bp, Homo sapiens
gtgttatatttttattttggagtattttcacatatacaaaagagacactgtagtataataaacctttgaggacctatccagccccagcaaccattatggcmtggtcagttctgtcccatccacatcctggggctctttttaagctggtaaatcattatgatgtgggttgtcatttacagtggtaaaaaacatctatcagta

SEQ ID NO: 247942 - DNA, 201 bp, Homo sapiens
ccctgagagtggctgtactatccactctcaggataccaaagatcatctggaaagtcactggtggagctggaccggggcccaggcatctcttctcctgtccrgggctcttgacttcaggaccacctttctgaaacccatgatggggcaacaccaggacactttccagcctgcaggtgtctgtcccgcggaagcgagccaggc

SEQ ID NO: 247943 - DNA, 201 bp, Homo sapiens; identical to SEQ ID NO: 48703

SEQ ID NO: 247944 - DNA, 201 bp, Homo sapiens
ctcttgacttcaggaccacctttctgaaacccatgatggggcaacaccaggacactttccagcctgcaggtgtctgtcccgcggaagcgagccaggccacrtgtgaattcctgttttctgggtgggtttcagaaggtacgagcaagtcggcagggtgacagcccaggtgcttcttgggttccccaaaacgcggttatgttt

SEQ ID NO: 247945 - DNA, 201 bp, Homo sapiens; identical to SEQ ID NO: 48688

SEQ ID NO: 247946 - DNA, 201 bp, Homo sapiens; identical to SEQ ID NO: 48706

SEQ ID NO: 247947 - DNA, 201 bp, Homo sapiens
tggctcctggacacaggggtgccgttgtccagagtaacagctcccagactcatgttggagtcctgagtgctgcctcccttctgggctgtgccaggggtggrccaggaggcagccatgccatcagaacctgggctctggagtctggacaccttgtctttgtgaccttgggtgtgtcattgcacctctgagcctcagttgctc

SEQ ID NO: 247948 - DNA, 201 bp, Homo sapiens
gcaattgaaggcagttgccaggcttctgttggcctttctaggatctgagaaagcagcacttgaggcaaataacctatcccaacagactgtagacatatccygtcttgggtatagatgttgctggaaatggatgaccaaagtcactgagcagggcctggacccagtgccatggcacctgtgtacaggttgggataaaggggt

SEQ ID NO: 247949 - DNA, 201 bp, Homo sapiens
ttttggagcctggcaaatggcacagcctcagagcccaaaaggctaaagtcttcagtcggttccaggagccctggaaattctttccttttcatgatgtttcytttccatatccaaggtggccctggttggtacccaccctcttaaggcagactctcttccaggcaggtgctttcaacatgcccatgggcactggtccaaggc

SEQ ID NO: 247950 - DNA, 201 bp, Homo sapiens
agtaacatgtagtaacatggataagagaaaataattgaacttgccgccttggtatggagatttctaggcaaaatgttcaaaatgccaacttactccctttrgctgcctgtgaaaaagtacaggaagaagaaactattttgtttcaagcaaaattttgagaaactatagagggcccagggcattatatacagccagaaaaaa

SEQ ID NO: 247951 - DNA, 201 bp, Homo sapiens
atatttgaggtgagtcagtgcgttgacaggtgaggcctcagggcttgtctgcccctccctggtgattgtctccacctgaccctcaagctgcccgaagatckctgctgccctctccctgtggtgggtgtgatctgggcatggtcccctgcccagggtctcctgcccacctctttcttcccagcctcgaggaggggtccttag

SEQ ID NO: 247952 - DNA, 201 bp, Homo sapiens
ttactccctttggctgcctgtgaaaaagtacaggaagaagaaactattttgtttcaagcaaaattttgagaaactatagagggcccagggcattatatacrgccagaaaaaagaaatgctcaaagtaaattaaaacctagagggaatattaattctaagaccttccccgtaaaatggggccttaaggtcacggatgtggct

SEQ ID NO: 247953 - DNA, 201 bp, Homo sapiens
tgtgtgtgtgtgtgtgtgtgtgtgtgtgtatctacctgtagatagatagatattaatataattttagatagatgtatctagatctctctctctcatatatrtgtgtgtgtgtatatatctatatctatatctatatatatctccttttacccttaaatattcagtgtatatttcctaacaacaaggtgatttaaaaatata

SEQ ID NO: 247954 - DNA, 201 bp, Homo sapiens
tgaggcctgggaaggtggaatgagagagggtgtgtgtgcatgcagatgtgtatcagatgtgtgtgtaatgagggcaggggaaggggagtgatttcacagayacctggcacttacagcgaggaaccagccccccagccaccaccagtgcagatgaggtaaacgccaaacagtgtgcttgcctattgctgtcaactctatagc

SEQ ID NO: 247955 - DNA, 201 bp, Homo sapiens
gctatgcccccagggactgcgtctctcctcacaaggtggccatcatcattccattccgcaaccggcaggagcacctcaagtactggctatattatttgcayccagtcctgcagcgccagcagctggactatggcatctatgttatcaaccaggtgaggcctgggaaggtggaatgagagagggtgtgtgtgcatgcagatg

SEQ ID NO: 247956 - DNA, 201 bp, Homo sapiens
ccctggctttgtgtagctgtgtattttccttttaaaaataaaaccaccatttagatgtcagacttttaggtaacttcaaagtttatccagtcagtcagagygtgtctcctggggcacctggagacagtgcccttagttcaggtcacatgcctacatgccagcccctggtgaaatatctggagaagtctgattcgtgggcca

SEQ ID NO: 247957 - DNA, 201 bp, Homo sapiens
tgctctcttgcccaggctagagtgcagtggcttgatctctgctcactgcaacctccacctcctgggctcaagcgatcctcccacctcagcctcccgagtasctgggaccacaggtgcgtgccaccatgcccggctaattttttgtgtttttggtagagacagggtcttgccatgttggccaggctggtctcgaactcctga

SEQ ID NO: 247958 - DNA, 201 bp, Homo sapiens
agaggagaggaagagtgtaccccagttccagcagatagatgaacacattcaccttttctctgtttttgttctctctggattctcagcagattggatgctgyccccccaccttaagggtggatcttctccacagaattcactcagaatcacacacttacacatcccaaaataatgctttaccagatttctaggaattttttt

SEQ ID NO: 247959 - DNA, 201 bp, Homo sapiens
cttgaacccaggaggcggaggttgcaatgagccaagatcgtgccactgcactccagcctgagtgacagtgagagtctgtctcaaaaaaaaaaaaaaaaaaattctgtgctgcaattggctgactatcagcctggcttcccccttacaccaattgtatgttccagaaggccagtgatgctgtctaacttaggctctgttcta

SEQ ID NO: 247960 - DNA, 201 bp, Homo sapiens
gcgtatgcctgtgtttatgtctatgtgtgtggagtgagtttgtgccctcaagctcctggggacttgttcacaccctcttcagaggcactaatcagaacttbtgctggtcccattgaagaccccaggatacggaaccacccatcattcccaggaggcccctctctccctgggggctcctgaactctccctggcctgcatgat

SEQ ID NO: 247961 - DNA, 201 bp, Homo sapiens
atggtgaaaccccatatctactaaaaatacaaaatttgctgggcgtggtggtgcacacctataatcccagctatttaggaggctgtggcaggagaatcacytgaacccagtaggcagagattgcagtgagccaagattgtgccactggactccaacctgggtgacagagcaaaactccgtctcaaaaataaataaataaat

SEQ ID NO: 247962 - DNA, 201 bp, Homo sapiens
ggctgtggcaggagaatcacttgaacccagtaggcagagattgcagtgagccaagattgtgccactggactccaacctgggtgacagagcaaaactccgtstcaaaaataaataaataaataaataaaaataaatttaaaaaaatttttaaattagctgagtgtggtggcacgcacctgtagtcccagctacttgtgaggc

SEQ ID NO: 247963 - DNA, 201 bp, Homo sapiens
agtaggcagagattgcagtgagccaagattgtgccactggactccaacctgggtgacagagcaaaactccgtctcaaaaataaataaataaataaataaawataaatttaaaaaaatttttaaattagctgagtgtggtggcacgcacctgtagtcccagctacttgtgaggctgagataggaggatcgtttgaatccagg

SEQ ID NO: 247964 - DNA, 201 bp, Homo sapiens
atggggattctttctgagaaatgtgtcgatagtcaattttgttattgtgcaaacatcaaagagtgagtctaaatccagatggtacagcccactatacatcwaggttatatggtatggcctattgctcctaggctacaaacctgcacaacatgttactgtactgaatactgtaggcaattataacacaatgataagtgtata

SEQ ID NO: 247965 - DNA, 201 bp, Homo sapiens
tcagagcaggcttttcagtgttcccaactgctcaaggagtaggtaggtgtaggtgccaggctgggcgtaagcaggctgctcctgaacaggtccccagaccmgtttccctttccccctgtgcccaggtctgtttccagctggggaaatgggtgtgggactggccatgaggtcagtggccctggatcctgccaggcgttgcct

SEQ ID NO: 247966 - DNA, 201 bp, Homo sapiens
gccactgcttctggcccccaataagatatacatataattttgagacggagtctcactctgtcacccaggctggagggcagtggcacgatctccgctcaccrcaacctccacctcccaggtttaagcgattctcctgcctcagcctcctgagtagctgggattacaggcatgtgccaccatgcccagctaatttttgtattt

SEQ ID NO: 247967 - DNA, 201 bp, Homo sapiens
acagccttcagcccttacttgcaaatcaacaaagggtaaacctgtagaaaacatgggtttcggagccagaattctgcctcttgccagctgtgggctcttargaaagtttcttaatctgccggggccccactctacgacatggggagaactgctacttcatgggacagtgggtagcccagtgtagactgtaacgccggctga

SEQ ID NO: 247968 - DNA, 201 bp, Homo sapiens
cctttggactcagcacctttatggtctcactttgaattttgaacctcccacctccccccatcccccagagtaaggcaaatggtcttctgattgttcctgcrgagggaaggctccacaggtaagcacacgatggccaggaagcagagctggagcctgcctgaaaggctgtggagaaatggagggagggctgccctgaggact

SEQ ID NO: 247969 - DNA, 201 bp, Homo sapiens
tcagcctcctgagtagctaggattacaggcacctgccacctgcccagctaactttttgtatttttagtagagacggggtttcactatgttggccaggctgrtctcgaactcctgacctcgtgatctgcctgcctcggcctcccaaagtgctgggattataggcatgagtcactgcgcgcggcctcatctgtatcttcatag

SEQ ID NO: 247970 - DNA, 201 bp, Homo sapiens
acactatattcaatcgtgctaagctcctcaatgttggctttcaagaagccttgaaggactatgactacacctgctttgtgtttagtgacgtggacctcatyccaatgaatgaccataatgcgtacaggtgtttttcacagccacggcacatttccgttgcaatggataagtttggattcaggtaagagatactcagtcaga

SEQ ID NO: 247971 - DNA, 201 bp, Homo sapiens
gggtttcactatgttggccaggctggtctcgaactcctgacctcgtgatctgcctgcctcggcctcccaaagtgctgggattataggcatgagtcactgcrcgcggcctcatctgtatcttcataggttaaataaagacaagattcttttaaagaaaaatcagtttctaaaactcccccatacttacatagtatacattaa

SEQ ID NO: 247972 - DNA, 201 bp, Homo sapiens
gtaatcctaacacttgggaggctgaggcaggaggattgcttgagcccagaaattagagaccagcctgggcaatatagcaagaccccaactctaaaaaaaawttttttttttaattaaaaaaagaacagtccctttggggacaccagccatccagtcacctctacagacccatagaagccccagacctgtggccaagactag

SEQ ID NO: 247973 - DNA, 201 bp, Homo sapiens
acacacacaaattagctgggtgtggtggcgtgtgcctgtaatctcagttacttgggaggctgagggaggagaattacttgaactagggaggcggaggttgmagtgagccgagattgcgccactgcactccagcctgggtgatggagccagacggtctcaaaataaataaatagatacataaataaataaaataataaaata

SEQ ID NO: 247974 - DNA, 201 bp, Homo sapiens
tgagtgctgcctcccttctgggctgtgccaggggtgggccaggaggcagccatgccatcagaacctgggctctggagtctggacaccttgtctttgtgacyttgggtgtgtcattgcacctctgagcctcagttgctcacctgtaatcagggctacttcatgtggttgtgtggaatgtgttctgttcatctccagggggtg

SEQ ID NO: 247975 - DNA, 201 bp, Homo sapiens
tccaggcttgaccaacagtagcctatgcagaaatgtgcaagtcacaagctgaatccttcttttgtgaaggaattgagctggtgacctgagagagctggggkgtgtgtgtgtgtgtgtgtgtgtgtgtgtgtgtgtgtgatttccaattgcctccaatttctccacattctcaacattttaacattctagtgagtgtaaagt

SEQ ID NO: 247976 - DNA, 201 bp, Homo sapiens
caggcttgaccaacagtagcctatgcagaaatgtgcaagtcacaagctgaatccttcttttgtgaaggaattgagctggtgacctgagagagctggggtgtgtgtgtgtgtgtgtgtgtgtgtgtgtgtgtgtgtgatttccaattgcctccaatttctccacattctcaacattttaacattctagtgagtgtaaagtga

SEQ ID NO: 247977 - DNA, 201 bp, Homo sapiens
tgacctgccaaaaaaaaaaaaaaaaaaccggaaaggaaaaagaggctgggcatggtggctcacacttgtaatcactttgggaggctgaagtgtgcggatcrcttgagcccaagagtttgccaccagcctgggcaatatagggagacccatctctacaaaatacattttaaaaaattagccacatgtattggcatgcacctg

SEQ ID NO: 247978 - DNA, 201 bp, Homo sapiens
taaatagcctgtatttaaggcttttgtttttcttttttatttttatttgtatttttttagatggagtctcactctatcgcccaggctggagtgcagtggcrcgatctcggcttactgcaacctctgcctccagggtttaagcgattctcctgcttcagcttcctgaggagctgggactacagtgcctgccaccacaccctg

SEQ ID NO: 247979 - DNA, 201 bp, Homo sapiens
gcccctgggatgccgtgagtgcccaagagagcccccagatacacacaggccccaggaggtgtggcctgggtcacagtgcctgttgtgtctctggcaaaggrgtaaggctgccaccctccagcctaagccaacccctcctgcactctttcctcctctggcttctctgagacatagagaggtacaggagagagctccggacca

SEQ ID NO: 247980 - DNA, 201 bp, Homo sapiens
agactgacctctcggttcacgtgtcttgccatagagccactctcctgagtgggtttttctcctgatcgtttgggccaagtgacttctctctgaacctcatrtttctcttctgggataataaatggtcaccctttcaaggggttgttttggaagatattgtgaacaatggtaaataagggcttaattaatgagggtaagccc

SEQ ID NO: 247981 - DNA, 201 bp, Homo sapiens
aaaaaaaatttttttttttagagatgtctcactatgttacccaggctggtcttgaactcctgggggctcaagcaatcctcctgctttgacctcccaaagtrctgggatgacaggcatgaactactgcacctgctgagatgcaacagctttctgtcagactcattttattctcatcatttcttcctgtcctcccttgctggg

SEQ ID NO: 247982 - DNA, 201 bp, Homo sapiens
gagatgggcacttggaccagcaaacagcagctacaggtagccagggcacccgaggagcacttgctcatgagccggtttccctggtttttatgggggctgtygctgagcgtctgccagggtttgtgtcctagcacttgctggtctttgctgggctctcagctctcaggtgtttctctaccagcacgtttccccctccctcat

SEQ ID NO: 247983 - DNA, 201 bp, Homo sapiens; identical to SEQ ID NO: 48676

SEQ ID NO: 247984 - DNA, 201 bp, Homo sapiens
agaggaggtattcaacatataccacaggagggagtctctgtctatggtgacaattctgaacactgtgtgtccctgtgggacattgtgtgagtgcatgtgtrcaggacgtgcctggggctgtgtctaatgtcagaatatttgacaaccagtcagagcagatgttgaccaaaagagcagagcagcatctcgaaatcatcccac

SEQ ID NO: 247985 - DNA, 201 bp, Homo sapiens
cttttccttgtagaccttttcaaattcatctacttggaattatcttcccttgctcctttttcctagctaatttctacttattcctgtgtgccccactgatyccttagaattctgtgctgaaggccgggcacggtggctcatgcctgtaatcctagcactttgggaggctgaggcgggtggatcacttgagatcgggagttc

SEQ ID NO: 247986 - DNA, 201 bp, Homo sapiens
atctgtaaaaattataatagtggcgtttctctcacatagggctaattgaaataatgtatgtaaactatttggctctttggcactgaataagcggggctggrttctgatggactgacggggacgatgctgaggctgtggatgggaaggtggctccgagcctcctcattccactacatgaaggggcaatctcaagagtctcaa

SEQ ID NO: 247987 - DNA, 201 bp, Homo sapiens
tccagatattgcttcaacctattttttcagccacaccatccactgttctccattcacaaacctcacccacaagtctaaagagtaaaaagtaaaaggatcastttgcaaaaatccactatagatgtacagattgggtgtgtgtgtaggggaaacagcacacttgggatgcatttgcagaccttgttccagattcaggtctaa

SEQ ID NO: 247988 - DNA, 201 bp, Homo sapiens
gtgagaacaacacgcagctgccttaccattcttgagaaagggagctttcctgctgccactggcacttctgaaacacaaagaagcaagaattagattatgcyggctctagaccccaggtctaggggtctgaggactgcttctgcttcagggagcttggtccagcaactacccaacctggaattcctcaaggaaaggtgatga

SEQ ID NO: 247989 - DNA, 201 bp, Homo sapiens
ctctgtctgatctgtcatttgtcatcttcttgtgaacctgtggccactgaagtttgaattcccagcctctctcatttattcctttattcaggaaaccattrttgatgcctcattggtggccagttcaatgctcactatcaggaacacaaggatggtgtcctgccctgggatccctgacttgggaagggtagggaagaggta

SEQ ID NO: 247990 - DNA, 201 bp, Homo sapiens
gactgcttctgcttcagggagcttggtccagcaactacccaacctggaattcctcaaggaaaggtgatgagccaccagacaatggggctgccagaaagctratgtgatcttgggttccataaacagagacagaaattcaaaaattaggaaggtgacagtccagcctattccttgttagttagatcccactggaattgttat

SEQ ID NO: 247991 - DNA, 201 bp, Homo sapiens
gtgcaatcacatctcactgccacctcaacctcctgggcttaggcaatcctctcacctcagcctcatgagtagttgtgactacagacacataccaccaccamgcctggctaattttttttatttttaatagagacaaggtctcactatgttgcccaggctaatcttgaactcctgggctcaagcaatgctcctgcctcagcc

SEQ ID NO: 247992 - DNA, 201 bp, Homo sapiens
aattgaacttttttaaatgactggaatgaacctttgccattatacttgtcactcaacaggcaatcccccatcttattttggaaaattttccagtgtatatrgtactggagggctcaatgccctagctcccaccatggaggcagaaaggggaagattcgttcctcccctacctagcagctagggctcaagcatgtgaattgg

SEQ ID NO: 247993 - DNA, 201 bp, Homo sapiens
tccttctgcaggatatatttctagaggggaattgctgactcagaggttttggtactctgtgttgattgtagagtgacggcagaaaagtgaggcccaagagyttcctagtgaccatgtgtagtggacaagtcaccagtccctgtgagtgtttggcccaaaggctttaaggcatttgatatcactgtttttgtttctgcacca

SEQ ID NO: 247994 - DNA, 201 bp, Homo sapiens
atcgtgctaagctcctcaatgttggctttcaagaagccttgaaggactatgactacacctgctttgtgtttagtgacgtggacctcattccaatgaatgaycataatgcgtacaggtgtttttcacagccacggcacatttccgttgcaatggataagtttggattcaggtaagagatactcagtcagaatctgtggtaaa

SEQ ID NO: 247995 - DNA, 201 bp, Homo sapiens
cctgtatttaaggcttttgtttttcttttttatttttatttgtatttttttagatggagtctcactctatcgcccaggctggagtgcagtggcacgatctyggcttactgcaacctctgcctccagggtttaagcgattctcctgcttcagcttcctgaggagctgggactacagtgcctgccaccacaccctgctaagtt

SEQ ID NO: 247996 - DNA, 201 bp, Homo sapiens
ggcttactgcaacctctgcctccagggtttaagcgattctcctgcttcagcttcctgaggagctgggactacagtgcctgccaccacaccctgctaagttkttgtatttttagtagagacggggtttcaccatgttggtcaggctggtctcgaactcctgaccttgtgatctgcccgcctcagcctcccaaagtgctggga

SEQ ID NO: 247997 - DNA, 201 bp, Homo sapiens
caccttatagaagtttgtttacagtactggatgtctgcctgtataaacgtccccttcccaaaaaggtcttacctgaccacacaatctgaaataggttcttratattattctttcttgtaatattcttttctttcagatcaattatcacagtttgttattatgtacttttttttttttttgagacagagtcttgctctgtcg

SEQ ID NO: 247998 - DNA, 201 bp, Homo sapiens
aatgaacccctataagaaaagacagattaatgagagaaaaacaaacaagtgtattagcatgtatattttgtatatacatctgaaatacccagggaatgaayaggcctcaaagaggtggcttggaattccagttcatatagcatcttcaacaaagaacagtaaatttttagagaagtggcaagacaagggaaaagggcattg

SEQ ID NO: 247999 - DNA, 201 bp, Homo sapiens; identical to SEQ ID NO: 48691

SEQ ID NO: 248000 - DNA, 201 bp, Homo sapiens
gtttcttgggacccaggcttgcatcactcagtgccaccctccccaggggaacaggctccaagctgtgcctgctcctctctggtgactcacaacacgactgrtctccaagatctaaacctgattgtgcctggaagtgaagaagggtgataacacccttaataaaaatagatactatgcagtgaacacttagtgcttgctcta

SEQ ID NO: 248001 - DNA, 201 bp, Homo sapiens
gtggcttggaattccagttcatatagcatcttcaacaaagaacagtaaatttttagagaagtggcaagacaagggaaaagggcattgaacttctaagggcwgcaaattgtgggacggcaaataagtggcagttacaggctatttagtagagcttgctacgtagattcctttggtgccatctccaggctgttaagctctaaa

SEQ ID NO: 248002 - DNA, 201 bp, Homo sapiens
tgttgtgctgtgtattttgatttcctgtgtatgcaaatgtgtgtatttaccattgtgtagggggctgtgtctgatcttggtgttcaaaacagaactgtatktttgcctttaaaattaaataatataacgtgaataaatgaccctatctttgtaactgcaggtggtttctgtttgccaggtgtaagggttgtcatggctgtg

SEQ ID NO: 248003 - DNA, 201 bp, Homo sapiens
ggtatgagtcactgtatgaatctagtgcattcttgttcttgtctgttctgtttccggagcctgaatgtcataattttgtgggagctgctgggccagtggcktgcccataatcccagctactaaggaagctgagacaggaggatcacttgagctcaggagtttgagatcaacctggacaacatagtgagatactgtctctaa

SEQ ID NO: 248004 - DNA, 201 bp, Homo sapiens
atctttataagagacagaagagaaatcagagaagaagagatggctgcatgaggatggaggcacagattggagttatgcagccacaagccaaggagcccttrgaagctggaagagcaggattcttccctggggcctttgaaaggaatgtgaccttgctttgattttaaacttttggcctctggaaatttgagaatctttttt

SEQ ID NO: 248005 - DNA, 201 bp, Homo sapiens
actttctgcaacactccgcccactctgcaacatacactcttcttccaggttctagtaatctcccacccctcactccctgggcatagtggtggtgatagctstgctcctgccagacctgggtttctgccatatcccttctgtcttccccatccttgtccacacccttggatattcctggactatttaatatatcttaaaacc

SEQ ID NO: 248006 - DNA, 201 bp, Homo sapiens
gagtgatgataactccatcattaagccagcatcttttgaagagagagcaatacttcagctgagttgggccagctgagagtcctggtttctcacattacccractttgggccctcagctaatacatcagtgaaagacattttctttttccccagaagcagcccagcagagaccactccatcctgtcctgactcttttccttg

SEQ ID NO: 248007 - DNA, 201 bp, Homo sapiens
cactgccagtctgaagatgagtagggtgatggggggaggtgggcagtacctgaagctgaactggtgagagaggcaggctggcctgggggctcagctggggyctgggatggttggtacagtcccctcaggggggtaggggagtgagtgttagactgcttaagcctcagaggccgctcttgcccacctatgctttgaggagat

SEQ ID NO: 248008 - DNA, 201 bp, Homo sapiens
aggagggcaagaccattgtagggtaccagacctactgctatttgaatctgcttggctcaactcttatcaatcctgaaggctttctgtggctgctatatttkgatttaaaacactggaagctgggttttgatggggccccaggagtggggagcaggagaggtttctgagggatgcttataagttttttgagacactttctgt

SEQ ID NO: 248009 - DNA, 201 bp, Homo sapiens
tagggtgatggggggaggtgggcagtacctgaagctgaactggtgagagaggcaggctggcctgggggctcagctggggcctgggatggttggtacagtcmcctcaggggggtaggggagtgagtgttagactgcttaagcctcagaggccgctcttgcccacctatgctttgaggagatcctcttcatttgttcaaaggg

SEQ ID NO: 248010 - DNA, 201 bp, Homo sapiens
tttttggatggtttctgtaggagagctttctaaaaaaggaaaaaaagtgttgaatgttttttgagaagggctagattttcaagccagtcttacaaaaggayagactcattggaaattccagatttgcttagtgctggcagatgagtatcacttattgctgaacaatgtgtctagaattctgattaaaaaagaaactaggtc

SEQ ID NO: 248011 - DNA, 201 bp, Homo sapiens
ggatccatcaggtctgagtcatgggttctgctgatgggtggtggggacagaggccttgtttagcttaaggtgggggagctgagctccagcagagcttgggyctgccagatggcatggccaacatggccagtttgccctgggaccaccttccctggcctccagctcacatcctgctccacccttcctccagcccaaagtgcc

SEQ ID NO: 248012 - DNA, 201 bp, Homo sapiens
tccagcctattccttgttagttagatcccactggaattgttatgtcccatataataattataaaatagcaattcagcagttattatgtgccgggcattgaraacacatgattttaactcctctccacccctctcttactgctgtgtaacagagggaagaaaggagatagtagtggatgctgtgttctgccatcaagagccc

SEQ ID NO: 248013 - DNA, 201 bp, Homo sapiens
ggtccactgggtccagccagtgacatcctatgctgtgtccatataggtgggaacagaggtggcactctatttcaaggaccacattttctactagctcttasccaacctggctggggacctaagaacttagtatctcctctaagacctgagtgtggtgctttgtctccataagctaccccaagaccatctgctgaactcaca

SEQ ID NO: 248014 - DNA, 201 bp, Homo sapiens
tggaattgttatgtcccatataataattataaaatagcaattcagcagttattatgtgccgggcattgaaaacacatgattttaactcctctccacccctmtcttactgctgtgtaacagagggaagaaaggagatagtagtggatgctgtgttctgccatcaagagccctcgcgcaagtctgaggcactcatttcccctg

SEQ ID NO: 248015 - DNA, 201 bp, Homo sapiens
ccagggctgcatccactacccaggaacagcccatatcccatgtcgggttgatgtggttacaaagggcctgatcccctcgcccaaagctgcctgtaggatcwtctgaagcctctgttgtgctgcatggaagtcaacttccctcatccttcatggatgttactcccatgaacgctccccagtaaattgcatgtatagctcaga

SEQ ID NO: 248016 - DNA, 201 bp, Homo sapiens
catttcttgatatttaactgttagggaaaagaaaagcatttaaaaaatataaagcccttccgtggttccctgtcctgatcactaagcctccctatggacckgagctgcttagtcttatgtttagggtactgcgtaagctgaccctaaacttgcttcttgggctgacttcccagtacacctctccatgccccagctattcct

SEQ ID NO: 248017 - DNA, 201 bp, Homo sapiens
atgtactgtcccactcactgggtcaccccgcctccctatgcacctgagctccttggggttcctttatgtctgcctttgcgcagcacttggttcaatgtccyacactgtgggtgttcaggaattgaatactaaagtgcattggtgtaatcccagcaccttgggaagccgaggcgggcaaatcttggggttggaagttcgaga

SEQ ID NO: 248018 - DNA, 201 bp, Homo sapiens
aggagggggtgttcagaactctaagatgtcagagtttctttctgggggatgtggggaaaagctacatttacccccaggctgcccttgaccttgacccaaartgccccctcctcactcagcccaggcagtagtctgaaatgtgcaaaaaacaaaaacaaaaacaaacaaacaaaaaccaaacttcttcagagcaggcttttc

SEQ ID NO: 248019 - DNA, 201 bp, Homo sapiens; identical to SEQ ID NO: 48680

SEQ ID NO: 248020 - DNA, 201 bp, Homo sapiens
tagtccctcatctccttcaagctttgctcaaacatcggactctcagagatacctcccctgatttgaaattgcaacccccttccagtgcccatcaccctgcyaagtattttttccttaacttttatcagcttctaacataccgtttaacatacattgtaaccatcttgtttattgcctttccccttttcctctaccccattg

SEQ ID NO: 248021 - DNA, 201 bp, Homo sapiens
gtatatgtgtccagtcctgggaaagggctctgtcgtgctcacatggctgcccaagtcccaaaccacagcctttcagagagatcgggagctcagaagacctyggccaggtctctcttagcatccaccaccctgcacccagcatacttgtcagtctctcctgagagctgggacctacctgctcccttctgtccccacagcctc

SEQ ID NO: 248022 - DNA, 201 bp, Homo sapiens
atgggttctgctgatgggtggtggggacagaggccttgtttagcttaaggtgggggagctgagctccagcagagcttgggtctgccagatggcatggccarcatggccagtttgccctgggaccaccttccctggcctccagctcacatcctgctccacccttcctccagcccaaagtgcccccacctgcctggaaacctg

SEQ ID NO: 248023 - DNA, 201 bp, Homo sapiens
agggaaaaagctctgaccaatgatttaaggctgggaaggctgaggcagagagaaggatttgcagagaaccctctagaggagcttcatagttgctgtgttcyagccactgggcatggccttgtgggaaacagtggttcagccttacaagaagctgcaggggactcaagctctactctataactgcgttttctttcttcagcc

SEQ ID NO: 248024 - DNA, 201 bp, Homo sapiens
gcatcattcgggggattgtctcatgtgattacggaggctgagaagtcctgccacaagctgtctgcgagctggagaaccagggaagctgttggtgtggctgmgtccaaatccaaaggcctcagaaccaggcaagctgaaggcataattcccagtctaaggccaaaggcctgagaacccaggggcctctggtgttaagtcctg

SEQ ID NO: 248025 - DNA, 201 bp, Homo sapiens
tcttctccacagaattcactcagaatcacacacttacacatcccaaaataatgctttaccagatttctaggaattttttttttttttttttttttgagacrgagtctcagtctgtcgcccaggctggagtgcggtggcgcgatctcggctcactgcaagctccgcctcccgggttcacaccattctcctgcctcagcctcc

SEQ ID NO: 248026 - DNA, 201 bp, Homo sapiens
tcccttcaggtggacgttgttcatcagtatcctgggcaagaggccatcataaaccacagacagctgagtgattaggaagaggagctgaagagggagcattrgatgtttgattgagtcttaggtgagaaagtatatcattaaaacaaaaagatagatgtaggcgggctcagtcttgtgtgcctggtgtgttggtagaaaaac

SEQ ID NO: 248027 - DNA, 201 bp, Homo sapiens
cacaaggagactcaatcagagtcttttcctgggacctttgtcattgggacttgagaaagaaagcctttggtgcctcttgggtggaagctctcaaatgtgasacccaggctactggcagccgtgtttccagccttgaggaagccaggctgccagaatgaggctaatgggtggagagagaagcagatgctagagtctggtatt

SEQ ID NO: 248028 - DNA, 201 bp, Homo sapiens
tcggctcactgcaagctccgcctcccgggttcacaccattctcctgcctcagcctcctgagcagctgggactacaggctcccgccaccgtgcctggctaattttttttgtatttttagtagagacggggtttcaccacattagccaggatgatctcagtctcctgacctcgtgatccactcgcctcagcctcccaaagtgc

SEQ ID NO: 248029 - DNA, 201 bp, Homo sapiens
cgcaggtctgcatgattctgaacagaggtagtcgttgccttcctggagtctgagctctctggagtttctcactgggacagagccaggtgtgtagcagagcrtggtccctgcagtatggcaggaggtgtgcagggcattcaggaggcctcctggctggcactcgacccaattagtcattcaacgccaggtctggggctgctg

SEQ ID NO: 248030 - DNA, 201 bp, Homo sapiens
ctgtcttcacagaagctttgtgttatatttttattttggagtattttcacatatacaaaagagacactgtagtataataaacctttgaggacctatccagycccagcaaccattatggcatggtcagttctgtcccatccacatcctggggctctttttaagctggtaaatcattatgatgtgggttgtcatttacagtgg

SEQ ID NO: 248031 - DNA, 201 bp, Homo sapiens
ctgggactacaggctcccgccaccgtgcctggctaattttttttgtatttttagtagagacggggtttcaccacattagccaggatgatctcagtctcctsacctcgtgatccactcgcctcagcctcccaaagtgctgggattacaggcgtgagccacggcgcccagcctctaggaatttttttaatccagtcaagttga

SEQ ID NO: 248032 - DNA, 201 bp, Homo sapiens
gttaaatagtatgatagaacttctggattcatcctccatacttcctaatttttcttttatacttctcacctctgttctttctaactgcattttatgagaattttttttttttttttttgagacaggctagagtgtagtggtgcaatcttggctcactgcaacctccacctcctgggttcaagtaattctcatgcctcagcc

SEQ ID NO: 248033 - DNA, 201 bp, Homo sapiens
cggtctcgatatcctgtcctcgtgatccgcctgcctcggcctcccagagtgctgggattacagggaggagccaccacgcccggccccagctaattttttgkatttttttttttttttttttttagtagagacgggtttcactgtgttagccaggatggtctgaatctcctgacctcgtgatccgcccacctcggcctccca

SEQ ID NO: 248034 - DNA, 201 bp, Homo sapiens
agaaggagtaatgttgaagaggaggcacaaaaaatcaatacctgtccattacaggaagacgttgattctgcaaactacactcttatctaagaatagtttgtgtgtgtgtgtgtgtgtgtgtgtgtgtgtgtgtgtgtgtaagacagggtcttgctctgttgcccaggctggaatgcagtggtgcaatcacatctcactgcc

SEQ ID NO: 248035 - DNA, 201 bp, Homo sapiens
actgtgttttccagtctgaggacaccagtcacaacctgtgcatatcacggtgatagagtcacgtggttgctcctcaagaactgggctagtttggactcaamttgtcttccagcagcccactgcacagtggcccaacctggcctcagctggaagactaagtactccccatatctctacaacagttgctcaggacaattcagc

SEQ ID NO: 248036 - DNA, 201 bp, Homo sapiens
gaaggagtaatgttgaagaggaggcacaaaaaatcaatacctgtccattacaggaagacgttgattctgcaaactacactcttatctaagaatagtttgtgtgtgtgtgtgtgtgtgtgtgtgtgtgtgtgtgtgtgtaagacagggtcttgctctgttgcccaggctggaatgcagtggtgcaatcacatctcactgcca

SEQ ID NO: 248037 - DNA, 201 bp, Homo sapiens
agggaggcagttgaaagggaagagagctgcagagagggatttcttggtctgcagagggtaggagcaagccttgaaggctgctggagtgaggattccgagcyctggtctttattctttttctaattcattacatcattttaggcaagtcctaactcctttggtctctgttgtctttctgaaatttgagtgggctgggcctgc

SEQ ID NO: 248038 - DNA, 201 bp, Homo sapiens
ccaattagtcattcaacgccaggtctggggctgctgtctgttgtctcaaaggtgtgagctgcaagatccttagagttgtggagaaaaaattgccagattgrcaagaagggcaggattgggggtcaaggtgtctcagtgtgttggaagcatgatgggggttgtgcaaggggcacagcgagttcagaagggagcaggagagtg

SEQ ID NO: 248039 - DNA, 201 bp, Homo sapiens
cagccagtgacatcctatgctgtgtccatataggtgggaacagaggtggcactctatttcaaggaccacattttctactagctcttagccaacctggctgrggacctaagaacttagtatctcctctaagacctgagtgtggtgctttgtctccataagctaccccaagaccatctgctgaactcacaggaaacagtttca

SEQ ID NO: 248040 - DNA, 201 bp, Homo sapiens
gggaggccgaggtgggcggatcactaggtcaggagatcgagaccatcctggctaacatggtgaaaccccgtctctactaaaaatacaaaaaattagccggkcgtggtggcgggcacttgaaaagtcccagctactcgggaggctgaggcaggagaatgatatgaacccgggaggcggagcttgcagtgagccgagatcgcg

SEQ ID NO: 248041 - DNA, 201 bp, Homo sapiens
acctaagaacttagtatctcctctaagacctgagtgtggtgctttgtctccataagctaccccaagaccatctgctgaactcacaggaaacagtttcagtkcctatcttctctcctggtgcatggactcttggcttgatcacctccaaccataagggattatcatacagacccaccgaggagtggggctgctcaagagacc

SEQ ID NO: 248042 - DNA, 201 bp, Homo sapiens
ctgaactcacaggaaacagtttcagttcctatcttctctcctggtgcatggactcttggcttgatcacctccaaccataagggattatcatacagacccaycgaggagtggggctgctcaagagacctggtgttctgggaccttgtgccatccaaacatttccattcatggacataaccagtggctcaagtcctctgagca

SEQ ID NO: 248043 - DNA, 201 bp, Homo sapiens
cttgagcccaggagtgcaagaccagccggggaaacacagagagacctcattgcaattaaaaagtaagaatcaataaattaaaagtcaattaaagccacacracaatattttgtgattatatgtaagagttaggttctaggctcatgtaattgtaatgtcagacaaatgaatgatgaaccatatgaaaggtgtggggaacaa

SEQ ID NO: 248044 - DNA, 201 bp, Homo sapiens
cagtctctcctgagagctgggacctacctgctcccttctgtccccacagcctccagcccaatagttgctcagtgcagctttgaactggaacaatgccctcytttacagctggagaaactgaggccccaagagggtaggggactttggtaattctgcgccagtcaggatttgaacccaagtttcttttctcccagcccagaa

SEQ ID NO: 248045 - DNA, 201 bp, Homo sapiens
tcctaagtgatactgcttgccctgaacctttgaatagcagggacctaggagaccttccaggtgctggggaagaaaatgataagagaagagaaaggtaagcygaaagcagagaggagagaatttctgaaaatgggaaacaagaagttactctgaagctttaccttcaagcaggttagtaacttaataaaagtcaagaactgt

SEQ ID NO: 248046 - DNA, 201 bp, Homo sapiens
caccccaagctcacctaccaacacaaagccacagagaatccaggttctgcccactcacccctgtccacaacaaggagggcagccaaggccagggcgattayccactggcggacggccatgctgatcctgggatagtgtagcctgagctggctggggcctgggcctgaggaaggatgggggcctatttatagtgccgctctc

SEQ ID NO: 248047 - DNA, 201 bp, Homo sapiens
cagccacggcacatttccgttgcaatggataagtttggattcaggtaagagatactcagtcagaatctgtggtaaacatgtctctctcatgtgttgactasgaaatgcagtcctggcagctcaagagtgcctctttaagctctggagcagaatgcctcctctgagaaatgggtgctttgtattagttgagatggaaagaag

SEQ ID NO: 248048 - DNA, 201 bp, Homo sapiens
cccaaggggcctcaaggggcaccgtgatttcacgagaatgctgcaagcaaatcttttctcaagctggggaatttggtggtaatgcctggctcagcttgcgstgcgcacctggcctttggaagattggtacagagagaagcggcccatccacatgagcctgtggaacagcactggtgggggagctgatttgtgaagaggggc

SEQ ID NO: 248049 - DNA, 201 bp, Homo sapiens
ctgtccacaacaaggagggcagccaaggccagggcgattacccactggcggacggccatgctgatcctgggatagtgtagcctgagctggctggggcctgsgcctgaggaaggatgggggcctatttatagtgccgctctcctaatcttatcttatctagggccagatggagagaccagagttaatctttgcacgctgaca

SEQ ID NO: 248050 - DNA, 201 bp, Homo sapiens
atacaaaagagcttagaacaaagtctcttgatacccccttccgttccagagctctgatggccttcagaaaaatcagattatcacagcctggtgcaacatgwcacaactccagaccactatgaattttgatagggtccttgggttgcaagcaacagaagtagattttggcaaacctcagcagaataataattttccagaagg

SEQ ID NO: 248051 - DNA, 201 bp, Homo sapiens
ccagaccactatgaattttgatagggtccttgggttgcaagcaacagaagtagattttggcaaacctcagcagaataataattttccagaaggatgtggtrttgtcttaggttggactcaggggcagaccataagaaaagcacattagattccaaatcattttctgggaggcaatcccacgaaacacctgcaggagagtgg

SEQ ID NO: 248052 - DNA, 201 bp, Homo sapiens
cctcatctgtatcttcataggttaaataaagacaagattcttttaaagaaaaatcagtttctaaaactcccccatacttacatagtatacattaataagtmatttggatatttgctctcaaagaatttctgatatataaaatacattttatttacatacacgtttctctaattcatttagatcagtgtttttcagctctgt

SEQ ID NO: 248053 - DNA, 201 bp, Homo sapiens
cagtgtttttcagctctgtctgcagattggatttccctgggggagaatttacaaatacagatgctgagcttcgctctgaaatatttaaatcagaatctgtggttttttttttttaaagaaaaactttatttcgaaagatttcaagcctgcagataagttgcaagaatattccaatgacaaggcgaaggattcttgtttgag

SEQ ID NO: 248054 - DNA, 201 bp, Homo sapiens
ccctttggggacaccagccatccagtcacctctacagacccatagaagccccagacctgtggccaagactagcttgaggcccccagtgatccttgactcarcttcaagatccttccgttcctccttaggaaactgcacagtcccagggatacctctgaggcaggtggcagctatctttccattgcttaggcaggtagagaa

SEQ ID NO: 248055 - DNA, 201 bp, Homo sapiens
ccagacctgtggccaagactagcttgaggcccccagtgatccttgactcagcttcaagatccttccgttcctccttaggaaactgcacagtcccagggatrcctctgaggcaggtggcagctatctttccattgcttaggcaggtagagaaaatatttaatgatgacttcctgtcctaaagcaaaaacgccatcttataaa

SEQ ID NO: 248056 - DNA, 201 bp, Homo sapiens
gtaagtccctctccctctgcaagcctgagcccgcattccttagcttgacaaaatcctaatccagatattgcttcaacctattttttcagccacaccatccrctgttctccattcacaaacctcacccacaagtctaaagagtaaaaagtaaaaggatcactttgcaaaaatccactatagatgtacagattgggtgtgtgt

SEQ ID NO: 248057 - DNA, 201 bp, Homo sapiens
taagaaggcttaatagttggttcagtgatagccacaagggagcaggctgcctcatgacatagcgagctccctgtcactggaggtgtgcacacaaagccaaragaactctcagagagtgtatggtgtgtggaaatcctcactggatgaagttagggtcgatgtccttccatattctctctgatgctgaaatctgatgaagtc

SEQ ID NO: 248058 - DNA, 201 bp, Homo sapiens
ttcacaggttctaaattggaaaatcctggcttttgaagtatgtggattctaagggcgatttggatctagctggagcctcacactgacacttccagccagtktgtgtgtgtgtgtgtgtgtgtgtgtgtgtgtgtgtgtagttccctatgctggacaccgtgtgtgtgtgtgtgtgtgtgtgtgtgtgtgtgtgtgtagttc

SEQ ID NO: 248059 - DNA, 201 bp, Homo sapiens
gggacctggggagtggcatgctgattaggaaaatgggcagagtggcagccagctgggaacagctcccccagaccgcaggcagcagtaaagcagggctaccrtggccccagagcttgactggaacaaggtgcattctggcatggctgatcctacacaaacaagaaggttgaggggagttcccaggtgaggaattcccggcag

SEQ ID NO: 248060 - DNA, 201 bp, Homo sapiens
cagttgtcatgtctcttagtgtcttgtaatctgaaataattcccaagccctttggatttcatgacagtgacattgttgaagagtacaggccagttattttrtagaaggtctctcagtttaggtctgtctgatgtttcctcctgatcagattcaggttattcacttttgacaggaataccactgaaatgatgctgagttctt

SEQ ID NO: 248061 - DNA, 201 bp, Homo sapiens
gcttgactggaacaaggtgcattctggcatggctgatcctacacaaacaagaaggttgaggggagttcccaggtgaggaattcccggcagccagggagcaygaaccaggtggcttccactctgcctgcaggaaggaaatttcttttctggttcctgaaacttcactcctatcaggaatggcctctctcctacctacccacc

SEQ ID NO: 248062 - DNA, 201 bp, Homo sapiens
tcatgtctcttagtgtcttgtaatctgaaataattcccaagccctttggatttcatgacagtgacattgttgaagagtacaggccagttattttgtagaargtctctcagtttaggtctgtctgatgtttcctcctgatcagattcaggttattcacttttgacaggaataccactgaaatgatgctgagttcttctcagt

SEQ ID NO: 248063 - DNA, 201 bp, Homo sapiens
cagcctttctaaattgcagtaccagttaacagaaggtgtctgtcagagcaacacccaagtcattcaagttaccattgtgtgcaaacttaacagagacccamgtcttcaatataagccttgaaggaaactccagttttagtatgtagatggggtatcaagtgtgtgcacattgaacatctgctgcatacagagcactgtgcc

SEQ ID NO: 248064 - DNA, 201 bp, Homo sapiens
actctgtctcaaaaaaaaaaagtaaataaataaaaaaaatttttaagtatcttatgggcatatacttgtcctgttactcctcaaactttcatccacttttytttttttaaattttttttcttacctttcatcgttttcttgatatccactgggttttagcatctacaaatgattcttgcctgaatcagttattatggtagt

SEQ ID NO: 248065 - DNA, 201 bp, Homo sapiens
gtttcaccatgttggccaggctggtctcaagcccctgacctcaaggtgacctgcctgtctcagcctcccaaagtgctgggattacagacatgagccaccaygcccagcctcaaagacctcttctttacttgctcaccctgccgcccactcccctaccaacccctgcatgccctataccacctggcacatgatacatactaa

SEQ ID NO: 248066 - DNA, 201 bp, Homo sapiens
cattactgacagcacctccatgagtctttctctggggtgaggtgtctctgctcactcagggcctgaggcctctgggtcaaatcgaggtcaagtggcttcaktgcctaagtctctcacccacacagccttcagcccttacttgcaaatcaacaaagggtaaacctgtagaaaacatgggtttcggagccagaattctgcctc

SEQ ID NO: 248067 - DNA, 201 bp, Homo sapiens
ccacctcaatccgagtagatggaacaactaaccaagccagctcagaccggtggcacagctgtgctggctaacactgggcaccacctaagagagtgcttctscaaaagtgtgcttccccaaatggagcgaaatacgcttgaggaatgttgggttgaaccatgtaaagcaggtctcattcccgcagagcctttggtaccccgg

SEQ ID NO: 248068 - DNA, 201 bp, Homo sapiens
gcggtggctcacacctgtaatcccagtactttgggaggccgaggtgggcggatcactaggtcaggagatcgagaccatcctggctaacatggtgaaacccygtctctactaaaaatacaaaaaattagccgggcgtggtggcgggcacttgaaaagtcccagctactcgggaggctgaggcaggagaatgatatgaacccg

SEQ ID NO: 248069 - DNA, 201 bp, Homo sapiens
ctgtcccctgttgcaatcaggggaaggccacacttgccttccttaaccacagttaggattttcttggggattagaccagattctagcacctgtcctgaacctctcgccccgcccctacaaaggctgcttgcaagtgtagtgcacatacacagggagcaggtggggcatggaagtggaagtggagcccctgcctttggccct

SEQ ID NO: 248070 - DNA, 201 bp, Homo sapiens
ggttgcaagcaacagaagtagattttggcaaacctcagcagaataataattttccagaaggatgtggtattgtcttaggttggactcaggggcagaccatragaaaagcacattagattccaaatcattttctgggaggcaatcccacgaaacacctgcaggagagtgggaataaggaaggcagggaagggaactaataat

SEQ ID NO: 248071 - DNA, 201 bp, Homo sapiens
ttccattgcttaggcaggtagagaaaatatttaatgatgacttcctgtcctaaagcaaaaacgccatcttataaaaggggaattggactttaaaggtcatyttggggccaggcaccatggctcacacctgtaatcccagcactttgggaggaggctgaggcgggtgcattcacttgaggtcaggagttcgagaccagccct

SEQ ID NO: 248072 - DNA, 201 bp, Homo sapiens
ggagagtgacaaaggagaggcttctctttgaatagtagcacatgagcagagaagaaacgagtcctgcagaggtggcaggggaagagcctgccaagcagagkaactgcaagtgcaaaagccttgacttgggaacagggttggcagctacaacaccaaggagtccagtagagccagaatggaaagaacaaggaagtcagtggc

SEQ ID NO: 248073 - DNA, 201 bp, Homo sapiens
aactgcaagtgcaaaagccttgacttgggaacagggttggcagctacaacaccaaggagtccagtagagccagaatggaaagaacaaggaagtcagtggcrggaggtgagggcctcgttgtacactcagctcccagcccagctaccagtttcttaggtgagcttaggtgcatcccttcccctctttgggcctgcacatgtt

SEQ ID NO: 248074 - DNA, 201 bp, Homo sapiens
gaactgaggggccctgatggaggagctgcttctttgcaaagctttccttgactctcttcctgtcccctagttgattccccttctgtgctagttttagcttrttgtttgttacctgtcacacttagcagtactgttggctttgctggtctccttgactactgggggtaaagaccttttgttgttgttgttgagacagagtct

SEQ ID NO: 248075 - DNA, 201 bp, Homo sapiens
aagccttgacttgggaacagggttggcagctacaacaccaaggagtccagtagagccagaatggaaagaacaaggaagtcagtggcgggaggtgagggccwcgttgtacactcagctcccagcccagctaccagtttcttaggtgagcttaggtgcatcccttcccctctttgggcctgcacatgttcttccatctcccat

SEQ ID NO: 248076 - DNA, 201 bp, Homo sapiens
ggcgctgacttaaaatagcgggctttctgacaagaatgtaaacagaaccaaaatatacttctgtgtggggtattggtcaaaggctgacctagtgggctccrtactaggccaggcagacagaatacaaagatagggtatagaaagactggtagtggcaacaagtgaagtgtcttctctcctgtcctggccctcacctaacaa

SEQ ID NO: 248077 - DNA, 201 bp, Homo sapiens
gtgtgttttcttaaaaaacaacataaggctaggtgtggtggctcaggcctgtaatcccagcacttttggaggctgaggtggatggatcacttgaggccagragtttgagacaagcctgaccaatgtggtgaaaccccgtctctactaaaaatacaaaaattagctgggcgtggtggtgtgcacctgtaatgccagctactc

SEQ ID NO: 248078 - DNA, 201 bp, Homo sapiens
tctggctacctccttggctatatacctcaaactgctgctatatatcactgctgctctcaagatggctgatatggtttggatctgtgtccccacccaaatcycatgtcgaattgtaatccccaatgttgaaggtggggcctggtgggaggtgattggatcatggggatggatttctcatgcatgctttaacaccatcctctt

SEQ ID NO: 248079 - DNA, 201 bp, Homo sapiens
aagtgacaggccacaggggctcggagcccagggctctgtgtgaagaatttttggcctcttcctcttcctcttgatcttcaacactggtcacaagaggaagygcagggagggttcagggcagcctgacccttcaggaagcagacacatttagggccagtgtgcctggagggttcagggcggcctgacctatcaggaagcaca

SEQ ID NO: 248080 - DNA, 201 bp, Homo sapiens
ctgcagtttacaaatgaggaaaccagtaccctgagagtggctgtactatccactctcaggataccaaagatcatctggaaagtcactggtggagctggacyggggcccaggcatctcttctcctgtccggggctcttgacttcaggaccacctttctgaaacccatgatggggcaacaccaggacactttccagcctgcag

SEQ ID NO: 248081 - DNA, 201 bp, Homo sapiens
gcctcccaagtagctggaaccacaggtatgcatcaccatgcccagctaattttttatttttattttgtagagacagggtcttcttatgtcgcccaggctgktctcgagctcctgggctcaagtgatcctcccaaagtgctggcattatagatgtgagcactgtgcccagcccatgtctactttctgaccagggaagggaag

SEQ ID NO: 248082 - DNA, 201 bp, Homo sapiens
ggagtcctgagtgctgcctcccttctgggctgtgccaggggtgggccaggaggcagccatgccatcagaacctgggctctggagtctggacaccttgtctktgtgaccttgggtgtgtcattgcacctctgagcctcagttgctcacctgtaatcagggctacttcatgtggttgtgtggaatgtgttctgttcatctcca

SEQ ID NO: 248083 - DNA, 201 bp, Homo sapiens
tcagagagtggcatcatcttattgtgaaccattgattatataatatctcgtttaatccttacaaccacattttgacatgggtaccatctctacagatgcaraaacagtcttaaagaggtcaagaaacctgcttaggtctgtctgaggtggacctggagttcagactcagttctgaggagacctaaggtctgtgtttctaat

SEQ ID NO: 248084 - DNA, 201 bp, Homo sapiens
atgtcagaagcctcagtatttctcttcgtattttttctgtagtaaattctaatccctgccctccctttttccccatggatgctatattagccagggtctcrgcagaaaacagatgggttactcagtgtggtcattgaagggtttaatgaagacattgtttatgaaagtgccagcaaggctaaggtagtgaataagaaatga

SEQ ID NO: 248085 - DNA, 201 bp, Homo sapiens
ttacaatccaaagatcgctaagaaatagtatgaactttattataagatatatttattcattcagaaaatatttgtggagcaactactgtgttctgggtacrgtacaaagtgcttgaaattcactgatgaataggatagacatggtatctcccctcagggaccttctacttggaggtagaataaaagactggggcaggaaca

SEQ ID NO: 248086 - DNA, 201 bp, Homo sapiens
ttcgtattttttctgtagtaaattctaatccctgccctccctttttccccatggatgctatattagccagggtctcggcagaaaacagatgggttactcartgtggtcattgaagggtttaatgaagacattgtttatgaaagtgccagcaaggctaaggtagtgaataagaaatgacaaaacactcagggactagaaatg

SEQ ID NO: 248087 - DNA, 201 bp, Homo sapiens
caaagatcgctaagaaatagtatgaactttattataagatatatttattcattcagaaaatatttgtggagcaactactgtgttctgggtacggtacaaartgcttgaaattcactgatgaataggatagacatggtatctcccctcagggaccttctacttggaggtagaataaaagactggggcaggaacagatctcaa

SEQ ID NO: 248088 - DNA, 201 bp, Homo sapiens
tttctgtagtaaattctaatccctgccctccctttttccccatggatgctatattagccagggtctcggcagaaaacagatgggttactcagtgtggtcaytgaagggtttaatgaagacattgtttatgaaagtgccagcaaggctaaggtagtgaataagaaatgacaaaacactcagggactagaaatgtgggagagc

SEQ ID NO: 248089 - DNA, 201 bp, Homo sapiens
gcaaaattcttcactgatataacctcaaaatcctcttataatccagtttctctccaccaaatagccccaagtcattcattcattcatcaattcactgattkataactattccatattctagaatcagatgagattatgtgggtataaaagcatgttgtaaataccaaagcattaaacacatgttacactgtgctataattt

SEQ ID NO: 248090 - DNA, 201 bp, Homo sapiens
gtgggagagcatcgctaccctgaggcccaaaggagcaacaatacagactgcagcgatgggtgagggacagctcgaaaggaatttaggtggagaaatgcagycgtttcttacctgtggtctggcagagggggagctagggcaataaataccctggcatatctctcctcctgccctcacgttctttccagtacctcccatttg

SEQ ID NO: 248091 - DNA, 201 bp, Homo sapiens
tctcctgcctcagcctccggagtagctgggattacaaacatgtgccaccatgcctggctaattttttgtatttttagtagagacggggtttcactgtgttrgccaggatggtcttgatctcctgacctcatgatctgcccgccttggcctcccaaagtgctgggacatttccacttttatattattgacccaaactcagtc

SEQ ID NO: 248092 - DNA, 201 bp, Homo sapiens
acagaaaccaatccccaatccccaccccaagggctgagatccagacattgttggagcaggtatggctgtggttcactggattgtaaagaagtccatgtggygctgtgttgatggaacttgctggaaatctaccctctgggattcttgggaggtgtctgtcagagtcactcctataaaactacctgtagtagggagtgccag

SEQ ID NO: 248093 - DNA, 201 bp, Homo sapiens
ccccaatcagtactggtttctggcccagtagcttcctgtggcaggagtggtggcaggttctttcatgatcagtgatggcagaaccgtgatgattcttaggkttcacaattatttctggaagctccattttaagtctacccctccagccctgctagtaatgttgtaagacagaacttttcaaactttaatgttcatatgaat

SEQ ID NO: 248094 - DNA, 201 bp, Homo sapiens
gaaatctaccctctgggattcttgggaggtgtctgtcagagtcactcctataaaactacctgtagtagggagtgccaggggaagctgctgctggcctttgsttgatgctggccaccatgcatggtaggagccagaccctggagaagccatctgtctttgcgggaacctgatgctaaagaagttgcttgcactgcagacgct

SEQ ID NO: 248095 - DNA, 201 bp, Homo sapiens
accaagaaaccttctgatttttcttcctgtctaccctagtaccagctggagaatagatattgggcagtggatatacatactatgctgtttgcaaaaggatrtcatccactgtgctctaataaattggtatttgatggctacagcagccttggatggtattagtgagagtaagtctgtccccaagggaccactcttctctac

SEQ ID NO: 248096 - DNA, 201 bp, Homo sapiens
aaatattattcttgtattcagcaaatgtatgtcataggcctagtgtgtgttaggaactgtgctgtcaccaacaaagtttagagaggttataaaacttgacygtagctttttagaggtggaggagtgatttgaaacctaggctgtaattccttcctcctgtgattccttcctactgtgttgccttcccttgaaaattgcatt

SEQ ID NO: 248097 - DNA, 201 bp, Homo sapiens
gctggagaatagatattgggcagtggatatacatactatgctgtttgcaaaaggatgtcatccactgtgctctaataaattggtatttgatggctacagcrgccttggatggtattagtgagagtaagtctgtccccaagggaccactcttctctactacactaagaaaatccagtttctgacccagagaagctgagaacc

SEQ ID NO: 248098 - DNA, 201 bp, Homo sapiens
atggcctaaggaggtgcaaagcgaagcatcctcaccagcatcctgacttggcagtgaggcatgggaccctggagggagtagtggtaagtgtgactctggarttcttcctgggctacttgtcagtgactggctccagattgagaggagagcccagaggacacaggtggctgccccagcctggaggtgaaagtcttaaaataa

SEQ ID NO: 248099 - DNA, 201 bp, Homo sapiens
gtcatccactgtgctctaataaattggtatttgatggctacagcagccttggatggtattagtgagagtaagtctgtccccaagggaccactcttctctastacactaagaaaatccagtttctgacccagagaagctgagaaccaggttttggacttgagagactcaaccaaggcactttcctgaaggatctggagactg

SEQ ID NO: 248100 - DNA, 201 bp, Homo sapiens
ctgaggtgggagaattgcttgagcccaggagttcaagaccagcctgggccacagaggaaaatcttatctctacaaaaaataaaaaattatctgtgatggtrtatacccttagtcccagctactgggaaggctgaggcagaagggtcccttgagtttgggaggtcaaggctgcaatgatccgtgattgtgccattgcacttc

SEQ ID NO: 248101 - DNA, 201 bp, Homo sapiens
catccggataggaagacaaatgtcaacgtatacgtctctctcctatcctgattgagctggcactactgtgttttccagtctgaggacaccagtcacaaccygtgcatatcacggtgatagagtcacgtggttgctcctcaagaactgggctagtttggactcaacttgtcttccagcagcccactgcacagtggcccaacc

SEQ ID NO: 248102 - DNA, 201 bp, Homo sapiens
cggaactgggccagtatagaggacatttctgtgaacaccatggatgtggctctgcctgcttttcctctgaggggagaaggcagcaccggccagccatggcsttcacactggagggtgcttccaagctcttgacttttgcttttggcccttgcctttgtggtaggtgggaatctgtcgccctggagacttcgggtctgatgt

SEQ ID NO: 248103 - DNA, 201 bp, Homo sapiens
tccttactctactgtggcaaagtaccatatctctctctttttttatttttttttttattgatcattcttgggtgtttctctcagagggggatttggcaggktcataggacaatagtggagggaaggtcagcagataaacaagtgaacaaaggtctctggttttcctaggcagaggaccctgcggccttccgcagtgtttgt

SEQ ID NO: 248104 - DNA, 201 bp, Homo sapiens
aaggtcagcagataaacaagtgaacaaaggtctctggttttcctaggcagaggaccctgcggccttccgcagtgtttgtgtccctgggtacttgagattasggagtggtgatgactcttaacgagcatgctgccttcaagcatctgtttaacaaagcacatcttgcaccgcccttaatccatttaaccctgagtggacaca

SEQ ID NO: 248105 - DNA, 201 bp, Homo sapiens
tcagcagataaacaagtgaacaaaggtctctggttttcctaggcagaggaccctgcggccttccgcagtgtttgtgtccctgggtacttgagattacggaktggtgatgactcttaacgagcatgctgccttcaagcatctgtttaacaaagcacatcttgcaccgcccttaatccatttaaccctgagtggacacagcac

SEQ ID NO: 248106 - DNA, 201 bp, Homo sapiens
cttggctcaccacaacctctgcctcctgggttcaagcgattctcctgcctgagcctcccgagtagctgagactacaggcacgcaccaccatgcccagctartttttatatttttagtagagacggggtttcactatgttggtcaggctggtctcaaactcctgacctcgtgatctgcctgccttggcctcccaaagtgctg

SEQ ID NO: 248107 - DNA, 201 bp, Homo sapiens
ggtaaggtcatagatcaacaggatcccaaggcagaagaatttttcttagtacagaacaaaatgaaaagtctcccatgtctacttctttctacacagacacrgcaaccatccgatttctcaatcttttccccacctttcccccttttctattccacaaaaccgccattgtcatcatggcccgttctcaatgagctgttgggc

SEQ ID NO: 248108 - DNA, 201 bp, Homo sapiens
cccccacctccctcccggacggggtggctgccgggcggagacgttcctcacctcccagacggggtcgcggccaggcagaggtgctcctcacatcccagacsgggcggcggggcagaggcgctccccacatctcagacgatgggcggccgggcagagacgctcctcacttcctagatgggatggcggcccggaagaggcgct

SEQ ID NO: 248109 - DNA, 201 bp, Homo sapiens
tgtgcccggacttttttaaaaaaaaaaacaaacaaaaccagttctgctctgtcacccaggctggagagcaatggcacgatctcggctcactgcaacctccrcctcctgggttcaagcaattcttctgcctcagcctcccgagtagctgggattacaggcacccaccaccacagccagctaatttttgtatttttagttgag

SEQ ID NO: 248110 - DNA, 201 bp, Homo sapiens
cctcaagtgatctgcccgcctcagcctcccaaagtgctgggattacagtcgtgagccactgtgcctggactattttgggttttttaattttatttttgagrtggggtctcactctgttgcccaggctggagtgcagtggtgtgattacagctcactgcagcctcgacctcctgggttcaagtgatctcgcacttcagcctc

SEQ ID NO: 248111 - DNA, 201 bp, Homo sapiens
gccgcgggaaggtgggatatttggttctcggagcagacagttttgtgttaggagagagtcggtgttgtgcggttcttggtctttatcctagggcccccgcsagcttcccctgcgttttgtagcagattccccacttcccaggcaccctctcaccggccagggtgctctcatactttgggttgagaggtgtcattacctgcg

SEQ ID NO: 248112 - DNA, 201 bp, Homo sapiens
ccttttagctttgtgcatcttgaggccacctggagaatttggggtagacatcgccctgggcagctcccagagatttggagtgccactgggctatgggggamcccatgcagcattttttgctgtccgagaaagcttggtgagaatgatgcctggaagaatggtgggggtaacaaggtaaaggggctcatgtttctctacttt

SEQ ID NO: 248113 - DNA, 201 bp, Homo sapiens
acggggtcgcggccaggcagaggtgctcctcacatcccagaccgggcggcggggcagaggcgctccccacatctcagacgatgggcggccgggcagagacrctcctcacttcctagatgggatggcggcccggaagaggcgctcctcacttcctaggtgggatggcggccgggcagagacgctcctcactttccagactgg

SEQ ID NO: 248114 - DNA, 201 bp, Homo sapiens
cggatcactcgcggttaggagctggagaccagcccggccaacacagggaaaccccgtctccaccaaaaaaatacgaaaaccagtcaggcgtggcggcgcgygcctgcaatcgcaggcactcgtcaggctgaggcaggagaatcaggcagggaggttgcagtgagccaagatggcagcagcacagtccagcttcggcccgtg

SEQ ID NO: 248115 - DNA, 201 bp, Homo sapiens
ctggagaccagcccggccaacacagggaaaccccgtctccaccaaaaaaatacgaaaaccagtcaggcgtggcggcgcgcgcctgcaatcgcaggcactcktcaggctgaggcaggagaatcaggcagggaggttgcagtgagccaagatggcagcagcacagtccagcttcggcccgtggaaagagggagagggagaccg

SEQ ID NO: 248116 - DNA, 201 bp, Homo sapiens
tggagaccagcccggccaacacagggaaaccccgtctccaccaaaaaaatacgaaaaccagtcaggcgtggcggcgcgcgcctgcaatcgcaggcactcgkcaggctgaggcaggagaatcaggcagggaggttgcagtgagccaagatggcagcagcacagtccagcttcggcccgtggaaagagggagagggagaccgt

SEQ ID NO: 248117 - DNA, 201 bp, Homo sapiens
gcctgggtgacagagcaagactccctctcaaaaaaacaaaaaaggacccttcagtataagagctgtccatgtagcagctctcaacttagtccagtgagttraagtgtgagattggattagtaatcctttaatttaaagtcgtgtgacctcagccaagtgaccgtcttcaatcctcagtaccctaggctgtgcgaaaagcat

SEQ ID NO: 248118 - DNA, 201 bp, Homo sapiens
gaaaagcatatggtacaattcctggtggaataatgttcaataaatgtcaaatgctattattattttgtgattatatgaatgacccgagaaagggtcccacstgcatccaagtacatttatacttcttaataaccaaagtgccttcatgagaatgctggtagaaactgcataagggtgtgtttttttgcttttgtttttgtt

SEQ ID NO: 248119 - DNA, 201 bp, Homo sapiens
gggttcaagcgattctcctgcctcagcttcctgagtaggcgagactacaggcatgaactaccacgcctggctaatttttgtatctttagtagagacggggktttcaccatgttagccaggctggtcttgaactcctgacctcagatgatctacccaccttggcctcccataatgctgggattataggtgagccactgcgcc

SEQ ID NO: 248120 - DNA, 201 bp, Homo sapiens
tcgactacagtggaatgatcacagctctgtgcaacctcgacctctccggctcaggcagtcctgtcacctcagccttccaagtagcttagaccacaaggagraccacagcacctggctaattttttaaatttttttgtagacatgggggtctcaatatgttgcccaggctggtctcaagcttctgggcttaaatgattctct

SEQ ID NO: 248121 - DNA, 201 bp, Homo sapiens
aaaatgaaatccttgcaactctgcatgccatttcaagcaaaaaccagatctggagatcgtatattggcatgggctattataactgctcagtgccacagacrattttgcggaacttactggagaactcaggatggtaatgtatttctcagttcaggaacaggatgactgtgatttgcataattctctccatcctccatctgt

SEQ ID NO: 248122 - DNA, 201 bp, Homo sapiens
caggatgactgtgatttgcataattctctccatcctccatctgtccccttgcagtctcagagcctccacactgacacccacctcctagtgctgtctccaaygtccgggaacctaccgggtttctctggatcgagaaatgttcttgctcaaatgttgaggaaatagaagtttcttcccacttccagtcccataaaatctact

SEQ ID NO: 248123 - DNA, 201 bp, Homo sapiens
tctgagatcagaggagagggagggggagaagcgggagagggaaggggagcctccaaactaatgcaggtctaactttggtggaaggggagagaagcagaatraagactgggtaggaagagtcttacagtacagaacagatctaagagagtttccatcaggcccacatggagtcctggagctacagctgcccatgggaggagt

SEQ ID NO: 248124 - DNA, 201 bp, Homo sapiens
aacccttattttatttagtagtgtacccaaagcacaagagtagtgatactggtatggtggtgtaattgttctatttattcttagttattgttgttaatctstaactgtgcctaatttataagttagattttatcataggtatgtatgtataggaaaaatcgtagtacacctgggtttgggtgccatccatggtttcaggca

SEQ ID NO: 248125 - DNA, 201 bp, Homo sapiens
cttctgggcatctctctggtaagtaaactgtgtcagaattgagttgggaaatacacaattgccattgctttatagtaagttgtgttttgttttcttcttcttttttttttttttttttgagacggagtctcgctctgtcgtccaggctggagtgcagttgagggaacctaggctcactgcaagctccgcctcccaagttca

SEQ ID NO: 248126 - DNA, 201 bp, Homo sapiens
tgcagcttaatttctgtgctgtatttgagtaagatgtgaaacctgcaggtgggcagattcaggcctttactcctccttggagaccctgggacataggctayttctgagctatctcattgagtcattggtggagtctgggagagaatcttggtccactgtcttctctcaggattccccgcctaccaccctgcccagacggag

SEQ ID NO: 248127 - DNA, 201 bp, Homo sapiens
tgcaggtgggcagattcaggcctttactcctccttggagaccctgggacataggctatttctgagctatctcattgagtcattggtggagtctgggagagmatcttggtccactgtcttctctcaggattccccgcctaccaccctgcccagacggagtcttgctgtgtatcccagtctggagtgcagtggtgtgatcttg

SEQ ID NO: 248128 - DNA, 201 bp, Homo sapiens
tcttggcacaatagccaaattcctatccctctaatcctattgtgtctcctggggctgggtatgaggaaggagagtcctgcactggaagaattaccttagcrgtttcacttactatgaggactgttggtttcagtaacccttttggctcccatcaatgtccatttagctatttctaattatttcaactactataatattatt

SEQ ID NO: 248129 - DNA, 201 bp, Homo sapiens
ccccttcctgggatcctagccttctccttcctttgggtgagatcctatctactccttctcaggaggtggcctctgctgcagacccataaaactttaacccyacctttcctatcagtgagaattaacataacagctagggctactatcacaggagtggaaaataaaccatagtaaagagaccttccaaaagtctgcaagcaa

SEQ ID NO: 248130 - DNA, 201 bp, Homo sapiens
tctcggttggactgcaaatttctccatatgacttttttttgaggcagggtctcactgtcactcaggttggactgcagtggcatgatcatggctcactgcarcctcaacctcctgggccaaacagatcctcccactactgcagcttcctgagtatctggactacaggcatgtgctaccacatggactaatttatttcatttt

SEQ ID NO: 248131 - DNA, 201 bp, Homo sapiens
aactaccatttttatcttccgcaatactcccattcaattgagctgcttctttttattttttatctttttatttcaatcctgctccttctgtagtcaattgmgcttcttgactggtctcctggagctaattgtcaggactggggtggtgccccacccccttcctgggatcctagccttctccttcctttgggtgagatccta

SEQ ID NO: 248132 - DNA, 201 bp, Homo sapiens
ctgatacagtttttttaattagtttcctatggctgccatgtaatatagtaccacaaactaggtggcttaaaacaacaggaacctgttcactcccagttccrtagtcagaaatcaagatgttggcagggttggctcatttctggaagctctgaaggaggatcagttccctgcctctctcccaggttccttggcctgtggata

SEQ ID NO: 248133 - DNA, 201 bp, Homo sapiens
ctgtcaagtgaaaaaataaactaccatttttatcttccgcaatactcccattcaattgagctgcttctttttattttttatctttttatttcaatcctgcyccttctgtagtcaattgcgcttcttgactggtctcctggagctaattgtcaggactggggtggtgccccacccccttcctgggatcctagccttctcctt

SEQ ID NO: 248134 - DNA, 201 bp, Homo sapiens
ctaggtggcttaaaacaacaggaacctgttcactcccagttccgtagtcagaaatcaagatgttggcagggttggctcatttctggaagctctgaaggagratcagttccctgcctctctcccaggttccttggcctgtggatacattgctccagtctctgctgccatcatcacatggcattcttcttgcatgtgtgtctg

SEQ ID NO: 248135 - DNA, 201 bp, Homo sapiens
ctgcagattcttaggaagtgatgcctagaggccactgaactctgttcttggtacattaggaccaggagattatgcaatgctctgaggcagaataaacaagrtcagaagcaggcatttattctgcaagaaaagaatttactgtgtaggttcctgaaggattgcctgaattccttcatggctgagagtgcaaaataatgcaca

SEQ ID NO: 248136 - DNA, 201 bp, Homo sapiens
gtggggcaccttgtgaaataagggtcttgaagaggaatgaggagcaaagaaattggctttcagaggcgaggtcacacagtatcaaccacagatctgggaayccatagggaacagagtgggggaaaactgaatacgagtcctgcccagtggaccaatgtgtttccctccactgtgggacagggagatggcgcccagtgcaac

SEQ ID NO: 248137 - DNA, 201 bp, Homo sapiens
attcaacacattccgtgattcagctgacttggctagtgaaaccctcctctgcccagggaggaaacttgacaagtaacagggagttggctctatggactgcrtaagtgggcttgatccaggtggctatgggggagagaaaggagtgctataaatgactgggtgatgttggggaaaggatcagcatgcagatggaatctgctt

SEQ ID NO: 248138 - DNA, 201 bp, Homo sapiens
aaaccagaaggcagaggttgcagtgagccgagatcacgccattgcactccagcctgggcgaaagagcgaaactccgtctcaaaaaaaaaaaaaaaaatcartaatcatgtttagatgaggaacgtttagaaattgtttctttataaatttgcacccaagtgcatttgctgaattcacttcaagctgggaaggaaagaagta

SEQ ID NO: 248139 - DNA, 201 bp, Homo sapiens
tcctctgttgaacagcaagctgatctttatttatttatttgtttttttggttgttttttttttttttgagatggagtcttgctctgtcacccaggctggcrtgcagcggcccaatctcagctcactgcaacctctgccttccagtttccagcgattctcttgcctcagcctcctgagtagctgggattacaggcgcctgcc

SEQ ID NO: 248140 - DNA, 201 bp, Homo sapiens
tggttcccatgggctggagcatattgctaggagggtacataatgccactttgattttgtcagaaggtgagttggtaatctgtctaaaacatttgggcatartaaaattgataaatttgagtaaaattgaaaatattgcatgtccaatactatatgcaaaattaaaagtcaagtgagaaacgaggaaaaatactttcaacat

SEQ ID NO: 248141 - DNA, 201 bp, Homo sapiens
agagacagggtttcaccatgtcggccaggctggttttgaactcctgacctcaagtgatttgcctgcctcagcctcccaacgtgctgggattacaggtgtgmgccaatgagcccagctccacctctttcatgtttattcattctataagaagcagagcagttcgtagactgtcttcaggggctattaattactggagctatt

SEQ ID NO: 248142 - DNA, 201 bp, Homo sapiens
agcaattctcctgcctcatcctcccgagtagtgggattacaggtgtgcaccaccatgcctggctacgttttgtagttttagtagagctggggttttgctawgttggtcaggctggtcttgaactcctgacctcaggtgatccacgcacctcggcctcccgtagtgctgggattacaggtgtgagccaccgcacctgtccag

SEQ ID NO: 248143 - DNA, 201 bp, Homo sapiens
aggctggagtgcagtgaggcgatcttggctcactgcaacctctgcctcccgggttcaagcaattctcctgcctcatcctcccgagtagtgggattacaggygtgcaccaccatgcctggctacgttttgtagttttagtagagctggggttttgctaagttggtcaggctggtcttgaactcctgacctcaggtgatccac

SEQ ID NO: 248144 - DNA, 201 bp, Homo sapiens
aaataaaaataaataaataaactattttatttattaatttatgtatgtatgtatttatttatttaagacagagtctcgctctgtggcctaggctggagtgmagtgaggcgatcttggctcactgcaacctctgcctcccgggttcaagcaattctcctgcctcatcctcccgagtagtgggattacaggtgtgcaccacca

SEQ ID NO: 248145 - DNA, 201 bp, Homo sapiens
ggggagggggaagctcaattaggagtggactttggatagatgtggctgggggtgggggtgagggtgtttcaagggcaggtgtgggtcagacgtgaggatcycccccataacacacacacatgactgagtgcccgggagcctctccgttgttccaaaccttggcagcatagctgagtgtaaaggcatgagggtctctgtttg

SEQ ID NO: 248146 - DNA, 201 bp, Homo sapiens
ttaaacagctgactcggcacctagctttgggagggcagagggcgggagcaggggagggggaagctcaattaggagtggactttggatagatgtggctgggrgtgggggtgagggtgtttcaagggcaggtgtgggtcagacgtgaggatctcccccataacacacacacatgactgagtgcccgggagcctctccgttgtt

SEQ ID NO: 248147 - DNA, 201 bp, Homo sapiens
tttaagtgtacagttcagaggcattaagtatattcacactgttgtacagccatcaccattatccgtctgagagctttttgattttctcaaattcaagctcrggacctgttaaacagtaactcttcggttcctctttccctttttccctggcccctggcggcctccattctactttctggctccatgaatttgactacttta

SEQ ID NO: 248148 - DNA, 201 bp, Homo sapiens
gagccactgtgcctggactattttgggttttttaattttatttttgagatggggtctcactctgttgcccaggctggagtgcagtggtgtgattacagctyactgcagcctcgacctcctgggttcaagtgatctcgcacttcagcctcctgagcagctgggactacaggcgcatgccaccatgcccggctaatttttgta

SEQ ID NO: 248149 - DNA, 201 bp, Homo sapiens
aaagcatcatttttgggaacacaattcaacttgtaacactcctcttatccatctccctcctggactatagtgctggcctcttactgtatctccctgggccrgggtctcccctcagtgacctttccacaccatcagtagaattatcttactgtattgtaaaaagaatcatactatccagctttatttccaaaggctaaactc

SEQ ID NO: 248150 - DNA, 201 bp, Homo sapiens
tttggattggtgccattttatacaccagaaacactgagttgaaattttatttcaaatgatgaattagtcttaaaaggaagacatcttatttgaaaatatargtgtccacttttcatttccagcatggaaacaaatcagacatagatggagtatggtgataattcctaggtgattttttaaaagttagtttgtggaagaggt

SEQ ID NO: 248151 - DNA, 201 bp, Homo sapiens
agtatatcatggtaaaagtggaggggtgaaaatatttgttttaaaagtgatgagattacaggctgacacctgtaatctcagcactttgggaggttaaggtrggtggattgcttgagccgagtagttcaagaccagcctgggcaacatcctgtctctttgaaaaaaaaaaagtaaaaaaaaatttttaatgtgttgagtcct

SEQ ID NO: 248152 - DNA, 201 bp, Homo sapiens
caaaaaaaaaaacaacaaacaaacaaacaaaaactcaagcaaaggcagtaccttcactgagaaaaaggaaatggagaaatgcaatgtgcaagacataattyggcaagcacttgaatgttgttgcgggatcatccctgatggaatcttaaataattatgctatcaattatttgggggatattcagataaatgtcgaagtata

SEQ ID NO: 248153 - DNA, 201 bp, Homo sapiens
tctccgttgttccaaaccttggcagcatagctgagtgtaaaggcatgagggtctctgtttggtggggttgtaagagggtagtgacaaaggtcctggcactrtggtcaagggtggattctcaggcccatagagtaggacttctattatctccatggcacttacatggaagtgccataatttatttaatctctcgtctattac

SEQ ID NO: 248154 - DNA, 201 bp, Homo sapiens
catttaagaaaccattgccagatccaaggttatgcagattagcccctatattttcttttttttttttaagatggagtcttgctctgtcgcccagggtggcstgcagtggcatgatctcagctcactgcaaactccacctcccaggttcacgccattctcctgcctcagcctcccgagtagctgcgactacaggcacccgcc

SEQ ID NO: 248155 - DNA, 201 bp, Homo sapiens
gagtcttgctctgtcgcccagggtggcgtgcagtggcatgatctcagctcactgcaaactccacctcccaggttcacgccattctcctgcctcagcctccygagtagctgcgactacaggcacccgccaacacgaccggctaattttgtattttttagtagagacggggtttcaccatgtgagccaggatggcctcgatct

SEQ ID NO: 248156 - DNA, 201 bp, Homo sapiens
tttctgcaggctgtgctgtgcaagaagcgtttgcttctggtgagggtttcaggaaacttcctctcatgaaggaaggggaagaggagcaggcatcacatggyaaaagaaaaaggaagagagagagaggagggaggtgccaggctctttttaacaatcacttctcatcagttctcatgggaactagtagagtgagaactcact

SEQ ID NO: 248157 - DNA, 201 bp, Homo sapiens
tttgggggcttttcttccctgaaaagttagcaaaacattgtatttttgtgtaagttccctttttggacaactatgtcccacttttaaatgaagacagtaayggtacttaccttataaggttgtggtggaacttaaataaattaacatatgtatagcgcttagaacagtgcctggcacatagcttttctcatcatcgtcatt

SEQ ID NO: 248158 - DNA, 201 bp, Homo sapiens
actgtcagagctcctctgctaagaacaaggctttctgggagggcccagaaccttcccattagattaaactgaatcgtttacattttctgaatttgcacttaaaaaaaatacaggaagaaacatctcgccccgtttttgcccaatcatcccgtcatttcactaaagcggaatgaggatgcctgtcctgtgggaaccgtcagt

SEQ ID NO: 248159 - DNA, 201 bp, Homo sapiens
catactgccttacccagcagttccaggctaattatcagaccaattatcagaatcacctggcatgttttatgactcatagatttttggaccctaccttggasttcctgaatcagggtccagatgcaggaatttcttttgcaagaacttctcaggtggttcaaaatatggggaccactacagcaggatatgttggactgaatt

SEQ ID NO: 248160 - DNA, 201 bp, Homo sapiens
tgttaaaaatacaaactccgggccccgctccagacgcactgatcataacctccagggggtgagactaagactctttatttttatttttatttatttatttrtttttttagatggagttttgctcttgttgcccaggctggagtgcaatggcgtgatctcggctcaccgcaacctctgcctcctgcattcaagagattctcc

SEQ ID NO: 248161 - DNA, 201 bp, Homo sapiens
agactctttatttttatttttatttatttatttgtttttttagatggagttttgctcttgttgcccaggctggagtgcaatggcgtgatctcggctcaccrcaacctctgcctcctgcattcaagagattctcctgcctcagcctcccgagtagctgggattacaggcatgtgctaccacacctggctaattttgtatttt

SEQ ID NO: 248162 - DNA, 201 bp, Homo sapiens
tatttttaagacaagaccaagtgattctaatacacagtcaatttggaatcccctggatttgtggtctctctgccttcatgatgatagatgacagatggaccgagagatgatagatagatagatagatagatagatagatagatacatacatacatacatacatacatagatgaatgatagatgggcaggaatcatgttatc

SEQ ID NO: 248163 - DNA, 201 bp, Homo sapiens
atttttaagacaagaccaagtgattctaatacacagtcaatttggaatcccctggatttgtggtctctctgccttcatgatgatagatgacagatggaccgagagatgatagatagatagatagatagatagatagatagatacatacatacatacatacatacatagatgaatgatagatgggcaggaatcatgttatcg

SEQ ID NO: 248164 - DNA, 201 bp, Homo sapiens
agtgatttctactaaatggttaatggagggcagtgagtggagggagggagcattgtgtaatgcagctgcaggtgttggctttgtcaccctagttgggttgsgcactctcctgaactgaccccaggggcaactaggccgtggcagctgttccccaggccgaggccacgacttgtctttagccagatgatgcccattgccagg

SEQ ID NO: 248165 - DNA, 201 bp, Homo sapiens
ttcaactagaactgaggagatgagttgtcagaatgatggacttgtgccagctgaatgttccagagtgatttctactaaatggttaatggagggcagtgagyggagggagggagcattgtgtaatgcagctgcaggtgttggctttgtcaccctagttgggttgcgcactctcctgaactgaccccaggggcaactaggccg

SEQ ID NO: 248166 - DNA, 201 bp, Homo sapiens
tgaccaaagccagttacttttagctatggtatgcctcgctgtgtagtcttttcagtgaattcatctcaaggcaactagactgaactagactgaactaatcrtagataaactgcagggattaaagtttacacaaaattgcacattgcttgtggaagagagaggagaaactaaaccctccaatgttcacattattcaactaga

SEQ ID NO: 248167 - DNA, 201 bp, Homo sapiens
attcagttcaaaatcctgtcctgctcaagtgaatcctgcattccccatccacatgcactcaacaacaacaaaaggactagaaggatatgtgtcactggcarcactgatttctctgaatggtgcccttattagtggttttagctttcctttaattactttgcagttttggaattttctgcagtgtaggtattcattttataa

SEQ ID NO: 248168 - DNA, 201 bp, Homo sapiens
tgtagttccttgagcttccttgttccttacagcacaatgtcggggttcagaatgcgtgttcccagatgaagcatggagaagctgcaaatctctaatggccsaacctcctaagttacactgcatcccttccagattagtctatctattaaagcaagtcacgaggcgagcccagattgaatcggggaggggacaacacctggg

SEQ ID NO: 248169 - DNA, 201 bp, Homo sapiens
tgaactggctgctaagtaagtcattattcagagaaacaagcaaagctattcagttcaaaatcctgtcctgctcaagtgaatcctgcattccccatccacaygcactcaacaacaacaaaaggactagaaggatatgtgtcactggcagcactgatttctctgaatggtgcccttattagtggttttagctttcctttaatt

SEQ ID NO: 248170 - DNA, 201 bp, Homo sapiens
agtgacatatcatatcagacgaaagaaatcattttatatcatgataagaatatttccctctctatttttttaaaaaatagagtcaaggtcttgctgtgttygccagtctgatctcagactcctggcctcaagcagtcctcccacctcagcctcccagagttctggaattataggtgtgaaccactgtacctggccttccca

SEQ ID NO: 248171 - DNA, 201 bp, Homo sapiens
cctgacctcaagtgatctgcccgcctcagcctcccaaagtgctgggattacagtcgtgagccactgtgcctggactattttgggttttttaattttatttktgagatggggtctcactctgttgcccaggctggagtgcagtggtgtgattacagctcactgcagcctcgacctcctgggttcaagtgatctcgcacttca

SEQ ID NO: 248172 - DNA, 201 bp, Homo sapiens
ggggagagcaaattggtgcatgtaagctctggtagtagcatttccatttaatagtggagcaccattactcaaacttggtttcatgtgaatgcctgtgttcyagtgtagtcagaaaggaattctggattaaatatttgtttgccatgtacagagaaaactgtagtgagagctagttataggagtgttaaatgtcctcattgc

SEQ ID NO: 248173 - DNA, 201 bp, Homo sapiens
tggcaagtatctctactaggccaggatccattttagcgaagctttttttttctttctttcatttcttacgtttattctgaagtgacatatcatatcagacraaagaaatcattttatatcatgataagaatatttccctctctatttttttaaaaaatagagtcaaggtcttgctgtgtttgccagtctgatctcagactc

SEQ ID NO: 248174 - DNA, 201 bp, Homo sapiens
tgcaaaggatgaattttgactctgaggtgtgcacgtgtcatggtgaatgaatattctccaggtggggagagcaaattggtgcatgtaagctctggtagtakcatttccatttaatagtggagcaccattactcaaacttggtttcatgtgaatgcctgtgttccagtgtagtcagaaaggaattctggattaaatatttgt

SEQ ID NO: 248175 - DNA, 201 bp, Homo sapiens
gtgcaactcgctgttgtggttggcaagtatctctactaggccaggatccattttagcgaagctttttttttctttctttcatttcttacgtttattctgamgtgacatatcatatcagacgaaagaaatcattttatatcatgataagaatatttccctctctatttttttaaaaaatagagtcaaggtcttgctgtgttt

SEQ ID NO: 248176 - DNA, 201 bp, Homo sapiens
tttcttagaattttattttaggtttaaaatatttttaatggtccaagattgcttttcaggggtatttttatgtgggtatttgacttccatggggtgggggracaatccataagtcaagggcacaggctgagctcttaaaaaaaaatctcatctggttatctcactttcaatcatggagatacttatctctttttcttctag

SEQ ID NO: 248177 - DNA, 201 bp, Homo sapiens
cggggtttcactgtgttagccaggaaggtcttgatctcctgaactcgtgatccgcccaccccggcctcccaaagtgctgggattacaggcgtgagccatcrcgcccagctgatgctttttttttaatcgttcaaatttttattttaatacacagtatgagaaattaacttttttttttttttgagatagagttttactctt

SEQ ID NO: 248178 - DNA, 201 bp, Homo sapiens
ttcctgtatcagaaagatagggattcaagtcaacagaagatttgtgcaactcgctgttgtggttggcaagtatctctactaggccaggatccattttagcraagctttttttttctttctttcatttcttacgtttattctgaagtgacatatcatatcagacgaaagaaatcattttatatcatgataagaatatttccc

SEQ ID NO: 248179 - DNA, 201 bp, Homo sapiens
cccccacccccttttaaacctgtcatattaaaagcttttttaaaaaaaattgtttatagttctaaatctcaggtagaattacgaaccttaagccgtctttytagaaatcattcctgtatcagaaagatagggattcaagtcaacagaagatttgtgcaactcgctgttgtggttggcaagtatctctactaggccaggatc

SEQ ID NO: 248180 - DNA, 201 bp, Homo sapiens
cacacagtatcaaccacagatctgggaacccatagggaacagagtgggggaaaactgaatacgagtcctgcccagtggaccaatgtgtttccctccactgwgggacagggagatggcgcccagtgcaaccttcctttcctttctgattcttatatggaggagaaggttctgtgtagtctgtttgagtgaggtagggagaag

SEQ ID NO: 248181 - DNA, 201 bp, Homo sapiens
ttgattgcatacaagaattactcataactccagtttcactctttgtgagcatgcaagtctccctgttttgttaggagatgactggtgtcttttgagttgtyccttttgtgctgtaggtctttgacccccgccttctgttgtagcagctgttccacattcttctcactcttgctcttctctcttgtcactggggtgggtggg

SEQ ID NO: 248182 - DNA, 201 bp, Homo sapiens
tttttaagacaagaccaagtgattctaatacacagtcaatttggaatcccctggatttgtggtctctctgccttcatgatgatagatgacagatggaccgagagatgatagatagatagatagatagatagatagatagatacatacatacatacatacatacatagatgaatgatagatgggcaggaatcatgttatcgg

SEQ ID NO: 248183 - DNA, 201 bp, Homo sapiens
agcaaagaaattggctttcagaggcgaggtcacacagtatcaaccacagatctgggaacccatagggaacagagtgggggaaaactgaatacgagtcctgyccagtggaccaatgtgtttccctccactgtgggacagggagatggcgcccagtgcaaccttcctttcctttctgattcttatatggaggagaaggttctg

SEQ ID NO: 248184 - DNA, 201 bp, Homo sapiens; identical to SEQ ID NO: 48731

SEQ ID NO: 248185 - DNA, 201 bp, Homo sapiens
ttttaagacaagaccaagtgattctaatacacagtcaatttggaatcccctggatttgtggtctctctgccttcatgatgatagatgacagatggaccgakagatgatagatagatagatagatagatagatagatagatacatacatacatacatacatacatagatgaatgatagatgggcaggaatcatgttatcggt

SEQ ID NO: 248186 - DNA, 201 bp, Homo sapiens
tcacaattataaatcacattgtacccccctaaattgaaagaaaacaacagctttctctgcctgggctcctgtcagaagattgacggttgaggtgcagggtrggaggagaagagagtgtattgctctgacccctcctctgtccgtgtctctgtctcagatgtctccacactccctgacctgcgttacatcttcccactggga

SEQ ID NO: 248187 - DNA, 201 bp, Homo sapiens
gggttaaaacaatgttaagtgtcttccttgccagtttgctgtcttaggttttgctttacctacgtttttctctgatagaggaaaaataaaataatcaattyccagggttaagtgactgagtccccaagaagatcttaaagaagacagccatttgcctaagtagttaaatcccagttaaattttagtagcatgatctatctc

SEQ ID NO: 248188 - DNA, 201 bp, Homo sapiens
atgatccacccacctcggcctcccaaagtgttgggattacaagcatgagccactgcacctggccatgtctggcattctttaaaaggatgggataaaacagsaagagcttcctgggttctgaccagggttctgggttctgctccttgaagttgctccagggcttaggtcgaagtgtttgtgaaacccagccaaaccctagga

SEQ ID NO: 248189 - DNA, 201 bp, Homo sapiens
tttaagacaagaccaagtgattctaatacacagtcaatttggaatcccctggatttgtggtctctctgccttcatgatgatagatgacagatggaccgagvgatgatagatagatagatagatagatagatagatagatacatacatacatacatacatacatagatgaatgatagatgggcaggaatcatgttatcggta

SEQ ID NO: 248190 - DNA, 201 bp, Homo sapiens
ttatttttgagatagagtcttgctctgtcacccaggctggagtccagtggcaggatcttgtctcactgcaatttctgcctcccgggttcaagcgattcttytgcctcagcctcccgagtagctgggactacacgtgtgcaccaccatgcccggctaatttttatatttttagtagagacagggtttcaccatattggccag

SEQ ID NO: 248191 - DNA, 201 bp, Homo sapiens
actgggatggggatatacaggcagcaccaaacgtgtaggtaattttttctaaaagatgaagcaaatatgacagaatgctcattagactttactgggtggtrgatgtgatgattattaccataacgttctgatatttaaaatatttcacaattataaatcacattgtacccccctaaattgaaagaaaacaacagctttctc

SEQ ID NO: 248192 - DNA, 201 bp, Homo sapiens
cacagtcaatttggaatcccctggatttgtggtctctctgccttcatgatgatagatgacagatggaccgagagatgatagatagatagatagatagatasatagatagatacatacatacatacatacatacatagatgaatgatagatgggcaggaatcatgttatcggtatgtgagtttacattttagaatatcttta

SEQ ID NO: 248193 - DNA, 201 bp, Homo sapiens
aacatatgcagtaatagtataaaagcatgatgagaatggtaaacaccgaattcagaagagtggttagcactgggatggggatatacaggcagcaccaaacrtgtaggtaattttttctaaaagatgaagcaaatatgacagaatgctcattagactttactgggtggtggatgtgatgattattaccataacgttctgata

SEQ ID NO: 248194 - DNA, 201 bp, Homo sapiens
gtcaatttggaatcccctggatttgtggtctctctgccttcatgatgatagatgacagatggaccgagagatgatagatagatagatagatagatagatasatagatacatacatacatacatacatacatagatgaatgatagatgggcaggaatcatgttatcggtatgtgagtttacattttagaatatctttagaaa

SEQ ID NO: 248195 - DNA, 201 bp, Homo sapiens
tatgatgatatcagattttaaaatgagccaaattatgctatatgcagtttattaacatatgcagtaatagtataaaagcatgatgagaatggtaaacaccraattcagaagagtggttagcactgggatggggatatacaggcagcaccaaacgtgtaggtaattttttctaaaagatgaagcaaatatgacagaatgctc

SEQ ID NO: 248196 - DNA, 201 bp, Homo sapiens
atttggaatcccctggatttgtggtctctctgccttcatgatgatagatgacagatggaccgagagatgatagatagatagatagatagatagatagatasatacatacatacatacatacatacatagatgaatgatagatgggcaggaatcatgttatcggtatgtgagtttacattttagaatatctttagaaaatga

SEQ ID NO: 248197 - DNA, 201 bp, Homo sapiens
ataataccactcatatgatgatatcagattttaaaatgagccaaattatgctatatgcagtttattaacatatgcagtaatagtataaaagcatgatgagratggtaaacaccgaattcagaagagtggttagcactgggatggggatatacaggcagcaccaaacgtgtaggtaattttttctaaaagatgaagcaaata

SEQ ID NO: 248198 - DNA, 201 bp, Homo sapiens
aaggctctggacttcacccttgagctggacaatagccattaaaggtttttgagcaggggagggtagggattcatgaagagaccgttacaatcattaagacrgcggcaagggggaaacatgccttagaggtagcaaggggctggggtggtggctcacacctgcaatcctgtaatcacacctgtgattgaaggttagctagcc

SEQ ID NO: 248199 - DNA, 201 bp, Homo sapiens
agaatcaggattcgagcaaaaaaaaatcaataacgtagagatggggagcaggagaggaggggaattataagaaaataaaatatagtgaaataaaatttagwacaacagatgttagctgcgtaaaactgcgtgtgtgtgtgtgcacaggggcataggtggaaagatgtatgaaaggatgggactcaaacagttgtctctagg

SEQ ID NO: 248200 - DNA, 201 bp, Homo sapiens
ccaggtacaagtccttgctatgggcccagagtaagagcaggacagagaccaggacctggagcttagatcagagagacagacgtcaggaaccagcccaccckcctgcacctgggcaacagcaacaaagcgcttatgggatcttggtttctctggtccaggtggaatgtagctctatagctgtgatctttaatttaatggctg

SEQ ID NO: 248201 - DNA, 201 bp, Homo sapiens
tgcgcactctcctgaactgaccccaggggcaactaggccgtggcagctgttccccaggccgaggccacgacttgtctttagccagatgatgcccattgccmggtcctgcctgtaggccccgcagtctgtgacaaggctttcctttggccattcccgactcattcaattcccagcttataggaattattatttcttctttag

SEQ ID NO: 248202 - DNA, 201 bp, Homo sapiens
cttgttccatcccacctgggatgtaaatcagccctttgtccagcatatccactgtgtatatgctacccacccatcagtcacttagtagctgccttggttaycagatcaactgctatgttatcacagcgctttcaaggaacagtgaaatcgtacagtggcacgatctcactgcaatgtctcattgcaaggaacccttatttt

SEQ ID NO: 248203 - DNA, 201 bp, Homo sapiens
ttatccgtctgagagctttttgattttctcaaattcaagctcaggacctgttaaacagtaactcttcggttcctctttccctttttccctggcccctggcrgcctccattctactttctggctccatgaatttgactactttaggaacctcgtataagtggatcatacaatatttgtccttttgtgtctggcttatttcac

SEQ ID NO: 248204 - DNA, 201 bp, Homo sapiens
ctcctgttatcccagcaatttgtgaagctgaggtggaaggatcacttgagcccaggaatttgagaccagcctggacaacatagtgaaaccctgtccctacaaaaaaaaaaaaaaaagattgaaacccagggcttcagctgggcgtggtggctcacgcctgtattcccaacattttgggaggctgaggtgggtgggtctttg

SEQ ID NO: 248205 - DNA, 201 bp, Homo sapiens
ccaggaggtggaggttgcagcgagccaagatcaggccactgcactccagtctgtgtgacagagcaagactctgtctcaaaaaacaaaacaaaaaccaaaasccagtgcttcttaatacttagtagttttgaagatgcaaggatatctgtgaatcactgtagtgtttaagagaatgcagacagatatgctctttctggagag

SEQ ID NO: 248206 - DNA, 201 bp, Homo sapiens
aaaacaaacaaaaccagttctgctctgtcacccaggctggagagcaatggcacgatctcggctcactgcaacctccgcctcctgggttcaagcaattcttstgcctcagcctcccgagtagctgggattacaggcacccaccaccacagccagctaatttttgtatttttagttgagatgggctttcaccgtattggtcag

SEQ ID NO: 248207 - DNA, 201 bp, Homo sapiens
aagagaatgatgctattggggtcgattacttccactagtagaatcttaatgatgtgtgggaaaccatgtctctggcaaagtgctggagttcacctgagccttttttttttttctggagacagtgtctcgctctgttgccccggttggagtgcagtggcgtgatctcagctcactgcaacctccgcctccctggttcaagcg

SEQ ID NO: 248208 - DNA, 201 bp, Homo sapiens
catggagaaaccccgtctccactaaaaatacaaaattagccaggcatggtggcacatacctgtaatcccagttactcaggaggctgaggtgggagaattgyttcaacccaggaggcggcggttgcagtgagctgagattgcgccattgcactctagcctgggcagcaagagcaaaactccatctcaaaaaaagaaaaaaga

SEQ ID NO: 248209 - DNA, 201 bp, Homo sapiens
tcacccaggctggagtgcagtggcatgatcttggctcactgcaacctccgccttctggtttcaagcgattcttctgcctcagcctcccaagtagctgggaytacaagcacgtgccaccacacccagctaatttttgtattcttagtagagacggggtttcaccatattggccaggctcgtctcgaactcctgacctcgtga

SEQ ID NO: 248210 - DNA, 201 bp, Homo sapiens
ctccctggttcaagcgattctcctgtgtcagcctcccaagtagctgggattacaggcacatgccaccaggcccagctaatttttgtgtttttagtagagayagggtttcaccatgttggccaggctggtcttgaactccttgacctcaagtgatcctcctgcctcggcctcccaaagtgctgggattacaggtgtaagcca

SEQ ID NO: 248211 - DNA, 201 bp, Homo sapiens
ctcctgacctcaagtgatccgcctgcctcggccttccaaagtgctgggattttccaaagtgctggcattacaggcgtgagccattgtgcccggactttttwaaaaaaaaaaacaaacaaaaccagttctgctctgtcacccaggctggagagcaatggcacgatctcggctcactgcaacctccgcctcctgggttcaagc

SEQ ID NO: 248212 - DNA, 201 bp, Homo sapiens
ggccctggaacattgcttgaaatgttccttaaactagaaaatgatgtctggacagtgtaccagcaactcccgaactctcaactgaggatgatactcttccstagaataaggtaattcttctgagaagatgcagttgttactttgaagtttccatcgtcttgaacagcatagcagttactcaaggatgatgtggttgtggaa

SEQ ID NO: 248213 - DNA, 201 bp, Homo sapiens
tgcctttccaagcagtacaatatcgagactttgaaataatttcctgagacttgtattggggtgttggtgtgcggctatgtgtatgtgtgtgtgtgtgtgtragagagagagagagaaagagtgtgtgtgtgagagagtgtgtgtttgtgtgtgtgtgtgagagagtgagtgtgtgtgtgtgtatacaacagaatggatttt

SEQ ID NO: 248214 - DNA, 201 bp, Homo sapiens
gaaatgataattagacagtgtgaatataatactatgcattcattgaaaatgatgctgtaaaacatatttgctgatgtgggagatgttcatgatgtactaattttttttttttttttgagacggagtcttgctctgttgcccaggctggagtacagtggcgtgatctcagctcactgcaacctccgccccgcgggttcaagc

SEQ ID NO: 248215 - DNA, 201 bp, Homo sapiens
taccaacgctatcttcaggtcaaccactgaagctctagtctagtacacagaaattcctgctggggaactgcaggacattcccattggtggatacagcttcycagctacctcaagatggggtgctggtaaggaagcatgtcatgtctgcagtggtccatgcatctgtctgctgcagtcagaaaataagaaaacagtttttac

SEQ ID NO: 248216 - DNA, 201 bp, Homo sapiens
ccaggcccagctaatttttgtgtttttagtagagacagggtttcaccatgttggccaggctggtcttgaactccttgacctcaagtgatcctcctgcctcrgcctcccaaagtgctgggattacaggtgtaagccaccgtgccccaccaacctgagccttttttaactggccagctgggcccaagagtattatcgtgtctc

SEQ ID NO: 248217 - DNA, 201 bp, Homo sapiens
ggggtcacggaagtgcaatactgaagaatgagcagtgatgctctgctagataaatctgggggaggctgctggaggtagtgggattaacatgtataggacasaatggccggacagaaccaggggaggacgggtggttcatcagtcactaaggatgctccccctcttcttggacaattcagaaagtgccttgacaaaatactt

SEQ ID NO: 248218 - DNA, 201 bp, Homo sapiens
tagtcatgaggcactcttactgggagattatgactggcattcttttttttgttttttcgagacagagttttactctgtcgcccaggctggagtgcagtggygcaatctcagctcactgcaacctctgctgcccggtttcaagcaattctcctgcctcagcctcctgagtaactgggattacaggcgcctgccacagcgcca

SEQ ID NO: 248219 - DNA, 201 bp, Homo sapiens
ccctgcctctctcccaggttccttggcctgtggatacattgctccagtctctgctgccatcatcacatggcattcttcttgcatgtgtgtctgtgtgtccyaattttgctcttcttataaggacaccaatcattggattacggctgaccctaatccagcatgatctcattttaacttggttacatcagtggagaccctatt

SEQ ID NO: 248220 - DNA, 201 bp, Homo sapiens
cagggttttttgctgtttaaattggggttgctgagttttgccttacctctcactttcttctgggcatctctctggtaagtaaactgtgtcagaattgagtkgggaaatacacaattgccattgctttatagtaagttgtgttttgttttcttcttcttttttttttttttttttgagacggagtctcgctctgtcgtccag

SEQ ID NO: 248221 - DNA, 201 bp, Homo sapiens
acatctggtcagagtcctaagtttcttgttagtccagatattaagctggaagatcaggagtggagaataccatgaaggctgtggttgtgtcttcatggctrtaagccagagaacaagtctgatatgactgcagcagctggggcaggtttccaaactgcctacctgtaggagagggcagggaccagtgacttgcagaaggca

SEQ ID NO: 248222 - DNA, 201 bp, Homo sapiens
agaagatagtcctatttatttaatgttcacgttggaatgtgctttttcttttcaacagacacaacaagaggaggaaatttctcgttgatccccgttgccayccacagacaatagctgttgtccagactcgagccaagtaattaatttgattcgtgttttaaactcagtataatgtcatgttcatctctgctgtttctttct

SEQ ID NO: 248223 - DNA, 201 bp, Homo sapiens
agcagttccaggctaattatcagaccaattatcagaatcacctggcatgttttatgactcatagatttttggaccctaccttggacttcctgaatcagggyccagatgcaggaatttcttttgcaagaacttctcaggtggttcaaaatatggggaccactacagcaggatatgttggactgaatttgctcacacatggaa

SEQ ID NO: 248224 - DNA, 201 bp, Homo sapiens
ctttgcgttcttagaagatagtcctatttatttaatgttcacgttggaatgtgctttttcttttcaacagacacaacaagaggaggaaatttctcgttgayccccgttgccacccacagacaatagctgttgtccagactcgagccaagtaattaatttgattcgtgttttaaactcagtataatgtcatgttcatctctg

SEQ ID NO: 248225 - DNA, 201 bp, Homo sapiens
gaaccgtttccacacttgtccaaaagcccagaattgtccaggtgcctggcacatagtaggcactcaacacatagtgttaataaatgagagaccaaatgaayagctaagtcgaaaaacaatgaacatgacaacacagtttccaggtcttaaagcataaccgctgaatgtgaatttttaaggaagagagctgataatctgtat

SEQ ID NO: 248226 - DNA, 201 bp, Homo sapiens
actagaagtcgggcaactgatgtgattggttatgggtacatgtttggcttagcctggttggtcctatgttggaagtgggacaaaaattagggaagctatcwgttattaatcgagttctggccatttggggccaattgttagggaagttgttgttcggtttcctggattgtcactagagatagcaatctggctttctctgta

SEQ ID NO: 248227 - DNA, 201 bp, Homo sapiens
tgtttgctttgcgttcttagaagatagtcctatttatttaatgttcacgttggaatgtgctttttcttttcaacagacacaacaagaggaggaaatttctygttgatccccgttgccacccacagacaatagctgttgtccagactcgagccaagtaattaatttgattcgtgttttaaactcagtataatgtcatgttca

SEQ ID NO: 248228 - DNA, 201 bp, Homo sapiens
aagagcaggacagagaccaggacctggagcttagatcagagagacagacgtcaggaaccagcccacccgcctgcacctgggcaacagcaacaaagcgcttrtgggatcttggtttctctggtccaggtggaatgtagctctatagctgtgatctttaatttaatggctggtcttaccttataaatcagtatccaaaggggt

SEQ ID NO: 248229 - DNA, 201 bp, Homo sapiens
gataataatatcaaggatctttcaattctcagaaaggctaagttggggagaacattgccattcaatggatatggagtcctatctgagttttaatgacttgyttttggaaaaaaagaaaaaaatcttttaaatttaatagtttcactactgcatcataatgggaatcccatgtgtgtgactcactcctctcttgaatgaatg

SEQ ID NO: 248230 - DNA, 201 bp, Homo sapiens
tcactacattttcctagtgaacaatgttattaatattaaaatattaagaccatattacttttttgggggttggggagacagagtctcactttgtcgcccasgctggagtgcagtgatgtgatctcagctcactgcaacctccacctcctgggttcaagtgattctcatgcctcagcctcccacgtagctgggactacaggt

SEQ ID NO: 248231 - DNA, 201 bp, Homo sapiens
ggtgtcccggaagatatttcctgcagataagagggggctactgttaataagccttgccatcagatgaactgatttgtgccagtttctttcttttttttttwaaaaaagtagctattccagttactttgcctttacatatgcattttagaataatcttgcttgtgtctataagaaaatcattattttgggggaggatgatgt

SEQ ID NO: 248232 - DNA, 201 bp, Homo sapiens
cccgcctcggcctcccaaagtgctgggattacaggcgtgagccaccgcacccggcctactcagtattttttatactgtgcttagacttaccctcggtactrtgtttgctttgcgttcttagaagatagtcctatttatttaatgttcacgttggaatgtgctttttcttttcaacagacacaacaagaggaggaaatttct

SEQ ID NO: 248233 - DNA, 201 bp, Homo sapiens
tgtaagtctaacttgtagcaggctggcttccttgattgtttattctaagtaagcgggttagtttcctggacaggtgtgggtgaaagttctatttttaaatrtggtctggtaattgtctatttgtatatgtagtccctcacagcagaatctgttttgtccatatatatatatatatatatatatatatactttttttttatg

SEQ ID NO: 248234 - DNA, 201 bp, Homo sapiens
ccggtcatatgttcagtaatgccccccacctgccattagccataatcaggttcacaggtgtgtagtgagctgaagataagacacatcggcacagtgtgctraacatttttatttgtaataagactaaatgaaacctttattgccaataataaacttacccggtgcccatggcttcttggtcctcgctgatacacataaaaa

SEQ ID NO: 248235 - DNA, 201 bp, Homo sapiens
tgtctaaaagtatgacacttacatttaatatatagtacctaataataatgataaagactatgctgctggtttatgtattcactacataatgcttcttatcwttattattattattattattatttttgagacagagtctcgcttggtcacccaggtgggagtgcagtggtgtgatgttggctcactgcaacctccgcctcc

SEQ ID NO: 248236 - DNA, 201 bp, Homo sapiens
taaacttataatttatcactcataaaataaatatttttcatgaaaaggtatcattttaaatgtaataaaatattttttttaaaaacataccccgagaaactttttttttttttttttttgagacagagttttgctcttgttgcgcaggctggagtgcagtggtgcgatctcagctcactggaacctccacctgctgggttc

SEQ ID NO: 248237 - DNA, 201 bp, Homo sapiens
ggtctccaactcccaagctcaagcaatcctcagctgagcatttaagagtcctggtattaatagttgataaaaacttagtctaatgattttccccttgaacrttccacttactattctgtttcagcattttttccctatgtttacctacccatgaataggattttctacctcttttttttttttttttttttttttgagaaa

SEQ ID NO: 248238 - DNA, 201 bp, Homo sapiens
ggttacttatggctagttgcctggaatttgcaataaagaatgctgaaagtgtttcacttccctttcataacaggggaaacgaaggaacatttttttccctscttcccttgcatagttcatcctgattccacaggtgtgtctttccaggctttcatcttggttggggaatagaattttttttttttttttgagatggagtct

SEQ ID NO: 248239 - DNA, 201 bp, Homo sapiens
ttagtcatgttctgtggatttcagctaaaaggcttgaccaagcattgattgcccagcagagctttccagagtagttacccagtgagttcatttattcctcrgcagccgccttgaggatgggggataagtaaggtctggtcccttctctcaaggagggttttgagcagccctattttttcacagcacactcccatattgttc

SEQ ID NO: 248240 - DNA, 201 bp, Homo sapiens
gtcttgaactcctgacctccacctcccgaagtgttgggattacaggcgtgagccaccatgcccggccaggttgatcttttttttttttttttttttttttwaaatacggagtttcactcttgtcgcccaggctggagtgcaatagcgcaatctcggctcaccgcaacctacacctcctggtttaaaccaattctcctgcct

SEQ ID NO: 248241 - DNA, 201 bp, Homo sapiens
tgaactcctgacctccacctcccgaagtgttgggattacaggcgtgagccaccatgcccggccaggttgatctttttttttttttttttttttttttaaawacggagtttcactcttgtcgcccaggctggagtgcaatagcgcaatctcggctcaccgcaacctacacctcctggtttaaaccaattctcctgcctcagc

SEQ ID NO: 248242 - DNA, 201 bp, Homo sapiens
gtgttactgtccctgaacaccttccagaggacaagatgtcggaggtggggctaggtgctgtggctcatgcctgcaatcccagcagtttgggaggccaagcygggagggttgcttgagcccaggagtctgagaccagcctgggaaatatcatgagacctgtctcttccaaaaaaaaaaaaaaagaaaaaattaaccaccatg

SEQ ID NO: 248243 - DNA, 201 bp, Homo sapiens
tattggttctgtagcataaatgaattctgtacctttggtcaccatcaaaattagtcctaacacccaagtggtgggaaggctagtgggatggcatgcctggyatctgggtcatctcgggaagactgcgagccttgccttccctctctcagttcagcctcctccctggtgcccccgcagccccttccatcactgtgcccaacg

SEQ ID NO: 248244 - DNA, 201 bp, Homo sapiens
agttgaggctgcagtgagttgtaatggtgccactgcactccagcctgggtgacagagtgagacactgtctcaaaaaaaaaagatgaggaggtggaagacartgatattgagcatcctgaatctgtaggcctagacaaaggtgtgtgtttgtgtcttagtttttaacaaaaaagtttaaaaagtaaaaagaaattaaatata

SEQ ID NO: 248245 - DNA, 201 bp, Homo sapiens
gttgtgggcaacatgtctctaagcagcacaataaaatgcttctgtgaagtgggtactaaagaagtgacaagagcttctgattaattcaaatctagcttagctcctgctctgtgaaatgtatcctgcttgtgtattggctttaaggaatagcttcaatatttatttcatcagattacataaataatgtatatatgctcaaca

SEQ ID NO: 248246 - DNA, 201 bp, Homo sapiens
agccattgccccggcaagttgatacattttaaaggaagaattgcaaaaatccacagctgtctacttttataggaggcaaaggtttgatctgaatggagttyccattagtaggaggagatgactttgttagtatcccaacgttttctttatgttttaatttcttatatgcctatccattttttttttttttttttgagacag

SEQ ID NO: 248247 - DNA, 201 bp, Homo sapiens
ttgtgggcaacatgtctctaagcagcacaataaaatgcttctgtgaagtgggtactaaagaagtgacaagagcttctgattaattcaaatctagcttagctcctgctctgtgaaatgtatcctgcttgtgtattggctttaaggaatagcttcaatatttatttcatcagattacataaataatgtatatatgctcaacac

SEQ ID NO: 248248 - DNA, 201 bp, Homo sapiens
gacggggtttcactgtgttagccaggaaggtcttgatctcctgaactcgtgatccgcccaccccggcctcccaaagtgctgggattacaggcgtgagccaycacgcccagctgatgctttttttttaatcgttcaaatttttattttaatacacagtatgagaaattaacttttttttttttttgagatagagttttactc

SEQ ID NO: 248249 - DNA, 201 bp, Homo sapiens
tgtgggcaacatgtctctaagcagcacaataaaatgcttctgtgaagtgggtactaaagaagtgacaagagcttctgattaattcaaatctagcttagctcctgctctgtgaaatgtatcctgcttgtgtattggctttaaggaatagcttcaatatttatttcatcagattacataaataatgtatatatgctcaacacg

SEQ ID NO: 248250 - DNA, 201 bp, Homo sapiens
acttcctcacgtttaattttatttagtagcagccgggtgtgttggttcacacctgtaatccaagcactttggaaggctgaggcgggttgtctaaaagtatracacttacatttaatatatagtacctaataataatgataaagactatgctgctggtttatgtattcactacataatgcttcttatcattattattattat

SEQ ID NO: 248251 - DNA, 201 bp, Homo sapiens
ggaattctttttattatatgtgggtgtggaagcctgaggtcttagattttatcacagtaagaagcagcttacccctctgttcatcaagtcacagactgtcytggcttctagctgggaagtttttgttgggaagttttgtagtgttgggcaatggatgagtgaatggaaagaagcgtgactagggacctactcttaatggct

SEQ ID NO: 248252 - DNA, 201 bp, Homo sapiens
gagctgatttgagcatggcaggggctttgcacaatgtttaggcttagataaaggaatgaaggatgtttctggtcatgagcagaagctgctgtgacagatgrgaaaatgccttattctttgttgagaaagtacaagggccatgcttctggtgagtaaagcaatttgatgtcttaattcgcagaaaaaaggaagggatacacc

SEQ ID NO: 248253 - DNA, 201 bp, Homo sapiens
ctgagattcccagctataccatccatttccaagagctgatttgagcatggcaggggctttgcacaatgtttaggcttagataaaggaatgaaggatgtttstggtcatgagcagaagctgctgtgacagatgagaaaatgccttattctttgttgagaaagtacaagggccatgcttctggtgagtaaagcaatttgatgt

SEQ ID NO: 248254 - DNA, 201 bp, Homo sapiens
ttttttgagacggagtcttgctctgttgcccaggctggagtacagtggcgtgatctcagctcactgcaacctccgccccgcgggttcaagcgattctcctrcctcagcctcctgagtagctgggactacaggcacgtgccaccacgcctggctaattgtttgtatttttagtagagacgggtttcaccatgttagccagga

SEQ ID NO: 248255 - DNA, 201 bp, Homo sapiens
tccacactgacacccacctcctagtgctgtctccaacgtccgggaacctaccgggtttctctggatcgagaaatgttcttgctcaaatgttgaggaaatasaagtttcttcccacttccagtcccataaaatctactaggatgctaaattgtggatctggtcatctcttcctcttctgcagcttaatttctgtgctgtatt

SEQ ID NO: 248256 - DNA, 201 bp, Homo sapiens
gagagcaatcctcacctggtagcctggtgtgataaagagcaagagccctggccccatctgaaaacccatgagacctacgtgctccaggaaacagcccaaaccctggccaacgtctgaccaacagttctgtcgcgagccctgcaaatcactaaaagggctcacgattcagcttctaaattgtttgtctcagatggattcatg

SEQ ID NO: 248257 - DNA, 201 bp, Homo sapiens
cagtagaattatcttactgtattgtaaaaagaatcatactatccagctttatttccaaaggctaaactcagtttgacagacagagcccttcacagactgtkgtcattggagagctggaccaacgcagaacagggacctgtcccccctgcacaggatcataattgaagccggactcgcctacaaggcactgctaattaatct

SEQ ID NO: 248258 - DNA, 201 bp, Homo sapiens
cagtttgacagacagagcccttcacagactgttgtcattggagagctggaccaacgcagaacagggacctgtcccccctgcacaggatcataattgaagcyggactcgcctacaaggcactgctaattaatctttcctcctactgggcgtctgaatcattctgcccctaagaagattatttgggaggtgattggacttttt

SEQ ID NO: 248259 - DNA, 201 bp, Homo sapiens
ttagattatattactcatgaaactaataacttcaagactctctttccttactctactgtggcaaagtaccatatctctctctttttttatttttttttttrttgatcattcttgggtgtttctctcagagggggatttggcagggtcataggacaatagtggagggaaggtcagcagataaacaagtgaacaaaggtctct

SEQ ID NO: 248260 - DNA, 201 bp, Homo sapiens
aattgatcatactacagatagttttattagtttgttgtccaggctgaagtgcagtggtgccatggcagctcattgcaatcttcagctcctgggctcaagtsatcctcctaactcatcctcccaagtagctgggaacacaggcatacacccgccacacctggctaatttatttatatatatattttttgtagagacggggtc

SEQ ID NO: 248261 - DNA, 201 bp, Homo sapiens
tcctgctctgtgaaatgtatcctgcttgtgtattggctttaaggaatagcttcaatatttatttcatcagattacataaataatgtatatatgctcaacayggacattttggaaaataataaagcatgacaaagaaaatgtaaatggtccatggttccatcaatcagttatagccattactaatattttctgtatttcttc

SEQ ID NO: 248262 - DNA, 201 bp, Homo sapiens
gaccaggtctgtttccagccaaacaggtaagggcatttcttttcttattgtttcagcaatctattcttgtatagcatacaccacaaaacttaaaggcttaraacaacaacttatttgtgttattctgtgacttgctagacagttccactccactggggagagcatggctagaaggtgcatcgtgttctccctcacatagct

SEQ ID NO: 248263 - DNA, 201 bp, Homo sapiens
agcttagctcctgctctgtgaaatgtatcctgcttgtgtattggctttaaggaatagcttcaatatttatttcatcagattacataaataatgtatatatrctcaacacggacattttggaaaataataaagcatgacaaagaaaatgtaaatggtccatggttccatcaatcagttatagccattactaatattttctgt

SEQ ID NO: 248264 - DNA, 201 bp, Homo sapiens
gtattaattggctgagcaagaagacagggaagagcctggcaggcttagagcaaggagactcagagccccaggttgggcctgcgtgccgctgccctgaccayatccttacacgtggcacagctctgctggtctgcaagggttttaggttcagtttcctctgtacgctgtgcagagcgtagcgtatggattggcttggctttc

SEQ ID NO: 248265 - DNA, 201 bp, Homo sapiens
ttcatgttggccaggctggtgtcgaactcctgacctcaggcaatccgtctgcctcggcctcccaaaatgctgggattacaggcacgagtcactgtgccctrccccgaatggtttttctagaaaaacacacaaataagatttacatttgtttaagaaaggtcagtttagtcatagactttcttagaattttattttaggttt

SEQ ID NO: 248266 - DNA, 201 bp, Homo sapiens
acagtcttcccttcttgttcttgctctgtaggccatgacaatgtacctttggggcagcaaagagggaaaacaaatcctctgggacctgcactgattctcayttcaaactcagcatttggcctgaatacataggtcagctggtattccagataaatactatgaattgcaatgtttctctgtacatttcttaacatttgtaga

SEQ ID NO: 248267 - DNA, 201 bp, Homo sapiens
cacaatgcacttctcagaacgtattcccttcattaagtgatgcatgactgtattctgctagaatgaggaaagaaaggaattacctcaggtaagatgatactttttttttttcttttttttgagacagagtttcgctcttgttacccagactggattgcaatggcgcaatctcagctcacctcaacctctgcctcccgggtt

SEQ ID NO: 248268 - DNA, 201 bp, Homo sapiens
gagccactgtgcccagcccatatgcctttgatctataaaaaattatctttttctcaagcatgatacactgtttgagttggactcttaggacacagtcttcmcttcttgttcttgctctgtaggccatgacaatgtacctttggggcagcaaagagggaaaacaaatcctctgggacctgcactgattctcacttcaaactc

SEQ ID NO: 248269 - DNA, 201 bp, Homo sapiens
tggcctcccaaagtgctgggattacaggtgtgagccattgccccggcaagttgatacattttaaaggaagaattgcaaaaatccacagctgtctacttttrtaggaggcaaaggtttgatctgaatggagttcccattagtaggaggagatgactttgttagtatcccaacgttttctttatgttttaatttcttatatgc

SEQ ID NO: 248270 - DNA, 201 bp, Homo sapiens
gccattgccccggcaagttgatacattttaaaggaagaattgcaaaaatccacagctgtctacttttataggaggcaaaggtttgatctgaatggagttcccattagtaggaggagatgactttgttagtatcccaacgttttctttatgttttaatttcttatatgcctatccattttttttttttttttttgagacaga

SEQ ID NO: 248271 - DNA, 201 bp, Homo sapiens
ttcacctgtattttctgagcatttactataagagattacaatttacttggtgtgattctcggttggactgcaaatttctccatatgacttttttttgaggyagggtctcactgtcactcaggttggactgcagtggcatgatcatggctcactgcagcctcaacctcctgggccaaacagatcctcccactactgcagctt

SEQ ID NO: 248272 - DNA, 201 bp, Homo sapiens
caaaggtttgatctgaatggagttcccattagtaggaggagatgactttgttagtatcccaacgttttctttatgttttaatttcttatatgcctatccattttttttttttttttttgagacagagtcttgctctgtcacccaggctagagtccagtggtgcaatctcggctcactgcaacccccgcctccccggctcaa

SEQ ID NO: 248273 - DNA, 201 bp, Homo sapiens
tccccagagagcagaaaacacagttgtgggcaacatgtctctaagcagcacaataaaatgcttctgtgaagtgggtactaaagaagtgacaagagcttctrattaattcaaatctagcttagctcctgctctgtgaaatgtatcctgcttgtgtattggctttaaggaatagcttcaatatttatttcatcagattacata

SEQ ID NO: 248274 - DNA, 201 bp, Homo sapiens
atacgtgaaagtttaggtgaattttcattgcaacacattgattcacctgtattttctgagcatttactataagagattacaatttacttggtgtgattctsggttggactgcaaatttctccatatgacttttttttgaggcagggtctcactgtcactcaggttggactgcagtggcatgatcatggctcactgcagcct

SEQ ID NO: 248275 - DNA, 201 bp, Homo sapiens
ctcaaggagggttttgagcagccctattttttcacagcacactcccatattgttcttaccctcagaagacaatcaacatatgggggcggtggttcccacttagatagccacccaacgtttaccttgcttttccttcatccccccccctcctgtcctccttgcccctttcacgtggtaccttctcagctgtagtcactgtta

SEQ ID NO: 248276 - DNA, 201 bp, Homo sapiens
aacatgccttagaggtagcaaggggctggggtggtggctcacacctgcaatcctgtaatcacacctgtgattgaaggttagctagcctctagggcttacartagagggaataataggcaggggaacaaagtcaccctggaagtgatgggagggaactaaaaaccaggcatccttttacacattgggctgtgggctcaggac

SEQ ID NO: 248277 - DNA, 201 bp, Homo sapiens
atttcccagggatggagtgtggggaagaaagaaaagccaggatataaggaaataaaacatgcagaaggagagaggcagggcagtctgagatgaagtcatcmgaggcagaaggatatattttcaggcagggagttacggacccctgtgtcgtattctcgacctttcttaggcagaagagggaagaaagtctgcataaagaca

SEQ ID NO: 248278 - DNA, 201 bp, Homo sapiens
tcaaggagggttttgagcagccctattttttcacagcacactcccatattgttcttaccctcagaagacaatcaacatatgggggcggtggttcccacttagatagccacccaacgtttaccttgcttttccttcatccccccccctcctgtcctccttgcccctttcacgtggtaccttctcagctgtagtcactgttag

SEQ ID NO: 248279 - DNA, 201 bp, Homo sapiens
agtggcaggatcttgtctcactgcaatttctgcctcccgggttcaagcgattcttttgcctcagcctcccgagtagctgggactacacgtgtgcaccaccrtgcccggctaatttttatatttttagtagagacagggtttcaccatattggccaggctggtctcgaactcctgacctcaggtgatccacctgtctcagcc

SEQ ID NO: 248280 - DNA, 201 bp, Homo sapiens
tcctgagattcccagctataccatccatttccaagagctgatttgagcatggcaggggctttgcacaatgtttaggcttagataaaggaatgaaggatgtktctggtcatgagcagaagctgctgtgacagatgagaaaatgccttattctttgttgagaaagtacaagggccatgcttctggtgagtaaagcaatttgat

SEQ ID NO: 248281 - DNA, 201 bp, Homo sapiens
cagggtgctctcatactttgggttgagaggtgtcattacctgcgcagacccggatagactcaaaggatctaggaattgcctaaggtcgtgcaactggggamgtgaccagacatctcgcctccctcccccacgcttctttagatcgcagtatcttccaattgttttcttacctcacgtccaaattttattatttaccaactg

SEQ ID NO: 248282 - DNA, 201 bp, Homo sapiens
caaggagggttttgagcagccctattttttcacagcacactcccatattgttcttaccctcagaagacaatcaacatatgggggcggtggttcccacttagatagccacccaacgtttaccttgcttttccttcatccccccccctcctgtcctccttgcccctttcacgtggtaccttctcagctgtagtcactgttagg

SEQ ID NO: 248283 - DNA, 201 bp, Homo sapiens
cctggtgttctttctttgtcctaatttttctcattcatatgatggacagtgagactccacaccctatcccaatcttgcagagggtaagagatcttcatcaygatgtcgttcctggcaatgatgtcttctccagttcctgagattcccagctataccatccatttccaagagctgatttgagcatggcaggggctttgcaca

SEQ ID NO: 248284 - DNA, 201 bp, Homo sapiens
aaggagggttttgagcagccctattttttcacagcacactcccatattgttcttaccctcagaagacaatcaacatatgggggcggtggttcccacttagatagccacccaacgtttaccttgcttttccttcatccccccccctcctgtcctccttgcccctttcacgtggtaccttctcagctgtagtcactgttaggt

SEQ ID NO: 248285 - DNA, 201 bp, Homo sapiens
gatcccagaagactgacctaagaatcaggaaatttgtcttcttaaagcagtggtttacagccttggctaggaattagatcccatggtgactttataacatycctgatgcccacatcacaatcccagattgaatcataatctcaatggagaatgactggggtgagggaagggacccaggcgtgagtatttctttaaagttcc

SEQ ID NO: 248286 - DNA, 201 bp, Homo sapiens
tgcctcaaaagtgtacatttttaaaccacccccagcccaagtggccctgtggatggacctaaactttgcaagaggaggaagaccccctgattaagagtggrcttaccggttagctccggttgcaactgaaatccaaccccgagtggcggaatctccaccccacttcacgattttctttcctccaaatcattctggcttgct

SEQ ID NO: 248287 - DNA, 201 bp, Homo sapiens
tcaggggctattaattactggagctattcttcacaggcttgagaagttatgcttgctctgagtctctataagtggattcatttttgctgagagtgaggaamgtgggttaagaagaaggagtacatcattatctcatgagtagatactttcctggaaggaaattcatcagttggtggaccgtggaatttgggaagccccgga

SEQ ID NO: 248288 - DNA, 201 bp, Homo sapiens
ttgtaacatagactacacagcaaagccatttactttgtaaaaacaatacaccctataaaatacaaaccctttgggaagagggtatgtggcaatgaaaggayacagtgctctcaattgcgtcttaaagtctcacttcataaataggtaggagctgatagcatgaaagtcaagctttagtataccttctttagaacttcatta

SEQ ID NO: 248289 - DNA, 201 bp, Homo sapiens
catctgtgggaaatcccagggcaaatgtttacattttgtataccctgaagaactctttttcctctaatatgcctaatctgtaatcacatttctgagtgttytcctctttttctgtgtgaggtttttttttttttaatctgcatttattagtattctaataaaagcatcttgatcggaagaatgcctttctcttggtgtact

SEQ ID NO: 248290 - DNA, 201 bp, Homo sapiens
gaaaacaacagaaaaaacaagcagtgtctgctaaaaaggaaatgataattagacagtgtgaatataatactatgcattcattgaaaatgatgctgtaaaamatatttgctgatgtgggagatgttcatgatgtactaattttttttttttttttgagacggagtcttgctctgttgcccaggctggagtacagtggcgtga

SEQ ID NO: 248291 - DNA, 201 bp, Homo sapiens
tctgctcactgcaagctccgcctcccgggttcacgccattctcctgcctcagccttccaagtagctgggactacaggtgcctgccaccacgcccggctaattttttttttttgtatttttagtagagatggggtttcaccctgttagccaggagggtctcgatctcctgacctcatgatccgcccgcctcggcctcccaaa

SEQ ID NO: 248292 - DNA, 201 bp, Homo sapiens
ggagtacagtggcgtgatctcagctcactgcaacctccgccccgcgggttcaagcgattctcctgcctcagcctcctgagtagctgggactacaggcacgygccaccacgcctggctaattgtttgtatttttagtagagacgggtttcaccatgttagccaggatggtctcgatctcctgacctcgtgatccgcccgcct

SEQ ID NO: 248293 - DNA, 201 bp, Homo sapiens
gggactacaggcacgtgccaccacgcctggctaattgtttgtatttttagtagagacgggtttcaccatgttagccaggatggtctcgatctcctgacctygtgatccgcccgccttgacctcccaagtaaaataggtgaggtgtggtagctctcgcctgtaaggatgaaggaactaaattggctaactgacatatccaaa

SEQ ID NO: 248294 - DNA, 201 bp, Homo sapiens
cacgtgccaccacgcctggctaattgtttgtatttttagtagagacgggtttcaccatgttagccaggatggtctcgatctcctgacctcgtgatccgccygccttgacctcccaagtaaaataggtgaggtgtggtagctctcgcctgtaaggatgaaggaactaaattggctaactgacatatccaaagccacattctt

SEQ ID NO: 248295 - DNA, 201 bp, Homo sapiens
atcataacctccagggggtgagactaagactctttatttttatttttatttatttatttgtttttttagatggagttttgctcttgttgcccaggctggartgcaatggcgtgatctcggctcaccgcaacctctgcctcctgcattcaagagattctcctgcctcagcctcccgagtagctgggattacaggcatgtgct

SEQ ID NO: 248296 - DNA, 201 bp, Homo sapiens
tcagcctcctgagtaggtgggacttacaggcccctcgccaggctaatttttttttttttttaaatttttagtagagacaaggtttctctgtgttgcccagkctgatcttgaactacttgccccaagagattttcctcccaaagtgctgacaggtgtgagccaccacacctggcctgtatactgagtcttaaaacatacaca

SEQ ID NO: 248297 - DNA, 201 bp, Homo sapiens
aggtgggcagatcacttgaggtcaggtgttcaagaccagcctggccaacatggcaaaaccctatctctacaaaaaatacaaaaaaaattagccaggcctastgataggcacctgtaatctcagatatttgggaggctgaagcaggagaatcacttgaacccaggaagaggagactgcagtgagtggagattgcaccactgc

SEQ ID NO: 248298 - DNA, 201 bp, Homo sapiens
ttggcttttagattaacatatgtaaaaaccaactttacttaagggaatgcaggcttcactaagtgggaaatcataagttgtaccaacaggagcttttgaartacccaagtacatgctcccaatcaatgagtgttaacaatttgataaacactttgcatctttgtctgcttttccatcattgcaaatgtaatcctggtgggt

SEQ ID NO: 248299 - DNA, 201 bp, Homo sapiens
tgggttctcagagtgggtttaacatcagagaaactgaaacatcagatatatttttccagacacagctaagttccatgagtcatatggatgttctggccgcrtcctttggtttcctgcaggatttatatagccccttccgagtgaaaagcagtgcatgtactaattattccactttgctgagatcctgctatatatctcact

SEQ ID NO: 248300 - DNA, 201 bp, Homo sapiens
aaaattagtgcgtgtggtggcatatgcctgtagtccctgctactctggaggctgaggcaggagaattgcttgaaactgtgaggtcgaggtcacagtgagcygagatcgcaccactacactccagcctgggcaacagaccaaggctctgtctcaatggaaaaacagaaagaagaagatgacttccatgatcccgaaatatat

SEQ ID NO: 248301 - DNA, 201 bp, Homo sapiens
ggctgctggtttcaggatggctttggagacagaatgaaggagtggccctaaatagactactcatcccatcaaagtcttcatgtgttgaggataccctcatyggtgtagtgcacttgtaggggctgggggaggagcagcaaaatgggtgcttttaggggatttccaaagaaaagcgtaattagattttactaaccatagcat

SEQ ID NO: 248302 - DNA, 201 bp, Homo sapiens
tggcatggggcccatcggagtgtaagttctgggctgctggtttcaggatggctttggagacagaatgaaggagtggccctaaatagactactcatcccatsaaagtcttcatgtgttgaggataccctcatcggtgtagtgcacttgtaggggctgggggaggagcagcaaaatgggtgcttttaggggatttccaaagaa

SEQ ID NO: 248303 - DNA, 201 bp, Homo sapiens
tatgcctaatctgtaatcacatttctgagtgttctcctctttttctgtgtgaggtttttttttttttaatctgcatttattagtattctaataaaagcatyttgatcggaagaatgcctttctcttggtgtactttatagttttaccaccgttacaacctagattcagtgggagctgaagggcaatgagaacacccaaccc

SEQ ID NO: 248304 - DNA, 201 bp, Homo sapiens
ccgaccacgcaggggaaggtagcgctgctcagggaagagttgcctatttcaacaacatggaggttctgccctttcttgtgttagagacacttctctccctytgtggtgtgtggataattaggaagagactgtgtattcaaatccatatttttaaatctaaattggactaaatggtcagttgctatttccatagcaaccaca

SEQ ID NO: 248305 - DNA, 201 bp, Homo sapiens
gaattctgtacctttggtcaccatcaaaattagtcctaacacccaagtggtgggaaggctagtgggatggcatgcctggcatctgggtcatctcgggaagrctgcgagccttgccttccctctctcagttcagcctcctccctggtgcccccgcagccccttccatcactgtgcccaacggggccgttcggtaacgtgcat

SEQ ID NO: 248306 - DNA, 201 bp, Homo sapiens
ggattacaggtgtgatccaccacgcccgacctcttttttttttcctaccattttagagcctttctttggttctcattcatttcacaagtgtaatccagagmttgtctattggttctgtagcataaatgaattctgtacctttggtcaccatcaaaattagtcctaacacccaagtggtgggaaggctagtgggatggcatg

SEQ ID NO: 248307 - DNA, 201 bp, Homo sapiens
atgacttgaaccaagggaaaaccaccttagagagttgggcccaaaatatccaaaaatcttgtgaatagtccttttggtctggaccatagagacctagcctsaaaggatcttattatttctttttttcttttttcttttttttttttgacgtggagtctctctctgttgtccaagctggagtgcagtggtgtgatcttggct

SEQ ID NO: 248308 - DNA, 201 bp, Homo sapiens
aacttcaacagaaggcaagggaaaggaatggatatgagaagatgagcagagagattaactatgagaatggacgcacctagaaccacaaacgtctgaaatcrttattgagatgacttgaaccaagggaaaaccaccttagagagttgggcccaaaatatccaaaaatcttgtgaatagtccttttggtctggaccatagaga

SEQ ID NO: 248309 - DNA, 201 bp, Homo sapiens
aagtagacctctattaatttcttagcatgtagaacttctcctggttaacataaaacaaatatccaaataaataaataaaatgtttgagtattacatgttasattcttggatgctttcctattgtaaaatgtgaatgaggtcttttatctaggggaaagataatagcaaatgaaatttctgtttatgatattataggtagcc

SEQ ID NO: 248310 - DNA, 201 bp, Homo sapiens
aaatgatagcattttgtgtgcttctctaaacagcagtcagtttggacaagaccttttgtttcccttgcaggatcacccagtatactccataccagcctgargtgtctcaggggaggctggagagtttactcaactaccagaccatggtgtgtgacatcacaggcctggacatggccaatgcatccctgctggatgagggga

SEQ ID NO: 248311 - DNA, 201 bp, Homo sapiens
tgtaaagtgctgtggagtttctgtgtttatttctgattgttgtaaggagtccataagagtgtttacactttgtctaggacttttagtacaagaatgcctayttccatgttttctgatgtctctttctcctcatttacttccttgtttgctgacttcacctttggaaactgtttcttattttgcattggctccatagagact

SEQ ID NO: 248312 - DNA, 201 bp, Homo sapiens
tcaagcaattctcctgcctcagcctcctgattagctgggactacaggcgtgtgccaccatgcccagctactttttgtatttttagtagagacagggtttcmccgtgttggccaggatagtctcgatctcctgacctcatgatccgcccgcctcagcctcccaaagtgctgagattacaggcgtgagctaccacgcctggcc

SEQ ID NO: 248313 - DNA, 201 bp, Homo sapiens
catctattactcatttcccttcccttcctgcacggggtactgggaacatgaaataacagtctacgattgagtcagcattgctcaccggaatgttagtcatkgcatatgccctgaaagtggtgccttccaggaccgttgagatgaggatggccagcccctaacagccatctgcatccggggcctgggagagccgaacctgag

SEQ ID NO: 248314 - DNA, 201 bp, Homo sapiens
atctttttttagtatttaatttttgccttcagcttcgcagacatacacattttgaatgggactgatacatctattactcatttcccttcccttcctgcacrgggtactgggaacatgaaataacagtctacgattgagtcagcattgctcaccggaatgttagtcattgcatatgccctgaaagtggtgccttccaggacc

SEQ ID NO: 248315 - DNA, 201 bp, Homo sapiens
tggattggtggctttagggaaggctttgcagagagttgtagccagttgaagaatgggcaggatttggctgagaagcatttgaccttgatgatctcactacwcatcacatctgccctgtgtgatgggtactgttactatccccattttacacatctctcaggcacataggcacagggagatgaagttacttgtgatgtgagt

SEQ ID NO: 248316 - DNA, 201 bp, Homo sapiens
gtaataattttctatgtccagtacatgtataggatattaatgtcagataagattgtagagtaaaatgctatgataatttggaggaggtagaggattatttmtttaatcaatctatcaaatattttttatgtcagtgttcttggaatagagaatacaattgtgaacaaggttgacaaaattcttgccttcagggaaggcctc

SEQ ID NO: 248317 - DNA, 201 bp, Homo sapiens
atatttactaaatacttattgcagaactactacatgcagagtactgttctatatattccctgttgaagaatatacagaactctgagaattagaccctactktcagagcttatgctctaattgagataagacaggcatacaaagtaaatgtgaaatcggtaataattttctatgtccagtacatgtataggatattaatgtc

SEQ ID NO: 248318 - DNA, 201 bp, Homo sapiens
tcagcattgcctaccagagcatttgctacaattgaacctacattaatgcatcattatcacccaaagtgttttttttttttttgagacggagtctcactatstcacccaggctggagtacagtggcacgatctcagatcactgcaacctccgcctcctgggttcaagcgattctcctgcctcagcttcctgagtaggcgaga

SEQ ID NO: 248319 - DNA, 201 bp, Homo sapiens
atggtgtctataaagttagccacgatgttttttaatccccccggccatgagactgagtctcactctgtggcccaggctggagtgcagtggcgcgatcttasatcactgcagcctccacctccttgctttaagcgattctcctgcctcagcctcccaagtagctgggattacagatgcacaccaccacacctggctaatttt

SEQ ID NO: 248320 - DNA, 201 bp, Homo sapiens
tgccacaacgcccagctaatttttgtatttttagtagagacgaagtttcgccatgttggccaggttggtctcgaactcctgacctcaggtgatctgcccgyctcagcctcccaaagtgctgggattacaggcatgagccaccatgcctggtcaagaaacttcttaagaagttcaaatataagaagtaaaataggtccactg

SEQ ID NO: 248321 - DNA, 201 bp, Homo sapiens
attttagcttctaaatgttacattttgtacaaagggctgtatgctggatgctatagatattataggtagttgaagggaacaaattcacctcatatttaaayttataatttatcactcataaaataaatatttttcatgaaaaggtatcattttaaatgtaataaaatattttttttaaaaacataccccgagaaacttttt

SEQ ID NO: 248322 - DNA, 201 bp, Homo sapiens
ggtgaatgaatattctccaggtggggagagcaaattggtgcatgtaagctctggtagtagcatttccatttaatagtggagcaccattactcaaacttggyttcatgtgaatgcctgtgttccagtgtagtcagaaaggaattctggattaaatatttgtttgccatgtacagagaaaactgtagtgagagctagttatag

SEQ ID NO: 248323 - DNA, 201 bp, Homo sapiens
ccagacacggaggggaaggtggaagactttacggaactcgtggagagagctcatcagagtggggtaggtatacctttcttgtggggggtccgtggaggcgyatcccaacttgtatctgtctacctatctctctctctgtcttttcatgtgccttaatttctttaccattatcacatggaatggtaaaactctccttcctga

SEQ ID NO: 248324 - DNA, 201 bp, Homo sapiens
ttgcagtttcagttacccatggtcaactggctcaaaaatattaaatggaaaatttgagaaataagcaattcatcctaagttttaaattgtacaccattctraatagtgtgatgaaaccctgcagcatcttgttccatcccacctgggatgtaaatcagccctttgtccagcatatccactgtgtatatgctacccacccat

SEQ ID NO: 248325 - DNA, 201 bp, Homo sapiens
attttcaacatcctaatgtaaccctccttcgtacttttaagcacattgacagcatgtccacatgtcattttcccagcatcattttctgaattgcatttgtmcttactgctcgttggctatggtagtttgcagatactttctcccgttctgtagcttgtccttgtaaccctaatgggagcaaaaagtttttaattatgatgg

SEQ ID NO: 248326 - DNA, 201 bp, Homo sapiens
tcttatggatatatgtttaatatatccatacctatatatacgcaaaagtaattatttgatgttgagggtaaagttgctgaaaagtgtcaatggctctagaratattttgtataaaaggatcaggactatacaacacatttaactgttgcaagtagattttatgtccgcagaatagaaataatctcatccccagacacctcc

SEQ ID NO: 248327 - DNA, 201 bp, Homo sapiens
atttccttctggggggtgacactgggtaggatggatgggggtcgcttttttcttcttcttttgctttataacccttctgcactgatgatggattttttttwaaaaaatcacataaatgtattcttttatttatttattttttaagatagagtcttgctctgttgcccaggctggagtacagtggcacgatctcagctcact

SEQ ID NO: 248328 - DNA, 201 bp, Homo sapiens
ttaaattgtggtgtgaacagggctctcaatggctgtcagaattaattgtgcatgagaatcacctggagggcttgtgcaattactgagcctcaccctacagrgtttctgattcagtaagtctggagtagggccccagaatttgcatttttaacaaatccccaggtgatgctgaggcagctcgtttggccaccagcctgtgaa

SEQ ID NO: 248329 - DNA, 201 bp, Homo sapiens
gcaaccagtgaacaaacatttgaaacaattcagacactcactaggctgtatgtttggggaattctttttattatatgtgggtgtggaagcctgaggtcttwgattttatcacagtaagaagcagcttacccctctgttcatcaagtcacagactgtcttggcttctagctgggaagtttttgttgggaagttttgtagtgt

SEQ ID NO: 248330 - DNA, 201 bp, Homo sapiens
ttgtttttgtccttaaaaactgcaaactgtgattgttaatgtagacggaggtggccattgcttttcccagaatctccttcatgggaagattcttaaattgwggtgtgaacagggctctcaatggctgtcagaattaattgtgcatgagaatcacctggagggcttgtgcaattactgagcctcaccctacagagtttctga

SEQ ID NO: 248331 - DNA, 201 bp, Homo sapiens
tgcctagttccttaggacattttgatcccaagggtgtttgaagggcctgaaagaaaaaatgtcaagaagcttatccctattttctcctatttatttgttcwacccataaaccccggggagggtttccagcttggtgtagaaaacagccaaataatatttaattaccttttcatttcccactgagcccagcggggcttgctt

SEQ ID NO: 248332 - DNA, 201 bp, Homo sapiens
tgttgagttatagcagttctttttttttttttttgagacgaggtctcgctctgtcgcccagactggagtgcagtggcgcgatatcggctcactgcaacgaycgcctcccgggttcacgccattctcctgcctcaccctcccgagtagctgggactacaggcgcatgccaccacacccggctaattttttgtatttttagta

SEQ ID NO: 248333 - DNA, 201 bp, Homo sapiens
aatccgctgaaggtgcgtaggccctggaacattgcttgaaatgttccttaaactagaaaatgatgtctggacagtgtaccagcaactcccgaactctcaamtgaggatgatactcttccctagaataaggtaattcttctgagaagatgcagttgttactttgaagtttccatcgtcttgaacagcatagcagttactcaa

SEQ ID NO: 248334 - DNA, 201 bp, Homo sapiens
actcaggaggctgaggcaggagaatggcttgaacccaagaggtggaggttgcactgggccgagatcgtgccactgcactccagcctgggtgacagagcaaractctatctaaaaaaaaataaaaaccccaaaaaactagttatcatatataatttggaattctacttctaagaatgtatccttagacaaagataaagatct

SEQ ID NO: 248335 - DNA, 201 bp, Homo sapiens
ctaaatgccttcttggatgtgcagatacctttttatatgttaaaatatatttaggaacaaaccagttgaattagtcatttggaacatagacattatagatsacaggcatgttttcttaatcactatgttttacctaattgagtcaaactcttgtaaacatgatggcaggccttttgatagtatttttctcctgaaatgagg

SEQ ID NO: 248336 - DNA, 201 bp, Homo sapiens
tttcaccatattggccaggctcgtctcgaactcctgacctcgtgatccgcctcctcagcctcccaacgtgctgggattacttacaggcatgagccactgcrcctggcctgatttttttgtagaggtgaggtctcatatgttgcccaggctagtctcgaattccagggctcgagtgattgcccacctcagcctcccagagtg

SEQ ID NO: 248337 - DNA, 201 bp, Homo sapiens
agcatttccatttaatagtggagcaccattactcaaacttggtttcatgtgaatgcctgtgttccagtgtagtcagaaaggaattctggattaaatatttrtttgccatgtacagagaaaactgtagtgagagctagttataggagtgttaaatgtcctcattgcagagtaaagattgtgatcagtttggaaatacttggg

SEQ ID NO: 248338 - DNA, 201 bp, Homo sapiens
attttcaaaagcaacagcctccagcaaaatctcctgagcacttgttaaaaatacaaactccgggccccgctccagacgcactgatcataacctccaggggktgagactaagactctttatttttatttttatttatttatttgtttttttagatggagttttgctcttgttgcccaggctggagtgcaatggcgtgatctc

SEQ ID NO: 248339 - DNA, 201 bp, Homo sapiens
cttccagcctcaatttctttgtaaaggaaagactttgaagaagaacagtgattttcaaaagcaacagcctccagcaaaatctcctgagcacttgttaaaartacaaactccgggccccgctccagacgcactgatcataacctccagggggtgagactaagactctttatttttatttttatttatttatttgttttttta

SEQ ID NO: 248340 - DNA, 201 bp, Homo sapiens
ggccgaacctcctaagttacactgcatcccttccagattagtctatctattaaagcaagtcacgaggcgagcccagattgaatcggggaggggacaacacytgggtgtgaattttggtagatgtcgttcattgcggactgtctttggaagctagcttactacacctgtcagtgacacagcataagaagaaggatcaagcac

SEQ ID NO: 248341 - DNA, 201 bp, Homo sapiens
caacgtgctgggattacttacaggcatgagccactgcgcctggcctgatttttttgtagaggtgaggtctcatatgttgcccaggctagtctcgaattccwgggctcgagtgattgcccacctcagcctcccagagtgcaagggttacaggtgtgagccaccatgcccagcctccatctacttttctttcattacttttct

SEQ ID NO: 248342 - DNA, 201 bp, Homo sapiens
tgtgttccagtgtagtcagaaaggaattctggattaaatatttgtttgccatgtacagagaaaactgtagtgagagctagttataggagtgttaaatgtcytcattgcagagtaaagattgtgatcagtttggaaatacttgggttacttattacacataactcagtaatctcagacatttatgtagtgcttaccatgtac

SEQ ID NO: 248343 - DNA, 201 bp, Homo sapiens
gtaagtgatggaggcagaattcaaacccaggcagcccagctccactgtccacactccatccactactttgctctctcttcattttgtcctttgcaaggtcrtgggtgtacaaagtggaaaacttctgtcctgactcacctggaatatccagtttacagatgtgcacaaacccagttgcactagaatcaccctgccatatgc

SEQ ID NO: 248344 - DNA, 201 bp, Homo sapiens
cagccgaggggaggacttcaaggtccactagtcagctcagtgaggttgagagagaggtggggcagccccacccacattctgcctgcaagctcagtgacccrcctcaggaggctgggagtgagggcccgggctgaaccggggcgcgtgctagagaatagggacgtgagtcgctgtgggcgaatctgtgttgtgacttctatt

SEQ ID NO: 248345 - DNA, 201 bp, Homo sapiens
attctcgacctttcttaggcagaagagggaagaaagtctgcataaagacataaggatcctccgaggtgggaggagttgaggggctgcatttctgacgatcyctctgcatgagagacaggaaggctgagactgagtactagggaaaagtgaatttcagaagagctattgtgtgcatctgggtggcgaggacccttgatcggt

SEQ ID NO: 248346 - DNA, 201 bp, Homo sapiens
tgggcgaatctgtgttgtgacttctattcttcatgtcctcttccccactccatcaaatagcactgtgccttgcttaaacaagtctcagttatacgatgtayggataactttgatctcattttgactcaagtttgctttactttttgtaagtccagagtattcatacaaaaatgcaaactgagaattttagtaagaattctc

SEQ ID NO: 248347 - DNA, 201 bp, Homo sapiens
tattgtgggtatatatatatatggtgtaaaactttaggtatagcatttttagattgtcaaagaagcaaaaagcaaaacctgaatacattttcccttataaytgaggccaaaagaaattgtagggttatgtttggggtaatgggttaaggatgggaaacaatgtgtgcatgtgtgtgtgtgtgtttagttgtagcaggtatc

SEQ ID NO: 248348 - DNA, 201 bp, Homo sapiens
atctttaaagcagggtattttaggtgaatatttgaacaagtgaatcccttcctgagactttcaaagtcagggaatgtttaggttagctatttttataatawatatactctaaaataaagtgttcttttcagagcattagagcctgggaaacatggcaaagttgtgtatccttttttagtttagttcttggttccagctgaa

SEQ ID NO: 248349 - DNA, 201 bp, Homo sapiens
cttgtctccaagtgtttctttttctttaggcagggtctcactctgtcacccaggtgggagtgcattggtgcaatcactgctcactgcagcctccacctccygggctcaagcaatcctcctgtctcattctttgactttttttttgtagagacgaggtctcactatgttggtcaggctcgaactcctgggctcaaacaatcc

SEQ ID NO: 248350 - DNA, 201 bp, Homo sapiens
agcctccacctcccgggctcaagcaatcctcctgtctcattctttgactttttttttgtagagacgaggtctcactatgttggtcaggctcgaactcctgrgctcaaacaatccttctgcctcggcctcccaaagtgctgggattaacaggcgtgagccactgcccccagccttcaagcgtttcttaatggattccccctt

SEQ ID NO: 248351 - DNA, 201 bp, Homo sapiens
actgtcactcaggttggactgcagtggcatgatcatggctcactgcagcctcaacctcctgggccaaacagatcctcccactactgcagcttcctgagtayctggactacaggcatgtgctaccacatggactaatttatttcattttgtagagacgggggtcttgctgtgttgcctaggctggtctcaaactcctgggtt

SEQ ID NO: 248352 - DNA, 201 bp, Homo sapiens
gcttctagccccgagctccagggcttctatcacctccatgactttcctgaatctgagtccttgaagtgcatttttcagaaaacttgggtcctactcttccycttcctttgggtgagatcctatctactccttctcaggaggtggcctctgctgcagacccataaaacgttaaccccacctttcctatcagtgggaatgaac

SEQ ID NO: 248353 - DNA, 201 bp, Homo sapiens
atacaaaaattagccgggtgtggtggtgtgcgcctgtaatcccagctactccggaggctaatgtggcagaaacacttgagctgggcagtggaggttgcagygagccaagatggctccactgcacttccacctgagtaacagagtgagaccctgtctaaaaaaaaaagagaaaggaagaaaagaaaaaatcagaatcctaat

SEQ ID NO: 248354 - DNA, 201 bp, Homo sapiens
aatcagaatcctggctgggcacggtggcaaatgcctataatctcagcattttgggaggtctaggcaggtggatcgcttgaggccagcagtttgagaccagyttgggcaatattgcgagaccccatctctacaaaaaatacaaaaattagccgggtgtggtggtgtgcgcctgtaatcccagctactccggaggctaatgtg

SEQ ID NO: 248355 - DNA, 201 bp, Homo sapiens
aatattagcttttggtcaacctggatagtctaacctttatccactcttagtccatttttatttacattaactttttcattcctactattcatgatctaccrtggtgcaatttagatttatattctgtattatctgccttgacctgacccatgagagcgacatagaccctgactggagaggaggcctttgcactggaaatgc

SEQ ID NO: 248356 - DNA, 201 bp, Homo sapiens
ttgtctccaagtgtttctttttctttaggcagggtctcactctgtcacccaggtgggagtgcattggtgcaatcactgctcactgcagcctccacctcccrggctcaagcaatcctcctgtctcattctttgactttttttttgtagagacgaggtctcactatgttggtcaggctcgaactcctgggctcaaacaatcct

SEQ ID NO: 248357 - DNA, 201 bp, Homo sapiens
gctatgttattgacccagataccagttggccctgaatgctggtaactgtctgtcagagacgccactatgcctctggtatgcttgtgtcttatttggggttycccaaaatcagaccctgaaacaggaacttcagtacaagaagtttatgtggttgctgatcccggaaagcacagtggagaagtacagaggtgagacagggaa

SEQ ID NO: 248358 - DNA, 201 bp, Homo sapiens
ttccagccaaacaggtaagggcatttcttttcttattgtttcagcaatctattcttgtatagcatacaccacaaaacttaaaggcttagaacaacaacttwtttgtgttattctgtgacttgctagacagttccactccactggggagagcatggctagaaggtgcatcgtgttctccctcacatagctggtgaggagctg

SEQ ID NO: 248359 - DNA, 201 bp, Homo sapiens
tccaaaagtctacaagcaaaatcaaaacaacacatttgagcacctctatatgcagcgggagctagatttttgctacagtacctagtgagggactgtaattktggctcttggcacaatagccaaattcctatccctctaatcctattgtgtctcctggggctgggtatgaggaaggagagtcctgcactggaagaattacct

SEQ ID NO: 248360 - DNA, 201 bp, Homo sapiens
tctatatgcagcgggagctagatttttgctacagtacctagtgagggactgtaattttggctcttggcacaatagccaaattcctatccctctaatcctaytgtgtctcctggggctgggtatgaggaaggagagtcctgcactggaagaattaccttagcagtttcacttactatgaggactgttggtttcagtaaccct

SEQ ID NO: 248361 - DNA, 201 bp, Homo sapiens
cttccactagtagaatcttaatgatgtgtgggaaaccatgtctctggcaaagtgctggagttcacctgagccttttttttttttctggagacagtgtctcrctctgttgccccggttggagtgcagtggcgtgatctcagctcactgcaacctccgcctccctggttcaagcgattctcctgtgtcagcctcccaagtagc

SEQ ID NO: 248362 - DNA, 201 bp, Homo sapiens
agtgctggagttcacctgagccttttttttttttctggagacagtgtctcgctctgttgccccggttggagtgcagtggcgtgatctcagctcactgcaayctccgcctccctggttcaagcgattctcctgtgtcagcctcccaagtagctgggattacaggcacatgccaccaggcccagctaatttttgtgtttttag

SEQ ID NO: 248363 - DNA, 201 bp, Homo sapiens
gaaagagaacaatctattgctatataagagtttatgccaaccatacctgaagcaactcattgtgtttcatggaaagaaatctgttttgggggcttttcttycctgaaaagttagcaaaacattgtatttttgtgtaagttccctttttggacaactatgtcccacttttaaatgaagacagtaacggtacttaccttataa

SEQ ID NO: 248364 - DNA, 201 bp, Homo sapiens
acagtggcacgatctcagatcactgcaacctccgcctcctgggttcaagcgattctcctgcctcagcttcctgagtaggcgagactacaggcatgaactaycacgcctggctaatttttgtatctttagtagagacgggggtttcaccatgttagccaggctggtcttgaactcctgacctcagatgatctacccaccttg

SEQ ID NO: 248365 - DNA, 201 bp, Homo sapiens
agggtcttggaccgccggaaggtgggtgatgtgcggatcttctttttttttgtggctatggacacctttcaacactgccttcttggcctttaaagcattckctttggcttcggctttaggaggggcaggagcttccttcttcgctttcggcgccatcttgtgaaaaagctctgtttttgtcattaattctcaataggcaga

SEQ ID NO: 248366 - DNA, 201 bp, Homo sapiens
tttgttggcaacatccaaagcatcataatcaggagccagtcgaacatataccttcttctctccatcaggccgaatcagggtgttgcccttggccacatcawtgtcatagagcttcttcacagcctgtttaatctggtgcttgttgactttaacatccacaatgaacacaagtgtgttgttgtcttccatcttcttcatggc

SEQ ID NO: 248367 - DNA, 201 bp, Homo sapiens
taaggacaccaatcattggattacggctgaccctaatccagcatgatctcattttaacttggttacatcagtggagaccctattttcaagtaaggttataytcagaggtaccatggggttaggatttcaaagcatcatttttgggaacacaattcaacttgtaacactcctcttatccatctccctcctggactatagtgc

SEQ ID NO: 248368 - DNA, 201 bp, Homo sapiens
tgtcattacctgcgcagacccggatagactcaaaggatctaggaattgcctaaggtcgtgcaactggggaagtgaccagacatctcgcctccctcccccasgcttctttagatcgcagtatcttccaattgttttcttacctcacgtccaaattttattatttaccaactgaaagacagcagtacttttcgagtccgaatg

SEQ ID NO: 248369 - DNA, 201 bp, Homo sapiens
agaaaggatctagtgtgcagatggcaagctttattttgtttgaaggtggacatttgaggtatggagcctatctgcttcaggttggctgctcaggctatgcygagggctgctgcctttgttggtttcaaatctgatggtcgttgaaaacctgcatgttttgctgaattgaactaattgagatttagggatggtcggagggaa

SEQ ID NO: 248370 - DNA, 201 bp, Homo sapiens
acagaaggattgtgccaatttagtttccagtcattgtttcatgagggtgctatattttataacccatggctgtattttatagctaaggtttaaaatcatcmcaggagatatgataaggacactggaaactttaggcaactcattgacagtagcaaagctggaataactgtaggtcatcactgaaacttggagtcagggaac

SEQ ID NO: 248371 - DNA, 201 bp, Homo sapiens
tggggtcggcaccgattagctctgatcatgtccatccttgaagatggggagtggggacagtctctcctgaacctcgtcgactgagtttggtggagaggttrtttcccaaaggtaaccagaggaagggagaatgcattgttgctgggcagataacaccaccactgcaaggctatgaatgataatcccccaaagcagtgaagt

SEQ ID NO: 248372 - DNA, 201 bp, Homo sapiens; identical to SEQ ID NO: 48746

SEQ ID NO: 248373 - DNA, 201 bp, Homo sapiens; identical to SEQ ID NO: 48748

SEQ ID NO: 248374 - DNA, 201 bp, Homo sapiens; identical to SEQ ID NO: 48749

SEQ ID NO: 248375 - DNA, 201 bp, Homo sapiens
gaagaatgcttttgtccttagtgaaagccctgaaaacctcggaagaagggccacacaggtataaggaatcctcttttcacaaagtcataaaccagagttcktaggttgtccttatgcagtctttacaccagtgtgtatgtgtggaggcgaatgtgtggaggtgtatatgtggaggtgtgtgtatgtggaggcgtatgtgtg

SEQ ID NO: 248376 - DNA, 201 bp, Homo sapiens
ctgtggcaaattttatgaggtatcaagggaagaatgcttttgtccttagtgaaagccctgaaaacctcggaagaagggccacacaggtataaggaatcctsttttcacaaagtcataaaccagagttcttaggttgtccttatgcagtctttacaccagtgtgtatgtgtggaggcgaatgtgtggaggtgtatatgtgga

SEQ ID NO: 248377 - DNA, 201 bp, Homo sapiens
taaaccagagttcttaggttgtccttatgcagtctttacaccagtgtgtatgtgtggaggcgaatgtgtggaggtgtatatgtggaggtgtgtgtatgtgkaggcgtatgtgtggaggtgtgtgtatgtggaggtgtgtatatgtgtaggtgtgtatatgtggaggtgtgtatatgtgtaggtgtgtatatgtgtaggtgt

SEQ ID NO: 248378 - DNA, 201 bp, Homo sapiens
ttgggcagaacacagactctggagccagaatacctaagttcaagtcccagctcaccatcttcaccttcaccttctgcttaacctctgcctgttttttcctstgtaaattggggaagagaataaaggtttgaaagattaatatgggtaactcttagaactgggcctgacgcatagaaagcactatagaaatgttagctattg

SEQ ID NO: 248379 - DNA, 201 bp, Homo sapiens
agagttcttaggttgtccttatgcagtctttacaccagtgtgtatgtgtggaggcgaatgtgtggaggtgtatatgtggaggtgtgtgtatgtggaggcgwatgtgtggaggtgtgtgtatgtggaggtgtgtatatgtgtaggtgtgtatatgtggaggtgtgtatatgtgtaggtgtgtatatgtgtaggtgtgtatat

SEQ ID NO: 248380 - DNA, 201 bp, Homo sapiens
gtatttttagtagagatagggtttcactatgttggccagactggtctcaaactcctggcctcaagtgatctgcccacctcagcctccaaaagtgctgggaytgcaagtatgagccatcgcacctggcatcttctcctttttaaaacaaaatatgttgcatggttcagaattcaaaattttgttttaaaaagtttaatgaaa

SEQ ID NO: 248381 - DNA, 201 bp, Homo sapiens
tcagatggcagctaatccctcagactatgtaattggctagcagtctttaaaagcttacattttaacattgttttgtctgctcttgttttgtctgcaacacktataggaaccgtactgaatgagtatttgacttaggctaagaaatactccagttttcttactgagccttcctgcttcttacagaggattgactgcctcccc

SEQ ID NO: 248382 - DNA, 201 bp, Homo sapiens
gagaaactactatacttttgttaaaagccaatgagaggccgggcgcggtggctcacgcctgtaatcccagcactttgggaggccgaggcgggcggatcacraggtcaggagatcgagaccatcctggctaacacggtgaaaccccgtctctactaaaaatacaaaaaaaaaaaaaaaaaattagccgggcatggtggcggg

SEQ ID NO: 248383 - DNA, 201 bp, Homo sapiens
tgttcccggccataacctttgtttttatcagaaaagttgatgatgcacattttcagatgagtatgccattcagacttcccctttaggcaactcgttccgasgtgcctggaatgggataaaacaaatgcacttactgatttttttccccgctttgctgtagaaattggcgtgttagccaaggctttcattgaccaagggaaa

SEQ ID NO: 248384 - DNA, 201 bp, Homo sapiens
agattcatgttctttgggcagcatgttcattttcatttttagatgttgccaggctggagtgcagtggcgccatcttggctcactgcaacctctgcctcccrgggttcaagcgattctcctgcctcagcctcctgagtaactgggactacagccacgcgccaccatgcccagctaatttttgtattttgggtagagacaggg

SEQ ID NO: 248385 - DNA, 201 bp, Homo sapiens
cccgccatcatgtccggctaatttttttatttctgtagagactgggtttcaccatgttggccgggctagtcttgaactcctgtcctcaggtgatctacccrcctgggcctcccaaagtgctggggttacaggtatgaaccactgttcccggccataacctttgtttttatcagaaaagttgatgatgcacattttcagatg

SEQ ID NO: 248386 - DNA, 201 bp, Homo sapiens
tcattttcatttttagatgttgccaggctggagtgcagtggcgccatcttggctcactgcaacctctgcctcccggggttcaagcgattctcctgcctcascctcctgagtaactgggactacagccacgcgccaccatgcccagctaatttttgtattttgggtagagacagggtttcaccatgttggccaggatggtct

SEQ ID NO: 248387 - DNA, 201 bp, Homo sapiens
aaatcattttccagagtgttttgttaataaaaatataacataatcacaatactaatctggttaaaaactgaattgtgtcacgatagcagcacctgttttayaggattggaaaagtctctccaataacatgatagcaggcatttaaactgaatcatttcaaaataatgatgatttcagattcttatttttaaagaaaataat

SEQ ID NO: 248388 - DNA, 201 bp, Homo sapiens
aatggtataattggaagagaatgttacccatctacctaagagtaataattttaaggcagtattatcttcactaccactgaaaaaatgacactgagttaacagagaataaatggacagctatttgatttaaaaatttttttattcaaatattaattttatcaaatgaaacaagaatctttgatgatactttgatgtaaaaaa

SEQ ID NO: 248389 - DNA, 201 bp, Homo sapiens
atggtataattggaagagaatgttacccatctacctaagagtaataattttaaggcagtattatcttcactaccactgaaaaaatgacactgagttaacagagaataaatggacagctatttgatttaaaaatttttttattcaaatattaattttatcaaatgaaacaagaatctttgatgatactttgatgtaaaaaaa

SEQ ID NO: 248390 - DNA, 201 bp, Homo sapiens; identical to SEQ ID NO: 48747

SEQ ID NO: 248391 - DNA, 201 bp, Homo sapiens
acttcaaaacttgaacgtttaacaatcaggtcttgctgccctactcataaagagacccaaataaaaacaacatgacgccatttttttccatgtgtttagaytggcaaacttgtgaagtcgcttaataccaaatgtgtaccaagatgtaaggaaatgatgtgagaatgtcattagtataaccttttaggaggagtaatttga

SEQ ID NO: 248392 - DNA, 201 bp, Homo sapiens
tagataatcttcaagacttctgtcagtccctggattctatatttcttcaaaacattattatgtacacctgtggcacataggcttgcataattagaatgatrctgatggcaaagcggagttttttttttttttttggaatggtaaaacatttaatttgtagtaggcaattccaaaaatataaaaggatatttcatgaaaaga

SEQ ID NO: 248393 - DNA, 201 bp, Homo sapiens
tggagaaacgtttgttaggtagcgttatatattgttatctggtgttccctataccgaaaacggcgggtcctggccgccgggaggtactcagaccaggtgtscactttacatgttgcttaaaaattgcaactcattcctttacattgacatttaaaccagtgattctaaggcagagttggggcggagggaggagaattttga

SEQ ID NO: 248394 - DNA, 201 bp, Homo sapiens
ttaaagctaagtcactttaaagaaaactatatagtaaagaactatatagtaaagaaaaactatatagtaaagaactatatagtaaaaaaaactatatagtraataatagttcaactatggtagaaatcgtgaggttgaagtgtgattgcttagtctgagaaagctgcactgtagcatagtgcgtctcagagacataaccct

SEQ ID NO: 248395 - DNA, 201 bp, Homo sapiens
  misc_feature (1)...(201): n = A,T,C or G
aggtgggcgtagaaaaaggcgtagaagagggtctgggagacgcggcattccaggggtttggcgacagcaccactccatccctccgcagaacgcaggccccntctcacctgggcgccgccgcctggcagctgcgggcagcggggagaactggggaacacgtcgaagtcactctcttcctcagcctcaccctcggcccgaggg

SEQ ID NO: 248396 - DNA, 201 bp, Homo sapiens
ataagatatttagcagtttcttcacatacaaggtatggatggtcagacaaaaatctctggctatcatcccatcgactcaacatacctgtaaaaaaaagaaktgaaccataagtgtcaaatattttctttcttcccataagggaagaaataccaaccattcttaattcattaatctctcaatggtatttttaaatgattctc

SEQ ID NO: 248397 - DNA, 201 bp, Homo sapiens
ctgtatttcatgaaaattatagctattaatttttaaagctaagtcactttaaagaaaactatatagtaaagaactatatagtaaagaaaaactatatagtraagaactatatagtaaaaaaaactatatagtgaataatagttcaactatggtagaaatcgtgaggttgaagtgtgattgcttagtctgagaaagctgcac

SEQ ID NO: 248398 - DNA, 201 bp, Homo sapiens
  misc_feature (1)...(201): n = A,T,C or G
aggtggaggttggtaatatatggccaccccgtctgccctccgaagatgccataaaaggggtgggatggcatcaggcgtcaggtcccaggtccccggccccnggcagtgaggtgggcgtagaaaaaggcgtagaagagggtctgggagacgcggcattccaggggtttggcgacagcaccactccatccctccgcagaacgc

SEQ ID NO: 248399 - DNA, 201 bp, Homo sapiens
gcctctcagagtcagacctctcttttagagatgaggagactgagttcaggagaacttgcttgatagtaaacagtatttattgggggattagggtgaaaacrtagatttctccatgttaaatactcttttctctatgcagtatttcccacattgagattcatgagatagacatgaattagacgatgagattcatgagataga

SEQ ID NO: 248400 - DNA, 201 bp, Homo sapiens
cagcccctcagctttccagtttacctcctaccagccagaaaccccagcagcaaagagcctcttttgccagcaaaagtcttggggtcggcaccgattagctytgatcatgtccatccttgaagatggggagtggggacagtctctcctgaacctcgtcgactgagtttggtggagaggttatttcccaaaggtaaccagagg

SEQ ID NO: 248401 - DNA, 201 bp, Homo sapiens
aaaaacaatatttgtaagaaatgaagaaagcaatggatgtttgtgcagcacagttcaatttttcttaattcaaaggatttctgtacaatattttggtatayagtatatcctgtgttctaggtctgcagtcatgtttttatatcttagtccttgtttcatcaactaacttctaaacttctttgttaatttaggcctatcccc

SEQ ID NO: 248402 - DNA, 201 bp, Homo sapiens
gcagcccctcagctttccagtttacctcctaccagccagaaaccccagcagcaaagagcctcttttgccagcaaaagtcttggggtcggcaccgattagcwctgatcatgtccatccttgaagatggggagtggggacagtctctcctgaacctcgtcgactgagtttggtggagaggttatttcccaaaggtaaccagag

SEQ ID NO: 248403 - DNA, 201 bp, Homo sapiens
aaattcttgtgaatgttttttaatatatgtaatatttgttcagcagtacatttatataaatatgtatttcagtctggtcacttaactgcctggagtctgcrgctctacagcaagagctttgagactttttgactttcataaacttttcaagcacctttcataaactgtcaaaattgaacactgtttatgggattctgctgc

SEQ ID NO: 248404 - DNA, 201 bp, Homo sapiens
taagcaaaaggggaatttattggtaatgtaactgaaaagtcaaagatagatggatgggtccaggtgttcaaaaacacctatcatcaggcgtcagtcactcmgctccattgtcctgtgctggcttcagtctcaggtgtgccctccctgtgtagcagcccctcagctttccagtttacctcctaccagccagaaaccccagca

SEQ ID NO: 248405 - DNA, 201 bp, Homo sapiens
ctacttaggaaatggaaagaggctatggaatacataaagttgtcttaaaggtagtacactatataataatacttttgcttctctttaccatttggtttgcwctgtcaattaattttatttataaccaaaaaaaaaaaaaattctaaaacaagatctatacagctgtgccagaagctacaaaattggagtttgccacttttc

SEQ ID NO: 248406 - DNA, 201 bp, Homo sapiens
ctaagaacctaattcacaccaggttaagcaaaaggggaatttattggtaatgtaactgaaaagtcaaagatagatggatgggtccaggtgttcaaaaacamctatcatcaggcgtcagtcactccgctccattgtcctgtgctggcttcagtctcaggtgtgccctccctgtgtagcagcccctcagctttccagtttacc

SEQ ID NO: 248407 - DNA, 201 bp, Homo sapiens
ttaggaaaaactctgaagaatataagtacaaataagaccacagagaaacatgggtgtaaagcccctatagccctatacagcccccacacacaccaggcccrtgtcaaccaagagtccagaatgcaatccaagtccagaaagcctccaactggaagctttaattacatctcctattgcagatgtgtttagaagagtatacca

SEQ ID NO: 248408 - DNA, 201 bp, Homo sapiens
aattacaaggttggcaaaccattttttgtagtagctgttactataattttgtcatttgtttaatgaggctggttctgaaaattaccgtctcttttgccctwggcaagctatttaacctccatgccacaaatcccttatttgtaaaatcaggcaatattaaatagcatctgctttatagggttgttaaaagaattaagtgag

SEQ ID NO: 248409 - DNA, 201 bp, Homo sapiens
aaaacattgggattacaggtacgagccaccatgcctggcctttcaaaccatcttaattttttctggagcataaaattacaaggttggcaaaccattttttrtagtagctgttactataattttgtcatttgtttaatgaggctggttctgaaaattaccgtctcttttgccctaggcaagctatttaacctccatgccaca

SEQ ID NO: 248410 - DNA, 201 bp, Homo sapiens
ctaactgttacaggcttgggttactgcctactgcagaaccagtcattggggtgggaaggattccactgattacactgactagtccacttctagagttggcrgtgcgacagtctcatccatactctgctatgtgcagatgttccgcaatttacaatgaaattacatcctaataaatccattgtaatttgaaaataccaagca

SEQ ID NO: 248411 - DNA, 201 bp, Homo sapiens
aaccttttactctaaggctaaagtgactgataactgtagaaatgaaactggcgtaccctgtttctgttgcgatgatctcttttgaggttggattccatttwtttaaaagttagcacatttttgtgcttggcacttgcacagagatgtctgtttaaaaataattgaactgcttatgaaaatatctttcagaaatatgatatc

SEQ ID NO: 248412 - DNA, 201 bp, Homo sapiens
tggtagagttgactgatcaagtccactgagcttggtgcgaaaggttgccccaggagcagcaggggtttgttactcattcaaaaacatttgttgatttcctrctctgccaaggagtgtgttaggagttgcgctgatagagattcataacaccttggtttatttaggacttgcagttgaaattccaagtttatagctgaatct

SEQ ID NO: 248413 - DNA, 201 bp, Homo sapiens
ggctggagtgcactggtgtaggattttggttcactacaacctcccctcccgggttcaagcgattctcccacctcgcctcccaactagctgggattacaggsacctgccatcatgccaggctaatttttgtatttttgtagagatgggatttcaccatgttggctaggctggtcttgaactcctgacctcaggtgatccgcc

SEQ ID NO: 248414 - DNA, 201 bp, Homo sapiens
tgaggaaaaatcaagactaatttacacaatttaaatgtccagcagtactgctgtcataaagtgtagttttatatatttatttcgaaatatcttatatttgragtgtaatatggttacctaaaatgactatataaaaccaccgaaaagtatttattaaataatgctaagtgacaaaaagaacataaaattgtagatacgcag

SEQ ID NO: 248415 - DNA, 201 bp, Homo sapiens
attctcaggttacttggtagagttgactgatcaagtccactgagcttggtgcgaaaggttgccccaggagcagcaggggtttgttactcattcaaaaacakttgttgatttcctgctctgccaaggagtgtgttaggagttgcgctgatagagattcataacaccttggtttatttaggacttgcagttgaaattccaagt

SEQ ID NO: 248416 - DNA, 201 bp, Homo sapiens
tctgacaatttagaatctgttttggggtcagtatggcaattcataccaacagttaggaaaatgttcatatataccttgaccctttaatctgacatctgggmatttatttattggaaataatcccaaagaggagtaaaataaaagcaaaagaacaagagtctttggtgatgaggaaaaatcaagactaatttacacaattta

SEQ ID NO: 248417 - DNA, 201 bp, Homo sapiens
tgttgtaaatgccatcattaccaataagagtcaccaaattctcagaaataggtaattggcagctcaaggcagttagcactacaagatttctcttgcctttaaaaaaaaaatcatttttaagactccttttttaaaaggctacatcaaaaaataaaccaaaataacaaaaattaaaaggcaacatgagtaaaataactacaa

SEQ ID NO: 248418 - DNA, 201 bp, Homo sapiens
agttttacttctttttttctggatgctttctatttctttttctggactaattgccttggctagaatctctaatattgtatagaagtggcaagggcagacartcttttcttacagctattcatatactgataaaattaagtactttattaattaaccccatcttctaacccatctgctgcagctggttcggatttagaagag

SEQ ID NO: 248419 - DNA, 201 bp, Homo sapiens
gaagctgcagcaaggtatccagaaaatctagctaagatcattgatgaaggtgtctacactaacagattttcaatgtaaacgaaacagccttctattggaaraagatgccatctaggacttccattgctggagaagagaagtcaatgcttgacttcaaagcttcaaaggacaggctgactctcttgctagggactaatgcag

SEQ ID NO: 248420 - DNA, 201 bp, Homo sapiens
aaagtgcaagtgctgatgtagaagctgcagcaaggtatccagaaaatctagctaagatcattgatgaaggtgtctacactaacagattttcaatgtaaacraaacagccttctattggaaaaagatgccatctaggacttccattgctggagaagagaagtcaatgcttgacttcaaagcttcaaaggacaggctgactct

SEQ ID NO: 248421 - DNA, 201 bp, Homo sapiens
gctgagagatgtgttgaagctgcagaataaaaatttgaagctagcagaggttggttcatgaggtttaaggaaagaagccgtctctataacaggaaagtgcragtgctgatgtagaagctgcagcaaggtatccagaaaatctagctaagatcattgatgaaggtgtctacactaacagattttcaatgtaaacgaaacagc

SEQ ID NO: 248422 - DNA, 201 bp, Homo sapiens
gcacaagaaagcaaaacaaccttgttgttgatatggagaaagcttgagtggtctagaaagaagatcagaccagccacatcatccattaagccaaagcccartccagagcaaggccctaattctcttcatttcagtgaaggctgagagatgtgttgaagctgcagaataaaaatttgaagctagcagaggttggttcatgag

SEQ ID NO: 248423 - DNA, 201 bp, Homo sapiens
gaaattaaaagtgctgctccagtaaacactggagcacaagaaagcaaaacaaccttgttgttgatatggagaaagcttgagtggtctagaaagaagatcaraccagccacatcatccattaagccaaagcccagtccagagcaaggccctaattctcttcatttcagtgaaggctgagagatgtgttgaagctgcagaata

SEQ ID NO: 248424 - DNA, 201 bp, Homo sapiens
atggtggtgcaggcctgtagtcccagttacttgggaggctgaagcaagagaatctcttgaatccaggaggcagaggttgcagtgagccaatatctcgccaytgcaccagcctgggtgacagagagactccgtctcaaaaacaaacaaacaaaagtgacaaaacagtaattcttagtatttaatcaacaaaaccctattgag

SEQ ID NO: 248425 - DNA, 201 bp, Homo sapiens
gaccttacttttcaaaatagaacccgttttgaaactcattttgaaacccatttacatagaaataatgcttccacaaggcctttttcttttgttttcctttytttttttttttttttttgtaaggatagcaaacaggatagacgtgcatagcataaaaaacaacgccctctttcgttccctacctcagtcccattcttcgga

SEQ ID NO: 248426 - DNA, 201 bp, Homo sapiens
gggtccatcgagctgagccgcagcttgttcaacgtgctggtgcctttggaagactgtcattagccctgctagagtttgctcgttctgttttgttttctttstttctttcttttctctttcttttttggtgtggttaagctctatgagatcttgtagttctgacctttcccccatattcccaaggccaagtattatttaccc

SEQ ID NO: 248427 - DNA, 201 bp, Homo sapiens
atattttatatttataaaacgtgaattaactaaattaataaactaaatacaaatgtagaggaaaaagtcagatttcaatgctttataatagtccatgatayattgtaccatttaccactaggtggtaaattccacctaattgtaagggtaaaagcagcacaagaaaggcagtcaacaaattgtataagggaaaagttagga

SEQ ID NO: 248428 - DNA, 201 bp, Homo sapiens
ctaatgttaagccattttgattcttaggataaacgctttgaaaaatttttttcagattataaaaataaagtttatttattatgaagaatttttaaaatccrgaaaataaaagttagctgtaattctaccacaagagattactgttaacattttgatgtatttccttccaggcatatttttgaatgactttttaaaaaacca

SEQ ID NO: 248429 - DNA, 201 bp, Homo sapiens
tgggattacaggcagaaccactatgccaggcttagaatgatatattttaacaaactacactaattcattttaatttctctgtgtactaaaaatctcccagstagtttgtgaattacttgaggaaagttgtatgatcatttcccatattcctaaactccagatctcctctatttccaatcgtctaccaccatatgcatttct

SEQ ID NO: 248430 - DNA, 201 bp, Homo sapiens
ccagtggcagccactcttgggggtccatcgagctgagccgcagcttgttcaacgtgctggtgcctttggaagactgtcattagccctgctagagtttgctygttctgttttgttttctttctttctttcttttctctttcttttttggtgtggttaagctctatgagatcttgtagttctgacctttcccccatattccca

SEQ ID NO: 248431 - DNA, 201 bp, Homo sapiens
ttaattaatttatttctttatcttgagagacaggttattcctctgttgtctaggctagagtacactggtgcaatcacaactcattgcagcctcaacctccygggctcaagagatcctcccacctcagcctctgcagtagctgggactacaggtataagcctccacacctgacgaatttttttttttttttgtagagatgag

SEQ ID NO: 248432 - DNA, 201 bp, Homo sapiens
taaagaaagcacaatccttatttcttatacttgaacccacaaagtaaatcctatgaagcagttttgccttagctttcttacacttctggagaggtaatatyttcaactctatctaccatccacgataaagcattgctcctcttgtttacttcttcatggcagcattgtgacttactgaaataccaaaagccttatccattc

SEQ ID NO: 248433 - DNA, 201 bp, Homo sapiens
atacaaatggagagtaacaatttaagacagcggctgagaagacagactagagctaaatggcccaggttcaaatactggcttcaccattttactactgcagktccctttatatgcctccatttcctcctctgtaaaatagggctaaaaatagtacctaactcaggattttcatgacaattaaatgctattaattcatataaa

SEQ ID NO: 248434 - DNA, 201 bp, Homo sapiens
tatttttaaatgattctctttaaagacaattcatattaccagagcaacagattatggtaaaagagcaagtgagggacaatactctttaaagcaatactcastagactggaaatagctcctaaaattcacaggaagttttatttcagataattaatcaggccagagtggccagttcaatattaaaaagtcctacatccatga

SEQ ID NO: 248435 - DNA, 201 bp, Homo sapiens
aaaaaaaaaaagtagtaagggaagttaaggaaagctgcgaagatgaagtgaaagacacgggcccctgtcttaggagatattttagaagtctttctaggctscttctggcttttgctgccttttgctgttaattcaagcttttcttttctttttctttccttctttcttttttttttttttttttttgagacggagtctcac

SEQ ID NO: 248436 - DNA, 201 bp, Homo sapiens
  misc_feature (1)...(201): n = A,T,C or G
taattcattaatctctcaatggtatttttaaatgattctctttaaagacaattcatattaccagagcaacagattatggtaaaagagcaagtgagggacantactctttaaagcaatactcactagactggaaatagctcctaaaattcacaggaagttttatttcagataattaatcaggccagagtggccagttcaata

SEQ ID NO: 248437 - DNA, 201 bp, Homo sapiens
aaaaaatggtaattccatctaatgaccttcctgctttcttttaaaggacttaatgtagaaaacaaaacaaaacatcaataaagtatgaaatcagatttccrctaaggttcccagaaactcaaggttcacataataataccttctcagcttccaggtgaaaacaccataaaataagatatttagcagtttcttcacatacaa

SEQ ID NO: 248438 - DNA, 201 bp, Homo sapiens
agtgaaagccctgaaaacctcggaagaagggccacacaggtataaggaatcctcttttcacaaagtcataaaccagagttcttaggttgtccttatgcagyctttacaccagtgtgtatgtgtggaggcgaatgtgtggaggtgtatatgtggaggtgtgtgtatgtggaggcgtatgtgtggaggtgtgtgtatgtggag

SEQ ID NO: 248439 - DNA, 201 bp, Homo sapiens
tgtgctttgcattaggcactcagtatttactgaatgaattaatgatggaacgtaagtttcctgaatacacacattcatttaaatgggtctcaatttcatayacatgctgtagtacagcctcttatatagctcttttaagtttaaattagcaagaaattagcaatataaattttcttttcacaagaaaatctacagaattta

SEQ ID NO: 248440 - DNA, 201 bp, Homo sapiens
agattttactatctgtccaagggaggcctgtgtattcattttttttccattataaataataccacattgattatatgtagaaaaactttgtctttatttcyttgggtactattttttagttaaacacagtcttttttctttctttaaaatgaaaagtatgagcaaagtgaatattttacgaataaattacataaaaggaag

SEQ ID NO: 248441 - DNA, 201 bp, Homo sapiens
tgaatattttacgaataaattacataaaaggaagggaaaaaatttaaagtaatatttattatattgacataactgaagcataaacgaaattcaaaaaacgytgggtaaataaacaccaacaggaaaaagatttcaaaatgccatgtaaaaagttcatgaacatattacaaataaaaaccatgtttactaaattaacatact

SEQ ID NO: 248442 - DNA, 201 bp, Homo sapiens
caaataatacaacagaaggattgtgccaatttagtttccagtcattgtttcatgagggtgctatattttataacccatggctgtattttatagctaaggtktaaaatcatcccaggagatatgataaggacactggaaactttaggcaactcattgacagtagcaaagctggaataactgtaggtcatcactgaaacttgg

SEQ ID NO: 248443 - DNA, 201 bp, Homo sapiens
  misc_feature (1)...(201): n = A,T,C or G
tctctctttgtactagagcttcttctttctgtcgccactcttcttcccgttgcctcagttctgatactgctgtttgtgctttggcatgctcctgatccaangactcagaattatgcagtgctaagctaccaagtttctgttgagcttcagcaagattccatttgcacgccacagagctcttcacaaactctttctgctttt

SEQ ID NO: 248444 - DNA, 201 bp, Homo sapiens
aacacaagtatatgcgtatatattttcactggagaatgacgtgaagcaaaactaaaaaacaaaacagtaaggcaaagatggtcacgcgaatgggagaggtrtacgccagcgtcaaaagcgagatttaaagaatttactcagttgtcaacatcggtgaaaatcgcatgtgaaatctttgtcaggactcagtgtgatgctgaa

SEQ ID NO: 248445 - DNA, 201 bp, Homo sapiens
atttttagtaacttttgcaatatttaaaatattttcattattattatatctgttaaagtgatctgtgatcagtgatctttgatgttactattataattgtkttggggtgccatgaactatacccatataagatggcaaacttaattgataaatgttatgtgtgttctgactgttccactaaccagccattcccttgtctct

SEQ ID NO: 248446 - DNA, 201 bp, Homo sapiens
atagttttcctttagctggactttagtttcattttgtcatatttcagaaatagcctctggagtgtttgtttgtttgtttttgaggagtcttgctctgtcayccaggctggagtgcactggtgtaggattttggttcactacaacctcccctcccgggttcaagcgattctcccacctcgcctcccaactagctgggattac

SEQ ID NO: 248447 - DNA, 201 bp, Homo sapiens
tgtcaagcaaggctattggccccattttcccaacaagtacgcacttcccatttctattttacatttttagtaacttttgcaatatttaaaatattttcatyattattatatctgttaaagtgatctgtgatcagtgatctttgatgttactattataattgttttggggtgccatgaactatacccatataagatggcaaa

SEQ ID NO: 248448 - DNA, 201 bp, Homo sapiens
tttattgtgcttcacaggtactgtatctttttttacaaatctaagttttgtggcaactctgtgtcaagcaaggctattggccccattttcccaacaagtaygcacttcccatttctattttacatttttagtaacttttgcaatatttaaaatattttcattattattatatctgttaaagtgatctgtgatcagtgatct

SEQ ID NO: 248449 - DNA, 201 bp, Homo sapiens
ttcaccattttggtcaggctggtctcgaactcctgacctcaagtgatgcgcctgcctcggcctcccaaagtgccgggattacaggcatgagccattgtgcytggcctaacacttgtttttaaaggcatatgttgttttattgtgcttcacaggtactgtatctttttttacaaatctaagttttgtggcaactctgtgtca

SEQ ID NO: 248450 - DNA, 201 bp, Homo sapiens
gctggagtgcagtggcagctattcagctcactgaaacctccgcctcccaggttcaagcacttctcctgcctcagcctcccaggtagctgggactacaggcrtgcaccaccacacccagctaatttttgtattactagtagagacagggtttcaccattttggtcaggctggtctcgaactcctgacctcaagtgatgcgcc

SEQ ID NO: 248451 - DNA, 201 bp, Homo sapiens
gaattcaagaccagcctaggcaacatgacgaaacccccgtctctaccaaaaatacaaaaaattagctgggcatggtggctcgcgcctgtggtcccagcttytctggaggctgaggtgggagtatcacttgagcccgggatgcagaggttgtcatgagccgagattgtgctactacactccaagctgggtgacagacagagt

SEQ ID NO: 248452 - DNA, 201 bp, Homo sapiens
tacaaaaattagccaggcatggtggtgggcgcttgtaatcctagctacttgggaggctgaggcaggagaatcacttgaaactgggaggcggaggttgcagygagccgagatggcgccattgcattccagcctaggtgaaaagagcggaactctgtctcaaaaaaaaagatgtttaattttatcaaagttgtatagttatta

SEQ ID NO: 248453 - DNA, 201 bp, Homo sapiens
gacccatgcggttcaaatccatgttgttcaagggtccactctagaatttttatgaggagtctgttaagatgtaatgttaaatgtaggtaatcaaatggatraaagtttaccatatctccagagaacatgctggttaagagtctttgcatataattttgggagggggtaaatatatttgaaatgtaatatgttaactgctta

SEQ ID NO: 248454 - DNA, 201 bp, Homo sapiens
atggtgagaacccgtctctacaaaagataaaaacattagctggatgtggtggcacgtgcctgaagtctcagctctctgagaggctgaggcgagaggattgyttgaacccaggagttcgaggctgcagtgggctgtgatagcaccacagtactcacagtgacagagtgagaccctgtctcaaaaaaaaaaaggagacataac

SEQ ID NO: 248455 - DNA, 201 bp, Homo sapiens
tccccattgtcttcatgtcaagtagactgaggaggaggaggggtcagttttgttgcctaagagtggcagaggcagaggtagacccatgcggttcaaatccrtgttgttcaagggtccactctagaatttttatgaggagtctgttaagatgtaatgttaaatgtaggtaatcaaatggataaaagtttaccatatctccag

SEQ ID NO: 248456 - DNA, 201 bp, Homo sapiens
gaacccgtctctacaaaagataaaaacattagctggatgtggtggcacgtgcctgaagtctcagctctctgagaggctgaggcgagaggattgcttgaacycaggagttcgaggctgcagtgggctgtgatagcaccacagtactcacagtgacagagtgagaccctgtctcaaaaaaaaaaaggagacataaccctagac

SEQ ID NO: 248457 - DNA, 201 bp, Homo sapiens
tgtatactgtattcttataataaaccaagtgagagaaaaaaatgttattaagaaattatcagccatgtgcagtggctcatgcctgtaattccagcactttrggaagccaagatgggaggatcacttaagcccaggagttcaagaccagcttgggcaaagcaagactccctctctacaaaaaagtaaaaaaaattagccagg

SEQ ID NO: 248458 - DNA, 201 bp, Homo sapiens
atgtatatatatatttatatatgtatatatatatttatatatgtatatatatttatatatgtatgtatatttatatatgtaggtatatttatatatgtagrtatatttatatatgtaggtatatttatatatgtatatatatttatatatgtatatatatttatttgtgtatatatatatttatatatgtatatatatatt

SEQ ID NO: 248459 - DNA, 201 bp, Homo sapiens
ttttcactggagaatgacgtgaagcaaaactaaaaaacaaaacagtaaggcaaagatggtcacgcgaatgggagaggtgtacgccagcgtcaaaagcgagrtttaaagaatttactcagttgtcaacatcggtgaaaatcgcatgtgaaatctttgtcaggactcagtgtgatgctgaactacaatcattcactgttccta

SEQ ID NO: 248460 - DNA, 201 bp, Homo sapiens
tatatatgtatatatatttatatatgtatgtatatttatatatgtaggtatatttatatatgtaggtatatttatatatgtaggtatatttatatatgtakatatatttatatatgtatatatatttatttgtgtatatatatatttatatatgtatatatatatttatatatgtatatatatatttatatatgtatatat

SEQ ID NO: 248461 - DNA, 201 bp, Homo sapiens
caggaggatcagtagagtccaggagtttgagaccagcctgggcaacatagtgagacccctatctctacaaaaaataaaaaaaaaattagccaggcatgatkctgcttgtctatagtcctaactacttgggaagctaagctgggaggatgcttgagcccaggggtttgagactgcagtgagttataatcatgccactgcatt

SEQ ID NO: 248462 - DNA, 201 bp, Homo sapiens
aggaggatcagtagagtccaggagtttgagaccagcctgggcaacatagtgagacccctatctctacaaaaaataaaaaaaaaattagccaggcatgattstgcttgtctatagtcctaactacttgggaagctaagctgggaggatgcttgagcccaggggtttgagactgcagtgagttataatcatgccactgcattg

SEQ ID NO: 248463 - DNA, 201 bp, Homo sapiens
cggtccaggggggtagaagggaggagcggattcgagtgggcgccaggtggaggtggggccagggttgtcaagggagcacgaaaggggtcgcggtgtgtccsgcaaggactgggtagggcagcgcctgctatggactaggggcgagggctacgaaagggttgtgggaggggtggatgcgggtggatcccgaaaccaagcggc

SEQ ID NO: 248464 - DNA, 201 bp, Homo sapiens
gtaattccagcactttgggaagccaagatgggaggatcacttaagcccaggagttcaagaccagcttgggcaaagcaagactccctctctacaaaaaagtaaaaaaaattagccaggcattgtggtgtgtgcctgttttcccagctacttgggaggttgaggtgggaggatcacttggacccagcacgtcgaggctgcagt

SEQ ID NO: 248465 - DNA, 201 bp, Homo sapiens
aatcttgtgagtgtgaaaggtacttaatctttctagacatctatttttcttcaacatagccaacatcatctagtatgtactgcttcctgtgaattcatagygtaagcatttcttcagctcattacaaaagttccataaatataattttaaagggtgcatgatattctatgtaccatgggtatttttaactattcccttaat

SEQ ID NO: 248466 - DNA, 201 bp, Homo sapiens
ccttgagaatctactctctaggatgcatacacctaggagaatttctgggtgttaaggcaggcacttgttcaactttactaggaaattttttaaagtggttkttccaatttatacttccactagcagtgaacgcaaattcttattgccctacttcttgggcagcttttaaattactgcaaatcttgtgagtgtgaaaggtac

SEQ ID NO: 248467 - DNA, 201 bp, Homo sapiens
ggagtaaaataaaagcaaaagaacaagagtctttggtgatgaggaaaaatcaagactaatttacacaatttaaatgtccagcagtactgctgtcataaagygtagttttatatatttatttcgaaatatcttatatttggagtgtaatatggttacctaaaatgactatataaaaccaccgaaaagtatttattaaataat

SEQ ID NO: 248468 - DNA, 201 bp, Homo sapiens
aacagttttggattttggagcgttttggattttggattaggaatactcaacctacaccacaatttatttattgtttccaggcttttagctattacaatctmctatgaacattacggcaatctagtacatatgtgtaagagtttctctagcgcagcagttctctttacagtcttcaaaattattgaggaccctaaagagctt

SEQ ID NO: 248469 - DNA, 201 bp, Homo sapiens
agatctgggaatatttgcattatacttaccagtgaagatctctaaattgaaaacacaaaatctgtgagtatttcccttgagtgtcatgtcgatgctcaaamagttttggattttggagcgttttggattttggattaggaatactcaacctacaccacaatttatttattgtttccaggcttttagctattacaatctact

SEQ ID NO: 248470 - DNA, 201 bp, Homo sapiens
gcaggaggacagcttgagcccagaagttcgagaccagcctgggcaacacagtgagaccgtgtctctacaaaaaattagctggggatggtggcatgtgcctrtagtcccagctacctgggaatctgaggcaggaggattgcttgagcccagaagttcaaggctgcagtgagcaatgattgcaccactgcactctagcctgag

SEQ ID NO: 248471 - DNA, 201 bp, Homo sapiens
atccagacccagggagtttaacttcaaaacttgaacgtttaacaatcaggtcttgctgccctactcataaagagacccaaataaaaacaacatgacgccatttttttccatgtgtttagactggcaaacttgtgaagtcgcttaataccaaatgtgtaccaagatgtaaggaaatgatgtgagaatgtcattagtataacc

SEQ ID NO: 248472 - DNA, 201 bp, Homo sapiens
agtgatactcccacctgagcctcccaagtagctgggactacaggcatgcaccaccatgcccgtattttttttatttagatgtaggatcttgctgtgttgcycaggctggtcaggaactcttaggcttgagcagtcttcctgtgttggctcccaaaacattgggattacaggcatgagccaccacagctggccatatgtttt

SEQ ID NO: 248473 - DNA, 201 bp, Homo sapiens
aactaatcactactacattaaaaggagaggaaatctggtatctctaaatacttaagaggtgagattcagcaccaaaacatggcatgaagtaagattcaacmgttatcttctgaggcaggaatatttaaaatagtagcacatattaaaaaaaaaaaagagtggggcaaaataacaaaaattatgtgaattaataggcttata

SEQ ID NO: 248474 - DNA, 201 bp, Homo sapiens
gaactcctgcacccaagtgatactcccacctgagcctcccaagtagctgggactacaggcatgcaccaccatgcccgtattttttttatttagatgtaggrtcttgctgtgttgcccaggctggtcaggaactcttaggcttgagcagtcttcctgtgttggctcccaaaacattgggattacaggcatgagccaccacag

SEQ ID NO: 248475 - DNA, 201 bp, Homo sapiens
gagtttaacttcaaaacttgaacgtttaacaatcaggtcttgctgccctactcataaagagacccaaataaaaacaacatgacgccatttttttccatgtrtttagactggcaaacttgtgaagtcgcttaataccaaatgtgtaccaagatgtaaggaaatgatgtgagaatgtcattagtataaccttttaggaggagt

SEQ ID NO: 248476 - DNA, 201 bp, Homo sapiens
catttttttccatgtgtttagactggcaaacttgtgaagtcgcttaataccaaatgtgtaccaagatgtaaggaaatgatgtgagaatgtcattagtatawccttttaggaggagtaatttgacaatatgagaggcttgagcggattgattcagcaatttcaccactaagaaagtatgcaacaattatttttgcaccaata

SEQ ID NO: 248477 - DNA, 201 bp, Homo sapiens
ccttgtaaagtgtatgattcagtggtttttagcatatccaaagttgtgcaaccatcacctcaatcaattttagaacatttttatcactccaaaaagaaacrctgttctcattagcagtcattacccatttctccccaaccctcccagcctttggcaactactaatcttctttccatctctttagatttgcctattctaaac

SEQ ID NO: 248478 - DNA, 201 bp, Homo sapiens
atttttttccatgtgtttagactggcaaacttgtgaagtcgcttaataccaaatgtgtaccaagatgtaaggaaatgatgtgagaatgtcattagtataamcttttaggaggagtaatttgacaatatgagaggcttgagcggattgattcagcaatttcaccactaagaaagtatgcaacaattatttttgcaccaatat

SEQ ID NO: 248479 - DNA, 201 bp, Homo sapiens
gatatatgtattgtatactgtattcttataataaaccaagtgagagaaaaaaatgttattaagaaattatcagccatgtgcagtggctcatgcctgtaatyccagcactttgggaagccaagatgggaggatcacttaagcccaggagttcaagaccagcttgggcaaagcaagactccctctctacaaaaaagtaaaaaa

SEQ ID NO: 248480 - DNA, 201 bp, Homo sapiens
atgaattagacgatgagattcatgagatagacattttagatagacaaaaactttttatttattttaaagcagaattgaaacagacataaatctagcacatsaaagctgtatttcatgaaaattatagctattaatttttaaagctaagtcactttaaagaaaactatatagtaaagaactatatagtaaagaaaaactata

SEQ ID NO: 248481 - DNA, 201 bp, Homo sapiens
tcatatgatatatgtattgtatactgtattcttataataaaccaagtgagagaaaaaaatgttattaagaaattatcagccatgtgcagtggctcatgccygtaattccagcactttgggaagccaagatgggaggatcacttaagcccaggagttcaagaccagcttgggcaaagcaagactccctctctacaaaaaagt

SEQ ID NO: 248482 - DNA, 201 bp, Homo sapiens
caaaaaaggaaatacagttggccttgaacaactttggggttagggctgccgattcctagtgtagtcaaaaatccacatgtaacttttgacatccccaaaayttaaatagcctactgttgaccaggagccttaccaatagcatacacaattgattcacacatatttcatatgatatatgtattgtatactgtattcttataa

SEQ ID NO: 248483 - DNA, 201 bp, Homo sapiens
atgttctcacttataagtgggagctaaatgatgagaacacatggacgcatagagggaacaattcacactagggcctttcagaggatggaggtggggaggarggagaggatcaggaaaaataactaatgcatactagcttaatacctgggtgatgaaataatctgtacaacaaacccccatgacacaagttcacccatgtaa

SEQ ID NO: 248484 - DNA, 201 bp, Homo sapiens
ataaaaaagttcatgataaatgaaaaacagattattagactacacataggattatctatctatatataaacaaaactcaaaatacctggttttcgttttgkttttgtttttcctgagacaaggtcttgctctgtcaccaaggctggagtgcagtagtgcggtcatggctcactgcagccttgacctcctgggctcaagcaa

SEQ ID NO: 248485 - DNA, 201 bp, Homo sapiens
ttggggtcaggttaaccaaagtctaggagagtaggcctggcgcaatggctcatgcttgtaatcccagcactttgggggctgagtcgggcaggtcacttgargtcaggaattcaagaccagcctaggcaacatgacgaaacccccgtctctaccaaaaatacaaaaaattagctgggcatggtggctcgcgcctgtggtccc

SEQ ID NO: 248486 - DNA, 201 bp, Homo sapiens
tgacctcgtgatccacccggctcggccttccaaagtgctcggattacaggcgtgagccaccgcgcccggccaacgtgtatcttttcttgtatgtaatatgkgagcatactatgtgtatatactctgcactagtgtggtttcactttgtgtctgggatatatttcacatgaaaacggacaaatccatttcattctgtttttg

SEQ ID NO: 248487 - DNA, 201 bp, Homo sapiens
ttaaataatgccactatgaacattcatttacaagtttttgtgtagacatatttcttttttttttttttttaagagacacagtctcttctctgtcaccaagkctggagtgcagtggtgcaatcataactcaacagcagcagccttgaactcctgcacccaagtgatactcccacctgagcctcccaagtagctgggactaca

SEQ ID NO: 248488 - DNA, 201 bp, Homo sapiens
ttttttgtatttttagtagcgatggggtttcactgtgttagccaggctggtccccatctcctgacctcgtgatccacccggctcggccttccaaagtgctsggattacaggcgtgagccaccgcgcccggccaacgtgtatcttttcttgtatgtaatatgtgagcatactatgtgtatatactctgcactagtgtggttt

SEQ ID NO: 248489 - DNA, 201 bp, Homo sapiens
actacagttttgaaagaagttctactgtggataaaatactatcacacaacactgcatgctacagagaagtttttggtgaaaagaagagtcagttgatgagrcagactttactgttgtcttattttatgcaattgcacagccacctcatcatttagcaacctccatcctgatcagtcagcagccatcagccatggaggcaag

SEQ ID NO: 248490 - DNA, 201 bp, Homo sapiens
acctcagtcccattcttcggaggggaacagagttttccttctagaaaggtttactttttaagcgcagatacgtgtaccttttttctttttttctttttggyttgtttgttttttgagacggagtcttgctctgtctgcctcctgggttcaagcaattctcctgtctcagcctccctagtagctgggactacaggcgcatgc

SEQ ID NO: 248491 - DNA, 201 bp, Homo sapiens
gttgaagaaatgtgtattcagatcctatgcccgtttaacatttttttaaaattgagttgtaagagttctttagatattctagatacaaattccttaccagmtacatgatttgcaaaatttttcttccatcccatgctatgcattgtcttttcacttcttttcttttcgtttcttttttaagagatggggtttcaccatgtt

SEQ ID NO: 248492 - DNA, 201 bp, Homo sapiens
agccccgttttcttgcagctcttcggcactgcaaacctaaccgctaatggcgctgtgggtggagaaacgtttgttaggtagcgttatatattgttatctgktgttccctataccgaaaacggcgggtcctggccgccgggaggtactcagaccaggtgtgcactttacatgttgcttaaaaattgcaactcattcctttac

SEQ ID NO: 248493 - DNA, 201 bp, Homo sapiens
gccatctcttcaaagcttttccgaccgcctatctacaacagcctgcctccacagtttcacacactcttttacgttatttataaaagagtctcactcaatgraagctggatttcctctcctgtaaaatgaggtaggccctctcggctcaaggtcactccctgtgattctacacagagagggagtgggaagagagggcgctcg

SEQ ID NO: 248494 - DNA, 201 bp, Homo sapiens
ttgctctaacaaattatgcatgtgcggttttaacctttgtcactttttttttttttttggagacagtgtcttgctctgtcaccaggctgcagtgcaatggrgtcatcatggcttattgcagccttgacctcctgagctcaggcgatcctcctgcctcagcctcctgagtagctgggaccataggcatgcaccaccacgccc

SEQ ID NO: 248495 - DNA, 201 bp, Homo sapiens
gtttcattttgtcatatttcagaaatagcctctggagtgtttgtttgtttgtttttgaggagtcttgctctgtcacccaggctggagtgcactggtgtagrattttggttcactacaacctcccctcccgggttcaagcgattctcccacctcgcctcccaactagctgggattacagggacctgccatcatgccaggcta

SEQ ID NO: 248496 - DNA, 201 bp, Homo sapiens
cctctggagtgtttgtttgtttgtttttgaggagtcttgctctgtcacccaggctggagtgcactggtgtaggattttggttcactacaacctcccctccygggttcaagcgattctcccacctcgcctcccaactagctgggattacagggacctgccatcatgccaggctaatttttgtatttttgtagagatgggatt

SEQ ID NO: 248497 - DNA, 201 bp, Homo sapiens
catcatgccaggctaatttttgtatttttgtagagatgggatttcaccatgttggctaggctggtcttgaactcctgacctcaggtgatccgccctcctcrgcctcccaaaatgctgggattacaggtgtgagccactgcgcccggccagtccctggatttgggtgaagatcatgagttcagtttgagtttaaaggcggga

SEQ ID NO: 248498 - DNA, 201 bp, Homo sapiens
tatttttgtagagatgggatttcaccatgttggctaggctggtcttgaactcctgacctcaggtgatccgccctcctcagcctcccaaaatgctgggattrcaggtgtgagccactgcgcccggccagtccctggatttgggtgaagatcatgagttcagtttgagtttaaaggcgggaaaagtcctgtgtcccagttaga

SEQ ID NO: 248499 - DNA, 201 bp, Homo sapiens
caaggatggtggtttggggagaggggtgcttgggactatcctgaaaccagtcatcttctctgggaccagttctatatccaaatggaaagagggaagtgaaktgcatgatttctaagctcccttcagatgtaactttagttcctttcccctttctttgagaatattttgtgatatgggaggatcaccacagaagaagcaaga

SEQ ID NO: 248500 - DNA, 201 bp, Homo sapiens
agggtaggcctgtatgtgtctttttgactataaccatgttcgtgaatgtgaagtagtatctccttgtggttttcatttgacttccctaatgattaaggacrttgatcatgtgttcatgggcttattggccatttgtatatcgttgaagaaatgtgtattcagatcctatgcccgtttaacatttttttaaaattgagttgt

SEQ ID NO: 248501 - DNA, 201 bp, Homo sapiens
ttcatctgttctattttttaaaaaacaaaatctgtattgagatttaattcacataccatacaattagcccttgtaaagtgtatgattcagtggtttttagsatatccaaagttgtgcaaccatcacctcaatcaattttagaacatttttatcactccaaaaagaaacgctgttctcattagcagtcattacccatttctc

SEQ ID NO: 248502 - DNA, 201 bp, Homo sapiens
tatcattaataataattatctctgagtagtgatcagactatgagtggtttttttattttttttcttactgggaatttttcatctgttctattttttaaaawacaaaatctgtattgagatttaattcacataccatacaattagcccttgtaaagtgtatgattcagtggtttttagcatatccaaagttgtgcaaccatc

SEQ ID NO: 248503 - DNA, 201 bp, Homo sapiens
ttgttaaaaagactactttttcttcattcatttattttggcatcctattaaaaatcagtttactataaatttgaaaggttatttctggactttcaattctrtgattttttttttttctttttgaaacagggtctcactccgttgcccaggcgggagtgcagtagcatgatcatggctcactgtagccttgacctcttgggc

SEQ ID NO: 248504 - DNA, 201 bp, Homo sapiens
tatatttaacacataaaacaaaagagaaaaataacaattctttctcatcacacaaaaatctatttagaatgtttaagatatcaatctaatctcaatgtctktcttgttctaattaaatcatacaaacataaaaaagttcatgataaatgaaaaacagattattagactacacataggattatctatctatatataaacaaa

SEQ ID NO: 248505 - DNA, 201 bp, Homo sapiens
ccatccttccagccaagtaaggcagtcaaaagaggtgtagatctggtagcagaaactgggtccataattatcaaagtggaagttcacagagcaattataaytgagaagataaaaactcatgtaacttccattcagtactgcaatttaaaaatagatttttttcacaataactatatacaagataatatatttaacacataa

SEQ ID NO: 248506 - DNA, 201 bp, Homo sapiens
tgatgatgcacattttcagatgagtatgccattcagacttcccctttaggcaactcgttccgaggtgcctggaatgggataaaacaaatgcacttactgayttttttccccgctttgctgtagaaattggcgtgttagccaaggctttcattgaccaagggaaactcatcccagatgatgtcatgactcggctggcccttc

SEQ ID NO: 248507 - DNA, 201 bp, Homo sapiens
aaattataatagaaattataaaacaacaacaagaacaataaaataaaaacactttacatttgagaaagaatgacaatatcagtaggtaaaaccaacatcarcagttacaagaccatccttccagccaagtaaggcagtcaaaagaggtgtagatctggtagcagaaactgggtccataattatcaaagtggaagttcacag

SEQ ID NO: 248508 - DNA, 201 bp, Homo sapiens
agaccaaacaaagccagtcctggaatattaccagtgagtttttgcttttcagaacttctcttgcgtagtggtgcactaagtctagttttgattttccttcytctacagctgaaatgctaaaatgccaaaagacccagttcacatgggcttaagtaataaaggaaatacattagcttgtgtaacagaagtccagaaggtagg

SEQ ID NO: 248509 - DNA, 201 bp, Homo sapiens
attaccagtgagtttttgcttttcagaacttctcttgcgtagtggtgcactaagtctagttttgattttccttcctctacagctgaaatgctaaaatgccraaagacccagttcacatgggcttaagtaataaaggaaatacattagcttgtgtaacagaagtccagaaggtaggttgggcttcagtcacacctgggtttg

SEQ ID NO: 248510 - DNA, 201 bp, Homo sapiens
aggggggaggttgcagtgagccaagattacatcattgcactttagcctgggtgacaagagtgagactccatctcaaaaaaaaaaaaaaaaaagagtttagyagctttagcacttacatttaggtttatgacctatattgagttaatttttatgcatggtagaggtctaacttcattccttttcatctggatatttatttgt

SEQ ID NO: 248511 - DNA, 201 bp, Homo sapiens
aggagggagaggatcaggaaaaataactaatgcatactagcttaatacctgggtgatgaaataatctgtacaacaaacccccatgacacaagttcacccaygtaacaaacctgcacatatatccctgaaattataatagaaattataaaacaacaacaagaacaataaaataaaaacactttacatttgagaaagaatgac

SEQ ID NO: 248512 - DNA, 201 bp, Homo sapiens
accagagacggttatcaagagactaaaggcttatgaagaccaaacaaagccagtcctggaatattaccagtgagtttttgcttttcagaacttctcttgcrtagtggtgcactaagtctagttttgattttccttcctctacagctgaaatgctaaaatgccaaaagacccagttcacatgggcttaagtaataaaggaaa

SEQ ID NO: 248513 - DNA, 201 bp, Homo sapiens
gggtgaaaacaccttgaggaatgttgtttcaccagatgcagtacatgctctgaaagagcaatcagtatatggtactatttttccttcagcagcaaaacatrggcctagaaagcaaggactgtaggcgggagtggcaattcacatatcacaactaagattcatgtgcaaattttttgctttctatccttatgactcaaggct

SEQ ID NO: 248514 - DNA, 201 bp, Homo sapiens
ggcgggttatggggtggcggtgggggaagggactggaaagttaggtcgagctcgaagttcagagatgaaaggaaaccaccgggctttgtttcagaggcccragtcctcccagtggcagccactcttgggggtccatcgagctgagccgcagcttgttcaacgtgctggtgcctttggaagactgtcattagccctgctaga

SEQ ID NO: 248515 - DNA, 201 bp, Homo sapiens
accattcttaattcattaatctctcaatggtatttttaaatgattctctttaaagacaattcatattaccagagcaacagattatggtaaaagagcaagtragggacaatactctttaaagcaatactcactagactggaaatagctcctaaaattcacaggaagttttatttcagataattaatcaggccagagtggcca

SEQ ID NO: 248516 - DNA, 201 bp, Homo sapiens
aagtccagaaggtaggttgggcttcagtcacacctgggtttgatcagtgtagccgttctcttggttttgccttcctgtgtgtgtattggctttgtccttaggcttcctgcatggtagcagacatttgtaggaacagccagggcttcctcttctatgaagggctgaggggtaacctttcctccagtgaatagaagcccagag

SEQ ID NO: 248517 - DNA, 201 bp, Homo sapiens
ctggtgaagatgctgtgagcattattcaactggcaacgagggatttagaatatgacttaaacttagttgaaaaaggagcagcgggtctgagaggatagacyacagttttgaaagaagttctactgtggataaaatactatcacacaacactgcatgctacagagaagtttttggtgaaaagaagagtcagttgatgaggca

SEQ ID NO: 248518 - DNA, 201 bp, Homo sapiens
agtccagaaggtaggttgggcttcagtcacacctgggtttgatcagtgtagccgttctcttggttttgccttcctgtgtgtgtattggctttgtccttagscttcctgcatggtagcagacatttgtaggaacagccagggcttcctcttctatgaagggctgaggggtaacctttcctccagtgaatagaagcccagagc

SEQ ID NO: 248519 - DNA, 201 bp, Homo sapiens
tgcagcctgaagatgtaactggattgctgcaatctcataaaacttgaatggatgaggagttgcttttaatgaatgagcaaagaacgtggtttcttgaggtrgaatctagtcctggtgaagatgctgtgagcattattcaactggcaacgagggatttagaatatgacttaaacttagttgaaaaaggagcagcgggtctga

SEQ ID NO: 248520 - DNA, 201 bp, Homo sapiens
acctcggaagaagggccacacaggtataaggaatcctcttttcacaaagtcataaaccagagttcgtaggttgtccttaagcagcctttacaccagtgtgwatgtgtggaggcgaatgtgtggaggtgtgtatgtgtggaggtgtgtgtatgtgtaggtgtatatgtggaggtgtgtgtatgtggaggtgtgtatatgtgt

SEQ ID NO: 248521 - DNA, 201 bp, Homo sapiens
gcatgagccgccccaaatctgagtgctgtcaggaaggggagatggaggaaggtattccaagagtgaacaggaatcagccaaggcgaaagaaaacatgtgcktggaggtggaggttggtaatatatggccaccccgtctgccctccgaagatgccataaaaggggtgggatggcatcaggcgtcaggtcccaggtccccggc

SEQ ID NO: 248522 - DNA, 201 bp, Homo sapiens
tggtctgatcatgtctcctttttgatgtaaattttttcatgctgcctatatgacatgatttttttttttttttttttttttttgagacggagtcttgctcygtcgcccaggctggagtgcagtggctcgatctcggctcactgcaagctctgcctcccgggttcacgccattctcctgcctcagcctcccgagtagctggg

SEQ ID NO: 248523 - DNA, 201 bp, Homo sapiens
tctggacatcacatcaaaatatggcagaagctaaagcaggaagacagagaaggaggcaaaacagctttattcacttgtggctctcatatgaagaataaagmtatttctcgaaaccttctagtgaaatccttatatcttattggccagaactggcttacataaattatgatttgttgtctggagctggatgcattgctacct

SEQ ID NO: 248524 - DNA, 201 bp, Homo sapiens
gcgcgggtgtcagagtgagaccctgtcttaaaaaaaaaaaaaaaaaaaaagtagtaagggaagttaaggaaagctgcgaagatgaagtgaaagacacgggyccctgtcttaggagatattttagaagtctttctaggctgcttctggcttttgctgccttttgctgttaattcaagcttttcttttctttttctttccttc

SEQ ID NO: 248525 - DNA, 201 bp, Homo sapiens
gcaactatccgtggatcctttaagcatcagatatgtgctaggtagtggagacacagagagcaactgatttcactaggtgctcacagagtgtgggcatgggrgcaggagggcagatggacatgtgtgttagtcagctcaggctgccgtaacacaataccacacactagggggcttattttcttatagttctggaggctagaa

SEQ ID NO: 248526 - DNA, 201 bp, Homo sapiens; identical to SEQ ID NO: 48752

SEQ ID NO: 248527 - DNA, 201 bp, Homo sapiens
gagcccagaagttcaaggctgcagtgagcaatgattgcaccactgcactctagcctgagtgacagagcaggaccttatctctaaaaacaaacaaaagtttagactagtcaccagaagcagcctagctaaaatatcaagtcaagcatttgctattaaagttcaactgtttcaggaaaatttcatattttggttgcatttcag

SEQ ID NO: 248528 - DNA, 201 bp, Homo sapiens; identical to SEQ ID NO: 48753

SEQ ID NO: 248529 - DNA, 201 bp, Homo sapiens
acaagtataaccaaagttaaacttttggtatacttccttttaacttctaattgtatatgttcaaatatatcctatgtgcagaagagcatgtaaaagatatrcgcacagtttattcagcaaaacccccactatttacccatagaaattaggatatggatcattactaggatcctagaaaccagttcccaagagcattccccc

SEQ ID NO: 248530 - DNA, 201 bp, Homo sapiens
acatgctggttaagagtctttgcatataattttgggagggggtaaatatatttgaaatgtaatatgttaactgcttagactcagattagggagttaagtcttttttttttttttaagtaagcttcaattgaagcattataggctccaggttttaataaatattgtggataaatgcttattgatatagaaagttcatgatat

SEQ ID NO: 248531 - DNA, 201 bp, Homo sapiens
atttctgaattcactcattaggtacatttgcctgtctctctgtttttgaaccacattgtttagctatataacacatctctttgtctgttagggttttatcyttttgcattaatagttttcctttagctggactttagtttcattttgtcatatttcagaaatagcctctggagtgtttgtttgtttgtttttgaggagtct

SEQ ID NO: 248532 - DNA, 201 bp, Homo sapiens
attttaatttttttctggtattctggacaaaatgtccttagtaacaacattgcaaagtcagaagtttgtgatcaaagtattattttaaattccctaatatrcttgggtgtatttctgaattcactcattaggtacatttgcctgtctctctgtttttgaaccacattgtttagctatataacacatctctttgtctgttag

SEQ ID NO: 248533 - DNA, 201 bp, Homo sapiens
tttttttttttttttggagacagtgtcttgctctgtcaccaggctgcagtgcaatggagtcatcatggcttattgcagccttgacctcctgagctcaggcratcctcctgcctcagcctcctgagtagctgggaccataggcatgcaccaccacgccctgctaattttgttgtcgttgttatttatagagaaggggtcttg

SEQ ID NO: 248534 - DNA, 201 bp, Homo sapiens
atttacccatcaccagagagaaacaaggactttgggggccctcccgttccccttccatgcacatctccttcctgcttcccagaggtaaccactttgttgastcaagtgtttattatttgagaaaggtttttttttaaagcccttgattgggtgtaaagctatcatttaactaatttcctgacattctcctagttttgtttt

SEQ ID NO: 248535 - DNA, 201 bp, Homo sapiens
gagggaggaggagaaataagatgaggctggacccaggtgggcatttatgtaattgtcaaaatcagaatttatccgaagcagagtgaatgggaaggggagtrtagacctggaacaggaactctttctggatgcttcactgaagaggagagagattgagtgatggtgagcgggaggaacaatggtcaagggaggttttcattt

SEQ ID NO: 248536 - DNA, 201 bp, Homo sapiens
ggaagggaaggaaaggaaaaggaaaggaagattcaggttctttcaatccctatccctcctccccagcatcctaaatctgtttactttcatcttcaggcttsttacatcatggttgcaggatggctgctacagctctggacatcacatcaaaatatggcagaagctaaagcaggaagacagagaaggaggcaaaacagcttt

SEQ ID NO: 248537 - DNA, 201 bp, Homo sapiens
aacttcatacctattagccgtcacttctgttcctaccccacacccctccacctgagcctctggcaacaccaactcacctcctgtctcttttgagttttctrtactggacatttcatacaaatgcaatcatacaatatgtggtcttttctgactggcttctttcatttagcttagtgttttcaaggctcatccacactatag

SEQ ID NO: 248538 - DNA, 201 bp, Homo sapiens
aatatattagtgtttagtctgtgattctgaaatatacttccaaaacacacacggattcggagaaaaaaacaggacaaggtgatgcgagtatgtaagtatcycctaagataggtccctgaaaaatccttaatagtatatcacatttggatacgtttcagtcgcaggaaggcaggaatgctggattgaaaacacaataccagg

SEQ ID NO: 248539 - DNA, 201 bp, Homo sapiens
agacaagagtttcgctcttgttgcccaggctggaatgcaatggtgtgatctcggctcactgtaacctttgcctccaacaattctcctgcctcagcctcccragtagctgggatcacaggcatgcgccaccacaccaggctgattttgtatttttggtagagacagggtttctccatgttggtcaggctggtctcgaactct

SEQ ID NO: 248540 - DNA, 201 bp, Homo sapiens
aaagcacttagaacagtgcctgagacatagtaaatactcgataaatgataagcacccattcaaaatgtttatttagctaatcctttggttaaggataatayagtcatttaaactagccaaacaatttctctgaatgcttggaaaacctcactttgacaagtttagatattttaatcatatgctttaacctatatatttccc

SEQ ID NO: 248541 - DNA, 201 bp, Homo sapiens
gcgggagtgcagtagcatgatcatggctcactgtagccttgacctcttgggctcaagcaatcttcccacctcagtctcctgagtagctgagactacagccrtgagccaccacacccagctaattttttaatcttttgtagagatggggtctcaccatgttgcctaagctggtctcaaaccgttggctttagacatagtttt

SEQ ID NO: 248542 - DNA, 201 bp, Homo sapiens
aatgattctctttaaagacaattcatattaccagagcaacagattatggtaaaagagcaagtgagggacaatactctttaaagcaatactcactagactgsaaatagctcctaaaattcacaggaagttttatttcagataattaatcaggccagagtggccagttcaatattaaaaagtcctacatccatgaatgcccgc

SEQ ID NO: 248543 - DNA, 201 bp, Homo sapiens
caactgaaaccaaaatgtacattttccaatgcccagccaagtgcctttctctcctgattacacaaatctatacttaccaagactcctatatctacaatatsattatttacagaaaggctttgaaagagcttattaggaagactcagacctgtgtgtgtttgttttgtttttgtttcatctttaggaaaaaaggggtgctgg

SEQ ID NO: 248544 - DNA, 201 bp, Homo sapiens
agctgggattacagggacctgccatcatgccaggctaatttttgtatttttgtagagatgggatttcaccatgttggctaggctggtcttgaactcctgasctcaggtgatccgccctcctcagcctcccaaaatgctgggattacaggtgtgagccactgcgcccggccagtccctggatttgggtgaagatcatgagtt

SEQ ID NO: 248545 - DNA, 201 bp, Homo sapiens; identical to SEQ ID NO: 48751

SEQ ID NO: 248546 - DNA, 201 bp, Homo sapiens
tatatgtgtaggcgtatatgtgtaggcatatatgtggaggtgtgtatatgtggaggtgtgtatatgtggaggcgtatatgtgtaggcgtatatgtgtaggygtatatgtgtaggcatatatgtgtaggcgtatgtgtaggtgtgtatatgtggaggtgtgtgtatgtggaggtgtatatgtgtaggtgtatatgtgtaggt

SEQ ID NO: 248547 - DNA, 201 bp, Homo sapiens
tcttgggctcaagcaatcttcccacctcagtctcctgagtagctgagactacagccatgagccaccacacccagctaattttttaatcttttgtagagatsgggtctcaccatgttgcctaagctggtctcaaaccgttggctttagacatagttttacttctttttttctggatgctttctatttctttttctggactaa

SEQ ID NO: 248548 - DNA, 201 bp, Homo sapiens
atatgtgtaggcatatatgtggaggtgtgtatatgtggaggtgtgtatatgtggaggcgtatatgtgtaggcgtatatgtgtaggcgtatatgtgtaggcrtatatgtgtaggcgtatgtgtaggtgtgtatatgtggaggtgtgtgtatgtggaggtgtatatgtgtaggtgtatatgtgtaggtgtgtatgtgtaggtg

SEQ ID NO: 248549 - DNA, 201 bp, Homo sapiens
ataccaccaagaaatcacggaaccagcaaagtgttgactttttaatgttgtccagtcagtcataactgaatagatttttttcttttctttttttctcttcttttttttctccataaagatgagaggcttattatgttgctcaggctggtcttgaactcctggcctcaagatattctcctggctaggcctcccaaagtgctg

SEQ ID NO: 248550 - DNA, 201 bp, Homo sapiens
ttatttttttgtttgagacacagtttcactctgttgcccaggctggagtgcagtggcagctattcagctcactgaaacctccgcctcccaggttcaagcamttctcctgcctcagcctcccaggtagctgggactacaggcatgcaccaccacacccagctaatttttgtattactagtagagacagggtttcaccatttt

SEQ ID NO: 248551 - DNA, 201 bp, Homo sapiens
gctttcttacacttctggagaggtaatattttcaactctatctaccatccacgataaagcattgctcctcttgtttacttcttcatggcagcattgtgacytactgaaataccaaaagccttatccattctggtttattttgcaggaaggataacatgaaagggttcctgacacttggggccatggggaagggtatcatta

SEQ ID NO: 248552 - DNA, 201 bp, Homo sapiens
tctactaaaaatacaaaaattagccaggcgtggtagcaggcgcctgtaatcccagctactcgggaggctgaggcagcaggaacgcttgaacccgggaggcrgaggttgcagtgagctgagatcacaccactgtactccagcctgggggacaagagcgagatttcgtctcaaaaaaaaaaaaaacattaaaatcatatacat

SEQ ID NO: 248553 - DNA, 201 bp, Homo sapiens; identical to SEQ ID NO: 48750

SEQ ID NO: 248554 - DNA, 201 bp, Homo sapiens
ctttgcctccaacaattctcctgcctcagcctcccgagtagctgggatcacaggcatgcgccaccacaccaggctgattttgtatttttggtagagacagsgtttctccatgttggtcaggctggtctcgaactctggtgggcagtgcagtaggtgggaaaatatactggactaggagtcataagtgggttctagttttaa

SEQ ID NO: 248555 - DNA, 201 bp, Homo sapiens
gttttgtaataaagtgttgaatatctcacataatttactgaatattgtactgaaattgaaaagcaggatggttgtacaggtgctcgaggtacaatttctaytgaatgcatgttgctttcgcaccatcataaagctgaaaaatcctgcattgaataattgtaagctggggattgtcggtaggggaggcagggctggaatgaa

SEQ ID NO: 248556 - DNA, 201 bp, Homo sapiens
tgtgtggcaagaaaaaaaaaagcattctaattgtccatcgatagaggaacttaaagtatggaatattaatacaatggcatattaccctttttaaaaaaagkaaattgtatctgaatatgctgatatataaatacctccaaaaggtattgagttttaaacaaagcaacttgcagaattaaacatatgcgtacgtatacagag

SEQ ID NO: 248557 - DNA, 201 bp, Homo sapiens
ttttgcaatatttaaaatattttcattattattatatctgttaaagtgatctgtgatcagtgatctttgatgttactattataattgttttggggtgccaygaactatacccatataagatggcaaacttaattgataaatgttatgtgtgttctgactgttccactaaccagccattcccttgtctctctctcctcgagc

SEQ ID NO: 248558 - DNA, 201 bp, Homo sapiens
accctacagtggcctctaagtgttcaagttaaaggaagagagtggcacatctctcactttaaatcaaaagctagaaatgattaagcttagtgaggaaggcrtgctgaaaaccaagacaggctgaaaccaggcttcttgcaccagttagccaagttgtaagtgcaaaggaagaccttgaaggaaattaaaagtgctgctcca

SEQ ID NO: 248559 - DNA, 201 bp, Homo sapiens
ctccatttcctcctctgtaaaatagggctaaaaatagtacctaactcaggattttcatgacaattaaatgctattaattcatataaagcacttagaacagkgcctgagacatagtaaatactcgataaatgataagcacccattcaaaatgtttatttagctaatcctttggttaaggataatacagtcatttaaactagc

SEQ ID NO: 248560 - DNA, 201 bp, Homo sapiens
aacagaatgattatggaagttacttaaaactacttcttaaagtataagaatattgctaggcgtggtgtaatccccactatttgggaggctgaggtgagagsacaccttgagcccagatggtggaggctgcagtgagctatgacctcaccactgcacttcagcctgggtgacagagcaagaccatatctcttaaaaaagcct

SEQ ID NO: 248561 - DNA, 201 bp, Homo sapiens
ctttaaaaaaaaaatcatttttaagactccttttttaaaaggctacatcaaaaaataaaccaaaataacaaaaattaaaaggcaacatgagtaaaataacyacaaatttaaaaatcagattattattcctgtttgttcttacaagccattagtattcttttaaaacttactccctgagagatcccagactatgttaagaaa

SEQ ID NO: 248562 - DNA, 201 bp, Homo sapiens
aaaatagtgtagctgtgcttaaagcttctggtaaaagccagtatgctttgtagagcccttatccccctcctgctttttatttgtttttagctcactaaatratataaacactgatttttccatatatagcactgaataaactgtcatgcctaagtgtaaatcagtccagcactgtgtcatctttttctaaagcattccaag

SEQ ID NO: 248563 - DNA, 201 bp, Homo sapiens
aacgctgcactccagcctgagcaagaccccatctcgaaaaaaaagaaagaaagaacagagattgtttgacttgcttgctaaatgttgttaatgcgacataytgaagtagttaggtaacattaaacagtcccagatactgctactggttggggtcaggttaaccaaagtctaggagagtaggcctggcgcaatggctcatgc

SEQ ID NO: 248564 - DNA, 201 bp, Homo sapiens
aaactgccctatactaacaacaaatcattgtaattatagatctcaaattatgttaaattgctatagttgcaaccaacagcaagaatttgtattttagaatrtgttgtgtcttctcattgaccaaaaaataaaaataaaaataaaaataaatcctcaggccctgataaactgtagaaatagcttttctatctttgcagttaa

SEQ ID NO: 248565 - DNA, 201 bp, Homo sapiens
cgcagtggcaggcacctgtgatcctagctactcgggaggctgaggagagagaatcgcttgaacctgggaggcggaggttgctgtgagtcgagattgcaacrctgcactccagcctgagcaagaccccatctcgaaaaaaaagaaagaaagaacagagattgtttgacttgcttgctaaatgttgttaatgcgacatattga

SEQ ID NO: 248566 - DNA, 201 bp, Homo sapiens
agtcaccctgggggttaggttccaacatacagatttaggggagacatacttccatctataacaacatgtaaacacggtcattggagtgatatgtgtctcartagagacaagtctgtgacatttggaagtccagagggggagcttccagttccctaggaggttgagggacacttgaccatgaagggccgtttagggtgtgtg

SEQ ID NO: 248567 - DNA, 201 bp, Homo sapiens
ggttgtcaagggagcacgaaaggggtcgcggtgtgtcccgcaaggactgggtagggcagcgcctgctatggactaggggcgagggctacgaaagggttgtbggaggggtggatgcgggtggatcccgaaaccaagcggctccgaggggcgactagaggtggggagggggcgcgcaggagttgccaaggtcggacagagggg

SEQ ID NO: 248568 - DNA, 201 bp, Homo sapiens
cctttaaagccctatttccaaatatagtcaccctgggggttaggttccaacatacagatttaggggagacatacttccatctataacaacatgtaaacacrgtcattggagtgatatgtgtctcaatagagacaagtctgtgacatttggaagtccagagggggagcttccagttccctaggaggttgagggacacttgac

SEQ ID NO: 248569 - DNA, 201 bp, Homo sapiens
cctcactctgttgcccagactagagtgcagtggcataattgggtcactgtaacgttgaactcctgggctcacgcaattcttctacctcagcctcccaagtrgctgaaactacaggtatgtaccaccatgcctggctaattttatttttttgtagagacggcgtctcgatatgttgcccaggctagtctcctggcctcaaac

SEQ ID NO: 248570 - DNA, 201 bp, Homo sapiens
gaggagcggattcgagtgggcgccaggtggaggtggggccagggttgtcaagggagcacgaaaggggtcgcggtgtgtcccgcaaggactgggtagggcakcgcctgctatggactaggggcgagggctacgaaagggttgtgggaggggtggatgcgggtggatcccgaaaccaagcggctccgaggggcgactagaggt

SEQ ID NO: 248571 - DNA, 201 bp, Homo sapiens
cctcatttaatcttagttacctcctttaaagccctatttccaaatatagtcaccctgggggttaggttccaacatacagatttaggggagacatacttccrtctataacaacatgtaaacacggtcattggagtgatatgtgtctcaatagagacaagtctgtgacatttggaagtccagagggggagcttccagttccct

SEQ ID NO: 248572 - DNA, 201 bp, Homo sapiens
ggcgctcggcagcagaggaggaggaggaaggagggaagggcgaaggcgggagtgggtgcagaagcggggggtctggcggtccaggggggtagaagggaggrgcggattcgagtgggcgccaggtggaggtggggccagggttgtcaagggagcacgaaaggggtcgcggtgtgtcccgcaaggactgggtagggcagcgcc

SEQ ID NO: 248573 - DNA, 201 bp, Homo sapiens
attaaaaactagcctacaggataaacctaaagttaactgttattatttctatatccaagaggccttggattagacctctcaaaactaaggataatgaatgstatttggcttatttcacacgattgctgtcaattattaaaaaaaagaaatgaaaagctaaatggttacccacacttaagctttatcaaaaatgaccaatat

SEQ ID NO: 248574 - DNA, 201 bp, Homo sapiens
gccttacataaacacaagggcattatcatatatatataatgcccatttatcatgtatataaaaattaattgcttggtgttatctaatgtccaaaccataawcaaatttccctgataggctgggcatagtggctcatgcctgtaatcccagcactttgggaggccaacgcgggcagatcaactgaggtcaggatttggagac

SEQ ID NO: 248575 - DNA, 201 bp, Homo sapiens
gcgtgaatggaacctgctgcgccgagccagaagcccagccgggggtccgggccgttacccagaatccctctactggccgcgacgccgctgcacacccggcracagcctgggcctcgccaccggcggacggcggaagaaatagtcggcgcggtgcgtcacttccggttggggcggggctgtggaggcgcgtcccgggccctt

SEQ ID NO: 248576 - DNA, 201 bp, Homo sapiens
ttatcaaatgaaacaagaatctttgatgatactttgatgtaaaaaaatgtttcattcatgtgtttgcactttccatggtttaatttgtttagggtaaattktccaacctgaaatataaattatccctttgcttaatatactctttatttcttcagaaacaaaaaaaaggtaggaattagttcaaggatgtcaatttactgt

SEQ ID NO: 248577 - DNA, 201 bp, Homo sapiens
ttctccaaaactcatccacccatcttcctaagaactgtaagatactatcatacagagactttaaaaaataagaaggaatcggtatacccgacctaacctayacttagatttcattgactgtcccatattttcatctagtaacattctcaacacatatgattcacagtctgtggtataggtgaataagcagtgaagcataat

SEQ ID NO: 248578 - DNA, 201 bp, Homo sapiens
ctcagatgatcattaacattttttagcaataaaactattttaaattaaggtaggtacattgttattttagacataatgctattgcacttaatagactacartgtaatgtaaatatataacttttatatgcaccgagaaaccaaaaaatttgtgtgactcacatattcactttattgtggtagtctggaaccaaacccacaa

SEQ ID NO: 248579 - DNA, 201 bp, Homo sapiens
tgggacactcacactgggcttcagttttaatcctgcctctatttagtaaagcaagcctcaaggagaacaaaattcacaatttagtaaaattaaaaactagyctacaggataaacctaaagttaactgttattatttctatatccaagaggccttggattagacctctcaaaactaaggataatgaatggtatttggcttat

SEQ ID NO: 248580 - DNA, 201 bp, Homo sapiens
tacttgggaggctgaggcaggagaatcacttgaacctgggaggggggaggttgcagtgagccaagattacatcattgcactttagcctgggtgacaagagygagactccatctcaaaaaaaaaaaaaaaaaagagtttagtagctttagcacttacatttaggtttatgacctatattgagttaatttttatgcatggtag

SEQ ID NO: 248581 - DNA, 201 bp, Homo sapiens
cttttttctttatttttttttagacagggcctcactctgttgcccagactagagtgcagtggcataattgggtcactgtaacgttgaactcctgggctcaygcaattcttctacctcagcctcccaagtagctgaaactacaggtatgtaccaccatgcctggctaattttatttttttgtagagacggcgtctcgatatg

SEQ ID NO: 248582 - DNA, 201 bp, Homo sapiens
  misc_feature (1)...(201): n = A,T,C or G
accactcttctcttcagaacaaaacaaaacaaaaaacctagcagcacattaaaaaaaatttacaaaacatttcagtactctttccctcccatcaaaaaccnaacaaaaataaagtgcagcacccataaaagtgtcaagaaaatagccaagttcttcctttcttgtaacaaaatagcacttggcctcagcagtcttaaccaa

SEQ ID NO: 248583 - DNA, 201 bp, Homo sapiens
ccatctctttagatttgcctattctaaacattttatgcaaatggaatcatacgatatatagtcttttgtgtctggcttctttcactgagcatgtttgaagkttcatctatgctgtaacatgtatcagtacttcatttctttttttgctgaataatattccactgtcttgatataccacattttatttacctgttcatcagt

SEQ ID NO: 248584 - DNA, 201 bp, Homo sapiens
gactgtagcagatgcctcccagaatcaaccagttcttgtaaacattgcatttgtgcagattttcatacttgattccaaaattgagaacaataagattaaargcaaatttagtagccacaaaaagtccagtttgacttcctgcaacatatggtaccactcttctcttcagaacaaaacaaaacaaaaaacctagcagcacat

SEQ ID NO: 248585 - DNA, 201 bp, Homo sapiens
tcacagagtgtgggcatgggagcaggagggcagatggacatgtgtgttagtcagctcaggctgccgtaacacaataccacacactagggggcttattttcytatagttctggaggctagaagtacaagaccaaggcactggtagagttggtttctggtgaggcccttcttcctggcctgtctagttgccttctcactttgt

SEQ ID NO: 248586 - DNA, 201 bp, Homo sapiens
gactttggctgctggtctagtgacaagctagacaaatctgcctgggaagaaatgaagacagtcaataggaaacccaataaaaccaacactttttattcccmtttctgttaatattcagaagagtggaatagaggagaacataaatgttggcctgggcaaaaaggaaagatactcaagtattagaaagtagcttttgcaaaa

SEQ ID NO: 248587 - DNA, 201 bp, Homo sapiens
  misc_feature (1)...(201): n = A,T,C or G
ttttaagcacccatttttgtaagccagagagcacaactgaaaccaaaatgtacattttccaatgcccagccaagtgcctttctctcctgattacacaaatntatacttaccaagactcctatatctacaatatcattatttacagaaaggctttgaaagagcttattaggaagactcagacctgtgtgtgtttgttttgtt

SEQ ID NO: 248588 - DNA, 201 bp, Homo sapiens
ctgtaaaatgaggtaggccctctcggctcaaggtcactccctgtgattctacacagagagggagtgggaagagagggcgctcggcagcagaggaggaggargaaggagggaagggcgaaggcgggagtgggtgcagaagcggggggtctggcggtccaggggggtagaagggaggagcggattcgagtgggcgccaggtgg

SEQ ID NO: 248589 - DNA, 201 bp, Homo sapiens; identical to SEQ ID NO: 48754

SEQ ID NO: 248590 - DNA, 201 bp, Homo sapiens
agcaagaatttgtattttagaatatgttgtgtcttctcattgaccaaaaaataaaaataaaaataaaaataaatcctcaggccctgataaactgtagaaayagcttttctatctttgcagttaaagattttcatcttggaagttatggttaaaaaatttttaaacagttaaaatagtgtagctgtgcttaaagcttctggt

SEQ ID NO: 248591 - DNA, 201 bp, Homo sapiens
gatattttatttatttatttattttcgagacagagtctcactctatcacccaggctggagtgcaatggtgcgatctcggctcactgcaacctccatttccygggttcaagtgattttcctgccacggcttcttgagtagttgggattacaggtgtgcaccaccacgcctagctaatttttgtttgtttgtttgtttgtttg

SEQ ID NO: 248592 - DNA, 201 bp, Homo sapiens
aactggagttctgttagcaaggaggaagagtttgtggcagtaaggtaggcaatcacattctctgccataattgataaagttcctgtgaaacctagtggcascctaattcctgagtgtcattcctttcttttttttttttgagatggagtctcgctctgtctcccaggctggagtgcatggactgcagtggcgccatctcag

SEQ ID NO: 248593 - DNA, 201 bp, Homo sapiens
atcatgtctcacccctgctatatcaattatatgctttcaatgcaaataactgaaacctcagctaaaagaaacctaaactataaggacatttattgtgtatktaacaaaaagaatgatcccaggataggcttagcagtttgaagatgtcattaaatattcaggttcaggccaggcgtggtagcctacacctgtaatcccagc

SEQ ID NO: 248594 - DNA, 201 bp, Homo sapiens
cttagttcctccctctcctttacctctcataccaacagcaagtcctactgtttttacccccaaatacatcttgaatctatgttctttcctgctttactgcrtactccctaggccagaacactatgattgcttctcagaactactgcagtagtcttccatgcttctgttccattcttgctccttacaatctcttcatactgt

SEQ ID NO: 248595 - DNA, 201 bp, Homo sapiens
cccctgtgctccagactcatgtctacccgctgatttgtcatctcattttaatggttcatacacatcttaaatttaacacatccaaacccttgatctcaccsccttccccaaacttctttgggtcttctccgtgtcaatcaatggcatcaccatccagtccaaaacctagagttcagccttagttcctccctctcctttacc

SEQ ID NO: 248596 - DNA, 201 bp, Homo sapiens
tccaagtcctgaccttacccctgtgctccagactcatgtctacccgctgatttgtcatctcattttaatggttcatacacatcttaaatttaacacatccraacccttgatctcaccgccttccccaaacttctttgggtcttctccgtgtcaatcaatggcatcaccatccagtccaaaacctagagttcagccttagtt

SEQ ID NO: 248597 - DNA, 201 bp, Homo sapiens
aaaaacgtttattctgaaaaccaggaagattgtgatgttacagaagaagattcaataattccagtccatttctagggtactaagtgtctgatcacctcagygaaaacaagatacaaatgaggccaaggtcacaggtctggccaccctgagtcccttcgcactatttggtttctcaagttgagacacgtattcccagtccca

SEQ ID NO: 248598 - DNA, 201 bp, Homo sapiens
  misc_feature (1)...(201): n = A,T,C or G
ctcggctggcccttcatgagctgaaaaatctcacccagtatagctggctgttggatggtaagtggagtctcatgagcatttcacctgcccaaaataatcantgctggcaggagaatgagcatttcatgggcttcagacagacgtcaaggatggtggtttggggagaggggtgcttgggactatcctgaaaccagtcatctt

SEQ ID NO: 248599 - DNA, 201 bp, Homo sapiens
cagtgcccctcaagaatagtttactcagtttgttgatactttctctcctgccagtcttcagtcattaaatacctctaacttagagaaggcaaaatgaaatycaaaacaatttgaatgcttacaggcaaatcctgggaaagaagggaaaataataattcaagtaacatttctgtgaaactaggaatatggctcctgtgtctg

SEQ ID NO: 248600 - DNA, 201 bp, Homo sapiens
gcctcgccaccggcggacggcggaagaaatagtcggcgcggtgcgtcacttccggttggggcggggctgtggaggcgcgtcccgggccctttgcgtgtagygggtggatctgcaattgtattcctgtttcaagccccgttttcttgcagctcttcggcactgcaaacctaaccgctaatggcgctgtgggtggagaaacgt

SEQ ID NO: 248601 - DNA, 201 bp, Homo sapiens
tttgtgtgtgtgtggcaagaaaaaaaaaagcattctaattgtccatcgatagaggaacttaaagtatggaatattaatacaatggcatattaccctttttwaaaaaagtaaattgtatctgaatatgctgatatataaatacctccaaaaggtattgagttttaaacaaagcaacttgcagaattaaacatatgcgtacgt

SEQ ID NO: 248602 - DNA, 201 bp, Homo sapiens
tcataaagagacccaaataaaaacaacatgacgccatttttttccatgtgtttagactggcaaacttgtgaagtcgcttaataccaaatgtgtaccaagaygtaaggaaatgatgtgagaatgtcattagtataaccttttaggaggagtaatttgacaatatgagaggcttgagcggattgattcagcaatttcaccact

SEQ ID NO: 248603 - DNA, 201 bp, Homo sapiens
tgctgttaactgtgtgaaagatgtgggaattttaataatcattttctatatttagagatcaaacaagtctaattcttcaaagcttatgagaatggtttcayttcatattagatggtgaacaatccataatgaacttatattcaccctgtgtccccctcccgacccccttggctcacatagtgagcaaataattttcagata

SEQ ID NO: 248604 - DNA, 201 bp, Homo sapiens; identical to SEQ ID NO: 48755

SEQ ID NO: 248605 - DNA, 201 bp, Homo sapiens
ctatttggtttctcaagttgagacacgtattcccagtcccagttagccaccttccaagtgtttgctactagccttaatgggtacttagccaaagactacacccaaatataaccaaagcttatgttaagtcataagattaatccttcaataataaggatagcataattggctttgttacctaattctacataaacaaaatca

SEQ ID NO: 248606 - DNA, 201 bp, Homo sapiens
aaaattgcaactcattcctttacattgacatttaaaccagtgattctaaggcagagttggggcggagggaggagaattttgaacaagcggagccaattttygtctcatttctaattacaggcaacaacagaattctgcgaaacttggttggttggaggagcacaccaaaaataaagtaccggagccggcacggcttcaaaa

SEQ ID NO: 248607 - DNA, 201 bp, Homo sapiens
atctataaaaatgaatgaaaatgaatcacagggtgtttgagaaaattaaataatatgtgtgaaagtgctttacaacatataaactgatataaaaatgggawgttattattatggtaagatttttcttccaaacctctaaactgatgatttggtctttcaggtggcctctcattttacttccctcaactagtcgataatcct

SEQ ID NO: 248608 - DNA, 201 bp, Homo sapiens; identical to SEQ ID NO: 48771

SEQ ID NO: 248609 - DNA, 201 bp, Homo sapiens
cgggctttctcagtatgtagcagcctcagaatagtgtatgtctttacaaaaaaaattttattttatttttttaaatttttgagacagagtctcgctctgtkgcccaggctggagtgcagtggcgcgatctcagctcctgcgaggaggcggaccgcccattccgtgcccggtagccgcgagggaccggtggtagccgcgagg

SEQ ID NO: 248610 - DNA, 201 bp, Homo sapiens
cagtgcttattctccagcagcttacctatttcacttgtcaacaatcatgtaactatgttggtcagttatatataatattaaactatatatatatataaatrtatatgtatatttaatatataatattaaacttatttaaatataaatataggaatacttttaagtaggaggaatagttagttaaaatacttcaggaagtag

SEQ ID NO: 248611 - DNA, 201 bp, Homo sapiens
gcttcttcaggttagtattttgtaaatttgtcaaaacacagatacagtggaaacactaattttttatgcaaaaaaagttcttaaaatacagtttaactacrccgcactccagaaagtggaaggactggttgatggtcacaaacagctgaagatactacttgtatctctcaggattttcaaatgctagtattttgagccttt

SEQ ID NO: 248612 - DNA, 201 bp, Homo sapiens
tctatcccctccaccatcattctagttcatgttgctgccatcccttgcctagattactcctaactgatttgtatacttccaatccactctccacactggcyatagggatctttcagaaatgaaaatctgacctagccacaaccctgctaaactcatatctcttggtaaaggccaaactcttcttattccacttccaacttc

SEQ ID NO: 248613 - DNA, 201 bp, Homo sapiens
tatataaatatatatgtatatttaatatataatattaaacttatttaaatataaatataggaatacttttaagtaggaggaatagttagttaaaatacttsaggaagtagaaaattgagtgaattcttttttagttggcaggatcttgtggccagtggggtagtggagtatattgataccctggaagaagaaacagtgatg

SEQ ID NO: 248614 - DNA, 201 bp, Homo sapiens
agtgactagtcctaggatttgcttgtgggagatatttagccatcagagtagttgcctcacagattgctattccaggaggaatagactttggcagttaccakgataacaaacacccaagcatttatggcaaatatgatgtaattaaagttgatttaaagaaagggcagtttttctgttttccaggtgatgttttaatgtatg

SEQ ID NO: 248615 - DNA, 201 bp, Homo sapiens
gatgcagtgatcctgatcttcagtagttgacagtctatgcttgtagatgtaaacagataattacagcatggcatggtaactgttataataagagatgtgcrctgctgctctgtggaaatgctggagaaagatacttagcacagcctgagaaggtgaaaagaagtccttgtttaggaggtaacacctgaactgaatcttgaa

SEQ ID NO: 248616 - DNA, 201 bp, Homo sapiens
aaattgaaagtaactctgtagtcttatctggagggaaaaagccttttaatgaaaaggctattaactcctacggaatcagtatttgatataattgctgttgygtttcatggttaagagccgtaattgattattccaaatggttattacttactgtttttgaaaaaaatcaggagttttaccaatcatatttcttttgattta

SEQ ID NO: 248617 - DNA, 201 bp, Homo sapiens
taatcacttactataagaatggatacattgggagtgactagtcctaggatttgcttgtgggagatatttagccatcagagtagttgcctcacagattgctrttccaggaggaatagactttggcagttaccatgataacaaacacccaagcatttatggcaaatatgatgtaattaaagttgatttaaagaaagggcagtt

SEQ ID NO: 248618 - DNA, 201 bp, Homo sapiens
cggcctcccaaagtgctgggattacaggcgtgagccaccatgcccgacctaaatatcaagttattttatgggctcatcaaacaaagtgttttggcagcagsaactaagaatttcattgtggtgggaaagatatgatattttcttggtggcagaaggagaggggaatggggtagtatcagtttcaaacctaaaagctggggc

SEQ ID NO: 248619 - DNA, 201 bp, Homo sapiens
ggcctcccaaagtgataggattacaacaatactgttaatgtacagatctgactcagatttttgtcagttgtcctgataatattgaaaactattaagtaatragatctgtacattaatagtatatagtaattcaagtttaatctcttttatagttcagagttcaattcagaataacgcattgcattttgattatatgtcttt

SEQ ID NO: 248620 - DNA, 201 bp, Homo sapiens
gtatgagtgttgactattaaaggagacagtagagttctttggcactgttatcttttgtattaacagacttttggctttgaatgtgggtaacatttgttatytgttagtaaagtttatctttagtgtattgtaatggggctctaccattttgatagcaaattctcataggttaaaattacttattttcaaaatcctccacaa

SEQ ID NO: 248621 - DNA, 201 bp, Homo sapiens
cttcataagatgacttcaggtaaaataaacagagtagagatcataaatatgaaatatttatatagtttaggtgtttaagcaccattctaatgattttgggkaaagtagctatagttcagcttcctggggtaatgaaacttatctatagtttagaagctattcatcttaaattgcctataaaaaaccatggctatgtatatt

SEQ ID NO: 248622 - DNA, 201 bp, Homo sapiens
tggaacaatatgtaggttagcatgtctctgtgtaaggatgagacacaaatgagaagggttccatatttttgtttgacccctgggtcctccccctttctttaaaaaaaaaaaccaaacaaacaaatttgtggaccagtgataaaaagacataggaaatcaagggcaagaaaggcatttcagtgtctgggataagatcagagg

SEQ ID NO: 248623 - DNA, 201 bp, Homo sapiens
actgcattccagccagggcgacagagtgagaccctgtctcaaaaaataaaataaataactgtctcctttgtaaaatattaggtttaatttaaattaaatcttttttttttttttttttttttgagatgaagtctcactctgttacccaagatggagtgcagtgtcatgatcttggctcactgcaacctccacctcccaggt

SEQ ID NO: 248624 - DNA, 201 bp, Homo sapiens
caggaagagaaattaagagagaagatttgagaagtagctgataaggaggggaattccaggtttgtaggagattctcagggagactggatggtgggtaaaayggtgaagagaaatctgaagggtatgagtgttgactattaaaggagacagtagagttctttggcactgttatcttttgtattaacagacttttggctttga

SEQ ID NO: 248625 - DNA, 201 bp, Homo sapiens
acaggttgaattttattttgaaaatggagacccatccaaccttttggatcagggaagtaatacaattagaaatttgttttaggaataccattctgacagcrgcataaagagtagattacaatcaggtactgtattaacagggagctaatttaggggtttttgcagtagtataaatgtgaaatggcaaggtcctaaagaaat

SEQ ID NO: 248626 - DNA, 201 bp, Homo sapiens
acagttgcatttagataatatagaaatgtccaaagaagaaataaaaataacttagaatccatagataactattgttaaaattatagtgtgttttcttttcrctctttttttccattatgtttcagtttgattgtcgacaaacagacctcaaattcaaggcatataaagattgttttaaaaactgggaatttagtagagggg

SEQ ID NO: 248627 - DNA, 201 bp, Homo sapiens
gttgagataaaggtttttcttagagtcaaaaatgatgtttttaacatataaatcaaaaaaaagtccaaaactaagtgttttccctctttctttctttcttyttttttttttaaagatacatggttcataggttacttctggcagctttgggtagaagagaactagatgacagagatcactatggaaacaagagattggatc

SEQ ID NO: 248628 - DNA, 201 bp, Homo sapiens
tatgtttcagtttgattgtcgacaaacagacctcaaattcaaggcatataaagattgttttaaaaactgggaatttagtagaggggatggattttcctttktctgtgtagtttcaaagggtagcactagaactcagaggacagatactatggcttaatgtaaaaactttttttttttttttttttttgagacagagtcttt

SEQ ID NO: 248629 - DNA, 201 bp, Homo sapiens
aagtcactcgataaatgtctgtcatggaagaatctgctttcccagtgctgattccaatgttcttttccttcatagacttttttttttgttttctgtgtggrctgtagtattagagttcagaatagtttgtaatatttggaataagggtgtgattcatggtatagagactcctgtggccttctctctgacttggaactgatt

SEQ ID NO: 248630 - DNA, 201 bp, Homo sapiens
  misc_feature (1)...(201): n = A,T,C or G
ttataggcaaaacagtcaccttgcctgaaaatgaagatgaattggagagcaccaatagacgctataccaagagagactgtagcacttttctcagaactagngagacgggcattgtggatcaggttatggtaactctcaatcaggaaggatataaattttgtaaaataagggtgagtacaactttgttcatgtagctagttt

SEQ ID NO: 248631 - DNA, 201 bp, Homo sapiens
ctatgaagcatttatgcaaaatggagtttgtaaagttgaagaattaaatatttcagtgagcctatatggtcagattaaattaagatgcagattttactctyttttctcttcagtgatgttttggattttatggctgtaactttcttattgtccaaataggttctgattgcccaagagaaaatggcaacaaacacagtttat

SEQ ID NO: 248632 - DNA, 201 bp, Homo sapiens
ctcatgcctgtaatcctagcactttggaaggcctacatgggtagatcgtttgaggccaggagtttgagaccagcttgggaaactctgtctctacaaaaaawagaaaaattagctgggtgtggtagtgcatgcctgtaatcccagctactctggaggctgaggcacgagaatcactggaacccaggaggcagatgttgtagt

SEQ ID NO: 248633 - DNA, 201 bp, Homo sapiens
gggtgatgggataatcttgagggttgtgctacatcctccagcctctgtgatgcccagctttgcagctgtccctggatggtaatagggagtgatctgttgakatcctcttgcacgtgtatctacttgtctctgtatgtctttccccacccctcacctgaaaagtatctgttccttataaatatgatgtctactttttagatt

SEQ ID NO: 248634 - DNA, 201 bp, Homo sapiens
ccacctcccaggttcaagcaattctcctgcctcagcctcccaagtagctgggactgcaggcacacgcaaccatgcccggctaatttttgtaattttagtaragacggggtttcactgtgttggccaggctggtcttcactacgttggccaggctggccttgaactcctgaccttgtgatctgcccgccttggcctcccaaa

SEQ ID NO: 248635 - DNA, 201 bp, Homo sapiens
accttacacatgtgtgattgtctgctgtgttttctaccataggacctaacttctaatattggtggccatacttgactggatcagggtggggccaatttgtyggcctgtcactgatgtgcgaggtgacctgatgaagccaaaatgggaggctgatgattagttggactctgcatattgtcttagaaaattgatgtgaagatg

SEQ ID NO: 248636 - DNA, 201 bp, Homo sapiens
tgcccagttggtcttgaactcctgggctcaagcagtccttcctgccttggcttcccaaagtgttgggagctatgcagtaggttggctgtatttttttttcttttttttttgagaggatgtctctctgtcacccaggctggaatgcagtggcacaatcatggttcactgcagcctctacctcctgggccccaacgatcctcc

SEQ ID NO: 248637 - DNA, 201 bp, Homo sapiens
cttgatgaattttcacaaagtaaacacagctgcatgactaacaccaagatctaaaaatgtgaaggtagcgactgaaccttttttagtcgctacctttccaytcccaccccaagctaattactctcttaattgctaacattatagattagttctgtgctttaatttttatataaatggagtaacacaatatatacacatatc

SEQ ID NO: 248638 - DNA, 201 bp, Homo sapiens
gtaatggcataacttgggctggctgaggtgggaggatcgcttaaagctaggaatttaggaccaaccaccctgggcaacatatcaagaccatgtttatattaaaaaaaaaaaaaaaagagaaaaagacccatagagctgtattctgttaggaatgttagttttctaagaacttaaggcagtgcatttgaaagaagaatcttt

SEQ ID NO: 248639 - DNA, 201 bp, Homo sapiens
tttagaggaaactgtgttggtctgattatccaggcagaattagtgtggcagaacagattggcattttcacaattttgatagcatgcttctgtgagattcckagttctaaataaggaaaagataatttgatttttctaaaaaccagtttaggttttagtgtggtaatttctctaagctattcatcttttggaaataataaga

SEQ ID NO: 248640 - DNA, 201 bp, Homo sapiens
tttcaccatgttggccaggatggtctcaatcgcttgaccttgtgatccacctgcctcggcctcccaaagtgctgggattacaggcgtgagccaccatgccygacctaaatatcaagttattttatgggctcatcaaacaaagtgttttggcagcagcaactaagaatttcattgtggtgggaaagatatgatattttcttg

SEQ ID NO: 248641 - DNA, 201 bp, Homo sapiens
gacagtctcactctgtcacccaggctggagtgcagtggtgcgatctcggctcacggcaacctccgcctcccggattcaagcaattctcgtgcctcggcctmccaagtagctgggattacaggtgtgcgccaccaagcccagctaatttttgtattttttgtagagccagggtttcaccattttgcccaggctggtctcaaa

SEQ ID NO: 248642 - DNA, 201 bp, Homo sapiens
gtggtgcgatctcggctcacggcaacctccgcctcccggattcaagcaattctcgtgcctcggcctcccaagtagctgggattacaggtgtgcgccaccawgcccagctaatttttgtattttttgtagagccagggtttcaccattttgcccaggctggtctcaaatggttggcctcaagtgatccgcctgccttggcct

SEQ ID NO: 248643 - DNA, 201 bp, Homo sapiens
taaccttttcagatctttgtcaggaatattcatatcactttttttttttttttagacagggtcgcactctcacccaggctggagtgcagtggcgtgatctyggctcattgcaacctccaccttctgggttcaagcgattctcctgcctcagccttcctagtagctgggactacaggcaggtgccaccatgcctggctaatt

SEQ ID NO: 248644 - DNA, 201 bp, Homo sapiens
gcaatgtataatgatcctgtggaaaaagagtttatcagggttgctttagcagtgaacctacattttattgcccatgtcctctgaaatgtttattagataaygtcctcatcagttttcagtcactatgtgaaaatgtcagatttctgtcatccacatggaaacaagttaaattcttttcattgttacctttttcttctagta

SEQ ID NO: 248645 - DNA, 201 bp, Homo sapiens
gctatgagctgagaacaaagtgagaccttgtctcaaaaaaaacaagttaaagtgtcacgtctccttcttacccaccatctgcccagtttgaactctccacrgtgggtaactacagttataacagttataagaggttcttatcactccacagtttctttttttttttttgatggtcttgctctgttgcccaggcttgagtgt

SEQ ID NO: 248646 - DNA, 201 bp, Homo sapiens
gggtaggtgaacgctcaaaacacacgccgtggcggtccatttaagcaggaaagcgttgggaactgattggattgaggatttggggccttcccatgcgccgkctgcacagtccccagccttgttcccacacttaccaggccgggaacgaaactggggtagggagaggcggagggtgcagggaacatagtgttaatgttccag

SEQ ID NO: 248647 - DNA, 201 bp, Homo sapiens
gtgggagatatttagccatcagagtagttgcctcacagattgctattccaggaggaatagactttggcagttaccatgataacaaacacccaagcatttawggcaaatatgatgtaattaaagttgatttaaagaaagggcagtttttctgttttccaggtgatgttttaatgtatgctcttaaattcactgcaggcatca

SEQ ID NO: 248648 - DNA, 201 bp, Homo sapiens
tatctacgatttagagagctgccagcaggtatggtcagttttgctctacgttatttaagatccttctgtgcttaaggcacttttctgggtgcttgggaggwttaaaaaataaatatgacatagtgcctgttctcacggaatttataatatggtgggaaacatgaacataataaaaaggtaggtatgtggaaagtgttttgg

SEQ ID NO: 248649 - DNA, 201 bp, Homo sapiens
gcttttgctttttcattgtagtgcaaccaagatttttgttaatggctgctgggttggaatacataaagatcccgaacaacttatgaacaccctaaggaaaytgagacgtcagatggacatcattgtgtctgaagtaagaatctttagttaagagggtgtggactgtgagatttttaaacaaggcataggactagtgaaagt

SEQ ID NO: 248650 - DNA, 201 bp, Homo sapiens
tcaggtgtcgttatttgtgcaacaacattgaaaaacaagcagaaataaaacattgacggaacggatacgaccgcagattgcgggagctgtcctctcaatcrgcccggcagcggcggcccacaatttacgcgtgtgcaaccctaaccccggcccaagcttgacctacaatttgcgcaggcgcagatcctaactttggcgtcc

SEQ ID NO: 248651 - DNA, 201 bp, Homo sapiens
cgagatcgctccactgcactccagcctgggcgacagagcgagactccatttcaaaaaataataaataaataaaaataaaaaatagcttcgtgttttggtcyttataaaggcaaataaattgagcatcccaatgttgcggattcacaggacgaacactttttaataataagtatacctggttttgttttcaggtgtcgttat

SEQ ID NO: 248652 - DNA, 201 bp, Homo sapiens
aagtggggtcacttcaatacaattctgctaattaccatttgttttttcttttcagatttctttggtgcgaatgccttacgcatgcaaactattgtttcagraacttatgtctatgagtattgcaccgcgaatgatgagtgtttagctattttacaggagtcaacaagataattaaatatcttggtgtcttgtttctattgt

SEQ ID NO: 248653 - DNA, 201 bp, Homo sapiens
cctgaccttgtgatctgcccgccttggcctcccaaagtgctgggattataggcatgagcctccatgcccagcaaatctttttttttttttttttacatccrgggtacacgctggataaaaatttatttttcttttgtagatttaggttctcactttctttccctgggtggtcttgaactcctggactcaagccatcctcct

SEQ ID NO: 248654 - DNA, 201 bp, Homo sapiens
ttttttttttttttggagactaagtctggagtggctctatcccagctcactgcaacatctgcctcctgggttcaagtgattctcctgcctcagcctcctgrgtagctgggattacaggcgtgtgccaccatgcccagctaattttgtatatttagtagagacagggtttcaccatgttagccaggctgatctcgaactccc

SEQ ID NO: 248655 - DNA, 201 bp, Homo sapiens
tgtactccagcctgggtgacagagtgagactctgtctccaaaaatttattaaaaaaaaaaaaatcattacaatatattgtgaactttattactctcccaartaagggttttagtatactgtttgcggaatgtagttcaggcttttaattttcccaaatctataccttgggtgaaagtggtttttgagagaaactgaacacg

SEQ ID NO: 248656 - DNA, 201 bp, Homo sapiens
cactccatcctgggtgacagagtgagaccctgtctcaaacaaaacaaaacaaaatgaaacaaaacaaaagagactggaggagataaaaatcttagaatagsctatgattaagataataatgacctagactagatgatggcacagataaggagtagaggattggcttccctttggttcgttatcaccaccgttctctttgcc

SEQ ID NO: 248657 - DNA, 201 bp, Homo sapiens
caaaacaaaagagactggaggagataaaaatcttagaatagcctatgattaagataataatgacctagactagatgatggcacagataaggagtagaggaytggcttccctttggttcgttatcaccaccgttctctttgccctttatccagcccagcttgggagacttgagtgtcaataattaatcattagtaaaacgtc

SEQ ID NO: 248658 - DNA, 201 bp, Homo sapiens
tatccagcccagcttgggagacttgagtgtcaataattaatcattagtaaaacgtctgcttactcctgttttcttctctgagacttgatttagagaaaagyacactatccatttatctctagaaagttgtcctcatggatcttgttttattaggcagcaagtgaatgtttaattgaaaaatttctttttttttctatgaac

SEQ ID NO: 248659 - DNA, 201 bp, Homo sapiens
gctcagtcacatgtggctatcccctgtattagatagctagactataagccatttgtctgagggtgggtgtgagcagtcaggcttacgtctgataggtgggkgtgagaagtcaggctaatgactgggaaagtatggtcaaagcaaagtgatatagggctggtttttgaaaggttacagggtgagatatatgtcatcagcaaa

SEQ ID NO: 248660 - DNA, 201 bp, Homo sapiens
ataataaagagaaaataaaaatttgtggaactgttttttctttttatatgtaggtttctatgatcagagatattcgagagagggagattcggatctatacrgatgcaggccgtatttgtagaccacttctgattgtggaaaaacaaaagctacttttgaagaagaggcatattgaccaattgaaagagagagaatataaca

SEQ ID NO: 248661 - DNA, 201 bp, Homo sapiens
tcaaggtgggaggattgcttgaggccaggagttcaagaccagtctgggcaacatattgagactcccatctctccaaaaaataaaaaaattagtcaagtgtrgtggaatgcacctgcagtccagctactcaggaggcaggaggatcacttgagcccaggagtagtgagttttgattgtaccagcctgggcaacagagcaaga

SEQ ID NO: 248662 - DNA, 201 bp, Homo sapiens; identical to SEQ ID NO: 48777

SEQ ID NO: 248663 - DNA, 201 bp, Homo sapiens
cctgggcaacagagcaagaccctgtctcaaaaaaaaaaagtttttgtgatatattaaaatctattaatagtaataatgcgaaataacctatataatctaarttattacatataatatgacaataatatgaataatataataagaaatttagtaaaaagatgaagctgctttaaatatttattttttagcaatatgaatgta

SEQ ID NO: 248664 - DNA, 201 bp, Homo sapiens
gcctgggtgacagagtgagacttcatctcaaaacaaaaaacaaaaaattttgtagagacgggggtctcactatgttgcccaggctggacttgaactcatgkccacaatcctctagcctcagccttccaaagtgttggaattacaggcgtgaaccactgcacccagccctcttgattatttttaagcaaagcccagacatca

SEQ ID NO: 248665 - DNA, 201 bp, Homo sapiens
tttttttataattgtattcttagaaagtaagaataaatcttgaaatcacattgaaggaaaaatgtttatggaaaagaagtttgataggcatgtaaaatcaraatgactaatacttggtttattttttagggccatgctgtaggacttgtgaagaatttagccttgatggcgtatatttcagttggatctcaaccatctcca

SEQ ID NO: 248666 - DNA, 201 bp, Homo sapiens; identical to SEQ ID NO: 48772

SEQ ID NO: 248667 - DNA, 201 bp, Homo sapiens
cagaccagctctgatttaatatttattttttattgtgtgcttagcttttttccgtatttgtctatctgtattgtctcttttttttttttttttacctctcwtctatttctttcttccagaggtttaattttttggaggggggataggttggggagggtgaggaatcagtattcatatttttttgcagccaaaagtgatttc

SEQ ID NO: 248668 - DNA, 201 bp, Homo sapiens
attggttgccttccaaccttttttttccccttgtaatttgtttgttgaacaacctggactgtttgtccagggcttgagactgaattttgctgcttgcatcscaaatgctgtgcattgctgttttttgtttgtttgtttgttttttgttttttgtaaatagatcttgaggcttgagatttagcgtttgagttttttggcagt

SEQ ID NO: 248669 - DNA, 201 bp, Homo sapiens
ttttggcagtaatactttataggtggtattctatacttccagtatctggttgcctttctttttatgattttagcagctattactaaagaccttaattaaakggcgatttccaactgataccattctattttttctcagtccttcttcagtttttagccagactacttctaaaactttgtttcctcaactgtttggttacct

SEQ ID NO: 248670 - DNA, 201 bp, Homo sapiens
ctctcgtgctaggggacctattcagatcctcaatagacagcccatggagggtagatctcggtaagaactgtatcatcatcattattattaattaaccttayattatgaaaaatgtcaacacaccaaaatggagatagtggtatagtgaatgcctgtgtgcctgttacccccatttcaacaattatcgactgatggccagtc

SEQ ID NO: 248671 - DNA, 201 bp, Homo sapiens
tatatgccaatgtatatctattatgtgtcacatgttctttgtctataatgtagactcttcatttgagtttatattcatatatgtgtgcctactagaagtayttgaaggtattgtgatctatagatatctctaaagccgatctcatcattacctctcctttttccaccatcttacttgcttctcctgtatggcagtgatgtt

SEQ ID NO: 248672 - DNA, 201 bp, Homo sapiens
gattagtggatcttaactaaaggttcacctcaataacctaagactcttccaagtacaaaaggggcccatttccaaatctgctgactcaatagtgagaatgrgagtggaatggggcccaggtacaagtatttgaaagaggtccccaggtgattgtgatgtgcattctttgtcgagaggcatcggcctggatgacagagggca

SEQ ID NO: 248673 - DNA, 201 bp, Homo sapiens
ttaaattcactgcaggcatcaactcaattgtggccattgcatcatacactggatataatcaggaagactctgttatcatgaatcgttcagctgtagaccgyggcttcttcaggttagtattttgtaaatttgtcaaaacacagatacagtggaaacactaattttttatgcaaaaaaagttcttaaaatacagtttaacta

SEQ ID NO: 248674 - DNA, 201 bp, Homo sapiens
acttaaggcagtgcatttgaaagaagaatctttcttggactttagaatactactcatgatatttttgctcacagtgttcctccttaaattactttctaagracaggcagtagactaggaacttggaacatttttctctttcttgtcttttgactcattttagagaaaaacttgatgttttgttgttttgttttttgagaca

SEQ ID NO: 248675 - DNA, 201 bp, Homo sapiens
taatggatcagaaaaggtatagtaacattattttaaaaaattacaaaatggtagttaaaatttagtttaaagttgaaatgaaaaaaaaaaaaaaaagaaaraaagattttcctgcaggataacctggcactgacagttgacttgtttagggtatgacagctaaacttatataaaccaaagctttatttagctgtatataac

SEQ ID NO: 248676 - DNA, 201 bp, Homo sapiens
tcttgattatttttaagcaaagcccagacatcatataatttctcctataaatttttcagtgtatatctttaaaacaatggttctcaaatgtcttgatcccrggaacccaaaatgcttttgttttatgtgagttgtatttattgatatttatcatattagaagttaaagctgagattttaaatttattgttttaaaaatgct

SEQ ID NO: 248677 - DNA, 201 bp, Homo sapiens
cactgcaacctcgacttcccgggcaccagtaattctcccacctcagcctcctgagtagctgggaccacaggtgtgcacaatcatgcctggctaattttttrtatttttggtagagatggagttttgccgtgttgcccaggctgatcttaaactcctgagctcaagtggttcaccatcctcgggctcctgaagtgctgggat

SEQ ID NO: 248678 - DNA, 201 bp, Homo sapiens
ttcaagagttaggagctcgagaaccgtttggcaatatgtacgacgcggatgagggtaggtgaacgctcaaaacacacgccgtggcggtccatttaagcagkaaagcgttgggaactgattggattgaggatttggggccttcccatgcgccggctgcacagtccccagccttgttcccacacttaccaggccgggaacgaa

SEQ ID NO: 248679 - DNA, 201 bp, Homo sapiens
gagtcaaaatctacccgattcaaggagagggtgcatagaccactatatgtgatgataggagtgtcaagatcacattatagaagaccatgtcggatgggagmtaggcttgtggccatctttggaaaatgcaaactttcatacctgtacatgtatgaaatgttgctataatagattgccccaccttagggtattgcccagttg

SEQ ID NO: 248680 - DNA, 201 bp, Homo sapiens
acgtcggagacggaagttacttcgtctttagctcctggcgctgctggcttctgggcggtttttgtcttttgatttcaagagttaggagctcgagaaccgtktggcaatatgtacgacgcggatgagggtaggtgaacgctcaaaacacacgccgtggcggtccatttaagcaggaaagcgttgggaactgattggattgag

SEQ ID NO: 248681 - DNA, 201 bp, Homo sapiens
ttgtctataatgtagactcttcatttgagtttatattcatatatgtgtgcctactagaagtatttgaaggtattgtgatctatagatatctctaaagccgrtctcatcattacctctcctttttccaccatcttacttgcttctcctgtatggcagtgatgttaacttttaatctctcatcaaagctagaaatgtctgagc

SEQ ID NO: 248682 - DNA, 201 bp, Homo sapiens
ggcagtgatgttaacttttaatctctcatcaaagctagaaatgtctgagctattatacatagctttgtctttcttacccttccctcaggtgtagggattartaattccagtccatttaagaagtatttattaaaaatttattttgtatatgtatcaaattttgaacccagatctcctgaatttcataggctatatatgtgt

SEQ ID NO: 248683 - DNA, 201 bp, Homo sapiens
gtttaaattgtctcccaaatttcaagtaaatgagaaattgttggtatagtctcagcccttttgttaaaagaaaatagactttacctttagaaccatgtgtktttaggtctgttttctatcgctcatacaaagaacaggagtctaaaaaaggatttgatcaagaagaagtttttgagaagcctacacgtgaaacatgccagg

SEQ ID NO: 248684 - DNA, 201 bp, Homo sapiens
gaaaagaagtttgataggcatgtaaaatcagaatgactaatacttggtttattttttagggccatgctgtaggacttgtgaagaatttagccttgatggcrtatatttcagttggatctcaaccatctccaattctggaatttttagaagaatggagtatggaaaatttagaagaaatttctcctgcagctattgctgagt

SEQ ID NO: 248685 - DNA, 201 bp, Homo sapiens
tatggctatcatctcagaggaaatgaggtatatttgctcttatagtagtaatttgccacttgtttttttttgtatgtgtgtagttttattctgaaacaatrtaaccttttattgaagtatcatatgtgcacatatagaaatgtacagcttgatgaattttcacaaagtaaacacagctgcatgactaacaccaagatctaa

SEQ ID NO: 248686 - DNA, 201 bp, Homo sapiens
ctcgcacctgcccgtaatcccaacactttgggaggctgaggccggtggatgacttgagctcaggagtttgagaccagcctatgcaacatagccagaccctstctatctcttttttttttaaagaaagaaaaaaagagaaatctggcaaaaagtcagcttttcattgtgcctgaggtgatggtgacctttgattccatttgt

SEQ ID NO: 248687 - DNA, 201 bp, Homo sapiens
gctcaagcagtccttcctgccttggcttcccaaagtgttgggagctatgcagtaggttggctgtatttttttttcttttttttttgagaggatgtctctctgtcacccaggctggaatgcagtggcacaatcatggttcactgcagcctctacctcctgggccccaacgatcctcccacctcaggctcctaagtggctgag

SEQ ID NO: 248688 - DNA, 201 bp, Homo sapiens
tctcttgtaatatagaaatcagaagatgacaaaaaacatatccaaagtcactcgataaatgtctgtcatggaagaatctgctttcccagtgctgattccartgttcttttccttcatagacttttttttttgttttctgtgtggactgtagtattagagttcagaatagtttgtaatatttggaataagggtgtgattcat

SEQ ID NO: 248689 - DNA, 201 bp, Homo sapiens
cagtcagatcacttgaggtcaggagttggagaccagcctggccaacatagtgaagctccgtctttactaaaaaatacaaaaattagatgggtgtggtggcrcacacctgtaatcccagctacttgggaggctgaggcaggagaatcacctgaaattgggaggcagagtttgcagttagctgagatgatgtcactgcactcc

SEQ ID NO: 248690 - DNA, 201 bp, Homo sapiens
ggtcttcactacgttggccaggctggccttgaactcctgaccttgtgatctgcccgccttggcctcccaaagtgctgggattataggcatgagcctccatkcccagcaaatctttttttttttttttttacatccggggtacacgctggataaaaatttatttttcttttgtagatttaggttctcactttctttccctgg

SEQ ID NO: 248691 - DNA, 201 bp, Homo sapiens
aggttggctgtatttttttttcttttttttttgagaggatgtctctctgtcacccaggctggaatgcagtggcacaatcatggttcactgcagcctctacytcctgggccccaacgatcctcccacctcaggctcctaagtggctgagaccacaaggtgtgtgccaccacacccaggttttgttcatcacacagtgtgtat

SEQ ID NO: 248692 - DNA, 201 bp, Homo sapiens
agggtaagtgacactaacatttaaatgatggaatccaaagttaacttactgtggttttcctaagtgattttgatgggttgtgtcaccctgtgcctgccccygtcctcctctccctttttttgtgcaatgaaagtgtgttttcatgttattcttagagttcacatctaagaaaacatgtgtatttgataaaagtctttgcac

SEQ ID NO: 248693 - DNA, 201 bp, Homo sapiens
aaagttagaacagggagtatattttagttatttgaatatttgttggtgtggttacatgagaaaattgggttctggttagattttactttcagattttgccrgtagttacataccttattattatttgagaaagggtctcgctctgtcacccaggctggagtgcagtggtgaaattacagctcactgcaacctcgacttccc

SEQ ID NO: 248694 - DNA, 201 bp, Homo sapiens
taaaagtcacaggatatgaaagagatgtatactcaagggttaaggtttaataaaactatttattttcactgcttcattaaggacatttttaagtaaaactsgcttttctccccttcacttgaatggagaatatgactgctagtaatgtttggttctgctaccctgagttctgctaaggtgtcagcagttttattcatgttt

SEQ ID NO: 248695 - DNA, 201 bp, Homo sapiens
agtctgacatttcttcatactgtttgtaagtcaaagtaaattgtcttaaaggatgacttttaacttcctcttctcacaatgtcacagttctcagatgataygtattctgctgcactgggccaatgtataatacctgtttgtttgcgcatatggaattcttagtagtggccgagcgcggtggctcccgtcagcactttggga

SEQ ID NO: 248696 - DNA, 201 bp, Homo sapiens
actttggcgtccctgtgggcggcctttggtgtgagacgcgtggtattctgggaacgtcggagacggaagttacttcgtctttagctcctggcgctgctggyttctgggcggtttttgtcttttgatttcaagagttaggagctcgagaaccgtttggcaatatgtacgacgcggatgagggtaggtgaacgctcaaaacac

SEQ ID NO: 248697 - DNA, 201 bp, Homo sapiens
gctgggattataggcatgagcctccatgcccagcaaatctttttttttttttttttacatccggggtacacgctggataaaaatttatttttcttttgtaratttaggttctcactttctttccctgggtggtcttgaactcctggactcaagccatcctcctgttttggccttccaaaatgctaggattataggagtaag

SEQ ID NO: 248698 - DNA, 201 bp, Homo sapiens
agcctcttaaagtgctgggattacaggcatgagccactgctcctggccatgcactactctttttataatggaattatttgtatctttctagaaaggtaatygcctgtgctgatgagtggtttttgtcagagatcgctagatctctgaggtatcttctaagagtttgtgattccttgattttctaaaaatactcacatattt

SEQ ID NO: 248699 - DNA, 201 bp, Homo sapiens
attattttttaatgttctgcttgttctgggataagatccatgatgaaacaaataatagactaaatggaataattgatgtccaggtggaaacaaccaattgkcatttggagatatgggggctgagggtacaagaaaaagatcaagataaacatttgggtgtcatatatgaaaagttgttactgaacaagtccatgagaggag

SEQ ID NO: 248700 - DNA, 201 bp, Homo sapiens
tgatctgttgagatcctcttgcacgtgtatctacttgtctctgtatgtctttccccacccctcacctgaaaagtatctgttccttataaatatgatgtctrctttttagattgcagctctctcagccatgctgcatttttatcaccagtcttttgctgagtatttttatgtaaagacttattcttcttatcctacctttaa

SEQ ID NO: 248701 - DNA, 201 bp, Homo sapiens
aatatttgaaaatagaattgatagggtatgtttatagatgggtagaaggaggaacttggagacaaaaatgattttgagatttccagattgagagaaaggtratgctgcttatccacgacagaagacttaggaaagaggaagaaagtttgaattgtttaaggactgggggaagatggagatttataaataattaataatata

SEQ ID NO: 248702 - DNA, 201 bp, Homo sapiens
caaaaattagccgggcctggtggtgcgcctgtagtcccagctacttgggaggctgaggcaggagaatcacttgaacccaggaggtggaggctgcagtgagccgagatcacgccactgcactccatcctgggtgacagagtgagaccctgtctcaaacaaaacaaaacaaaatgaaacaaaacaaaagagactggaggagat

SEQ ID NO: 248703 - DNA, 201 bp, Homo sapiens
ttcaccgtgttagccaggatggtctcgatctcctgacctcgtgatccgcccgcctcggcctccaaaagtgctgggattacaggcgtgagccactgtgcccrgccttcaattttatttaataattatgcatgtgtgggatgcaatgtgatattttgatacgtgtatacaatgtgtaatgatcaaattagggtacttagcata

SEQ ID NO: 248704 - DNA, 201 bp, Homo sapiens
gccaaaatgggaggctgatgattagttggactctgcatattgtcttagaaaattgatgtgaagatgggggagtcagtagttggggagtagaagctaagaargtctcacagatataagatgacagaggtcacaagatataggagtggagacgtggaggtgtggtggggcacttcctactgctgaagggtgatgggataatct

SEQ ID NO: 248705 - DNA, 201 bp, Homo sapiens
agtctctactgaaataaattgccccaactgttatttaggtcataccttacacatgtgtgattgtctgctgtgttttctaccataggacctaacttctaatwttggtggccatacttgactggatcagggtggggccaatttgttggcctgtcactgatgtgcgaggtgacctgatgaagccaaaatgggaggctgatgatt

SEQ ID NO: 248706 - DNA, 201 bp, Homo sapiens
gaagcccctgaaacagcccaagaagcaggccaaggagatggacgaggaagatacagctttcaagcagaaacaaaaagaggagcagaaaaagctttaaaatmgaaggctgtggggaaagggcccctggccacaggtagaattaagaaatttgacaaaaagtcttggcgaggtggctcgcacctgcccgtaatcccaacactt

SEQ ID NO: 248707 - DNA, 201 bp, Homo sapiens
tctcaggtctaagtgacctgagcctgtatgtaaaattagtatacttgtttcggtggttttgaaaagcagtcataggaggttcctcacagtattgggaggcrtgcttcttttgaaatgtgcacaaagaatatatatatattaaatagttctcttggtgtttttatattgctgtgagcttttgtatattcatgttctaatgat

SEQ ID NO: 248708 - DNA, 201 bp, Homo sapiens
gaggctacagtgagctgtgatcacaccactgcacttcagcctgggtaacagcaaggccctgtctcaaaaaacaaaaaagagaatattaaaaaaaaattgcrtccttgtaaaaatgtacagactttttttttcttgccattattccataaacattacaagtaaataattatttatatagcatttacattgtattaggtatta

SEQ ID NO: 248709 - DNA, 201 bp, Homo sapiens
agtagctgggatttcagggatgcgccaccatgcccttctaatttttgtatttttagtagagacggggttttaccatgctggccaggctgctctcaaactcytggccttgtgatccacctgccttgggttcccaaactgctgggattacaagcgtgagccactgcgcccggccagctttttaaagaaaattttagagacggg

SEQ ID NO: 248710 - DNA, 201 bp, Homo sapiens
acttttaaagttgttcccagatatcctgccttcagccttccttgtctgtgtataatctcatttttctcccacccatttgttaatgattccaactatgtacttttttttttcaaattttaaaacgtttattttattgacacataatagatacacatttgttatatgccaatgtatatctattatgtgtcacatgttctttgt

SEQ ID NO: 248711 - DNA, 201 bp, Homo sapiens
caggcatgtgccaccctgcctggctaatttttgtcttttttagtagagacagggttttgccatattggcctggctggtctcgaactcctgacctcaggtgwtccaccgaccttggcctcccaaagtgctaggattacaggcctgagccacccctactttttaatgacagctcagggctccagaaggaagtgttttagcaaa

SEQ ID NO: 248712 - DNA, 201 bp, Homo sapiens
gtaacttgcagatcatttgaccctgggaggttgaggttacagtgagcgaaggtcgcaccgctgcactccagtcttggtgatagagtgagaccctgtttccaaaaaaaaaaaagaataactgcagacataagaacattcttttacataatcacaattatggtgatcttatttaatctatagaccttacccacattttgccag

SEQ ID NO: 248713 - DNA, 201 bp, Homo sapiens
gtagctagcagttcttaaatatttgctgtatgccaattctgttactcagattgcttgatttaatttttacagctatcttggaaaacctctatttcagttcrtgtgtgtgtgtgtgtgtgtgtgtgtgtgtgtatgtatatgtgtgtgtgtgtgtatatatatatatatatattttttttttttttttttttgagacggagt

SEQ ID NO: 248714 - DNA, 201 bp, Homo sapiens
ggcaaataaattgagcatcccaatgttgcggattcacaggacgaacactttttaataataagtatacctggttttgttttcaggtgtcgttatttgtgcamcaacattgaaaaacaagcagaaataaaacattgacggaacggatacgaccgcagattgcgggagctgtcctctcaatcagcccggcagcggcggcccaca

SEQ ID NO: 248715 - DNA, 201 bp, Homo sapiens
cttgatttaatttttacagctatcttggaaaacctctatttcagttcatgtgtgtgtgtgtgtgtgtgtgtgtgtgtgtatgtatatgtgtgtgtgtgtgwatatatatatatatatattttttttttttttttttttgagacggagtcttgccctgtcaccaggctgcagtgcagtggcatgatctcggctcagtgcaag

SEQ ID NO: 248716 - DNA, 201 bp, Homo sapiens
ctatcttggaaaacctctatttcagttcatgtgtgtgtgtgtgtgtgtgtgtgtgtgtgtatgtatatgtgtgtgtgtgtgtatatatatatatatatatwttttttttttttttttttgagacggagtcttgccctgtcaccaggctgcagtgcagtggcatgatctcggctcagtgcaagctccgcctcctgggttcac

SEQ ID NO: 248717 - DNA, 201 bp, Homo sapiens
ttggcacattttaaattattaaattatattttagaactcaaattacattttaaagtaaaaattcttttgggaatctttttataaagctgagaatacttttwaaaagggaataaccatctgggatttatcctttgaatccagagattcattaataaaatgtgatataccactaatagattcttttatattttggaggatatt

SEQ ID NO: 248718 - DNA, 201 bp, Homo sapiens
cggtgaacttcgagtaactgatttaggagagaacataataagttcagttttagataagatttttggggagtgcatgttgtagacattttttttctttaaattttttttttttttttggagactaagtctggagtggctctatcccagctcactgcaacatctgcctcctgggttcaagtgattctcctgcctcagcctcct

SEQ ID NO: 248719 - DNA, 201 bp, Homo sapiens
cttcagtgtatatttcctaagaatcagtacattcacttaaataatcgtagtataatcatttaaattagaacattttacttagatacaatactgtttttttkgggggggaggatagagtctcactccgttgcctaggctggagtgcagtggcacgatctcggctcaccacaacctccgtctcccaggttcaagtgattctcc

SEQ ID NO: 248720 - DNA, 201 bp, Homo sapiens
gtgatgggataatcttgagggttgtgctacatcctccagcctctgtgatgcccagctttgcagctgtccctggatggtaatagggagtgatctgttgagaycctcttgcacgtgtatctacttgtctctgtatgtctttccccacccctcacctgaaaagtatctgttccttataaatatgatgtctactttttagattgc

SEQ ID NO: 248721 - DNA, 201 bp, Homo sapiens
ccatctgggatttatcctttgaatccagagattcattaataaaatgtgatataccactaatagattcttttatattttggaggatattgaagtgctttggrattaggatgggttttaaaaaaatcattacaataaggccgggcctggtggctcatgcctgtaatcccagcactttgggaagttgaggcaggcggatcactt

SEQ ID NO: 248722 - DNA, 201 bp, Homo sapiens
ttgtgaaagagatactgatttgcctataatcccagcactttgggatgctgaggcagtcagatcacttgaggtcaggagttggagaccagcctggccaacayagtgaagctccgtctttactaaaaaatacaaaaattagatgggtgtggtggcgcacacctgtaatcccagctacttgggaggctgaggcaggagaatcac

SEQ ID NO: 248723 - DNA, 201 bp, Homo sapiens
cctgggtaacatagtgagaccttgtctctaaaaataaataattaaaaaatatatattgagtttttgggatataagtatatatttttccataaggagttgakggtgaggataggagctctgtttctggtggcagggtttggagaaggggccggggcggcagttgccatgtttggttgcaaaggtagcaagaagcccctgaaa

SEQ ID NO: 248724 - DNA, 201 bp, Homo sapiens
ttttctcattttctttcctgttcacattctccttgggtgatctcatccattttccattgtttcagttaccatctgtatgcggataacttctgaatgtgtayacttctagtttaaaatctggggtatctaactgccactagccaactaggatatctcccaggctgcttaaccttgtcaactgcccaaactgagctaattatt

SEQ ID NO: 248725 - DNA, 201 bp, Homo sapiens
gagaaaaagacccatagagctgtattctgttaggaatgttagttttctaagaacttaaggcagtgcatttgaaagaagaatctttcttggactttagaatmctactcatgatatttttgctcacagtgttcctccttaaattactttctaaggacaggcagtagactaggaacttggaacatttttctctttcttgtcttt

SEQ ID NO: 248726 - DNA, 201 bp, Homo sapiens
gctggtctcgaactcctggtctcaagtgatctgcctgcctcggcctcctaaagtgttgggattataggtgtgagccagtgcgcccagcctgaaaaaaaatmtgataaatggatgagtaaatgagtctccttcatgagttcattttcctttgtatgacttttaaagttgttcccagatatcctgccttcagccttccttgtc

SEQ ID NO: 248727 - DNA, 201 bp, Homo sapiens
cccacattttgccagttgtcccactggtgtttatagcaaaatacaaatttttctgatcctggatccaacctaggatcacatattgcatttacttgtcatgscatgttcttttgtttcctttaatctggaacagttcctcagtgtgtctgttcttttttttaccttgacatttttgaagaatacgggccagttactttttag

SEQ ID NO: 248728 - DNA, 201 bp, Homo sapiens
caacacatctcagttcagaatcgccacgtttcaagtgctcagtcacatgtggctatcccctgtattagatagctagactataagccatttgtctgagggtkggtgtgagcagtcaggcttacgtctgataggtgggtgtgagaagtcaggctaatgactgggaaagtatggtcaaagcaaagtgatatagggctggttttt

SEQ ID NO: 248729 - DNA, 201 bp, Homo sapiens; identical to SEQ ID NO: 48796

SEQ ID NO: 248730 - DNA, 201 bp, Homo sapiens
gacctcccaaccagggtctccagccttgtcctgcaggcgcatttgggctggcaacaggtctgtacctcgctgggccggagctcccagaggaagaggcaggmtgacatctttgctgtttcacagccttcactggtgatagctccaggtactggaaaatccaaggagactaggaactggagaagaagcccagcaaagtacagc

SEQ ID NO: 248731 - DNA, 201 bp, Homo sapiens; identical to SEQ ID NO: 48797

SEQ ID NO: 248732 - DNA, 201 bp, Homo sapiens; identical to SEQ ID NO: 48798

SEQ ID NO: 248733 - DNA, 201 bp, Homo sapiens
ttaatgcaaccagaaaacaacctaaaggttatcttttaaatgatctcttctgacttagggttcctttggtctgtccttcttctgacagtgttttctctctsttttttttttttttttggcccattcacaggtcctatttatagacaactggcgtgtcctacatggcagggaatgcttcactggctaccgccaactgtgtgg

SEQ ID NO: 248734 - DNA, 201 bp, Homo sapiens
acgatctgcgggccccacttccactgcacctcacaggataagacccactggtttggaattccagccagccaccagcagcagtgttgcacctacctgggacrgaggtcccagggggaagggcaggctgctctctgggacagagctcccagaagtggtaccccagaacagcacagcacagctgctcttcagaagcatggccag

SEQ ID NO: 248735 - DNA, 201 bp, Homo sapiens
aatgcaaccagaaaacaacctaaaggttatcttttaaatgatctcttctgacttagggttcctttggtctgtccttcttctgacagtgttttctctctgtkttttttttttttttggcccattcacaggtcctatttatagacaactggcgtgtcctacatggcagggaatgcttcactggctaccgccaactgtgtggct

SEQ ID NO: 248736 - DNA, 201 bp, Homo sapiens
gtcacctgcacggctggctcagactccagcgtcccctcaccctcggcagcagtgcgagcggaggcggcgatgtccgagggcccggggcggcccccctcggsactgctgttcccaccatggggcaaggccagcacccgcagttctactcgggctgtggcctcaccagcagggttggtggcgatgcaggtgtagcccccagcg

SEQ ID NO: 248737 - DNA, 201 bp, Homo sapiens
ggcgatgtccgagggcccggggcggcccccctcggcactgctgttcccaccatggggcaaggccagcacccgcagttctactcgggctgtggcctcaccarcagggttggtggcgatgcaggtgtagcccccagcgtccccagcgccggtcaccccaatctctaaggtcccgttggggaaagcccgggctcgggaggagtt

SEQ ID NO: 248738 - DNA, 201 bp, Homo sapiens
ggggacttcctatggccagggccgggggactgctctcccaccttggcgtccagctctgagtctgcacaccctccctgcaggtggagctggagcggggcaaracgctgcacatcaaagccctggccgtgagcgacctgaaccgggccggccagaggcaggtcttctttgagctcaatgggcagctgcggtccatcttggtca

SEQ ID NO: 248739 - DNA, 201 bp, Homo sapiens
ggactgctctcccaccttggcgtccagctctgagtctgcacaccctccctgcaggtggagctggagcggggcaagacgctgcacatcaaagccctggccgkgagcgacctgaaccgggccggccagaggcaggtcttctttgagctcaatgggcagctgcggtccatcttggtcaaggacacccaggccatgaaggtattg

SEQ ID NO: 248740 - DNA, 201 bp, Homo sapiens
ttctcctaggacctaggaatctaacttcttgtttctttgccctctaggtgagattgccatccgtgtgttccgggcctgcacggagctgggcatccgcaccrtagccatctactctgagcaggacacgggccagatgcaccggcagaaagcagatgaagcctatctcatcggccgcggcctggcccccgtgcaggcctacct

SEQ ID NO: 248741 - DNA, 201 bp, Homo sapiens
aagtacaggcgaagtggctcctggggccagccagggggcttgctcactccccacattggtggagagcaatggggatccaggtacttagtgttttaaaagtmattattctaaaagcattacgtggttattataaaaatcagcacaaaggagcaaataaaaatgactgacagccctcctctctgtcaggacgctgccgattgc

SEQ ID NO: 248742 - DNA, 201 bp, Homo sapiens
gccctcgcccagttacctccaggcggcttccgaggctcgccctgcccggcgccagggccctgccgtgagcctcgcggtgctcccttcctctaggagtgagrggggccgcggtggcttccgggcggcgcggggcggcctctgacgggctcggggccctggcagagcgcagagctcgcatctcctctatgcgggggctgcccc

SEQ ID NO: 248743 - DNA, 201 bp, Homo sapiens
gaaacctgccctcccgtctctgactgcctcctgtctcagaccacctccctcatcatcttgccaggtccctagggggccgagggagcaggctgtgggctgtrgatcagctactctctgcgtgacccaacctcccgcctccctgcagccagcggcccatgccagcttctaggcctcaggttcacagcctctaggctcactgct

SEQ ID NO: 248744 - DNA, 201 bp, Homo sapiens
agagggctgtaccgtcccccacctcctcctgttgcttagtccagtcctgtgtccgccccgcagaccctgaagtgccatggggaaggcgctcacacgtgctycccaggctttacactggatacggcgtcctgtcgccacctggcaggaaggggcgttctttgcacttacaggcgagggtaggccgcctgcccaagcccatgc

SEQ ID NO: 248745 - DNA, 201 bp, Homo sapiens
ccctctgggcggtccccccactccccttcttccttacctgggcctgacgggtcccccacctccggggagcccttctctgcggggctcactcgggcggcacsaacaggtgcaggcggcacgagccacctgtgtgtgtgagtgtcggcgcctctgtctcctcctctccgctgcccctcccattgccgtctggccctggccctg

SEQ ID NO: 248746 - DNA, 201 bp, Homo sapiens
actctgttgcccaggctggtcttgaactcctgggctcaagcaatcctcctgcctcagcctcccaaagtgctggtattataggcatgagccaccacgccctrcctagaagtataatgttaattgcagagttggttctagtggactcaaaacattatagtttgtgtacctcccttctacaggacttgggaatggaaagaggaa

SEQ ID NO: 248747 - DNA, 201 bp, Homo sapiens
agtgttaggtccatatccattttcctgtccccctccgcttgtcccagctttatcatccgagatatggggcttctttccaaaggtgaatttaagtttcaggytttcctaacagtttcagctgttaggcaggggcttgtggcaggaaaaagaagacagaaatttctgttgcccataggagggtgacggggtgctgggtaaata

SEQ ID NO: 248748 - DNA, 201 bp, Homo sapiens
gaggtgatatctcattgtagtttggatttgcatttccttaatgattagtgatgttgagcaccttttttttttttttttttttttagatggagtcttgcttkctctgttgcccaggctggagtgcagtggcaccatgtcagctcactgcaacctctgcctcctgggttcaagctatcctcttgcctcagcctcccaagtagc

SEQ ID NO: 248749 - DNA, 201 bp, Homo sapiens
gcgcctgccacgacgcccggctaatttttgcattttttagtagaaacggggtttcaccatgttgagaaatttctttttttttttttttttttttttttttyttgagccggagtcttgctctatagcccaggctggagagcagtggcgcgatctctgctcaccacaagctccgctgcttcccgggttcatgccattctcctg

SEQ ID NO: 248750 - DNA, 201 bp, Homo sapiens
catttgcatccaggcccagctctgttccctgaggaggttggagttctgataccccacagaaggaaggagtcaaggcggggaggctgcttggaggagggtgyggcgaagacaaagaaatggctctacgattcttgggattgctgggaagctgttgcttatagggttggctctctgtcctctctgatgctccaaacaggtccc

SEQ ID NO: 248751 - DNA, 201 bp, Homo sapiens
ctcccgggctcaagcgaccctcctgccacagtcccccagtgctgggactacaggcgggcgccaccacgcctagctaatttttgtattttttggtagagacraggttccgtcatgttgcccaggctggtctcgaactcctacgctcaagcgagcggcctgccctggcttcccaaagtgctgagattacaggcgtgcctcgtc

SEQ ID NO: 248752 - DNA, 201 bp, Homo sapiens
gactccaagggaactggcacataaatggatgcagtcaggtggccgttgagccaagggccaagtaaggcatttcgtcctcagccacgttgcccttgcctcaygcctgtatttctgttctttttttttttttttgagacggagtctcgctccgccacccagcctggagatctcggctcactgcaacctctgcctcctgggttt

SEQ ID NO: 248753 - DNA, 201 bp, Homo sapiens
cctcccgggctcaagcgaccctcctgccacagtcccccagtgctgggactacaggcgggcgccaccacgcctagctaatttttgtattttttggtagagamgaggttccgtcatgttgcccaggctggtctcgaactcctacgctcaagcgagcggcctgccctggcttcccaaagtgctgagattacaggcgtgcctcgt

SEQ ID NO: 248754 - DNA, 201 bp, Homo sapiens
tcttgtccgctccggctccccagtgctgatggagactcaggcaggctgcgctggaccaaataggacacgtggtggtgatgacatttttggtccaatccagyagcagcctgtgaagtgctcattgcaggcagagctgagtaagctgtgaccccactctcaggcagcttctcttcgggggggagcggcagggacacctgttcc

SEQ ID NO: 248755 - DNA, 201 bp, Homo sapiens
gttagtgtttaacttaaaaaaaaaggtattcagtttagctatgtaatacttgcaccttgtacaaacattgaaatgtatgagtctcctttttcctctctccscagtaacccagtcccctcccaggaggccacttccggttaaattatcttgtctgtcctcttggaggtggtctgccctttgaaatagaaacatatttccttt

SEQ ID NO: 248756 - DNA, 201 bp, Homo sapiens
agctttcgccttgcttccagggcgggataggtggaagctgaaactgcctcctagcaaacagatttacactgatcaaaacaaagtatttgtaggtgttagakttaagaggttgaggttttccgttggattttttaggtgcatggtggaagaggtattttagacgaaggattctcctagcagacacaaaatatgaattaagaa

SEQ ID NO: 248757 - DNA, 201 bp, Homo sapiens
ggctccgtcgggcccaagctcctcccaggcgcctggcataaccgtagcacccggcatctcccaggtccagagagcagctgcgctgcggccggggcgggggrctccgcggcgggtgggccttgggtgtggggctggggcctccattggtctgggactggacgtggctgagcttgagggggaggcggccatttccggcccccc

SEQ ID NO: 248758 - DNA, 201 bp, Homo sapiens
tattggggccagaggcttgtgctgcagagctagctccaaggcctggtggagttccccaggcatgcagagctgatctgggcctctcggttcctgtgcaggarccacgtttgacgtcgccatgcgcttcctgtatgagtgcccctggcggcggctgcaggagctccgggagctcatccccaacatccctttccagatgctgct

SEQ ID NO: 248759 - DNA, 201 bp, Homo sapiens
ccctccctctctgccccggccatgtccccgccacccacaggcacacatcctgccctctctaccatctctctctctctctctcccacttcccccaggacatkgccgggctgctgaagcccacggcctgcaccatgctggtcagctccctccgggaccgcttccccgacctcccactgcacatccacacccacgacacgtcag

SEQ ID NO: 248760 - DNA, 201 bp, Homo sapiens
cgcacccacgatctcaaaaagatcgccccctatgttgcccacaacttcagcaagctcttcagcatggagaactggggaggtaggctggcatgctgcgcagygcctggtaggaatgggcgcccgctctgtggccagtcccacaggcttaggccactggggacaagctagagacgctgacacgaagaacaccaaagaggaagg

SEQ ID NO: 248761 - DNA, 201 bp, Homo sapiens
cggtgttgaggggatgcgtggccatgcacaggggtgacccaggccatccccctcgcctgcccctgcccgttgctctgtggtcctggctggctcctggggtkgtgcccggttcctctgctccctcctcaccctcagcagctccccacgtgccaagctggtccctgggccctagaaccttgcgcctgctaggggtgcagctag

SEQ ID NO: 248762 - DNA, 201 bp, Homo sapiens
ttgatatcctcaaagattaattcatgttgcagaatgtcattggaactaccttaagacattgatagagtgcctgtctgctgtcttccttagctcatcctcaygttttgatcaaattaagtacttggacaccaggtctgtaaaaaagaaaagagccttctttatttgggttctgtaggcaaaagggagagtggagaagcgact

SEQ ID NO: 248763 - DNA, 201 bp, Homo sapiens
gaagttcctttttattgaacacaggcctctgcccccgagaagcggaaatgggcagtgggtgtcccgagcccctctgggcggtccccccactccccttcttycttacctgggcctgacgggtcccccacctccggggagcccttctctgcggggctcactcgggcggcacgaacaggtgcaggcggcacgagccacctgtgt

SEQ ID NO: 248764 - DNA, 201 bp, Homo sapiens
gtgcccacccaccctgtcccgcgcccccgcccactcctccatggcgttcgctccccacacccttctctgtcgaggaccttgctcccattcatctaaaccasgctctcgaagcccacctctagctgcatgttctggggctgggagggcaggcacacgcgtgtgagccaggtccatgcacacgtgaacacacgtatgccttag

SEQ ID NO: 248765 - DNA, 201 bp, Homo sapiens
gcccccttctgagctctcatgctgaaaacacaccaggactaatctggccagactcaccaactccaaaaaagagcgggcaggtgaacacagcagggcccagrcccatgcacggtgctaacatgggcagcatacaggcccggaacaccagctcctctgtcagcggggcgatcacttggttccgcagccaacgcatgtctgtga

SEQ ID NO: 248766 - DNA, 201 bp, Homo sapiens
ggatgttgaggccttccccaccaccctgttaaaaacaaaaacaaacccccggtcagccttgcctcttgcctcgcacatggtcctttggaggccctgtcgcyggcctgccgtcccctcgctgtctgggagcccacggcgaggccctttagcggccgggtcagcagacctcaatccgtgctgtggaacgaacgtggatgagtc

SEQ ID NO: 248767 - DNA, 201 bp, Homo sapiens
cccagcactttgggaggccgaggtgggtggatcacctgaggtcgggagttcgagaccagcctgaccaacatggagaaacccccatctctactaaaaatacmaaattagctgggcgtggtggcacatgcctgtaatcccaactacctcaggaggctgaggcaggagaatcgcttgaatccgggaagcagaggttgcagtgag

SEQ ID NO: 248768 - DNA, 201 bp, Homo sapiens
cccctgcccattaaccatcaagacgtcagcaaatactggggtctaatctcaactagtgttactccaggacaccatatggagctgactgctgatgttctgtycttgataatatcccttatgtgtgtgtagcactttatagtttttttatttcatttttttctttttttctctccccccccaccttttttttgtgtgtgtgtg

SEQ ID NO: 248769 - DNA, 201 bp, Homo sapiens
acttccctctctcaggacagcaccaagcctgttcttcctgagaacttcacaattgctatcccttcttcctggagctttctctgcggatctgtgcgtggccracttctccccatccaggtcccagcttctgtgtcccctcctcagagaggccttttctaatatccagcccccaaacccctgcacccgccccagatcattcgc

SEQ ID NO: 248770 - DNA, 201 bp, Homo sapiens
tggagggccccctgaccgttcacttccccaccaagggccttgcacatggcttcacctcagccttgcccctgactgatgggtcgaggtcagtggctctcctyggctgcagctgcacgccagactccagctgttttcagagtctgcaggcgcctgggcaacccgctgccagagtccctggcagtggcctggccggagctcgtc

SEQ ID NO: 248771 - DNA, 201 bp, Homo sapiens
tgttactataggttagtttccattttctggaatttcacataaattgactcatacagtatatattcttttttctctgccttcttttactcagcataattatrttgagatatgtccatgttgttgcttgtattgatagttcatttccttcttttttttttttttaagacagagtcttgctctgtcacccaagctggaatatag

SEQ ID NO: 248772 - DNA, 201 bp, Homo sapiens
gatgagcagggcccttgcggagttccgcgtccgaggtgtgaaggtgagaggctgcagcccccgcctgcctttgctcccggcccttggagggccccctgacygttcacttccccaccaagggccttgcacatggcttcacctcagccttgcccctgactgatgggtcgaggtcagtggctctccttggctgcagctgcacgc

SEQ ID NO: 248773 - DNA, 201 bp, Homo sapiens
gtcttgggccagcaggtgccgtctgcgtgctaccattgagtaagggcaatgggctcatggtgggaatggccgtaacgtggaagaactccaccctccacgartttcacccccttgttctctctctgcttgctctgtcctcttattcttggctgctagagttggatgttatttctcttacttgcatccctacaatgagaggtg

SEQ ID NO: 248774 - DNA, 201 bp, Homo sapiens
cttacctccctgtttctcctccttagggttttagcctgaatgttccttattttcttgccagcttgcctatgcttttaagacaaaatttaatctggccaggygtggtggctcatgcctgtattcctaacactttgggaggacaaggtggaaagatcacttgagcccaggagtttgaaaccagcctgggcaacatagtgagac

SEQ ID NO: 248775 - DNA, 201 bp, Homo sapiens
aatttctctcttttgtactctgtccctttatttctcagactggctgacacttagggaaaatagaaaagaacctacctgactatcaggggctgtttcccccratacctcccctccttcattgtccttttgtccaaagatcatgtctgtcttgtttgcaaataagaaggaataataggctaggctcagtggctcacaaggcct

SEQ ID NO: 248776 - DNA, 201 bp, Homo sapiens
cagaccatgcataccggaggaccctggggccatctcaaaagtcctgtctcccatcaaccaaaaaccaaaaacaagagtccacggcactgcccatcaggctrataacaaagaccagaagaaaaaatacagcaggagcactcaccatggtcagcaacaggggcagcagcgccgctgggaaaatgccctccagcctgaagccca

SEQ ID NO: 248777 - DNA, 201 bp, Homo sapiens
aaagagatgcgtccctgagggtaggcctctgaaatggccgcttcgggggcagccgtcttttatggtctaagccgtagggatgaaataagccccagtctccygtagagctcccaggcttattaggacgaggaaattcccgcctaataaattttgatcagaccagttgtctgctctcaaaccatgtctcctgataagatgtta

SEQ ID NO: 248778 - DNA, 201 bp, Homo sapiens
cctgcgcggccctcgcccagttacctccaggcggcttccgaggctcgccctgcccggcgccagggccctgccgtgagcctcgcggtgctcccttcctctargagtgaggggggccgcggtggcttccgggcggcgcggggcggcctctgacgggctcggggccctggcagagcgcagagctcgcatctcctctatgcgggg

SEQ ID NO: 248779 - DNA, 201 bp, Homo sapiens
ctgcccggggaatatagggaaggcattcctgagcctactcctataggatgtggaggaatggggacaagtgaccttcccatgtgagccctgcccacaccccrtgctgcagggtcggcaggaagctggctcctcgtgcgccagggggcagtgttggccctgaaattctcactgctttccagtgaggctgggatggagcagcca

SEQ ID NO: 248780 - DNA, 201 bp, Homo sapiens
accaggtctgtaaaaaagaaaagagccttctttatttgggttctgtaggcaaaagggagagtggagaagcgactctgtctacgctgctcccctcactcccsgtctctgggcccttctgggatttgcatgccacccactgctctgtcaggagtggctcttagggaagtgaggaaagggccttgattatagtgtttgccaatt

SEQ ID NO: 248781 - DNA, 201 bp, Homo sapiens
atagggaaggcattcctgagcctactcctataggatgtggaggaatggggacaagtgaccttcccatgtgagccctgcccacaccccgtgctgcagggtcrgcaggaagctggctcctcgtgcgccagggggcagtgttggccctgaaattctcactgctttccagtgaggctgggatggagcagccacctcactgcaggc

SEQ ID NO: 248782 - DNA, 201 bp, Homo sapiens
gacttgctgaacttatgcgaggggtgaacaaggaaaggcccgggaggcagttgcacctctgggtcttgccctggaggcagagcctgtcactggcgccacarccccgggacggggcctcctggggagcatgtggtgtgtgaggagctggggaggaagaggacaggagagcaagatggcttggaagcccagggaacgagcagc

SEQ ID NO: 248783 - DNA, 201 bp, Homo sapiens
tttttcctgggacagagtcttgatgtcacccaggctgagggcagtggcgcaatctcagctcactgcaacctctgtcttctaggttcaagcgattctcgtgyctcagcctcctgagtagctagaattacaggcgtgtgccaccatgcccggctaatttttatatttttagtaagaggcggggtttcaccatgttggccaggc

SEQ ID NO: 248784 - DNA, 201 bp, Homo sapiens
tcactgcaacctccacctcccaggctcaagtgattctcatgcctcaccctcccaagtagctgggattacaggcatgtgccaccatgcctggctaagttttrtattttctgtagagacagggtttcaccatgttgcccaggtgggtttcaaactcttgagctcacacaaatgtgccttggcctcccaaagtgctgggtttac

SEQ ID NO: 248785 - DNA, 201 bp, Homo sapiens
ggccacttgtccgtccctccctctctgccccggccatgtccccgccacccacaggcacacatcctgccctctctaccatctctctctctctctctcccacktcccccaggacatggccgggctgctgaagcccacggcctgcaccatgctggtcagctccctccgggaccgcttccccgacctcccactgcacatccacac

SEQ ID NO: 248786 - DNA, 201 bp, Homo sapiens
ggtggttcacacctgtaatcccagcactttgggaggccaaggcaggtggatcgcctgaggtcaggaggtcgaggccagcctggccaagatggtgaaacccygtctctactaaaaatacaaaaattagctgggcgtggtggcgggtgcctgtaattccagctactcgggaggctgaggcaggagaatcactcgaacccagga

SEQ ID NO: 248787 - DNA, 201 bp, Homo sapiens
ccttaggtgatccacccgcttcagcctcccaaagtgctgggattacaagtgtgagccacgtgccaggccacacccagctaattttaaaaagttttttttttaattttttggcagagacaggatctcaatatgttgcccaagctgatctcaaactcctagactcaagtgatacccctgcctcggcctcttaaagtgctgaga

SEQ ID NO: 248788 - DNA, 201 bp, Homo sapiens
ttcatgccattctcctgcctcagcctcccaagtagctgggactacagatgcccgccaccacgcccggctaatttttttttttttgtatttttagtagagayggggtttcaccgtgttagccagggtgggccaacctgatacttttaaaagttatagtgcatattatgctgggtacggcagctcacacctgtagtcttaact

SEQ ID NO: 248789 - DNA, 201 bp, Homo sapiens
gagactgagagtagatgagtggttgccaagggctgagggagctaagggggttggagcatgacagctaggggataggaaatgttctaaaagcggattatggyggtagatgcacatatctgtgaatatatttaaaaagccattgaattgcactttatttgtttcttgagacagagtcttgctctgtcgcccaggctggaatgc

SEQ ID NO: 248790 - DNA, 201 bp, Homo sapiens
atgccattctcctgcctcagcctcccaagtagctgggactacagatgcccgccaccacgcccggctaatttttttttttttgtatttttagtagagacggrgtttcaccgtgttagccagggtgggccaacctgatacttttaaaagttatagtgcatattatgctgggtacggcagctcacacctgtagtcttaactact

SEQ ID NO: 248791 - DNA, 201 bp, Homo sapiens
ggcatgcaagcagtcctacagttgttgccattcctttaaaaaaacttcatgagatcatgttgtttaccattaaattttcttggcttcacattacatcacargcatttcccatgtcatcaaaacctgtgcaaacacattattgttaatggttacataatgtctgtgggagccagggtgtggaatctttaaattgcttctcat

SEQ ID NO: 248792 - DNA, 201 bp, Homo sapiens
aacccgggagtcagagcttgcagtgagccgagatcgtgccactgcactccagcctgggcaacagagcaagactccgtctcaaaaaaaaaaaaaaaaaaaaacaacgttggaggactcacacttcctgatttcagaatttaactgcagtgtggtactggtgtaaggatagacatatagatatatagatcaatggaatagaac

SEQ ID NO: 248793 - DNA, 201 bp, Homo sapiens
ggccccatccgtgcctggcattgtgtgcgggtcagggagagacaggttggtggtgggggtcttgtgtgaccacagcggtgagcttagtttcagggccatamctaggttctaaggagcagtgcagccctcaccctccgtcattcacagcagctcctgacagccttccccagccccacactgcctgctggccaacatttccgt

SEQ ID NO: 248794 - DNA, 201 bp, Homo sapiens
gggccccatccgtgcctggcattgtgtgcgggtcagggagagacaggttggtggtgggggtcttgtgtgaccacagcggtgagcttagtttcagggccatractaggttctaaggagcagtgcagccctcaccctccgtcattcacagcagctcctgacagccttccccagccccacactgcctgctggccaacatttccg

SEQ ID NO: 248795 - DNA, 201 bp, Homo sapiens
tcaggtctgaagtagtgggatttcagggacattttgatgatttattagacaaattgaaactgccttggcttatctgggacatgtgactgctgacattgttsgtcagctctcgttgggaagctctgagtgccactggtggccctgctggaggccaggccagtgacagttttatcagaagtggggtttttggttttggtattt

SEQ ID NO: 248796 - DNA, 201 bp, Homo sapiens
tttttggcagagacaggatctcaatatgttgcccaagctgatctcaaactcctagactcaagtgatacccctgcctcggcctcttaaagtgctgagattayaagcatgagccaccacgcctcacggtgaatcttaacagcctcatgccactctgcaacctcattgtgacctgaagtatttcttcactgattcattccctca

SEQ ID NO: 248797 - DNA, 201 bp, Homo sapiens
taaaatgctgcctgggagctggagcaggtgggggtccagttctgagtttaccagtacatgatctgggcaggctgtttgttggggaacctcagtgtcaacayctgggagctcagttggggaagggggtagcatgcaaagagtcacgtaacctgccacccccatttttggcaaggtccccaggccctcaactgtgcctcgaat

SEQ ID NO: 248798 - DNA, 201 bp, Homo sapiens
gggtttcaccgtgttagccaggatggtctcaatctcctgacctcgtgatccgcacgcctcggcctcccgaagtgctgggattacaggcatgagccaccacmcccggcctttctgctcccaaatcttttgtactttctgtagtgtcatgcttttctcccttccacgtttattggttccctatctttacccagtgccttcttg

SEQ ID NO: 248799 - DNA, 201 bp, Homo sapiens
atggtaccttgagatttttcaggctaatgaaaaaagaatgaaggaaaattaacagcctcagagacccatggtgcaccgtcacacaaatcaacatatgcatsatgagagtcccagaaggagaggagagaaagggtcagaaagaatggccacaagctgatgaaaaacagtaacctacccactcaggaagctcagtgaactcca

SEQ ID NO: 248800 - DNA, 201 bp, Homo sapiens
tggagggtgtggcctggagatggagaagaggtcacaaggtcccaaaatggccgtggtcgaatcctctggcttgaccagtggcatgggaggagtgggtgatkagggtgatgggatgcaggttttggtaactggggggacagtggggcacccactgggcacaggaggactgggtgcataggcaggaagctggccgtggacttg

SEQ ID NO: 248801 - DNA, 201 bp, Homo sapiens
ggcctgaatggtactttgttttctgcctttggcgccacaggccaagcggctttactactgctgctgccgttctaacagtctcgtctccaatgagaaattcrttcccacccgggtttcacgttgttttactgaatatcctgtgaggaatgggctttgagccagcttggggtctcgtgtgggttgctgggtgggggcttatca

SEQ ID NO: 248802 - DNA, 201 bp, Homo sapiens
cagtattcccattctcccacccgctcctgtgggcccccagggacccatgagggactgaggaccaacctgtgcggatgaagaggaaagcagtgtaggcaccraagacagctgtgtaggagaactggaacgctggagacggggaggccacgagtgaccacacctgcacgcccttcctgcccccacactacatacccatcagcc

SEQ ID NO: 248803 - DNA, 201 bp, Homo sapiens
ttgagtgccccagacattgaatttcagccttgacgttatctgtcaaggcagctggttttctctgaacagggatttgagcttgctggcctgtttttccattytgctgttcattgactagtggctagggtaggtgtggctttttcggaaataagcagtcaataaaactccgaaaagtgattacacaataccaactgtgggctc

SEQ ID NO: 248804 - DNA, 201 bp, Homo sapiens
accaccaggacgctggtgaagcgtcgcttgatgaccgcgggatggtccctacggaggggacagtaagttcagggggcccgcggctgcccatgagcacggasccgcccccggctcgcccaagctccgcccgcagggcgcggattccggtcgcgcgcagcccccgcacctgggcagttcgctcttccagacgtagaggctgcc

SEQ ID NO: 248805 - DNA, 201 bp, Homo sapiens
ctctctcccacttcccccaggacatggccgggctgctgaagcccacggcctgcaccatgctggtcagctccctccgggaccgcttccccgacctcccactscacatccacacccacgacacgtcaggggcaggcgtggcagccatgctggcctgtgcccaggctggagctgatgtggtggatgtggcagctgattccatgt

SEQ ID NO: 248806 - DNA, 201 bp, Homo sapiens; identical to SEQ ID NO: 48801

SEQ ID NO: 248807 - DNA, 201 bp, Homo sapiens
aaggcacaccccacgttctctctccaccgcctcctacctacccttgtctcccgcctgtgcctctgtctcatcggctggacctacaggaaaccagccaggargggagcccaggtgcctccacccagagggctcagccccgctgggtccagagaagggcatacagggaggccgccaaccaggtagcctttccccaaaaggcaa

SEQ ID NO: 248808 - DNA, 201 bp, Homo sapiens
cccaaatcattgtgtctatatttctctattggtgcttctgaccttccaaaatctgatcccaccctggcagtcagaccttatttgatgtcaaggattattartttgtagcatgtattacatccctaatatggaccagttcacatgcattctcatatttcatcctcccaatgaacatacaaagtcaaataattattcttattt

SEQ ID NO: 248809 - DNA, 201 bp, Homo sapiens
caaactgctcgggattagcaattgttaagaacatgcctttctccccaccccgggagttctaggccaggggtggagggattgagcaccgtggctttgttctstgtcaggtggtgcctttctctgtgacaccgagggagacctgccatcaggagggagtctgaggccaggagacagtacttaccgatcaggatggatctttgg

SEQ ID NO: 248810 - DNA, 201 bp, Homo sapiens
tctaccatctctctctctctctctcccacttcccccaggacatggccgggctgctgaagcccacggcctgcaccatgctggtcagctccctccgggaccgsttccccgacctcccactgcacatccacacccacgacacgtcaggggcaggcgtggcagccatgctggcctgtgcccaggctggagctgatgtggtggatg

SEQ ID NO: 248811 - DNA, 201 bp, Homo sapiens
ggtccatgacgagtatgaccttgggcaagtcactgtgaatggcactcctgggtgaggcttaggctgagtgcaggctccatgcagatacttcctccagctcyggccccacaccagcagcacaccagccagaaggcaaatctcaaggcgagtacgggagttggtggcacctctctgcctccagctgtggaagaggcacccggt

SEQ ID NO: 248812 - DNA, 201 bp, Homo sapiens
ctgtgttgctctgccgcagtgagtggtcaggcccctgcgtccccttctgctcatacccggtgttccagccataccaaactgcatggtttgtgaccatacartggcccgtgtcctggccacaccactctcttcccttttcccttcccgccggtcctctgtcactcaccttgtctgtgagtctcaactcccatggtttcctga

SEQ ID NO: 248813 - DNA, 201 bp, Homo sapiens
ctgtgtaaattgaagacagcatggatcatgctgtgttgctctgccgcagtgagtggtcaggcccctgcgtccccttctgctcatacccggtgttccagccrtaccaaactgcatggtttgtgaccatacaatggcccgtgtcctggccacaccactctcttcccttttcccttcccgccggtcctctgtcactcaccttgt

SEQ ID NO: 248814 - DNA, 201 bp, Homo sapiens
gggccacttgtccgtccctccctctctgccccggccatgtccccgccacccacaggcacacatcctgccctctctaccatctctctctctctctctcccamttcccccaggacatggccgggctgctgaagcccacggcctgcaccatgctggtcagctccctccgggaccgcttccccgacctcccactgcacatccaca

SEQ ID NO: 248815 - DNA, 201 bp, Homo sapiens
ctgttgccctgttgccaagaaggccttggtctgccttttgttttttttcctctctcaggaataaccctgctgggaacttttttttttttttttttttttttaagacagagtcttgctctgtcgcccaggctgaagtgcagtggtgtgatcttggctcactacaacctctgactcccgagttcaaatgattctcctgtctca

SEQ ID NO: 248816 - DNA, 201 bp, Homo sapiens
ctgggattacaggcgttagccaccgcacccagctgcaaagcctttcttttttcctggcttcttacctgttgaccttatggagagagaggggcaggaatacrttgtaaaaatcaaaacagaccaccctgttttatccagtagggagaaagagaaagacctgctgacttaccgaagtgtttggattgcccaggtagcttgata

SEQ ID NO: 248817 - DNA, 201 bp, Homo sapiens
  misc_feature (1)...(201): n = A,T,C or G
atggggcaaggccagcacccgcagttctactcgggctgtggcctcaccagcagggttggtggcgatgcaggtgtagcccccagcgtccccagcgccggtcnccccaatctctaaggtcccgttggggaaagcccgggctcgggaggagttgccaaccaaccggtcgtcaggaccgacccagtgcatggtaggcgcggggtc

SEQ ID NO: 248818 - DNA, 201 bp, Homo sapiens
aaaactgcttggcaacgagcaggacaggcttgctgtctacagctgtgggcctggcctgacctacgctaagggaaagaccacaggggctgggccaagtgtgktgagtgagagctggggaacagacgtggcccctgcacagagcgcatttgttcctgctgatcccctccagcaataggggagttccagcagaagcagtggctg

SEQ ID NO: 248819 - DNA, 201 bp, Homo sapiens
cctgggaggtggagattgcagtgagctgagatggcatcactgtactccagcctaggcaacagagcaagactcagtctcaaaaaaaaaaaaaacaaaaaaamcccagaaattctggagttgaactgtgtagttactgacatgaaaaattcactagaggctgaacagcagatttgagcaggcagaaaaaaatcagcaagcttg

SEQ ID NO: 248820 - DNA, 201 bp, Homo sapiens
gtgtgcgcacccacgatctcaaaaagatcgccccctatgttgcccacaacttcagcaagctcttcagcatggagaactggggaggtaggctggcatgctgygcagcgcctggtaggaatgggcgcccgctctgtggccagtcccacaggcttaggccactggggacaagctagagacgctgacacgaagaacaccaaagag

SEQ ID NO: 248821 - DNA, 201 bp, Homo sapiens
caggtatgtgctaacttaggggaaagctaaccagcttccagtttgtccccttcctgcagcaggaggtcctcctggaccatcccaggctctaggctgcccayggaggtctttccctgcagctcaccccagggtatgagtgccgtaatcctagaaggctgaggctgggctcaggtgcctcttgccccaggtaacccaagttca

SEQ ID NO: 248822 - DNA, 201 bp, Homo sapiens
taaatcaactattttaaatttgtctaaagaacttaaggaaaatgtgagaagagtgtctcaccaaatagagggaggccaaggcaggtggatcacgaggtcgrgagatcgagaccatcctggctaacacagtgaaaccccgtctctactaaaaatacaaaaaattagctgagtgtggtggcacgcacctgtagtcccagctac

SEQ ID NO: 248823 - DNA, 201 bp, Homo sapiens
ggttcaagctatcctcttgcctcagcctcccaagtagcttggattgtaaacatgcaccaccatgcctggctaatttttgtatttttagtagagacgtgttrgccaggctggtctcgatctcctgacctcaagtgaccacctgcctcagcctcccaaagtactgggattacaggcgtgagccactgtgcctggccttgagca

SEQ ID NO: 248824 - DNA, 201 bp, Homo sapiens
gggttcaagctatcctcttgcctcagcctcccaagtagcttggattgtaaacatgcaccaccatgcctggctaatttttgtatttttagtagagacgtgtkagccaggctggtctcgatctcctgacctcaagtgaccacctgcctcagcctcccaaagtactgggattacaggcgtgagccactgtgcctggccttgagc

SEQ ID NO: 248825 - DNA, 201 bp, Homo sapiens
agcgtcccctcaccctcggcagcagtgcgagcggaggcggcgatgtccgagggcccggggcggcccccctcggcactgctgttcccaccatggggcaaggscagcacccgcagttctactcgggctgtggcctcaccagcagggttggtggcgatgcaggtgtagcccccagcgtccccagcgccggtcaccccaatctct

SEQ ID NO: 248826 - DNA, 201 bp, Homo sapiens; identical to SEQ ID NO: 48806

SEQ ID NO: 248827 - DNA, 201 bp, Homo sapiens
gcatgtcgcgttctgccgcagcagggctgggagcatccccagggcaggcggaggtcggaggtggtgaggcctttcggcgaagctgaggcctggaacaaccyggtgggaagccatggagggggtcccctagcggaggctgggcgcgggccagtgcgcgtgcgcggctggaggctcagcgcgcaagcgtgcgcgtgatttggc

SEQ ID NO: 248828 - DNA, 201 bp, Homo sapiens
atctctttcctccccttcccctcaggcctagagagcgtggaccactatcccattctggtggcagtgacgggcatcctggtgcagctcctggtgcgtggccyagcctcagagtgagtgttggggaccgtgggcccctgtgggagttgggtgtgtctggtgaggaggggctggacagggcctcctggtacttcagtttcctca

SEQ ID NO: 248829 - DNA, 201 bp, Homo sapiens
accgtctgagcggggcctctaagtatgggtaggagacaggcggcctagggattccggttagcatgtcgcgttctgccgcagcagggctgggagcatccccrgggcaggcggaggtcggaggtggtgaggcctttcggcgaagctgaggcctggaacaacccggtgggaagccatggagggggtcccctagcggaggctggg

SEQ ID NO: 248830 - DNA, 201 bp, Homo sapiens
ggactctggcaggaacggcctttcagacgttttaaggaccgtctgagcggggcctctaagtatgggtaggagacaggcggcctagggattccggttagcaygtcgcgttctgccgcagcagggctgggagcatccccagggcaggcggaggtcggaggtggtgaggcctttcggcgaagctgaggcctggaacaacccggt

SEQ ID NO: 248831 - DNA, 201 bp, Homo sapiens
aattattatttactatagtcactctgttctgctaccagataggtctcattaattcaatttttttgtacgcattagccatccccatctccccacaagccctrtactacccttccaagcctctggtaaccatccagtactttgcctctatgagttcaattgttttaatttttagctgtcacaaataagtgataacatgcaatg

SEQ ID NO: 248832 - DNA, 201 bp, Homo sapiens
ggccccagctgtaggcaggtcagcccacacccggcggcagagcccagagaggctcgctcatctcagccgccagaagtgtcatcccagggaaggtgagcgargctgtccactaggactaaataggggtggaggtaacaggtagcagggactctggcaggaacggcctttcagacgttttaaggaccgtctgagcggggcctc

SEQ ID NO: 248833 - DNA, 201 bp, Homo sapiens
gaatcttggaaaaggccccagtcatggctgccttggcatctcttcccccaggactacgaggtacaagattgcctcaagcagttgatgatgtctctgcttcrgctgtaccgattctcacccattgtcccagacctgggcctacaggtgggagcccctacccctgccctgagccccctgggactcgcctgtccactctgaacg

SEQ ID NO: 248834 - DNA, 201 bp, Homo sapiens
ctcaccgtcctgggcacttccactgtggccccttgcgccaccactggcctgagaaccctcctgctcttcctcccagatgaccttgcttccaaagccaacaytgtgatcgacccactggagctccagtcaaccgccatggatgacctagatgaggatgaggagccagccccagctatggcccaggtgccgcagtgggggcag

SEQ ID NO: 248835 - DNA, 201 bp, Homo sapiens; identical to SEQ ID NO: 48850

SEQ ID NO: 248836 - DNA, 201 bp, Homo sapiens
tccaaaagtctatagaagtttgcatcctatttttatcatcaaatgttatcccgtgagtatttttccccattatcaatttatcttactgagcatctttaggkccagggggtctgctgtggcccataccagtgccctagtttggaaggacttttgcttttgtaaacaatgctgtgaggatgcccagggctggagtcgtgtggc

SEQ ID NO: 248837 - DNA, 201 bp, Homo sapiens
ttgtgcatctctgctcctacagctcagggctgggagtggcttacactggggaatatgtgatccctgagcctgggtagtggctactttgtcagggtgcttgrccaacctttgtccccttccagagctttctgtctgtgtggatgagtggggtaagaactggcattaaaggtggaagagcaggtggtggcaccctgtgggcag

SEQ ID NO: 248838 - DNA, 201 bp, Homo sapiens
tcctgtctccaggcagtgctagttccttctgagagtcagggagcagaggtcagggagcgggtgcacattcatgcccagctagcacctggcacctactccayacccagcatctgcccctgcatgtacctgccctcaccttggccccagcctggccccttgtagcttctgactgaccttgtaaagaacaaactcctccagggc

SEQ ID NO: 248839 - DNA, 201 bp, Homo sapiens
tgcaccaggtcctggacctcttgtggctcttcatggaggtgaggctcctgacctcaggcctcaggcctggctgtcagtcttcactggggtcgggaagatayggggagaatcttggaaaaggccccagtcatggctgccttggcatctcttcccccaggactacgaggtacaagattgcctcaagcagttgatgatgtctct

SEQ ID NO: 248840 - DNA, 201 bp, Homo sapiens
gaaatgtggctaaggcaactgagaaatcgaattgttaatttttaaaactttaaatttaagtaacctcatgtggatgacggctgctgtgttggacagcaccsctacacatcagtgaggccagcaccagggactcagtgcaggttctggagcagctgcagcagcaacatgatgtgagggatagatgcactaggaggaccaatg

SEQ ID NO: 248841 - DNA, 201 bp, Homo sapiens; identical to SEQ ID NO: 153729

SEQ ID NO: 248842 - DNA, 201 bp, Homo sapiens; identical to SEQ ID NO: 153732

SEQ ID NO: 248843 - DNA, 201 bp, Homo sapiens; identical to SEQ ID NO: 153733

SEQ ID NO: 248844 - DNA, 201 bp, Homo sapiens
ctacctcatgtgataccagagatggtcctactgctgctgctgctgctgtggccgccaggagagacagcaggtggtagggctgtcagtcagtggttgtgggsattcagggccctgaactgggacctaggagatccaaaaaggtcagggaagttgctggtcttggccaaatgggcagtgctgtaggcactcagtggtggctgt

SEQ ID NO: 248845 - DNA, 201 bp, Homo sapiens
gtacaatgacacgatcttggcttactacaacctctgccccaccaaggttcaagctattctcctgcctctgtctcccgagtagctgggattatacgcatgcrccaccacactcagctaatttttgtatttttagtagggatggggtttcaccatgtggccaggctggtctcgaactcctgacctcaggtgatctgcccgcct

SEQ ID NO: 248846 - DNA, 201 bp, Homo sapiens
ggaggtcggaggtggtgaggcctttcggcgaagctgaggcctggaacaacccggtgggaagccatggagggggtcccctagcggaggctgggcgcgggccrgtgcgcgtgcgcggctggaggctcagcgcgcaagcgtgcgcgtgatttggccctgaacggacgccgtagccaagaggttgggcggatgttgtgagccggg

SEQ ID NO: 248847 - DNA, 201 bp, Homo sapiens
cccagcatttttagtagagtcgcaatttcaccatgttggccaggctggtcttgaactactgacctcgtgatctgcccgcctcagcctcccaaagtgctggkattacaggcatgagccaccgcacctggccacatactttttttttttttttttttgagacagagtcttactcttgttgcccgggctgaagtacaatgacac

SEQ ID NO: 248848 - DNA, 201 bp, Homo sapiens
tcatcccagggaaggtgagcgaggctgtccactaggactaaataggggtggaggtaacaggtagcagggactctggcaggaacggcctttcagacgttttmaggaccgtctgagcggggcctctaagtatgggtaggagacaggcggcctagggattccggttagcatgtcgcgttctgccgcagcagggctgggagcatc

SEQ ID NO: 248849 - DNA, 201 bp, Homo sapiens
ctcagccgccagaagtgtcatcccagggaaggtgagcgaggctgtccactaggactaaataggggtggaggtaacaggtagcagggactctggcaggaacsgcctttcagacgttttaaggaccgtctgagcggggcctctaagtatgggtaggagacaggcggcctagggattccggttagcatgtcgcgttctgccgca

SEQ ID NO: 248850 - DNA, 201 bp, Homo sapiens
agcgcacgcgggacgcgggtaccttgaaggccaagcatacgtactcgcgcgcaaagtcgcgcacggcgctcaggccccgctggtgccagcgctgtagcagrtggtagaggcggcagtcgcaaggcaaagggttgttgtgcaagtagaggccgttcttgaggaaggccggcagcgcggccagctcaggtacggagatgtgtc

SEQ ID NO: 248851 - DNA, 201 bp, Homo sapiens
gctcctgtacgttgcctatggccaagctgccgtcggccagcaccgcgatgctgccatcgcgggatcctggcgccctgagaagctcctgctgcggcgaaacycaggcaatgcgcatggccgggacgctggtgttgcagtaaagcctcagggaccgacccaccagcgcgtacaggtgctcttccggccgctctaggccaagag

SEQ ID NO: 248852 - DNA, 201 bp, Homo sapiens
acccagagggtgggaactgggtttggttcccatggcaggggctgggggaaggtgcagcactgagccagcccagtctgggcctgcattctcagctcagcacmgcctcacttttccctctctcaaagggtgaagcttctaggtatatcttcctgaccaagtttcgcaagtttctgcaggagaacgccagtggccggggggtag

SEQ ID NO: 248853 - DNA, 201 bp, Homo sapiens
gggagcatccccagggcaggcggaggtcggaggtggtgaggcctttcggcgaagctgaggcctggaacaacccggtgggaagccatggagggggtcccctmgcggaggctgggcgcgggccagtgcgcgtgcgcggctggaggctcagcgcgcaagcgtgcgcgtgatttggccctgaacggacgccgtagccaagaggtt

SEQ ID NO: 248854 - DNA, 201 bp, Homo sapiens
tgaaatgtggctaaggcaactgagaaatcgaattgttaatttttaaaactttaaatttaagtaacctcatgtggatgacggctgctgtgttggacagcacsgctacacatcagtgaggccagcaccagggactcagtgcaggttctggagcagctgcagcagcaacatgatgtgagggatagatgcactaggaggaccaat

SEQ ID NO: 248855 - DNA, 201 bp, Homo sapiens
cgtctgagcggggcctctaagtatgggtaggagacaggcggcctagggattccggttagcatgtcgcgttctgccgcagcagggctgggagcatccccagrgcaggcggaggtcggaggtggtgaggcctttcggcgaagctgaggcctggaacaacccggtgggaagccatggagggggtcccctagcggaggctgggcg

SEQ ID NO: 248856 - DNA, 201 bp, Homo sapiens; identical to SEQ ID NO: 153749

SEQ ID NO: 248857 - DNA, 201 bp, Homo sapiens; identical to SEQ ID NO: 48877

SEQ ID NO: 248858 - DNA, 201 bp, Homo sapiens
gatgaggaatgggcaaggcactggactggcaccaatgcatgtttcatgcctggtgtccacagaacatgcccatgctctgcccccctgagtacatggtctgyttcttacaccggctgatctctgccctgcgctactattgggatgaatacaaggcttccaatcctcatgcttccttcagtgagggtgagtggcaccggggtc

SEQ ID NO: 248859 - DNA, 201 bp, Homo sapiens
gcactcagtggtggctgtctcaggccgactgcccacagatatgtgcagtctgctctcaggatcaggcacacgacttttggggtcaggtacaagagtagctrctccaagtgtgggcttgttaagaactgttttcttttgagacagggtctcgctatgtcacagtcatagctcactgcaacctcaaagtcccaggctcaagga

SEQ ID NO: 248860 - DNA, 201 bp, Homo sapiens
gaccaactggatcctggtgcggctctggagggtaagcctgactcgaggggaagtggctgaggctggctggagggagagggtgcgctgtcccattgacctgrgcactgacccccacctccacagggctgtggcttcgggtaccgctatacacggctgccacatctgctgaaaaccaaacttgaggacgccaatttgcccagc

SEQ ID NO: 248861 - DNA, 201 bp, Homo sapiens
atcccctcagaactgcctaggaccctaactaacctggactgccctctggagaagaaacgtgtcccacccaatcccaggcaccccagctcagagaatacctsttactctttccctcagatcatctgttcccttctgtagagccatatgcatccaaggctggtgattggtgggctctggcccagaccctgcctgcctcaccag

SEQ ID NO: 248862 - DNA, 201 bp, Homo sapiens
ggtgcccatgtctaggtgggacttggggaaccctggtggtggagccctggcccaaacctgccccccatctcctggagcctgagggccatgttcctcacctsacctccagtggtggaagaactacaggtccagatcctgaagctgctgctggacaataaagatgacaatggggtgagtgactcccaggagccctgggtgggg

SEQ ID NO: 248863 - DNA, 201 bp, Homo sapiens
aggtcctttgtccttgtggctagtctcccttgggtggttctggaaacgcagctggggttcagagtcagcaggctgctgggcttctgtgcatctggtgaggmctcctctcatggcaggcgtgggcagcgggggacatcgtgagctgcctgattgacctggatgatggcactctgtccttctgcctgtgagtttcctatctct

SEQ ID NO: 248864 - DNA, 201 bp, Homo sapiens
atggcctacttcccagccatcagcctctctttcaaggagtccgtggccttcaactttggcagccgtcctctgcgatatcattttgtgaagatggctgtggrctgctcagaagctcttggggaggctgggatgaggggctccctaccccaggggtgccatgggctggtggcaggccctggctgctgcagagttagtgggggg

SEQ ID NO: 248865 - DNA, 201 bp, Homo sapiens
aggagagctccaagtggcggttgcggggccagcccaccgtcctcctcacactggcccacatcttccatcactttgcaccgcttctggtgagcggcattggraggggcatgggaggggaggagacaggccatgctagacacgcccgtggtagatgtgccctcactgagggctgcagtgctgaggtcccacagcatcacctgg

SEQ ID NO: 248866 - DNA, 201 bp, Homo sapiens
gtttttacagatgaaggaattaagacttagagagggctactttttttttttttttttgagacagagtcttgctctgtcacccagactagagtgcagtggcrcgatcatggctcactgcaacctccgcctcccaggttcaagcaattctcctgcctccgcctcccaagtagctggtattacaggcacatgccaccgcgccca

SEQ ID NO: 248867 - DNA, 201 bp, Homo sapiens
ggtagagacagggtttcactttgttggcgtggctggtctcaaactcctggcctcatgtgatcctgccacctcggcctcccaaagtgctggggttacaggcrtgcgccactgtgcccggtcacccatcatagccatttttaagtgttaagtctattcacattgtcgtgcagccaatctccacactcatttcatcttgcaaaa

SEQ ID NO: 248868 - DNA, 201 bp, Homo sapiens
gagccgggtcgctgcggccgaggctccgggtgagtgaggggcggcagggctctgagcctggcgggttccggctattcccttcgcggtccgggctagtccastgcgagggcacctgcagcgcagggatctgggtgcgaaactccgagcggaagctggtctggcaggtcctgtggagcttggggccaggcgggggcgacttgg

SEQ ID NO: 248869 - DNA, 201 bp, Homo sapiens
taagtctattcacattgtcgtgcagccaatctccacactcatttcatcttgcaaaactgatactccgtgcctgttgaacaaaacctcctgtcctcccttcyccagcttccctgacagctcccacccatccccacctgtcagcagatccctgggtctggcagctgggggagcagtggttctggcatcaggtccctgagtgct

SEQ ID NO: 248870 - DNA, 201 bp, Homo sapiens
gcccttttctcccttctgacttgtggctcaggcattgtgcaggagaagctgctgaatgactacctgaaccgcatcttttcctcttctgaacatgcaccccsagcagccaccagcaggtatggctgggtgggtggcccctcctcactctgctgggccagaccagaataaggaggctgcagttgtagggaaagggagcctggg

SEQ ID NO: 248871 - DNA, 201 bp, Homo sapiens
caactttgggccgagccaaccgcttcctcagcacagcggctgtgagcctcatgaccccacggcggcctctgagcacctcggagaaagtgaaggtccgcacrctgagcgtggagcagaggacccgtgaggacagtaggtgcttggtggggtcaggcaggtccccgaaggacccttccacagtgtacagtccccgatccgggc

SEQ ID NO: 248872 - DNA, 201 bp, Homo sapiens
aggctggagtgcaggggcacaatctcagctcactgcaagctccgcctcccaggttcatgccattcttctgcctcagcctcccaagtagctgggactgcagrtgcccgccaccatgcccagctaattttttgcatttttagtagagacggggtttcaccgtgttagccaggatggtcttgatctcctgagctcgtgatccgc

SEQ ID NO: 248873 - DNA, 201 bp, Homo sapiens
tttgtgcatctctgctcctacagctcagggctgggagtggcttacactggggaatatgtgatccctgagcctgggtagtggctactttgtcagggtgcttrtccaacctttgtccccttccagagctttctgtctgtgtggatgagtggggtaagaactggcattaaaggtggaagagcaggtggtggcaccctgtgggca

SEQ ID NO: 248874 - DNA, 201 bp, Homo sapiens
agctgagctcaggacagcactgactggcattagacagtacccttttccctctaggcctgtgtgttgagaggatgagggggccacccagacagatttttccmaactcctttggctcgggtaggtgggtcatgtgctccgctgaccatttatggactggcgggtacaggacagagccatccagcagctcagagggctgagcct

SEQ ID NO: 248875 - DNA, 201 bp, Homo sapiens
tggccttggtactgaccactttgggaaccagcatttctcccagccttcttcttccagacatcatcagcacagccacctttgagagcggacaggttatgtgstatgcagacagcacttgttattccctgggctcttcacagcatctctaacataagtcactattctgtttttacagatgaaggaattaagacttagagaggg

SEQ ID NO: 248876 - DNA, 201 bp, Homo sapiens
tgtttttacagatgaaggaattaagacttagagagggctactttttttttttttttttgagacagagtcttgctctgtcacccagactagagtgcagtggygcgatcatggctcactgcaacctccgcctcccaggttcaagcaattctcctgcctccgcctcccaagtagctggtattacaggcacatgccaccgcgccc

SEQ ID NO: 248877 - DNA, 201 bp, Homo sapiens
tggccaggctggtcttgaactactgacctcgtgatctgcccgcctcagcctcccaaagtgctgggattacaggcatgagccaccgcacctggccacatactttttttttttttttttttgagacagagtcttactcttgttgcccgggctgaagtacaatgacacgatcttggcttactacaacctctgccccaccaaggt

SEQ ID NO: 248878 - DNA, 201 bp, Homo sapiens
gtgtgtgccaggtgctgtcctggaactagggacacacacacattaataagtcagaaagatgagcctctgccttctgaaggcactcagcctggtcagatacrtggatggacagacagatggatggggcactcctgctgtgactgaagtttcacccccaggcctcagactctctggacttgtttcctctccctgcccctcttg

SEQ ID NO: 248879 - DNA, 201 bp, Homo sapiens
gggctgtggggagggtcttcctactgggccgtgaccactggcctagcctcctcaattcctcgcagaggcctacatcccgccccaggtcttctataatggcraggtggactactttgacctgcagcgcctggggggcctcctctcgcacctgcggaagaccctcaaaggtgtgtacaggcctgtgggccgggagcagttctg

SEQ ID NO: 248880 - DNA, 201 bp, Homo sapiens
aggtgatggaaccattcaggctgaggcagaagcagaaaaggggtctctagtgtgagccctaggagccctggtctgagacctctgtggcccagcaacacacwtctgtggggggcggggaggggaggagcttcctctgtggttcaccctgcagcaaacaaacgtctgcaccctgccctgggacctgcagccacagagccaaca

SEQ ID NO: 248881 - DNA, 201 bp, Homo sapiens
ctccccctccccagccttgcccacagtcttacctacatgtgccctttgggcctggatgctctatgtgggtcatggtgagaggcggcaccatgttcctggcmtgctacagctcatgcagactgaatactctgtcccttgccctttaagctagctccctgacctccagccttgtcccagcaccatgtccttctgcttcttttt

SEQ ID NO: 248882 - DNA, 201 bp, Homo sapiens
tctgctaagtcacacagcaagtccttgccaattgccgtggtcctgcgtccagggcggaactgagctgcaagtggagagcggcagtggggccaggcctgtcytgctgctgcgggaactattgatttgtatcaagctggtggggaggtgcgccaggcccgttgcagctgagggctccggttactgctgcctgccagcccagac

SEQ ID NO: 248883 - DNA, 201 bp, Homo sapiens
gtgctctgcagtctcggctcacccttctgtagagagggcagtgggcaggcctggagcccttgaagcaggagcgtgtgggtggctcatctctttcctccccytcccctcaggcctagagagcgtggaccactatcccattctggtggcagtgacgggcatcctggtgcagctcctggtgcgtggcccagcctcagagtgagt

SEQ ID NO: 248884 - DNA, 201 bp, Homo sapiens; identical to SEQ ID NO: 48878

SEQ ID NO: 248885 - DNA, 201 bp, Homo sapiens
gctctgtgcctgaggcttgtgccttggccatgtgccagggcaggggtgccttgaccagagtggaaggccaccacctcaccagtgcctggccttggtgcagygcaaggtgtatctggtggaggctgtgctcatgagcttcttgctgggcatcgtggagaagggcacacccacacaggcacagtccgtggtgcaccaggtcct

SEQ ID NO: 248886 - DNA, 201 bp, Homo sapiens
gagatgctgctgcggcgtcttgcacaggtgtggccatctgggcaacaagggtgggaccctggggatgccccattgatgacgctccccatccaccaatggaytcctgctcccctcacagctgctaaaccaggtgctgaaccgggtgacagctgagaggaacctgtttgatcgtgtggtcaccctacggctgcctggtgagga

SEQ ID NO: 248887 - DNA, 201 bp, Homo sapiens
aaagtgaaggtccgcacgctgagcgtggagcagaggacccgtgaggacagtaggtgcttggtggggtcaggcaggtccccgaaggacccttccacagtgtmcagtccccgatccgggcaaagccaaaatacaccccatgccctcccagccctgtggcctggcagcatcccaggagtgcaggaagcacactccgagggcagg

SEQ ID NO: 248888 - DNA, 201 bp, Homo sapiens
gatgggctcctggggaaggactcttgagggtgtgcagagtgccctttggcaagcagagccctgccttgacacccgccagcttcgacgtgctccgctccgtygtcttcttttacatcaagagccccctgcgtgtggaggaggccggcctgcaggagctcattcccaccacctggtggccccactgctccagtagggaggtga

SEQ ID NO: 248889 - DNA, 201 bp, Homo sapiens
tagagatggctgagcgcgcgcaggccgtggaaggcatgctcgtccaagtgcaccaagcggttattgaacagaagcagcttctccagcgcccccagcccgtygaggtcgtggcggccaagcgcccgcaacgtgttagatgatagatcgagcagcctcaggccgctggcgttgacgaagacgccgcgacccagcgcatctagt

SEQ ID NO: 248890 - DNA, 201 bp, Homo sapiens
aggcctcctctcatggcaggcgtgggcagcgggggacatcgtgagctgcctgattgacctggatgatggcactctgtccttctgcctgtgagtttcctatytctatgcacaggcctggcccctggggcctccccagactgcccccagtttcctgggccctgtaaggggccagactgagtttgatagcctgagggtgggcag

SEQ ID NO: 248891 - DNA, 201 bp, Homo sapiens
ccgccgtcttgcctgggtccatgccactgtctactcccaggtgtgctggtattgcagctgccccttcccgacctcactgtctggccacgggtctagcaagrttgtgccagggcccttgatgcccccaccctctcaggcctctggcacacacatgtcccttcccacacttcagactccatcaccccatgccatgtcccctgt

SEQ ID NO: 248892 - DNA, 201 bp, Homo sapiens
tgtcccattgacctgggcactgacccccacctccacagggctgtggcttcgggtaccgctatacacggctgccacatctgctgaaaaccaaacttgaggaygccaatttgcccagcctccagagtgagtatctgggttgggcgagtcctgggcaaggcaggcgggggcgcttacctcctacccatgggttctttcagactc

SEQ ID NO: 248893 - DNA, 201 bp, Homo sapiens; identical to SEQ ID NO: 153787

SEQ ID NO: 248894 - DNA, 201 bp, Homo sapiens
caaaagttatgctctctccttctttctctgtcttagctgctacatcttccccttcatctccctccagcacaggctcttccccatctctgaaatagtctcaycagggtctctgtctgcccccatctcaatccggccggcacatttccatctcctttgcattgataccttagctctgatggggccattgccagcccctcacca

SEQ ID NO: 248895 - DNA, 201 bp, Homo sapiens
gcagggtctcactatgttgcccagttgtcaaactcctgggttcaaggaatcctcctgcctcggcctcccaaagtgcggggattataggcatgagccaccayacccggcaatttctacttttttaatagtaaatcctaatgggtaggatatggtaccttattgtggttctgcattttgctaatgattagtgacattatgaca

SEQ ID NO: 248896 - DNA, 201 bp, Homo sapiens
tctttctgtccttataccaaagcctcaatgggcgaggacagaggcaaacaggcagaggccactgcagtggagtccctgatgatgccgcctcctgtccccckgcagagccctgcccttccaccctgctgcagcagcacatggcggacctcctacagcagggtcctgatgtggcacccagcttcctcaacagcgtcctcaatc

SEQ ID NO: 248897 - DNA, 201 bp, Homo sapiens
acattctgcccccggacagccagacttggtgctctgcagtctcggctcacccttctgtagagagggcagtgggcaggcctggagcccttgaagcaggagcrtgtgggtggctcatctctttcctccccttcccctcaggcctagagagcgtggaccactatcccattctggtggcagtgacgggcatcctggtgcagctcc

SEQ ID NO: 248898 - DNA, 201 bp, Homo sapiens
cacctgggtcctcagcaactgactcccggagcccactccgggtgtctggaaggtctgctcatcaaatgaatgactgagtttaatcagatcttcaactactstggtagtgaaggggcaccgatcatggacgcccaccgagggcccgaggtcgggaaaatcaccttcccgaggagcaggcgtggtgcagacccacaagggttt

SEQ ID NO: 248899 - DNA, 201 bp, Homo sapiens
tgcgcaacccagcagcaccccgtgtgcctcctgcaggagaagatgctggacatctactggctgctgcgcgtctgcctgcggaccattgagcacggtgatcrcacagggtctctctttgccttcatgcccgagttctacctgagcgtggccatcaacagctacagtgctctcaagaattactttggtcccgtgcacagcatg

SEQ ID NO: 248900 - DNA, 201 bp, Homo sapiens
agccctgggcagtctaggttgtcatgggaccctcggagcctatggagctggcggactcagagccagccttcagctgcaggcctccagggttgtagagatcraattcctcagctactgccagctgcacgcggccattgaggcccctccggcctggctccagaaagactacgtgcttgtggacgctggccttgcggctgggtg

SEQ ID NO: 248901 - DNA, 201 bp, Homo sapiens
ggacacctcactttggacattttggtctgatttccacagagctgagacattttgttatggttcggcaaaaatatatctagtacctgctctctgcccagccmtgtgctgggcacagggacactggagaacaagaagtggtccctgttacatgggcctagaccctggctaccctccctgtgtaggaagctgggagcccctgca

SEQ ID NO: 248902 - DNA, 201 bp, Homo sapiens
ccacccatccccacctgtcagcagatccctgggtctggcagctgggggagcagtggttctggcatcaggtccctgagtgctctggccagcggctcacagacccccagctgggccttacttccatgtcatgaggggaccaccatggccctgttctgaggctagctcaggttgcccctggcaaccaccatcctactttctgtc

SEQ ID NO: 248903 - DNA, 201 bp, Homo sapiens
cacgcccagctaattttgtatttttttttttttgagacagagtctcactctttcacccaggccggagtgcaatggcgctatctcagctcactgcaagctcygcctcccgggttcacaccattctcctgcctcagcctcccgagtagctgggactacaggcgcctgccaccacgcccggctaattttttgtatttttagtag

SEQ ID NO: 248904 - DNA, 201 bp, Homo sapiens; identical to SEQ ID NO: 48876

SEQ ID NO: 248905 - DNA, 201 bp, Homo sapiens
ggtgggtcatgtgctccgctgaccatttatggactggcgggtacaggacagagccatccagcagctcagagggctgagcctttcatacttccagaacatgkcccattcaacacagactcccctggctgggtggtggcgagactggaatctgccccaaaggaaccacaggcctaggggcaagggttggactaggtggccttg

SEQ ID NO: 248906 - DNA, 201 bp, Homo sapiens
tggcggtgtggtgctgagtactgaggactgtgcgctcagctcttggagcgggctgggtgtttggggccagcggcggcagcggcaggcacggcggcagcagyggcagggtggggcgaacaggtagagcagcacgagcacaaggcccacggcacagcccagcagtgtggtgaagcctgtgttgaaagcctcgggctctgggcg

SEQ ID NO: 248907 - DNA, 201 bp, Homo sapiens
tttacaagtttaatacttttaagtgtagtcagtataaaagttacaagtacattttagcagaaacttagagggccaggcacagtggttcacacctgtaatcscagcactttgggaggccaaggtgggtagattgcttgagtccaggagttcaagaccagcctgagcaacatggcaagaccccatctctacaataaaatacag

SEQ ID NO: 248908 - DNA, 201 bp, Homo sapiens
ggatgcccagggctggagtcgtgtggctagagtgtttgaactgcagtcacttttaagactgttgccagattacttcttcaaaggatcaagtaggttctccstccctgcagtgaggcacggttgtccctgtctctcaccccctcatcagccttagctgttctgtcttttacgacttctgccctttaggcaggtccaaaaggc

SEQ ID NO: 248909 - DNA, 201 bp, Homo sapiens
ccggcctgcaggagctcattcccaccacctggtggccccactgctccagtagggaggtgagtgcaccccaagtgggatgggcagaggtcatggcaaggccyctggcctgggcatctggccactgggcatctagcatgaggccttttcactggccctggtccctgaagccctggagatggagtgtgggtgttctgagtgaag

SEQ ID NO: 248910 - DNA, 201 bp, Homo sapiens; identical to SEQ ID NO: 48880

SEQ ID NO: 248911 - DNA, 201 bp, Homo sapiens
tgccgcagcagggctgggagcatccccagggcaggcggaggtcggaggtggtgaggcctttcggcgaagctgaggcctggaacaacccggtgggaagccayggagggggtcccctagcggaggctgggcgcgggccagtgcgcgtgcgcggctggaggctcagcgcgcaagcgtgcgcgtgatttggccctgaacggacgc

SEQ ID NO: 248912 - DNA, 201 bp, Homo sapiens
tgagtgaggggcggcagggctctgagcctggcgggttccggctattcccttcgcggtccgggctagtccagtgcgagggcacctgcagcgcagggatctgrgtgcgaaactccgagcggaagctggtctggcaggtcctgtggagcttggggccaggcgggggcgacttgggggagccatgcgccgccctcgccgtccttg

SEQ ID NO: 248913 - DNA, 201 bp, Homo sapiens
tagggaaagggagcctgggctctggacagataggcttaggctctgttctcactgtgctcctggctgcgagatctctggccagagagtctgccttccgtackctgcttcttcctgtctccaggcagtgctagttccttctgagagtcagggagcagaggtcagggagcgggtgcacattcatgcccagctagcacctggcac

SEQ ID NO: 248914 - DNA, 201 bp, Homo sapiens; identical to SEQ ID NO: 153822

SEQ ID NO: 248915 - DNA, 201 bp, Homo sapiens
gttagtttgctggtgccttaaccaactcaaggcagggactgtatcaggagttattcttcatcatcatgcatttgcaataaatatccttgatgaagcagtasaaattaataaatcttggtccctgaatacatgcctttttaatattttgtgtggcaaagtaggaagtgcatataaagtgcttgtgctgcattgctgcatact

SEQ ID NO: 248916 - DNA, 201 bp, Homo sapiens
cggagtcaaatcattatgaaaatatatgtgacgtgatttgttgaaatgtcaaggagacattgcctagtaaaaccaaaatgacccattatttttagtattayttaatactgatgattaagtattaaattgaaaaacattgcagacaatcccctcaacctgtgtcagaattcatattgagagagatacagaaactgaattgaa

SEQ ID NO: 248917 - DNA, 201 bp, Homo sapiens
agcttacaatttagtagaacttagattctttttaatcagcatattgctgaccagttttatgaaggactctgtgctgttcactatggtagtcataagccacrtgtagctattaaaattaaataaacttaagttcatgaccagaatggccaacatggtgaaaccctgtctctactaaaaattcaaaaattaatcaggcgtggt

SEQ ID NO: 248918 - DNA, 201 bp, Homo sapiens
ctgtttctgttctggagtttttttgtgaattaactcaaacaaccgtttgaaattggtggtgttattaccaccagcatttgacagcgaggaattgggcacaragaggttaagtcatctgccagtggtctcataactaggaaatggtggagccagggttggaagcaatgcaacagcttgtgttgtctcaaatgaaatgctttc

SEQ ID NO: 248919 - DNA, 201 bp, Homo sapiens
atttgcttgctttattttgttaggagtaaacagaaagtagcctgtgtttagtcccaaagatagcagtgattttgaataaaggagttttgtgttgcctggayatatgaatttctgtaaataacttctgttggttaaacatgttaaaacaacaacaacaacaacaaaaaacttctgtctctatattcaggacgttcagatgtc

SEQ ID NO: 248920 - DNA, 201 bp, Homo sapiens
gtttctgttctggagtttttttgtgaattaactcaaacaaccgtttgaaattggtggtgttattaccaccagcatttgacagcgaggaattgggcacagaraggttaagtcatctgccagtggtctcataactaggaaatggtggagccagggttggaagcaatgcaacagcttgtgttgtctcaaatgaaatgctttctg

SEQ ID NO: 248921 - DNA, 201 bp, Homo sapiens
aaaaaaaccctggtttgtatgtttgccaatttctttggtgtgaaaatacctaccatagccccttttgagccatcagtagtttaataactggctcacagaartcttctatatttaactatctgctcagccagctagctccagcctaccattgcaagttgaaatatatttttgctatagaacgtcatagccacaaatgttatt

SEQ ID NO: 248922 - DNA, 201 bp, Homo sapiens
aattttttaaaagaaaaacatttgtattatgagaaaaggacaaaagagaaaatgagactttatttttggccttatggtgaatagtctgttctgtatagctrcattttatacataataattatgtactgactgaagtcagtggtacgctgataaactggcctggccaaaaagtaacagagaaggaaaaaaaccctggtttgt

SEQ ID NO: 248923 - DNA, 201 bp, Homo sapiens
gtgacgctctagccttgccggggactcgtgggtaacttgcttttgggagccagcggtatggcgtcgggctgcaagattggcccgtccatcctcaacagcgrcctggccaatttaggggccgagtgcctccggatgctagactctggggccgattatctgcacctggacgtaatggacgggtaactcctccgggctccggtc

SEQ ID NO: 248924 - DNA, 201 bp, Homo sapiens
acccaggggctttgattaaagacattcgggagaatgggatgaaggtaagaaatcgtgatgagagtgttttgtaacattcactctcagttgggaagatttgygggaaacaggaaattttctctttttttgatacagtcttgctctgtcacccaggctgaagtgcagtggcacagtcagggcccattgcaggtaaagaatacc

SEQ ID NO: 248925 - DNA, 201 bp, Homo sapiens
gtgagacaattggagttttaattgctaatatttgctgttggatttttttgtttgattgtcccccacccccacccccaccaacatacccactttaggagttwcttatttcctcatgtatatatctaggttcactggttgaggacccagttcccatctttggatatagaggtcgatggtggagtaggtcctgacactgtccat

SEQ ID NO: 248926 - DNA, 201 bp, Homo sapiens
agttttttagagtggcatttcctggacctggacctagatttcctgatttttagatgttaactttttatatacagcactgtatgctttttgtgggaaaatartgttttttgtaaatgaatttaaataaatccttgtcttcaaaataagaggaaactacctatactgaattagaactatttaaataatgatttgtgtgatggc

SEQ ID NO: 248927 - DNA, 201 bp, Homo sapiens
gcataccaccatgcccggctaattcttacacattttagtagagaggaggtctcactacgtacccaggctggtcttgaactcctgggcttaagctgtcctcscaccttggtctgccaaagtgttgggattacaggtggcagccaaccacgcctggaagtcttgaaatttccttttgaaactattatctctaacttttagatc

SEQ ID NO: 248928 - DNA, 201 bp, Homo sapiens
atgtatatatctaggttcactggttgaggacccagttcccatctttggatatagaggtcgatggtggagtaggtcctgacactgtccataaatgtgcagargtgagattgctcttcaactatgactagaccaatttcccgtcaaatatgtctccaggacattgtctcatgggccagcgattccctctgtggttcctaagtt

SEQ ID NO: 248929 - DNA, 201 bp, Homo sapiens
agacttcggtaggctacagatgagttcgtaatactttccatttgccatagcttagtaccagtagtcttaatgttttattcattcaggagtttttatggatygtccattgtggagtacatactattctaagaagatgttaatatcagataaaagtaaaactaataatcttagacaagtcagcattaatttaatgaatgactt

SEQ ID NO: 248930 - DNA, 201 bp, Homo sapiens
atatctctcaggatattgattagaagtttacttctgttagtattttctgtatatcttccaagttctttttttttttttttcctgttttggttcccagttastgtgtgtgtgtgtgtgtgtagtaaatatatatatgtatgcgtttacttactgcccttattttagtacaagtgttttaaaatgagaatatttcctgcataa

SEQ ID NO: 248931 - DNA, 201 bp, Homo sapiens
agctataaccaaatattaatgaacttttagcttcatagttaaaaataagttgtatgaatcaaatatattgttttctaacaagatagttataaatgtctgttaatatgtgctagtaaggctgttatagattagcaaaatataaattattttcaaaatcaggtgtttttatttttaaagctattttagagttcaacatatgga

SEQ ID NO: 248932 - DNA, 201 bp, Homo sapiens
atttctgacttttgggggaaaaaaaaaaacagttcaaagacttgctagcactgggccctcagtcttaccaggtgacatgcgctggagctgacaggggcagyctcacctttagtcatgtggggtgtacttcatttggcccctttccctatctgctctgttttgctctttgatgttacctaactctcagcagcattgagtttg

SEQ ID NO: 248933 - DNA, 201 bp, Homo sapiens
aagctataaccaaatattaatgaacttttagcttcatagttaaaaataagttgtatgaatcaaatatattgttttctaacaagatagttataaatgtctgttaatatgtgctagtaaggctgttatagattagcaaaatataaattattttcaaaatcaggtgtttttatttttaaagctattttagagttcaacatatgg

SEQ ID NO: 248934 - DNA, 201 bp, Homo sapiens
gaagctataaccaaatattaatgaacttttagcttcatagttaaaaataagttgtatgaatcaaatatattgttttctaacaagatagttataaatgtctgttaatatgtgctagtaaggctgttatagattagcaaaatataaattattttcaaaatcaggtgtttttatttttaaagctattttagagttcaacatatg

SEQ ID NO: 248935 - DNA, 201 bp, Homo sapiens
agaagctataaccaaatattaatgaacttttagcttcatagttaaaaataagttgtatgaatcaaatatattgttttctaacaagatagttataaatgtctgttaatatgtgctagtaaggctgttatagattagcaaaatataaattattttcaaaatcaggtgtttttatttttaaagctattttagagttcaacatat

SEQ ID NO: 248936 - DNA, 201 bp, Homo sapiens
tgtttaaatttttaacacataaaaagaagctataaccaaatattaatgaacttttagcttcatagttaaaaataagttgtatgaatcaaatatattgttttctaacaagatagttataaatgtctgttaatatgtgctagtaaggctgttatagattagcaaaatataaattattttcaaaatcaggtgtttttattttta

SEQ ID NO: 248937 - DNA, 201 bp, Homo sapiens
atgtttaaatttttaacacataaaaagaagctataaccaaatattaatgaacttttagcttcatagttaaaaataagttgtatgaatcaaatatattgttttctaacaagatagttataaatgtctgttaatatgtgctagtaaggctgttatagattagcaaaatataaattattttcaaaatcaggtgtttttattttt

SEQ ID NO: 248938 - DNA, 201 bp, Homo sapiens
ggccaggctggtcttgaacacctgcccttgtgatctgccaccttgttctcccaaagtgctgggattacaggtgtgagccaccatgcccggccccggtttgktaaagatttaagtgaactagtgatagaacaaaaagattaactggagtagggtaaaggataagtaccgtgggtctggtagacttgatttgtttttgttttt

SEQ ID NO: 248939 - DNA, 201 bp, Homo sapiens
tattttccttctaattcgttactgtcttgtaaggttttcatggacccttgaaaccgtaggaaatgtatgacaattctacacatcctcttcacctgttctaytgataaacctcccagcctttcagttcttgctctcccaatcctctcctagagttcatcctaagatcacactttcatagcatttctcatatatcctgtcttt

SEQ ID NO: 248940 - DNA, 201 bp, Homo sapiens
aattcaaaaattaatcaggcgtggtggcaaacacctataatcccagctactcaggaggctgaggcatgagaatcacttgaacctgggaggtggagattgtrgtgagctgaggtcattccactgcactccagcctgagtgacagtgtgacactccatgtcaaaaaaaaaaaattttttttaaattaaataacataaacttaa

SEQ ID NO: 248941 - DNA, 201 bp, Homo sapiens
aataggtaatagagttatcctttttttttttttttttgagacagtcttgctctgtcacccaggctagagtgcagtggtggccttcatacctcactgaagcytcagtcttgatgggctccagcagtcctcccacctcacctctcccctccagtagctgggactgcaggggcacactaccatgcctagctaattattctgttg

SEQ ID NO: 248942 - DNA, 201 bp, Homo sapiens
agtaactggtttgctgtttcaagcctccaagagtaccttaaacaaggtgatagctcctctcttctttagcattatattcctttagtcaacaaagaactttstccactctgctgcccagctctgagagtatctgagatgagaataggatgtgtgtggaggggcttttagggaagaaagggtcataaatgaatagaagtacag

SEQ ID NO: 248943 - DNA, 201 bp, Homo sapiens; identical to SEQ ID NO: 48938

SEQ ID NO: 248944 - DNA, 201 bp, Homo sapiens
gtgtgtggcccacatataagtttggtttttattagcactcattctacctgtcatctaactgtgagaccttaaacatagtttgtattttaactcccctcccmcacacctaatcatttaaaagatccaatcagttttgcctgtcttgtcattcttagtgttccttgccacttaccaagtggcaattgcagtcacctaccctct

SEQ ID NO: 248945 - DNA, 201 bp, Homo sapiens
tcaaagaagattgttaaatattcaacaagaatcataaatacctttatatgtattttaaaagtattgggctgttctgaacatgattatgctggtctgtctgycttttagcctgactccttcactcttgtgtgtgaagtctattagcaactttcaataagctaagcaatgttgtaacttgcaaaaaagcctccactctgagaa

SEQ ID NO: 248946 - DNA, 201 bp, Homo sapiens
tatgctgtttcatgtttgtagactcatagatgttttgtgttattagtggctgttctggattataaactcccatgagaggttattttaaaatcagaattttwaatttttaatatttatcactactgcttatatcctcactttaacctacctaatgctgtttcactcaaatgtcttttctttcttccctgtaacagttgtgca

SEQ ID NO: 248947 - DNA, 201 bp, Homo sapiens
cttgtgctcttcaaaggggataataatagcatctactttgtaaggctgtcgtgaagatgaaatgaagtaaattacgatgcttggcatgtagtaaaccctcrgtgaaaggtggtcgttactaataaacacatcatgtttctttattagtcatctttaagaaagtttaaagaaactgtcatttagtgccttgtgatagaagtg

SEQ ID NO: 248948 - DNA, 201 bp, Homo sapiens
atcttaagatatgaggagaaagaaatagcagctaactttggccatgtagcaggtgctattcttcattaatcaggtttgtttcgtaatgaaactttgatagyacttccactctctaatagataaataagtacttggaagttcgtattgacttgttacacaaggtgattatagttagtagtggacacaaaatgctgcaataca

SEQ ID NO: 248949 - DNA, 201 bp, Homo sapiens
atatattttgaatacaagctcattctatgtagtattttacttctggtgcacaatagctgatgttacaacagcatgttttcctttttactggtctcacccaraattcatgcagaggttttgttcatttcacatggattctatggcttggggttttaaatttgtaacctgcctgctgtttcttctgtgccacttgctttgctc

SEQ ID NO: 248950 - DNA, 201 bp, Homo sapiens
aaattaaataaacttaagttcatgaccagaatggccaacatggtgaaaccctgtctctactaaaaattcaaaaattaatcaggcgtggtggcaaacacctrtaatcccagctactcaggaggctgaggcatgagaatcacttgaacctgggaggtggagattgtagtgagctgaggtcattccactgcactccagcctgag

SEQ ID NO: 248951 - DNA, 201 bp, Homo sapiens; identical to SEQ ID NO: 48936

SEQ ID NO: 248952 - DNA, 201 bp, Homo sapiens
ataatgtttaaatttttaacacataaaaagaagctataaccaaatattaatgaacttttagcttcatagttaaaaataagttgtatgaatcaaatatattgttttctaacaagatagttataaatgtctgttaatatgtgctagtaaggctgttatagattagcaaaatataaattattttcaaaatcaggtgtttttatt

SEQ ID NO: 248953 - DNA, 201 bp, Homo sapiens
gtgtttattgctgacttggcaatgcatcaaaatcttttttttttttttttttttttggtcacaggtattactgtcttacagtgtgaataccccatgaaaaygtagaactctttgcaacttatgtcacacctgtatcttcaagggcaaggattatttgttgctatagtttttatgtcactaaagtaccttttagtgtcatat

SEQ ID NO: 248954 - DNA, 201 bp, Homo sapiens
tttctgagacagtctctctttgtggcccagattggagtgcagtggcgtgatctctgctcactgcaatctctgctgccgggttcaagcgattctcctgcctyagcctcctgagtagctgggattacaggtacctgccaccatgcttggctaatttttttatttttagtagagacagggtttcactatgttggctaggctggt

SEQ ID NO: 248955 - DNA, 201 bp, Homo sapiens
cacttctcaatctccgtcgtgcagtattctgcaaaacaggattacagtagatttacagtactgtctagttacttgtaatgataccctcctttcatcagttrtgtaaatatggcagtacacgttacataatttttgtaaatacattgttataaagtctgactaaaaaatgttaagaaaaccaaaaaataaaacatttttcta

SEQ ID NO: 248956 - DNA, 201 bp, Homo sapiens
tctttttttttttttttttttttttctttttctgagacagtctctctttgtggcccagattggagtgcagtggcgtgatctctgctcactgcaatctctgctgccgggttcaagcgattctcctgcctcagcctcctgagtagctgggattacaggtacctgccaccatgcttggctaatttttttatttttagtagagac

SEQ ID NO: 248957 - DNA, 201 bp, Homo sapiens
agttgactttctttcttggaaaagtattttttgttcacatgtacaactaggaaaataaacagccataagtggatattctttttttttttttttttttttttctttttctgagacagtctctctttgtggcccagattggagtgcagtggcgtgatctctgctcactgcaatctctgctgccgggttcaagcgattctcctg

SEQ ID NO: 248958 - DNA, 201 bp, Homo sapiens
cagcgattccctctgtggttcctaagttgactttctttcttggaaaagtattttttgttcacatgtacaactaggaaaataaacagccataagtggatatkctttttttttttttttttttttttctttttctgagacagtctctctttgtggcccagattggagtgcagtggcgtgatctctgctcactgcaatctctgc

SEQ ID NO: 248959 - DNA, 201 bp, Homo sapiens
gcgtatttcctttacaaaacagtattctgaagcacctagtatggtacttgcatataggggattttttttgtttgtttttgtttgtttttttttttttttttgagatggagtcttgctctgttgcccaggctggagtgcagtggcgtgatctcagctcactacagtctccacctcctgggtacaagcgatcttcctgcctca

SEQ ID NO: 248960 - DNA, 201 bp, Homo sapiens
ctgtcataggaactgtagcgtatttcctttacaaaacagtattctgaagcacctagtatggtacttgcatataggggattttttttgtttgtttttgtttktttttttttttttttttgagatggagtcttgctctgttgcccaggctggagtgcagtggcgtgatctcagctcactacagtctccacctcctgggtacaa

SEQ ID NO: 248961 - DNA, 201 bp, Homo sapiens
agtacaccacttccagggactaaagtctgtattagtaatctattgctatgtaacaaattattccaaagtattagtagtctgttgctacgtaacaaattacyctggtacttaggagtgtaaaacaagcctttattattttacaaaatttctgagagacaggaatcggggagtagcttaggaaggtggttctggctttgggtc

SEQ ID NO: 248962 - DNA, 201 bp, Homo sapiens
tattttatttattattaaatttttaacctctgatatgatttcagtgtactgctaggattgagaaccactgaagtagaccataccacattgtaatcttcaaytgaaactcatgcaagtataaagaacagtaaaacttagctagtgttttttgtgggaaatactgttacaagctgtctatctcccattatttaaaagtccagc

SEQ ID NO: 248963 - DNA, 201 bp, Homo sapiens
gacgagtctctctgggcctccttttcatttgtgaaataaggggtttggattatatgatctttatggttttcttttttgactctgaaatttatgtgattttwaatttctgtaagattattgtcaggtagcactgacaaattcagtctttacatatggtcattgtatgagctgagatgctgaaactgaaagaagatgtaagct

SEQ ID NO: 248964 - DNA, 201 bp, Homo sapiens
actttaaaaggattaatttagcagcaatatgtaggttgggtgggatggagagcagaggtgaagagaatggtgggaagggattttagcacattgtagaggartgataatgaggacttggcctggatcgtgctcataggatccaaggaaaggactgatttaagaaaccttaagaagatagaagccacagcattcatcatttgg

SEQ ID NO: 248965 - DNA, 201 bp, Homo sapiens
tcctaattaacctctttaatgagctttggaagtttacgtatttcaagggatatatcgatattgtctaagttattaaatttattgacaaagttgttcataawgtttctttattatccttttaatatctgtggtatctgtagtgatgtcacctctttcattcctctgtcttctctcttttttttcctttgatcagtgtggcta

SEQ ID NO: 248966 - DNA, 201 bp, Homo sapiens
tgctagtgctataggccatcttctaacaaatcacctaggtggccaggtgtgttggttcatgcctgtaatcccagcactttgggaggccaaggtgggagaaycttttgagcccagaaggttgagtctacagtaagctatgtttacactaactacactccagcctgggcaacagagtaagaccctgtctcccccacgcgcccc

SEQ ID NO: 248967 - DNA, 201 bp, Homo sapiens
tgctgcagctatttgctaataattgtagtttagtaaactgtagagcctaggaggggtttatgtgtatgggatgggctagggacaggatagagggagaaccrtagacattttctgctgtggtgaaaaacatctttgtccatgtggtagtagcaacatttttttcagattccaaatagcatttattcccagtccttgtatata

SEQ ID NO: 248968 - DNA, 201 bp, Homo sapiens
ttaaaagatggttgtttattgaagacattgctccatcacttagaggactaggtagtgtgggttttgctgatttcttttgaagcataaggtcctacaggatmctgtccggatttgtaatagtataccctgccctgtgttgatggaatgttgctgcgtcatgggctccctgagttccatgctgtggggttaagtaggtaccag

SEQ ID NO: 248969 - DNA, 201 bp, Homo sapiens
ttatttttcattaacaccgacttaaaaaggaatgtctgccagaacattgatggttcagctcgtatttctttctttttctttctttccttttttttttttttaagagacagggtctcactctgttaccaaggctggagcaccctggcttgatgatcatagctcgctgtagcctccaactcctaggcaaaagtgatcctccca

SEQ ID NO: 248970 - DNA, 201 bp, Homo sapiens; identical to SEQ ID NO: 48953

SEQ ID NO: 248971 - DNA, 201 bp, Homo sapiens
ttcctgctcgggtccctgttaccaaaaatacagggcccttattttcatatttgccccggattttttccttgcaagagtttcttgatagcaaatccttcttktaaatactagaaagtatgaggaagcgttctcttttcacagccagtgatttaaagaatagttatttttaaagtagactagtgggcttttagtgttaaatgt

SEQ ID NO: 248972 - DNA, 201 bp, Homo sapiens
cgccaggatttgcacacctttctctgcaggaagccttgaaccctctccactcgcatttccaccacctccaggcaagatctcccacgtggaggccccacccsctccctgacgcgccccactctcgccccgcccacctggtgggcgtccccggccgttagcgccctggaagcatccgggacttcagggtcagtacattacaat

SEQ ID NO: 248973 - DNA, 201 bp, Homo sapiens
aatttgttcattatatgccactaatgatgccatgtagtagcaatatgctgtttcagggaagtatctgaaataattaaaaaaaatatgtagtctatatttaygttatctttagaatttcggctttagaatattcaaatctgtctcattctcctcctttcctttcctccctccttctccctcaacctctcaacaattaggaaa

SEQ ID NO: 248974 - DNA, 201 bp, Homo sapiens
aatccagtccctcagctgatgttgaaatgctccttaaacggttgctcagttaatggtttgtagcctctgctgggatgctagtgataggaaatacattactrtgaggcatcttatgtcatttttggacaactttaaatgttaaaaagtttgttagtttttttttttgttttttttttttagtgttcagccaaaatttgactt

SEQ ID NO: 248975 - DNA, 201 bp, Homo sapiens
agttgtgtttcttttatttagtgaatcatctttcttttacccctttgacacttttgttgttgttactttatgttcttggtgatgttttaattttcttttakcttgagatgggaaaactttttctgtaaagggccagatagtaaatatttaggctttttggctctatagtctctgttacaactcagctattgcagtgtgtaa

SEQ ID NO: 248976 - DNA, 201 bp, Homo sapiens
atttggccagggggctattgcttgctgacccttgtttagatggatttgtgcttttctggggtgattgaggttgccagatatctgaactcagttaaagctgragtatttttctgtctgctatgattataacacttaatattttcatgttgtttttgtcgtggatataataatcccatgttcttgttatagaaaatatgtata

SEQ ID NO: 248977 - DNA, 201 bp, Homo sapiens
agtaccactactagaagtgcattgtttaacattttgctatataaggagctatacaatgattcattttctttttacctatgtagcactatttttttttttttgagatgttgtctcactatgttgcccaggctagttttgaacacctggtctcaagccaccttcctgcctcagcctcccaaagcactaggattgcaggtgtac

SEQ ID NO: 248978 - DNA, 201 bp, Homo sapiens
gatggttgtttattgaagacattgctccatcacttagaggactaggtagtgtgggttttgctgatttcttttgaagcataaggtcctacaggatcctgtcyggatttgtaatagtataccctgccctgtgttgatggaatgttgctgcgtcatgggctccctgagttccatgctgtggggttaagtaggtaccagttccct

SEQ ID NO: 248979 - DNA, 201 bp, Homo sapiens
ggtgatgttttgaggtactgttttaggattaagggaccaatgttaatatctaagaagacagactttcttacctgtgcatttgtcaattattaatttacctrcatttatcaaaccatgcatattttatcctatgatagttctgggtttattatcttctgtaagcatatgactaattgagtaaagtaacactcccttattgcc

SEQ ID NO: 248980 - DNA, 201 bp, Homo sapiens
ttcatgattatgacaacaatgctaataataatggctatagagcactcatgttctgtctgtctatccatcccctacctacccacccgtgtgccaggcgctayactatgtgcattacatggatttagtcttcaccataatcctgtgagggtaggtgctcttattaagctttttccagatggagtccctgagaccttgagatgt

SEQ ID NO: 248981 - DNA, 201 bp, Homo sapiens
aatttctacagtaacagattctgtattttctttcacctagtagacataactgagccagttaatctagttttggccattctgtattttgtccagtttttctyataaaaaaacaatattttttatctcaatttcagcaacttccaaaaaatgtgattatgggacctactttataataaattatggggtcaatgacaaagtact

SEQ ID NO: 248982 - DNA, 201 bp, Homo sapiens
tgctcagaagttatttcttaattttagcattgtttcacatctggagaagatgagaattttttaaatccccaacatcctggctcatttttgtttaacagccyttcctttagcttatctctttttttcacataagcacaagaaaaacccaggtggcactgtgaacactggttggaaatcttagttacatcaccccattgattt

SEQ ID NO: 248983 - DNA, 201 bp, Homo sapiens
caaacctcagttccttgctgatttttggccataggctttagttcctcccaccttatcctctccataggactacttagcacatgttagcttgtttgccccaratggagaggtccgagagagtaggtaagtaagagagtgccgaggatagacgcctgttttcaataacagctcagaagtgatacactagcccttctcatattc

SEQ ID NO: 248984 - DNA, 201 bp, Homo sapiens
cgtggtgtaatagctggcagtagtggcagaaccttctgtgtatatcatatacacccctaaggtgtggttacttgatgtgtcatttcgttagaggaaattastaatcacgattttattgttgatttttctttgtatagaaacccatgaaataacagctgaaaggaataaaacatatgataattaggattcagcgtattttaa

SEQ ID NO: 248985 - DNA, 201 bp, Homo sapiens
tgcaatgagaggcatttgctgtggagaggatacaaaacagatgcccaaatgattagagtaagttgaaaacctgtgatgactagttctttgaagaaagacargttttgagtttggagcccttgttgaatctctcagagattcattttctcaacttgggcctgaaggcagaagctgtgtgtgggagagatggaagtgggggtg

SEQ ID NO: 248986 - DNA, 201 bp, Homo sapiens
gctgtggcttagcacacttaagaatcaatctttctgcataaagtaccttaaagatcaaagagagtgcctgtcttttgacctaacagattctatattttacyttgctttaccaacaggtgagtcctaccatcattaatttggctaagaggtttatatttatggttaagttaaatgtaaagttcttcatgggcctataactca

SEQ ID NO: 248987 - DNA, 201 bp, Homo sapiens
ttcagtaaaggcctgttaattattttatttttattcttcaacttgcagtaggagctttaaatataagttgtttatccctttgctcttaagatgttaggttytttttttattatttttatttttttgagacagagatttgcttttgttgcccaggctggagtgcaatggcacactctcgtgccattgcaccatgtcgtgcca

SEQ ID NO: 248988 - DNA, 201 bp, Homo sapiens
aaggaatgataaaacatcagttaagatatctggtttctgatagaactcaaaaagaaaggttactgtttcagctagtagcatatgttgaaacacaatgtaaacattaaaaaaataatccaatgaagtttatggtttgttcattcctttttcagagaaactccagaaaatcttgccaaacttctgaccaggatgtatttaaaa

SEQ ID NO: 248989 - DNA, 201 bp, Homo sapiens
ccattctcctgcgttagcctcccgagtagctgggactacaggcgcccgtcaccacgcccggctaatttttttttgtatttttagtagagatggggtttcascatgttagagaagatggtcttgatctcctgaccttgtgatccgcccgctttggcctcccaaaatgctgggattacaggtgtgagccaccgcatccagcct

SEQ ID NO: 248990 - DNA, 201 bp, Homo sapiens
ctgcttttttgtgtttgaggcaagctttcaaatactatcatttttcttagcttctttgaaggaattaaaagacaaagcaatattaaacaaataagcagtgwttcctacacagttggaatagtggtataacacaggcactgtttttatagaagcttcagcaatcatcacatgagtcacttagccctgccttgtttttactgc

SEQ ID NO: 248991 - DNA, 201 bp, Homo sapiens
acgtaatagaactgcaataatgactaatggaaaagactctaaagctgtatctgatgggaaatgatttactttttaaactctttctatttaaggaattagcytaccgaaaggagatggtgagagctgacctaattaacaaaaaagttggaatcaggtatgctctgaaaacttcacttaattcaagaacaaagtacacgtatg

SEQ ID NO: 248992 - DNA, 201 bp, Homo sapiens
aatttttgtttttgttttcattttgagactcctttgaaaataaccctgaaatctatgggtttttttagattgaagatgtgtgtggttctttttttttttttaaataaatgagagattaaataagcaggaagttgtttcttacccactttccatgagaaataataaaatgcagacattgttatgcttgtggagttctagatg

SEQ ID NO: 248993 - DNA, 201 bp, Homo sapiens
ctgtcttcgttttattaatgtttcctgagcgcctgttatgtgtcaggcactgttctaagagcttaggactagagctgtgcacacgacacgtcaggtccackttctgtctgatggaggcagacaattaaccagcacgttaataaaatgatttcggataatgttaaatgccatcaaggaaagaaaaggtgttgtgccaagaac

SEQ ID NO: 248994 - DNA, 201 bp, Homo sapiens
cataatgaatactttggaattatagtagtctcctcttatctgcagggtatacattccaagacccccgatggatgcttgaaactgcaaatagtattgaacaytatatatatgatacgtttttagtctgttaaccaagacagctactaagtgactaacgggcaggtagtgtatacactgtggacacaccggacgaaaggaaga

SEQ ID NO: 248995 - DNA, 201 bp, Homo sapiens
taatttttgtttttgttttcattttgagactcctttgaaaataaccctgaaatctatgggtttttttagattgaagatgtgtgtggttctttttttttttttaaataaatgagagattaaataagcaggaagttgtttcttacccactttccatgagaaataataaaatgcagacattgttatgcttgtggagttctagat

SEQ ID NO: 248996 - DNA, 201 bp, Homo sapiens
cgctgtgggaactcagtttataagggggtaggaggagagatttgtgcagcggggtggagaacggcattccacctgtcttcgttttattaatgtttcctgarcgcctgttatgtgtcaggcactgttctaagagcttaggactagagctgtgcacacgacacgtcaggtccacgttctgtctgatggaggcagacaattaac

SEQ ID NO: 248997 - DNA, 201 bp, Homo sapiens
atatcaaattcaagcctctaaataagaccaaggagtatacagcctgtgaactgatgaacatatacaaggtaaatattctttttgattatgcagcagctttrcaaaaatcatgaaattccatcaaagtcaagccttgcaactagggaaatgtaatcaatacttttaaaaaatagcagtgtctggactccaacctagagacag

SEQ ID NO: 248998 - DNA, 201 bp, Homo sapiens
ccttcctattacaagatattacaaagaaaagccttactgtttgctatctctaatgatattatgaatttcagacagctaagatacgtccttttgcggtagcrgcagttctccgtaatataaagtttactaaagatcgatatgacagcttcattgaacttcaggagaaattacatcagaatatttgcaggtttgtggttgcat

SEQ ID NO: 248999 - DNA, 201 bp, Homo sapiens
gagaatcttttgagcccagaaggttgagtctacagtaagctatgtttacactaactacactccagcctgggcaacagagtaagaccctgtctcccccacgygcccccccgcccccccaaaaagaagaaagaaaggaaagaaagaaagaacaaattacttaggtgattatcccagaaactcagttcatatatcttttagatt

SEQ ID NO: 249000 - DNA, 201 bp, Homo sapiens
ggtagctcagaagggagcaacagttgccattaacttgttttctaatattaaggaaaaacccaaccttcccagccttgtatcaatttggggtgggcaagcaygtcttccaaaatgaaaatagaatccatactggatttcgatatgcctcccacacattttatgtgaccagtattcctgtaagagtagatgaaagactcctag

SEQ ID NO: 249001 - DNA, 201 bp, Homo sapiens
tacttgaaaaatatattactgaaggaacgtattatgtaagaaaatctattacttttgtaattgccaataaaagcccaatttttttctcaaaaaaaaaaaaagacatactttaatttaaaagataattttctgatagttagtattatttttttcctaagccttctatcttcacctgttcagtgcttttataacactacctta

SEQ ID NO: 249002 - DNA, 201 bp, Homo sapiens
cttatgtcatcagtctggattaatttaatttcaccatttcatatttttggcatgtagaatttccaattattaattcaaaaaatatgggtgtaaggagcatygacattaacaatttttgaagtaacacatttgcatacatgatggcatcttaactgtgtaaatacatcatttttaatatagaaagttattttagtacatttg

SEQ ID NO: 249003 - DNA, 201 bp, Homo sapiens
tgatagatctcttctctgtacttttaatgatgattttacaggagaactttggccttatttttatactggaactgactcaaaacctcttaaaatttctacartaacagattctgtattttctttcacctagtagacataactgagccagttaatctagttttggccattctgtattttgtccagtttttctcataaaaaaac

SEQ ID NO: 249004 - DNA, 201 bp, Homo sapiens
tagatcctgaagcagcacatcgtaaacttatagtctcagaagatagaaaaactgtgcgatatggaaatacaacacaaaacttacctcataacccaagaagattttatctgctcccagctgttctgggttctaagggataaaattgtggcaggcagtaccgggaagtagaagttaaagacatgcctgaatggattcttggtg

SEQ ID NO: 249005 - DNA, 201 bp, Homo sapiens
ctagatcctgaagcagcacatcgtaaacttatagtctcagaagatagaaaaactgtgcgatatggaaatacaacacaaaacttacctcataacccaagaagattttatctgctcccagctgttctgggttctaagggataaaattgtggcaggcagtaccgggaagtagaagttaaagacatgcctgaatggattcttggt

SEQ ID NO: 249006 - DNA, 201 bp, Homo sapiens
tctagatcctgaagcagcacatcgtaaacttatagtctcagaagatagaaaaactgtgcgatatggaaatacaacacaaaacttacctcataacccaagaagattttatctgctcccagctgttctgggttctaagggataaaattgtggcaggcagtaccgggaagtagaagttaaagacatgcctgaatggattcttgg

SEQ ID NO: 249007 - DNA, 201 bp, Homo sapiens
gaaatttataagcaatccccagctgggtagtttgactgaaattgctaagcaactccagctaagaagcaagaggaagaggcaggaagagaagcatgtgtgtragaagcataatcaggttttgactttcttctctcagaaagacctagagcttttatgtccaaggtgcagtttgtccactgatcaccagcatcgctgtgtttg

SEQ ID NO: 249008 - DNA, 201 bp, Homo sapiens
actgttaactgggttgaggtcagaattgaaaaagcatgttcagcaaacatgtggtttccaagtagtatggatacatcttgtttcttacctttttttttttyccccagtcttcctctttttttcttgttttcagataatgtctcattcacacttttaaaatccacattctctctctttagtccctccaagggttgctttcta

SEQ ID NO: 249009 - DNA, 201 bp, Homo sapiens
gaaaggtcagagaaaaagccccagtggagataggtgggattagagattttttggctgtgtgtcttgggcagaacatttaaacaaggagcacttgggtgacrttggggcagatgagacaagagagccagacagagaggtgccccttaagcaaatcatgtaggtgagatgacttgtgtaaaacactaggcacaacacctgtca

SEQ ID NO: 249010 - DNA, 201 bp, Homo sapiens
tcctgaaagttcaaaggatttttaggatgattctgattactcagtttttatcttatacatgtgagacagatttactttcctcaggtatcagcagttttatrcattggccaaaatggggcagcactcggttttggcacatttgtgtgctgcagcatattggttaagagtcactgtcctgggaattcctagaacatgatgtat

SEQ ID NO: 249011 - DNA, 201 bp, Homo sapiens
ctttctaccttactttcacttgcttttcttttgtgtgctgtgattatgagtactaagattgtagcaataccaactcatcatatcacatagaggtggtacaytgtgagtgtgaaaagtgattgatatctgtctagctattcataaatcaattaaatttcaggctttgggtgttctctagttccggttgcacaggaactctag

SEQ ID NO: 249012 - DNA, 201 bp, Homo sapiens
atggcgatattcaagacaacacgcacaagaagaggcgggtcctacgcgcttcgctagggaagcccgggtcagctcgctgcgcaggcgcagtgagttcgacmcaccatgccgactgtcagcgtgaagcgtgatctgctcttccaagccctgggccgcacctacagtgagtggcggccctatacgttgggccctacgcctctt

SEQ ID NO: 249013 - DNA, 201 bp, Homo sapiens; identical to SEQ ID NO: 48951

SEQ ID NO: 249014 - DNA, 201 bp, Homo sapiens
ctaaacttttatactcattcaatatcaattccccattccctttccctccaacccctggcagctacctttctactttctgtttctccgagtttcatgacttagatacttcatataaatggaatcatgcagtatttgtcttactgtgagtggcttatttaatttagcataatgtcctcaagattcacccatgtggtagcatag

SEQ ID NO: 249015 - DNA, 201 bp, Homo sapiens
aaatatatttttattttttaaaacatatgagtgtcataggaatacatcttattttaaaggactcatactttaaccatgtagattaaaccataacagttctyttccccacttcgaatcctcttttcctccccagaaacaactgctgttaaaacttgggtatgcatttttccctgcccttttatattagtggtgccagtttga

SEQ ID NO: 249016 - DNA, 201 bp, Homo sapiens
tgggaagtaaataaaagttggaaaaaattatccttgcccaaacataacctctgttaacatttaggtatatttcttttcagtctttttctctgttcatgggkttttttggcttatggctatatttatgtagttgtgattctgtttttcatctttttattattattattattattattgtagagatggggtattgctatgttg

SEQ ID NO: 249017 - DNA, 201 bp, Homo sapiens
accagcggaggctgcagaacagcaaatattgtagaacggcaaatgttgctgcctgatccttcctctggaagctttgtctcagagggccacccggctgtatraggtgtcagtcggcccctactgggaggtatctcctagttaggttactcgggggtcagggacccacttgaggaggcagtctgtcggttctcagatctcaaa

SEQ ID NO: 249018 - DNA, 201 bp, Homo sapiens
agtgggcttttagtgttaaatgtctattgatgttttgccagaagaaacattgatttttctcttactttctctttttcagggcctgctttcttccccgggcratgtgcagagatctttgccaggggtcaaagcgtcgggaagcttggggtccttcatcctgacgttatcaccaaatttgagctgaccatgccctgctcctcc

SEQ ID NO: 249019 - DNA, 201 bp, Homo sapiens
ttatgtataatattcatgtatataatatttacttatatgtaatgaatatgttgtttgtaaaaccttaggatgcatgctaatcaactgtgatagagtccatwtaacactgagtgttgtggcaagtcgttctgtcactaatccatgttattaaagacttaattccttcacgccagtttcttcatctgtaaaatggcaatgacg

SEQ ID NO: 249020 - DNA, 201 bp, Homo sapiens; identical to SEQ ID NO: 48946

SEQ ID NO: 249021 - DNA, 201 bp, Homo sapiens
tgtgtgtgtcagtattggcaaggagtccctgtcggatgcatgctttgcagtactggaaaataaacctttcaagtaggtggtgcctgaaaaggacatcggasccctaggagatgaaacagtagagtattattgtttatagcaagatcaatccaaacagtgctggaatgcgatagatggagtatgttgaggctgtagttgtag

SEQ ID NO: 249022 - DNA, 201 bp, Homo sapiens
cctagaggtagtacatgagttaggaaaagtctcttcagttattatacctgagatggtgaaatcttagagctttttaataatatcttcttgggtaagtttayagttggttattacgtgctttgctgccaaaaattctttacacttttaaaaataatatcttcttgattaacttcatactgggttcttacttgctttgtatta

SEQ ID NO: 249023 - DNA, 201 bp, Homo sapiens
ttcaagtaggtggtgcctgaaaaggacatcggagccctaggagatgaaacagtagagtattattgtttatagcaagatcaatccaaacagtgctggaatgygatagatggagtatgttgaggctgtagttgtagcccaaatgaaagatttgataaccatactcatgtctgtaatttatggcacatttttttcttaagtatt

SEQ ID NO: 249024 - DNA, 201 bp, Homo sapiens
aaaaatatatatatatatatatatacacacacacacacacatacatacatacaaaaattagctaggcgtggtgtgcgcctgtagttgccatgtgagccagrattgcaccacacagtactccagcctgggtgacacggtgagaccctgtctcaaaaaaagaaaaaaagaaaagaaaaaacattcggaagaatccatcacgtt

SEQ ID NO: 249025 - DNA, 201 bp, Homo sapiens
caccacgcctggctaattttgtatttttagttgagatggggtttctccttgttggtcaggctggtcttgaactcccaacctcaggtgatccaccggcctcrgcctcccaaagtgctgggattacaggcatgagccaccacacctggcgttctcttcttttttaatattaggtcagtatgtgaactatagtgatagaaatta

SEQ ID NO: 249026 - DNA, 201 bp, Homo sapiens
aagtgatcctcctgcctcagcctcccgagtagctgggattacaggcatgtgccaccacgcctggctaattttgtatttttagttgagatggggtttctccwtgttggtcaggctggtcttgaactcccaacctcaggtgatccaccggcctcggcctcccaaagtgctgggattacaggcatgagccaccacacctggcgt

SEQ ID NO: 249027 - DNA, 201 bp, Homo sapiens
aaacatatcattcttaactttccaaagtagtcacaactattgactgtaaatcgacctatcttaggaattatagaggtatgaccagagctactactgtccayggcaaactctccagccaaggctggattccatctgttccccaatattgtcccatttaatggattggcaaattaagacagaaagtggtaatttgcccagggc

SEQ ID NO: 249028 - DNA, 201 bp, Homo sapiens
gcaggccttgttgagctgaggtgggctccacgcagtttgagcttcccagctgctttgtttacctactcaagcctcagcagtggcggatgcccctcccccarccttgctgcagccttgcagttcgatctgggactgctgtgctagcagtgagcgaggctccgtgggcgtgggaccctctgagccaggcatgggatataatct

SEQ ID NO: 249029 - DNA, 201 bp, Homo sapiens; identical to SEQ ID NO: 48950

SEQ ID NO: 249030 - DNA, 201 bp, Homo sapiens
tcttattttttcctctatttttattgattaagcctcttttttaggctaattagtccctactgctgaggcaagaccctttgcctactatatccattgctacrtgagcagtgaagttttagtctgtgtgagcatggagcactgtttcctctaattccgttgagtaattctttcctggccttgggtagttttctcagctgcatg

SEQ ID NO: 249031 - DNA, 201 bp, Homo sapiens
atatttcttggaggctttgttcatttctttttactcttttttctctaaacttctcttctggcttcatttcattcatttgatcttcagtcacctttcttccmcttgatccaatcagctactgaagcttgtgcatgcgtcacatagttctcttgccatggttttcagctccatcaggtcatttaaggtcttctctatgctgtt

SEQ ID NO: 249032 - DNA, 201 bp, Homo sapiens
gattttccaggtaccgtctgtcacggcatcccttggctaggaaagggaattccccgaccccttgtgcttactgggtgaggagatgccctgccctgctttgkctcacactccatgggctgcacctagtttccagcaagttccagtgagatgaacctggtacctcagttggaaatgcagaaatcacctgtcttctgcattgct

SEQ ID NO: 249033 - DNA, 201 bp, Homo sapiens
cacactccatgggctgcacctagtttccagcaagttccagtgagatgaacctggtacctcagttggaaatgcagaaatcacctgtcttctgcattgctcaygctgggagctgtagactggagctgttcctattcggttatcttggaccccaaattcagggcaataatttttaaaacttttttggggggaattggatggaaa

SEQ ID NO: 249034 - DNA, 201 bp, Homo sapiens
ctctaagggaagaaaagacccatgttataatagcacaaaacataaatgataacatacttaggaataaacacaagaaatattatttgtagaaaatgttaaartgctaatgagagatgaaataagacccaaacaaatgggaagatacaccacgttctttcatagaaatacgcagcatcataaagatatcacttctctcattaa

SEQ ID NO: 249035 - DNA, 201 bp, Homo sapiens
gatttgggatggagagttctgcagatgtctattaggtccacttggtgcagagctgagttcaagtcctggatatccttgttaactttctgtctcattgatcygtctaatgttgacagtgggttgttaaagcctcccattattattgtgtgggagtctaagtctctttgtaggtctctaaggacttgctttatgaatctgggt

SEQ ID NO: 249036 - DNA, 201 bp, Homo sapiens; identical to SEQ ID NO: 48945

SEQ ID NO: 249037 - DNA, 201 bp, Homo sapiens; identical to SEQ ID NO: 48949

SEQ ID NO: 249038 - DNA, 201 bp, Homo sapiens
tcttcctgccttggcctcaggtgtgagccaccacgcctagtcttttgagtacttaccataactaatgatgtgttaaataaccttttgaattaaatagtaamatataaactatttttgtttaattatcagagcctaagctacacacaaaagctctaaagatcagccacaaggcagtcaaatggcctcccattcaatgtgact

SEQ ID NO: 249039 - DNA, 201 bp, Homo sapiens
tattctacactttggttatggtgctttcattaattcgacaaatgtttagtgagcaccaaatgtctttccagtgccaagaatttaataatgagttacatgtytcttcacttcaaagaactcctagggggagagttagtcatatacgtaactataaaacacaaaatggaatgagtactatagcgaaatccatataaattgttt

SEQ ID NO: 249040 - DNA, 201 bp, Homo sapiens
tgaggtcaggagttcaagaccagcctggccaacatggtgaaaccccgtctctactaaaaatatgaaaattagccaggcatagtggcgtgcacctgtaatcycagctactcaggaggctgaggcacagaatcgtttgaacctgggaggtggaggttgcagtgagtcgagatttgcaccactgcactccagcctgggcagcag

SEQ ID NO: 249041 - DNA, 201 bp, Homo sapiens
ctaccttaggtgtaaagttaaaaaatgttcaggctaaaaaattgtacattatcttaccttatttttcctgctgccttactaatgttacagaaagatcatcyttgtactaatctatttgtatacttgagaaattggctgagatttctgtagtttataagttgctattcgtaattttactacacctcagaattatgtttgaaa

SEQ ID NO: 249042 - DNA, 201 bp, Homo sapiens
tattttttatctcaatttcagcaacttccaaaaaatgtgattatgggacctactttataataaattatggggtcaatgacaaagtactttagaaattctayggtaaaatacttgaaaaatatattactgaaggaacgtattatgtaagaaaatctattacttttgtaattgccaataaaagcccaatttttttctcaaaaa

SEQ ID NO: 249043 - DNA, 201 bp, Homo sapiens
ccaatttttttctcaaaaaaaaaaaaagacatactttaatttaaaagataattttctgatagttagtattatttttttcctaagccttctatcttcacctrttcagtgcttttataacactaccttaggtgtaaagttaaaaaatgttcaggctaaaaaattgtacattatcttaccttatttttcctgctgccttactaa

SEQ ID NO: 249044 - DNA, 201 bp, Homo sapiens
ctgggttctaagggataaaattgtggcaggcagtaccgggaagtagaagttaaagacatgcctgaatggattcttggtgtctgtagtgactctcctcccasaaggaggaagagtcaaccaattttagtacaggatggattatggagaatttggtaatctagtcggaataattatattgtattgggccataaggaaattatt

SEQ ID NO: 249045 - DNA, 201 bp, Homo sapiens
taactgattaatgagctaaagcaaagtttgatcccaacttctggagagaggtagatctggcaactgaagaagaatataactgaattttgctaaaaaaaaaagtgctgattcgaaaagttgttttatgaagtaaaaattctaagctcttatctcttaggctttattttgctaacattgttagaactagcacatctggcttag

SEQ ID NO: 249046 - DNA, 201 bp, Homo sapiens
atcaatagcttttatagatacaatatgtctaatttcaagctctaagggaagaaaagacccatgttataatagcacaaaacataaatgataacatacttagkaataaacacaagaaatattatttgtagaaaatgttaaaatgctaatgagagatgaaataagacccaaacaaatgggaagatacaccacgttctttcatag

SEQ ID NO: 249047 - DNA, 201 bp, Homo sapiens
cagggcggcaggaaagtgagtaaagggggtgagagtgagtaaagggggaaatgcctcttaaaaaaccatcagatcttgtgagaactcccttaatatcacargaacagcatggggataactgcctctatgtctcaattacctcccacccagaccctcccatggggattatgggaactacatttcaagatgagatttgggtag

SEQ ID NO: 249048 - DNA, 201 bp, Homo sapiens
cttctacttctgatgctccctaaaattataggaatgactctacgtgtaaagcttatccaaactttgggcctataatatttctctttaaaaaaaaaaaaaaagatgaggcaaaaagaaactgtgaaaagtgtttagcaatgagcaagagagggagcttacaaactctttgatggtcaattagccagaaaatgtgctaaagcc

SEQ ID NO: 249049 - DNA, 201 bp, Homo sapiens
catccgggacttcagggtcagtacattacaatgcctgacaaatcctagccagttctatcaaattatatctttcttacaggcttttaagctattagtctcayaaagatacatttaatcagcgaggtaatggcatgatgagtgtttttaggttaaaaagagaacaggaactgttggcagcagaatggcgatattcaagacaac

SEQ ID NO: 249050 - DNA, 201 bp, Homo sapiens
caagtaagtgggattacaggcatgcgccaccacgcctggctaattttgtatttttagtagagaaggggtttctctgtgttagttaggctggtcttgaactyctgacctcaggtgatccgcccactttggcctcccagagtgctggtgggtgtgagccaccatccctggccaaggtgttagtttttaatatgttttacattt

SEQ ID NO: 249051 - DNA, 201 bp, Homo sapiens
atgacttcatgattatgacaacaatgctaataataatggctatagagcactcatgttctgtctgtctatccatcccctacctacccacccgtgtgccaggygctatactatgtgcattacatggatttagtcttcaccataatcctgtgagggtaggtgctcttattaagctttttccagatggagtccctgagaccttga

SEQ ID NO: 249052 - DNA, 201 bp, Homo sapiens
agcaaagagtcacttgttttcttcagccatcatgtctcattagtctcctggtgacttctagaatagtcttttcttcactttcatgaccttgacacttgaakattacaggccagttattttgtagcatgttcctcaattttggtttgtctgatgtttcttcactaattaaattcctgttaggcatctttggaggaatggtag

SEQ ID NO: 249053 - DNA, 201 bp, Homo sapiens
caaactcacttgaaaaagcagttcccaagatggaatagacattaattcattatatataatatttattatgtataatattcatgtatataatatttacttayatgtaatgaatatgttgtttgtaaaaccttaggatgcatgctaatcaactgtgatagagtccatataacactgagtgttgtggcaagtcgttctgtcact

SEQ ID NO: 249054 - DNA, 201 bp, Homo sapiens
taagctttttgatatgctgctggattcgttttgccagtattttattgaggatttttgcatcgatgttcatcagggatattggtctaaaattctcttttttkttgttgtgtctctgccaggctttggtatcaggatgatgctggccccataaaatgagttagggaggatttcctctttttatattgattggaatagtttcag

SEQ ID NO: 249055 - DNA, 201 bp, Homo sapiens
ttaggccttatgtgcctgtgggccacacacagaagagctgattccacggcccttattcaccttttgcttactctccagcctctactattgcttgcctaggrcaagcctcctaatctccttgtgcttcactttttcccatctgtaacttgtctgtcccacaaagggcttggccagggctgcactgggaatgagtgaatagaa

SEQ ID NO: 249056 - DNA, 201 bp, Homo sapiens
gtcacaatatatgtttaagattcttgttcctttctcctcccttgaccaccaaggccatcacagaacaaacctaattcactgttcttttatgatttggtttrttctttcaatttgctattggtttgtatcatatatgtatgttggtgtttgtgtatctgtcttataagttacgaaaatatagcggtcagatctttaaaggtt

SEQ ID NO: 249057 - DNA, 201 bp, Homo sapiens
gaataattatattgtattgggccataaggaaattattctgctgccaaaagtaacacctagtaagattggcatttttttagactgtgaaatgaatgaggtttccttttataatttgaatgatagatctcttctctgtacttttaatgatgattttacaggagaactttggccttatttttatactggaactgactcaaaacc

SEQ ID NO: 249058 - DNA, 201 bp, Homo sapiens
tactagttatttatgagtattatttcaaattcttacaataattcttttttagtttttaagacaaggtctcactttgtcacccaggctggagtgctgtggcrcgatcacagctcaccacagcctcaacctcccgggctcaagtgatccgcgtagatgggatcataggtgtgttgccgccatgcctggctaatttttcttttt

SEQ ID NO: 249059 - DNA, 201 bp, Homo sapiens
gttgtttcttacccactttccatgagaaataataaaatgcagacattgttatgcttgtggagttctagatgttagaactggattttggagttcatccagcycacgagcccggttttatgagtgagggaactggggttaggcaagttaaagaagccggagccgggtcatgcatgttgaccccacagcttctgcctcccagta

SEQ ID NO: 249060 - DNA, 201 bp, Homo sapiens
agctttgttctttttgcttaggattgtcttggcaaggcaggctcttttttggtgccatatgaactttaaagtagttttttccaaatccgtgaagaaagtcmttggtagcttgatggggatggcattgaatctataaattaccttgggcagtatggccattttcacgatattgattcttcctatccatgagcatggaatatt

SEQ ID NO: 249061 - DNA, 201 bp, Homo sapiens
tagctgggtcatcttgaagctcttccaacattcctgacctcctttaggttttaaaatatgagtgtgcatgtgtgcatgagagacacatagttaagattagrctttaaaatagatctcaacgtttcccgagcattttctatttaatcatttcgtatttgccctaattaactaaatgtttcataagaaatgttaaaaagtaaa

SEQ ID NO: 249062 - DNA, 201 bp, Homo sapiens
ttaaaaaaattgaaaatatatttgtgatgttttaagacctttcatgaatatgtatttttaatttaaaagcaattctaatcttttcttattttttttttttwaatatccaacttctccttagtcctactcttagaattagttgccggcccttttctgtgctcatacaagcatatgttatgcttttatttacagccatagata

SEQ ID NO: 249063 - DNA, 201 bp, Homo sapiens
aatggcacactctcgtgccattgcaccatgtcgtgccattgcaccatgtcgtgccattgcaccatctcggctcaccacaacctgcacctcccgggttcaascaattctcctgcctgagcctcccaagtaagtgggattacaggcatgcgccaccacgcctggctaattttgtatttttagtagagaaggggtttctctgtg

SEQ ID NO: 249064 - DNA, 201 bp, Homo sapiens
ttaagggagacaaacctgtgagcagattcttacagataatgctgagagaatgtaccagttgccccttggtagctcagaagggagcaacagttgccattaayttgttttctaatattaaggaaaaacccaaccttcccagccttgtatcaatttggggtgggcaagcatgtcttccaaaatgaaaatagaatccatactgga

SEQ ID NO: 249065 - DNA, 201 bp, Homo sapiens
ttttcattgctagagactgctttagaatatcagagaaagagttgccagtcttaagggagacaaacctgtgagcagattcttacagataatgctgagagaawgtaccagttgccccttggtagctcagaagggagcaacagttgccattaacttgttttctaatattaaggaaaaacccaaccttcccagccttgtatcaat

SEQ ID NO: 249066 - DNA, 201 bp, Homo sapiens
ggtctaattacaaaggtatattgcatgatgttgaggtttggagtgtgactgaacccgtcacccagtagtgagcatagtacccaataggtagtttttcagcycttgctccccacctctctcttcgccttgtattcccctagtgaagcttgatagatttcttaagatgtggtaactgttatgttcttcaggatttacatcctg

SEQ ID NO: 249067 - DNA, 201 bp, Homo sapiens
acaagtacctgtgttatatgggatttaaaaaataaatagttctgttttccatggaaggctctaggttttgtcagtattgtgctgtattaatattacagacyctacttgggtatgtcctaaggtggaagatgatgaactgtcagtctttcttattttctcttaagttttgtttgtttatttaattgtaaaccagaagaagtt

SEQ ID NO: 249068 - DNA, 201 bp, Homo sapiens
tttttaaaaaactttattttatttttatttattttttgagacagagcttcgctctcttgcccaggctgaagtgcagtgtcctgatcttggctcactgcaamctccgcctcttgggttcaagcgattcttgtgccccagcctcccgagtagctgggattacaggtgtgtgctaccataccttgctaatttttgtactttaat

SEQ ID NO: 249069 - DNA, 201 bp, Homo sapiens
tcctgcctcagcctcccaagtagctgggactacaggcgcccgccactacgcccggctaattttttgtatttttagtagagacggggtttcaccatgttggygaggctggttctgaactcctgatctcaagtgatccgcaaagtgacctcagcctcccaaagtgctgggattacaggcatgagcacctagccaggtttcatc

SEQ ID NO: 249070 - DNA, 201 bp, Homo sapiens
acacatttgtagttgtgagcatccaggatttcatataaaatgaagtaccaaaaataacattgaaaaatatatttttattttttaaaacatatgagtgtcayaggaatacatcttattttaaaggactcatactttaaccatgtagattaaaccataacagttctcttccccacttcgaatcctcttttcctccccagaaac

SEQ ID NO: 249071 - DNA, 201 bp, Homo sapiens
gtttaatctatgaggggaaaggaagcttcttctttttctcccctgcaacttagccctacctctgaaattctcaatattttagagtatttaagggactctayttctagtttgcttaataaatattaagcattaagatttttctgattcaggagtcattcattcaacatttgttgagcatttattatatgtcaggcactgcac

SEQ ID NO: 249072 - DNA, 201 bp, Homo sapiens
cacgtatgactaattttttttttgcgatccttcagagtctgttaaggaatgataaaacatcagttaagatatctggtttctgatagaactcaaaaagaaargttactgtttcagctagtagcatatgttgaaacacaatgtaaacattaaaaaaataatccaatgaagtttatggtttgttcattcctttttcagagaaac

SEQ ID NO: 249073 - DNA, 201 bp, Homo sapiens
aagtttgttagtttttttttttgttttttttttttagtgttcagccaaaatttgacttgctgtaactcaacccattgccctaattcattttgtatacttcytatatacagcatagaatgtaattattttatataatgtcttgattaattatgagtaaattcatttaaatattattttaggataaaggctccagtgtataaa

SEQ ID NO: 249074 - DNA, 201 bp, Homo sapiens
gacagtgaggcagaattgtttagtttggagagatgtgaaaaagaggccaccttaatatttcacctctgttgctttgggtttacttaagaatgacaatttasaatattttccagctctttccccagaaatataaacaaagatccttctctgctggtcaagaaatatatgtaattgtcctttgtctctgtggtactaacttga

SEQ ID NO: 249075 - DNA, 201 bp, Homo sapiens
ttattttcatatttgccccggattttttccttgcaagagtttcttgatagcaaatccttcttttaaatactagaaagtatgaggaagcgttctcttttcayagccagtgatttaaagaatagttatttttaaagtagactagtgggcttttagtgttaaatgtctattgatgttttgccagaagaaacattgatttttctc

SEQ ID NO: 249076 - DNA, 201 bp, Homo sapiens
ttggctaccacccaggtctgatttttcacaagcctagactcatattttgttccatttcgatgtgactgtttttatttctggaaatactctgctttacggcrcattagtcctagctagagcactatgatcacattaatctaccggagttattgtgctcaactaccccctttctgccaacagtggagagagatgctctcatct

SEQ ID NO: 249077 - DNA, 201 bp, Homo sapiens
acttgtcatttacattaggttatttctcctaatgctttccctcccccttcccccaccccatgacaggccccggtatgtgatgttccacttcctgtgtccarctgttctcattgtacaattcctacctatgagtgagaacatgcggtgtttggttttttgtccttgcaatagtttgctgagaatgatggtttccagtttcat

SEQ ID NO: 249078 - DNA, 201 bp, Homo sapiens
gttaaattccatctgctatgggcctgagattgatgtgtatttattgttagcttattctttttttgtttgttttttattattattattattacatttacttmagctcacaccaggcctattcttaacttgctgatatgtgtagagaatataaattgctcttagaagttgacttacagcattactttttattttaaacttaag

SEQ ID NO: 249079 - DNA, 201 bp, Homo sapiens
acactgttggcctgagagactcgagagaccatttatctgccccacatatacctaacatacagtggtgggatgggcataggataactcctgtagcccttccwcttcaaaggggcggaaatgggagacacaaaggagtcattggtccatggcaattctggaatcaagtggcaaatgttggatgttcttgattaggtctgaagg

SEQ ID NO: 249080 - DNA, 201 bp, Homo sapiens
atggctcactgtgattctcccgcttcagctacccaagtagctgggactacagggcatgccaccatgctcagctctttttttttttttttttttttttttttgtagaggcgggtttttgccttgtcacccaggctggtcttaagctcccggtatcaaacaatccacctgccttggcctcccgaagtgttgagattataggtg

SEQ ID NO: 249081 - DNA, 201 bp, Homo sapiens
tacctttgtggggttctctgtatttcctgaattgaatggtggcctgccttgctaggttggggaagttctcctggataatatcctgtagagtgttttccaasttggttccattctccccgtcactttcaggtacaccaatcaaacgtagatttggtcttttcacatagtcccatatttcttggaggctttgttcatttcttt

SEQ ID NO: 249082 - DNA, 201 bp, Homo sapiens
gacttctgactgtggaccttcagcagcctccatgatttcatccttcctgctcgggtccctgttaccaaaaatacagggcccttattttcatatttgccccrgattttttccttgcaagagtttcttgatagcaaatccttcttttaaatactagaaagtatgaggaagcgttctcttttcacagccagtgatttaaagaat

SEQ ID NO: 249083 - DNA, 201 bp, Homo sapiens
gtgcccaggcatttttcaaacattattctgttggccaaagccagtcatttggctagatttgacaggtggagaaatagatgtcatctcctgattggaagatyggcagtgtcacattgcaaggccatggatacagagaggggagaaatttgtggccatttttgcagtttatgacagtagcaattgggattagctggacatagc

SEQ ID NO: 249084 - DNA, 201 bp, Homo sapiens
ttgcaccatctcggctcaccacaacctgcacctcccgggttcaagcaattctcctgcctgagcctcccaagtaagtgggattacaggcatgcgccaccacrcctggctaattttgtatttttagtagagaaggggtttctctgtgttagttaggctggtcttgaactcctgacctcaggtgatccgcccactttggcctcc

SEQ ID NO: 249085 - DNA, 201 bp, Homo sapiens
catggaaggctctaggttttgtcagtattgtgctgtattaatattacagaccctacttgggtatgtcctaaggtggaagatgatgaactgtcagtctttcytattttctcttaagttttgtttgtttatttaattgtaaaccagaagaagtttgtaaacacgaaatggacagcttgaccaaaagcttaaaaacattctgct

SEQ ID NO: 249086 - DNA, 201 bp, Homo sapiens
gtttctggaggtaagaaggaggcttagctgatttgctatgagaaggagaagcttcttctcaagatcttggaccctagtagttacagtggttaagaacatgrgccccagagttaaccagttctagacccaaatcctagccttgctgctcatgatcatggtcaaatagtttaatctctctgaatttagtttcttgccagcaat

SEQ ID NO: 249087 - DNA, 201 bp, Homo sapiens
cttatgtaacttatgctcatacatttataaatattttctgatgctaggttttgggttctattatgtttcttcaaaggttattgatgttttggttttagcargtaattcacttggttaaactcaaagtcaaactctgtcatgtctgtagttttttttcttttgttttttttttttgttgttgttgttttttgttttgttttt

SEQ ID NO: 249088 - DNA, 201 bp, Homo sapiens
ttaaccaggattcctcttcttctgctttctgataacattacctcactttcctccatgtcctcacctgcatccttaccaaagactatgaggcttctttcttraggttttcatttacacgcctcaaagcccactgcttggttccaaagccattcccatgtttttcatttttgttacagcagtacaccacttccagggactaaa

SEQ ID NO: 249089 - DNA, 201 bp, Homo sapiens
tgaggaaactgaagtaccaggaggccctgtccagcccctcctcaccagacacacccaactcccacaggggcccacggtccccaacactcactctgaggctrggccacgcaccaggagctgcaccaggatgcccgtcactgccaccagaatgggatagtggtccacgctctctaggcctgaggggaaggggaggaaagagat

SEQ ID NO: 249090 - DNA, 201 bp, Homo sapiens
gctgacacaggccgcattcaccggttcgtggagaagccacaggtgtttgtgtccaataagatcaacgcaggcatgtacatcctgagccctgcagtgctgcrgcgcatccaggtgtgtaggagacagctgttggtgggctggggtggggcaggccatcaccgccatgaccctgctcacaagctgcccactcccacagctgca

SEQ ID NO: 249091 - DNA, 201 bp, Homo sapiens
gcaccccgaagccactggtggacttctgcaataagcccatcttgctgcaccaagtggaggcgctagccgcggtaagaccctgggtcgggatcagagtcgcrttcggatctggcgggactagggatggccagcgactaggggtcaggggctcccgtaccttctgactgagcccgcccgtcggcctgcgttctgacaggcagg

SEQ ID NO: 249092 - DNA, 201 bp, Homo sapiens
ggcccgtgacctactctctgagactgcagaccctttcttcgtcctcaacagtgacgtgatctgcgatttccccttccaagccatggtgcagttccaccggsaccatggccaggagggctccatcctggtaaggcgccaggtcttctctctcttgacactttcaccctccatgcccagcctcccatgccccctagccttcat

SEQ ID NO: 249093 - DNA, 201 bp, Homo sapiens; identical to SEQ ID NO: 48956

SEQ ID NO: 249094 - DNA, 201 bp, Homo sapiens
ccgaagccactggtggacttctgcaataagcccatcttgctgcaccaagtggaggcgctagccgcggtaagaccctgggtcgggatcagagtcgcgttcgsatctggcgggactagggatggccagcgactaggggtcaggggctcccgtaccttctgactgagcccgcccgtcggcctgcgttctgacaggcaggcgtgg

SEQ ID NO: 249095 - DNA, 201 bp, Homo sapiens
actcactctgaggctgggccacgcaccaggagctgcaccaggatgcccgtcactgccaccagaatgggatagtggtccacgctctctaggcctgaggggarggggaggaaagagatgagccacccacacgctcctgcttcaagggctccaggcctgcccactgccctctctacagaagggtgagccgagactgcagagcac

SEQ ID NO: 249096 - DNA, 201 bp, Homo sapiens
tcctcaccaggcagccgtagggtgaccacacgatcaaacaggttcctctcagctgtcacccggttcagcacctggtttagcagctgtgaggggagcaggartccattggtggatggggagcgtcatcaatggggcatccccagggtcccacccttgttgcccagatggccacacctgtgcaagacgccgcagcagcatctc

SEQ ID NO: 249097 - DNA, 201 bp, Homo sapiens
cacccagccgcaaggccagcgtccacaagcacgtagtctttctggagccaggccggaggggcctcaatggccgcgtgcagctggcagtagctgaggaattygatctctacaaccctggaggcctgcagctgaaggctggctctgagtccgccagctccataggctccgagggtcccatgacaacctagactgcccagggct

SEQ ID NO: 249098 - DNA, 201 bp, Homo sapiens
cagaggccagctgagcctactgagcgaggcccttctgaaatggccctcaggtgggccctggaaagggggtaagggagggaactgggcaccagaaggacggrggggaggcaaagagaggagactggaaggacacaaaaagtatcaacatcacagatctgcccggggcaagcctcacccactttattatgtctcccttctcca

SEQ ID NO: 249099 - DNA, 201 bp, Homo sapiens
aattcatagaatgctacccttgtagaactagctgggatggaagaaggcgggatttaccagaagcaagtagatttccatttccaacaaggctcacaaatgtmtcagttttataaagtattcatttatcattttcttactaaatcttccctgaatttctagagaataaacccagaatactaattacaataatttttgcacatt

SEQ ID NO: 249100 - DNA, 201 bp, Homo sapiens
tacagtgcagtgggtgccccttacgaggaggtggtgaggtaccagcgacgcccttcagacaagtaccgcctcatagtgctcatgggtatgtcccagcatgyactgtctctcctcctccttgagaagtcttccttctagattcaggtgtcttgcattgggaataatggtgaaagtagaactctttatggacccccatacaaa

SEQ ID NO: 249101 - DNA, 201 bp, Homo sapiens; identical to SEQ ID NO: 131038

SEQ ID NO: 249102 - DNA, 201 bp, Homo sapiens
acatttacacccgcacctgccaccccatctctgctctcttcctttcctaggcctctcccagatcctgaggcttgtgctgcaagagctgagtctgttctacrgcagagatgtgaatggagtgtgtctcttgtacgatctcctccactcgccgtggcttcaggctctgctaaaggtgagtgcttctttgctcggaagcctttg

SEQ ID NO: 249103 - DNA, 201 bp, Homo sapiens
catgatcttcttaaaggcttaactttttcatgtctgtttctgcacttacccaaatatccagaggaactttcagaaggtaattgtttttatttcctagatayaccaaatagaactatgtttaagatctttcagtgcctcaaaaatgaatacttgactggataatgtttaagatgaagatacggaatttgttgttgtttatgg

SEQ ID NO: 249104 - DNA, 201 bp, Homo sapiens
tatgtgtccaaggaaacatttgaaaacctcatatatagtcacaggtaaagtagaggttcagaagctgattcttacctcttgttgttttacatttgaaatarattccctatttttatgtattttccaaatctcctgggtaattccttttgtttctgaggagttaagcaagaaatgtacatcgatatacagcacaccaactca

SEQ ID NO: 249105 - DNA, 201 bp, Homo sapiens
tttctagagaaatcccttttttttctttttttttttctttttttttttttgagatggagtcttgctctgtcgcccaggctggagtgcagtggcgtgatctyggctcactgcaagctccacctctggggtttgccattctcctgcctcagcctcccaagtagctgggattacaggtgcccgccaccacgcccggctaatttt

SEQ ID NO: 249106 - DNA, 201 bp, Homo sapiens
ggtgcccgccaccacgcccggctaattttttgtatttttagtagagacggggtttcaccgtgttagccaggatggtctcaatctcccgacctcgtgatccrcccacctcagcctcccaaagtgctgggactataggcgtgagccacacacccgtcctgagaaatccctctttcttaacttgggtcagggctttagtaagtt

SEQ ID NO: 249107 - DNA, 201 bp, Homo sapiens
gtgtctcttgtacgatctcctccactcgccgtggcttcaggctctgctaaaggtgagtgcttctttgctcggaagcctttgcttgctgaaggggttgtggrgagtgtgtagaaaatgacagcttcagtccattcaggctggatagtggaatagtttataaacaacagaaattgatatctcacagttctgtaggccaggaag

SEQ ID NO: 249108 - DNA, 201 bp, Homo sapiens
ttcaagcaattctcgtgcctcagcctcccgagtagctaggactacaagcacaagccaccatgcctggttaatttttgtatttttagtagagacagggtttmgccatgtttgccaggctggtctggcaatggaactcctgggctcaagtgatccacctgcctcagcctcccaaagtgctgggattataggcatgagctactg

SEQ ID NO: 249109 - DNA, 201 bp, Homo sapiens
tcccaagtagctgggattacaggtgcccgccaccacgcccggctaattttttgtatttttagtagagacggggtttcaccgtgttagccaggatggtctcratctcccgacctcgtgatccgcccacctcagcctcccaaagtgctgggactataggcgtgagccacacacccgtcctgagaaatccctctttcttaactt

SEQ ID NO: 249110 - DNA, 201 bp, Homo sapiens
cctcctctaccccgagaagttctggtcctggctgggaaacttcccgtcccaagcagctccttcctccttcagccacgggaagactgccagggcccccagcmcagctccctcatcacctggtttgctccattggaaactgaacctggggtggacagagtgagacttagtaggagagtctgaacccaagcaaaccactccttc

SEQ ID NO: 249111 - DNA, 201 bp, Homo sapiens
aatttactgagccttcaatctcacacacagtaaatccccaagtaacagcaactaaatatgatgcgtaataatcctatcctttgtactgtgttggacctggrttcaagactgtgttggatatttttcaatactgatggcccgagaagcaaaataagtaaatgagtacagtacaaggagatgggatactaagaagtcaagaag

SEQ ID NO: 249112 - DNA, 201 bp, Homo sapiens
gccaaagccgaatggcctttcctttttgatggcatgctatgactgacaggccacagggcactgtgtggtccctccgtccctggttgcctgaatagccttgwttgaaaaaccagagctgcattgattgaaagaccagagctgcattgattgagggaagccacctggaaaatggtcatgtcaggtaacagagggatctcgtct

SEQ ID NO: 249113 - DNA, 201 bp, Homo sapiens
atgagtgatgtggtttttaaggggtggcgataacaccttatagtgttataaaggttaccttatagtgtagcttattctacagactatactttggactacayttttacagactatgtacttttggaacatgtataagcttcatttattaaatcagtatttgttgagcacctgggatgtgctgggcactgctagaaacaagat

SEQ ID NO: 249114 - DNA, 201 bp, Homo sapiens; identical to SEQ ID NO: 48970

SEQ ID NO: 249115 - DNA, 201 bp, Homo sapiens
ggatattcaaggggttcgaacccatgaactgaagccctatgtcatatttataaagccatcgaatatgaggtgtatgaaacaatctcggaaaaatgccaagrttattactgactactatgtggacatgaagttcaaggtaagagcaagtcaaaaactactgtattgctttcagtggcttctgcgtgggagagatctgggttg

SEQ ID NO: 249116 - DNA, 201 bp, Homo sapiens
agaaggctcaaacctgttgctttcctttaacttctccctttgaagccctattttgtgccaaccaagtagagtcttcctgagttaaaaagccttcagggagrgtcttgataggcaactttcagaaaaagttactgtcccaagcagcagagtcagggcaaaccagtttctcagtcccaatcatgtggtgatcatttgccttgc

SEQ ID NO: 249117 - DNA, 201 bp, Homo sapiens
atctaagtgagaaaatatacttacttaccagaagatggaattgatattggtgtgttttctttctatgtattttaaaacacttaaaaaaaaaaggttaagaraaaaggttgcatatgtcagttcattctattaacaaatgctctttatattttatatatatgtttatatttgagacgaagtctctctctgttgcccagactg

SEQ ID NO: 249118 - DNA, 201 bp, Homo sapiens
ttactcatcaaacacaaatctttttgttttcttccagactgtttcgtaacctatttatcttatgctaaagagacaaagtctctgacttttaaacttacttyttatggccacatttctatcatctgtcacctgggcagagctttgtgaaggaccaggtaccactcatgtaaaaccgctctgggcttccttctatagggaggc

SEQ ID NO: 249119 - DNA, 201 bp, Homo sapiens
aaggcagagctctctgattctctaaaatgagaccagctaattctcatggcattcaacattagatgaagtttgctgggggtcaggttcctgtgattccttayctcattcctgaatgttgaaacaatgtggattactccatgggtcactagaaaaattcccaagagttttctggggttcttccaatttatgagaaaggaagtt

SEQ ID NO: 249120 - DNA, 201 bp, Homo sapiens
tgtgagtattgcaactgcccgacaggttcttcctgtttgcaataaagaccatggcattgcagtaaataaagagtctaattgatgtgaggctggccatgccwcatgggagatggagttgttatttaaatcaatctccttgaagggccctagattaggggtttttcaaaggtagtttggggagggcgtgggggtggtggctat

SEQ ID NO: 249121 - DNA, 201 bp, Homo sapiens
gtctctgacttttaaacttacttcttatggccacatttctatcatctgtcacctgggcagagctttgtgaaggaccaggtaccactcatgtaaaaccgctytgggcttccttctatagggaggcaggggaaaactagcagagccgcagggtctagaaggttggttcccaagctggatgcattttggaatcatcaggggagc

SEQ ID NO: 249122 - DNA, 201 bp, Homo sapiens
taaacttacttcttatggccacatttctatcatctgtcacctgggcagagctttgtgaaggaccaggtaccactcatgtaaaaccgctctgggcttccttytatagggaggcaggggaaaactagcagagccgcagggtctagaaggttggttcccaagctggatgcattttggaatcatcaggggagcgtgaaaaaaaaa

SEQ ID NO: 249123 - DNA, 201 bp, Homo sapiens
gaataaacccagaatactaattacaataatttttgcacattacatttcttattgtaaattaatctgagaaaatatagtacagatactgtgttctttttatmccccctgcttcaatcatttgcttgtactcagcaatttctatggaagaaggtaagaaatagtatttaggaaaaaactcttatctccaaagtcttttagaaa

SEQ ID NO: 249124 - DNA, 201 bp, Homo sapiens
ttaacctgttggctctaacaggggccaagagagtgagggtatttatataccaaggttgccattggtgtataaaaaccctcatgttgccattggtgtgtaartactctcactcccctggcccctgttcccccgtgggattaagctctagttgcctacagtggttacttcttgataacaacctattactggctttttcacctt

SEQ ID NO: 249125 - DNA, 201 bp, Homo sapiens
ctaacaggggccaagagagtgagggtatttatataccaaggttgccattggtgtataaaaaccctcatgttgccattggtgtgtaagtactctcactcccytggcccctgttcccccgtgggattaagctctagttgcctacagtggttacttcttgataacaacctattactggctttttcaccttccctgcctcaatac

SEQ ID NO: 249126 - DNA, 201 bp, Homo sapiens
aaccctcatgttgccattggtgtgtaagtactctcactcccctggcccctgttcccccgtgggattaagctctagttgcctacagtggttacttcttgatracaacctattactggctttttcaccttccctgcctcaataccctactccccattgtatattaaaccagtgcaaaagtgtcttgtgtttatatgtaaagaa

SEQ ID NO: 249127 - DNA, 201 bp, Homo sapiens
aatagagatggggtttcaccatgttggccaggctggtctcaaactcctgacctcaggtgatccgtccggctcagcttcccaaagtgctgggattacaggcrtgagccaccacacccagctagccttaccttttaatatcatcacatatgcattttggaagtacacattcagatcatagcaactacttacccaatggtgtca

SEQ ID NO: 249128 - DNA, 201 bp, Homo sapiens
ttaatttgcttatgtggcctgtgtgatttatattagactttctagaagtccatgctgaaaatagttttcaatattctattattatcctcacaaatatctargtccacgagcctcaggtttggagccactgacttaaagggtcccctctcttagggaatgtttccggtagacatgattattttttaaactactagaaagatc

SEQ ID NO: 249129 - DNA, 201 bp, Homo sapiens
tatattccagtgtgctgagagctggtggccagtgggactgagtgagctgtgtgccgtgtattgacccgcttcctagtcctgaattcctttcagaagctccrgcagggaggatgatacagtcagacaaaggagcagatccaccagacaagaaggacatgaagctttctacagccaccaatccacagaatggtatgtgtcacc

SEQ ID NO: 249130 - DNA, 201 bp, Homo sapiens
atcattttctggaagtttttttctttgagttttgtcttagctttggctgtcataacaaagtaccatagacagtggcttaaacaacagaaatgtattttctsatacagttctggaggctggaagttgaagattgggatgccagcatggttgggttcttgcgagggttctcttcctggctttcagatggccgcgttttcactg

SEQ ID NO: 249131 - DNA, 201 bp, Homo sapiens
gtttcaccatgttggtctgtctgttctccaactcctgaactcaagtgatctgcccacctcagcctcccaaagtgctggaattataggcatgagccaccacrcccggccaggaaactgctagaattttgtgcaggggctggggaagatcttgcctcacataagggctgtgggagaccaagaagttgctttatgatcgcatgc

SEQ ID NO: 249132 - DNA, 201 bp, Homo sapiens
tccccccaaaaaaattaggggcaggctactgagtccaaagatatagggcaattttattaatgaaatgttattgatgttagtttgcagatgattattaaaawgttatttactgaaggtgcacttatagttgtcttccctctttctttcccttcctccctccctctctccatctctctgtcttcttcccttcctttcattgaa

SEQ ID NO: 249133 - DNA, 201 bp, Homo sapiens
ttaagaacaacactatgacaaagctagcaccttctcatcttgggcaaagaaactgggtttcggatagctatgtgactttgtgacgttcacaaagtaagagrtggaacagggcttgaagtcagatcttttggcctgagatccagtgtcatttccactcctggtgagaccccatggcatgccccagctatctgagttgccttt

SEQ ID NO: 249134 - DNA, 201 bp, Homo sapiens
agagggtttatgaagaacatttgattgcagaacagaaacctatctcttagtacttacagatttgagaccaatttatcaataaattagaactttaagacaaygtctgtatttggagtgctgaaatttatcagtcaaaagttataattcacaacacaaccaccagtcatcaaatatcctcaacggcacgcactacttagagaa

SEQ ID NO: 249135 - DNA, 201 bp, Homo sapiens
gaactttaagacaacgtctgtatttggagtgctgaaatttatcagtcaaaagttataattcacaacacaaccaccagtcatcaaatatcctcaacggcacrcactacttagagaattttctgagttccaactaaattgtgtctaccaatctcagtcagggtggcagagtgacagcttctccagcccgtgaaatgaagaatt

SEQ ID NO: 249136 - DNA, 201 bp, Homo sapiens
attttaatatttggctttctgacctatgcatgtatttccctcaattccattgcatttgcctatttccttatattaatgagaagctaaggaaggcattaatytgattttctaagaacagtccctctaattaggttttaattgtgggaggtttctgtatctttggatgaatctaagtattcttttatgtctgtgtggttgaaa

SEQ ID NO: 249137 - DNA, 201 bp, Homo sapiens; identical to SEQ ID NO: 131083

SEQ ID NO: 249138 - DNA, 201 bp, Homo sapiens
ccttgaatgtcagattccttatctgtaaaacaaaggttttgcatttgattatctctaagatccgcttctgcccccagttttaaagtttgatagggaaagargtttaagtcaggataccaggccagggaggaaaggaagggagggcacaggcctctggagttcagctgcctcccccattaggattgaagtcccagctgctgg

SEQ ID NO: 249139 - DNA, 201 bp, Homo sapiens
aagaactgggaaaatgagaagtgctatgagggcaagaagttgcaactgttttcttagctacctggagggagggaaaatcattttctggaagtttttttctwtgagttttgtcttagctttggctgtcataacaaagtaccatagacagtggcttaaacaacagaaatgtattttctcatacagttctggaggctggaagtt

SEQ ID NO: 249140 - DNA, 201 bp, Homo sapiens
acacaacattcagtccaccataaatttgtcataggaacctgaagatgaggagccaagcacagtttttagaatttgcataagttgtagattactgtaattaytgtttttgcctctatggctgagaaactttgggtcaaaacgagccttttagaatgtatgaattagttatctaggtagccctgaagttggctctagatttat

SEQ ID NO: 249141 - DNA, 201 bp, Homo sapiens
ggttaccttatagtgtagcttattctacagactatactttggactacacttttacagactatgtacttttggaacatgtataagcttcatttattaaatcmgtatttgttgagcacctgggatgtgctgggcactgctagaaacaagatgtaaagtgctgaaagaaaaaattcagaacctttattcaaatcaacaattttg

SEQ ID NO: 249142 - DNA, 201 bp, Homo sapiens
tgatccaccttgagagtctgtctttgtctttgtcatatgagatcatgtatagaatcctactctcagtaaatgagattctctcatgtatagactcttactcwgctagtaagatttcaattgctagtcatagctaataagagtcaggatctgaccttaattttgattctaaaactacatcttcaaatttttaaaatgttcatt

SEQ ID NO: 249143 - DNA, 201 bp, Homo sapiens
aataccataaaatattgcagtatcaaatttttaaagagcaatatatatattttattattaagtttgatgccatcttctggtggattctagtatagataaayagtagtaggttccaaaatgatgagacatgcatgaaagttttttacatttctactctttaatttttttgtaaattgggaaaagatttttcaaatttagtgg

SEQ ID NO: 249144 - DNA, 201 bp, Homo sapiens
actgtgttggatatttttcaatactgatggcccgagaagcaaaataagtaaatgagtacagtacaaggagatgggatactaagaagtcaagaagcaacatmaaaaatcatgaacatttgagcctaaacttctctaagctaagagattctgttcccaaagatgctttttatcatggtacttaggctcaggaggcgagttctc

SEQ ID NO: 249145 - DNA, 201 bp, Homo sapiens
tattatttttcctcattttctcccatttcattggtctctaattgctttggcatattatctttaccccaattaaggcaattttcttctttctcttatcacayacaaataaatctagccttttattacttaccaaaacactttttattctagtgtccacctgtttcttttctatttttctgtacttcatataaggaatatttt

SEQ ID NO: 249146 - DNA, 201 bp, Homo sapiens
acactttttattctagtgtccacctgtttcttttctatttttctgtacttcatataaggaatattttctgattttcttacttctcttgaatccatgcttcrttataagtaaatattaatataagcatctagtagtttcttaggtcttccaaatatgttatgcccaaggatttatattttgatatatatacttttttttttt

SEQ ID NO: 249147 - DNA, 201 bp, Homo sapiens
gctggagacaaactggtagaagtgaatggagtttcagttgagggactggaccctgaacaagtgatccatattctggtaaatcttctttttgcctttttgtwaatgacttggagaaatgccaaggctgaactgggaccatcaagcccacgtgtgtgcactgggatgtaccggggactcaagttctcttggcagctttctccc

SEQ ID NO: 249148 - DNA, 201 bp, Homo sapiens
tatttatacttgcccatttggcttagtttttaattcccctagcttattctcatccttctttgttctgtcccactggaaaacactccacatgtgaaggctgwggttgaggccggggagtgtttgcgggtctgtggaaggagaagcagtgggtgagaccaccgactccagccagattggccagtttgaaccctgggttcatta

SEQ ID NO: 249149 - DNA, 201 bp, Homo sapiens
ccgggcatggtggtgcgtgcctggaatcccagcaactcgggaggctgaggcaggagaatcacttgaacccaggaggtggaggttgcagtggccgagatcgygccgttgcactccagagtgagcaacaacagcaggggggtaggcagggagggagaagaacaaaaagctactttatgcttatttaaagttatatgatactga

SEQ ID NO: 249150 - DNA, 201 bp, Homo sapiens
cttgggagacagagattgcagtgagccaagatagcaccattgcactccagcctgggtgacagaggggactgcatctcaaaacaaaccaaaaaacagaatayggctattttgtgatatctagaaaacaaagaaaacagtttgctttgtatttggtttcctctgtcttcatggggcagctggggatggaagtgtgtgagaccc

SEQ ID NO: 249151 - DNA, 201 bp, Homo sapiens
cctgggcagagctttgtgaaggaccaggtaccactcatgtaaaaccgctctgggcttccttctatagggaggcaggggaaaactagcagagccgcagggtytagaaggttggttcccaagctggatgcattttggaatcatcaggggagcgtgaaaaaaaaaaaacaaaaaaaaaaaaaacaaggggccacctttctgtat

SEQ ID NO: 249152 - DNA, 201 bp, Homo sapiens
gctgggtgtggtgctgcatgcctgtaatcccagctactcaggaggctgagacagataatcgcttaaacctgggaggcggaggttgcagtgagccgagattscaccattgcactccagtctgggcgagaaagtgagattctgactcgaaaaaaaaaaaagtgttttcttatttccttttactcgtaactcctttatttctcc

SEQ ID NO: 249153 - DNA, 201 bp, Homo sapiens
aaaccctgtctctactaaaaatacaaaaaattagccatatgcagtggcacgcacctgtaatctcagctactctggaggctgaggcacgagaattgcttaarcctgggaggcagaggttgtagtgagccaagattgagccactgcactccagcctgtgtgacagagagagactccatctcaaaataaataaataaaatagaa

SEQ ID NO: 249154 - DNA, 201 bp, Homo sapiens
caatttcccaatggcagccaataattaagcttttgaagcatcggggccaccaaactcaagttcatttctctttggcaactagagacacaacttactaaacrccaaccacaccgtgctgtgcagccattggtgcagttgcctggggtgtttcttctctttgagagtcttaaatccaaaatggcaatagtcatattatcaata

SEQ ID NO: 249155 - DNA, 201 bp, Homo sapiens
aattatgtttccaaacctgacactgttttgaaagtttcttttgctaatgaacatttccagacctgttcctcattctagtttccttttctttctgtcctttkttcttgtcaatattctgatccattaattattcattgttattcatctaatttccactgggttatctattaattactcatcaaacacaaatctttttgtttt

SEQ ID NO: 249156 - DNA, 201 bp, Homo sapiens
tcttgtgtttatatgtaaagaaaagttggcgtctagattcagataactacaggttttattgtttttcagtgacatgatagttcagtgggacatttgaaagytatacagggcatgaggcgattcttcactgtgtagggcaacttgtggaaaactttgcttaaagagcagtaggcatattttctttgcccgtgttttcttaat

SEQ ID NO: 249157 - DNA, 201 bp, Homo sapiens
ctgtgccacgtatgtttagttctgctttcataatggtttgtgttttggtaaaactttctttgctgatctcatttaactatgtcattccatctttgttgtawaagtatacaacaccagggatagttcttaagtatttctaaccatatttattttaataaggaaaactgacttattggaatgtaggcagctggcttttaaaag

SEQ ID NO: 249158 - DNA, 201 bp, Homo sapiens
ggacatttgaaagttatacagggcatgaggcgattcttcactgtgtagggcaacttgtggaaaactttgcttaaagagcagtaggcatattttctttgccygtgttttcttaatcccttcctcccctaccctgttggccgaaatgtagacgtgatgactggagctgcagctgccatcttggagcaggtagacagaaccatg

SEQ ID NO: 249159 - DNA, 201 bp, Homo sapiens
aatcatctgtgcaaaattttcggaccttactgtttttatacatagtttcacaactgaatgtgacagcataacaaactgtattttttccatttgtccaattragtctgtactatccatatttttctatttctcctaaaggatgaagacctacaagagatggaaaatttagcccaaagaatggaaactcagtttggccaattt

SEQ ID NO: 249160 - DNA, 201 bp, Homo sapiens
gcatggtggtgcgtgcctggaatcccagcaactcgggaggctgaggcaggagaatcacttgaacccaggaggtggaggttgcagtggccgagatcgtgccrttgcactccagagtgagcaacaacagcaggggggtaggcagggagggagaagaacaaaaagctactttatgcttatttaaagttatatgatactgaatca

SEQ ID NO: 249161 - DNA, 201 bp, Homo sapiens
gccttgcaaggagcacacaaaacccaattatgggtttcttgggggggcacacaaacaaagaatgataggaagttctcatgctgcttttagtcattgccacrtgaaaacctaatatgaaaataagaaattaagcaatttcatttagaagcaatatgtcaatagcagagtctacacaaatgtcttgttggggacagaataatg

SEQ ID NO: 249162 - DNA, 201 bp, Homo sapiens
tctgtgcatccttagagggagagggagagggagagagaaagaagagagagagagagagaggaagagaagagaagagaagagaagagaaagagagagagatygattgatctgatgtgttttttcttcttataaggccaccagttctatcaaattaaggccccagcagtatgacctcatttaaccttaattacctccttaaag

SEQ ID NO: 249163 - DNA, 201 bp, Homo sapiens
ccttctatagggaggcaggggaaaactagcagagccgcagggtctagaaggttggttcccaagctggatgcattttggaatcatcaggggagcgtgaaaamaaaaaaacaaaaaaaaaaaaaacaaggggccacctttctgtattgctttcagaatcattcagcctaaaagctattaggtagagctgagcagagtaggcag

SEQ ID NO: 249164 - DNA, 201 bp, Homo sapiens
ggtggaggttgcagtggccgagatcgtgccgttgcactccagagtgagcaacaacagcaggggggtaggcagggagggagaagaacaaaaagctactttawgcttatttaaagttatatgatactgaatcatagtaaaaacataagaactgggtatgtatctttaaacatatcctaaggaaacttatcttaaaaaattaat

SEQ ID NO: 249165 - DNA, 201 bp, Homo sapiens
gaatctcattcagaaaaccaggaggcacattggaggactggaggagggtgttgagactaaatccgctgccatatctgggcaagaggcctgccccgagcgcrggctgatgtggcttttgagaagtcagtatctctgagcctcaataaatgaggtctttgatatctacaaacaatttttctctcttcctacctctccaacttt

SEQ ID NO: 249166 - DNA, 201 bp, Homo sapiens
ctatagggaggcaggggaaaactagcagagccgcagggtctagaaggttggttcccaagctggatgcattttggaatcatcaggggagcgtgaaaaaaaamaaacaaaaaaaaaaaaaacaaggggccacctttctgtattgctttcagaatcattcagcctaaaagctattaggtagagctgagcagagtaggcagctac

SEQ ID NO: 249167 - DNA, 201 bp, Homo sapiens
gggggtaggcagggagggagaagaacaaaaagctactttatgcttatttaaagttatatgatactgaatcatagtaaaaacataagaactgggtatgtatytttaaacatatcctaaggaaacttatcttaaaaaattaataaactcgttttggctttaaccatactagacagaatacattcagtgtaacgctcaaattct

SEQ ID NO: 249168 - DNA, 201 bp, Homo sapiens
tgtgaagtgcgtccctatagtttgttgtgtgtgaataataggatgaaaaatgcttagaacattcggtgagccactcaaggataaattcaactctgctgccrtctactaaggtggtcacttgaaaagttgaaaatgatttcatgaatttattctgaataaacttctcgctctcacatattctgctccatctgttctttgtgt

SEQ ID NO: 249169 - DNA, 201 bp, Homo sapiens
tggctttttcaccttccctgcctcaataccctactccccattgtatattaaaccagtgcaaaagtgtcttgtgtttatatgtaaagaaaagttggcgtctrgattcagataactacaggttttattgtttttcagtgacatgatagttcagtgggacatttgaaagttatacagggcatgaggcgattcttcactgtgtag

SEQ ID NO: 249170 - DNA, 201 bp, Homo sapiens
atgaggcgattcttcactgtgtagggcaacttgtggaaaactttgcttaaagagcagtaggcatattttctttgcccgtgttttcttaatcccttcctccyctaccctgttggccgaaatgtagacgtgatgactggagctgcagctgccatcttggagcaggtagacagaaccatgctacaccctagggtgacagagcag

SEQ ID NO: 249171 - DNA, 201 bp, Homo sapiens
ctccactctttctaccctggcccaagccaccctcatctcccacccagaccactgcagtagcttcctaactgctctctcctgaggccacacttgctctccckacggtttacaccaaccagaggagtctttcagaaacatgaatcaaatcatgtcactaccaacagcttcccatcacacttccacaacaatccaacactttca

SEQ ID NO: 249172 - DNA, 201 bp, Homo sapiens
cctgccttcctccagatgtctgctcaacgccaacctttcagagatactccaaccttactgcctatctaaaaaagcacccccatcactctctatctacctcrtcttcttatgagtacttattttttgttgttttttatgtttgtctctcttcttctacaaaatgtagatttcatgagaaagtggccttggattagttgagcc

SEQ ID NO: 249173 - DNA, 201 bp, Homo sapiens
gggtggatcatctgaggtcaggagttcaagaccagcttggccaacatggtgaaaccccgtctctacttaaaatacaaaaattagctgggtgtggtgctgcrtgcctgtaatcccagctactcaggaggctgagacagataatcgcttaaacctgggaggcggaggttgcagtgagccgagattgcaccattgcactccagt

SEQ ID NO: 249174 - DNA, 201 bp, Homo sapiens
cggtagacatgattattttttaaactactagaaagatcatttattttcaactattatagatgatccttcaattaatattattttgtatgtttctgctctgyttaagtcttatcataccctcctccccccaaaaaaattaggggcaggctactgagtccaaagatatagggcaattttattaatgaaatgttattgatgtta

SEQ ID NO: 249175 - DNA, 201 bp, Homo sapiens
ataagcagagagcagggtggggaagggggcattgggaaggagagagtagaaagcttgaaaagtttccatgagagttggagagcaaacagattaggtaaacrtagtgtgatcagcattaaaggccctcttaagttaaaggtcatatatttgaagtgcttctggggtgcgggtccagattagacagagggttggatttaacag

SEQ ID NO: 249176 - DNA, 201 bp, Homo sapiens
gcagatgcagaccatcctgcctaacacagtgaaaccctgcctctactaaaaaaatagaaaaaaaaattagccaggcgtggtggcgggcgcctgtaatcccrgctactcaggaggctgaggcaggagaatggcgtgaacccgggaggcagagcttgcagtgagccgagattgcgccactgcactccagcctgggcgacagag

SEQ ID NO: 249177 - DNA, 201 bp, Homo sapiens
attgagaactgtgacagaacagtgttgagacctaggagtgagcaggagtgagctggcgatggctaccagaaaagtagtgggatgatgttcaaagctggggrctcctagggaagaggaagaataatctggaaatggcagtgagaagcaaggacacaccccccacctccaggcccagtggaaggaaagctatacacaaggatg

SEQ ID NO: 249178 - DNA, 201 bp, Homo sapiens
attggcccttcttcaactctcttgtgaattagaatcacatggagagtttgatttaaacatgtagatgccctggccttatctccagggaattggaggcaggmgctctgggaggcccagattatttgcattttaacaaacacctcagatgtattccaaagtttgagagattaaattagagcttgttgcctttaacatacatat

SEQ ID NO: 249179 - DNA, 201 bp, Homo sapiens
tattattattttatattaaacatttttagagcatgcttgggttagtgagttaaatagctatcgaggtagctactgctatttttatcctacttctttgtatstttctttgttttttgttactgtctgcctagggttgctatatgctggagacaaactggtagaagtgaatggagtttcagttgagggactggaccctgaaca

SEQ ID NO: 249180 - DNA, 201 bp, Homo sapiens
ccctattttgtgccaaccaagtagagtcttcctgagttaaaaagccttcagggagagtcttgataggcaactttcagaaaaagttactgtcccaagcagcrgagtcagggcaaaccagtttctcagtcccaatcatgtggtgatcatttgccttgccaggccttacccgagttaccttttgctagtggtgacgtgcacgtc

SEQ ID NO: 249181 - DNA, 201 bp, Homo sapiens
agaggccctgtgtgatctggctccagccacttccctgaccctatttccatactccctgttgcttaccgccctgcagctatacaggcttccttgctgttccycaaatgctccaagcacagttcgtttctctgcaccactgcacttgctgttcccttggcctggcttgcccgtctctgcagaggcttcctgatgtggctccct

SEQ ID NO: 249182 - DNA, 201 bp, Homo sapiens
acctgagtggagctggtccacgcaagacttttctgagctctaatgatgggtaaagtcaactgggtaaagaggtggaagataaataaatatagtatttgtcrtttacttctaaaaagtgggtaggtgtggtttctaggaaatcaattcttctgaaaggctaaaaaatgtgtttaaaacatggagttagggggagcattttat

SEQ ID NO: 249183 - DNA, 201 bp, Homo sapiens
ggcgtgatctcggctcactgcaagctccacctctggggtttgccattctcctgcctcagcctcccaagtagctgggattacaggtgcccgccaccacgccyggctaattttttgtatttttagtagagacggggtttcaccgtgttagccaggatggtctcaatctcccgacctcgtgatccgcccacctcagcctcccaa

SEQ ID NO: 249184 - DNA, 201 bp, Homo sapiens
tcagcctcccaaagtgctggaattataggcatgagccaccacacccggccaggaaactgctagaattttgtgcaggggctggggaagatcttgcctcacakaagggctgtgggagaccaagaagttgctttatgatcgcatgctataggctgtgctttctgaagtactgctttcatgtacaggaatgtgcattaatctgaa

SEQ ID NO: 249185 - DNA, 201 bp, Homo sapiens
caggtgggtccatggtggaatatttatgtccccaaacaatgaatgcgtatcatccattttttgtgcacatgctgtaggttatagttgagacatttattctrttagccttttaagaataaggccatttcccatatataagatcttacttaacgtgtcaattgacaacattttacttttagttgggaaagaagtcttgcttct

SEQ ID NO: 249186 - DNA, 201 bp, Homo sapiens
ttgtacaaggaggtgaggtttctatgttgtcatatctgtggctaccttcctgagaccacatgtagaatggagcaggggtgagcaagttaaggtaagataarcagcatgcaatccgtaggcccaatttttatgaactttgtattttcttcgtgtgtgtgtgtgtgtctgtgtgtgtgtctgtgtttgttttgttttttgaga

SEQ ID NO: 249187 - DNA, 201 bp, Homo sapiens
ttcctaaatggtaacttcttgctatgtcctcacataatggaaggggctagccagctctcttggggtctcttgtataagggcattaattccatattcatgarggcagagccctgatgacctatcggctcccaaagaccttacctattttttttttttttttgagacagagtctcactctgttgcccaggctggaatgcgctg

SEQ ID NO: 249188 - DNA, 201 bp, Homo sapiens
tcccgggttcaagcaattctcgtgcctcagcctcccgagtagctaggactacaagcacaagccaccatgcctggttaatttttgtatttttagtagagacrgggtttcgccatgtttgccaggctggtctggcaatggaactcctgggctcaagtgatccacctgcctcagcctcccaaagtgctgggattataggcatga

SEQ ID NO: 249189 - DNA, 201 bp, Homo sapiens
ggcaacttgtggaaaactttgcttaaagagcagtaggcatattttctttgcccgtgttttcttaatcccttcctcccctaccctgttggccgaaatgtagrcgtgatgactggagctgcagctgccatcttggagcaggtagacagaaccatgctacaccctagggtgacagagcagtagccggaaggaacctattccctg

SEQ ID NO: 249190 - DNA, 201 bp, Homo sapiens
agcagggcagatgcaggggtaaattgcttcctgatttccatttctggatggtgacagctgcagagcccttgtgaaaggctcttgggggattttaccatgaracctggatacattgcactgtaactctgtccaccgagccccagtaaccctgctagctccatgattgtcatcctttctcctctcttattttccaggccatgt

SEQ ID NO: 249191 - DNA, 201 bp, Homo sapiens; identical to SEQ ID NO: 131154

SEQ ID NO: 249192 - DNA, 201 bp, Homo sapiens
ggtgacagagcagtagccggaaggaacctattccctgaggacttcatggagcaaggctgccctattagccctggattctctctgtctctgaactttcacaygaacaagatataaactactctgctaagccaaaattattctgggtttctacttcttgaaactaaatctacctaaagcaataccaaaaataaacattaaaat

SEQ ID NO: 249193 - DNA, 201 bp, Homo sapiens
atcatccattttttgtgcacatgctgtaggttatagttgagacatttattctgttagccttttaagaataaggccatttcccatatataagatcttacttracgtgtcaattgacaacattttacttttagttgggaaagaagtcttgcttctcagacagaaaagcagaactgattgagtggtcacaaagagaagcaagaa

SEQ ID NO: 249194 - DNA, 201 bp, Homo sapiens
ttagccaggcgtggtggcgggcgcctgtaatcccagctactcaggaggctgaggcaggagaatggcgtgaacccgggaggcagagcttgcagtgagccgakattgcgccactgcactccagcctgggcgacagagcgagactccgtctcaaaaaaaaaaaaaaaaaaaagcaatgatgtatgtatttctccttcccccttc

SEQ ID NO: 249195 - DNA, 201 bp, Homo sapiens
aggcaggggaaaactagcagagccgcagggtctagaaggttggttcccaagctggatgcattttggaatcatcaggggagcgtgaaaaaaaaaaaacaaamaaaaaaaaaacaaggggccacctttctgtattgctttcagaatcattcagcctaaaagctattaggtagagctgagcagagtaggcagctacacaaaggt

SEQ ID NO: 249196 - DNA, 201 bp, Homo sapiens
cacctttctgtattgctttcagaatcattcagcctaaaagctattaggtagagctgagcagagtaggcagctacacaaaggtggagagtaaggagcatgascagggtgaagaaggcatctgtgcaggggacaatggtagcctggtgccaattgtcagaggcagagtaaaatcaagagggcagctgccatcacttggcctct

SEQ ID NO: 249197 - DNA, 201 bp, Homo sapiens
tattgctttcagaatcattcagcctaaaagctattaggtagagctgagcagagtaggcagctacacaaaggtggagagtaaggagcatgagcagggtgaaraaggcatctgtgcaggggacaatggtagcctggtgccaattgtcagaggcagagtaaaatcaagagggcagctgccatcacttggcctctgatacccaac

SEQ ID NO: 249198 - DNA, 201 bp, Homo sapiens; identical to SEQ ID NO: 48969

SEQ ID NO: 249199 - DNA, 201 bp, Homo sapiens
ctagcttgggctctgacactttgtgcgaggctatcaacactgtctgtcccctatcttgcacatttaagtgctcttgattgatacaataagcaaaaaaaaamaaaaaaacaaaaaaaaaacaagggccagggttctcactgttagagaagggagttacaaacatggaaaggggaagtctagaatgaatcctgtagtgttgga

SEQ ID NO: 249200 - DNA, 201 bp, Homo sapiens
cacaaaacagccaccacgatggtcattggcaacactttatcagctggctacaaccgtttgtccttgcagcaaccctggataaataaaagtgctttaaaaarttattcctatttgtttgttaaagttagaaagtaaaatatctacagttctgtttaggtaccctgaagtttcttattctaaagtttcttctggcccagtgtg

SEQ ID NO: 249201 - DNA, 201 bp, Homo sapiens
atccagaactttccatggtgctttgtttcccctacaaagctattgcccatccaaaaatcttgggtagcaaacagggaatgttctagttatagaggaatacytccatgcttcctttccaaagtgggactattttgagttttagataatgtgtgtgtatttggaatatacagtataatgatgattatccctgtgagagggttt

SEQ ID NO: 249202 - DNA, 201 bp, Homo sapiens
gttgaaagtggccattttgtatctttaatgttatccctatcagattaatgttcacttgaaatttatgtttaaattttatttaaactggtacattttctttrgttttatgttgtatatggttaaaaagtttcaagtgtttaggtaagagtaagataagttcacacgggaagttgaggggagtaatctgtctgcaaactatga

SEQ ID NO: 249203 - DNA, 201 bp, Homo sapiens
ccgaatggcctttcctttttgatggcatgctatgactgacaggccacagggcactgtgtggtccctccgtccctggttgcctgaatagccttgtttgaaaraccagagctgcattgattgaaagaccagagctgcattgattgagggaagccacctggaaaatggtcatgtcaggtaacagagggatctcgtctattctct

SEQ ID NO: 249204 - DNA, 201 bp, Homo sapiens; identical to SEQ ID NO: 48972

SEQ ID NO: 249205 - DNA, 201 bp, Homo sapiens
gtttgctgaagatttgctgtgggttccagagggcgtgggtgggtggaaggggtcttatagggattaaagcacaggggataaggggtgacctgagcttgggrgctgaaggacatgaacagggataaaggcctaatgagattagtcctcatggtttcaggtcagaaagtggtgaggagggtctggcaggggccttgcaaggag

SEQ ID NO: 249206 - DNA, 201 bp, Homo sapiens; identical to SEQ ID NO: 48967

SEQ ID NO: 249207 - DNA, 201 bp, Homo sapiens
ttgagagttaccagaaaaacaggaaacccttgactgtttaggcttctttctagagaaatcccttttttttctttttttttttctttttttttttttgagakggagtcttgctctgtcgcccaggctggagtgcagtggcgtgatctcggctcactgcaagctccacctctggggtttgccattctcctgcctcagcctccc

SEQ ID NO: 249208 - DNA, 201 bp, Homo sapiens
ggcttctttctagagaaatcccttttttttctttttttttttctttttttttttttgagatggagtcttgctctgtcgcccaggctggagtgcagtggcgygatctcggctcactgcaagctccacctctggggtttgccattctcctgcctcagcctcccaagtagctgggattacaggtgcccgccaccacgcccggct

SEQ ID NO: 249209 - DNA, 201 bp, Homo sapiens
ggaccctgaacaagtgatccatattctggtaaatcttctttttgcctttttgttaatgacttggagaaatgccaaggctgaactgggaccatcaagcccaygtgtgtgcactgggatgtaccggggactcaagttctcttggcagctttctccctccaggctcccagaccttgtctgtcacccatgtcacttgctgacctc

SEQ ID NO: 249210 - DNA, 201 bp, Homo sapiens
caggctggagtgcagtggcgtgatctcggctcactgcaagctccacctctggggtttgccattctcctgcctcagcctcccaagtagctgggattacaggygcccgccaccacgcccggctaattttttgtatttttagtagagacggggtttcaccgtgttagccaggatggtctcaatctcccgacctcgtgatccgcc

SEQ ID NO: 249211 - DNA, 201 bp, Homo sapiens
actgatggcccgagaagcaaaataagtaaatgagtacagtacaaggagatgggatactaagaagtcaagaagcaacataaaaaatcatgaacatttgagcmtaaacttctctaagctaagagattctgttcccaaagatgctttttatcatggtacttaggctcaggaggcgagttctcctttttggtgagggtggagagg

SEQ ID NO: 249212 - DNA, 201 bp, Homo sapiens
gattaaagcacaggggataaggggtgacctgagcttgggggctgaaggacatgaacagggataaaggcctaatgagattagtcctcatggtttcaggtcaraaagtggtgaggagggtctggcaggggccttgcaaggagcacacaaaacccaattatgggtttcttgggggggcacacaaacaaagaatgataggaagtt

SEQ ID NO: 249213 - DNA, 201 bp, Homo sapiens
ttcccgggggccgcaactcactgccgttgaggctccgggtttgcagccgtggaggtagtgaggtcgtggcctagatgagagcccccatcagggctctgccragggacccctggctctgagctgggctggcactgcggccagagcccctccgcagcttcccactgagtccaaggccctgaggaggctgaggggcagcagcgg

SEQ ID NO: 249214 - DNA, 201 bp, Homo sapiens; identical to SEQ ID NO: 49003

SEQ ID NO: 249215 - DNA, 201 bp, Homo sapiens; identical to SEQ ID NO: 49007

SEQ ID NO: 249216 - DNA, 201 bp, Homo sapiens
agggcctgggtcatacccggacgtccggctccagacttcatggtgttgcccagtgcggcctctgggttgctctagttccaaatttcagcgtgaatgtgaasgtgcctcccaagagcccccggagatggacttcaggggcaaggacacgggcgccactgtcctaggagggcagcccggctgtgctcctgaatgaggtgctgg

SEQ ID NO: 249217 - DNA, 201 bp, Homo sapiens; identical to SEQ ID NO: 49010

SEQ ID NO: 249218 - DNA, 201 bp, Homo sapiens
tcgacggagctgcactgtctctgataatgaagcctcgagaagacgggagttccggcaactacagggagctcttcctggaaatctgccggagctgcagcgcrgtgctctgctgccgcatggcgcccttgcagaaggctcaggtgctgcccgcccgtcctcgatagctggtggtcagggcgtccaaaacactgaaaaccttcc

SEQ ID NO: 249219 - DNA, 201 bp, Homo sapiens
gagaaggcgcaagttatgctggccgtggatgtttttatacatcagagttaaatgggtctagtctgaggactttttgagcagaaagcttctataggaatacycattctcaaaggagggaggaagtgggggcatgggacttagcctgcagtggtggagggtggccagccccagaggcagatctgctgaaggagtgaggctttc

SEQ ID NO: 249220 - DNA, 201 bp, Homo sapiens
cccaagagcccccggagatggacttcaggggcaaggacacgggcgccactgtcctaggagggcagcccggctgtgctcctgaatgaggtgctggcaacgcrgtgccaggggcttctctcagccttcctggcagggtctctgcagcgtctccgccttctcggatccctggacccctggcgtgtccgcagtcagctgcacctg

SEQ ID NO: 249221 - DNA, 201 bp, Homo sapiens
ggacgttcagatcatgtgaaagctgaggaaagagaagttcggacagactagacaccctgtgcggtgtcagctcccgagaggcagggcctgggtcatacccrgacgtccggctccagacttcatggtgttgcccagtgcggcctctgggttgctctagttccaaatttcagcgtgaatgtgaaggtgcctcccaagagcccc

SEQ ID NO: 249222 - DNA, 201 bp, Homo sapiens
tacaggcatgagccaccacacccggcccgctttttaattctttataaaataaaattccctgcgaggtgcagttcatggaatccgataaactagaaatcgtstgggccacagcgcaggagcgtcccaaaggaaagcaggttctcccgaaacaagtttccagtcgggggttttccccaaggcggggggtggtctgggcagcag

SEQ ID NO: 249223 - DNA, 201 bp, Homo sapiens
ggttctcccgaaacaagtttccagtcgggggttttccccaaggcggggggtggtctgggcagcagccctttctggcctgtgcctcgtgcggtagagaggcrtgctgtcctcacgggtcgggcacgcggtcctcacgggtgtgtctgtgtctgtgctgcgttgccagctggcagctcgtgggtcccactgaccttccctcct

SEQ ID NO: 249224 - DNA, 201 bp, Homo sapiens
accttggtctgtggcccgcatgctgccatctgggaaatacatccatggctcccttacctaggacccagggctgtggcgtccccacattcttcctctccackcacactgtgaggtgtggctttgtcttcctgagcagtgtgaggtgtggctttgtcttcctgaaggtgtgaggtgtggctttgtcttcctgaaggtgtgagg

SEQ ID NO: 249225 - DNA, 201 bp, Homo sapiens
atggttcctgactggctccaggtgctgctgacggcactggtggggccacctcagggacccctgctctagaggtctctcggggagtgttgctgaggctgccrggcgcagctcagtgggtctggatggggcctgaggtcccgcatgcgccaatgggaggcccttgccgctactcctggagccatgtgttcgtcccccaaagat

SEQ ID NO: 249226 - DNA, 201 bp, Homo sapiens
gaacagcacactcggttcgtgctccggaatgctgggatgagcagtggcggggcacagtcagagccctgtggccgccatgatgttttggtgacccacacggktgggcactctcctgatcctcccactctgacctgtggctgcccctgtccctgacgattgcctctgcagtccaggtggatgcatctgtggtcccctgacctc

SEQ ID NO: 249227 - DNA, 201 bp, Homo sapiens
tgaccaccaagaggatcgaggagcagagcctgcacgacgtcctgttcgagctgagcaagacggtcctgcgccacagcgggagcctgaccagagacaacctstccgggtaggcagcgcgtccccgcccccacccccacactcccgcaaaaggggcttcagacccagtggccttcacctgcaagtcggggagccgcattgtct

SEQ ID NO: 249228 - DNA, 201 bp, Homo sapiens
ccccggcatgacccccacagacagggccggcgtccacacttgaacagaaagcgcctgcagccagcacatgcccggcgcacacgggaacacgccgtggcgcygagaccacctgcgttctgcaaaactttggaggaataaacgtgtcactagtcctcacgtggggcatatgttacttccagtggatggctttcttttaacctg

SEQ ID NO: 249229 - DNA, 201 bp, Homo sapiens; identical to SEQ ID NO: 49009

SEQ ID NO: 249230 - DNA, 201 bp, Homo sapiens; identical to SEQ ID NO: 49011

SEQ ID NO: 249231 - DNA, 201 bp, Homo sapiens; identical to SEQ ID NO: 49013

SEQ ID NO: 249232 - DNA, 201 bp, Homo sapiens
tgctgttctgccgcacgctgggtgcacgtggatccctcctcccatgtggggtgggccacgtcggtaggtggcggctgcctccctctgtcccgtcaccgaastaacagttatgccttgcctttcagaacgtctgcttcatcttccctcagtttttataccagttcttctgtgggttttcacaacaggtcagtcctagggtct

SEQ ID NO: 249233 - DNA, 201 bp, Homo sapiens
aggagattatgaccatgttctttccaacttaggtcatccaggcagaaacccaaggacttagctgtaaagactgtgaccaagaaggttgagagtaaagaccraccaagatcttagaccacaagatgaacgccttcctgttgtttcaaaagtacagggacttaacgagtccacaaagagagtctgcacttgctttacctaaaa

SEQ ID NO: 249234 - DNA, 201 bp, Homo sapiens
acatacccatctagagcatagacagggttcaggaccatccgcagactctgcatccccgcagggtctgggaatgtacccctgaggatgaggagggcctgccrtgccgcgggaggagacccccagcccttttctccccccacagaattgagtgtggaaccagtgagaacctttcaggtggaaatgtttgaggaaggattcctt

SEQ ID NO: 249235 - DNA, 201 bp, Homo sapiens
attccatagtacttttttaagttctcaactggcttttgaaacatttcatacaaattaacttgtgtttcagtttcctatcttgaaacaagaaggcacccacrtttccccccatctcttcattcttacagcttgaactgttacatttaggcacatagatgggggggaaaagattataaagaaattgactaaaaacttggaaat

SEQ ID NO: 249236 - DNA, 201 bp, Homo sapiens
caggcattcgacaggtcctgtctcactccatcctcacgccccgcagcaagatggggcccaggcatggtggggctggaccttgcccgcagcagcctgactcmtcggggagcctctggtttgggggagagcagcaggcacgcaggcccgggcgggaggaggtcctccgtgagtgggagccgtggccagcggagaggggcccgg

SEQ ID NO: 249237 - DNA, 201 bp, Homo sapiens
agacttggctttacctacctaaggctgaaggacaattacatggagatattaaacagggagaaccacatcgaaaggtatgtgcagacctcaccctcagatgygaaaggactaacgaataaagagtgttctttataaggttctgcgtttgagggaaaagacaagttctctatgttctcccacaattcgcttcctctccttccc

SEQ ID NO: 249238 - DNA, 201 bp, Homo sapiens
ggcattcgacaggtcctgtctcactccatcctcacgccccgcagcaagatggggcccaggcatggtggggctggaccttgcccgcagcagcctgactcatsggggagcctctggtttgggggagagcagcaggcacgcaggcccgggcgggaggaggtcctccgtgagtgggagccgtggccagcggagaggggcccggac

SEQ ID NO: 249239 - DNA, 201 bp, Homo sapiens
gtctcagagatgagagcccagcttggagggtgtcaggcaccctgtcagccccagagaaacctgcttagctctagagagcccagcccggctctggagagccyggccattctaacagccctgaaggcgatggctctgtaagaggaagattccatcccaaacctctctgaccagctcctgggctttgtagccaaggagccacag

SEQ ID NO: 249240 - DNA, 201 bp, Homo sapiens
ccttaagaaactgattaaatcatgccaactctgagctaaaaataagcattctaacgattcatgtagtttgttgagagctgatttgcttctgagcatgtacrgaagctgagcccggctgcgtagagacagtggcacggagtttctcctgccccctgcgaggccttgggccccggcatgacccccacagacagggccggcgtc

SEQ ID NO: 249241 - DNA, 201 bp, Homo sapiens
cgatggctctgtaagaggaagattccatcccaaacctctctgaccagctcctgggctttgtagccaaggagccacagcccgtcagccttggtagaaccacrgcctctcacattgtttcctaaaacattgaccccacgtctctgatgtgctgggagctcaccatgtcaccaccgcttggtgatgagaccccatcctcctgcc

SEQ ID NO: 249242 - DNA, 201 bp, Homo sapiens
ctttctggggagagaagtcattgcttgctctgtactgacgaccagtgctcgggacgtccttcccatccgagacttcaagatagaaaaacatccctatttcratccctttgtgttttgttttttgtttttttttttttgcttctgtgaaactgaacttcagagacttctatgtcccatttgagatgacttcatagaattcct

SEQ ID NO: 249243 - DNA, 201 bp, Homo sapiens
ctggttcactacaaccaccctatcagctggacgttcagatcatgtgaaagctgaggaaagagaagttcggacagactagacaccctgtgcggtgtcagctyccgagaggcagggcctgggtcatacccggacgtccggctccagacttcatggtgttgcccagtgcggcctctgggttgctctagttccaaatttcagcgt

SEQ ID NO: 249244 - DNA, 201 bp, Homo sapiens
tgatgtgggaatgaattccacgttgagcccgtgttagatttccccgagtaccatacttagtcgtcttcctctgtgatgagtagatttgtagttttctagcrgacattcactctctggttgtttgcctaacccctgggggtttgttttatttgtatcttgcttttttctttttgccactggcgtcccttcccaccctcagat

SEQ ID NO: 249245 - DNA, 201 bp, Homo sapiens
ccttttttttttccttttagcttgcattggacacacactactggacttggatcaaccattttgtcatctgggggtcgctgctgttctacgttgtcttttcrcttctctggggaggagtgatctggtaaatatctgataagtagctgataatctgataaatatcatgtggttgttatttttttatcaagggttgaagacaca

SEQ ID NO: 249246 - DNA, 201 bp, Homo sapiens
ggaacagtctgttcctttcaggccatgccttcgtgatgtccagcagacccacagcagtgcctgccccgggtggtgctccccagactgccaggccctgagcrctgtgcctggtgagtggccatgcctcctggcagcaggctgtcccaccctcctcctaatggcttgttgctggcctccaggagcttcctcacagttgcaggt

SEQ ID NO: 249247 - DNA, 201 bp, Homo sapiens
taaattattctataggaatatctatagatcctgtgtaggattggaggaacaatagaattatggacatctctttcaaaagttcaccaatggagcattttctrcactgacatcgtaagccatagtaacttctcattttgatgccacaaatgagaatgcgaagacaacagttatttgttgaacagcaagacattcctaagtgaa

SEQ ID NO: 249248 - DNA, 201 bp, Homo sapiens
ctgataaattctttgggaaagaacttttttctgtaacaaggaaagtgcccagcagcgttgagtgtgggggaaagcgcccagcagcgttgagtggggggaarcgcccagcagcgttgagtaggggggaaagcgcccagcagcgttgagtggggggaaagcgcccagcagcattgagtgcgggggaaagcgcccagcagtgtt

SEQ ID NO: 249249 - DNA, 201 bp, Homo sapiens
cccatggcacctgttggccatagaatcactagtgttattctcagtattttatattatttagaggtacctggaccccaagtgggttctaagtgacaaacttmgaacagtttatacaaaacaaaagacaatcaatattcctgaccaccttgagtccagatcccatctttccatggttgagacatttttggtggtggttataat

SEQ ID NO: 249250 - DNA, 201 bp, Homo sapiens
tttgggaaagaacttttttctgtaacaaggaaagtgcccagcagcgttgagtgtgggggaaagcgcccagcagcgttgagtggggggaagcgcccagcagygttgagtaggggggaaagcgcccagcagcgttgagtggggggaaagcgcccagcagcattgagtgcgggggaaagcgcccagcagtgttgagtgcagggg

SEQ ID NO: 249251 - DNA, 201 bp, Homo sapiens; identical to SEQ ID NO: 49014

SEQ ID NO: 249252 - DNA, 201 bp, Homo sapiens
gattttgaggggctacgatattttgacagctttgcaagtttctgcagttccttatttggattcctgggtcagcactgacttttctctatgctgtgtttggytttgcctccctcaggctgcaggagaaagctgcagacaccatcgaggccctgcagaaggccgggatcaaagtctgggttctcacgggagacaagatggaga

SEQ ID NO: 249253 - DNA, 201 bp, Homo sapiens
agaacttttttctgtaacaaggaaagtgcccagcagcgttgagtgtgggggaaagcgcccagcagcgttgagtggggggaagcgcccagcagcgttgagtrggggggaaagcgcccagcagcgttgagtggggggaaagcgcccagcagcattgagtgcgggggaaagcgcccagcagtgttgagtgcaggggaaagcacc

SEQ ID NO: 249254 - DNA, 201 bp, Homo sapiens
tcacttccctgcctgggattctgcaggaatccgtgcatcggcctcactgccctcatcagaatatttagccattctgtgggatcttgacggcttggatccamaagtaatcactgtaggtgattaaggacgatgataaaaaggcaaacttctgagttggttgtacatctttaataaatctaaagaaaatgggaataaatctaa

SEQ ID NO: 249255 - DNA, 201 bp, Homo sapiens
  misc_feature (1)...(201): n = A,T,C or G
cgggaaggctcatgatgatggtttcatccgttcttctccccgtccctgccctgtgtgtggtgtgcagaaagcatttcttcagctccttcacctccgtcttntaggtgtcatcggcaaggaaggccgccaggctgccaggaacagcgactatgcaatcccaaagtttaagcatttgaagaagatgctgcttgttcacgggca

SEQ ID NO: 249256 - DNA, 201 bp, Homo sapiens
gaacttttttctgtaacaaggaaagtgcccagcagcgttgagtgtgggggaaagcgcccagcagcgttgagtggggggaagcgcccagcagcgttgagtasgggggaaagcgcccagcagcgttgagtggggggaaagcgcccagcagcattgagtgcgggggaaagcgcccagcagtgttgagtgcaggggaaagcacct

SEQ ID NO: 249257 - DNA, 201 bp, Homo sapiens
caactaccagaggatgtactacgtgttcatccagatgctgtccagcgggcccgcctggctggccatcgtgctgctggtgaccatcagcctccttcccgacrtcctcaagaaagtcctgtgccggcagctgtggccaacagcaacagagagagtccaggtacggagtgtccccagccggggcgggggtgcctcagggccctg

SEQ ID NO: 249258 - DNA, 201 bp, Homo sapiens; identical to SEQ ID NO: 49016

SEQ ID NO: 249259 - DNA, 201 bp, Homo sapiens
gaagcgcccagcagcgttgagtaggggggaaagcgcccagcagcgttgagtggggggaaagcgcccagcagcattgagtgcgggggaaagcgcccagcagygttgagtgcaggggaaagcacctagcagtatggagtgggaggaaagcacccagcagtgttgagtaggggggaaagtacccagaagtgttgagtagggggg

SEQ ID NO: 249260 - DNA, 201 bp, Homo sapiens
gcagctgtggccaacagcaacagagagagtccaggtacggagtgtccccagccggggcgggggtgcctcagggccctggccttaggattgggagatgaccrttttgaaagacagtgtgaaaggtttggatttcatgaaacgtgatcagttcaggtatcactaatgagtgtcctgacggtgcatgatgttaaacatcaggta

SEQ ID NO: 249261 - DNA, 201 bp, Homo sapiens; identical to SEQ ID NO: 49017

SEQ ID NO: 249262 - DNA, 201 bp, Homo sapiens
gatcacaatgaggaagtgagggaaaaactgaaggatgtgttgatgggggcccctaagaagcggtgttcactacaaaaggtcctaacacttttttctataayctacaaatgagatgttatcctgttatcccactgaccatgtgggaggactgtagcccacaccctccctcagctaaatcaaggggtatggtgatgggtgtgt

SEQ ID NO: 249263 - DNA, 201 bp, Homo sapiens
gcagtgttgagtgcaggggaaagcacctagcagtatggagtgggaggaaagcacccagcagtgttgagtaggggggaaagtacccagaagtgttgagtagrggggaaagcacccagcagtgttgagtggggggaaagcacccagcagtgttaagtaggagggaaagtgcccagtggtgttgagtaggggggaaagcgccca

SEQ ID NO: 249264 - DNA, 201 bp, Homo sapiens
gtatcaggaaatgctggtattggtggagctgcttattttacacactcccaagttttaggcacaagcagaattctgggtccagggaagacgtgacgatgccragtgtccccccaggtgcagggtttggcaggtgtgaggacttagctcccggtcccccatccttttcagcagctggcctctgccttcaagctcaaccctaaa

SEQ ID NO: 249265 - DNA, 201 bp, Homo sapiens
aaatctgccggagctgcagcgcggtgctctgctgccgcatggcgcccttgcagaaggctcaggtgctgcccgcccgtcctcgatagctggtggtcagggcrtccaaaacactgaaaaccttccgttaggtctcaccgcctcagattgttaaacaatctagcagggtaccacctgttaaaaatagaagcaaccgtgatagag

SEQ ID NO: 249266 - DNA, 201 bp, Homo sapiens
ctctactaaaaatacaaaaattagccagacgtggtggcaggtgcctgtaatcccagctactctggtggctgaggcatgagaattgcttgaacctgggagayggaggttgcagtgagccgagatcataccactgcactgcagtctgggtgacagggtgagactccgtctcaaaaaaaataaataaaaataaaaatgcttttg

SEQ ID NO: 249267 - DNA, 201 bp, Homo sapiens
gccttcaagctcaaccctaaatcagaggcagtgaccacgacccacctctgctgctttactgggaagcctgcctgtcctcagagggccgctgcacctgtcayggtccctcaggactctattaacaatgcaagttttcaagtttcatccccgaaatttctaatcactccttgaggtggagccctggactgggcagtgctgaag

SEQ ID NO: 249268 - DNA, 201 bp, Homo sapiens
acacgcccagatactgtgtgcacacacacacatgcagacacacgcactcacacatgcccagacactgtgtgcacacacagacacacatgcacacatgcagacacacacactcacacatgcccagacaccgtgtgcacacacagacacacatgcacacacgctcacatgcagacacactctcacacactccctgacactgtg

SEQ ID NO: 249269 - DNA, 201 bp, Homo sapiens
agtgctgcatcgaaggccatgtctacgtgccccacgtcatctgcaacgggcaggtcctcccagagtcgtcaggaatcgacatgattgactcgtcccccagygtcaacgggagggtaggtggcagcccccacgccgtccaagtgtgtgagtgagtgggcggctgtgcatgctgagtccaccccttttcactcgagtgtccag

SEQ ID NO: 249270 - DNA, 201 bp, Homo sapiens
cttgagagctttcttgggacattggtgccgatttgaaatgttgaaaccgatgccaccagttcccggcactccctccttcatgcctcctgccacagtttgtraaatcagagcgagcaaaactcgtggtgaagagactgcctctcaatgtagtgaaaatgtccacacacagctccactgactcgggggccacaggcaggagaa

SEQ ID NO: 249271 - DNA, 201 bp, Homo sapiens; identical to SEQ ID NO: 49018

SEQ ID NO: 249272 - DNA, 201 bp, Homo sapiens
cacgcccagatactgtgtgcacacacacacatgcagacacacgcactcacacatgcccagacactgtgtgcacacacagacacacatgcacacatgcagacacacacactcacacatgcccagacaccgtgtgcacacacagacacacatgcacacacgctcacatgcagacacactctcacacactccctgacactgtgt

SEQ ID NO: 249273 - DNA, 201 bp, Homo sapiens
agcaaaactcgtggtgaagagactgcctctcaatgtagtgaaaatgtccacacacagctccactgactcgggggccacaggcaggagaaacgcagcagaaygtgccagttggctgcttataagaaggtcccactgaggggcctctgtgcaggaggggagacagtgggagcaggagccggggccctggctgagactccgcgg

SEQ ID NO: 249274 - DNA, 201 bp, Homo sapiens; identical to SEQ ID NO: 49019

SEQ ID NO: 249275 - DNA, 201 bp, Homo sapiens
acgaggagactggcgaggggcctctggtgaacacgtcggacctcaatgaagagctgggacaggttggtgtctcctgagtcatctgctgtgatttattaacrtctgggtgagtctgcttcacgttcctcaggtcctgtgcctgtcatccgagcgtggctgtacctgtagctggcgtaagacagcagcagggttgttttgaac

SEQ ID NO: 249276 - DNA, 201 bp, Homo sapiens
gctgacagcggagagctggccacatgacccctcacacaggtgtcagaggggttcctaagcaggaaggtgtgagagtttgcaattcacaggtcatccaggcyctgagctcacacacccttccctctgcagcctgtagagcgtggatcacaaggcctcctccctcacgcacccacttctgtgcccattctgcagctggaaaga

SEQ ID NO: 249277 - DNA, 201 bp, Homo sapiens
agaacttgcacgtggtggcgagcctctgactaactcagctctgtctcttgtttctctttccttcccatttccttccgtcttccgaccgctttgcctaaatsctcacaccttgttcacacacccctgtgtgcgtggccgctgacctcgggactaagactaagagccagtgcctttctgtcgagcagtcaaccatctttatgc

SEQ ID NO: 249278 - DNA, 201 bp, Homo sapiens
tgaccacaggccctctgctctgcaactcatctccaggatgggtgggcactttgggaatgccagtgaggaccctccccgtcccaccctttgtttagaagccyctgtattgctgtgggtctctgcgtcccacaagagccccgggaatgcttatgaacagctacacagcgggacctgcagaaggcataaagcagggggtgggag

SEQ ID NO: 249279 - DNA, 201 bp, Homo sapiens
attgtagtaataaactatccgcacatgttagtccattttcacatggctttgaagagctacctgagacagggtgatttaggaagaaaagaggtttaatcgasccacggttctgcaggctgcataggaagcatcgctggggaggcctcaggaaacttacaatcatggcggaaggcaaaggggaagcaaggcccttctttacaa

SEQ ID NO: 249280 - DNA, 201 bp, Homo sapiens
ctgcagcctgtagagcgtggatcacaaggcctcctccctcacgcacccacttctgtgcccattctgcagctggaaagactgagggcagctaggataacacrgtttgctcaggacccatgcacatttcagaaaaggggagccaggctgagccacacaactggagacaaagaggggacggaagtgtttggtgtcaaatgtttg

SEQ ID NO: 249281 - DNA, 201 bp, Homo sapiens
agtgtccgcccagagtgaccagaagaacttgcacgtggtggcgagcctctgactaactcagctctgtctcttgtttctctttccttcccatttccttccgycttccgaccgctttgcctaaatcctcacaccttgttcacacacccctgtgtgcgtggccgctgacctcgggactaagactaagagccagtgcctttctgt

SEQ ID NO: 249282 - DNA, 201 bp, Homo sapiens; identical to SEQ ID NO: 48994

SEQ ID NO: 249283 - DNA, 201 bp, Homo sapiens
ccagtgtgccccagctccacaatggggactgaaagttgtttgaggctgaggccactaagaaacagtcgtctggtccacatggtgccttccgagctgagtgaaaggcatggatttcagtggtttgtaggaatggaagaaaaaaaatgccccaattgatgagaatgaagcagaaacttcagaaagttcactgggagtttatct

SEQ ID NO: 249284 - DNA, 201 bp, Homo sapiens
atgcctccggcagagcagatgggacagagcccctggggcggggggcaggttgacttgactggaatgggaatgtagaagagtggagagttaatgcctggttgggggggggggatctcagtggctttttcgtgatgatacttgcttataaattatttccttataatctccagtcagcaagtgcgaaacatctctgagcctcag

SEQ ID NO: 249285 - DNA, 201 bp, Homo sapiens
ctccttcccgacgtcctcaagaaagtcctgtgccggcagctgtggccaacagcaacagagagagtccaggtacggagtgtccccagccggggcgggggtgyctcagggccctggccttaggattgggagatgaccattttgaaagacagtgtgaaaggtttggatttcatgaaacgtgatcagttcaggtatcactaatga

SEQ ID NO: 249286 - DNA, 201 bp, Homo sapiens
gcctccggcagagcagatgggacagagcccctggggcggggggcaggttgacttgactggaatgggaatgtagaagagtggagagttaatgcctggttggsggggggggatctcagtggctttttcgtgatgatacttgcttataaattatttccttataatctccagtcagcaagtgcgaaacatctctgagcctcagct

SEQ ID NO: 249287 - DNA, 201 bp, Homo sapiens
gtaaacgcatgcatcccgtcctgagagacaaactgggatgcaggccgacggcccagggcgtgtgagggcgagtggacgggagggaggccatccgcacagcygacggggcgtgtttgctgctcagggagaggctaggtgtcttgctacaccctggagtcatgtcaggaaggtcatgcctgggggatattttgttgtccatga

SEQ ID NO: 249288 - DNA, 201 bp, Homo sapiens
agagcagatgggacagagcccctggggcggggggcaggttgacttgactggaatgggaatgtagaagagtggagagttaatgcctggttgggggggggggrtctcagtggctttttcgtgatgatacttgcttataaattatttccttataatctccagtcagcaagtgcgaaacatctctgagcctcagcttccttttga

SEQ ID NO: 249289 - DNA, 201 bp, Homo sapiens
tagtcaagcatggtagcaggcacctgttgtcctagctacttgggaggctgaggagggaggatcgcttgagcccaggagttggaggctgcggtgagctgagwtcataccactgtaccctagcctgggcaacataaggcgttctctcgttctcttgctcgctctctttctctctctctctctatatatatatgcacacacaca

SEQ ID NO: 249290 - DNA, 201 bp, Homo sapiens
caccagccaaaacgctttttcctttggttttgatctcttagggtaacgccagttcattgacaaggatccaatctctgacacaactttgagtctctgttcakcggtgtttagggagggagtcggtgcgtagggaacgcagcctgcttggcagaatctgagcctatgccctgggtaggatggggacgtagtgaggagccggtg

SEQ ID NO: 249291 - DNA, 201 bp, Homo sapiens; identical to SEQ ID NO: 49000

SEQ ID NO: 249292 - DNA, 201 bp, Homo sapiens
gaagcaaggcccttctttacaaggctgcaggagagagagagcaaaggggaaaatgctacacactttgaaacaaccagatctcatgagaactcactcgcccrccgtcaacgagatctgcaaggaggacgtccatgattcagtcacctcccaccaggctctccctccaacacacggggattataatttgagatgagatttggg

SEQ ID NO: 249293 - DNA, 201 bp, Homo sapiens; identical to SEQ ID NO: 49008

SEQ ID NO: 249294 - DNA, 201 bp, Homo sapiens
tgggttcttccctgggatggtgggacagggggacggtcactctgttggtactgaaaaggagaggccctcattcctagacagagacccctcgcctccatatsgcttctctggtggggtggatcccgcccggcctgccctcaggacgagggtgtgtcctgagttgagtctagcagttcctgcaggaggcgatggtagtgagtg

SEQ ID NO: 249295 - DNA, 201 bp, Homo sapiens
tgtcaaggggatgcaagctgggcacgtccagtactaaatcaacccggtccctgtggggtggggcctgccttccctggggcagtgagttcgccttttgttcragggtctctgggtaccggtatggcgttcgagctcactgcacaggaagccagctacagggaggaagctcgtaggtttcccgtccatggcctgtatccctgg

SEQ ID NO: 249296 - DNA, 201 bp, Homo sapiens
gatactgtgtgcacacacacacatgcagacacacgcactcacacatgcccagacactgtgtgcacacacagacacacatgcacacatgcagacacacacactcacacatgcccagacaccgtgtgcacacacagacacacatgcacacacgctcacatgcagacacactctcacacactccctgacactgtgtgcacacat

SEQ ID NO: 249297 - DNA, 201 bp, Homo sapiens
tcctgccgctccccttgctggtcagacccacagggcccgtgcacatccggggccccagtgggctgtcagaagccatgcaggccccatccgtatggtgacaycctaggcaacatgtcaaggggatgcaagctgggcacgtccagtactaaatcaacccggtccctgtggggtggggcctgccttccctggggcagtgagttc

SEQ ID NO: 249298 - DNA, 201 bp, Homo sapiens
gcaagtttctgcagttccttatttggattcctgggtcagcactgacttttctctatgctgtgtttggttttgcctccctcaggctgcaggagaaagctgcrgacaccatcgaggccctgcagaaggccgggatcaaagtctgggttctcacgggagacaagatggagacggccgcggccacgtgctacgcctgcaagctct

SEQ ID NO: 249299 - DNA, 201 bp, Homo sapiens
gacacacgcactcacacatgcccagacactgtgtgcacacacagacacacatgcacacatgcagacacacacactcacacatgcccagacaccgtgtgcayacacagacacacatgcacacacgctcacatgcagacacactctcacacactccctgacactgtgtgcacacatgctcacatgcagacacacacgtactct

SEQ ID NO: 249300 - DNA, 201 bp, Homo sapiens
ttgggtagtgttgtcatcttaacaatccatgaacatgggatatctttccatttatttaggtattttataatttctttcagcaaactttggtatttttcagmcttgagtcttttacctccttggttaaatttattcataagtattttacttttgttgatgctactgaagtggaatttttttttaatttccttttcatattgt

SEQ ID NO: 249301 - DNA, 201 bp, Homo sapiens
agttggaggctgcggtgagctgagatcataccactgtaccctagcctgggcaacataaggcgttctctcgttctcttgctcgctctctttctctctctctmtctatatatatatgcacacacacatatgtacatacacacacacacatatatatatatacacatacatacacacacataaaattacaggcttttttttcat

SEQ ID NO: 249302 - DNA, 201 bp, Homo sapiens
aagagccccgggaatgcttatgaacagctacacagcgggacctgcagaaggcataaagcagggggtgggaggggctggcgggtcacggtggggggcaccastgtccgcccagagtgaccagaagaacttgcacgtggtggcgagcctctgactaactcagctctgtctcttgtttctctttccttcccatttccttccgtc

SEQ ID NO: 249303 - DNA, 201 bp, Homo sapiens
aaaagccttctattaataatttgctttaaaaatgacgaccttggcctttctgggcaatgtagaggcgttcacacgccatttttctgcggtggtgtccatgrtaagagccgagattgcaggggcctgcacgccgtcctgaagtcgcgttctgtcttttagccgtgtgctcctgcaccaaataccgccttcacgcatgcctcc

SEQ ID NO: 249304 - DNA, 201 bp, Homo sapiens
ttggaggctgcggtgagctgagatcataccactgtaccctagcctgggcaacataaggcgttctctcgttctcttgctcgctctctttctctctctctctmtatatatatatgcacacacacatatgtacatacacacacacacatatatatatatacacatacatacacacacataaaattacaggcttttttttcatct

SEQ ID NO: 249305 - DNA, 201 bp, Homo sapiens
cacttccctgcctgggattctgcaggaatccgtgcatcggcctcactgccctcatcagaatatttagccattctgtgggatcttgacggcttggatccaawagtaatcactgtaggtgattaaggacgatgataaaaaggcaaacttctgagttggttgtacatctttaataaatctaaagaaaatgggaataaatctaag

SEQ ID NO: 249306 - DNA, 201 bp, Homo sapiens
ttggtattactgttttaccaaatgcagcttagaaaaatgcccaaagcagaaaaaggcttcttttccctttaataacatcatcttctatatattttaaacasgatttttaactgacaaaatggtccttttttaagtccaagcaattaatcagaatcaacagttttctaatttagtgtcatcagaatttgttagattaaattg

SEQ ID NO: 249307 - DNA, 201 bp, Homo sapiens
tgggcaacataaggcgttctctcgttctcttgctcgctctctttctctctctctctctatatatatatgcacacacacatatgtacatacacacacacacatatatatatatacacatacatacacacacataaaattacaggcttttttttcatctatagaatactatgattgtctgatcttgagacttttagctaggaa

SEQ ID NO: 249308 - DNA, 201 bp, Homo sapiens
gggcaacataaggcgttctctcgttctcttgctcgctctctttctctctctctctctatatatatatgcacacacacatatgtacatacacacacacacayatatatatatacacatacatacacacacataaaattacaggcttttttttcatctatagaatactatgattgtctgatcttgagacttttagctaggaag

SEQ ID NO: 249309 - DNA, 201 bp, Homo sapiens
ataggtgagcttcgtccttgctgctggcacatcctggtggccaggtcaccccttcgctagacaaaggcccatggcagcacgcaggtgcattcaggacaccyccgtcaccaccctcgtgtgtgaccgggaaggctcatgatgatggtttcatccgttcttctccccgtccctgccctgtgtgtggtgtgcagaaagcatttc

SEQ ID NO: 249310 - DNA, 201 bp, Homo sapiens
ttttaatcatacctcatttcttttactttattttgttttgctttcaatatgaaaaaggttttatcctatatggagaaaacagacagaatgtcgtaaattasctctaagtagttaatttttttatttgcctaggctaacttttcatctttgttatttctgcctagtgaatgaataacctgttcagaagtgaaacagagaaga

SEQ ID NO: 249311 - DNA, 201 bp, Homo sapiens
tcagtgcaaaccatgcagcttcccagcggggtccatcaccacctgcgcagtaattcagtgcagcccatgcagcttcccagcggggtccatcaccacctgcrcagtaattcagtgcggcccatgcagcttcccagcggggtccatcaccacctgcgcagtaattcagtgcaggccctgcagcttcccagcggggtccatcac

SEQ ID NO: 249312 - DNA, 201 bp, Homo sapiens
cagcttcccagcggggtccatcaccacctgcgcagtaattcagtgcagcccatgcagcttcccagcggggtccatcaccacctgcgcagtaattcagtgcrgcccatgcagcttcccagcggggtccatcaccacctgcgcagtaattcagtgcaggccctgcagcttcccagcggggtccatcaccacctgcgcagtaat

SEQ ID NO: 249313 - DNA, 201 bp, Homo sapiens
aatgcttatgaacagctacacagcgggacctgcagaaggcataaagcagggggtgggaggggctggcgggtcacggtggggggcaccagtgtccgcccagrgtgaccagaagaacttgcacgtggtggcgagcctctgactaactcagctctgtctcttgtttctctttccttcccatttccttccgtcttccgaccgctt

SEQ ID NO: 249314 - DNA, 201 bp, Homo sapiens
agtgcttcaggggaaactcaccggccccaagcagccactcactgcccagccctgcctgtggcccgagaagcagctgtccagtggtggttttctctaagcayggtccttggttactgagctctttagctgtgcagttccacagcgggcacacgtgttcatgacagggctctgtgcatgggacacgtgttcataaccacatcc

SEQ ID NO: 249315 - DNA, 201 bp, Homo sapiens
agtgctgaagcccaatggggaaacgaggggtgggggcccctggcagtggctgctcctgcagggtgtgaggctccccaggtgggaggaagacggggagtgartgggggccggggccccagccctgactcactcacgtagctcagacacccgggggctggctcccagcggtgctgctgtgctgggagggaagacaggttgccc

SEQ ID NO: 249316 - DNA, 201 bp, Homo sapiens
ttctcacgggagacaagatggagacggccgcggccacgtgctacgcctgcaagctcttccgcaggaacacgcagctgctggagctgaccaccaagaggatygaggagcagagcctgcacgacgtcctgttcgagctgagcaagacggtcctgcgccacagcgggagcctgaccagagacaacctctccgggtaggcagcgc

SEQ ID NO: 249317 - DNA, 201 bp, Homo sapiens
gtctgatcttgagacttttagctaggaagttcttcccaaaacctaaccagatccttccagttagaatttaaatccattcctttcatactttctagaagcayggcacgttacttcacacgaaagtagtctgaaacttagaaaaaatggaggccccaaagtgaggcagacatggtttgaccccagatctcccaaggagagggc

SEQ ID NO: 249318 - DNA, 201 bp, Homo sapiens
cttgtcgggccagcttctgtgattagtgggtgatgaccagtcagatgtatgacccttccagatgcagtggccaggacagctgccctggctgacttctgttaaaaaaaaaaaaaaaagctatctcaatcactcctgagaatctacactaaaggtgtaagggaagggagctgacattactgagcacctagtgtgtgcctccta

SEQ ID NO: 249319 - DNA, 201 bp, Homo sapiens
taattcagtgcaggccacgcagcttcccagcggggtccatcaccacatgtgccgtaattcagtgcagcccgtgcagcttcccagcagggtccatcaccacmtgcgcagtaattcagtgcagcccatgcagtttcccagcggggtccatcaccacgtgcacagtaattcagtgcagcccatgcagcttcccagcggggtcca

SEQ ID NO: 249320 - DNA, 201 bp, Homo sapiens
gtaattcagtgcagcccatgcagcttcccagcggggtccatcaccacctgcgcagtaattcagtgcaggccacgcagcttcccagcgggatccatcaccaygtgcacagtaattgagtgcagcccatgcagcttcccagcggggtccatcaccacctgtgcagtagttcagtgcggcccatgcagcttcccagcagggtcc

SEQ ID NO: 249321 - DNA, 201 bp, Homo sapiens
tcccagcggggtccatcaccacctgtgcagtagttcagtgcggcccatgcagcttcccagcagggtccatcaccacctgcacagtaattcagcgtagcacrtgcagtttcccagcggggtccatcaccacctgcacagtaattcagtgcagcccatgcagcttcccagcggggtccatcaccacctgcacagtaattcagt

SEQ ID NO: 249322 - DNA, 201 bp, Homo sapiens
cggggtccatcaccacctgtgcagtagttcagtgcggcccatgcagcttcccagcagggtccatcaccacctgcacagtaattcagcgtagcacatgcagyttcccagcggggtccatcaccacctgcacagtaattcagtgcagcccatgcagcttcccagcggggtccatcaccacctgcacagtaattcagtgcagcc

SEQ ID NO: 249323 - DNA, 201 bp, Homo sapiens
tcaccacctgcacagtaattcagcgtagcacatgcagtttcccagcggggtccatcaccacctgcacagtaattcagtgcagcccatgcagcttcccagcrgggtccatcaccacctgcacagtaattcagtgcagcccatgcagcttcccagcggggtccatcaccacctgcgcagtaattcagtgcaaaccatgcagct

SEQ ID NO: 249324 - DNA, 201 bp, Homo sapiens
cgaggagcagagcctgcacgacgtcctgttcgagctgagcaagacggtcctgcgccacagcgggagcctgaccagagacaacctctccgggtaggcagcgygtccccgcccccacccccacactcccgcaaaaggggcttcagacccagtggccttcacctgcaagtcggggagccgcattgtctctactgggaattcggt

SEQ ID NO: 249325 - DNA, 201 bp, Homo sapiens
ctggcacgttaacacatgcaacgtgcccataggggaagaagacagttcccatccgggaggggtgaaggactccccgggcatctgccctagatggacacctycttctgtcacatgtgtgctcagtggttggcgggccagctgccttcatgggaagtgactgcgaccagagtcactgaagcttgaagatggcaatcagaattg

SEQ ID NO: 249326 - DNA, 201 bp, Homo sapiens
atcttccctcagtttttataccagttcttctgtgggttttcacaacaggtcagtcctagggtcttcagggacaggctgtctgagccttcttttccttcccrcagtgggtggctgctgtggggaggggagacttgggaatgagcagcactccccggcaccacgagggagccagggtgcccagcagcaggcgggggtgaaggg

SEQ ID NO: 249327 - DNA, 201 bp, Homo sapiens
tgaattcctgtgtgctttgtcggtagaaacgctgttagccgctgctgccccacacaccccagagctagctctgtgttagaagggtgtgtgcgcctcctgaygcacatccttgctgtgttccctcggttgccatgtcagggtggcccattgagccagggatgttttccgaattgactggattcatgggagcttccctcgatt

SEQ ID NO: 249328 - DNA, 201 bp, Homo sapiens
ctttttcatttgtgcagaaaatgccactgggggccaggtacggtggctcatacttgtaattccagcactttgggaggctgaggcataaggatcacttgagrccagaagtttgagaccagcctgggaaacatagcaagaccctgcctctacaaaacatacaaaaggaaaatcagccaggggtggaggcacacatctgtggtc

SEQ ID NO: 249329 - DNA, 201 bp, Homo sapiens
gagtgcaatggcgcagtcttggctcactgcaagctccacctcctgggttcacgccattctcctgcctcagcttcccaagtagctgggactacaggcgcccrccaccacgcctggctgactttttgaatttttagtagagacggggttttaccgtgttagccgggatggtctccatctcctgacctcaggtgatctgcctgc

SEQ ID NO: 249330 - DNA, 201 bp, Homo sapiens
tctattaacaatgcaagttttcaagtttcatccccgaaatttctaatcactccttgaggtggagccctggactgggcagtgctgaagcccaatggggaaaygaggggtgggggcccctggcagtggctgctcctgcagggtgtgaggctccccaggtgggaggaagacggggagtgaatgggggccggggccccagccctg

SEQ ID NO: 249331 - DNA, 201 bp, Homo sapiens
ctgcctcagcttcccaagtagctgggactacaggcgcccaccaccacgcctggctgactttttgaatttttagtagagacggggttttaccgtgttagccrggatggtctccatctcctgacctcaggtgatctgcctgccttggcctcccgaagtgctgggattacaggcgtgagccaccatgcacggccagcctgctga

SEQ ID NO: 249332 - DNA, 201 bp, Homo sapiens
actgggaagcctgcctgtcctcagagggccgctgcacctgtcatggtccctcaggactctattaacaatgcaagttttcaagtttcatccccgaaatttcyaatcactccttgaggtggagccctggactgggcagtgctgaagcccaatggggaaacgaggggtgggggcccctggcagtggctgctcctgcagggtgtg

SEQ ID NO: 249333 - DNA, 201 bp, Homo sapiens
cagacaccagcgctgacctcggagaaagtccctcttcagcagccccttctgggtgacttctttttttttttttttttttgagacggagtctcgctctgtcrcccaggctggagtgcagtggcgggatctcggctcactgcaagctccgcctcccgggttcacgccattctcctgcctcagcctcccaagtagctgggacta

SEQ ID NO: 249334 - DNA, 201 bp, Homo sapiens
ccaagttttaggcacaagcagaattctgggtccagggaagacgtgacgatgccgagtgtccccccaggtgcagggtttggcaggtgtgaggacttagctcycggtcccccatccttttcagcagctggcctctgccttcaagctcaaccctaaatcagaggcagtgaccacgacccacctctgctgctttactgggaagcc

SEQ ID NO: 249335 - DNA, 201 bp, Homo sapiens
tatcccagggatgcctgccacccccagaatctgatggaaataacgaccagcaattgtagtaataaactatccgcacatgttagtccattttcacatggctytgaagagctacctgagacagggtgatttaggaagaaaagaggtttaatcgacccacggttctgcaggctgcataggaagcatcgctggggaggcctcagg

SEQ ID NO: 249336 - DNA, 201 bp, Homo sapiens
agtaataaactatccgcacatgttagtccattttcacatggctttgaagagctacctgagacagggtgatttaggaagaaaagaggtttaatcgacccacrgttctgcaggctgcataggaagcatcgctggggaggcctcaggaaacttacaatcatggcggaaggcaaaggggaagcaaggcccttctttacaaggctg

SEQ ID NO: 249337 - DNA, 201 bp, Homo sapiens
tgggggcgtcctgccgtgctctggggagttgctgcatcttcttttacgggataataagaaaatatagtgcttatatctttggggtttgaagtgttggcacrcaagaaaaatgaggtgtattttctaaaactcttgattgtgaaagagaaaaaaaaatacataaaaacgagatgacttggactattttccccaaacagatat

SEQ ID NO: 249338 - DNA, 201 bp, Homo sapiens
tgtggcgtccccacattcttcctctccactcacactgtgaggtgtggctttgtcttcctgagcagtgtgaggtgtggctttgtcttcctgaaggtgtgagstgtggctttgtcttcctgaaggtgtgaggtgtggctttgtcttcctgaacggtgtgaggtgtggctttgtcttcctgagcggtgtgaggtgtggctttgt

SEQ ID NO: 249339 - DNA, 201 bp, Homo sapiens
tgtcttcctgaaggtgtgaggtgtggctttgtcttcctgaaggtgtgaggtgtggctttgtcttcctgaacggtgtgaggtgtggctttgtcttcctgagyggtgtgaggtgtggctttgtcttcctgagcggtgtgaggtgtggctttgtcttcctgagcggtgtgaggtgtggctttgtctccttaatggtgtgaggtg

SEQ ID NO: 249340 - DNA, 201 bp, Homo sapiens
gtcttcctgagtggtgtgaggtgtggctttgtctcctgagtgttgtgaggtgttgctttgtcttcctgagtggtgtgaggtgtggctttgtcttcctgaayggtgtgaggtgtggctttgtcttcctgagcggtgtgaggtgtggctttgtcttcctgagcggtgtgaggtgtggctttgtcttcctgagcggtgtgaggt

SEQ ID NO: 249341 - DNA, 201 bp, Homo sapiens
ctagccacctggcagagtgccacgtggcttcgccgtccagggatgcttcaggtgcagagggggctctgtgtgtcaggagcaggtgacatcacagcagaacygtcgtggcctttgctgtatgctgcagtgcctggaagagaaactcgctttatctgaggcctgagaagcccacgttcacagcacaagtatgtccacagcgat

SEQ ID NO: 249342 - DNA, 201 bp, Homo sapiens
ttctctgtcctgagggaggttccccgagggaagcccccaggcttccccctctgcatgggtgcctggggtgtttcctctgcatttactcgcagaacgttccsgccgctgttcttcaacagcaggcaggagtctgagctgagttcagaagggaacagacacagtctgtgagtttgttcctgaaacccgtggaatgtagctggg

SEQ ID NO: 249343 - DNA, 201 bp, Homo sapiens
gagttctgtgttgggatggccaaggtgaggcctgggggaggaagaggagagctgggcagcgtcaggggcttttcctccaggcccagctgatgtggttgtcygggtgcaaagccgccctcagctgctgtggaggcaccacttggctgaaagcatcagcttccagttacagcacagcagcctcccgccctccagcaccttgct

SEQ ID NO: 249344 - DNA, 201 bp, Homo sapiens
gcaggcaggagtctgagctgagttcagaagggaacagacacagtctgtgagtttgttcctgaaacccgtggaatgtagctgggtactcaggcaactgtctyttctacgtaaaacacaaaacagaaaaaggaggtttgcgtgtacccgagtttgcattatggatatttaaatgccagctgtgagggagtttttgtgctcagt

SEQ ID NO: 249345 - DNA, 201 bp, Homo sapiens
ggatggtctcgatctcctgacctcgtgatccgcccgcctcggcctcccaaagtgctgggattacaggcgtgagccaccgcgcccggcctctgggtgacttmtaaacagaaatcggcttcgttccttgtttagcctgacctctctctccctgtgtgtttgtccctcagactgctgggttcaaacacaaaagtcctgctatgt

SEQ ID NO: 249346 - DNA, 201 bp, Homo sapiens
gccctggctgagactccgcggcccccagtgcttcaggggaaactcaccggccccaagcagccactcactgcccagccctgcctgtggcccgagaagcagctgtccagtggtggttttctctaagcacggtccttggttactgagctctttagctgtgcagttccacagcgggcacacgtgttcatgacagggctctgtgca

SEQ ID NO: 249347 - DNA, 201 bp, Homo sapiens
ggaagtccaggcagtgcagaagcatggtccgcagtgtggctgtgagcagccctctctctcctgcttgtggcactttaccccgtcttggttcttacctttgrcctctagaagtacgtgccagggaccatggcatggacgcaagtgcagaggacccaccgtggtgcgttgagggcgaacacatcactgtgcccttcctattct

SEQ ID NO: 249348 - DNA, 201 bp, Homo sapiens
taaaccaaacctcttaacatttgttatctcattcttatccattttacccttttaaaaatgcttttagggccaggcacagtggctcatgcctgtaatcccarcactttgggaggctgaggtgggtggatcgcctgaggtcaggatttcaagaccagcctggccaacatggcgaaactcccatctctactaaaaatacaaaaa

SEQ ID NO: 249349 - DNA, 201 bp, Homo sapiens
ttcttttccctttaataacatcatcttctatatattttaaacaggatttttaactgacaaaatggtccttttttaagtccaagcaattaatcagaatcaamagttttctaatttagtgtcatcagaatttgttagattaaattgcagaatttcatctcaccatttctgtacttgaagacatttaggatgaaattattagga

SEQ ID NO: 249350 - DNA, 201 bp, Homo sapiens
  misc_feature (1)...(201): n = A,T,C or G
acgcccgtttagccttcctcacccgtcagtctcaattacaaaacagagtgcttgagaacgatggaaagctgtaattccatcccactgtataacccctcacngcccacaagctgccttcgtggccgcggggaccccccccaccccgcttcttgttatctctctgcgcctgtttccctctatcttcagtggacgcaccgtgat

SEQ ID NO: 249351 - DNA, 201 bp, Homo sapiens
tattgtaggttttgacctccaagactgtatagagtaagttcgtcctctctgtagccttggttttttattgttgttgttaagattcgggacaacccacttayactctgtcttcccaaacaaatggagccctggccccacccatgtctctgtcccggggaatgggactatgagaccatactctgttttgctcccaacccagag

SEQ ID NO: 249352 - DNA, 201 bp, Homo sapiens
ttaggacacatctgctcagtgatacccgtgttagaattggttatgaaaaccatagaagcagggcaaacacacatgcatgcacccagacaccatgtgcacayggacacacatgcacacacgctcacatgcaaacacatgcactcacacacgcccagatactgtgtgcacacacacacatgcagacacacgcactcacacatg

SEQ ID NO: 249353 - DNA, 201 bp, Homo sapiens
agtgctgcctcccgagcacgagtgccttggaacacaaatcttgcttcaggccaagttagcaggcaggcgtgcgttgtagtgagggccatcttttgttcctrgagctgagggtgatggcagcattgaccagcactgggcttagggttgactgtcccaccaccagaaaagaaaattgcaggccaggacccctgatgaacaaag

SEQ ID NO: 249354 - DNA, 201 bp, Homo sapiens
cttttccctttaataacatcatcttctatatattttaaacaggatttttaactgacaaaatggtccttttttaagtccaagcaattaatcagaatcaacakttttctaatttagtgtcatcagaatttgttagattaaattgcagaatttcatctcaccatttctgtacttgaagacatttaggatgaaattattaggaac

SEQ ID NO: 249355 - DNA, 201 bp, Homo sapiens
atgcaaacacatgcactcacacacgcccagatactgtgtgcacacacacacatgcagacacacgcactcacacatgcccagacactgtgtgcacacacagrcacacatgcacacatgcagacacacacactcacacatgcccagacaccgtgtgcacacacagacacacatgcacacacgctcacatgcagacacactctc

SEQ ID NO: 249356 - DNA, 201 bp, Homo sapiens
tcctggtggccccgtgtggcccacgtcgctcagtatctttcctcgccttgcagaggggtgtgaagcacaaggctccagtccaggccgcacagagcagcgaygggcccctcctgaaggacctcctacggcggccaaggcgcagttagctccacgctaggtaactgtgcggctgctggacgccgcccgtgtgctgtgactgtc

SEQ ID NO: 249357 - DNA, 201 bp, Homo sapiens
gtctgggggaaagcctttagaaatccaccgcctattcaagtcacagtgggagctggggaggaaacacggctgctgtgtgtctgagtcggggacgtgcgggmctccctcagagcgccctgacttgctgtgccctgcccgcaggtggagtacatcttcacagacaagaccggcaccctcacggaaaacaacatggagttcaag

SEQ ID NO: 249358 - DNA, 201 bp, Homo sapiens; identical to SEQ ID NO: 49021

SEQ ID NO: 249359 - DNA, 201 bp, Homo sapiens
  misc_feature (1)...(201): n = A,T,C or G
ttttgccaaagcagaattcagtgcagcccatgcagcttcccagcggggtccatcaccacctgcgcagtaattcagtgcaggccacgcagcttcccagcggngtccatcaccacatgtgccgtaattcagtgcagcccgtgcagcttcccagcagggtccatcaccacctgcgcagtaattcagtgcagcccatgcagtttc

SEQ ID NO: 249360 - DNA, 201 bp, Homo sapiens
ctcaccatgtcaccaccgcttggtgatgagaccccatcctcctgcccgccaccagcaccacgtgggtgcccccagccccatcccaggtctgccagcagctscgtgtccctcccgttacccaccatgccctgcttccgtttccctcctgttgtccacacaccagtttcactgtgcttcctggagctggggccctatctctgt

SEQ ID NO: 249361 - DNA, 201 bp, Homo sapiens
tgaccagctcctgggctttgtagccaaggagccacagcccgtcagccttggtagaaccacagcctctcacattgtttcctaaaacattgaccccacgtctytgatgtgctgggagctcaccatgtcaccaccgcttggtgatgagaccccatcctcctgcccgccaccagcaccacgtgggtgcccccagccccatcccag

SEQ ID NO: 249362 - DNA, 201 bp, Homo sapiens
ctgggcgggactctcagcccaggaagagtccctccggattctctcgttcagccagcggcccctggtggccccaagttgcattacacagtctcagagatgasagcccagcttggagggtgtcaggcaccctgtcagccccagagaaacctgcttagctctagagagcccagcccggctctggagagcccggccattctaaca

SEQ ID NO: 249363 - DNA, 201 bp, Homo sapiens
tcttcctgagtggtgtgaggtgtggctttgtcttcctgaatggtgtgaggtgtggctttgtcttcctgagcggtgtgaggtgtggctttgtcttcctgagyggtgtgaggtgtggctttgtcttcctgagcggtgtgaggtgtggctttgtcttcctgagtgttgtgaggtgtggctttgtcttcctgagtggtgtgaggt

SEQ ID NO: 249364 - DNA, 201 bp, Homo sapiens
ttgctctgtactgacgaccagtgctcgggacgtccttcccatccgagacttcaagatagaaaaacatccctatttcaatccctttgtgttttgttttttgtttttttttttttgcttctgtgaaactgaacttcagagacttctatgtcccatttgagatgacttcatagaattccttctcccgttcctcttaccccagca

SEQ ID NO: 249365 - DNA, 201 bp, Homo sapiens
tgctctgtactgacgaccagtgctcgggacgtccttcccatccgagacttcaagatagaaaaacatccctatttcaatccctttgtgttttgttttttgtttttttttttttgcttctgtgaaactgaacttcagagacttctatgtcccatttgagatgacttcatagaattccttctcccgttcctcttaccccagcat

SEQ ID NO: 249366 - DNA, 201 bp, Homo sapiens
atactgtgtgcacacacacacatgcagacacacgcactcacacatgcccagacactgtgtgcacacacagacacacatgcacacatgcagacacacacacwcacacatgcccagacaccgtgtgcacacacagacacacatgcacacacgctcacatgcagacacactctcacacactccctgacactgtgtgcacacatg

SEQ ID NO: 249367 - DNA, 201 bp, Homo sapiens
cagcctcatcctctgtttcctacttctcctcacctgggcgtttgcccattcagacgtgcaattgtgcaattccaagcccgcagttcttcagctcctgtgcytcccttattccttgaataaggctgggctacaagatctcagtggagttctgtgagcacgctggactcaggaaagtccgtcgcagggccctggtagagcggt

SEQ ID NO: 249368 - DNA, 201 bp, Homo sapiens
gctctgtactgacgaccagtgctcgggacgtccttcccatccgagacttcaagatagaaaaacatccctatttcaatccctttgtgttttgttttttgtttttttttttttgcttctgtgaaactgaacttcagagacttctatgtcccatttgagatgacttcatagaattccttctcccgttcctcttaccccagcatt

SEQ ID NO: 249369 - DNA, 201 bp, Homo sapiens
cccttattccttgaataaggctgggctacaagatctcagtggagttctgtgagcacgctggactcaggaaagtccgtcgcagggccctggtagagcggttmctggagctcgctgtctgccgtggaagtgggcgtgtggctgaacgtgtggcttcaggattccagcggtgcctggtagaccttccagccgagggacctcaga

SEQ ID NO: 249370 - DNA, 201 bp, Homo sapiens
aggcgatggtagtgagtgcatcccagagtggctcaggtcaccccaggcagccccgtgggtatccctgagactgaccatgtgtctcgttctctcagcagaaygggtgcgcacagcctcgggaccgcgactcagaattcacccctcttgcctctctgcagagcccaggctaccagagcacctgtccctcggccgcctggtaca

SEQ ID NO: 249371 - DNA, 201 bp, Homo sapiens
gagccggggccctggctgagactccgcggcccccagtgcttcaggggaaactcaccggccccaagcagccactcactgcccagccctgcctgtggcccgasaagcagctgtccagtggtggttttctctaagcacggtccttggttactgagctctttagctgtgcagttccacagcgggcacacgtgttcatgacagggc

SEQ ID NO: 249372 - DNA, 201 bp, Homo sapiens; identical to SEQ ID NO: 49004

SEQ ID NO: 249373 - DNA, 201 bp, Homo sapiens; identical to SEQ ID NO: 49005

SEQ ID NO: 249374 - DNA, 201 bp, Homo sapiens; identical to SEQ ID NO: 49012

SEQ ID NO: 249375 - DNA, 201 bp, Homo sapiens
atgtcaaggggatgcaagctgggcacgtccagtactaaatcaacccggtccctgtggggtggggcctgccttccctggggcagtgagttcgccttttgttygagggtctctgggtaccggtatggcgttcgagctcactgcacaggaagccagctacagggaggaagctcgtaggtttcccgtccatggcctgtatccctg

SEQ ID NO: 249376 - DNA, 201 bp, Homo sapiens
ccaccaccacgcctggctgactttttgaatttttagtagagacggggttttaccgtgttagccgggatggtctccatctcctgacctcaggtgatctgccygccttggcctcccgaagtgctgggattacaggcgtgagccaccatgcacggccagcctgctgaggttttcagactttatctctgtaactaacagttcacc

SEQ ID NO: 249377 - DNA, 201 bp, Homo sapiens
aatattcagtagtttattcagatacattttatcgatgctgtccttactggtgttagatgcattatctgagattacatgttatttgaatcatttcagtttcrttcatgtacataaagcgaaagcagctctctaatttacacaaatgttaagttattcataaatagcacagataattccctctacctgatctgcaatctgcag

SEQ ID NO: 249378 - DNA, 201 bp, Homo sapiens
tggtagtgtatagaaatgccactagttttcgtgtgttgactttgtaccctgtgtctttgctgaattcagttagtggggagcacattcttcatggtcttctrgatataggatcatgtcatctgcaaataggccttagaaaggcatcctttctaatgtggaaactttctttttctctttatagcctaatcctctcacttagag

SEQ ID NO: 249379 - DNA, 201 bp, Homo sapiens
ccttggaacacaaatcttgcttcaggccaagttagcaggcaggcgtgcgttgtagtgagggccatcttttgttcctagagctgagggtgatggcagcattraccagcactgggcttagggttgactgtcccaccaccagaaaagaaaattgcaggccaggacccctgatgaacaaagttgcaaaaatcctcaacaaaatac

SEQ ID NO: 249380 - DNA, 201 bp, Homo sapiens
gctgctgtgtgctgggtgtcgtggggtcctgggatacagtcgggggcaagacaccggggggttcctgctccggtgacttgcatcttccgggggagaaagaygctaactgataacagcttgtgacgagttatacggaggaacagaccaggattccgcaccaggggacccatgtcagattgaaaggccagaggtgacttttca

SEQ ID NO: 249381 - DNA, 201 bp, Homo sapiens
tctttaacacatatcacagttttctctgagatttgttttgtccttatttgcttgaattttaccttctcaaccttacatggtattgtaggttttgacctccragactgtatagagtaagttcgtcctctctgtagccttggttttttattgttgttgttaagattcgggacaacccacttacactctgtcttcccaaacaaa

SEQ ID NO: 249382 - DNA, 201 bp, Homo sapiens
gagaccatactctgttttgctcccaacccagagaaggtatcccgaggcctccccacccatcctcctgaattgcacctgccaggactgcagggtcctgttgsacgctgggaaggaggatgaggcaggagcatggctcagcccagtgagggggtctgtctgggggaaagcctttagaaatccaccgcctattcaagtcacagt

SEQ ID NO: 249383 - DNA, 201 bp, Homo sapiens; identical to SEQ ID NO: 49022

SEQ ID NO: 249384 - DNA, 201 bp, Homo sapiens
  misc_feature (1)...(201): n = A,T,C or G
acccctcaccgcccacaagctgccttcgtggccgcggggaccccccccaccccgcttcttgttatctctctgcgcctgtttccctctatcttcagtggacncaccgtgatttgggggttctgggaactgcttttttataggagcgcgaggagctgtttttccgggccctctgtctctgccacaccgtccaggtgaaagacg

SEQ ID NO: 249385 - DNA, 201 bp, Homo sapiens
tgcacgcacagacacatgctcacacgcagacacacacatgcactctcacacacgccccaaatgccgtggctccagatctcagcatctctgggcagggctgragtcccaggctgatgctgttcctgaatttccccgcacacagggcagcctcggggatcaggtcccagccggctgtggccctgagcacatcacttcaccttc

SEQ ID NO: 249386 - DNA, 201 bp, Homo sapiens
agcacagatacgtcaacagtatcaccggggcccttcgttccatgcgtaaacccacacatgcgtaggtgaggcttcttggagctgggtttctctcttcttgraacacaagtgcccaggaatgccactgccttcatcacaggtgttagaagtcagggcaggctaccccgcccacctttgagactcctccctgccctgaagctt

SEQ ID NO: 249387 - DNA, 201 bp, Homo sapiens
agccagggtccagggtgtttgtgaatgtctgtgttcgtggcaccgtgtgactcagtctcccttcctggacgctagcggtcacttgccatttctgagcgcaygtgaagcctctgtggtttctagaagtgtcggtgctgaacgcacgcccgtttagccttcctcacccgtcagtctcaattacaaaacagagtgcttgagaac

SEQ ID NO: 249388 - DNA, 201 bp, Homo sapiens
aatgagcaaaagtgtcatcgaagcaaggattgcaggccatgtgcctgccatgctcttctggagaacaatactgacaagaatgtgcctcactgctgtgtgcyaaggagggttgggttgggtagaaattctcttgctcttggaagattttttgagatggtgaataagttcattatgataatttcctaactttataatgcagtt

SEQ ID NO: 249389 - DNA, 201 bp, Homo sapiens
tcgtggcggtcagctcccctgctgtcaggaaggaattccatgttccacaagttcctggctgggaatggcgtattgtattccttggggaatgtttagaaatyagctgggccagaggcagacagacaggcagcctcagccggcaccgaccccagggggcctccgatacccagccaggcacaggctgtccagccaggcacaggc

SEQ ID NO: 249390 - DNA, 201 bp, Homo sapiens
tctctggacccccgtccctgtatgagcccctcccaccgtgataagcagcgtctggtccccggcgcgtgagtcttcatctctgactttgcgtgggtggcttytcctcctgaggtctgcagtaagttagaggtcattccaaataaccacaggcttcaaaatacggaaacaatcattcttttaacacaaatctccctcctgcat

SEQ ID NO: 249391 - DNA, 201 bp, Homo sapiens
tgcccctgtccctgacgattgcctctgcagtccaggtggatgcatctgtggtcccctgacctccctgcgaggagctctcccaggcactttgcatcccccawgcacaggtggacgacctcgtctccccccaccctcagcaggtcacgacacatgccacaggtcactcaacaccgcagcccctcaggctcccgcccacagtgc

SEQ ID NO: 249392 - DNA, 201 bp, Homo sapiens
aatctttaaaaagctttccacactgctatccctgttttttgttttttaataatggcataattttaaaaaataatctagtcttccccatattgtgattaaastcctcatttttctcattttgtaggagaaatttatctgttttgcaaaggagcagattcttcgatattcccccgagtgatagaaggcaaagttgaccagatc

SEQ ID NO: 249393 - DNA, 201 bp, Homo sapiens; identical to SEQ ID NO: 49002

SEQ ID NO: 249394 - DNA, 201 bp, Homo sapiens
ggcagcttctcggctcacagcagggagaggggacagtgaggaggccgtgtgagttgactgcagttatcacctgtggcgctgttggtgacacacactgcttmacagggcacccttgagttcatgtcttgctgccatctaactctttcagagttctgtgttgggatggccaaggtgaggcctgggggaggaagaggagagctg

SEQ ID NO: 249395 - DNA, 201 bp, Homo sapiens
gcagagctggtgcgggacctctcaccgcccaccctttaagcaaacgcttggaaaaatactttaaacattccagatacatggcataatttcaactcaggggmgccattttcaaatccatccagctcatgacttctgtattactgaacctcccctccccaaaagtgccttcagggactgagtatggtgagaatcatgttcgcg

SEQ ID NO: 249396 - DNA, 201 bp, Homo sapiens; identical to SEQ ID NO: 49006

SEQ ID NO: 249397 - DNA, 201 bp, Homo sapiens
  misc_feature (1)...(201): n = A,T,C or G
tgggttgggtagaaattctcttgctcttggaagattttttgagatggtgaataagttcattatgataatttcctaactttataatgcagtttataatctcngtttaactgaaagtatttcttttttgaaaagaacgctttaccaaaatataaagcaaatactctatgaaagaggaacatcagaatctcagattcaccccga

SEQ ID NO: 249398 - DNA, 201 bp, Homo sapiens
atagaatgggatgagtcagtgttaggctttttgccagctgtgactttcatcctgaaatcacagttgatatcacagaccctagtttatattgttaagctttsaaaagcgctctggtctttctatgcatttcagaaagaaaatatatttaatcaaaagatccaaaaagtttgtaacaatgcactgaggtgccacttcttgtga

SEQ ID NO: 249399 - DNA, 201 bp, Homo sapiens
acttagagaagggcttgggtgcagccacagcgctgcttcccctggatggtttttcttggagatgtaaattggagttcagtgaacaaaagttcactgtcaawtatgttttgggttaagccacctgaagtcaggttttgctgcaggccgcgttctgacctctccaggcccctttgcctccacgaggggagtgagcagctgccc

SEQ ID NO: 249400 - DNA, 201 bp, Homo sapiens
ggggagtgagcagctgcccccggtgtggccatgagtcccgcagggaggaaccctggctcacgtgctgggagcacagcgtcgtgtcgaaaacagtttgcacrgttacgcttttcagtcaccagtttgatgttggattgttttacttttcatatctttaaaactcttcccattttttagggactgtctctgtcccaaattgct

SEQ ID NO: 249401 - DNA, 201 bp, Homo sapiens
tatacatcagagttaaatgggtctagtctgaggactttttgagcagaaagcttctataggaatactcattctcaaaggagggaggaagtgggggcatgggrcttagcctgcagtggtggagggtggccagccccagaggcagatctgctgaaggagtgaggctttcgcactggtcaggttcttggctgagatgtgcctgtc

SEQ ID NO: 249402 - DNA, 201 bp, Homo sapiens
atgtttttatacatcagagttaaatgggtctagtctgaggactttttgagcagaaagcttctataggaatactcattctcaaaggagggaggaagtggggrcatgggacttagcctgcagtggtggagggtggccagccccagaggcagatctgctgaaggagtgaggctttcgcactggtcaggttcttggctgagatgt

SEQ ID NO: 249403 - DNA, 201 bp, Homo sapiens
agggaggggaggcagtggatgccactcatgaccgtgaccttgagaaggcgcaagttatgctggccgtggatgtttttatacatcagagttaaatgggtctrgtctgaggactttttgagcagaaagcttctataggaatactcattctcaaaggagggaggaagtgggggcatgggacttagcctgcagtggtggagggtg

SEQ ID NO: 249404 - DNA, 201 bp, Homo sapiens
atcagagttaaatgggtctagtctgaggactttttgagcagaaagcttctataggaatactcattctcaaaggagggaggaagtgggggcatgggacttakcctgcagtggtggagggtggccagccccagaggcagatctgctgaaggagtgaggctttcgcactggtcaggttcttggctgagatgtgcctgtcacatg

SEQ ID NO: 249405 - DNA, 201 bp, Homo sapiens
ctgctgggcggggagaccctgcagccagctcacagctcgtgtttcctcctgggctcagccctgtagggggttgcggctgtcagagccggatctcactgttktggggctgagcagccccaacaggggcctcccatgatgtccgcaggacccttttttatatgtctgtacctcagtcatgtgtgctttcctgggattctccac

SEQ ID NO: 249406 - DNA, 201 bp, Homo sapiens
gattctccacggtggaattttgaggaaggacttcggaagtcacaggccactcggctgcatcaggccttccctttcaaaggcagatgtgaaatctctctttygggggatcctgcggatgcttactgcacccaaggtattatgtacgcagtacacagaagaccgactcgaaagaagaaaaggagagtacataagcatattcat

SEQ ID NO: 249407 - DNA, 201 bp, Homo sapiens
agaaagaaaatatatttaatcaaaagatccaaaaagtttgtaacaatgcactgaggtgccacttcttgtgactttcctcttacagactttgtacgacaccrcgtatctgaccctctacaacatcagcttcacctccctccccatcctcctgtacagcctcatggagcagcatgttggcattgacgtgctcaagagagaccc

SEQ ID NO: 249408 - DNA, 201 bp, Homo sapiens
aaggtattatgtacgcagtacacagaagaccgactcgaaagaagaaaaggagagtacataagcatattcatctatgaaaaagaaaagcaagcagaaaagaygaaagagaaggaaagtcctaacagtgcaccctcctggagctcctccaggagctgcttccttgatgccctttttccagccatttcggggacatttgctgtc

SEQ ID NO: 249409 - DNA, 201 bp, Homo sapiens
agggtatttgtctggctttgttttatgtgctgtgtccagggttttcgtagtacttagcaggaggaatagagaaaagtatttctgttctgtgttaccacaasagaaagtccctgattgacttttaaaagcagcgacatatttatttccaaaagcttctgcttatcactcacagcaacctaagttctgggaccattttgggtt

SEQ ID NO: 249410 - DNA, 201 bp, Homo sapiens
atcgtatctttacaggcccttaggatcggaaaacctgctgcttagaggagctacactgaagaacactgagaaaatctttggtaaatatttaattaattatwaaccattgcccctaacattaaggatgcatgaagcaaaagttaaaacccgcagcggaacccgagagcgtttcttggcaccttgaggtgctggaggctttct

SEQ ID NO: 249411 - DNA, 201 bp, Homo sapiens
ttacgagaacaacatgggaaaaaaccacccccatgactcaatcactgcccaccaggtccctcccatgatgcgtggggatcataggtgctacaattcaagaygagatttgggtgaggacacagccaaaccctatcataaattaaaattttatttttcagataattttacatccatatgcagttgtaagaaataatagattct

SEQ ID NO: 249412 - DNA, 201 bp, Homo sapiens
ttctgatcacaatgaggaagtgagggaaaaactgaaggatgtgttgatgggggcccctaagaagcggtgttcactacaaaaggtcctaacacttttttctrtaatctacaaatgagatgttatcctgttatcccactgaccatgtgggaggactgtagcccacaccctccctcagctaaatcaaggggtatggtgatgggt

SEQ ID NO: 249413 - DNA, 201 bp, Homo sapiens
gtgggaaaaaatgacgcaaacgtttcccctgactcttccaagttcagaggtggcccggctgccttgctctgcatgaggacagatgactctccgaaggggayttgtgttcaccttccagcatttcagaaaccaggaccccctttgggtcaccccaacgcccgtcccgagggcattttgtcccctttcgtgtctttcccagag

SEQ ID NO: 249414 - DNA, 201 bp, Homo sapiens
ttttaaataaccattttcaaggaaaaggtaatgtgggtttgcaaatgtatctataataatgttcaaagttgcaaagtgagctttgttgattggcagttgcsgtaacagtgtgtctgtgagaacagcacactcggttcgtgctccggaatgctgggatgagcagtggcggggcacagtcagagccctgtggccgccatgatg

SEQ ID NO: 249415 - DNA, 201 bp, Homo sapiens
ggttggcagcattttattttgaaataattacagatttaggagaagttaaaataagtagaaagacagtccagaggggcctgtgtgtccttcgagtccagttwatttctcctttcgctggctgtgcttgctgtcatatcgaagaaactgctatgaaatccaagatgatgaagatttgccaccactgtgtttttttctataagt

SEQ ID NO: 249416 - DNA, 201 bp, Homo sapiens
ttacagatttaggagaagttaaaataagtagaaagacagtccagaggggcctgtgtgtccttcgagtccagtttatttctcctttcgctggctgtgcttgytgtcatatcgaagaaactgctatgaaatccaagatgatgaagatttgccaccactgtgtttttttctataagttttctagttttagctcttaaatgtagg

SEQ ID NO: 249417 - DNA, 201 bp, Homo sapiens
taaagaggttccaaataaagatagaggatcaaatacccacatttactttcattccctcccaaaacctcactaaaacaacagtaaaaggatttttttttttaaagacataaacccacaaggacaaagagagtgggagaggagacaacagcaacaaaattttggaatctgggtagcagatggatgagtgtaactgacttagca

SEQ ID NO: 249418 - DNA, 201 bp, Homo sapiens
gttttgaaaaggcactttatggctgggcgcggtggctcatgcctgtaatcccagcactttgaggggctgaggcgggtggatcacctgaggtcaggagttcyagaccagcctggccaacatggcaaaaccctgtctctactaaaaatacaaaaattagccgggcatggtggcacactcctatagtcctagctacttggaggc

SEQ ID NO: 249419 - DNA, 201 bp, Homo sapiens
agagacttctggggatggtagggttagtacaagtgggtctggcctgccttgagttagacagagggagtgggttatgcctttataatggctagggtgctggsgagttcccatgtgtaggctgaggatcggcaaaacttgaattttcccctggcgccaaaggcaaggcacatgtggacttccttattagcctgatcagttgtg

SEQ ID NO: 249420 - DNA, 201 bp, Homo sapiens
tcccaggagcacactagccccagacctgtgacctccacgtgcaagcacaggcccccaccgttcctgcctgctctggacatggctgggtggacgggggctgytcctcctctgccagagggtgggagaggaggccgaccccaggcagcacctaggagggggcaccctgagcctcttgagtttgagccgctgtctcctgctcac

SEQ ID NO: 249421 - DNA, 201 bp, Homo sapiens
agttagacagagggagtgggttatgcctttataatggctagggtgctggggagttcccatgtgtaggctgaggatcggcaaaacttgaattttcccctggygccaaaggcaaggcacatgtggacttccttattagcctgatcagttgtgggttcaaaaggggagaagtgaggtgaggcttaacataagtcagtggtcaga

SEQ ID NO: 249422 - DNA, 201 bp, Homo sapiens
ccaaggagttttttattaccaaagctaatttttcatagttagcattacaaatagaaagtttgttcattttccttctttttatcctttccttccccccgcgcccccccccccccccgcttttattacatagagacagggcctcactctgttgccaggctagagtgcaatggcgtgatcatagctcagtgccgcctcaaattt

SEQ ID NO: 249423 - DNA, 201 bp, Homo sapiens
gggaatttgtccattttttttctaagtttattgtattcctttataatccttttaatttctgtaaggtttatagagatgtcctctctttcatttctattctktggacaccctgtggaggtagaaaataacccttccaattaacaggtaggatgtctatgctggaagcactccacacgccaacaaaatttgagagaaatttta

SEQ ID NO: 249424 - DNA, 201 bp, Homo sapiens
caaggagttttttattaccaaagctaatttttcatagttagcattacaaatagaaagtttgttcattttccttctttttatcctttccttccccccgcgcccccccccccccccgcttttattacatagagacagggcctcactctgttgccaggctagagtgcaatggcgtgatcatagctcagtgccgcctcaaatttc

SEQ ID NO: 249425 - DNA, 201 bp, Homo sapiens
ggctacaggggctttgcggtgctgtggtgggctccgcccagcttgaacttcctggtggctttgtttacactgtgaggggaaaaccgcctacttaagcctcmgtaatggcagacgcccctccccaccaagctcaagtgtcccaggtcgacttcagactgctatgctggcagcaagaatttcaaaccagtggatcttagcttg

SEQ ID NO: 249426 - DNA, 201 bp, Homo sapiens
tggaagattttaaattaataattctatttatttacttgttatatgtctattcagattttctactactttttttttggagacagggtctcactctgtcactygggctggagttcagcgatgtaatcacagctcacgctcactacagctttgatctcccaggcttaggtgatcttcccacctcagccaccagagtagctggga

SEQ ID NO: 249427 - DNA, 201 bp, Homo sapiens
aaggagttttttattaccaaagctaatttttcatagttagcattacaaatagaaagtttgttcattttccttctttttatcctttccttccccccgcgcccccccccccccccgcttttattacatagagacagggcctcactctgttgccaggctagagtgcaatggcgtgatcatagctcagtgccgcctcaaatttct

SEQ ID NO: 249428 - DNA, 201 bp, Homo sapiens
gacccaccctctgtgtgggcggacaccatccaattggctgccagtgcgtctagaacaagtcgggtaagctggcttgctgagtcgtctggcttttatttttygcccatgctggatgcttcagtccgctcctggtgcccttggacatcagactctgggttcttccgcctttgcactcttgtacttacaccagtggtttgcccg

SEQ ID NO: 249429 - DNA, 201 bp, Homo sapiens
cttttttttgagatgtgaaacatcactgtggttccaaaagtcagaacatataaaaaggcatattaagtgaagtgttattccacatccatttcttttacctmgttatcacctgcctccctttcactgttcccatctactcactgtaggtagccagtctcattagtttctaatttactgtgttgtgtgtctttttgcacaaat

SEQ ID NO: 249430 - DNA, 201 bp, Homo sapiens
tatactttcagatagtggtaagtgcaaatgaaaataaagctggataaggccaggcgcagtggctcacacctgtaatcccagcactttgggaggctgaggcrggcagatcacaaggtcaccagatcaagactatcctggctaacatggtgaaaccccgtctctactaaaaatataaaaaattagctgggcgtggtggctggc

SEQ ID NO: 249431 - DNA, 201 bp, Homo sapiens
aaaatgaacactttgtcttctttctgctccaagggaaagcatttcacttttcaccactaagttttacattagtgctaggattctcatagaggcctttaacsaagttgaagaaattcctgttactcatgtgctgagggcttttatcttaagtgaatgttgaaattttgtcaaatgctttttcttcatttactgagatgatta

SEQ ID NO: 249432 - DNA, 201 bp, Homo sapiens
caaatcttgcattatttggtcatgatgtatcaccttttttatatattactgaattctatttgctaatgaccttgtaagaagttttaaattttctttttcartaactgatatacctttgtaagaattttaagtctatgagaggtattgatctcattaatcctttggttttgatatcaaggtactgctgtcttcattaaacta

SEQ ID NO: 249433 - DNA, 201 bp, Homo sapiens
catggaaaaggagtcagggaagactctgaaacggcctgagttggtcaggcaaacagttttatggtggcacttctacagttggcctttgtgacaacagtttytgccagggccatttatccaaggagttgaaaagggaaagtcaattccagtttggattggggtgaggttggctaagttcaggttgaggtagttaccagttca

SEQ ID NO: 249434 - DNA, 201 bp, Homo sapiens
gtgagggccctttcatgcccaaacgtgggcatcctatcccatgtatctaagctatgtccatacccattagaaatacctgccattgagtggaggcacccccrttgagggggtgcctccggtggtggggaagtgcctgtatatgtcctggaggtaggctttgggctgcttattttagggaagcacatccatttggccctgtga

SEQ ID NO: 249435 - DNA, 201 bp, Homo sapiens
ttacacggtcacatatggtgggatcaacttcaggctggaaatgtctaaatgggaattatcattcatgcactggatccatagaaatgaaagtctcaaagcamccagagacgtttaattttaagaaattaaaacttcctagtcaaccctccaagtaacctagtaaacgatggcttcccacctccaaccaagctaatggagttc

SEQ ID NO: 249436 - DNA, 201 bp, Homo sapiens
tacgtggttcattttctcttgcaacttgtttttttatcataagatcatcttaggctgtgcgcagtggctcacgcctgtaatcccagcactttgggaggccraggcagaaggatcacctgaagtcaggagttcgagaccagcctggccaacatggtgaaaccctgtatctactaaaaatacacaaattagttgggcgtgatg

SEQ ID NO: 249437 - DNA, 201 bp, Homo sapiens
gcagaggatgcaatgagctgagatcgtgccattgcactccagcctgggtgacagaacaagaccccatctcagaaaaaaaaaaaaaagatcatcttaagtarggattgtgtttagtgggagttccacatactgtgggttgtggatgtgttatcttatcacttttgcatatgttctgccaagacccagggaggttcataggtc

SEQ ID NO: 249438 - DNA, 201 bp, Homo sapiens
gtaccagtagagaccagcgggagccccagtgataccatataaaccaaacataccaagatagcactgcaaaggctattttccaaggaaattgtcattgaaaytacagcccacaaaagtaggtcaggacctgcatgttaaaccccaacagggtgtatgactgccttctaaaataaaagatttaaatgagacccagagtgtctt

SEQ ID NO: 249439 - DNA, 201 bp, Homo sapiens
cattcttggatttgaaagaaaatggtatcccatcagtgattgtctgccgcatttatctgacaaataactatcaactgtgccccaccatggaccacccaggraagataattacgcaggaaattcaagggttgtgctttaaatctcagttcttcgatggccaagggaaccccttcttcccttagctggagggaagcaagatta

SEQ ID NO: 249440 - DNA, 201 bp, Homo sapiens
agcaaacccggtaaatgggggttttcagggaactgctggataggtcaaataatgacatttctcctgtgatgctgtttttagggtgctgtaaacctgttctkgccactccagtgactgctaggccactggttttcaccacgattacaatgctgttgattttaaggctggagagagagatagagctggaaagggggatgtggg

SEQ ID NO: 249441 - DNA, 201 bp, Homo sapiens
tcccaggttcaagcaattctcatgcctcaccctcccaagtagctgagattacaggcatgcgccaccacatcccgctaatttttgtatttttggtaaagacrgggtttcaccatgtagtccaggctggtctcaaactcctgacttccggtcatccacccgccttgaccccacaaagtgctgggattaacagatgtgacccac

SEQ ID NO: 249442 - DNA, 201 bp, Homo sapiens
gtctctgcagcctgcctggttgcatgacattttttggggaggatggagcagacagctttgttcctgggagcccatagcaataagggaatagagtgagagtytaggagcagtgcctgtaaggatttcagagaattcctaataaactctctggctccccaaatggctgtgtttgtcacctgctgagaatttcctatattgact

SEQ ID NO: 249443 - DNA, 201 bp, Homo sapiens
tgcatctgattaacatttatggtactttatggaagtattaaatagtttaaatgaagttttaagcatcaagcagctggttgtcttgcatattagaaatagastttataggaaaccctaagttgtctgggctgtgtgtttcaggccagataaggatagtttcttccaggacattcttcagggcttggtctagtctttgttaat

SEQ ID NO: 249444 - DNA, 201 bp, Homo sapiens
atggtagggttagtacaagtgggtctggcctgccttgagttagacagagggagtgggttatgcctttataatggctagggtgctggggagttcccatgtgyaggctgaggatcggcaaaacttgaattttcccctggcgccaaaggcaaggcacatgtggacttccttattagcctgatcagttgtgggttcaaaagggga

SEQ ID NO: 249445 - DNA, 201 bp, Homo sapiens
cttccagtcaatgactgtttatttgaacatctcctgcgcaacaagagaatgtagtgatcaagagcatggaccctgggtcagactgcctgggttctgatccygactccctcacttagctgtgtgactctaactcttctgtgcctcagtttccttgtcagtgaaatggagagcataacagtacctacgttataggaatattag

SEQ ID NO: 249446 - DNA, 201 bp, Homo sapiens
gtgggttcaaaaggggagaagtgaggtgaggcttaacataagtcagtggtcagacatcaaaaatttaaaaaatggagtgagactccttattacaattcttsactttggaattaaaagaaaatttccttgttctttcttttcttcagattgtataacgttaattcatctaccttcaaatttattggttatttcttctgccag

SEQ ID NO: 249447 - DNA, 201 bp, Homo sapiens
ttggtaaaactaacttcaggatgtatctgacacaagtttctgtgtgtgtgtgtttgggagttgggggtgaggtcaaatagattaaaataagtattgtaatrtgctatttctagagcatttttagtggctgcaaatgccatttatttcttatcaatactcctcagttgatatctgtctatattttcactgcttatttttatc

SEQ ID NO: 249448 - DNA, 201 bp, Homo sapiens
ggttttgcccatctgtgggtttgtagtgatatctcattgtggctttaatttgcatttctctgactaataaggcagagcacctttccatctttattgctacrtggcatctctattttgtgaagtattttaagccttttcttccatttttctattggattatttgtcttttattgatctatagtagttctttatatattctgg

SEQ ID NO: 249449 - DNA, 201 bp, Homo sapiens
gcttggcaaaccttttctgtaagtggccagatagtaaatattttcgattttgtagaccatacagtccctcttgcaactgtttaactctgcccttgccgcaygaaagcagccatagataatttgtaaactaatgagcttggctgtgtttcagtaaaagtttatttacataaataggtggatgcactatgcatagtttgccaa

SEQ ID NO: 249450 - DNA, 201 bp, Homo sapiens
ggtagagatgttaataccttgaggaggctgagggtgcagggtcagaggaagagtgtaagtgacaaaggaacagaaattatttctaagcttttgttatttcytagggttcttggcgaggttttaagggattatagaagacttactcttcatgtgttcattcccagaccaatggctttgggtaaaacacaatcttagaagttt

SEQ ID NO: 249451 - DNA, 201 bp, Homo sapiens
aatcactccactctgctttcacacttcactgacttgacagtaaagtcccaactcattaagttggcatttagggctcttgacatcttgatcttcctttctcmctcttgttgtatattttcacgattatttgccattcctaaaggagaatttgcattttcttatctctttgcttttccatatgttctttctcagcttagatac

SEQ ID NO: 249452 - DNA, 201 bp, Homo sapiens
cagggcttggcaaaccttttctgtaagtggccagatagtaaatattttcgattttgtagaccatacagtccctcttgcaactgtttaactctgcccttgcmgcatgaaagcagccatagataatttgtaaactaatgagcttggctgtgtttcagtaaaagtttatttacataaataggtggatgcactatgcatagtttg

SEQ ID NO: 249453 - DNA, 201 bp, Homo sapiens
ttcttgagctcaagtgatctgcctgcctcggattcccaaagtgctgagattacagcttgagccaccacacctggccgaggaaccgtatagtgaaagaatgdctaaggactagcagtgctgcagaggaaggcaacaacatttaggcagagagagagaagttagcagataaacattcacagaagagctgggtcttgaattttg

SEQ ID NO: 249454 - DNA, 201 bp, Homo sapiens
cttgtaaaattctatttctttcaaaatttatattttagtaagtttctttcgcttgtgtttattttttcttttctttttttctttcattctttttctttttytttttttttgagatagggtctcactctgtcacccaggctggagtgcagtggcattatcatggctcactgtaacctcaaccttctaggctcaggtgatttt

SEQ ID NO: 249455 - DNA, 201 bp, Homo sapiens
ccatcaaggaacctttttttttttttttttttgcttttgagaaaggatctcgctctgttacccaggttcaccacgtgagcagtgacacaatcacagctcaytgcagccttgacttcctgggtcccaatgatccttcctcctcagcctcccgagtagctgggaccacaggcgcatgtcaccatgcctggctaattttttatt

SEQ ID NO: 249456 - DNA, 201 bp, Homo sapiens
tgtcttggtaatttgtttcatttaggggacttattcatttcatctaatttgtagactgtatcggcataaagctgttcataatattcttttactgtcctttkaatgtctgtaagatttttaatgattgcccctctttaatttctgaaatattattggtaatcatgtgccttatttttcttttttctttatcattctagtgga

SEQ ID NO: 249457 - DNA, 201 bp, Homo sapiens
tatttgataaaatttactagtgaaggcatatgggcttagagtattcttttctagtgggtttttaattacagtttaaatttctttattgatatagagtgtgrtggttttaaacatgacccaacattttttttgacattcctattattgataacagatactaaaggcttttaaatttttctgtttcttcttgtatctgtcttg

SEQ ID NO: 249458 - DNA, 201 bp, Homo sapiens
gtggtcctaagtcagcaaggtcggtagagtgtgaagatcacgtgatgaatctcatattacatctctttccttctcttctttgccctctacttaggtctccrtaaaaacaaccacaatttagtctctctgccactttcttggggggcattatgaatttgctggtttcctcctagagagtccaaatcttagagccattgctac

SEQ ID NO: 249459 - DNA, 201 bp, Homo sapiens
cctaaggcgtgtacgtgtacatttttagagcttttgactttgagattacagtcacacattgcttaatgacagggacacattcagagaaatatgtcgttaartgattttgtcagtgtgcaacatcatagggtgtacttagactaacctagatgggatagcctacgacccacctaggctttgtggtttacacagttgctgctc

SEQ ID NO: 249460 - DNA, 201 bp, Homo sapiens
tcccaaagtgctgggattacaagtgtgagccaccgcgcctggctgagatggctttttttctttatcagtaatccttgactgaggtcagtagtcccccagtkacctctgagggtctgcatcacttaggtttaattacctggagatttcacacagatcctaaaatgatatattgtaggtaaatggtgtccaggtaatgtcttt

SEQ ID NO: 249461 - DNA, 201 bp, Homo sapiens
catccaattatgtaagctagaaaatatgaagttatctttttttttttgagacagagtcttggagtgcagtggtacgatcttggcttactgcaacccctgcmtcccaggttcaagcaagtctcctgcctcagcctcctgagtagctgggactgcaggtgtgagccaccacgcctggctgatttttgtatttttagcagagac

SEQ ID NO: 249462 - DNA, 201 bp, Homo sapiens
tttctttccacaagatccttttatttgatatttggagccaagtgtgaattctgacaccaataccttcccatgcttctttaggttttgatttttttttttttaaagatgaggttttaagatgaggcttttaattagtctctattgttttgcaagtgtttctctctgttccttccttcactggatggatggagagtggtttct

SEQ ID NO: 249463 - DNA, 201 bp, Homo sapiens
aggacattttggttgttttcagtttttgatgattaagaacaatgcccctgtggacactgctgtacacatcatcgtaagaacatatgcttttatttctcttkgttaagtaggtacctggatgtggaattgctggatcatatggtaagcatatgtttatctttatacgaaattatgaagtggttttccaaagtagctgtacca

SEQ ID NO: 249464 - DNA, 201 bp, Homo sapiens
ttggattgctccaaaccctagaatcactatctttcaaactcactcatgttgaagggcatgaatgtggaacttaatttctccacggaaagtggagctagagkgagggttgtctttgtagggcctctctcaggtccaccagtgccacgtgcttagctgacagaccaaaatcagaaagttgacttagaggtcatcaagctttcc

SEQ ID NO: 249465 - DNA, 201 bp, Homo sapiens
ttccattgtatagatgtttcagagtttgtttacctcttcaccagttgaaggacattttggttgttttcagtttttgatgattaagaacaatgcccctgtgracactgctgtacacatcatcgtaagaacatatgcttttatttctcttggttaagtaggtacctggatgtggaattgctggatcatatggtaagcatatgt

SEQ ID NO: 249466 - DNA, 201 bp, Homo sapiens
gtggaaaatctagaattttggattgctccaaaccctagaatcactatctttcaaactcactcatgttgaagggcatgaatgtggaacttaatttctccacrgaaagtggagctagagtgagggttgtctttgtagggcctctctcaggtccaccagtgccacgtgcttagctgacagaccaaaatcagaaagttgacttag

SEQ ID NO: 249467 - DNA, 201 bp, Homo sapiens
ctgcatctgattaacatttatggtactttatggaagtattaaatagtttaaatgaagttttaagcatcaagcagctggttgtcttgcatattagaaatagrgtttataggaaaccctaagttgtctgggctgtgtgtttcaggccagataaggatagtttcttccaggacattcttcagggcttggtctagtctttgttaa

SEQ ID NO: 249468 - DNA, 201 bp, Homo sapiens
acttttcctgttgtgaaaaatttgtgttttgtgtctgcttcttagcatcttttgtgtgagtagaagtgcgtgaaacagtattatgatattggcaactaccrtcgaaaaaaagaaaaggcgcagccccactgagcaaggggacagacctaggtttgaatgatgatcccagctctgtgaaatggaggcttagatgaattcagc

SEQ ID NO: 249469 - DNA, 201 bp, Homo sapiens
cccaccctctgtgtgggcggacaccatccaattggctgccagtgcgtctagaacaagtcgggtaagctggcttgctgagtcgtctggcttttatttttcgyccatgctggatgcttcagtccgctcctggtgcccttggacatcagactctgggttcttccgcctttgcactcttgtacttacaccagtggtttgcccggg

SEQ ID NO: 249470 - DNA, 201 bp, Homo sapiens
gctcacgcctgtaatcccagcactttgggaggccgaggtgggtggatcacgaggtcaagagattgagaccatcctggccaacatggtgaaaccccatctcyactaaaaatgcaaaaattagctgagtgtggtggcacgcacctgtagtcccagctacttgggaggctgtggcaggagaaccgcttgaacctgggaggcgga

SEQ ID NO: 249471 - DNA, 201 bp, Homo sapiens
caggatagctttggctattctggtcttttatggcttcatataaatttgaagatttttttctatttatatgaagaatatcattggtattttgttaggtattrcattgaatctatagattgctttgggtagtatggacattttaacattattaattcttccaaccaatgagcatggaatatctttccattttttgtgtgtctt

SEQ ID NO: 249472 - DNA, 201 bp, Homo sapiens
acacctcctttgagtcgtcttcacatgctatcttctcagtgaagcctaccctgtatatcctattcataattgtaatcagtactttcagtgccccttactgyattctaatgtttcttttttttcctccatagcaatgaatttcagcactgtttattttctgtctcctccccgtggaaatctttgtctgttctcaaatgtgtc

SEQ ID NO: 249473 - DNA, 201 bp, Homo sapiens
tgtatacccagtagtggcattgctgagattttttttctatagagttgtttgaactccttatacattctggttgttaatcccttgtcagccatctgtaaagsgatatctgcgaaatagtttgcagatattttctccattttgtgggttgtctcctcactttctccattttgtgggtttttttccattttgtgggttgtctct

SEQ ID NO: 249474 - DNA, 201 bp, Homo sapiens
agtacccattgtttagcccccacttataagtgagaacatgtggtatttggttttttgttcctgagctaatttacttaggatagtggcctccaacttcattmatggtgctggaaaggacgtgatttcattcttttttaatggctgcatggtattccatggtatatgtgtaccacattttctttatccagtccaatattggac

SEQ ID NO: 249475 - DNA, 201 bp, Homo sapiens
tttccctgagtacccattgtttagcccccacttataagtgagaacatgtggtatttggttttttgttcctgagctaatttacttaggatagtggcctccarcttcattcatggtgctggaaaggacgtgatttcattcttttttaatggctgcatggtattccatggtatatgtgtaccacattttctttatccagtccaa

SEQ ID NO: 249476 - DNA, 201 bp, Homo sapiens
ctagtaagctaattttgcaggttgtggaaggtgtaggggaaagattcggttagccacaaatgtctactatgcctaacctttatgctatgtactgggatgtyactgtcaccaattatctttgttttgagtttctgtttaccacacatggcttcctgcgcttccaaattttcccagactcatactgctttacagccttcctct

SEQ ID NO: 249477 - DNA, 201 bp, Homo sapiens
aatctgtgaggaagccgaggcaagctgttaggattctgttcaatgggaggaaaggctctgagtgaggtgggaaggaaggacttcccaggaggcacacttgsgttcccggccccacctctgcgctggctgcccacaggccctgcttctgcctatttcctggttctgcttcatgtttcaaagacataagatcaaatgtgatta

SEQ ID NO: 249478 - DNA, 201 bp, Homo sapiens
ggtgtgtctgtgtgttcgcgagccctggcatgccactgcggcttcacagtagcctcctgggcagcggctcatcagcttccagcacagcctttgttgttctrtaaatctgttaatgtttgtgctacctagaataagaaggaaggagtcattctacagagaggatttattcttccaggcgccaaaaccttgttccttacgatt

SEQ ID NO: 249479 - DNA, 201 bp, Homo sapiens
cagctgcgaaaagatttcgtagagtgactcagagcaagcgcccagctcatgcccactgaattaagcaagaggaagtggccaacttccgcagctgctctgaragcccaacacagcaaggcctggctgagatgaacaacatagatcattccactgactttgggctacccccaagccaaccccatgtgaccccacacctacccc

SEQ ID NO: 249480 - DNA, 201 bp, Homo sapiens
actgagagcgcccccatcaccctgacgaatgtgactgtgtctgacgaatgtgactgtgtccaaccctgcccccacttcctctctgcaccagctccgcaggrcctggtgggagtcatgggtcctgtgataccccctcccctcagttcctcaagcagcactctgtgaggtcctgtgcccagctctggtgtgagtgggtgcccc

SEQ ID NO: 249481 - DNA, 201 bp, Homo sapiens
ccctttcttgaataagatttcctgtctgtcacgttgccatttgctttcttcatgtttttgcgatggactgcagctccctccattctggggagcctcctggsgctgcagcaatccagcatgactcggagctctttgattttctttcccagttactttatagcacatgaagatgtgttcttaccagtgacagagggtcggtga

SEQ ID NO: 249482 - DNA, 201 bp, Homo sapiens
tcccagtactttgggaggtccagtactttgggtggattgattgagtccaggagttccagactagcctgggcaacacagcaaaaccccatctgtacaaaaawtacaaaaattagctgggcgtggtggcatgtgcctgtagtcccactactagggaggctgaggtgagataatcacttgagcccaggaggttgagggtgcagt

SEQ ID NO: 249483 - DNA, 201 bp, Homo sapiens
aaacacaggactttgccgattacatgtgaacacccatgtcagtgactcacccaatcatgctttaatctcataactgagaggctttaaaaaattatagtcarcaaggcagcttgctagttatgactgccattggaatggagttttcctcagaacagctggagtgtaatgtggtgggaagaaagcctggtgtgggtgagagac

SEQ ID NO: 249484 - DNA, 201 bp, Homo sapiens
agtgctttcaggtaaactaacttcgtggattctgggcctttgcccaagttcttcttccccagatagcccacgcgttacttctacacctcctttgagtcgtsttcacatgctatcttctcagtgaagcctaccctgtatatcctattcataattgtaatcagtactttcagtgccccttactgtattctaatgtttcttttt

SEQ ID NO: 249485 - DNA, 201 bp, Homo sapiens
cattgctagatttggtttactggattcctttttaggatctttgcttcgtatttttaagagatttcagtctttagttttcttgtgataactttggttttatrtgaggataacactggcctcatagaatgagttttggaagagtttgtgaagaatttggggtatagttttttttctttttttcttctagcttttattttaggt

SEQ ID NO: 249486 - DNA, 201 bp, Homo sapiens
cattatgtaggcaaaactaaatattttatgtgtgggtcttaagtgtgatattgaaaggcctgactcctcccttgcattctttcttcccaaaccatgtacamtgcctgtaggatgctaaatcagagcaccaatgcatcctggaggatggcactcccccctcacaactgatgcctcctggttagtccaacagcttagtaagtc

SEQ ID NO: 249487 - DNA, 201 bp, Homo sapiens
gcattctttactcccgaaaattcctttgtatcccttttaagtcaacatttcccctcatcccacagcccctgccaaccactgatctgttttgcatccctgtrgatttaccttttccagaatgtcatataaatggaataattttgagtctggcttttttctattagcgtgcgcatgtgaaatttatccatgttgttcactgtt

SEQ ID NO: 249488 - DNA, 201 bp, Homo sapiens
aatagtatctttccacatcatcatcttaataaaaaacattcattttgagaatacattttccaggcagttcctttgcctccagggggaatattttgaggccwcccagtgaccataggattaaaagacttgacaggaaagccctagaattcttgaagagcaaggcttttgaaagattcattgttgtggactctccctttgaaa

SEQ ID NO: 249489 - DNA, 201 bp, Homo sapiens
gcccagttccttcccttgaagcccacagcccatcgaggaagacaggtatgtaagacagcatttgcaagggggtgacaaaggccaggggggaggtgaacaarggatgcagggagtggctctcagtgttgtgagcaccccgcatgggaaggccagcgcggcagggtgctgggtgctgttgccctctgcttctcccggctggag

SEQ ID NO: 249490 - DNA, 201 bp, Homo sapiens
gccaccacacccggctaatttttgtatttttagtagagatggggtttcaccatattggccaggctggtcttgaactcctgactttgtgatccgcctgcctyggcctcccaaagtgctgggattaaaggtgtgagccaccgcgcctggccacaacacctctttctatgagacagagaggcaagacatagttgatgggtccct

SEQ ID NO: 249491 - DNA, 201 bp, Homo sapiens
aatccatcagacaaagcattggcaaacactgctcaggtatgtctgggtttgaatcctacaaagtctggaggataataagatttttcttcagtaattctcascctccgaggtgtgggaacagaggttgcagtgatccattcttggaggtttcaggccgggtgtggtggctcacacctgtaatcttagcactttgggaggccg

SEQ ID NO: 249492 - DNA, 201 bp, Homo sapiens
ttggctcctgcttgagtcgtaatattgtctcagagaaaaacaattcacctctaggtaattaagaatagatcataagagctaccaatcaaggcccattgcargtgattgtatacactctggttttggacacgggaacagtcctacattcttgctttgtgggtttcagtttccagaagcattatagaaagcaactgaagaggg

SEQ ID NO: 249493 - DNA, 201 bp, Homo sapiens
gataattttgatccttggctctctgtcatcctgttctcctttcacataaaggggctaatctctacctctggggtccagggaggacagtccctaggacttgyccatttctcatgggacttggaccctgccttctctaaggctagaggcacagctgtcgggtaaacattcttaaagctctgaggtcattagaagaaagagaga

SEQ ID NO: 249494 - DNA, 201 bp, Homo sapiens
cctctttctatgagacagagaggcaagacatagttgatgggtccctgctgatgagggatcacacctggccatacctgcttccactgtgaagtagaaagccraatgctgctgagagggctgacggagtggtgaaggagatagtctgagtgggaaaaaacaacacagactgcctttcccctgctgccaccctgcaacaatcaa

SEQ ID NO: 249495 - DNA, 201 bp, Homo sapiens
ttttatttgaggcagggtcttgctctgctgcccgggctggagtgcagtggcatgaacatggctcactgcagtcctcctaggctcgagtgatcctcccaccycagcctcctgagtagctgggattataggcacgtgtcttcatgctcagctaatttttttgagtttagtagagataaagtcttaccgtgttgcccaggctgg

SEQ ID NO: 249496 - DNA, 201 bp, Homo sapiens
aaggctggagagagagatagagctggaaagggggatgtgggaatatggaaagtaaactttgtaagtaaaactttacaaagttcagtgtccttgttgatatktagccatttttcttgagtaattgcatctcagattgttaaaagcctgtggttaatttccagagttacactaaatttgattttgacagttttgtccagtgtt

SEQ ID NO: 249497 - DNA, 201 bp, Homo sapiens
gatttgcagatattttctcctacttgtgggctggctatcttgcactttcttgatggtgttcttagaagcacaaagtttcaaaatttgatgaagacccgtttagtctgttttttctttggttgcttgtgtttttggtgtcatatctataaaaaccattggcgaagatcacaaagagttagacatatgttttctttttgtttg

SEQ ID NO: 249498 - DNA, 201 bp, Homo sapiens
actgctgtacacatcatcgtaagaacatatgcttttatttctcttggttaagtaggtacctggatgtggaattgctggatcatatggtaagcatatgtttrtctttatacgaaattatgaagtggttttccaaagtagctgtaccatttctcactcccatgaaaaatatatgagagattcagtttctttacatcctcacca

SEQ ID NO: 249499 - DNA, 201 bp, Homo sapiens
acaaacaggacattgatcatatctattatgcccaaagctgttttcatacccctggctccctgatccctatcccagataactgattttttttttttttttttgagacagagtcttgctctgtcacccaggctggagtgcagtggcatgatcttggctcactgcaagcttcgcctcccaggttcataccattctcctgcctca

SEQ ID NO: 249500 - DNA, 201 bp, Homo sapiens
attacattgaacatgacaaaaattgctgtgtgggcagtttagttgagtacttgcagattgatagagcccttagtaataatgaagggaaaaggttcttgaasctgctctgttccagaagatgagctcaccagttaaggagtttgcaactaaaggtcctcattaacctcttgctggatggcaaagaggaaaaaagaagaagaa

SEQ ID NO: 249501 - DNA, 201 bp, Homo sapiens
ctggaatgagtggatagatccctctgaggtctggccatcgataccatttttgctgatgtcagggagtggagacttgaccagaattcttcttcttcttcttyttttttttttttgagacagagacttactctgttgcccaggctggagtgcagtggcacgatctcagcttactgcaacctccgccttgtgggctgaagtgat

SEQ ID NO: 249502 - DNA, 201 bp, Homo sapiens
gtccattcaggctgctataacagaatactgtagactaggtggcataaagaactaaaacaacggatttattcctcacagtccttgaggctgggaagtccaaratcaagatgctggcaggtccagtgtctagtgacggcccacttcctggttcatggaacagcaccttctcattgcgtccttacatagtagaaagaatgagag

SEQ ID NO: 249503 - DNA, 201 bp, Homo sapiens
agtattcctttcatgtaaatcccaactcactgtgaaattacaagaaatgcatagatagtaaccaggatgaatgggccctaaagtagatacacaactggacyttcttaattgtaagtatttagtacttcatcagcccataaaattcatgttgataaatagcaccactctcagaaaagacaaatactcaaagatcaatagatt

SEQ ID NO: 249504 - DNA, 201 bp, Homo sapiens
tctgaggctttaaaaaagaaaagcaacataagtactgcagaaatttgaggatcaggaagataatatgtccaaggaaactgcttaaaggggggttgcaccaraagctcaagaaacccagaagttatttctgagactggctccagttatttcaaatttcattcatattgttttgtttcctttgttgctaaactggaacaggaa

SEQ ID NO: 249505 - DNA, 201 bp, Homo sapiens
aaaaggaagcccagtgacctccaccagaccattacaaatgtgaaacttggcacttaaaattgcttgctctaaattttccaattgctttctctctttttttyccatttaatgtcgtcctgccaactagtgattttattattataaacaggacattgtattcacttttaagaagaaatatgaagctggaggtaaaattacaaa

SEQ ID NO: 249506 - DNA, 201 bp, Homo sapiens
atgcttatgaagaatttggaaaatgcaaagaaagtaatcacctggaacctctcagctagtgataggcactgttgctgtttaggtatgttccttccaagtcttttttttttttttttttgagacagactctcgctatgtcgcccaggctggaatgcagtggcaaaatctgggctcactgcaacctccacccgccaggttcaa

SEQ ID NO: 249507 - DNA, 201 bp, Homo sapiens
ctgtcctgggtcatcctgcctcagagcctgcagtgttactctggctctagctacataagaacttctacatacccgtttaggtttggtatttgaacaattayatttggaacagaaaagttccatcaatctttaaacctcataatccaattatgtcagtaaaattccagttttttggtccaatggaattggggtaatattttg

SEQ ID NO: 249508 - DNA, 201 bp, Homo sapiens
cttccaagtcttttttttttttttttttgagacagactctcgctatgtcgcccaggctggaatgcagtggcaaaatctgggctcactgcaacctccacccsccaggttcaaacgattctcgtgtctcagcctcctgagtagctgggactacaggtgcgtgccaccacacccagctaattttttgtattttactagagatgg

SEQ ID NO: 249509 - DNA, 201 bp, Homo sapiens
atcaaacaaaatacatagaaacaaatgagctggacatacagataaagctgtgattcacccagaacttaaacaaatcacaaatttcatagtttaatattggkacagaagcaaaacaacaaacaaataatacattttcccacttcagtaataaaatatgggaagacctgactatgagggtagagatcaaggctaaataaagct

SEQ ID NO: 249510 - DNA, 201 bp, Homo sapiens
ttttgaactccttcagctcaagggatcctcctgcgtagacctcccaaagtgttgggattacaggtgtgagccaccacacccagccaaaagctttaaatcaytggtgattattacaagctgcaactcgggctacatatgttactgggagctgattactcctatatctcactgcagcatagagtttagttatggcttttcccc

SEQ ID NO: 249511 - DNA, 201 bp, Homo sapiens
ccctaagggatgtatgagctggttttaattaagtagactaagagatactggttctgacttgcattcatctctacagtaaataaaaccttgtttttaaaaarcttcccatgttcctaatacagttaaaaaaatatatatatatactttaacctttttcctttcatatgcaaagatgttacttttcattatctcaagaatatc

SEQ ID NO: 249512 - DNA, 201 bp, Homo sapiens
atatgcaaagatgttacttttcattatctcaagaatatcttcctttgaagtctgtgagggtggatttcagccaccagaaattggtgaagtgggggacaagrgggtgtgcttgtctctgtgtgcacaagtctaagtaaaagaggagcacataggggccaaaaagggacaggggagggaagctggagcagaaggacacctccc

SEQ ID NO: 249513 - DNA, 201 bp, Homo sapiens
tttaatctgttgataatttcttttgctgtgcagaagctctagtttaattagttccaacttgtcaatttttgtttttgctgcagttgcttatggggacttakccaaaaatttgccaaggtcagtgtcaagaagtgtatttcctgggttttcttctaggatttttatagcttgaggtcttttattttattttgagacagggtc

SEQ ID NO: 249514 - DNA, 201 bp, Homo sapiens
agctatactgaatttatagaaaacattttttctttcttcaataataaattaaccttagcttactgtgactttttttactttataaactttaattttttatwttttgattcttataataatacttagcttaaaacacaaacacattgtacagctgtacaaaaatactctatgtccttattctataaacttttttctatttat

SEQ ID NO: 249515 - DNA, 201 bp, Homo sapiens
ctggtgagtctttgagcagctgagccacaactttgtaccagggcctgtccctgcccacacaccactcagaagagcatcccctttgcccactaggtagtgartgagccactccccagactctatctttctgcctgtttcctcagaaccactcctgtcccacttgcgtcagttcagatctgcagagaagcagatgctgagatg

SEQ ID NO: 249516 - DNA, 201 bp, Homo sapiens
tctcatggctgtacatttgaacaaggattcaaacagatctgtctgacttcaaaacccatgctctctttactgctccctgattccttggtagaatattgaaygtgaacccacgaggtcgtaaaaataccacttttgtcatagatgaccgagagaaaagttgctaaactattattgcctcacaggtatatgcagcatcttttc

SEQ ID NO: 249517 - DNA, 201 bp, Homo sapiens
tccctgattccttggtagaatattgaacgtgaacccacgaggtcgtaaaaataccacttttgtcatagatgaccgagagaaaagttgctaaactattattrcctcacaggtatatgcagcatcttttcctttccccagtaacctcctaccccaaatctctttatatccctgtgttttagtccattttcatgctactgataa

SEQ ID NO: 249518 - DNA, 201 bp, Homo sapiens
gggctgaagtcttcacacaggctgtgcgagagcactcagcagtctttggttgactttgggtaggagtggagatgaaacccagcagtcttatggttttcccsgccctccaccccacccaccctaccccttcctgtggacaaagagagggcagagctggggcctcagtgccacgtggggtgggcacatgaagatgtcagggaa

SEQ ID NO: 249519 - DNA, 201 bp, Homo sapiens
tgaagtcttcacacaggctgtgcgagagcactcagcagtctttggttgactttgggtaggagtggagatgaaacccagcagtcttatggttttccccgccytccaccccacccaccctaccccttcctgtggacaaagagagggcagagctggggcctcagtgccacgtggggtgggcacatgaagatgtcagggaagccc

SEQ ID NO: 249520 - DNA, 201 bp, Homo sapiens
gagaaggagagtataacgtaattgtacgttctaagaattgactttgtcctaatagccaagtggtaaaggacttgaaaggcaggaaagaaagagaggagackggagtccatttgaagagagctgctttagtaggaatggaaagtgggctttatgaatttagcgccagtccagggcttggtaaggactgggctgtgggagttg

SEQ ID NO: 249521 - DNA, 201 bp, Homo sapiens
ctgccctgccctcctgacccggaggcccagtgcgtctctgtggggggtgggaggagcgtcagcaaaggagaggctgcacagggcgccttcggcagtgacgsgaaaccaagagcaggaaaagcaaccctgctcagccctgggcgactcagacaggaaagggcctgagcctgaggcaaccaggagggggcagccttatcaggg

SEQ ID NO: 249522 - DNA, 201 bp, Homo sapiens
ttagcaggagcctcccacagagcgtgacaagggccctggtggctgagggcagaagaggctgtttctgtcccacatttgcctttggcctttgaaaatggacwaattttcagctttgggcactggtcctgcccctctgccccggctcccgctcatttccaaggccactctctgagtgtcctgtgtgaggaaggggtgaggtga

SEQ ID NO: 249523 - DNA, 201 bp, Homo sapiens
tagcaggagcctcccacagagcgtgacaagggccctggtggctgagggcagaagaggctgtttctgtcccacatttgcctttggcctttgaaaatggactmattttcagctttgggcactggtcctgcccctctgccccggctcccgctcatttccaaggccactctctgagtgtcctgtgtgaggaaggggtgaggtgag

SEQ ID NO: 249524 - DNA, 201 bp, Homo sapiens
ctatggtttggtcacttaatcccctgtcctgggtcatcctgcctcagagcctgcagtgttactctggctctagctacataagaacttctacatacccgttyaggtttggtatttgaacaattatatttggaacagaaaagttccatcaatctttaaacctcataatccaattatgtcagtaaaattccagttttttggtcc

SEQ ID NO: 249525 - DNA, 201 bp, Homo sapiens
ttcctctgaagagcagatcgctttacccctttctcatctcatcacctctgagccctgccagggtgagagcagcctttcccagcatcgtcctttaagatgcracagaaacaggtcccacctgagccagcaggaatgcggcacccagtggctggctctgcagtcttgatgctcgccggcaccttcagggtgaaggacgccctg

SEQ ID NO: 249526 - DNA, 201 bp, Homo sapiens
aaacagtattgattttcctaggaatgtcaaaagaagtaagattgagtcccagcacatgctgaaaaatatgtgctatattgaataaattaatatacattttrtaaactaataaaatcaaacctttttcaaacatttatttgcacatattgtttatatatagtatatgtcatatatgccgtatatgtcatatatatatatata

SEQ ID NO: 249527 - DNA, 201 bp, Homo sapiens
ttgaactcctgagctcaagcgattctcccacctcagcctcccaaagtgctgggattacaggtatgagccaccacacccagccacagactgcctccttgactgtgtattttcgtttgtgagacagtgaaagtggtggtgaatgaggcacaggaactgtgccccgatgatgacaatgatggtaatgacagcggctaccattga

SEQ ID NO: 249528 - DNA, 201 bp, Homo sapiens
aaccatgggcactgaggatacaacagtgaacaaaaatagatgtattcactgcccttgtggaactctcagtttggtggcagaagaacatgaatgaaactatyaagcagtagtcaaatgtggaattgtaatgaaggagggggtgcttggtgcaagtgtttgtgatcatgtgatttcttctgctctgaggtccactgctttcaa

SEQ ID NO: 249529 - DNA, 201 bp, Homo sapiens
tgaactcctgagctcaagcgattctcccacctcagcctcccaaagtgctgggattacaggtatgagccaccacacccagccacagactgcctccttgactgtgtattttcgtttgtgagacagtgaaagtggtggtgaatgaggcacaggaactgtgccccgatgatgacaatgatggtaatgacagcggctaccattgag

SEQ ID NO: 249530 - DNA, 201 bp, Homo sapiens
atatttaattataaagaggttccaaataaagatagaggatcaaatacccacatttactttcattccctcccaaaacctcactaaaacaacagtaaaaggatttttttttttaaagacataaacccacaaggacaaagagagtgggagaggagacaacagcaacaaaattttggaatctgggtagcagatggatgagtgtaa

SEQ ID NO: 249531 - DNA, 201 bp, Homo sapiens
ctttttttttaagtacactgattaagtattggaattccctctctgctgcagagtaaataacacaatgccattgatatagtcctaatttttgacctgtggcmgctttcagaaaagggggatctttgacaggtttagctgctggttatgaaagaggggatgaaagtgcttccagcggtttgtgtgggcagtagttgcagttgc

SEQ ID NO: 249532 - DNA, 201 bp, Homo sapiens
tgcactgtgggaacctctgtctctaccagtgtcacccttgctgtggggagtgtgtaccgtgtgcggggggctggtggcctttctctgctgtctgccacagyttgtgaggggctcgctgagcctcatacctgagcctccccctccccaccccctcctgccccagggaggcccagaaccagggaggagaggtgctgggagtga

SEQ ID NO: 249533 - DNA, 201 bp, Homo sapiens
gcactgtgggaacctctgtctctaccagtgtcacccttgctgtggggagtgtgtaccgtgtgcggggggctggtggcctttctctgctgtctgccacagtktgtgaggggctcgctgagcctcatacctgagcctccccctccccaccccctcctgccccagggaggcccagaaccagggaggagaggtgctgggagtgag

SEQ ID NO: 249534 - DNA, 201 bp, Homo sapiens
ccagtgtcacccttgctgtggggagtgtgtaccgtgtgcggggggctggtggcctttctctgctgtctgccacagtttgtgaggggctcgctgagcctcayacctgagcctccccctccccaccccctcctgccccagggaggcccagaaccagggaggagaggtgctgggagtgagtgccgaggagctggggtcctggcc

SEQ ID NO: 249535 - DNA, 201 bp, Homo sapiens
cccaccccctcctgccccagggaggcccagaaccagggaggagaggtgctgggagtgagtgccgaggagctggggtcctggccctgcagccactgtcacascacagccccaccccagacctccagagtggtggggccctggtggtgcaggttccagacgcttggctgatgccaggcctggatccaaggcccccgtctccga

SEQ ID NO: 249536 - DNA, 201 bp, Homo sapiens
ttagcttgctgttctggaaggtgatgctggctggcagccattcccagcccctcggaaagcagttgtcaggcagtccctgagctccagcgccccatcccccrcagggcccagtgatctcacgcctgtgcccctggtgctgggaggagtggggtgacactagggccagtgcccacatcagaggaggaaggtatgaggccaggg

SEQ ID NO: 249537 - DNA, 201 bp, Homo sapiens
gcgccctcccgtccagcagccccagtgcccactctgcgcccttcggggctcccgtggcccagagtgtggagcggctcaacctgaccacccaggatagcttgggggcgtttcggaggtttggctgcctaggctgtgcacctagcacagctccccaggagagggagggaggaggtcaggggagagggccctgctgaccgggtc

SEQ ID NO: 249538 - DNA, 201 bp, Homo sapiens
gggctcccgtggcccagagtgtggagcggctcaacctgaccacccaggatagcttgggggcgtttcggaggtttggctgcctaggctgtgcacctagcacwgctccccaggagagggagggaggaggtcaggggagagggccctgctgaccgggtcatctctggccctgggttcccataggagcgcctaggctctaagctg

SEQ ID NO: 249539 - DNA, 201 bp, Homo sapiens
acctgaccacccaggatagcttgggggcgtttcggaggtttggctgcctaggctgtgcacctagcacagctccccaggagagggagggaggaggtcagggkagagggccctgctgaccgggtcatctctggccctgggttcccataggagcgcctaggctctaagctggagcctccccatcccaggaccttggggagaaag

SEQ ID NO: 249540 - DNA, 201 bp, Homo sapiens
cttggggagaaagaggctgggcgccacctgctggcccaccagggaattgacagggtgggggactgtggagcctgtgctggccgcagatgagagccctgacycccaccttccctaccccacccaccctgcaccgtccagctcagttctctgacccgtggtgccaggtcccatttgcaatggcgaatactgaactcggtgcaa

SEQ ID NO: 249541 - DNA, 201 bp, Homo sapiens
cgcagatgagagccctgactcccaccttccctaccccacccaccctgcaccgtccagctcagttctctgacccgtggtgccaggtcccatttgcaatggcraatactgaactcggtgcaactctggctgctggcagctgggcttggcctgcacctttctgtccccaaactccactggggacccaccttccagccaccccag

SEQ ID NO: 249542 - DNA, 201 bp, Homo sapiens
atgagttaatgggtgcagcacatcaacatggcacatgtatacatatgtaacaaacctgcatgttgtgcacatgtaccctagaacttaaagtataataattaaaaaaaaaaggaaaagaaaaaagtatggtgatcaaatgctttggtgactgctttctctggttctctcttgcttgtattagagtcagtcttagggttcatt

SEQ ID NO: 249543 - DNA, 201 bp, Homo sapiens
tggacagatcacctgaggtcaggagttcgagaccagcctggccaacatggtgaaaccctgtctcactaaaaatacaaaaattagccgggtgtggtggcagscacctgtaatcccagctgctcgggaggctgaggcaggagaattgcttgaacccggaggcagaggttacagtgagccgagattgtgccactgaactccagc

SEQ ID NO: 249544 - DNA, 201 bp, Homo sapiens
tgcaccccaaactctactcgaagtgtacaaaaatatatgtacaagaatgttcattgctgtcttgtcataaaagttaaacattaaagacactgctaatgtcyattaataaaggaatggtttagtaacctgtgttatgtcaatatgatagcattccttgcagctctgcaaaaaggagctatatccatgttgactttcctaaaa

SEQ ID NO: 249545 - DNA, 201 bp, Homo sapiens
gtcgggcgacccaagtgcaggggagcctggcctggaaactctccctacgggccggtgctgcagaagctgcatggagcccacagccagccctggacacagcygggaggagggcgctgacctcgaagggccgctttctgctgccctgggagctgggtgcttggggtcctaatctgtcggcgggggtgcagcgccatgcagccc

SEQ ID NO: 249546 - DNA, 201 bp, Homo sapiens
accttgagggcatctgggaggcccaggcaggccagatttgtctcctggaaaggacatgggtacccctgggctctgcccagcctcctggcctccccctgggrccccttgtgcagcaagggccctggccccagtcctccctggcgtcactcagcaaccagcagcccattaggtctgtccacacatcgctgccgacggtgaggc

SEQ ID NO: 249547 - DNA, 201 bp, Homo sapiens
tactattcagtgtggcaagacatggttgttggaaatgtattaaggtgattcaccttttcaacctggcattgtgtttctttatatccattgactgttatctrtgattctcacctgtaaggctttaaaccttggtttaatttattagaatgtaactttgtctgaacaaagcctcatttctgccaggatatccttctgaatata

SEQ ID NO: 249548 - DNA, 201 bp, Homo sapiens
gggcagttaggcagggtttacaatcctttcagcccagagcagcagggcgcctgccctgtattttttgttactttctttttcattcagtaaatgtcaatcamtgcgggcccagccctttccctgcccatcatgctgattacagagagtcaggaggtagttcatgatccgcatgtagtaaatgggggtgaaagagttgagaag

SEQ ID NO: 249549 - DNA, 201 bp, Homo sapiens
tgggaagtccaagatcaagatgctggcaggtccagtgtctagtgacggcccacttcctggttcatggaacagcaccttctcattgcgtccttacatagtaraaagaatgagagagctgtctggggtcccttttataaggcactaatcctatttgtgagggatctacctctgaggcctgataacctcccagaggtctgcctc

SEQ ID NO: 249550 - DNA, 201 bp, Homo sapiens
atatgaaagccagtatcttttaaaatatcaaatttgtcttaaacattttggcagcatatgccatgtgacttttggatttatagtttctctttcatagaatraaaagttcagtgccaccacctcaagagttctgcaagttcacattatgtaaacatatataataaaatatttacttagggtttccataaaaaagatccaaag

SEQ ID NO: 249551 - DNA, 201 bp, Homo sapiens
aattctgctaacgcttgagttgacctttctgaggacccgaggttagaaacacctgctccagtgaaaagggcctgcccacagtgctgcatcatttctttctrctggccatatggcctcattaagtgtcactttaccactgagtgtggtgaggctggggaagtggaggcaaatggaccaaggtcactttctgctctaaataga

SEQ ID NO: 249552 - DNA, 201 bp, Homo sapiens
atagtatctttccacatcatcatcttaataaaaaacattcattttgagaatacattttccaggcagttcctttgcctccagggggaatattttgaggcctmccagtgaccataggattaaaagacttgacaggaaagccctagaattcttgaagagcaaggcttttgaaagattcattgttgtggactctccctttgaaag

SEQ ID NO: 249553 - DNA, 201 bp, Homo sapiens
tagtctcgatctcttgacttcgtgatccacccgccttggcctcccaaagtgctgggattacctgtgtgagccaccgcacccggccaagataggattctttytagggcatctaaggcccccaaagcatgagctctttcagcatgctgatctgttagatttttatctgccataagctgtccagtctatgctgctgtaaaatag

SEQ ID NO: 249554 - DNA, 201 bp, Homo sapiens
gggcctaggcctgggcctgcagggaggtggcagcctgtggggtggacagctgggcttgctctgggatgcctgtcacagcgccccaggctgagcttcccccrtgcagggcccgagcatcctgggaccaggaccccagaggaccctcgggtcagcgggagcagtggatgctgatgggtcggctctgggtcccaccccggccca

SEQ ID NO: 249555 - DNA, 201 bp, Homo sapiens
ggcctcctcctcttcctcctcctcattgtcctcctcgaccaccaccacctcctccttccaccacctcctccttctcctcctccgctgtcgcctcctcctcstcctcctcctcctcctcctcctcctcctcctccgctgtcgccgcctcctcctcctcctcctcctcctccgctgtcgcctcctcctcctcctctgcctcca

SEQ ID NO: 249556 - DNA, 201 bp, Homo sapiens
tctcctcctccgctgtcgcctcctcctcctcctcctcctcctcctcctcctcctcctcctccgctgtcgccgcctcctcctcctcctcctcctcctccgcwgtcgcctcctcctcctcctctgcctccacctctgccatcgccacctcctcctcctcctcccccaccccccgccgctacctttctttcttcttccttcttc

SEQ ID NO: 249557 - DNA, 201 bp, Homo sapiens
ataacattaacctctctgaacctttgttttctcatatacaaattgaggggtttgttttctgaggtcatttcctgaatctaggaatctatctaatgatttartgggaaaagaatgctagaataaatggttgaacattattgtttagtagaatttagtgtagccatgctgcagtatctatcaacattttaaatgtacctactc

SEQ ID NO: 249558 - DNA, 201 bp, Homo sapiens
cctcctcctcctcctccgctgtcgccgcctcctcctcctcctcctcctcctccgctgtcgcctcctcctcctcctctgcctccacctctgccatcgccacstcctcctcctcctcccccaccccccgccgctacctttctttcttcttccttcttcctgggcgagagtagcagccccggccccatgctggggaagggtagg

SEQ ID NO: 249559 - DNA, 201 bp, Homo sapiens
tacaggtgcacaccaccatgcccagctaattttctaaatttttagtacagacagggtctccctatgttgccctggttggtcttgaactcctgagctcaagygattctcccacctcagcctcccaaagtgctgggattacaggtatgagccaccacacccagccacagactgcctccttgactgtgtattttcgtttgtgag

SEQ ID NO: 249560 - DNA, 201 bp, Homo sapiens; identical to SEQ ID NO: 49031

SEQ ID NO: 249561 - DNA, 201 bp, Homo sapiens
ttttcctctcatgttctgtgttcctaacattcttctattttggcggggtggggaggtagaaggtaggcagagtctcactctgttgcccaggctggagtacrgtggcccgatctctgctcactgtaacctctgcttgccgggttcaagcgattcatgtgcctcagcctcccgggtagctgggattacaggtgccctccacca

SEQ ID NO: 249562 - DNA, 201 bp, Homo sapiens; identical to SEQ ID NO: 49032

SEQ ID NO: 249563 - DNA, 201 bp, Homo sapiens
ctgaccccagcctgtactccttccccctccgtgggggaagctccgtggcttggcgtccccgagagctgccagaaactaggatgaaagccatggtgagcacrgcctctgttcccctgcaccatttcctggggtgtccggattaacaagctcatttgatctggttacagtgaattttcttcaaagaaacactcaatagggtcc

SEQ ID NO: 249564 - DNA, 201 bp, Homo sapiens
tgtgtgttgatctgattccctgtgcccaagagcaaggacagtcacttcatcccagcccctgcacagtgttgggaacacagaggtgttcagcagatgctggrcaaatgtctcctgggagtatgcagtatttgctcttttttcctctcatgttctgtgttcctaacattcttctattttggcggggtggggaggtagaaggta

SEQ ID NO: 249565 - DNA, 201 bp, Homo sapiens
caggcagcctgactgtgagagccccaaacaggagagccccaaacaggaaggaccagggcccttcccctcccctccatgctgcccaccctctgaggagcagtggccaagttcctctctgggcttctcgggccaggctgaccctgtcccccagggcctcccacgaagcatgggagctgttccctcacaggcagcacagacccg

SEQ ID NO: 249566 - DNA, 201 bp, Homo sapiens
cttattctataaacttttttctatttattactttttaaaattttttgttaaaaactaagacacaaacacacacgttagcctaggcctacatagagtcaggktcatcagtatcactctcttccaccttgacatcttgtcctgctgaaaagtcttcaggggcagtacatgcatggagctgtcatctccagtaacagtgccttc

SEQ ID NO: 249567 - DNA, 201 bp, Homo sapiens
attttgtcattttttttttttttgagacagagtctcagtctttcgccaggctggagtgcagtggcgcgatctggctcactgcaacttctgcctgcaacctytgcctcccgggttcaagtgattctcctgctttagcctcccgagtagctgggactacaggtgtgtgccaccacgcccagctcattgtttgtttgtttgttt

SEQ ID NO: 249568 - DNA, 201 bp, Homo sapiens
gaagcccggagctcctgcaaaagtgattttgtacctaattatttaagattataagttaaccccacttgcagttttttcagccagagatacatcttaatgargtgctgacatttttcagaggataaatttaaagatacatttgaatggaactgaataattttcaaaggaagtggtcatacttctgtatcaatatagaaagtt

SEQ ID NO: 249569 - DNA, 201 bp, Homo sapiens
ttgaagaggagcagacatggagcttagacacccagagtggggcccagagctaaggaggagtgtctcaaggtgttggggtggggagggcacagaatcaccargcttcagatgctgctataaggtcaggcctacaaaggtttggattcagtgcacagaggttattagtgacctggacaaagcagttattttttgctgatgaag

SEQ ID NO: 249570 - DNA, 201 bp, Homo sapiens
tgaggctgggaagtccaagatcaagatgctggcaggtccagtgtctagtgacggcccacttcctggttcatggaacagcaccttctcattgcgtccttacrtagtagaaagaatgagagagctgtctggggtcccttttataaggcactaatcctatttgtgagggatctacctctgaggcctgataacctcccagaggtc

SEQ ID NO: 249571 - DNA, 201 bp, Homo sapiens
aagaaaatgtggtacatacacacattttctatgaatactttgcagcataaaaaggaacaaaatgatgtcctttgcagagatgtggatggagctggaggccrttatcctttagcaaactaatgcaggaacagaaaaccaaataccgtgtgttctcacttgtaagtgggagctaaaagatgagaaggcatggacacagggagg

SEQ ID NO: 249572 - DNA, 201 bp, Homo sapiens
tctgttgaatgacggttgttttcaggatttggctattatgaataaagctgccgtcagcgttcatgtgcagctttcatttctctggaataaatgctcatgartgcatacaccctttacttagactcatctgttggtaacattttgtcccatttgcttattatttccttcctttctctctctccacttttccatacacacaca

SEQ ID NO: 249573 - DNA, 201 bp, Homo sapiens
acaaatataaactaaaatttttccttaactgcttgagagtaaatttgactacatccttactcccacatacttctgtatttccaagaattaaggatattttmttacatactgtgatggttaatattaggtgtcaacttgattggattgaggcctagatagctggtaaagtattgtttctgggtgtgtctgtgagagtgttgc

SEQ ID NO: 249574 - DNA, 201 bp, Homo sapiens
tgtttaaccttttgccactgctggactttttagtctttccaataaataacactggggggaacagttttgcaaataaaacttttcttcctacatttctgatratttttctaagctataaattcataacttaaatcactgagtcaaatcatatgaaaatttctaagcaatgcagactcaaaatggacagaatgaatatagacc

SEQ ID NO: 249575 - DNA, 201 bp, Homo sapiens
gcctactacctgtttatgtacaacccatgagctaagaatggtttttacatttttaaatggttggaaaaaattaaaacaagaataatgttttatgaaaattwtatgaaattcagatttctgcgaccataaagttgcattggaacatggccatgcttattcattatctatgttgcttatggctgttttttgccctacaacagc

SEQ ID NO: 249576 - DNA, 201 bp, Homo sapiens
agttaccgatttaacaggagaagagcattactgtgtcttctgctttcccattgccagtgatttacggatgatcatgtttctactggtggaagggcaggagrttttaaactttcccactactttacttttagagaggagacaggtacctatgttccatttgtttgctaacccagttattccgtttctgttctatccataggc

SEQ ID NO: 249577 - DNA, 201 bp, Homo sapiens
gaatagcctgagagaatgtcctgatgccatagctaaatttcttgcagaaagtgctgagggcggactcttggagcaccctggtagataagtagacttgtacmacagaggagatggccatttttggtctccgcaataccctctacaaaggcagccaaggcccataacacatttcctgttggctgcctgtattcaacgcacaaa

SEQ ID NO: 249578 - DNA, 201 bp, Homo sapiens
cattgtgtggggtctgggaggcagatgccagatgttactggcacataattagatgtgtatgtacttccaagtcttgtctcttagctgtctccaacgccacygcacctccgtaagccaaatcctcatcatctcattgggctactgcagcagccccctctaaggcatttctctatgccctctctcacttcagcccttctctac

SEQ ID NO: 249579 - DNA, 201 bp, Homo sapiens
ctaactcagaaactgacattggaatattactattagctaaactccttactttatttggatttcactagtttttccatcagtgttttctttctgttccaggktctagttctggcccaagttataatgactttcttttgacaaacactaaatatgaagttaggaattataatgcattgtcagatgctcagctttgtgacttaa

SEQ ID NO: 249580 - DNA, 201 bp, Homo sapiens
ttagatttcccatagttccttcatgactaaggactaagtgctggtcaccacagcattgtgtggggtctgggaggcagatgccagatgttactggcacatarttagatgtgtatgtacttccaagtcttgtctcttagctgtctccaacgccactgcacctccgtaagccaaatcctcatcatctcattgggctactgcagc

SEQ ID NO: 249581 - DNA, 201 bp, Homo sapiens
cactggctgcccactttgtcagtctttggagtctgtgtcctccatgatttggctcccttctcaggctggtggcaagctggttgcagcagttctggcccgcrtgaccagaagcactcaacaagcatcccctcgtacctcattggcctcggttgggtcacacatccattcctgaaccagtttctagggccaggaaatgccatg

SEQ ID NO: 249582 - DNA, 201 bp, Homo sapiens
aagggaaggtgggggacctgatttagtcctttaggaagggagggagcatggctactgaggagtcaagcttctttccagctttgtcttttcatttgccgtaggattatcatgatgattaaattacacatgacatcagggaaactgtcttcatggatagctgtgaattctgaagagctaacatggagaaaagaagctgtaaaa

SEQ ID NO: 249583 - DNA, 201 bp, Homo sapiens
ccacctgagcctcttgagtagctgggtctacaggcatgagccaccatgcccagctagttaaaaaacattttttttttttttttttttttttttttttttttgtggagacagggtcttgctatgttgctcaggcttgtctgaaactcttggcctcaagtgatcctcctgcctcagcctctcaaatattggagttacaggcat

SEQ ID NO: 249584 - DNA, 201 bp, Homo sapiens
atggatagctgtgaattctgaagagctaacatggagaaaagaagctgtaaaaatgtggcttaactctaaatatagtggtaattacagtcacttacatcagtttttttttgccattttttgccgggtagtgaagaacagtgatagctatgaagagcattaaacatgtcagacaaacttgtggaagctgaattcgattgcaag

SEQ ID NO: 249585 - DNA, 201 bp, Homo sapiens
ggagtgcagtggcacgatctcagcttactgcaacctccgccttgtgggctgaagtgattctccagcctcagcctcgtgagtagctgggactacaagctcaygccaccacgcctggctaattttttgtattttaagtagagacggggtttcaccatgttggccaggctggtctcaaactcctgacctcaagcaatccacccg

SEQ ID NO: 249586 - DNA, 201 bp, Homo sapiens
tcccacctgtttcccgagtacctggtactacaggtgcacaccaccatgcccagctaattttctaaatttttagtacagacagggtctccctatgttgccckggttggtcttgaactcctgagctcaagcgattctcccacctcagcctcccaaagtgctgggattacaggtatgagccaccacacccagccacagactgcc

SEQ ID NO: 249587 - DNA, 201 bp, Homo sapiens
tttttgagacagggtcttgctctgtcacctgggctagagtgcagtgatagaatcgtggctcactgcagcccaaaactcccgggctcaagtgatcctcccayctgtttcccgagtacctggtactacaggtgcacaccaccatgcccagctaattttctaaatttttagtacagacagggtctccctatgttgccctggttg

SEQ ID NO: 249588 - DNA, 201 bp, Homo sapiens
ctgggggccccaccctagagcaggaggcctaggtccaaaggggacccagtggtagtctcatgctctggccgcctggagcctgccctcctgtgtgacctcakcctgagcccctgaaaggagaaggctctcccattttctgccctggggagactgccctttccttgttgggatgaaagccttgcctctaactgaacccttttg

SEQ ID NO: 249589 - DNA, 201 bp, Homo sapiens
tgctccttttttttttttttttttttgagacagggtcttgctctgtcacctgggctagagtgcagtgatagaatcgtggctcactgcagcccaaaactccygggctcaagtgatcctcccacctgtttcccgagtacctggtactacaggtgcacaccaccatgcccagctaattttctaaatttttagtacagacagggt

SEQ ID NO: 249590 - DNA, 201 bp, Homo sapiens
tcatagactgctccttttttttttttttttttttgagacagggtcttgctctgtcacctgggctagagtgcagtgatagaatcgtggctcactgcagcccraaactcccgggctcaagtgatcctcccacctgtttcccgagtacctggtactacaggtgcacaccaccatgcccagctaattttctaaatttttagtaca

SEQ ID NO: 249591 - DNA, 201 bp, Homo sapiens
cgtgactacgcttcatgtgtcctaactcagaaactgacattggaatattactattagctaaactccttactttatttggatttcactagtttttccatcartgttttctttctgttccaggttctagttctggcccaagttataatgactttcttttgacaaacactaaatatgaagttaggaattataatgcattgtcag

SEQ ID NO: 249592 - DNA, 201 bp, Homo sapiens
agtgactttgtttttaataagctcatttattttggaatgcttgcagttgacagagaagttgcaagggtagtaaagagtggtcccatacccggttcctccaygttaacatcttacgtgactacgcttcatgtgtcctaactcagaaactgacattggaatattactattagctaaactccttactttatttggatttcacta

SEQ ID NO: 249593 - DNA, 201 bp, Homo sapiens
aagtctctcaggtggcaaagcctttgctgtctttcctgcaccatgctgctgctgagtctgcacttcactcactgtaaaaaggtctttagaccttgttgtawttttttaagtggtgaggccctttttgcaaataatatctgaaccccaaattccaacatatagaaacagatcaggttttcactaaataattagcattcattt

SEQ ID NO: 249594 - DNA, 201 bp, Homo sapiens
gcccccaagtctctcaggtggcaaagcctttgctgtctttcctgcaccatgctgctgctgagtctgcacttcactcactgtaaaaaggtctttagaccttrttgtatttttttaagtggtgaggccctttttgcaaataatatctgaaccccaaattccaacatatagaaacagatcaggttttcactaaataattagcat

SEQ ID NO: 249595 - DNA, 201 bp, Homo sapiens
agatcattctctaagctccctcagtattagaggcagtgcagctcagtcatctttgccaacctttatcctgaacctcccatgggacctggcatggagctgcrcaccacagagagaatgcttagcaggtgcttgcccacagaactgtgaaaggagagcccgaaggagacttagacaggagccttttgaggctttcattttaca

SEQ ID NO: 249596 - DNA, 201 bp, Homo sapiens
ttggtacatgtttccactccagactgccccaggccccaactctcagctctcctgttgctaccagcttccagtcaatgactgtttatttgaacatctcctgygcaacaagagaatgtagtgatcaagagcatggaccctgggtcagactgcctgggttctgatcccgactccctcacttagctgtgtgactctaactcttct

SEQ ID NO: 249597 - DNA, 201 bp, Homo sapiens
ttgctttcactctggaccacgagaccggattgcctcaaggatgtcatatctatgagtaccgcgagagcaacaagtaagccactcagtgggaaagagtgtcrcttcacatgtgtgcagcagtggtgcctgtgggctttctgacactgagcttccattgctaagtggttgtcaggaagggaatacaccttttactactatact

SEQ ID NO: 249598 - DNA, 201 bp, Homo sapiens
gttccggttgggcaggggctggcactggagagaggcttatgtgtcaacaccataaagcagccagcaagccctaatgaccacgctctgcaagaccacacagsacagactggcacctggttctgcttgggggcagggccgctgccagcctgcaggccgcccctacctctgggagcagagcccgaacttggggagcgaatgagg

SEQ ID NO: 249599 - DNA, 201 bp, Homo sapiens
ccaacattttaacaaaagactgtaataagggctgtaggagtcataagcgaggaaccgcggatgaacacgcatgctcacacacacatatatgtccatgtcaygtgcacatcacagatagtatagagaactgaccaggaatccatcagacaaagcattggcaaacactgctcaggtatgtctgggtttgaatcctacaaagtc

SEQ ID NO: 249600 - DNA, 201 bp, Homo sapiens
gcgattataagatcgatcatagggtttgtggagctgggatagtagaagtgagggaaataaagaaccttgaagaaattatccatgtggttcacactgcatarcaaagttaatgaggacaagacaggataagactggggaaaaggatcaaggggtcagggaatgtatgaacatttgcacagttctaatgatagccaggagttt

SEQ ID NO: 249601 - DNA, 201 bp, Homo sapiens
agtcagtgtcctatcatcactatcccttttctccacggccagctcttaagctctgccctgactcaactttggtcctggccccaaagcatgcttaagaggasttagcatccttcaagccccgtttccttttctgctgcctgaagtgcttatcagtcttcctccacttggtatttattgagtaccagctgtgtgtcatgttcg

SEQ ID NO: 249602 - DNA, 201 bp, Homo sapiens
gtatccagactgcgcctccctggctatcagggcctactctctccttgccagttcctccttattgggcaggactgggttcagagtaacagctacccattctsttcaattagtcaagcattgtggctttgccttagtctctgagggaaaattgtcagcctgacaagctaggacctttattcgcttttcgttgattcaggctcc

SEQ ID NO: 249603 - DNA, 201 bp, Homo sapiens
gagggagtgtgggtggggagccagcaaaggcctgggctgaaaggggcagaagaggccctgcaacctctccaggtagtggagaagcccctatgacttggctkgtgggcatctggctcccacatcactgctagtccttcctgctcctccttgcctgaatgattgattcttcccttctgtggccctttgtgttggtcacagggc

SEQ ID NO: 249604 - DNA, 201 bp, Homo sapiens
ataatgacagaagaatctatggaaatgaatgttggggttgagggagaggagtccaagatggtgccaaggtttcaacctggatgactgggagatggaacccrtaagttagaaatgggaatcaggagtacaagctggtttgggagagagtatgttggcatggagttgtctgtctgatgttatttatgttagttgctgcaaatt

SEQ ID NO: 249605 - DNA, 201 bp, Homo sapiens
gatagattggggacaaactcgggacaaattttcagaccaaatagtgttttttgtttgttggacaatggaaaggcaagcagatgttgttcagcaagagagcrttcaaaaagaggaaaataatttagcattgcaaggaaaaggagagaaactagaggctggggaatgagtcagagaaatattgcaatagttgtggacctggac

SEQ ID NO: 249606 - DNA, 201 bp, Homo sapiens
ttagaatcagcccacaggaccatggagccagggagggagatgtgtgaactgaacctgtacagccccacgagttgctgagtggagaaggtgggcttgggtgyggggagcagagggggcagagtggaaatccagggtggcctaagagtctgggtgcctgtcacccatgaggaggccccaaagagtcccttgggaacagaggca

SEQ ID NO: 249607 - DNA, 201 bp, Homo sapiens
gctggcagccattcccagcccctcggaaagcagttgtcaggcagtccctgagctccagcgccccatcccccgcagggcccagtgatctcacgcctgtgccyctggtgctgggaggagtggggtgacactagggccagtgcccacatcagaggaggaaggtatgaggccagggcagggggcagggcgccctcccgtccagca

SEQ ID NO: 249608 - DNA, 201 bp, Homo sapiens
agactcactttctcagagaatacttctctcttgatggaaatcacatgtgtatgtggtggagtggtggcctcaatcttcatctagtcaaattagagcttggrcttaatcttggaaagaaggaagatcaaatatttctcctttcagctattcaagacataattaagagaagtaatttatgtctgataacccttttacttttgc

SEQ ID NO: 249609 - DNA, 201 bp, Homo sapiens
ttgaaatgtgttcaaaataaagttgattgactcttgcagtatctgtcactcaggcataactcttaggaatcatgttttccattttcactcccatcaatgcygtttggattctgaaggtagtgtggcagcatggaaagaggatgaggtgctggcatccatgagatttaggttcgaatcctgccccagccacttccgagctgg

SEQ ID NO: 249610 - DNA, 201 bp, Homo sapiens
aatttctaagcaatgcagactcaaaatggacagaatgaatatagacctgacctcagctgcaaagagagaggtaaagagaaaagggttgtaactaatagatkcttttaaaattatgttttacttcacaaaggagagggctgggaagattcaagtggtgctctgtagggcaaacatgcctttgacttgaagttctggcttcat

SEQ ID NO: 249611 - DNA, 201 bp, Homo sapiens
ctcacacctgtaattccagcactttgggagaccaaggcgggtggatcacctgaggtcaggagttagagaccagcctggccaacatagtgaaaccctgtctytactaaaaatacaaaaattagctgggcatggcgggcacctgtaatcccagctactcaggaggctgaggtgggagaatcagttgaacctgggaggtggagg

SEQ ID NO: 249612 - DNA, 201 bp, Homo sapiens
tctccttaaaagtatcggacttcctttgcctatgtaattgcttctaattattcaagttcaaagtcattttcctcttctgtagttacatttagttcaccagrctggttttgatccaactatgtgtaaagcactatgctatattatctgagaaatacaatggtaaacaagttatggattcgttacttaaggaacttatagtct

SEQ ID NO: 249613 - DNA, 201 bp, Homo sapiens
tctgaattgtcactgaattaattgtctccttaattcagtgcagaaggttttcataataacactaatatttatggaatagttaacaataggtcagagcttayaatgttaaataagataacaaagtttatctcatttaatcctcactagaataaccctgcgaggtaggtagaagaagttagagaggttaagtagtctgcctaa

SEQ ID NO: 249614 - DNA, 201 bp, Homo sapiens
gtggtggctcatgcctgtaatcccagcactttgggaggccaaagcgggcggatcacgaggtctggagttagagaccatcctggccaacatggtgaaacccygtctctactaaaaatacagaaaatgagccgggcatggtggcatgtgcctgtagtcccagctactcaggaggctaaggcaggagaatcacttggacccggg

SEQ ID NO: 249615 - DNA, 201 bp, Homo sapiens
gacgtcatattccaaaagagattaaagagtgtgtaatgggggaaatagaggttgtgagtccagaccacatttttaaactttggcaaggatgggaatgagakaaatggaatgatagctggtagcctgaggtgggcagaaggggagcagggccaggttcttacattggttgtgtgctattgggaataccccagtggcaagaat

SEQ ID NO: 249616 - DNA, 201 bp, Homo sapiens
tgcctctctctgctctcttccagcccgtcctctctctgcctagtccttttcagacacttgcttcttggcacctttgacttttctcactgccgggctgcccstactaaggatgattgccctgttttcgtagctctaagaagcagccaaaatccactccacctccctcccaccctccgtcactccaaacagcctggttttgtt

SEQ ID NO: 249617 - DNA, 201 bp, Homo sapiens
gtagtaaagagtggtcccatacccggttcctccatgttaacatcttacgtgactacgcttcatgtgtcctaactcagaaactgacattggaatattactawtagctaaactccttactttatttggatttcactagtttttccatcagtgttttctttctgttccaggttctagttctggcccaagttataatgactttct

SEQ ID NO: 249618 - DNA, 201 bp, Homo sapiens
ctctggcccagttgtaaacatcattcgtttgcttgtccagcaaacattattggacgcctattagtgccaggtactgcactgagcacaagagaagggcccasttccttcccttgaagcccacagcccatcgaggaagacaggtatgtaagacagcatttgcaagggggtgacaaaggccaggggggaggtgaacaaaggatg

SEQ ID NO: 249619 - DNA, 201 bp, Homo sapiens
tcaacttaaggagattttgggctgagacattggggttttctaaatatacaatcatgtcatctgcaaacagagataatttgacttcctctcttcctgtttgwataccctttatttctttcacttgcctgattgccctggccagaacttccagtactacgttgaatagagtgctgagagagggcatccttgtcttgtgccggt

SEQ ID NO: 249620 - DNA, 201 bp, Homo sapiens
tgctcctgctacaaagggagctagcctagatgggctctcttgtcccaaaggaaagccagagctgttatctgccatagccgccttcaatatgtggaggcccyacctaggaagacctggcacctcctctcccctgccccaggacagtactctctggatcactgaaacctagaatatttgagcaaaaccctagctccacctgct

SEQ ID NO: 249621 - DNA, 201 bp, Homo sapiens
catgccctaggacatgattctggtatttgctcattgactgccctaaggtcagaggaatatccccaccatccaccctagaatgcagcaccacaggtgcattstagaatttctgggctccacttctagcaaagtgcctacttgatgttcacaaaggtattggcacttctggagcaaaagctatccaggaaagcccaaaagttt

SEQ ID NO: 249622 - DNA, 201 bp, Homo sapiens
tgacctcccaaagtgctgggattacaggcatgagccaccgtgcccagcctatatacttattttacatgtatactctttttttgtaattggttcattttctrtattttcatacacacatacatgtatatgtatgtacgtatgtatatactcttgtatgtatgtgtatatttttattttcacatacactatatttgataggtg

SEQ ID NO: 249623 - DNA, 201 bp, Homo sapiens
ttgtatcttccatgtgcttctctctgcccattgtatatctttaaactgtatacttattttattttattattttattttttcgagacaaagccttgctctgytgcccaggctgaagtgcagtggcacaatctcagctcactacaacctctgcctccaaggttcaagcagttctcctgcctcagccccctgagtagctgggac

SEQ ID NO: 249624 - DNA, 201 bp, Homo sapiens
gttctgcaagttcacattatgtaaacatatataataaaatatttacttagggtttccataaaaaagatccaaagcagagaataagagagcttctctttgcyggtttcagaggctctgctgggaattctgaatgaaatttaagcctcttgaatatgttttgattggccttcttcatattttatctcctgtaatgaactcttt

SEQ ID NO: 249625 - DNA, 201 bp, Homo sapiens
cccttgcagtttcagtctgccaccaagcgttgatggcctagtggcctagtgttttaaaacattgcaaagatgttcatatttcccactgacacagaacgccrtaggttcagtatgtaatctcttctctactataatagatggggaagcttagtagatagaaggctgagagatagaagacattgcctaagactggttttatct

SEQ ID NO: 249626 - DNA, 201 bp, Homo sapiens
ctgtcttaccatggttagtacaagtatgggcaacatcatcagtgttgatgaatgaggaaaagacagagaaatggtggcagtgcactgctagtactggatgragtggaggaagaacctaggaagcagtgagcaccgactagagtgtggcatgggggcagaagggcagttgctgcagaataccccaatctccaggcagtcctc

SEQ ID NO: 249627 - DNA, 201 bp, Homo sapiens
agagcaaagggctgagatgaagtcactggacctgctactgggaagaaacgggacatgtgagagccctggggcttctgagtgaaaaggttcgtgcatgtctytagcagccaggccagaccctcttcctgggctcttttctcacctctgggaagactcttccccagcaatcattcaccccagcccctttacatttccctttgc

SEQ ID NO: 249628 - DNA, 201 bp, Homo sapiens
tgggaccaaaagacacaggaaacccaggagggcttagaattctgtaagaatcaccagtcataaaataaggaggaaaacctattagtcttctgtcaaagcartgtatgcttatgaagaatttggaaaatgcaaagaaagtaatcacctggaacctctcagctagtgataggcactgttgctgtttaggtatgttccttccaa

SEQ ID NO: 249629 - DNA, 201 bp, Homo sapiens
gctgttgctttctcacttcccgttgctttctcacttcccgtgtattccttatcccttttacagtgtggcttcagaatgctggctgcaacaggttgccccascctcagttcactaagcatctctacagcacttggctctttagtctgctattcctccttgaaattcactcactcttccttggactcaaaggaccctgcctgc

SEQ ID NO: 249630 - DNA, 201 bp, Homo sapiens
agaagatgcagaagtctggagaataaacaagtcttatctagaataatttctacttcagaattgtcactggtttttatctgagagaggaagagagacatatycacacttgaatagtggaaggaggagaggaaaagactcatttgagagcgttagaatgtcagatctaggcttgggaagtgattggatgtagaagggagagag

SEQ ID NO: 249631 - DNA, 201 bp, Homo sapiens
cctaactcagaaactgacattggaatattactattagctaaactccttactttatttggatttcactagtttttccatcagtgttttctttctgttccagrttctagttctggcccaagttataatgactttcttttgacaaacactaaatatgaagttaggaattataatgcattgtcagatgctcagctttgtgactta

SEQ ID NO: 249632 - DNA, 201 bp, Homo sapiens
ggctggatgatgttgccattaaccaagacagagaaaagcaagggttggaatgtggtgctgagtttttgggcaagagggatagctggcatacatgagtgaasaggccctggtggtgaccgtggcaaacagagagagaggctgttcacagtagttgagagcatggagtctggagccagattgtctggccttgaatgtgatgtg

SEQ ID NO: 249633 - DNA, 201 bp, Homo sapiens
cttattggcaagccttgtcaagagctccctgtggaaatatcagttgcttttcttggcttcaaggtgtttcctgaacagtgtattatcctttgtcccgagtrtgccattaagggatttgaaagtttgttaaaacatgtgtggcaagtgagtgctgtcatttaagcctagccagggaagccaagaaatgaaaagcagctcttt

SEQ ID NO: 249634 - DNA, 201 bp, Homo sapiens
aagggctgatgaagtaccctgccctcagtaaagtattggtggagtgtctggtagacacggagaggttgtgtgacccaaaccggatgaggcaggaagttatrtaatgctaattgaagaattctgcattataagttcctttttggtcctcctctaatgaaattggattgtttctatttcccattaggctttggtgaggagaag

SEQ ID NO: 249635 - DNA, 201 bp, Homo sapiens
taaatagaactggagttaatggcttagtggttgttctataatcaggccctgctacaagtggttaaggagactgacaacgggaaccaaaagagcctgcaggracaggagtgaacatggctggaaagagtctctgccaggacttctgaatccagagctgagaatgtggcttccttggagttatgagagatagggagggatttt

SEQ ID NO: 249636 - DNA, 201 bp, Homo sapiens
taacagaatactgtagactaggtggcataaagaactaaaacaacggatttattcctcacagtccttgaggctgggaagtccaagatcaagatgctggcagrtccagtgtctagtgacggcccacttcctggttcatggaacagcaccttctcattgcgtccttacatagtagaaagaatgagagagctgtctggggtccct

SEQ ID NO: 249637 - DNA, 201 bp, Homo sapiens
agagctaaggaggagtgtctcaaggtgttggggtggggagggcacagaatcaccaggcttcagatgctgctataaggtcaggcctacaaaggtttggattyagtgcacagaggttattagtgacctggacaaagcagttattttttgctgatgaagtatattaaaaggctttccaggcatcacatgtgccttagtccattc

SEQ ID NO: 249638 - DNA, 201 bp, Homo sapiens
ggtgtaactgtcatttaagggataagggccaggaaagtcaaaacatgcacagagcagacccacatgatgagcagttgggttggtatcagcttcttgtgaartggtgatagaggatggtgtgcaggggaggagtggaagaaacaagaccatgggatgggaggggtgggcaaaagccaggccaggcaggccacagaagccagg

SEQ ID NO: 249639 - DNA, 201 bp, Homo sapiens
tgctttccagccacagctgtgtccctagacacagcaagcttgcgcccaccccccatccttcgctctggctctcctgcctgggatgctctcccccatgtcawcacgtgacatggtcttttttagacccacaggtctcagtctgtttcctcatagacaccttttcattactaatgaactctaaaataggctccagacattcgc

SEQ ID NO: 249640 - DNA, 201 bp, Homo sapiens
gcacagctgtcgggtaaacattcttaaagctctgaggtcattagaagaaagagagaagctgtcctatggtgccttgggttcaactagtaaagctctccacsctgaattattctgtcagcctcccaaaagctgctccagtctgcatctggaggtgtgaggcctcacaccccctggcagatgccaccgtgggtctacgggtgg

SEQ ID NO: 249641 - DNA, 201 bp, Homo sapiens
gctcaggtatgtctgggtttgaatcctacaaagtctggaggataataagatttttcttcagtaattctcagcctccgaggtgtgggaacagaggttgcagkgatccattcttggaggtttcaggccgggtgtggtggctcacacctgtaatcttagcactttgggaggccgaggtgggaggatcatttgaggccaggagtt

SEQ ID NO: 249642 - DNA, 201 bp, Homo sapiens
taggtcagagaacattttaatgggaagaggggaagattagagtcctgccttggggagaaaaagaagcgggtgaaaggagggcaggagaaagtcagagagawtcagtggcctaaagctctccaacattttaacaaaagactgtaataagggctgtaggagtcataagcgaggaaccgcggatgaacacgcatgctcacacac

SEQ ID NO: 249643 - DNA, 201 bp, Homo sapiens
gattgtctctgcagcctgcctggttgcatgacattttttggggaggatggagcagacagctttgttcctgggagcccatagcaataagggaatagagtgaragtctaggagcagtgcctgtaaggatttcagagaattcctaataaactctctggctccccaaatggctgtgtttgtcacctgctgagaatttcctatatt

SEQ ID NO: 249644 - DNA, 201 bp, Homo sapiens
tgctaatgctgagactggggaatgacccctgccccaagttaaggtcctttcctctcattagaatccttaaagaaacccattgtgtttgaagtggggctgasaactgttgttgcattctcagatcctcagagaacatttgtaacttcactagtcttttctcttacctcctgcgtgtattacctcttgggcattgtttgagtt

SEQ ID NO: 249645 - DNA, 201 bp, Homo sapiens
caagttcagctcctcattctctttcctgttaatgaagaaggccattgctcaagtcatttggaagagaaaaagtggaatttactacctgggtgttcctcatmcatgctgttcatataaatttaaacttagatgcctgagaattacattgaacatgacaaaaattgctgtgtgggcagtttagttgagtacttgcagattgat

SEQ ID NO: 249646 - DNA, 201 bp, Homo sapiens
aaagtaggcaaaggacgtgaacagacccttctcaaaagaagacatgcatgtggccaacatttgtaaaaaaaagctcaacatcattaatcattagagaaatrcaaatcagaaccacaatgagataccatctcagaatggttattattaaaaagtcaaaaaacaacagatgctggcaaggctgtggagaaaaaaggaacactt

SEQ ID NO: 249647 - DNA, 201 bp, Homo sapiens
tttatagagcttgcctgcaaagtgctttagtcaccataatccaccaggagaattgaccaataagctggcatcaatttactgcctcctgctcaggctggccrgtagtgctgtttcttggtgtgtgctgggaagtcaagaggtacacaggtggctggggtggacatagcattttgttggtgtgttttattctaaaaatccaag

SEQ ID NO: 249648 - DNA, 201 bp, Homo sapiens
agttgtttcctgttcagaaggagtatgcccagttctctgctacttcatttactaagttcacctttatagagcttgcctgcaaagtgctttagtcaccatartccaccaggagaattgaccaataagctggcatcaatttactgcctcctgctcaggctggccagtagtgctgtttcttggtgtgtgctgggaagtcaagag

SEQ ID NO: 249649 - DNA, 201 bp, Homo sapiens
gctaattttgtgtttttagtagagatggggtttctctatgttggtcaggctagtctccaactcctgacctcaggtgatccacccgcctcagcttcccaaaytgctgggattataggcgtgagccaccacacccggctgggacttttaaaaaatagaaaagtccacaaatgaatgaaaatatgctacaattctgtttttaga

SEQ ID NO: 249650 - DNA, 201 bp, Homo sapiens
ttacagaagtgtctaaaaaaaagtgttctaaactatgacctagtatgatttattccaggcattcaagactggttcaacattcaaaaccaattaatgtatcrtgtgtacaaattaatttaaagtggatcgtagacctgaatgtaagggctaaaactagaaatctcttaggagaaaacaaaagagtaaaccttagtgaccttg

SEQ ID NO: 249651 - DNA, 201 bp, Homo sapiens
gcctggcccactgtcttcaccaggctgggatccaaaataaggtcacatatcttttaatagttacattaaaagactcagtggacacccctccttctgcttayctaggacattgtttctgcccctaagttctccctaaagtgccatccccaagcagcaataatctgagcagcctgaggaagctgtacatagtcctcagtcact

SEQ ID NO: 249652 - DNA, 201 bp, Homo sapiens
actgcctccttgactgtgtattttcgtttgtgagacagtgaaagtggtggtgaatgaggcacaggaactgtgccccgatgatgacaatgatggtaatgacrgcggctaccattgagcacctcctatgtgttaggcacagtactggggactttacatttgttatctcatttaatcttcataacaaccccggtgtgttatttt

SEQ ID NO: 249653 - DNA, 201 bp, Homo sapiens
gcctttaaatatatatatatatatgtgtgtgtgtgtatatatatatatatacacatatatatatgtgtatatatatatatatgtgtgtgtgtgtgtgtgtrtatatatattttttgagacagagtctcgctctgtcacccagactggatggagtgcagtggtgccatctcggctcgctgcaagctccgcctcctgggttca

SEQ ID NO: 249654 - DNA, 201 bp, Homo sapiens
aatagaaactaaaggcctgagcctttaaatatatatatatatatgtgtgtgtgtgtatatatatatatatacacatatatatatgtgtatatatatatatrtgtgtgtgtgtgtgtgtgtatatatatattttttgagacagagtctcgctctgtcacccagactggatggagtgcagtggtgccatctcggctcgctgca

SEQ ID NO: 249655 - DNA, 201 bp, Homo sapiens
gcagaaataaatacataatagaaactaaaggcctgagcctttaaatatatatatatatatgtgtgtgtgtgtatatatatatatatacacatatatatatrtgtatatatatatatatgtgtgtgtgtgtgtgtgtatatatatattttttgagacagagtctcgctctgtcacccagactggatggagtgcagtggtgcc

SEQ ID NO: 249656 - DNA, 201 bp, Homo sapiens
tggaaccattagtggcagaaataaatacataatagaaactaaaggcctgagcctttaaatatatatatatatatgtgtgtgtgtgtatatatatatatatwcacatatatatatgtgtatatatatatatatgtgtgtgtgtgtgtgtgtatatatatattttttgagacagagtctcgctctgtcacccagactggatgg

SEQ ID NO: 249657 - DNA, 201 bp, Homo sapiens
taagtgtttagtgaaagttattattaatataaaattagaaagattaaaatttgcatgggccacagtggctcacgcctgtaatccaacactttgggaggacragatgggaggattgcttgagtccaggaatttgagaccagccttggcaacatggtgaaaccccatctctacaaaaattacaacaattagctggatgtggtg

SEQ ID NO: 249658 - DNA, 201 bp, Homo sapiens
ggaaccaaatcctttgtggaaccattagtggcagaaataaatacataatagaaactaaaggcctgagcctttaaatatatatatatatatgtgtgtgtgtrtatatatatatatatacacatatatatatgtgtatatatatatatatgtgtgtgtgtgtgtgtgtatatatatattttttgagacagagtctcgctctgt

SEQ ID NO: 249659 - DNA, 201 bp, Homo sapiens
tgcatgtcttcttcattcatctggggcactgacaagtgaacaatttttttttttaagactgagtcttgctctgtcgcccaggctggagtgcgatggcgcartcttggcttactgcaacctccgcctcccagcttcaagtgattctgctgcctcaacctccctagtagctgggactacaggcacctgccaccacatccagct

SEQ ID NO: 249660 - DNA, 201 bp, Homo sapiens
aggtatttatcatatagaaatagattattaaaaaggatgcagtattcaagtaacatccaagaacctacaaaatctgctgcttttttgctaatgtggatggrcagatttacatgtagggtcacaatttttttcagtgactcaataacacctggtgtattttaatatagtgtccatagacatcagagtgctgtatgtgacaaa

SEQ ID NO: 249661 - DNA, 201 bp, Homo sapiens
caccatgaaagggactccataatgacttgttgaatgagtaaattgttcatcatttgtcaccccactaggatgtaggactcatgacggtgcctggcacgagstgggcattccaacatttgtttgaaagaataaaaggaatgtttacaagtagtgatcaaattcattttttatatttatgtatatacaggtgatcatttaagt

SEQ ID NO: 249662 - DNA, 201 bp, Homo sapiens
aaaaagaaaattttattaaatatactcagggactgggaaccaagtttttaaaaaagtttgctcaaaagttttgagcacagttttgctcaaaaaaaaaaaaagcattgtttacaagtttttctattactatatttttatggagtcaatttttacaaactgaggatatattcttacctttattctgatcgttaatatctttgt

SEQ ID NO: 249663 - DNA, 201 bp, Homo sapiens
catcctaaatcctaaaatctgaaatctgaaatgcttcactgagcatatcttttgattgtcatgttgatgctcaaaaagtttcagatttcagaccattttgrattttcagattagggatgttcaacctgtgtatcagtgccctagctgtagcttcactcacatgagctcttgcaggaagggccctgcgggaatctttttgga

SEQ ID NO: 249664 - DNA, 201 bp, Homo sapiens
tggctcattgcagccttgaactcccaagctcaagcagtcttcctgcctgggcctcccaaagcacgagccactatgggattacaagcacgagccactgtgcygagcctcaatattttcaactaaagaaaactgaaagaaacaagagaaaaggtcccctggaaattttagagaaattatatctttttaaaatccaaaattgaa

SEQ ID NO: 249665 - DNA, 201 bp, Homo sapiens
actttgttatagagtattttctttctttctttctttttctttctttctctttctttctttctttctttctttctttctttctttctttctttctttcttttttctctttctctttctctttctttttttttttttattttttgagatggagtctagctctgtcacccaggctggagtgcagtggcataatcttggctcact

SEQ ID NO: 249666 - DNA, 201 bp, Homo sapiens
ctgagaagtctctttggagctccagggctgttgaaatgcattcaccacttgcatttgcattttagcctgataaatggattgagaattaaggatgatgatcytttcaacagcaggttctgaattcctaacttgggaattcaaaggatgagaaaagaaatacattgttcctcaaatagaaatctaggagagatgtctagacat

SEQ ID NO: 249667 - DNA, 201 bp, Homo sapiens
actttgtttttaataagctcatttattttggaaatagctaaactccttactttatttggatttcactagtttttccatcagtgttttctttctgttccagrttctagttctggcccaagttataatgactttcttttgacaaacactaaatatgaagttaggaattataatgcattgtcagatgctcagctttgtgactta

SEQ ID NO: 249668 - DNA, 201 bp, Homo sapiens
tactttgttatagagtattttctttctttctttctttttctttctttctctttctttctttctttctttctttctttctttctttctttctttctttcttytttctctttctctttctctttctttttttttttttattttttgagatggagtctagctctgtcacccaggctggagtgcagtggcataatcttggctcac

SEQ ID NO: 249669 - DNA, 201 bp, Homo sapiens
gaaaaggagctgaaaggtatggagtacccacgctgtgagaggtaagggatttatcccctcactcctctctctgagtgctgaacccactgagaaatagtcaygcatatcagactgagattattccatctattactgataccgtttgggttagaaggcaatctaacagaacagcccagaagtagttaatgtaaaaagaaactg

SEQ ID NO: 249670 - DNA, 201 bp, Homo sapiens
ttgggagtttcctgggagggagagctggaggggcagcaggacaagggtccctctgagcctgtttcttctccgcctcttgcttttatgatggcatcagctgrcgtctaatcaaccaaggttttacaaagtaatcttggaatcacatttgattccttttcctctccagactgttgtcatggtcttttcagtaatttccctccc

SEQ ID NO: 249671 - DNA, 201 bp, Homo sapiens
agatttttcttcagtaattctcagcctccgaggtgtgggaacagaggttgcagtgatccattcttggaggtttcaggccgggtgtggtggctcacacctgkaatcttagcactttgggaggccgaggtgggaggatcatttgaggccaggagttcaagaccaaacttgggagtttcctgggagggagagctggaggggcag

SEQ ID NO: 249672 - DNA, 201 bp, Homo sapiens
agtttgaagccaaatcatggaggatactggatgccaagctgaggattatagttcaaagatagctagaagccagtgaaggtttttgagaaggagagtataaygtaattgtacgttctaagaattgactttgtcctaatagccaagtggtaaaggacttgaaaggcaggaaagaaagagaggagactggagtccatttgaaga

SEQ ID NO: 249673 - DNA, 201 bp, Homo sapiens
ggcccccagatattcaattcctaaacccatagagggtggggcatgggcacagaggagtaaccaggggccacctcacacagccctgctctttcaccctgccygcctggtggcctccttagcctgcagcctcagtgctgcccgctatggggtcatgctgcctcctgctggccacactgcaaaatgcagcccagggtcgggcct

SEQ ID NO: 249674 - DNA, 201 bp, Homo sapiens
aacaagctgattttaaaaatagatggcaatgtgaaggaccaaaataaccaagacaattttgaagtacaaagctggagttcttaaactgcccaacatcaagrcttaccataagtgagcacagttacaatagtttggtatttagtataaggagagacacataagctagtgaatgggatagaaagtccagaaatagactcatat

SEQ ID NO: 249675 - DNA, 201 bp, Homo sapiens
tgggaggcggaggttgcaatgagctgagatcgcgccatagccctccggcctgggcgacagagcaagactctgtctcaaaaaaaagtggagggggagggagrgaaacaacccaatcaactgttgaatgtataaacaaagtgtttcccctctgtgcagagaagggaaaacatggaatgattgccatgggtatggagtttcttt

SEQ ID NO: 249676 - DNA, 201 bp, Homo sapiens
tgatcttacaaagcagaaacttgttttcttaagaactagcttcggctgggcgcggtggctcacgcctgtaatcccagcactttgggaggccgaggcgggcrgatcacgaggtcaggagatcgagaccatcccggctaaaacggtgaaaccccgtctctactaaaaatacaaaaaattagccgggcgtagtggcgggcgcct

SEQ ID NO: 249677 - DNA, 201 bp, Homo sapiens
ttggaaggcggaggctggcagatcatgagatcgagaccatcctggccaacatggtgaaacctcatctctactaaaaatacaaaaattagctgggcatagtrgtacgcgcctgtagtcccagctacttaggaggctgaggcaggagaatcgcttgaacccgggaggcggaggttgcagtgagccaagatcgcaccactgcaa

SEQ ID NO: 249678 - DNA, 201 bp, Homo sapiens
ctgatgccagaactgcaatcttagctccttatctaaactctaattgggggattaacccatggagtaggacagtatacagtgtaacaggtcttgggtccaawtaccacctcactgactttaaatgaaattctttttgttgagattttgctcacagtaataagtatttggttattcttgttaacaatagggtataatcaggtg

SEQ ID NO: 249679 - DNA, 201 bp, Homo sapiens
agactctgtctaagggaaaaaagaaaagaaaccttgctctgcagaaagcctttgttaaaatatatcttaaatacacacaccacacacacacacgcgtgcgygcgcgccctgtgaaaggatccaaagacagaaggagtttgtagggtgctctctgctattcatgaagtaacaaggattttttaaaaaattacttttgggccg

SEQ ID NO: 249680 - DNA, 201 bp, Homo sapiens
tatttagtataaggagagacacataagctagtgaatgggatagaaagtccagaaatagactcatatatggtcacttgattatgataaagggaacagtgcastgcagtggaggaaagaatgctcttttcaacaagtggtgcaaggctgattggctacccacttggagaaaaaggatgttgacctttatttcataccatgcac

SEQ ID NO: 249681 - DNA, 201 bp, Homo sapiens
attactactttaggcatcaagaagtaatatagtaaattaccactaatgcttgtctttattttaaaactatacatgaatttactacattgatagtctattaygtacattataaatgtaagtgaaaatagaaaaataaaaatgtaatgagaaataaatttttaaatattttcattttacttacgaaaagtatagaaaactgtt

SEQ ID NO: 249682 - DNA, 201 bp, Homo sapiens
tactccttcagtagtatgtgaatcagggtaccttagatggaaacatctgtcaggagttctctgcctacacggagctctggcgcactcgcgcgctctctttwtctcgtctctctctctctctctctctttctctctctctctctctctctctctctctctctctctctctgtctcgtctctctctctctctctctgtctctc

SEQ ID NO: 249683 - DNA, 201 bp, Homo sapiens
gaagcctcttttataagggcctaaatcccattcatgagggaggagccctcatgatatcatcaccttttaaaggcctcacttttttttttttttttttttttgagatagagtctcgctctgttgcccaggctggagtgcagtggtgcgatctcggctcactgcaacctccacctcctgggttcaagcaattcccttgcctca

SEQ ID NO: 249684 - DNA, 201 bp, Homo sapiens
taaaagtcacatcagagttgcagcttgctgttcaaggcagagtcaaaggggttacagacctagatgccattcctgactcaatggcagcagatcccaaattcatagtatttggatgcacaggtattcaaaaggcaggtaggcagttgtcatataggaggaagggggtcctactggggctttgggacagggtgctaagttcag

SEQ ID NO: 249685 - DNA, 201 bp, Homo sapiens
aaactcctagcctcaagtgatccacccgccttggcctcccaaagtgatgggattacagatgtgagccaccgtgcctgaccccagttcaattttttttttttggagacagtctcactctgtcaccaggttggagtgcactggcatgatctcggctcaccgcaacctctgactctctggttcaagggattctcctgcttcagt

SEQ ID NO: 249686 - DNA, 201 bp, Homo sapiens
cttagttatttcttgtcttctgctaacttttgaatttgtttactcttgcttctctagttcatttaattgtgatgttagggtgttgattttaaatttttccygctttctcctgtgggcatttagtgctataaatttccttctaaagactgctttagctgtatcccagagattctggtacattgtgtctttgttctcattggt

SEQ ID NO: 249687 - DNA, 201 bp, Homo sapiens
ttagtggagacggggtttcaccatgttgaccaggatggtctcaatctcttgacctcatgatcctcctgccttggcctcccaaagtgctgggattacaggcrtgagccaccgcgcccagcctatttgttcattttctattcattgattcttgtttcttcattatttctgtccttctccttacctggaatctaatttgttctt

SEQ ID NO: 249688 - DNA, 201 bp, Homo sapiens
gcgtctatttgattcttctctcttttcttcttcattaggctgtctactggtctatctattttgttaatgttttcaaaaaaccagctcctggactcattgawttttttgaatggtttttcatgtctctatctccttcagttctgctccgaacttagttatttcttgtcttctgctaacttttgaatttgtttactcttgctt

SEQ ID NO: 249689 - DNA, 201 bp, Homo sapiens
ggtttttgtcatcggttctgtttatgtgatggattacatttattgatttgaatatattgaaccagccttgcatcccagggatgaagccaacttgatcgtgktggataagctttttgatgtgctgctggatttggtttgctagtattttattgaggattttcacattgatgttcatcagggatgttggcctgaaattttctt

SEQ ID NO: 249690 - DNA, 201 bp, Homo sapiens
tgatttttgcacattaattttgtattctgagactttgctgaagttgcttatcaacttaaggagattttgggctgagacattggggttttctaaatatacartcatgtcatctgcaaacagagataatttgacttcctctcttcctgtttgaataccctttatttctttcacttgcctgattgccctggccagaacttccag

SEQ ID NO: 249691 - DNA, 201 bp, Homo sapiens
ataaggctcagtatctagcttggaaatcaacctgtaccactttgaaaattgtcacagaaacaagcaattgtggaaaggtcttggaactgggagaaaaaaaaggcctttatatagtgaggcacaatccctaggtaatcttgtttgtaaagtcaaggtttaaatttgaagactagcatataggggcatctaaaatcctaatag

SEQ ID NO: 249692 - DNA, 201 bp, Homo sapiens
gaacctggggagccttacagcttcctgcaagagcctgaaatactgaactgctattgaagaggcccccacctgcacccctgtgtgtaaatagaagcagaccytgatttggtgctggaataacatgaagttgaaggcagactgggtggcctggctgttggagccaggattccagtttgcattaagagctggttatggaccatt

SEQ ID NO: 249693 - DNA, 201 bp, Homo sapiens
agtgcacagtctcggctcactgctacctctgcctcctgggttcaagcaattcttgtgcctcagcctcctgagtagttgggattacaggcgcatgccacctygcccagctaattttttgtatttctagtagacaccgggtttcgccatgttgcccagtctggtcttgaactcctgagctcaggcagtctgcccgccttggcc

SEQ ID NO: 249694 - DNA, 201 bp, Homo sapiens
tagctgggagtacaggcgtgcaccaccacgcacactaattttgtgtttttttagtagagacagggtttctctatgttggtcaggctggtctcgaactcccraacacaggtggtctgcccgccttggcctcccaaagtgctgggattacaggcgtgagccactgtgcctgcctgtttgttcatttttcttttttgagacaga

SEQ ID NO: 249695 - DNA, 201 bp, Homo sapiens
cgttcctttgcttctcccaattttccatagtgagagaggaagcttggagtctgctgctacagtagaaatactttctgagagccctctgagttttgctgtcragaggttcgttctcttagtagtctaggctgcatctttctgtcttccagcatcccctcaacacatgattctggaatgttgtaatctctcaatatacatatg

SEQ ID NO: 249696 - DNA, 201 bp, Homo sapiens
atcccctcaacacatgattctggaatgttgtaatctctcaatatacatatgtatttagttataccttgcttttatccaaaaatatttgaaggcagtttacatatatatatatatatatatataaaatgcagtgaattttttgttgttgtttgttttttgagacagggtcttgctctatcacccaggctagagtgcagtgtc

SEQ ID NO: 249697 - DNA, 201 bp, Homo sapiens
tcccctcaacacatgattctggaatgttgtaatctctcaatatacatatgtatttagttataccttgcttttatccaaaaatatttgaaggcagtttacatatatatatatatatatatataaaatgcagtgaattttttgttgttgtttgttttttgagacagggtcttgctctatcacccaggctagagtgcagtgtcg

SEQ ID NO: 249698 - DNA, 201 bp, Homo sapiens
cccctcaacacatgattctggaatgttgtaatctctcaatatacatatgtatttagttataccttgcttttatccaaaaatatttgaaggcagtttacatatatatatatatatatatataaaatgcagtgaattttttgttgttgtttgttttttgagacagggtcttgctctatcacccaggctagagtgcagtgtcgt

SEQ ID NO: 249699 - DNA, 201 bp, Homo sapiens
ccctcaacacatgattctggaatgttgtaatctctcaatatacatatgtatttagttataccttgcttttatccaaaaatatttgaaggcagtttacatatatatatatatatatatataaaatgcagtgaattttttgttgttgtttgttttttgagacagggtcttgctctatcacccaggctagagtgcagtgtcgtg

SEQ ID NO: 249700 - DNA, 201 bp, Homo sapiens; identical to SEQ ID NO: 49027

SEQ ID NO: 249701 - DNA, 201 bp, Homo sapiens
tttcctgtctcagtctcctgagtagctgggactacaggcgtgtgccaccatgcccggctaatttttgtatttttagtagaaacggggtttcaccatgttgsccagtctggttttgaactcccgacctcaggtgatctgcccaccttggcctcccaaagtgctttgttttctttttgagagtggctcttttcacttagttca

SEQ ID NO: 249702 - DNA, 201 bp, Homo sapiens
atcacagatagtatagagaactgaccaggaatccatcagacaaagcattggcaaacactgctcaggtatgtctgggtttgaatcctacaaagtctggaggataataagatttttcttcagtaattctcagcctccgaggtgtgggaacagaggttgcagtgatccattcttggaggtttcaggccgggtgtggtggctcac

SEQ ID NO: 249703 - DNA, 201 bp, Homo sapiens
tcacagatagtatagagaactgaccaggaatccatcagacaaagcattggcaaacactgctcaggtatgtctgggtttgaatcctacaaagtctggaggataataagatttttcttcagtaattctcagcctccgaggtgtgggaacagaggttgcagtgatccattcttggaggtttcaggccgggtgtggtggctcaca

SEQ ID NO: 249704 - DNA, 201 bp, Homo sapiens
ggattgagaagagagagaaggctgggcctctgccttgtaaggttactcctggaagtcactaacaacacactttccccagaatcttgttgcctaaaatgtaracatgcagggatgtggctgagggatgtggccttttaactaggtggcagtatgcccagctaaaaattggagttctttttactaggaaagaagaggctggat

SEQ ID NO: 249705 - DNA, 201 bp, Homo sapiens
caatttatactccttcagtagtatgtgaatcagggtaccttagatggaaacatctgtcaggagttctctgcctacacggagctctggcgcactcgcgcgckctctttttctcgtctctctctctctctctctctttctctctctctctctctctctctctctctctctctctctctgtctcgtctctctctctctctctct

SEQ ID NO: 249706 - DNA, 201 bp, Homo sapiens
atgccatttaaataatatcttgatacaggttttcatggctcttttcatagtgcccagttcttgctagtgtggagaacaggtcaccactgtcaacaccagcrtcctgcatgctgtcattcactggctccccctcttcactactcctctttcctcagtgaagctggaataacagtacccactttacccatagtataagttgta

SEQ ID NO: 249707 - DNA, 201 bp, Homo sapiens
attcccttccagagaggttgtaccaatttatactccttcagtagtatgtgaatcagggtaccttagatggaaacatctgtcaggagttctctgcctacacrgagctctggcgcactcgcgcgctctctttttctcgtctctctctctctctctctctttctctctctctctctctctctctctctctctctctctctctgt

SEQ ID NO: 249708 - DNA, 201 bp, Homo sapiens
taaaagtgttttcttctagttctttgaacatatttataatagctgctttgaagtcctattgtctaacttcaaaatctaggctcccctagagatagcttttrttgaaacttgtccccttccatgtatgggtcacgcttttctgattctttgcatatcttatgaaaactggatatttctgataatatattctgtattctgatt

SEQ ID NO: 249709 - DNA, 201 bp, Homo sapiens
ggcatgcgccaccacatcccgctaatttttgtatttttggtaaagacagggtttcaccatgtagtccaggctggtctcaaactcctgacttccggtcatcsacccgccttgaccccacaaagtgctgggattaacagatgtgacccaccaggccaattacctttatgtttgaccttttgttgttgtcctgtaagtccataa

SEQ ID NO: 249710 - DNA, 201 bp, Homo sapiens
gtatttatgtttttcagcaaatctgggatgtttttagccagtgtttcttcatttttttgggacctgttctcttcttctgggaaatcaattccccttatttrttttttttggagacagagtcttgctctgtttcctaggctggagtgcagtggcatgatcttggctcactgcaacctctgcctcccaggttcaagcaattct

SEQ ID NO: 249711 - DNA, 201 bp, Homo sapiens
gctaaatagaatattttgccagtgtgacctgtaaatgggagttttaaaaatgtatgtgtcagtataattgtgtgtgtgtgtgtgtgtgtgtgtgtgtgtgtatgtgtgtgtttgtatagaggcgtagatgaaaaatctttggctattaattgaaaattatttaatttgatgatgaatgtatggtagtttcttacatttttt

SEQ ID NO: 249712 - DNA, 201 bp, Homo sapiens
tgctaaatagaatattttgccagtgtgacctgtaaatgggagttttaaaaatgtatgtgtcagtataattgtgtgtgtgtgtgtgtgtgtgtgtgtgtgtgtatgtgtgtgtttgtatagaggcgtagatgaaaaatctttggctattaattgaaaattatttaatttgatgatgaatgtatggtagtttcttacattttt

SEQ ID NO: 249713 - DNA, 201 bp, Homo sapiens
gttgtagaagctggcagaagattccagttccagtaaggcaaggcagttgagagcagcctggaaatggcttctccaagaatgtcccaggcagagcattgccrtgggttggtttgttctggaatgtacaggccattggtgtggctgtgtcagaggaagggctcccagtggtggtgggaaatgttggggatgtaaccagggctg

SEQ ID NO: 249714 - DNA, 201 bp, Homo sapiens
ttgaacctgggaggctgaggttgtggagctgagattgtgccactgcactccagtgtgggtgacagaagtgaggctctctctcaaaaagaaaaaaaaaaaaagaaatactagttggtgataaattttgtcatattcttttttggacatttgttaagttcacctccccctattgctatatagtgagttatatttaatagatag

SEQ ID NO: 249715 - DNA, 201 bp, Homo sapiens
gctgatctggaggaacttgtttgctctgccttgaaatatgagtgttttcggctgggcacggtggctcacacctataacccagcactttgggaggccgaggygggtggatcacaaggtcaggagatcgagaccatcctggctaacatggtgaaaccccatctctactaaaaatacaaaaaattagccgggcgtggtggcggg

SEQ ID NO: 249716 - DNA, 201 bp, Homo sapiens
tcagtgtaatatttgtatctcaaaggaattgaaagctgagatttcaaatgggtttcatggaattttgatcagttagaaaataattaatggaaaactatctagctgttaaaattgtctcattcttcttgcagtgcttttaattgtgttacacatgttttttgtttttattcttgagttctggtctgaagtgattgtcagtgg

SEQ ID NO: 249717 - DNA, 201 bp, Homo sapiens
ctttgagtaaggctgcgctttcaggagtatccatgcagcacctaattcaatcacacatctgacccctgcctctctttcgcactggccccttctctgtgctyagtgtgctgctgggggcctctgcacaaacccggctgttctggaggcgtcctgtgctaagcagagagcacttggccattttccccactttctgaattcagg

SEQ ID NO: 249718 - DNA, 201 bp, Homo sapiens
aattggacattgtagaactatgttgtgtaccagttggggctttctcagctgaaccttcagtgctacttgggaatccttttattcgtcactaggttccaagmcttttttcttcggttccaacctcaaccttgctttccactcctctttcctttaagacccatcattctcccaagtacctttcattcctccttcttggaaacg

SEQ ID NO: 249719 - DNA, 201 bp, Homo sapiens
ctcagtgtaatatttgtatctcaaaggaattgaaagctgagatttcaaatgggtttcatggaattttgatcagttagaaaataattaatggaaaactatctagctgttaaaattgtctcattcttcttgcagtgcttttaattgtgttacacatgttttttgtttttattcttgagttctggtctgaagtgattgtcagtg

SEQ ID NO: 249720 - DNA, 201 bp, Homo sapiens
actcagtgtaatatttgtatctcaaaggaattgaaagctgagatttcaaatgggtttcatggaattttgatcagttagaaaataattaatggaaaactatctagctgttaaaattgtctcattcttcttgcagtgcttttaattgtgttacacatgttttttgtttttattcttgagttctggtctgaagtgattgtcagt

SEQ ID NO: 249721 - DNA, 201 bp, Homo sapiens
gactcagtgtaatatttgtatctcaaaggaattgaaagctgagatttcaaatgggtttcatggaattttgatcagttagaaaataattaatggaaaactatctagctgttaaaattgtctcattcttcttgcagtgcttttaattgtgttacacatgttttttgtttttattcttgagttctggtctgaagtgattgtcag

SEQ ID NO: 249722 - DNA, 201 bp, Homo sapiens
cacagatagtatagagaactgaccaggaatccatcagacaaagcattggcaaacactgctcaggtatgtctgggtttgaatcctacaaagtctggaggataataagatttttcttcagtaattctcagcctccgaggtgtgggaacagaggttgcagtgatccattcttggaggtttcaggccgggtgtggtggctcacac

SEQ ID NO: 249723 - DNA, 201 bp, Homo sapiens
tataatcctagcattttgggagaccaagataggaggctcacttaacgccaagagttcaaaaccagcctgagcaacgtagcaaaacccagtctctacagaaaaataaataaataaataaataaataaataaataaataaataagctgggcatagtgatgtgcgtctgtagtcctagccacgtgggaggctgaggtgggaaga

SEQ ID NO: 249724 - DNA, 201 bp, Homo sapiens
agatgagacaatccagagagaaggggtagaattagaagagaaggcagcctggggcagagcacggaggcttggcacgccacacttaagggacacggagaggyagagaaacttgaagaggagcagacatggagcttagacacccagagtggggcccagagctaaggaggagtgtctcaaggtgttggggtggggagggcacag

SEQ ID NO: 249725 - DNA, 201 bp, Homo sapiens
ataatcctagcattttgggagaccaagataggaggctcacttaacgccaagagttcaaaaccagcctgagcaacgtagcaaaacccagtctctacagaaaaataaataaataaataaataaataaataaataaataaataagctgggcatagtgatgtgcgtctgtagtcctagccacgtgggaggctgaggtgggaagac

SEQ ID NO: 249726 - DNA, 201 bp, Homo sapiens
taatcctagcattttgggagaccaagataggaggctcacttaacgccaagagttcaaaaccagcctgagcaacgtagcaaaacccagtctctacagaaaaataaataaataaataaataaataaataaataaataaataagctgggcatagtgatgtgcgtctgtagtcctagccacgtgggaggctgaggtgggaagacc

SEQ ID NO: 249727 - DNA, 201 bp, Homo sapiens
aatcctagcattttgggagaccaagataggaggctcacttaacgccaagagttcaaaaccagcctgagcaacgtagcaaaacccagtctctacagaaaaataaataaataaataaataaataaataaataaataaataagctgggcatagtgatgtgcgtctgtagtcctagccacgtgggaggctgaggtgggaagacca

SEQ ID NO: 249728 - DNA, 201 bp, Homo sapiens
atcctagcattttgggagaccaagataggaggctcacttaacgccaagagttcaaaaccagcctgagcaacgtagcaaaacccagtctctacagaaaaatwaataaataaataaataaataaataaataaataaataagctgggcatagtgatgtgcgtctgtagtcctagccacgtgggaggctgaggtgggaagaccac

SEQ ID NO: 249729 - DNA, 201 bp, Homo sapiens
gccaggttggtctcgaacttctgacctcaggtgatccacccgccttggtctcccaaagtgctgggattacaggcgtgagccactgcacccagctggtgagygaacaattttaactgtccttgttgtatgatcattttttactgaattgtaccttgactcaaaaaatccaaataactgaatagtcatgcgagggctctggca

SEQ ID NO: 249730 - DNA, 201 bp, Homo sapiens
tgccgttattatgagaccaccagtatggtggattctcataccacaggcatacataaattatgtatataatttcttgttaacttttgtgacgtcttggggaktcagaaatggtttccctttcatgcaaataaattaataagtgaaactgagtgattggatccaaaagagctaattgggcatggtgagaaaataataacccaa

SEQ ID NO: 249731 - DNA, 201 bp, Homo sapiens
attcttttctttaagaatgttgaatattggcccccactctcttctggcttgtagggtttctgccgagagatccgctgttagtctgatgggcttccctttgwgggtaacctgacctttctctctggctgcccttaacattttttccttcatttctactttggcgaatctgacaattatgtgtcttggagttgctcttctcga

SEQ ID NO: 249732 - DNA, 201 bp, Homo sapiens
tttaagaatgttgaatattggcccccactctcttctggcttgtagggtttctgccgagagatccgctgttagtctgatgggcttccctttgtgggtaaccygacctttctctctggctgcccttaacattttttccttcatttctactttggcgaatctgacaattatgtgtcttggagttgctcttctcgaggagtatct

SEQ ID NO: 249733 - DNA, 201 bp, Homo sapiens
tagaaagtcgcggcaccctccctctgcctccccacacctggagctctctgagctcccccaggggacagtgtggaagtggtgactgtaatgtcctgtcgtasctttcgataatgataaagtgttagagaaagccaggacgagttagccattctaggaaactttccacagctgttgcattaattaagacttttttggtcccaa

SEQ ID NO: 249734 - DNA, 201 bp, Homo sapiens
tgccacattcccttccagagaggttgtaccaatttatactccttcagtagtatgtgaatcagggtaccttagatggaaacatctgtcaggagttctctgcstacacggagctctggcgcactcgcgcgctctctttttctcgtctctctctctctctctctctttctctctctctctctctctctctctctctctctctct

SEQ ID NO: 249735 - DNA, 201 bp, Homo sapiens
attaatactgaaacatattgccacattcccttccagagaggttgtaccaatttatactccttcagtagtatgtgaatcagggtaccttagatggaaacatmtgtcaggagttctctgcctacacggagctctggcgcactcgcgcgctctctttttctcgtctctctctctctctctctctttctctctctctctctctct

SEQ ID NO: 249736 - DNA, 201 bp, Homo sapiens
tgagttagggacctactagttcagaagtcatagcctcagaactgtagagcaacttgaccattgtgtatttgcagttggcaacttagaccggagctgcctarcccatgtctgagttagtgagcctcagccctcagggccacctagtctggccccagttccatgaaggccacctactagcagtcttgtttaccctagtgtgct

SEQ ID NO: 249737 - DNA, 201 bp, Homo sapiens
agggtcattgtgtgatcttgtactgtgctaatgaaaggaacactcagattatagtattgtgggcagagcccaggcctgattctcggggacttcgaaacttytggccagtaggaaggaatacatgtgacactgtccttgaactcaaaactacccaccacatgtagaatttgctctgacactgcaaatactcaattggactca

SEQ ID NO: 249738 - DNA, 201 bp, Homo sapiens
aggatcctgcctcagcttaagggtcattgtgtgatcttgtactgtgctaatgaaaggaacactcagattatagtattgtgggcagagcccaggcctgattytcggggacttcgaaacttctggccagtaggaaggaatacatgtgacactgtccttgaactcaaaactacccaccacatgtagaatttgctctgacactgc

SEQ ID NO: 249739 - DNA, 201 bp, Homo sapiens
agatggaaatgcagaaatcacccgtcttctgcgtcgctcacgctgggagctgtagaccggagctgttcctattcagccatcttggctcctcccccctccttaattttctaaaggtccaataactggtatgacaggactgttttaacaactaatatcaggtccatcacttcacttgcttccttttgtcctccctcctcctca

SEQ ID NO: 249740 - DNA, 201 bp, Homo sapiens
cagatggaaatgcagaaatcacccgtcttctgcgtcgctcacgctgggagctgtagaccggagctgttcctattcagccatcttggctcctcccccctccttaattttctaaaggtccaataactggtatgacaggactgttttaacaactaatatcaggtccatcacttcacttgcttccttttgtcctccctcctcctc

SEQ ID NO: 249741 - DNA, 201 bp, Homo sapiens
tcagatggaaatgcagaaatcacccgtcttctgcgtcgctcacgctgggagctgtagaccggagctgttcctattcagccatcttggctcctcccccctccttaattttctaaaggtccaataactggtatgacaggactgttttaacaactaatatcaggtccatcacttcacttgcttccttttgtcctccctcctcct

SEQ ID NO: 249742 - DNA, 201 bp, Homo sapiens
gaggctgaggcaggagaatcgcttgaacctgggaggtggaggcagcagtgagcagagatcacgccactgcactccagccagggtaacagagtgagactccmcctcaaaaaaaaaaaaaaaaaaaaaaattgttagctctgtttttcgtggataccatggaatttcctgtatttagaagttcatgtcatctgcaaataggga

SEQ ID NO: 249743 - DNA, 201 bp, Homo sapiens
ctcactgcaacctctgcttcctgggttcaagcgattctcctgcctcaacctcccaagtaactgagattacaggtgcgcaccatcatgcccagcaatttttrtatttttagtagagatggggtttcaccatgttggccaggatagtctcgatctcttgacttcgtgatccacccgccttggcctcccaaagtgctgggatta

SEQ ID NO: 249744 - DNA, 201 bp, Homo sapiens
cctctctcaaataattaacaccatttgtccctttcagcattttcataaatgtttttacttagttaaatcatactctacatacatcttcaaaattctttttstgaaatacataaaaaattgaaaaatatgacatggtttagtttatcatttatctgttgcttgacatctaaattacttttactccttttctgctccaagatt

SEQ ID NO: 249745 - DNA, 201 bp, Homo sapiens
caagtaatcctcttacctcagcctaccaagtacctgggaccacaggcatgtgccaccatgcccggctattttttttaattttttaattaattaattaattwatttatttattattattattattttttaaattatactttaagttttagggtacatgtgcacattgtgcaggttagttacatatgtatacatgtgccatgc

SEQ ID NO: 249746 - DNA, 201 bp, Homo sapiens
actataatgatatttaaaaatttcattttgtggtatagatggtctaagatttggaataaactggagtatagagataactaaatgtcagggtggcaaagtctgttttttatattgagatattcaaataccacaaaattaatcattttaaattcagtggtttctcgtatattggtagatttgttgaaccatcaccactatcta

SEQ ID NO: 249747 - DNA, 201 bp, Homo sapiens
cttggctgaattcacataaagttcagttcctcgatcgcagggcaggtttcactgctcccagtgacccagcgacacagctgcgtgcctgtcagaatgaggcrgctaagcttggagtcatgctggttcctctcagctttccagacagccctctcctctgtgggaaacagatctgttatgttaccccatagcagccaggatctc

SEQ ID NO: 249748 - DNA, 201 bp, Homo sapiens
gggtttctgccgagagatccgctgttagtctgatgggcttccctttgtgggtaacctgacctttctctctggctgcccttaacattttttccttcatttcwactttggcgaatctgacaattatgtgtcttggagttgctcttctcgaggagtatctttgtggcgttctctgtatttcctgaatctgaatgttgggctgcc

SEQ ID NO: 249749 - DNA, 201 bp, Homo sapiens
gccgagagatccgctgttagtctgatgggcttccctttgtgggtaacctgacctttctctctggctgcccttaacattttttccttcatttctactttggygaatctgacaattatgtgtcttggagttgctcttctcgaggagtatctttgtggcgttctctgtatttcctgaatctgaatgttgggctgccttgctaga

SEQ ID NO: 249750 - DNA, 201 bp, Homo sapiens
tccttcatttctactttggcgaatctgacaattatgtgtcttggagttgctcttctcgaggagtatctttgtggcgttctctgtatttcctgaatctgaaygttgggctgccttgctagattggggaagttctcctggatgatatcctgcagagtgttttccaacttggttccattctccccatcactttcagagtgacac

SEQ ID NO: 249751 - DNA, 201 bp, Homo sapiens
  misc_feature (1)...(201): n = A,T,C or G
ttgtccttcacgaactttacacttttaaagagtactggccagtgattttgtaaaacgtttctcagtttgtgtttgtctaatgttctctcatgattagatcnagattagacattattgggaaagataccacagaggtgatgtgcatcttatcgggggcacataatgtcagtaagtaatactggtgatgttcaccttgatcac

SEQ ID NO: 249752 - DNA, 201 bp, Homo sapiens
ttggagttgctcttctcgaggagtatctttgtggcgttctctgtatttcctgaatctgaatgttgggctgccttgctagattggggaagttctcctggatratatcctgcagagtgttttccaacttggttccattctccccatcactttcagagtgacaccaatgagacgtagatttggtcctttcacatagtcccatat

SEQ ID NO: 249753 - DNA, 201 bp, Homo sapiens
tcttacttcttttctccatgcttttatctattttcactgataaaaacaccgttcctgaagtccctattccttaagtgctactttctgctgtgtcatagtamtgagccataagaagcgaaaataactcgttccctctcctgattatagaaaataatacataaaatatacagccaaagacaagtgtatttgccacacttcgtt

SEQ ID NO: 249754 - DNA, 201 bp, Homo sapiens
ggggaagttctcctggatgatatcctgcagagtgttttccaacttggttccattctccccatcactttcagagtgacaccaatgagacgtagatttggtcytttcacatagtcccatatttcttggaggctttgcttgtttctttttattcttttttctctaaacttcccttctcgcttcatttcattcacttcatcttcc

SEQ ID NO: 249755 - DNA, 201 bp, Homo sapiens
ctttcccaccaagagacatcaggtatctgagtggctccaacaagaaggattctagaagtggcccagaaagcctctttgtttctgtgggactgcgactctcrtctacccagaggcactgaacattcagagacactggacatctacccagaaaacaccaggaaaggggatctggccacaacatgcagtcaagtatgggaagcc

SEQ ID NO: 249756 - DNA, 201 bp, Homo sapiens
aatgtcatatgaggcgtttcatggtctggtccctacacctcatttatacacacacggctttcctcctactcagtttactcttgcttgtgtgcctttgcacrctctcttctccctttctaaaatgctccctcgtcccattcacctagctatttcctactcagcctttccattctcaactcaagagtttagccgctctgtcaa

SEQ ID NO: 249757 - DNA, 201 bp, Homo sapiens
agatttggtcctttcacatagtcccatatttcttggaggctttgcttgtttctttttattcttttttctctaaacttcccttctcgcttcatttcattcayttcatcttccatcgctgatagcctttcttccagttgatcgcatcggccaccatgcccggctattttttttaattttttaattttttaattttttgagaca

SEQ ID NO: 249758 - DNA, 201 bp, Homo sapiens
tcacatagtcccatatttcttggaggctttgcttgtttctttttattcttttttctctaaacttcccttctcgcttcatttcattcacttcatcttccatygctgatagcctttcttccagttgatcgcatcggccaccatgcccggctattttttttaattttttaattttttaattttttgagacaatgtctcactctg

SEQ ID NO: 249759 - DNA, 201 bp, Homo sapiens
agaggatggtgatgcaccggttacaaaagatgagaccacctgcatttcacaagacacaagagctttatcggagaaatccctgcaaagatcagcaaaggtcrttgcctacagattttctccacgtgtccaaatggctttcacctgagctacttgttgaagatctcgtgtgattcagtcaggactgtatttggtcatttaatc

SEQ ID NO: 249760 - DNA, 201 bp, Homo sapiens
tcccatatttcttggaggctttgcttgtttctttttattcttttttctctaaacttcccttctcgcttcatttcattcacttcatcttccatcgctgatascctttcttccagttgatcgcatcggccaccatgcccggctattttttttaattttttaattttttaattttttgagacaatgtctcactctgtcactcat

SEQ ID NO: 249761 - DNA, 201 bp, Homo sapiens
aactaccggcactaatacctgcgtccaagctattctctctcaccttgacagatacagtggcctcctgactgtccttgcagcctctgctcttgccccacgtyatctcctctgcatacagctgtcagagtgatccttctgaatcttaagccttgtctctccattaaaactttccaatctctcattcacaataaaagataaaac

SEQ ID NO: 249762 - DNA, 201 bp, Homo sapiens
atttaacattttacaattgaaaactgtccctggttttcagataatgcttaaaacaaacaaaaaacaaacaaaaagaacaacaacaacaacaacaacaaaaaccccacccaactcaaaacattaaagaatgaatatgccacccctgttcctgtaagtggaaccagccgtccacgcttcatagcttttgtctagtcccttgaa

SEQ ID NO: 249763 - DNA, 201 bp, Homo sapiens
tatttaacattttacaattgaaaactgtccctggttttcagataatgcttaaaacaaacaaaaaacaaacaaaaagaacaacaacaacaacaacaacaaaaaccccacccaactcaaaacattaaagaatgaatatgccacccctgttcctgtaagtggaaccagccgtccacgcttcatagcttttgtctagtcccttga

SEQ ID NO: 249764 - DNA, 201 bp, Homo sapiens
atcttatttaacattttacaattgaaaactgtccctggttttcagataatgcttaaaacaaacaaaaaacaaacaaaaagaacaacaacaacaacaacaacaaaaaccccacccaactcaaaacattaaagaatgaatatgccacccctgttcctgtaagtggaaccagccgtccacgcttcatagcttttgtctagtccc

SEQ ID NO: 249765 - DNA, 201 bp, Homo sapiens
gagctgagattgcaccattgcactccagcctgggcaacagcgtgagacttggtcttaaataaataaatgaaataaataaataaataaataaataaataaaacagatgaatactattgtgaagttaagcttcaggtcttcagagctcaagaagggaaggctcgagccagtcaagtagctcttcccttttcatccctttggtc

SEQ ID NO: 249766 - DNA, 201 bp, Homo sapiens
acactaatcaaatggaatcacagtgcagatatttttatgtgatttgcttttttcccatagcgtcaaatgtgtttgttttggtcagattttgcaaataatcktgggctgcttccacatagacgtataagtttattttgtagtaattttccttattcatctcagagaatatgatttatatgtttcggtcttgtggaagtaaaa

SEQ ID NO: 249767 - DNA, 201 bp, Homo sapiens
cagtgagctgagattgcaccattgcactccagcctgggcaacagcgtgagacttggtcttaaataaataaatgaaataaataaataaataaataaataaataaaacagatgaatactattgtgaagttaagcttcaggtcttcagagctcaagaagggaaggctcgagccagtcaagtagctcttcccttttcatcccttt

SEQ ID NO: 249768 - DNA, 201 bp, Homo sapiens
atcacttgaactctggaggtggagattgcagtgagctgagattgcaccattgcactccagcctgggcaacagcgtgagacttggtcttaaataaataaatraaataaataaataaataaataaataaataaaacagatgaatactattgtgaagttaagcttcaggtcttcagagctcaagaagggaaggctcgagccagt

SEQ ID NO: 249769 - DNA, 201 bp, Homo sapiens
aaaccatagcaggaagtaagaagaaagggatgattactttcaaggaacaaaggaatgcctctgtttcccttagcaggtgtcaggtgattgaagattttttwaaaaaaaaaagaaaaacaaacctaattctgacaattatttggaatcagtctgtcagccgcttttgcattcaatctttatgtcatacgaatgtattgaaag

SEQ ID NO: 249770 - DNA, 201 bp, Homo sapiens
agttccattatagtttattatattgtctatatttttaaatattacacatatgctttgaaagaaaggtgtgtgtgtgtgtgtgtgtgtgtgtgtatatatatctccacaaatttgatttataattatattgttcttcccttcatagtaagctgtttattattgtgtgtactttatctgtcagtttctgagagggatctttaa

SEQ ID NO: 249771 - DNA, 201 bp, Homo sapiens
tagttccattatagtttattatattgtctatatttttaaatattacacatatgctttgaaagaaaggtgtgtgtgtgtgtgtgtgtgtgtgtgtatatatatctccacaaatttgatttataattatattgttcttcccttcatagtaagctgtttattattgtgtgtactttatctgtcagtttctgagagggatcttta

SEQ ID NO: 249772 - DNA, 201 bp, Homo sapiens
ttatggatagttccattatagtttattatattgtctatatttttaaatattacacatatgctttgaaagaaaggtgtgtgtgtgtgtgtgtgtgtgtgtgtatatatatctccacaaatttgatttataattatattgttcttcccttcatagtaagctgtttattattgtgtgtactttatctgtcagtttctgagaggg

SEQ ID NO: 249773 - DNA, 201 bp, Homo sapiens
tgttctggtttcccccttcccacatttgtaccccctttctttgacagtgagaaacctggctcttactgttcacattatatttacttttttgctcattcctktttgtaactaatctatttccattgcttgtcttctgtatcactaggtcacctgcttcactccaggcttcagtccttgctaggctcctgcttcctcactcag

SEQ ID NO: 249774 - DNA, 201 bp, Homo sapiens
gttcaaaaggtaaaaatccatctctagtttcttttttcttgctttgtttatttgtttgtttccctggaagagtgtgtgctctctgttattacatgttctcyggaaagagaagccaaaggaagacacaggtgttcatctgaggcctcatcccagagtggccctgctatataagtaactgacagatactcagcttcagaaaga

SEQ ID NO: 249775 - DNA, 201 bp, Homo sapiens
gccattttttctaagactccctagttccttttaatggagatatccagactctcccaagccctcttaatgaacagaaactaggaaagacatgtatgtatctyccctccttccctcctttcttccttcctgccttcctatcagcctgcctgcgtgcctgccttacctatcttacctaccctatcttcatctatctatctgtgt

SEQ ID NO: 249776 - DNA, 201 bp, Homo sapiens
ttgatctgggtggagggtactgagtgggggagtaacattctctgtttctaattagaactagtaagctaattttgcaggttgtggaaggtgtaggggaaagrttcggttagccacaaatgtctactatgcctaacctttatgctatgtactgggatgtcactgtcaccaattatctttgttttgagtttctgtttaccacac

SEQ ID NO: 249777 - DNA, 201 bp, Homo sapiens
ttgagagtgatcacatattctcaatgattgaagcaattgaagaactcatacttgaaacatgggctagagctttctttagttggcaactttctcaatctccrgtgattattgatttctttaaattttctttgcatgtattttgataattatattttccaggaaaataatacattttgagcacatactgtaatgtattagaat

SEQ ID NO: 249778 - DNA, 201 bp, Homo sapiens
aatagaccagagcatattgatttaattcatgaggagacaatgtctggtaacagataaaaagtcagttcctaaatccaaagaaaatgagtaaattcttgaayttgagtttttgtttatacaacatctaaacttcattttcaaggtacttctgttaagactatacagaatttagaaaatatgttggtgtcagttttattatta

SEQ ID NO: 249779 - DNA, 201 bp, Homo sapiens
tcagggaggcatgtatggatcaaagctttctcttcctggtatactattggctgagtacagcagcccctctactaactctcccagacattggaagaagtagkgggctcctaactcttctgaggatcctgccctcaagggaaactgaaagggggaccatggcacccttttacagagactcttcgaacattgctgccagctcag

SEQ ID NO: 249780 - DNA, 201 bp, Homo sapiens; identical to SEQ ID NO: 49030

SEQ ID NO: 249781 - DNA, 201 bp, Homo sapiens
tgttcatatcctttgcccactttttgatggtttgttttcttgtaaatttgtttaagttccttgtagattctggatattatccctttgtcagatggatagaytgcaaaaattttttcccattctgtaggttgcctgttcactctgatgatagtttcttttgctgtgcagaagctctttagtttaattagatcccatttgtcc

SEQ ID NO: 249782 - DNA, 201 bp, Homo sapiens
tttatggatagttccattatagtttattatattgtctatatttttaaatattacacatatgctttgaaagaaaggtgtgtgtgtgtgtgtgtgtgtgtgtgtatatatatctccacaaatttgatttataattatattgttcttcccttcatagtaagctgtttattattgtgtgtactttatctgtcagtttctgagagg

SEQ ID NO: 249783 - DNA, 201 bp, Homo sapiens
gtttatggatagttccattatagtttattatattgtctatatttttaaatattacacatatgctttgaaagaaaggtgtgtgtgtgtgtgtgtgtgtgtgtgtatatatatctccacaaatttgatttataattatattgttcttcccttcatagtaagctgtttattattgtgtgtactttatctgtcagtttctgagag

SEQ ID NO: 249784 - DNA, 201 bp, Homo sapiens
agtttatggatagttccattatagtttattatattgtctatatttttaaatattacacatatgctttgaaagaaaggtgtgtgtgtgtgtgtgtgtgtgtgtgtatatatatctccacaaatttgatttataattatattgttcttcccttcatagtaagctgtttattattgtgtgtactttatctgtcagtttctgaga

SEQ ID NO: 249785 - DNA, 201 bp, Homo sapiens
atgccttggggtagttgtcttttttttttttcttttgagacagagtctcgctctgtcgcccaggctggagtgcagtggcgtgatctcggctcactggaagygctgcctcctgggttcatgccattctcctgcctcggcctcccgagtagctgggactacaggcgcccgccaccacgctcggctaattttttgtatttttaa

SEQ ID NO: 249786 - DNA, 201 bp, Homo sapiens
ttgagcctgggaggtggaggttgcagtgagccaaggtggtgccgctgcactcaagcgtaggtaacaaagtgcagctctgtctcaaaaaaaaaaaaaaaaaatacagttggttggttagaatcaggattaaaataaaacctacaaaattgccttttgttgatatgtaacaaatattttaatctataggcttacccttttttc

SEQ ID NO: 249787 - DNA, 201 bp, Homo sapiens
attatgccactgtaaagtttccactggaaagtctgctgccacatgtgttgtagctccattgtatgtttgtttgtttgtttctctctcttttcttttctttttctttttcttcttttcttttctttctttctttttttctgcttttaggatcctttctttatccctgacctttaggagtttgattattaaatgccttggggt

SEQ ID NO: 249788 - DNA, 201 bp, Homo sapiens
tattatgccactgtaaagtttccactggaaagtctgctgccacatgtgttgtagctccattgtatgtttgtttgtttgtttctctctcttttcttttctttttctttttcttcttttcttttctttctttctttttttctgcttttaggatcctttctttatccctgacctttaggagtttgattattaaatgccttgggg

SEQ ID NO: 249789 - DNA, 201 bp, Homo sapiens
atattatgccactgtaaagtttccactggaaagtctgctgccacatgtgttgtagctccattgtatgtttgtttgtttgtttctctctcttttcttttctttttctttttcttcttttcttttctttctttctttttttctgcttttaggatcctttctttatccctgacctttaggagtttgattattaaatgccttggg

SEQ ID NO: 249790 - DNA, 201 bp, Homo sapiens
catattatgccactgtaaagtttccactggaaagtctgctgccacatgtgttgtagctccattgtatgtttgtttgtttgtttctctctcttttcttttctttttctttttcttcttttcttttctttctttctttttttctgcttttaggatcctttctttatccctgacctttaggagtttgattattaaatgccttgg

SEQ ID NO: 249791 - DNA, 201 bp, Homo sapiens
acatattatgccactgtaaagtttccactggaaagtctgctgccacatgtgttgtagctccattgtatgtttgtttgtttgtttctctctcttttcttttctttttctttttcttcttttcttttctttctttctttttttctgcttttaggatcctttctttatccctgacctttaggagtttgattattaaatgccttg

SEQ ID NO: 249792 - DNA, 201 bp, Homo sapiens
ttgaacctgggaggcagaggctgcagggagccaagactgcgccactgcactccagcctgggtgacagagcgagactccatctcaaaaaaaaaaaaaaaaaagaaagaaaagaaagaaagctccagctgttattatattggggtctatctctctctctctttagctctagtaatatttgctttatatatctgggcactccgg

SEQ ID NO: 249793 - DNA, 201 bp, Homo sapiens
cccacctgaattttggtctgtctttctcagaaggacacaacatttgctcagttaatgcctctcaactgtcttctctgggagataaatataatgtaattgcmaagtttaaagtaattttagaaaataagcaaattaagctttaaaagtaaaagaaaacctaaacagttgaaacctaaacctaaattttctgcctattggccc

SEQ ID NO: 249794 - DNA, 201 bp, Homo sapiens
ttcttaaaggactgtgtccaggaacttttctgctgttttcactttactttgcctataaaggtcttctgaaaagctggatgagctgtgtttccgccctccakattctctgctttctcacttggcacaatcatttctcccagcttcatcacacaggggaaggggggctggggttccagttcatttcccatctatagggaatgt

SEQ ID NO: 249795 - DNA, 201 bp, Homo sapiens
actgaggagactgtagaacagcggtcccattgttttgggcaccagggcccagtttcgtggaagacaatttttccacagaccaggggtaggggatggtttcrggatgaaacttccacttcagatcatcaggcattagttagattctcataaggaacatgtagcctagatcccttggatgcacagttcacaatcgagtttgag

SEQ ID NO: 249796 - DNA, 201 bp, Homo sapiens
tccttgcttgttgtgtgctctgggaagtttccacgtgtctgaaatgaggtgggtaggagcgtggaactgttcaccagaccgcctcatgcagacttctttcyctgagcctgtcagctgggagaaatctgaaaggccttgcaaagccttctgattgaagttctgattttatcctcccttttgcaacagacttgcacaaatgct

SEQ ID NO: 249797 - DNA, 201 bp, Homo sapiens
aaattgcttcataaatgtctaaattctcattctttttaaagaaatcaaatggtaacgtatgaacagtgaattgtgagtgtagtttattcagaaaagactaygtagaattccggttagcattccctttttgaaagccttacatttacaaaaaattagtgaatgaatatacatctatataaattaaaacatttagtgatgggt

SEQ ID NO: 249798 - DNA, 201 bp, Homo sapiens
ccccaggggaggcgctaggggtgctgggctggcttccctcctctccaggtggtgcctgccctcctggggcatttcccagcccttcttcctctgcatctcargctccctggggaggcagatatgctctcaggacatcctggcagagcacagccacacgtctgccctggcaggcccaccctgggtggaggaggggctctatat

SEQ ID NO: 249799 - DNA, 201 bp, Homo sapiens
taagtggaaagaaaaccctccgaagtcctaattaggttccagttaattaaggtttgaaaataagggctttgcacccttggagttgattccttggttccccygaaaacaagtccatggaccccagctttggaaggaggagcacatcaatctcccacagcaaaggactctggtgaggtcatttataaatcagctaaatggccc

SEQ ID NO: 249800 - DNA, 201 bp, Homo sapiens
cctcttcctcatcagtcaggtggcagtacccagaagccactctgtttgagggcttccatgtaaaataagcatgaggtttgcaggaagctgtgcaccatcaygggtcccctgacaggtggttaggtgatgtgagcagttccttctgggtcactgactttgggaattcagaggaagttgaagtagtggtggagaaaacctgat

SEQ ID NO: 249801 - DNA, 201 bp, Homo sapiens
cacacagtgtactggattttggttctcacagagtgagaggaggcttgtataaagagaggccaggcattatgtagtaggaagctggtcacttccatgacggraattgtagtcctttgtcctgcttataggcaacgtgcaattcttcctttccagtttgtatgccccttctttttcttactttatggcattcactagtacctc

SEQ ID NO: 249802 - DNA, 201 bp, Homo sapiens
tagctgtcatgagtgaatcctaagcagccttttgtctttgtgtttctgtctacacattcaaagtcttgagttgaggcagagtttaagtcacacacagtgtrctggattttggttctcacagagtgagaggaggcttgtataaagagaggccaggcattatgtagtaggaagctggtcacttccatgacgggaattgtagtc

SEQ ID NO: 249803 - DNA, 201 bp, Homo sapiens
tgcacttgcatctttgcttcaagctcttgttttataaagcttatatttttgggagttcttgagagtatctttggtcatttctgtggttatatgcttatagrgattgttttgtccttctgccatttctttttcttgctcctttttttccttttaaatgtgggttttttttttaatagaatgtttggatggttccttctactc

SEQ ID NO: 249804 - DNA, 201 bp, Homo sapiens
caggtgttgtggcgggtgcctgtagtcccagctactcgggaggccgaggcaggagaatggtgtgaacccgggaggcggagcttgcagtgagctgagatcgygcccctgcactccagcctgggcgacagagtgagactccatctaaaaaaaaaaaaaaagttttctattccaaagaatcttagaaaatgttttctattcctc

SEQ ID NO: 249805 - DNA, 201 bp, Homo sapiens
ggcttaggtgatcttcccacctcagccaccagagtagctgggactacaggtgtatgccaccatgtccatctaattttttgtacttttttttttttttttttaatagggttggggttttgccatattgctgtggctgttctcaaactcctgggttcaagcaatctgcctgtcttggcctctgaaagtgctgggattacaggt

SEQ ID NO: 249806 - DNA, 201 bp, Homo sapiens
gttctctctaatctctccttctggaacttgttagaaaccatcttatttcatctttcctctcttttttctatttctgtatctgttaatgctgcattgtaggmaacttcctcaaaagtgtctgtcactttattctccttgtagcagtttactatcggctgcttaataacccttcccaatatgaatatttggtttttattttat

SEQ ID NO: 249807 - DNA, 201 bp, Homo sapiens
gtcaaataattttggattgtttcctgaatattattttatgtagactctgaattctgttaaattcctttgaagaatcttgatttttttttttttttttttttatttcactagcacttagcttcagaccctgttaggttcagattgcgtcttgtctcctgtaggcttaaatctcatttgaaatctcctgttggcttaaatctc

SEQ ID NO: 249808 - DNA, 201 bp, Homo sapiens
gccgaaggaaggatctagagatgaggaatagaaaatgttttctggccaggcgtggtggctcacgcctgtaatcccagcactttgggaggccgaggcgggcrgatcacgaggtcaggagattgagactatcctggctaacatggtgaaaccccgtctctactaaaaatacaaaaaattagccaggtgttgtggcgggtgcct

SEQ ID NO: 249809 - DNA, 201 bp, Homo sapiens
cacatttatgaagcccctgctctgtacagtgtgttacatgggggaggcaaagatacgttagacccagtgcatgccctcagggtttgtataaggagcaaagygcactccagcaccctgtgggatgatatgcactttggcagtggtaggaatcgagtgctatggcagcaacgatgaggaaagtgaatgcttccgactttggag

SEQ ID NO: 249810 - DNA, 201 bp, Homo sapiens
gtgaataagtgatttgtgagaattcagttacacatttatgaagcccctgctctgtacagtgtgttacatgggggaggcaaagatacgttagacccagtgcrtgccctcagggtttgtataaggagcaaagcgcactccagcaccctgtgggatgatatgcactttggcagtggtaggaatcgagtgctatggcagcaacga

SEQ ID NO: 249811 - DNA, 201 bp, Homo sapiens
ttctggattcttttatcagccctccattaacgggattcagtatcaaaagcaggtaaagttttctgcaacagagaagaagaatgtggccctcgggtccatgrgtggtgcctgataattttgatccttggctctctgtcatcctgttctcctttcacataaaggggctaatctctacctctggggtccagggaggacagtccc

SEQ ID NO: 249812 - DNA, 201 bp, Homo sapiens
gttgatgtttgattgttccccacttgtacattctcagggctgtgatgccattatatctgtttgcatggagtttccaacattggaccaacatgtatgagagyatgtatttaagagtagtaatacgatagtggtaatcactgcaagagtgcatgactgtcttctaaatatcgtctagttgtaagactaggagtttataagaat

SEQ ID NO: 249813 - DNA, 201 bp, Homo sapiens
ggtttcaccatattggcgaggctggtcttgaattcctgatctaggtgatccacctgccttggccccccaaagtgctgggattatagtcgtgagccaccacrcccggcctgagcctctagtttcttcatctataggatgaagtaggattaatagtaggattaattattaattgttaattaattattaatagtaggattaata

SEQ ID NO: 249814 - DNA, 201 bp, Homo sapiens
gtcttgagcgtagagatagcatggtcactttctcccagatttgtcatggtttcttcttgactatttaagggtaagtcttgaataaaatggaaacgttttayagcagctaccgtgaggaacttaatagtgtttcttggcaacactgaaggctagctgaagatatgtgacatgaatcgacctagagcaaattgacacatttat

SEQ ID NO: 249815 - DNA, 201 bp, Homo sapiens
aaatcatctttccctttagaaactcttgcagtggaattcatgcctatattttctcagccctttgggaaatctggtatcctcagtctagagtttacagttccagcttctctttccgggatgtcttgagcgtagagatagcatggtcactttctcccagatttgtcatggtttcttcttgactatttaagggtaagtcttgaa

SEQ ID NO: 249816 - DNA, 201 bp, Homo sapiens
ttcagaacagatttagatttacagaaaattgtcaagatagtacagttctcacctgccccttctctcctcctccaaaactagtttttttctcttaaccaatrttgatacattattaatggaggtccgtactttcttcaaactttcttgtttttaaaaatctaatgtcctttatctattccaggatctcatattacatttagt

SEQ ID NO: 249817 - DNA, 201 bp, Homo sapiens
tttcctttcctttcctttctctttctctctttctctctttctgtctttctctctttctttccttctttctttcttcttcttctttttttttttttttttttaagagactggatttcaccatgttgttgcccaggctggtctcaaactcctgagctcgagcagttctcctaccttggcctcccaaagtgctgggactacagg

SEQ ID NO: 249818 - DNA, 201 bp, Homo sapiens
aacatcatacaccggggcctgtagtggagtggggggagtggggagggatagcattaggagatatacctaaagtaaatgatgagttaatgggtgcagcacaycaacatggcacatgtatacatatgtaacaaacctgcatgttgtgcacatgtaccctagaacttaaagtataataattaaaaaaaaaaggaaaagaaaaaa

SEQ ID NO: 249819 - DNA, 201 bp, Homo sapiens
ctgtaggtcaggaatctggatagggcccttctgggtcccctacttcagagttcctcacaaggctgtagtcaaggtgtcagttttctgaaggcagactgggraaagatctgcttccaggcttttgtgattattggccagatccagttccttgtgggctcttggactgatgacctcagctccttgctgcctccgctgcctgct

SEQ ID NO: 249820 - DNA, 201 bp, Homo sapiens
ttttttgttatacattacaacatatttagtacctttaatatttagtactacactctagtccaggataattaaaaagccacattggtttcttcgctggaatratctgcaattacataatcagatttacagttttaagagcttcccaacctcttaaatcatctttccctttagaaactcttgcagtggaattcatgcctatat

SEQ ID NO: 249821 - DNA, 201 bp, Homo sapiens
aagtcacctagtcatttactcatcattttcaaaaattagaaggaatacaggttgcattattctggaagttgttaaaaatacagactcagaggtgatatccsaccagtacaggagggttgcttcctgtgtgttacaaatactgctcacagttctgtgaaggagccttaggcagcagaagacaaactttctaccctcaagctg

SEQ ID NO: 249822 - DNA, 201 bp, Homo sapiens
cagaatttctatggtggaaaatcttactggtctagcttgaggcaggtgttttccctcgtcagtagtttcaagcagaggtgggggtccagagtcccatccaygactcacacccaatttgcagcgctgtgggactcctgggaaagagcgtggataaaacagatggcttgaatggcttatctctttgagttctacctacagtac

SEQ ID NO: 249823 - DNA, 201 bp, Homo sapiens
ttgcctatatccaggctcatttcttatagatgaagaaagtcctacccccagcctactcctccaccttcaccctgtgaccttctccaccttcaccctgtgamcttctaggttcaccttttgaagctgaagattgaaactccaaatcctgctgcagagaagttcacatttgtttttcctaggcagggccagcccatccacccc

SEQ ID NO: 249824 - DNA, 201 bp, Homo sapiens
ggggtgttcacattaaaaattagacttttggcttctcttgtcaaaacaaaacatttggtaacactgggccaaatttctaaatgactgtagtcagagctgartagaggcagccctggaacctgtgttctttgatttgctactgccctccaaacatgttttccctctcccttctcccttttccctatctccctttcttttgga

SEQ ID NO: 249825 - DNA, 201 bp, Homo sapiens
cctggagtctgtagactttgggtttgttttgtctccatgagaagcagggattacagtgctggtgttttgacttctttttttgaagtggtagggagaagaartacaccaggtctgtcatagttgtactttggtgttttgggaatgattttggtcatttttctttttctttctttcttttttttttgagacagagtttcgctc

SEQ ID NO: 249826 - DNA, 201 bp, Homo sapiens
ttttgaagctgaagattgaaactccaaatcctgctgcagagaagttcacatttgtttttcctaggcagggccagcccatccacccctccttcctagggttyccctgatactttatttatacctgttacctgtctttatcacactgtcacattgtcttgccattttccttttgcttccctgtctccttttctaagattgtga

SEQ ID NO: 249827 - DNA, 201 bp, Homo sapiens
ttaggagaatgccatagtaactggtgtgtacccctaattaatcataggaaggattgaccagacatcctttaacaattcttgctggactctctgctctttgrgaaaaggttgaagagtatttattcaatgggagaaggacaccagctctctgtcctttaagtttatgtcttagctgttcacatatctggtggcaacaactta

SEQ ID NO: 249828 - DNA, 201 bp, Homo sapiens
tactataatgatatttaaaaatttcattttgtggtatagatggtctaagatttggaataaactggagtatagagataactaaatgtcagggtggcaaagtctgttttttatattgagatattcaaataccacaaaattaatcattttaaattcagtggtttctcgtatattggtagatttgttgaaccatcaccactatct

SEQ ID NO: 249829 - DNA, 201 bp, Homo sapiens
tttgaacagccgacttgctgttgttgggatggaatctgaggtaacagtcatttgaagatggagccatcagtgatcatcacagaaagctgtttgcccaggawttaggctgccttggaaacccagtcctctcactgcagtgtcttgattggtagcatttgagaccaaactagttgtcaaatatctaagtagaggatacttatt

SEQ ID NO: 249830 - DNA, 201 bp, Homo sapiens
ctctttagtggagctggaggcccagcttatttccctggagtctgtagactttgggtttgttttgtctccatgagaagcagggattacagtgctggtgtttkgacttctttttttgaagtggtagggagaagaagtacaccaggtctgtcatagttgtactttggtgttttgggaatgattttggtcatttttctttttctt

SEQ ID NO: 249831 - DNA, 201 bp, Homo sapiens
tctatgaccttccagaagagaaacctgggccttcctcaagacctctggtgctgtttagggtagaagagaggctaccgggtgccctcgttaccacatctccrctgggattaccttcaagacatgatgactgtttgtaatttatctttaggagaatgccatagtaactggtgtgtacccctaattaatcataggaaggattga

SEQ ID NO: 249832 - DNA, 201 bp, Homo sapiens
gcatgtgccaccacgcctggctaatttttaaatttttttaaattttaatttttgagacaaagtctctgttgctcaggctggagtgcagtggtgcgatctcrgctcactgcaacctctgcctctcaggttcaagtgattcttatgtctcagcctcctgagtagctgggattacaggcatgcaccaccatgcctggctaattt

SEQ ID NO: 249833 - DNA, 201 bp, Homo sapiens
catgctgtctgtaccagattacctcacgctcctgcgtacaacgtgtccctgttgtcatgccattttctgcttctagaacatccctctttcccagaaccccstgcccacccatctaggtaacctctgcttctccttccactctcagctaggtatttctcctctgggaagccattccacacccctcacaggcaccaccaaagc

SEQ ID NO: 249834 - DNA, 201 bp, Homo sapiens
gtcctctatattctggatatcagttctttgttgcttatacatgttgcaaatatcttccactgtgtagtttgcttttttactgcctctggtgttattttaaygtacagaagtacttaattttaatggagttcagtatgtcgatcttttttattatggttaaatgctttttgtataccatttaagaaatctttgtctatattc

SEQ ID NO: 249835 - DNA, 201 bp, Homo sapiens
acaaatttttatttaaaaataaataataaatagaacattacagcttccaggagcctcccatgtgcccctcactcctcccaaaaggataccaccattgttawcttctaacactgtagattggttgtgcctggctttgaacttcatataaatggaattatttactatattctcttttgtgcccagcttttctctttcagcatt

SEQ ID NO: 249836 - DNA, 201 bp, Homo sapiens
tttctgaggccagaactgacccaaacaaggaaatgggggagccgcaaaaatcggcagattgtgctggccacagaccagtcacatacatcagtgtacacacrcaggaacactggtccatgtctcagcatatagtgtgacttatgcattctgctatttttttctgtagtgcacatactggaaaataggtttttacaataagct

SEQ ID NO: 249837 - DNA, 201 bp, Homo sapiens
caattcctttttgccatataaggctattaaagttatctattacttgaacgaacttaacacacttttcagaagatccgtatgtatatatttacatgtttatmcacacacacacacacgtatatatttttgtagaagccttgaaagaaagagagaatcaaacaaaatacatagaaacaaatgagctggacatacagataaagc

SEQ ID NO: 249838 - DNA, 201 bp, Homo sapiens
aatggcagcagatcccaaattcatagtatttggatgcacaggtattcaaaaggcaggtaggcagttgtcatataggaggaagggggtcctactggggcttrgggacagggtgctaagttcagaaatgtgggactgttttgttataagcagagtggtagaagcagccactgggctaggagtcaaggataggatttgatcctc

SEQ ID NO: 249839 - DNA, 201 bp, Homo sapiens
atacacctactgaacatcatagcttagcttagcttaccttaaatgtgttcagaacacttatgttagcctaaagtttggcaaaatcatttaacacgaagccttttttttttttttttttttgagacagagtctcgctctgttgcccaggctggagtacagtggcgcgatcttggctcactgcaggctccgcctcccgggttg

SEQ ID NO: 249840 - DNA, 201 bp, Homo sapiens
gggaactctgagctaagcagtggaggtttctctggatctggagagaagagtgaccttggagccaataatgagccatcctgactacagaatgaacctccggyccctggggacccccagaggtagtaaaaggaaaatggagtctgcctgaataactggagaactgaaatgaaagtggaatgggtgtgaagtggaggctgtctt

SEQ ID NO: 249841 - DNA, 201 bp, Homo sapiens
gaataaatgaataataactgatcttgtgattaaacaatgtagtagagtctcattaaattgacaactttgctaattttttttttttttttttttttttttttggagagacaggttcttgcaggctggagtgcagtggtgcaatcttggctcactgcagccttgaattcccaggctcaggtgatcttcccacctcagcctcct

SEQ ID NO: 249842 - DNA, 201 bp, Homo sapiens
ccccagtcaatgacaagagcagtcccatcctggacttaaggagaatgtactctggtctcattgtctaaatatccaggctgtttaattttattcagtggaargaaacaaataggcacatgccagtagaactgtctactgtctatgaccttccagaagagaaacctgggccttcctcaagacctctggtgctgtttagggtag

SEQ ID NO: 249843 - DNA, 201 bp, Homo sapiens
ttcttgctcactgtgctccagccatgcctcatggtctttgttctggtccttgattgtgtgaagaacttcctgcctttaccctttcctgtgtgccattcctrtcttgggtctctcattctcctcttcactcctgtatacactgtccttatgtctcaatttaaattctttccctgatctctaatctaaatcatatgtcctttc

SEQ ID NO: 249844 - DNA, 201 bp, Homo sapiens
cagaagggacatattttcatttacaaatacatactgcattcttttcattgaactctttggaaattgtaaatttctgtggccctccattcagagattgaacragcttggatttgtcagctttggacttaaatcactgccattatcttaatttgggttctgattgtgtctcacctagattctaacctcagctttctaagatct

SEQ ID NO: 249845 - DNA, 201 bp, Homo sapiens
tatagaaatatgattgatttttttacattaatcttctccatcaatctggctaagctcacttagttcttattagtcctagacctttttttttttttttttttgagttggagtctcgttctattgcccaggtaggagtgcagtggcgcaatcttggctcactgcaacctctacctcccaggttcaagcaattcttctgcctca

SEQ ID NO: 249846 - DNA, 201 bp, Homo sapiens
ctgggaagggagatgctggcctgctggcatggaaaggtagggaggcaccaaacttcagaaggttctctagggtcagctaccattagctgttagtccctagmcccatgatggggatgaaagcgatttgtgtatcaaggtggctgtgcagtctaatgctccttctgcaaaattctgatcagaacctatttttgcttttaatgg

SEQ ID NO: 249847 - DNA, 201 bp, Homo sapiens
ctcatttatacacacacggctttcctcctactcagtttactcttgcttgtgtgcctttgcacactctcttctccctttctaaaatgctccctcgtcccatycacctagctatttcctactcagcctttccattctcaactcaagagtttagccgctctgtcaaactgcggggctcccatctcattgcccttaggcacactg

SEQ ID NO: 249848 - DNA, 201 bp, Homo sapiens
acacctcatttatacacacacggctttcctcctactcagtttactcttgcttgtgtgcctttgcacactctcttctccctttctaaaatgctccctcgtcmcattcacctagctatttcctactcagcctttccattctcaactcaagagtttagccgctctgtcaaactgcggggctcccatctcattgcccttaggcac

SEQ ID NO: 249849 - DNA, 201 bp, Homo sapiens
gcattctgtctccatgcactccaccatcctcactctggaacccattgcagaggagctcttcaagggggtgttagctttttcctcttttacctcgccttggrcaggctgagacacctcctgctcctcaaataggtgtggcccagtgcttctttaccttgtgtataagaatcaccaggggaggggagctttaagaatattcac

SEQ ID NO: 249850 - DNA, 201 bp, Homo sapiens
atgaggcaggaagttatataatgctaattgaagaattctgcattataagttcctttttggtcctcctctaatgaaattggattgtttctatttcccattargctttggtgaggagaagtttgtggtgattatctagatgctgagggattcagagagaagccccaaacatttctgtttaacttcatttttttagggaccagc

SEQ ID NO: 249851 - DNA, 201 bp, Homo sapiens
gcaatggttttccatcactaaaatataaaatagatactcttcagaatgtcatatgaggcgtttcatggtctggtccctacacctcatttatacacacacgkctttcctcctactcagtttactcttgcttgtgtgcctttgcacactctcttctccctttctaaaatgctccctcgtcccattcacctagctatttcctac

SEQ ID NO: 249852 - DNA, 201 bp, Homo sapiens
cagtagtatgtgaatcagggtaccttagatggaaacatctgtcaggagttctctgcctacacggagctctggcgcactcgcgcgctctctttttctcgtcyctctctctctctctctctttctctctctctctctctctctctctctctctctctctctctgtctcgtctctctctctctctctctgtctctctcaggtgt

SEQ ID NO: 249853 - DNA, 201 bp, Homo sapiens
ccaccagttgctggggacagaaataaggtccagactctttataagaagctggaaccccaaagggctacaccatcagggtagacatgaaacagcagctctcmcatggaaatgcagcccaggttcaagctgactgggtcaatcaaagaatctaaagtcttgaattggtttaaggactggtgcctctggatatctggcaaaatc

SEQ ID NO: 249854 - DNA, 201 bp, Homo sapiens
taaaatttcctttaattccctaatacagatccttcttgacttctgatggcgttgcattccaataaacccatcataagttgaaaatgtcatagattgggccrggcacggtagctcacgcctgtaatcctaacactttgggaggctgaggcgggcagattgcttgagctcaggagttcgagaccaacctcggtaacgtgaaac

SEQ ID NO: 249855 - DNA, 201 bp, Homo sapiens
ctcccactgaaacaactaaaaatatttggatttaaaaaaaatctcaaagcattaaagaactgacgggcattaccaggttaaaattggaattgataagacaytgtaggtttgaccaccagttgctggggacagaaataaggtccagactctttataagaagctggaaccccaaagggctacaccatcagggtagacatgaaa

SEQ ID NO: 249856 - DNA, 201 bp, Homo sapiens
atgctctacactgccacccgaaaaagatttctaagatacaaatcctagggactttccgttaatcgttatggtgggctattagattcaccaggaggaaactrctgaaaaccaaaggcagatacaccctcccactgaaacaactaaaaatatttggatttaaaaaaaatctcaaagcattaaagaactgacgggcattaccag

SEQ ID NO: 249857 - DNA, 201 bp, Homo sapiens
tgtgtttagcctatcagcctttgatgctcagcatttgccttgagacattgaaggccagagcaatttatgtagacatctgaattgactttttttttttttttgagtttaatgtttaataaggggactcagttgctttgggcatccaccaaagatacatttgtgaagatgatcaaacttttaagtcctcttaaaagatgtttt

SEQ ID NO: 249858 - DNA, 201 bp, Homo sapiens
tgccgggtagtgaagaacagtgatagctatgaagagcattaaacatgtcagacaaacttgtggaagctgaattcgattgcaaggctatactcttgttcacracatctagactttatgatccatgtaccataatcatgatgggagctaccatcttctgagtgcccgcagacaccaggcaaggggcttacccaggttagttct

SEQ ID NO: 249859 - DNA, 201 bp, Homo sapiens
attcttcttttctttcttagactattattttctgtattggcatgattatgtagcatagatgtttcctggcagctccaggtttatgtggtccttagtgcctrggatcccaggagagagaccctctttcctgaagttcatatcatttatcaatacaacaagttgtattgttcaactgaagcaaattcagcactatgcttgtat

SEQ ID NO: 249860 - DNA, 201 bp, Homo sapiens
ccagttttgccttctacatacctctctagccaggaccttccattcccttggccactagtctgatttagtgcagtgacctattaactggcctcctgcctccrgtctcacttttcctaaatctgttccctgttcagaaacctgtctaagcttcccaatactttaatcatgtcagccttttgccaccattctcctatagctccc

SEQ ID NO: 249861 - DNA, 201 bp, Homo sapiens
gtcttgtgaaatgttgctcttttttatttgactggtatttctgaagtgcttcctatgtagcagcggtagtatcaggaattaccaaaaacaactgttacttrgcaaccagtaggtatgctttacataaggagagtgtgtgtgtttagcctatcagcctttgatgctcagcatttgccttgagacattgaaggccagagcaat

SEQ ID NO: 249862 - DNA, 201 bp, Homo sapiens
ccagtcacgctgcttggcaggtcaccatccattcagtggtatgtgatgtggctgtgttagttataaagacctcgtagttttgggggtgcagttgccctgartacctgcctgattggcccttgtagtagaccctggcagacccaggccctagctttggggtgcctgctcctctgccctgctggcagttgtgcctcacttggt

SEQ ID NO: 249863 - DNA, 201 bp, Homo sapiens
atatattatatctctttgaggctaagaatccagggaagggaaagcagaaatggggttgctcaactgagaggttaaaaaaaagatgagggatgggccgggcrccatggctcacgcctgtaatcccagcactttgggaggctgagacaggcggatcacgaggtccggagattgagaccatcctggctaacatggtgaaactcc

SEQ ID NO: 249864 - DNA, 201 bp, Homo sapiens
ggtggcttatgcctgtaatcccagcactttggaaggcctaggcgggtggatcacttgaggccaggagttagagacctgcctgaccaacatggtgaaacctygtctctactaaaaaaataaaaacaaaaaaccccaaaattagctgagtgtggtggcttgtgccagtagtcccagctactcaggagggtaaagcaggagaat

SEQ ID NO: 249865 - DNA, 201 bp, Homo sapiens
gtacaaatctatatgacatttttcctgtttgacatctaaaatagtgaagttactagctgagggctttgccacttagagtttctttgcttctgcatttggtrttaggtttatatgaaacaccacagtttaagtagttactgtttcattcatgctcaagagtcttgtgaaatgttgctcttttttatttgactggtatttctg

SEQ ID NO: 249866 - DNA, 201 bp, Homo sapiens
aagtaatggcaagaaaaaaatttcaaaggtagttgtctgtaaaagctgttagcgaaggctggtaggaaaagttgttaccagagttatcaggtagtcattargtttcatacagatgttaaaagacatgacattctttagaaataccaaacaattgccaattatttgttactggtgtgggccatgagttctagaatttactat

SEQ ID NO: 249867 - DNA, 201 bp, Homo sapiens
taaagacataaacccacaaggacaaagagagtgggagaggagacaacagcaacaaaattttggaatctgggtagcagatggatgagtgtaactgacttagsagtcctgagaaagctgaatcctgagccagcaatagagaaagccaagaaacaacccagtttatgcagcagaaccctaaacaattcagaaattgacagtacc

SEQ ID NO: 249868 - DNA, 201 bp, Homo sapiens
cttactcttagaacaggttagtttgctaaacttaacaagagaaaatcttccattttttcctgcctagctactggactcattttgggaccttgaaacacacrtcattaaacttactagctggcctctagatgtgtgagagagagctacgctgtgggattgatttccttcggctgaagtgtctgccgcattcatgagcctgcc

SEQ ID NO: 249869 - DNA, 201 bp, Homo sapiens
atatcaaaattcatttaaaactataatttcattccaatttaataactttattaagcatctacagcattatacactttaaaggatataaaagaaaagtgcacacatgaaattattaggaaagcaatgaaatggacatttgtttaaatgcaaaatatgtggtacggatattaagtgctgtagtaggtcagagggtggagaaat

SEQ ID NO: 249870 - DNA, 201 bp, Homo sapiens
aaattgacagtaccagataattctagaaagtgggggaggggtgggggagagtgaggctaacaacagtattgaaagtttatttttaaaaattgcccctcctrtaacttagtggaagatcagaaatgtgttctctagacagggtaaagtaagaggtgtctgaactagaggacatcaaacatgcttgatggcagtgacaccttg

SEQ ID NO: 249871 - DNA, 201 bp, Homo sapiens
tcctccccacttcccagattcaactatcaagacagagtgttttaaaacaaaccacagacatgtcatttcgctcatacatattttagtatgaagctgaaaarattttggacattttcttatataccacagtgccattagcacacctaacagtgactactaatgccttggtgtcattctgaacccagtccgtaatagatttcc

SEQ ID NO: 249872 - DNA, 201 bp, Homo sapiens
gtttttagttagagaggtggggtggatggtcctgccattaatcaagaaaaatatgggaaaaggaacagatagtggtagatgggagagagtttttgaagtawtttcaggagatacagatagagatattcatttcatctttggaatagtaggaaaaaaaacaagtaatattttgggacaactgcaagtcatcatttgaaagta

SEQ ID NO: 249873 - DNA, 201 bp, Homo sapiens
aagtgtcatgagaaagctgattgtagaaaggtcagtggtgcatcgtcatgctggatgattggagcggtgaagatgaattagcaaggtagtgctataatcawggcacaaggtggtgaaaccacagaccaagaacagaggagagaaggatgtcagcaggggtttctgggcataaggaaaaagatgtctgtgcctgtcgtcggg

SEQ ID NO: 249874 - DNA, 201 bp, Homo sapiens
accaattattgcattaattcagcgtggcaataaaggttgtttgggtttatgtagtaacagtggaaatggcaagaagatccatttaaaggaaaggccactgrgctcttctgatggattgaatgtggggaatgagagggagagggtcaagggtagtgctgcggtttagggctggaggaactagatggaaggtgatgttatctg

SEQ ID NO: 249875 - DNA, 201 bp, Homo sapiens
ttttgccgacagccacccaggcttccgttaggaccctaatcgttaaaccatagatgagatagcagccccagctgacaaacatcttgattacagccttgagrtcaccactagagaacccagctaagccataccgagatactcgacccacagaagttgtaagataataaatgtgtcttgttttaaactgctaagtttgtggta

SEQ ID NO: 249876 - DNA, 201 bp, Homo sapiens
gtagactgtagttaatgcgataaagcaagaaaaaagacatgaggattgggaaagtaagacagtactcatcattttcagactagttgattgtatacatggaraatttaaaaggctgctacatacaaagtcagcctacaaaaattatttgcatttctatatatcaacaacaaagaaaaaatgttacccttatgttagcatgta

SEQ ID NO: 249877 - DNA, 201 bp, Homo sapiens
gggagagggcttctttgtggtaaaagatgatgtgaacaacctctagttccactctgctgcttgcttgccaggtaacttggacaaatcaattttcttcttakatcccaaggttttcatggggctggaggccattatccttcagcaaacttcacgtaagtgaggattatgctattttacaactttaaaaataggggcctgagt

SEQ ID NO: 249878 - DNA, 201 bp, Homo sapiens
gtgatttttacctttttctaatttgaaaggaaaatttttttcttttagcagagacctctaaattcattagggaaagaacaaccaaccagccatagtattayatgcttaaagtatgatttttgtcatagaaccagtaagttaaatggctttcctaaactcattcatttgagacttatttgacacctttttgaggtatgaaaa

SEQ ID NO: 249879 - DNA, 201 bp, Homo sapiens
atttgttgtaacctgacttctgtcccaaataggcttcatttattccaatttttgagcctttgctatgtactctgcattgtgctaggttttggggaatacaraggttctcaagacaccgtttatttcacccagaagccttcttcagatttgcccttagtgaggtctagtgccttttccccattcctcatccttcctgccttc

SEQ ID NO: 249880 - DNA, 201 bp, Homo sapiens
cccctttgtgatcccctgcagcttacagccactagatttacaaatggcttatgtctaatctcctcccctcctgcatttatttcgatacaatgaagttggcrtttctctgtccttctgctggagttaacccttcccctgggttctggatcacatcccttcctgtccagggacccctccctttcctaattgtgcccacttcaa

SEQ ID NO: 249881 - DNA, 201 bp, Homo sapiens
gacaatgtctggtaacagataaaaagtcagttcctaaatccaaagaaaatgagtaaattcttgaatttgagtttttgtttatacaacatctaaacttcatyttcaaggtacttctgttaagactatacagaatttagaaaatatgttggtgtcagttttattattatgttaaaagtagtttaaaagtatactttttaaaat

SEQ ID NO: 249882 - DNA, 201 bp, Homo sapiens
gcatgaagaccaagagggtgggggattattggggaccatagtagagtctgcttgtcacagatggttcctctatcagcctttacttatttcttccaaccaartgtgtgatcttttccttttgtgagtcttctttataacaacgtattttttccagtttacaattcatggctggtgtttttacaattgacttaaaaacttttt

SEQ ID NO: 249883 - DNA, 201 bp, Homo sapiens
ggtctcactgtcacccaggctggagtgcagtagcgtgactgcagctcactgcagcctcgatttcccaggctcaagtgatcctcccacctcagcctcccgartagctgagactacaggtgcgcactaccacgttcggctaatttttgtattttttatggagatgtggtttttaccatgttgtcaggctggtctctgactcct

SEQ ID NO: 249884 - DNA, 201 bp, Homo sapiens
atttcgttggttagaaacaagtcccaggtcccgcccacactcaggtaggggtgatcatacagggcatgaagaccaagagggtgggggattattggggaccrtagtagagtctgcttgtcacagatggttcctctatcagcctttacttatttcttccaaccaagtgtgtgatcttttccttttgtgagtcttctttataac

SEQ ID NO: 249885 - DNA, 201 bp, Homo sapiens
gagttttattctttcattttccttctatctagccacctgttaactggcatacagtaggcagggaatagatactttttgaacaatttcagtgtttccaaacwtcagaaaaaggataggattgtttattgtgatgtaaacttttacgactaggaagaccaaaaacacaggatgaattcactaaatttagtgatcttacaaagc

SEQ ID NO: 249886 - DNA, 201 bp, Homo sapiens
ctggtggcttaatcttggacttccgagcctccagaactggggagacagtctggacacagggaaaacctgagacacaggtttttatccattctttaattaartaattaaaagagatcaaatttgcatttatttctttaacttttactttttggttttccatttcatcctgtgaccttgttgatattttgaatgttggtttta

SEQ ID NO: 249887 - DNA, 201 bp, Homo sapiens
aaagcaccttaaaaagagtaaagcgtagcattttgttatgggaattttccaaaccattttttgaagcctgttacctcttgaactagcaagtgtcaaatgawtcttcctgcagaagttctcagaccacatggtgtcagtgatgagctttaatgactctctggctccccttgcccaccaggggcctcttccctgcctctccaa

SEQ ID NO: 249888 - DNA, 201 bp, Homo sapiens
cttgaagggcagccgcttaattataacatgtccttgacgtttgcgctttccacagtgatacactttatctcctttattgatcatagagagtttttttttttaataaacttttagatatgggggatacgcatgcaggttagtcacatgggtatattgcacccaggtattgagcatagaacccagtaggtagtttttcaaccc

SEQ ID NO: 249889 - DNA, 201 bp, Homo sapiens
gctttgtacgtggcactggcatgggtcctggagatacaaagatgaacacactttgactaccctcgatgaatttggagaccattgcagaaatcagatgtgtrgacagagagccacattgctgtgtgatatgttttaacagagatctgagcacagagatgaaggaggtgtatggagtgggagacaatggctctgcctaaggga

SEQ ID NO: 249890 - DNA, 201 bp, Homo sapiens
gcgcggtggctcacgcctgtaatcccagcactttgggaggccgaggcgggcggatcacgaggtcaggagatcgagaccatcccggctaaaacggtgaaacmccgtctctactaaaaatacaaaaaattagccgggcgtagtggcgggcgcctgtagtcccagctacttgggaggctgaggcaggagaatggcgtgaacccg

SEQ ID NO: 249891 - DNA, 201 bp, Homo sapiens
ctgcactttagactactgcacccatgactctgcagttcacccaggcctcattgcaccttttcttccaggtatgaatatgctctctgggccgaccctggtgyagtggggccaggatccaaacctgcctggctagctctgttcacctctccatcagggaagggggatccaacaaaatgtggcagcactcttagtaggacaaaa

SEQ ID NO: 249892 - DNA, 201 bp, Homo sapiens
gaggggagcgagaccagaattagagcctgttgctgtagagaggacgcctcccgaggctcgggtcacctgtggacgcgttctctagggtcttgatcgagatrttcaggactggcagggatggggagcctcgggaatcttgaagggcagccgcttaattataacatgtccttgacgtttgcgctttccacagtgatacacttt

SEQ ID NO: 249893 - DNA, 201 bp, Homo sapiens
catttcatcctgtgaccttgttgatattttgaatgttggttttatcatcttcagtattggttgtttcttatatatgttatttctacatttgacactttgcsttgggcacagtgccacttctgtgtgcctaagctggatttgtgtcctcatggtatttaggggcatagacatatttctgtaagcgtacacatccttattttg

SEQ ID NO: 249894 - DNA, 201 bp, Homo sapiens
acaggcgcgtaccaccacacccagctaacgtttgtatttttagtagagacagggtttcaccatgttggccaggatggtctcgatctcttgaccttgtgatmtgcccccctcggcctcccaaagtgtggaattacaggcgtgagccactgcgcccagccaggttatggttctttagttgattgtggtggccatgcaggagag

SEQ ID NO: 249895 - DNA, 201 bp, Homo sapiens
agaattcaggtcaggctgggactgagaggttctggggcaaccacagctgtgtacaagccctaaacttccagaaaggcttggacttcataacagactgttayggactaaatgtctgtgttctttcaaagttcatatgttgaaaccctaatcccagtgtgatggtatttggaggtgggggctttgggaagtacttgggtcatg

SEQ ID NO: 249896 - DNA, 201 bp, Homo sapiens
aaacaaaaagaacaacaacaacaacaacaacaaaaaccccacccaactcaaaacattaaagaatgaatatgccacccctgttcctgtaagtggaaccagcygtccacgcttcatagcttttgtctagtcccttgaacaaaagttcagctgcactgtgaagtcccacatctctgctcctcagctagctaaccctcatgtggc

SEQ ID NO: 249897 - DNA, 201 bp, Homo sapiens
ttccatttcatcctgtgaccttgttgatattttgaatgttggttttatcatcttcagtattggttgtttcttatatatgttatttctacatttgacacttygcgttgggcacagtgccacttctgtgtgcctaagctggatttgtgtcctcatggtatttaggggcatagacatatttctgtaagcgtacacatccttatt

SEQ ID NO: 249898 - DNA, 201 bp, Homo sapiens
tgagttgcttggttgtttgcttctttcactgtccttggtggcagtggaattgggtggggaggagacaatcctcagaacctgctcagggactggattgttarggtgtgggcgtggtgatgagggaaagtggagtcagggatgaccccatggtgtctgcttttgtgactgagtagatgttagtccagaaggctgggttagggg

SEQ ID NO: 249899 - DNA, 201 bp, Homo sapiens
gagtacctttcccagacccacatttagaaagatcacagcaaagtgtggagggccaggtgaggggggcacagaggcgaggtagggcagccaggtgtgggctraatagggcaatggccagagggaatgggaaggaagggcagagctttcagaggcttcatctgtaggatttggggattaattcacttctagtgacctaaaagg

SEQ ID NO: 249900 - DNA, 201 bp, Homo sapiens
gttttccatttcatcctgtgaccttgttgatattttgaatgttggttttatcatcttcagtattggttgtttcttatatatgttatttctacatttgacaytttgcgttgggcacagtgccacttctgtgtgcctaagctggatttgtgtcctcatggtatttaggggcatagacatatttctgtaagcgtacacatcctt

SEQ ID NO: 249901 - DNA, 201 bp, Homo sapiens
tttggacattttcttatataccacagtgccattagcacacctaacagtgactactaatgccttggtgtcattctgaacccagtccgtaatagatttccttsctttctcccatagattttcctgaattgggatcaaaacaagttatacacattatatttggtttttatggctcttaaatatcgggttaataaaaaaaaagca

SEQ ID NO: 249902 - DNA, 201 bp, Homo sapiens
ctttctggagcaggcatggtcagctatagaaagattgttccaacgttttcttaacgcctactaaatttttttttaaacactcacaagaaaatcttggacaygtatgcattcattaagctagtgctcaggcttttaggtcaataaacgctgaataatttatttttagcatatttctcacatgttggttgtgagagtcttatt

SEQ ID NO: 249903 - DNA, 201 bp, Homo sapiens
atagagtactaatggagaaaaagagattagatgtctactgttgctgcccagggatgataatgatgtcattaatctggatgtagtatgcaggtggaaaatayagtttgaggagaataataaattgaattagaaacatgtggcattcaaagtgcttgccggtattattcagcaggatgttggaaagttaaagaagagctttga

SEQ ID NO: 249904 - DNA, 201 bp, Homo sapiens
aaaagctattgaagagtctagccaagcctattggctaaaaactgggtcgtgtggctctgaatggggagagggaactgacagctgccctactctggctatasaatgtccgccattaaggacagatcttatttaacattttacaattgaaaactgtccctggttttcagataatgcttaaaacaaacaaaaaacaaacaaaaa

SEQ ID NO: 249905 - DNA, 201 bp, Homo sapiens
ggtgatatgactatcattatctacatttcacaggcaaggaaaacagagaggcagagaggttgagtaacttgtccaaggtcacacacagtgagtaactggtwgagttggatttgaacccagcagtttggctccctctgtcctaagtgctatgctgaattgctgctgtattggatttgcaacacaagaaatccctttttgtta

SEQ ID NO: 249906 - DNA, 201 bp, Homo sapiens
ggtggctcatacctttaatctcagcactttgggaggctgaggtgggcagatcacctgaggtcaggagttcaagaccagcttggccaacatggtgaaacccygtctctactaaaaatacaaaaattagccaggcatggtggtgggcacctgtagtcccagctacttgggaggctgaggcaggagaattgcttgaacccagga

SEQ ID NO: 249907 - DNA, 201 bp, Homo sapiens
tataagtggattgtgtgcaatggtgcttcagtctagatattcatgccttaatcttactgtgttcgtctctccctttttcaggggaagcctgagctttgctyagtgatgatggccctagtgtgaggactggggcttgtggagtagcctcttgtttgctctagccaccccactgcctctgtcctctgcagttactaggacctt

SEQ ID NO: 249908 - DNA, 201 bp, Homo sapiens
actacttccggtcttacttagtacagtaggtaggccttgaattacagtgctgtagtacataattatgtactcctttttcagtagttttttcccagtaataygccttcagtcagtgttggcactgtatttaatttgacattctgaacagtggtattccagagtatgtgcagtaaactcacctgcctacagaagagtgaccca

SEQ ID NO: 249909 - DNA, 201 bp, Homo sapiens
tctggctattatgctgttgtgaacattcatgcacaagattttatataagcacatgttttcacttcttttgagtatttgtctaggagtgaagttattgggtsatgtggtgactccatgtttaacaaaaatgatttttaaaatatagatcactaaaagatactgtccccaaacttttctgaccccaaaggaattagtcttatg

SEQ ID NO: 249910 - DNA, 201 bp, Homo sapiens
ttcactcatttttttctggaaggggattacctgttacattatgtttaatacatgtttgtcacagctttctgttggagacccacttttagtagttttcagcrtgttttgaagtctttttgacaagtaaatttacagaatattgcaaagttatttcaatataaagagtttttgtatcttgaaacacttcaaagtgcaaagcac

SEQ ID NO: 249911 - DNA, 201 bp, Homo sapiens
tgcccctcttcccttctcagtgctagctccctgtccccttgtgattcccttgcattcagtgagggccctttcatgcccaaacgtgggcatcctatcccatstatctaagctatgtccatacccattagaaatacctgccattgagtggaggcacccccattgagggggtgcctccggtggtggggaagtgcctgtatatgt

SEQ ID NO: 249912 - DNA, 201 bp, Homo sapiens
gttctgtaacccacctccttcccattttggggagatcattttatttatttattattattatttttaagatggggtcttgctgtattgtccaggctggtctygaaccctaggttcaaggtgtcctcctgccttggcttcccaaaatgctgggattacaggcatgagccaccatgcccagccttggagatcatcttaatatta

SEQ ID NO: 249913 - DNA, 201 bp, Homo sapiens
gtacccttcacctagttttttcttgtgtaactaaggtacagtatcaccatcaggtaactgcacataccttattcacattctaccattttcacttgtactcygtattcagattttaccagttttgcttttactcatttgtgtgtgtgttctgtcacatctgtagattgtgtgaccaccaccacagtcaagataaagaagagt

SEQ ID NO: 249914 - DNA, 201 bp, Homo sapiens
tcttgagttatttttatcctactaagtgttctgtaacccacctccttcccattttggggagatcattttatttatttattattattatttttaagatggggtcttgctgtattgtccaggctggtctcgaaccctaggttcaaggtgtcctcctgccttggcttcccaaaatgctgggattacaggcatgagccaccatgc

SEQ ID NO: 249915 - DNA, 201 bp, Homo sapiens
agtgatgggagggcaagatcttcggagcctccatcaagagtagtatggtaggtaaggtatatccactaacatgatcagattttcccaagattgttatatamacagcctatttttaacagtcatcttttttcttcattactgccagctctgcatcaaatacttcaggttcttgcctgctttaaacatgccctcagatctttg

SEQ ID NO: 249916 - DNA, 201 bp, Homo sapiens
gtcatgggtgcagtgtaacttgttggggcttcagaggtttcaagtaattataacgaattctttgttttagactctagatccctcactgtaaccccttcacscccttctccagttaggtctaacaattgaaggatatattgttcttgtagttggaaaaaacccactgactagtttattgaaaagagatagattttagaatat

SEQ ID NO: 249917 - DNA, 201 bp, Homo sapiens
ttgagggtctagccaggctgcaaaggcaagcagactgctggtacaagcatgggagggatgagaaatggcagattgttccagggtgtgtggtgtagggtgcrgagagagagaggagctagaggagacacaggctaggccttggagtctgtaggaatgaaccagggcagctatggaatgattttaaatatgtaagtgacatga

SEQ ID NO: 249918 - DNA, 201 bp, Homo sapiens
attgtcctatcagcatttcatgtctttgctatatagttctaaaaatgcttatatactacaaatatacaagcatttcatattatatacacacatatagtttrgtgttcatagtatatatagacacatagtttagtattgtaagctttttacgtaccataaacatctcagtttattataattgtttcaggcacatggaatgca

SEQ ID NO: 249919 - DNA, 201 bp, Homo sapiens
aggggacacattcaaaccatattacccagtctcactggatgaatgctatctaagatgagctggacactgtcacaacacttggtgcgtggtcatttcttttycttgaaattatgatgcactatcttcagtctgtaagcaccatagtctcaggtcctttgggataagatatggtgtcttttgaaagggaggaggttgagcctg

SEQ ID NO: 249920 - DNA, 201 bp, Homo sapiens
attttaaaaggaagggaagaaaaacctaatgcacatcaaacagttttgaagtgaccagtttcttctctagatcctggtaggtttgaattgctgtttgcaaytgatctaacttactacacagcgtagacgagatttccagctttctgagtgacagattgctacttcacaactctggaaagatcaggaaatgtccctctgagg

SEQ ID NO: 249921 - DNA, 201 bp, Homo sapiens
ggggtttacagacggcgctgcagggaggcatcatccaatgggagcggccagcctcgctatagactttccaacactaatgaatcgggaactccatgctgaayagggtttagtttgatgggtccctgtgccagcagaaggatgtatttttcttgaaagaccaaggtgccagaaatctccatgattacgttactggagaaaggt

SEQ ID NO: 249922 - DNA, 201 bp, Homo sapiens
ctgcttcacaaagcatcattctgacctgttaaccttggtcctctgtttggctttgtctgaagaaggaattctttcctagcggcctggatcctcacgcaaayagacctccagcgggtcctcccactggtgttttgggcatgcctaggtatgccggactcctgggatgaacataataacttaatcagtcaagctgggactcac

SEQ ID NO: 249923 - DNA, 201 bp, Homo sapiens
atactcaggaacctgagaatcagctccacgtgggatgttttatgtcttcattctcacttctctcttcctgagattctgaggctgtttgcctgtgaatgatrtggtttggctctgtgttcccacccaaatctcattttgaattgtaattgccatgtgtcgagggagggagttgattggatcatgggggcggtttcccccatt

SEQ ID NO: 249924 - DNA, 201 bp, Homo sapiens
ctgaaactgggtgatttataaagaatagacatttattttctcatagttctggaggctgggaagtcaaagatcaaggcactggcaggttcaactgcctggtraaggctgcattctccagagggaaggaatgctgtgtcctcacatggcagaaagtggaacagcaagtgggcctaccactgtgtgaagcctcttttataaggg

SEQ ID NO: 249925 - DNA, 201 bp, Homo sapiens
catggcccactaactgggcaggtcctgatcgggaagctgctgaggtaaaggtgctcctgttctgctaaaggagaccctgggatcagggacgagctcttccytgctgggctcacccagtaatacaggtcgtgtgggacagtggtgagccgaactctcctgccatagacgtgctggtgagcaatggagtcaccttcagaagag

SEQ ID NO: 249926 - DNA, 201 bp, Homo sapiens
gtggagtggtggccagcaaggaaggaggaacagcagcagggaatgatgtgccagaaaccaagttgaggaactcctgacctcgtgatccgcctgcctcagcytcccaaaatgctgggattacaggtgtgagtcactgctcccagacaagtagagttgttatttattgcatgtaatggatgctttagtgtatgggggcttaat

SEQ ID NO: 249927 - DNA, 201 bp, Homo sapiens
tctctgagtgggtggagagcctgtcgcttgggctacttctgtttcccttccctttgctgagtgtttgaccagggctgtgtagctgtgggaggcttccacarggtctgcagcttgggtaggaccactgctgagggcaggaccacaagctttatttagaaagcagatagataggtaacagaattagtatattctatatgcaag

SEQ ID NO: 249928 - DNA, 201 bp, Homo sapiens
tactaacacctttgccatgcaagtcttggaagtccagccaggcctgcatgaatatgcttagacagttgcaaagtggttccactccttttatcttagggtcyacacctattcccactatgcctctgatagcaggaagaagttagaatggtcttcaccctttttccatcttcattagccaacaccttaagattaaggtattat

SEQ ID NO: 249929 - DNA, 201 bp, Homo sapiens
ggcccgtgttcttgcctctctcatgtctgagatcgcagtggcaccatcttggctcactgcaacctccgcctcctgggttcaagcgattctcctgcctcagyctcccgagtagctgggattacaagtgcccgccaccacgcccagctaatttttgtatttttagtagagatggggtttcaccatgttggccaggctgatctt

SEQ ID NO: 249930 - DNA, 201 bp, Homo sapiens
ctgagtagctgggaccacaggtgcatgcctgtgctgatttttaaatgttttgtagagacggaggtctcgctctgttgcccaggctgctctcaaactcatakcctccagcagtccttccatctcagctcccaaagtgctgtgattacagacgtgagccacctcacccagccccattttccttcttaatggatcctggccctt

SEQ ID NO: 249931 - DNA, 201 bp, Homo sapiens
ggccctggtcgggtcctacaagatcatgtactcttgttgacatgtgatactctacccctaatggctcttagtggggcactttatgttatttacaaatactrttttataatactgaatgaaaatggtaaattttaaagggatggaggaagatttaccaagcaaatggaaaacagaagaaaccaggattgtaatcccagtttc

SEQ ID NO: 249932 - DNA, 201 bp, Homo sapiens
atattgagtcccaatcagcttgttccagcatgtcatgttttgaattctgatctcaactcattatcaggaataacctctggccttactgtataatacatcargaacatcattgagtttccgctatagctaggcactgttattatctcttttttacataggaggcacctaaggtaaaagagattacatactaacaggaagtaa

SEQ ID NO: 249933 - DNA, 201 bp, Homo sapiens
acctaggcagcttgggtttcagaacatttttctaacattacaaaggacttattttatagaatatactctgccccactctgcctcttccagctagcaagaarcatcagccttgctaacacttttagcacaaaattgttgggatggaaacctaaatgaaaggaaataatgtctcacaaatgttcatcctgttatctggaaaca

SEQ ID NO: 249934 - DNA, 201 bp, Homo sapiens
aaatgaacattggtgtacaactatccgtttgagtcactgttttcaattctttttatacctaagtcatataggagtagaattgctgggtcatagggtaattytgtgtttagctttatgaggattgtgaggtttttaaaagagggatttttgttggttattaaatacttggttattaggggggttaacagaaactgaaaatgt

SEQ ID NO: 249935 - DNA, 201 bp, Homo sapiens
gcaagccacagagagagtgtttcccagatactgctcaggtaaagaaattggaccttattgttgtagaaattactcaggttttagagtgatcacatttggaratattgagtcccaatcagcttgttccagcatgtcatgttttgaattctgatctcaactcattatcaggaataacctctggccttactgtataatacatca

SEQ ID NO: 249936 - DNA, 201 bp, Homo sapiens
acttggacccgggaggcggaggttgcagtgagcccagatcgtgccactgcactccaacctggtgacagagtgacagagtgacagagcgagactctgtctcaaaaaaaaaaaaaaaaaaaaaaggaaagaggaaagacatgatcttctttatgaagtgttttgtttctgaagctctccctgctgtttctactttttccgtga

SEQ ID NO: 249937 - DNA, 201 bp, Homo sapiens
aactgtgaaaggagagcccgaaggagacttagacaggagccttttgaggctttcattttacagatgaagtcctgaataggggccctggactaaataatagraagtggctataagggtccccaacccatttttaataggataatgctagttcttatattgatcttaatttttgttgttgttttgggttttttttctttattt

SEQ ID NO: 249938 - DNA, 201 bp, Homo sapiens
acccgccttgacttcccaaagtgctgggattgcaggcatgagccaccgtgcttggccaaaattcactagattttgaaagcagttcttgacccatggcttaygtgaaagcaaatgcccgatcagggtgcagtggttgccctgtgctggagcattcactagggaaaaagaccgcagaccctgggaggctgcagaccctgtgac

SEQ ID NO: 249939 - DNA, 201 bp, Homo sapiens
gagtgaaatttgcttaggcctagggattttgtgaagaaaggagcttattggtgctcctgaagactgtccctcccaagtcttgccttgacaggagctagatktggggtcctagaatgatcataagcactcgttagcccagcaagcttgcagcatcacaaatgattattcacagtgtatgttaccttgcccctgtgaggactt

SEQ ID NO: 249940 - DNA, 201 bp, Homo sapiens
aggactgagagtttttggcagaaccagggatagaatccagatctcttgacttacagcttaatatccttttcctcagattttcaaagtggagatcatgtccscaaatggttaggaagcattgatcctgacagttctgcctggagcagttcaaggtacccagtggcttctcatctaccattcatcctgccctgtgttagattc

SEQ ID NO: 249941 - DNA, 201 bp, Homo sapiens
taagcccctgactggggctgctgcctttctttcagagatgccctatccagagagaaggactctagagaggtagtctggctacaggggctttgcggtgctgyggtgggctccgcccagcttgaacttcctggtggctttgtttacactgtgaggggaaaaccgcctacttaagcctcagtaatggcagacgcccctccccac

SEQ ID NO: 249942 - DNA, 201 bp, Homo sapiens
actttccaatctctcattcacaataaaagataaaacgcccccttacaatggtaactttttccttgttcttttctgcctgtcttctgtgctggaaatgcatrgactccagagtcttcctgcaaccagcatctcctctcatgtcctggagcattgctgctcacaggagagaagctgccttttatgtgtaactgagctctctgc

SEQ ID NO: 249943 - DNA, 201 bp, Homo sapiens
tagtaactaagtccttagaccttagaaccttagaatcttagggccaaagatcagaataataaaagaagggtctcacaattgattagctatcctcagtttgygtctcctgtgacatccctgctgtgtgctgtacaggattagtcaggacctggagtgtactatggaagtcgcctatttcagccatttacttaggtcaaaaac

SEQ ID NO: 249944 - DNA, 201 bp, Homo sapiens
gccccattgtatgtgatgttcccctcactgtgcccatatgttctcattgttcacctcccacttatgagtgagaacatgtggtgtctggttttctgttcctrtgttagtttgctgagaatgatggtttccagcttcatccatgtccctgcaaaggacataaactcattcttttttatggctgcatagtattccatggtgtat

SEQ ID NO: 249945 - DNA, 201 bp, Homo sapiens
attttgtttatccatccatgttgatgaacacttgaattatttctacctttggctattgaatagtgaataatgctgaaatgaacattggtgtacaactatcygtttgagtcactgttttcaattctttttatacctaagtcatataggagtagaattgctgggtcatagggtaattctgtgtttagctttatgaggattgtg

SEQ ID NO: 249946 - DNA, 201 bp, Homo sapiens
gaaggacacaacatttgctcagttaatgcctctcaactgtcttctctgggagataaatataatgtaattgcaaagtttaaagtaattttagaaaataagcmaattaagctttaaaagtaaaagaaaacctaaacagttgaaacctaaacctaaattttctgcctattggcccaagcattcatgttattttaggtgcgaaac

SEQ ID NO: 249947 - DNA, 201 bp, Homo sapiens
tgggtgccttggcagataaaaatagttggtctgtgtttttataaatcagggatttagtggcagaagaaaatgtttttaatatgagagtattttgggtttcrgtctccatctatgtctgttaattggaaaggaagatatggttttagttttgatggttttaaataaaagtaaggatcaggcattggaatgatgtgtggtgac

SEQ ID NO: 249948 - DNA, 201 bp, Homo sapiens
gtgctgggattacagatgtgagccaccatgcccagccacacattttgtttatccatccatgttgatgaacacttgaattatttctacctttggctattgaatagtgaataatgctgaaatgaacattggtgtacaactatccgtttgagtcactgttttcaattctttttatacctaagtcatataggagtagaattgctg

SEQ ID NO: 249949 - DNA, 201 bp, Homo sapiens
tctgagtgagtgagtgaggatgaaagtgtctgtatcttgtgttcattgtctggagttcacggtggtcctaagtcagcaaggtcggtagagtgtgaagatcrcgtgatgaatctcatattacatctctttccttctcttctttgccctctacttaggtctccataaaaacaaccacaatttagtctctctgccactttcttg

SEQ ID NO: 249950 - DNA, 201 bp, Homo sapiens
actacaggtggcaccaccacacccagctaatttttgtattttttgtagagatggggtttcactatgttgcccaggttggtctcaaactcttgagatcaagyggtccgcctgccctggccccccaaagtgctgggattacagatgtgagccaccatgcccagccacacattttgtttatccatccatgttgatgaacacttg

SEQ ID NO: 249951 - DNA, 201 bp, Homo sapiens
ttagagagctgaagcccctaaaggttaagtgagttgcttatatgcaagaaattcaaattgccctgtgttcactttgccttcatttacaccatgctgacttgagagagaaaaacattttccttttaagtggaaagaaaaccctccgaagtcctaattaggttccagttaattaaggtttgaaaataagggctttgcaccctt

SEQ ID NO: 249952 - DNA, 201 bp, Homo sapiens
gaggggatggagtaaatgttgtctaatgttgctcacattctaaagtttttagagagacaaaaatagagatttgtttaaactatttaggtttgctcttactsactctaaaaatggttgtgaatttacacaatgtcatttgctatgctaaaatatctccctaggtaaagaggtgaagaacagtgaattagtcagcaggtataa

SEQ ID NO: 249953 - DNA, 201 bp, Homo sapiens
acctctgcctcctgggctcaagccatcctcccacctaagcctcctggagtagctgggactacaggtggcaccaccacacccagctaatttttgtattttttgtagagatggggtttcactatgttgcccaggttggtctcaaactcttgagatcaagtggtccgcctgccctggccccccaaagtgctgggattacagatg

SEQ ID NO: 249954 - DNA, 201 bp, Homo sapiens
tagagagctgaagcccctaaaggttaagtgagttgcttatatgcaagaaattcaaattgccctgtgttcactttgccttcatttacaccatgctgacttgagagagaaaaacattttccttttaagtggaaagaaaaccctccgaagtcctaattaggttccagttaattaaggtttgaaaataagggctttgcacccttg

SEQ ID NO: 249955 - DNA, 201 bp, Homo sapiens
tgctgcttcctctcttccctgataacacagtatagaatttccctaagttaaatccctattgggttggctcctagcaagtgtgggacctaggacagaagtasaaaagaaggcacacataccttaaatcaaatattgaaaagttagacatcaaaaccaccatcaagtaaaatatattattctatatattccatgtaggaatag

SEQ ID NO: 249956 - DNA, 201 bp, Homo sapiens
actgtttcagctttttagtaaatttaaaaatctttaaaataaaacattgggtgaaagagaaaaattgctatgttctacagttcggtgtggatttcaagagstggcattgctcatcccatctttggccctgaagtaactctaaagcataaaataataattgcttattcaatacaaatatagtcaggactgctgttttcagct

SEQ ID NO: 249957 - DNA, 201 bp, Homo sapiens
cagattcaagattcttataagactttgctctggataaaaatgtgagtagttgccaccattcttttcctctaccccatggctgccatttttcaagagtattrattcttcctttaagggagggtgaaggtaccaaagtggtctctccagcctttcagggcagaagctgtattccctggaggctttgtggtgtgaacagcacct

SEQ ID NO: 249958 - DNA, 201 bp, Homo sapiens
tgcttgttcacaccaaggtgccagtctaagctttctgtttttgatagaaccctctatttcagatatcaacataaattgtgtttcctgcatttaatgaatakttcttatacatctaacttgttttctcaagtgacctgtttaattttaaaactttttattggagaataacatacgtggaaaaatcgtaaatatatagctaga

SEQ ID NO: 249959 - DNA, 201 bp, Homo sapiens
ggtaagtatactttaagatcattctaattgatctggaatagggctaagcattggtattttgaaagagctctttagagattcaaggattctgctacatactyagcattgctgctgtagaatcagccctaggcttgtcctcccaactattacattctttctcccctaataaatagcaatatatacaatacaggttaaacattc

SEQ ID NO: 249960 - DNA, 201 bp, Homo sapiens
agtagagtacagttgcagatacttcacgcagaataagaagccgctggggtttgttctgtttctgcccgtaaagaaacatagtttgctgaatgtccctcaattacagcatggccaccctttgcctatcacttctcagttacctagcatggggttacagtgttatccatgctcaacactgcaagccaaagtgggccatagtaa

SEQ ID NO: 249961 - DNA, 201 bp, Homo sapiens
ctactcttgactggtgctccctcccttttcttgcacagaaaatacacttccacgcatttatccagagcttttccattctcctcaggccctcaaactccacytagcctcctttgtactttgcctcatgctcaactacatagattggggttctgtgatagtcatgctctcagcttccctcttcttcccttcagggtctcctgc

SEQ ID NO: 249962 - DNA, 201 bp, Homo sapiens
attgtggaaaggtcttggaactgggagaaaaaaaaggcctttatatagtgaggcacaatccctaggtaatcttgtttgtaaagtcaaggtttaaatttgargactagcatataggggcatctaaaatcctaatagttgccactttcccactctacgccaagctctgttgttccttacctttgcttgttcacaccaaggtgc

SEQ ID NO: 249963 - DNA, 201 bp, Homo sapiens
aggcaggagaatcacttgaacccgggaggcagaggttgcagtgagccaagattcataccactgcactccagcctgggtgatagagtgaaaaaaaaaaaaaagatataccttccatttaaaaatctgtgtctgtaaattttgatgtatttgtatttcttacattttgatttatttgtatttcctacagtcttgtcaattgta

SEQ ID NO: 249964 - DNA, 201 bp, Homo sapiens
tactaggtaggatagatggtcaggacccacagtgttctaagacccaaatcctatgctagaccagacattcctccctatgaagtttacaaaagaaatatacrcagaggacaaagcaaggcggaggaacaattctttttttattaactgaagcttccatctaagccagaatgattgtagtgtacactcctacttgcaatgtat

SEQ ID NO: 249965 - DNA, 201 bp, Homo sapiens
attacaagcgtgagccactgcacccagcgccttggggtagttttcttttagttaaatctgcttggtgttctataaccttcttgtacttggatattaatgtytttctctaggtttggggaattgtctcttattatttcttggattaaattttctatccatatgtctttctctacctcctctttaaagccaataactcgtagg

SEQ ID NO: 249966 - DNA, 201 bp, Homo sapiens
aaccgtagtgacaggacccagggtccttcaagctgcggtggggcaagcgctcgggacagtggtgagggagcagctcagccccaggtggtgcctggcaaccygccccgggacgtcccacccagggcagcagtagagtgacatggatagaaagctgaattccccagaagagcctggaggacattgaagtacttcgcatagagc

SEQ ID NO: 249967 - DNA, 201 bp, Homo sapiens
ttgcctccgcttccgatgcccccacctatccttaacctggtgcttcccaggttttttcatgtcatgtcacacacagaagatgttgctgtttgagtagcacyggggacgtgtgcatgaggctgatgggaggccgaagctctggctgccctgggagtaagaagagctagagccctcctcacagcgtctccagaacccatttgc

SEQ ID NO: 249968 - DNA, 201 bp, Homo sapiens
ttgctgtttgagtagcaccggggacgtgtgcatgaggctgatgggaggccgaagctctggctgccctgggagtaagaagagctagagccctcctcacagcrtctccagaacccatttgcagtacatgccttaaacctttgcagtgtgactctgcccctgtcctatattttcctaaaatagccttcataaacaccaccagcc

SEQ ID NO: 249969 - DNA, 201 bp, Homo sapiens
ccaacagtgccaagattgagaagcctgttctagacttctgtctctacatatgtgccccaaatggaaaagtcggaatgggtttcctctttctagcctcatcytgcttctccacctgtgttcactctttttgtcagtggccccacctcccccttctccctcactccacatccgagctgttcccaagcctgcagagtccctgtc

SEQ ID NO: 249970 - DNA, 201 bp, Homo sapiens
acaagcatgctgggtggctgagcagccagttaccaaaatacagttgatagaacgaactgttaatgcagcccagaggagaacacaagaatgcatacccagcmaacttgatgtagtctgtcttagctcaggctcctatagtaacatgccatagcttaaacaacagagatttattttctcccagttttggaggccagaatccca

SEQ ID NO: 249971 - DNA, 201 bp, Homo sapiens
ccgtcagacggggctggctatgggaggcaaccaaagacatcccgcacctgccctgggagcctttccctcctccagggctcagccacctcaggcggccttcmgtctgtgtgtcctgccacccccgagatgtcccagaggccacggtcaccccatctgttcctgtccccagaaccttctcctggagccaagtatctgcaggga

SEQ ID NO: 249972 - DNA, 201 bp, Homo sapiens
ttgagcttagttaatcattatcttctccatcagtgtgtctcagggtcttgaatatagtccatactcaataattaattgttgaattaaggactgaatgatcrtttgtagtagtctatttgagtgttcatgatattgtaaactgtggcatggacatttgtaatttaaacatggtacagtgcagaaggaaattattttctgctt

SEQ ID NO: 249973 - DNA, 201 bp, Homo sapiens
ggatagctcagctagtagaacagcagcaagcagaagaaggcttggtgtttctgagaaatgagaaggaagcctgttggaacattgtgagcaaagggagttayattatgggacaagtggagagttaggcagcagccaagtcatgtagggtctctaggctatgctggagaattggattttgttcaaagagcagcaggaagtcac

SEQ ID NO: 249974 - DNA, 201 bp, Homo sapiens
gtataccagtgagcaagttaggcaagtcactggggaggtaaggaaaaacaactaaagaaaaagagaagaaattatagactgatcattgctaataaagaaaygggaagggtgagagagaataattagagagagcctctttagtagggtcgttagggaaagcctctgtgagatgatctgtgggttatctgagatgagaatgaa

SEQ ID NO: 249975 - DNA, 201 bp, Homo sapiens
ccaggaacagttatggttagaataagtgtgcagcatgggtgcctttgacatggaggtagacaagattgccttgctgtacttcagcttgcagcccagtggtrggaggcagtcatgtgaacagatgatttggggataaaatggcaagtgctcagataaaagggtgaccagggtatatggcaaaatattggggggaaatgggga

SEQ ID NO: 249976 - DNA, 201 bp, Homo sapiens
ggaccagtgtgagctactacaatagaagtgagaaattgggtttggatatatgaaacattgaatagttcagtttttctggagcatgtggatgctgaacgacrgagaaaaatggatgaggttggaaaggaagcagtaaacaacaatagacagtatttgttgagtgctttatactttacaaactatgtttacaagctagttcag

SEQ ID NO: 249977 - DNA, 201 bp, Homo sapiens
tttgagaggagggaaccactatttcccattaggattgtctagagatgctttattggaagtgacatgtttgagccaggccatggattggtgcagtttgagtragtgaagataagagagagctttacaaatgtagggaccagtgtgagctactacaatagaagtgagaaattgggtttggatatatgaaacattgaatagttc

SEQ ID NO: 249978 - DNA, 201 bp, Homo sapiens
acttctttacatttcctaaaagttgccctaacccagattttgtcagggtaagagtgcccaggacttctacagggataataggccttcacaatgatgtcacrgggaagggaatgttgcttgttcgttccttgtcctatgccctcctctgtatctgcgtaccctttcttggcaatcttatccattcttgaacactccgtgtta

SEQ ID NO: 249979 - DNA, 201 bp, Homo sapiens
tatttaaggtaagagtagtttacacaccaaagttacagtgttataatatttcagtgtttttctgtgtacctactattatcagtgagttttgtaccttcagrtgattttttattgctcattaatgttctgttctttctaattgaagtactccctttagcgtttcttctaggacaagtctggtgttgatgaagtccttcagct

SEQ ID NO: 249980 - DNA, 201 bp, Homo sapiens
gcttagtgttctcattgcttgttcatgaaaacaaactcatccattcatttatggagcagcttttgagcacctattctatcctaggtgctgtgggagctgcyagagttacaatgacaaacccaatcaaacattccttgtctccctgagctaaagagacaagttaggtgttactcacacaaactgggataactgctgtgaagg

SEQ ID NO: 249981 - DNA, 201 bp, Homo sapiens
tttctctggtaatatgatataattcttgctttttaatttttgtgtatttgttgtatgttttttgatttgaggttacaatcagtattacagatgctatcctwtaacccattatttgaaactgataacagcttactgtttttataaataaataagcaaaaagaaaactaataaaaactctacactgtaacttcatcccctcac

SEQ ID NO: 249982 - DNA, 201 bp, Homo sapiens
gttgcccaggctggagagcaatggcacaatctcagctcactgcaacctctgcctcccaggttcaagcagttctccaccttagcctcctaagtagctgggaktacaggcgtgcaccaccacgcacactaattttgtgtttttttagtagagacagggtttctctatgttggtcaggctggtctcgaactcccgaacacaggt

SEQ ID NO: 249983 - DNA, 201 bp, Homo sapiens
aattctgagttatttaattttatttataactattgtaaatgggattactttcttgctttctttttcagattgtttgctgttagcatatagaaatgctactsatttttgtatgttgattttatatcctaaaagtttactgaattttcagttctaatagttttttggtgaagtctttagggttttccaaatataagatcatac

SEQ ID NO: 249984 - DNA, 201 bp, Homo sapiens
gcaagtgcctgtcattgcgttaagagaaacatctcagcatctcagacattcatacagtagtttctttgaggacgactacacaggtctgcattatccccagyccctgagagagagtgggccaaagacctgggccccttttagagatccactccccaatccccctttgagattgaacttttaccactttacaagcagtagctt

SEQ ID NO: 249985 - DNA, 201 bp, Homo sapiens
cttgactgaagaggctactacttcctgtgtcaggtactgctatgggccccaccaggtatcactgccttcagggtacccaggttccttttgtttggggacaygtttaggtaactagtggtttccctgtttagagctcagccagttccttttggatgctattccttgacattttattcttgcgatttttctactttcttttct

SEQ ID NO: 249986 - DNA, 201 bp, Homo sapiens
gttttctttaggtagttaaaccagagagcaatgacaaagaaacagaagctgcgtatgaatcagatatccccgaggagctctgtggacaccatctcccgcarcagtccctgaaaagctataatgacagtcctgatgtcattgtagaggctcagtttgatggcagcgactcagaagatggacatggcatcacacaaaatgtgc

SEQ ID NO: 249987 - DNA, 201 bp, Homo sapiens
attttattataaaagtaatacatatttattttataaaaatttagaaattgaccaaaagcagccattgttcacctatcactgagtaataacatttttctatrtatcctaaggcgtgtacgtgtacatttttagagcttttgactttgagattacagtcacacattgcttaatgacagggacacattcagagaaatatgtcgt

SEQ ID NO: 249988 - DNA, 201 bp, Homo sapiens
agtatggcgattcctcaaagacctagagccagaaataccatttgacccagcaatctcattacttgatatatacccaaaggaatataaatcattctgttatraagacacatgcatgcgtatgttcattggagcactattcacaatagcaaagatatggaatcaacctaaatgcccatcagtgacagtctggataaagaaaat

SEQ ID NO: 249989 - DNA, 201 bp, Homo sapiens
tcctcatcaatctatagtggtggctcacacgccttagtgtgcactggaatcacctggaaggctcgtgaagctacagagtactggcccgcaaccccagaggmtccgagtctgtaggtcatggacggtgccttttattttgcatttctaagagctcacaggtcatgtctatgctgctggtaaggaagctctgttataaggaaa

SEQ ID NO: 249990 - DNA, 201 bp, Homo sapiens
tttgttttcatttatatctaaatattttaaaatttcctttgagatttcttctttgacgtattttttatttaggagtaggttgtttaatttctacatacttrtgaatttctctaatttctttatgctattaatttctaattccattctattttggtcagagaacatactttgcatgattttagtccttgtatatttattgaa

SEQ ID NO: 249991 - DNA, 201 bp, Homo sapiens
gaggcctccccagccatgtggaactgtgagtccattaaacctctttcctttataaattacccagtctcaggtatgtatttattagcagtgtgagaacagamtaatacagtaggcattcaataaatgtgagtcctccatttagtaaacatgactgctcttctgttccagtcctctctctcccctaccctatcaccacctctg

SEQ ID NO: 249992 - DNA, 201 bp, Homo sapiens
aaagcctgtggttaatttccagagttacactaaatttgattttgacagttttgtccagtgttgttgttacttatatgaagtagtagcttttcagaggaggyctctactttgcgagtcccactgatgtgactctcaagtcttttcacttttattgcttgagttggagataaaagaagacagtgtcctgcagaaaagctacaa

SEQ ID NO: 249993 - DNA, 201 bp, Homo sapiens
atatacttctagaattcatcataaaaatcaggaaacaaattgattttttaaaggttcaaatgtatttaggaatgggaaatcaatatatggctacttatagmactgggacatacccaacttcaagatttgtgttgtctgaatgggatgaatcagtaagaccatgcctattttccttaagtgttcaactctagaaagtaatga

SEQ ID NO: 249994 - DNA, 201 bp, Homo sapiens
tttgaaagtatacaattcagtgacacttaacacattcacaatgttatgcagccaccacctctatcttattccaaaacattttgaatggctaaacagtggcrtatagatatacattccatgaaaaggaatgaataattgatacatactacaaagtagatgaatcttgaaagtattatgctaagtgaaagaagccagatacaa

SEQ ID NO: 249995 - DNA, 201 bp, Homo sapiens
caaacttcagaccactctcttctccactcggcttttcttccatcctcctggccatgtgtctccccgtgagtcgtggcccaagtctccccacctcggccagscgccaccctctggcctggctcccgccctcctgcccacctggccccttccccctcacccagcatgatggggctgagccgccgggccaggcctttggacagg

SEQ ID NO: 249996 - DNA, 201 bp, Homo sapiens
cgggctgaggggtgggggagaggccgccctgcgctgctcgcgcccccacacccgctaccggcaacgactactgtgaggtgacagagaggggacagggaggscccacacggaagagggggcgggggcagggatgcacttttgcgcatgtgcttacagtcctgacgtaggaaggggcggggctttgccgaagggggcggggct

SEQ ID NO: 249997 - DNA, 201 bp, Homo sapiens
gctgatgggttggctttcgtcagggacataggtagaagctggttggggagtgtgcgtgccagcctgacgcgatatagtgcgcacatgcgtgatgacgtagrgggcgttgattgggaccgagtacagggcccgcgcatgcgtggattgtcgtcttctgtccaagttggtcgcttccctgcgccaaaggtaagcgggccgtta

SEQ ID NO: 249998 - DNA, 201 bp, Homo sapiens; identical to SEQ ID NO: 49037

SEQ ID NO: 249999 - DNA, 201 bp, Homo sapiens
tgggaatggggcttaaaaatgtctatttttaagctttcttgggtgaatttagtgcacagccaggtaaggccactaaatatggtgatggggtgcacagcatkcgcagccgtacaaggctgatctgcagctaggatagagaaatgtctgcctaggggactgtttgcagattactgacacaagttcttgggacctcactgccga

SEQ ID NO: 250000 - DNA, 201 bp, Homo sapiens
taagcaatctacctgtcttggcctcccagagtgctaggactgtaagcgtgagccacctcacctggccaataattcactttctgtttgtttgttttgaaacagagtctcactctgtcgcccaggctggaatgcagtggcaatgtctctgctctctgcaagctccgcctcctgaattcaagcgattcttctgcctcagcctcc

SEQ ID NO: 250001 - DNA, 201 bp, Homo sapiens
aagcaatctacctgtcttggcctcccagagtgctaggactgtaagcgtgagccacctcacctggccaataattcactttctgtttgtttgttttgaaacagagtctcactctgtcgcccaggctggaatgcagtggcaatgtctctgctctctgcaagctccgcctcctgaattcaagcgattcttctgcctcagcctccc

SEQ ID NO: 250002 - DNA, 201 bp, Homo sapiens
ttataagccctttaaaggcttggtgtggtggctcatgcctgtaatcccaacactttgggaggctgaggctggaggatcacttgagcctaggagttggagamcagcgtgggtgacttagagatactttgtctctacaaaaaatcttaaaactagctgggtgtggtggtgtgtgactgtagtcccagctattcaggaagcaga

SEQ ID NO: 250003 - DNA, 201 bp, Homo sapiens
aattcaagtcattccctctcacatatataatagaccaactctcagagcctgcataatgggacactaaacgtaatttttttcacatgtcatttttaaaaatttattattattattattattattattattattattattattttgagacagggtctcttgtcacccaggtttgattgcagtggtgttactgtagttcactgc

SEQ ID NO: 250004 - DNA, 201 bp, Homo sapiens
attcaagtcattccctctcacatatataatagaccaactctcagagcctgcataatgggacactaaacgtaatttttttcacatgtcatttttaaaaatttattattattattattattattattattattattattattttgagacagggtctcttgtcacccaggtttgattgcagtggtgttactgtagttcactgca

SEQ ID NO: 250005 - DNA, 201 bp, Homo sapiens
ttcaagtcattccctctcacatatataatagaccaactctcagagcctgcataatgggacactaaacgtaatttttttcacatgtcatttttaaaaatttattattattattattattattattattattattattattttgagacagggtctcttgtcacccaggtttgattgcagtggtgttactgtagttcactgcag

SEQ ID NO: 250006 - DNA, 201 bp, Homo sapiens
cagatggggcggctgggcagagacgctcctcacctcccagacggggtcacggccgggcagaggcgctcctcacatcccagacggggcggcggggcaaaggygctccccacatctcagacgatgggcggccgggcagagaggcgctcctcacttcctagatgggatggcggctgggcagagacgctcctcactttccagact

SEQ ID NO: 250007 - DNA, 201 bp, Homo sapiens; identical to SEQ ID NO: 49042

SEQ ID NO: 250008 - DNA, 201 bp, Homo sapiens
ctctatccaagaaggagtgaatgttttcctgcactctcacccttccaggacttaatttttttaatttctatttaaaatgatacagaagttggccaggtgcrgtggctcacacctgtaatcccagcactttgggagcctgaggtgggcggatcatgaggtcaggagttcaagaccagcctggccaacacagtgaaacctcgt

SEQ ID NO: 250009 - DNA, 201 bp, Homo sapiens
cactctcacccttccaggacttaatttttttaatttctatttaaaatgatacagaagttggccaggtgcggtggctcacacctgtaatcccagcactttgrgagcctgaggtgggcggatcatgaggtcaggagttcaagaccagcctggccaacacagtgaaacctcgtctgtactaaaaatacaaaaattagccagatg

SEQ ID NO: 250010 - DNA, 201 bp, Homo sapiens
tcaccaatgaagacaacccccatggcaatgacagtgccaaagccagccgggccaggaccaaagccggtgatctccgagatacaggtgggcatatttccccrttctcttaaattggcacttaattattgtttttttattttttatttttttaggagttcaggagtcttggctcagcctcagcctcccaagtagctgggacta

SEQ ID NO: 250011 - DNA, 201 bp, Homo sapiens
gcctgaggtgggcggatcatgaggtcaggagttcaagaccagcctggccaacacagtgaaacctcgtctgtactaaaaatacaaaaattagccagatgtgrtagtgggcgcctgtagtcccaactacctgggagactgaggtaggagaatcccttgaacccgggaggcagaggttgcagtgagccgagaccacaccattgc

SEQ ID NO: 250012 - DNA, 201 bp, Homo sapiens
acggggtcacggccgggcagaggcgctcctcacatcccagacggggcggcggggcaaaggcgctccccacatctcagacgatgggcggccgggcagagaggcgctcctcacttcctagatgggatggcggctgggcagagacgctcctcactttccagactgggcagccaggcagaggggctcctcacatcccagacgatg

SEQ ID NO: 250013 - DNA, 201 bp, Homo sapiens; identical to SEQ ID NO: 49035

SEQ ID NO: 250014 - DNA, 201 bp, Homo sapiens
ggtgggcacctgtaatcccagctactcaggaggctgaggcaggagaatcacttgaactcgggaggcggaggttgcagtgagctgagattgcgccactgcaytccaccctaggcgacagagtgagactccatctcaaaaaaaaaaaaaaattagctgggcgcagtggcatgtgcttgtagtcccagctacttgggaggctga

SEQ ID NO: 250015 - DNA, 201 bp, Homo sapiens
gggctcaggtgattctcccacctcagactcctgagtagctgggaccatacccttgcaccaccacacctggctaatttttgtattttttgtagggacggagkttcaccatgttgcccaggctggtctggaactcctgagctcaagccatccgcctgcctcagcttctcaaagtgctggattacaggcatgagccagggtgcc

SEQ ID NO: 250016 - DNA, 201 bp, Homo sapiens
caagcattccgcctaccttggcctaccaaagtgctgggattacaggcatgggctactgcacctgacctcaactgttttacttggggtgtttttctcagctyaccccggacctgtagtatctcaggtggttttattctaattttttcaatgtttaaattgtcatgtttcagttgagttacattattgttttaacagaagtga

SEQ ID NO: 250017 - DNA, 201 bp, Homo sapiens; identical to SEQ ID NO: 49039

SEQ ID NO: 250018 - DNA, 201 bp, Homo sapiens
cacctcccagacggggtcacggccgggcagaggcgctcctcacatcccagacggggcggcggggcaaaggcgctccccacatctcagacgatgggcggccvggcagagaggcgctcctcacttcctagatgggatggcggctgggcagagacgctcctcactttccagactgggcagccaggcagaggggctcctcacatc

SEQ ID NO: 250019 - DNA, 201 bp, Homo sapiens
ccagacggggtcacggccgggcagaggcgctcctcacatcccagacggggcggcggggcaaaggcgctccccacatctcagacgatgggcggccgggcagagaggcgctcctcacttcctagatgggatggcggctgggcagagacgctcctcactttccagactgggcagccaggcagaggggctcctcacatcccagac

SEQ ID NO: 250020 - DNA, 201 bp, Homo sapiens; identical to SEQ ID NO: 49036

SEQ ID NO: 250021 - DNA, 201 bp, Homo sapiens
gcaatgacagtgccaaagccagccgggccaggaccaaagccggtgatctccgagatacaggtgggcatatttccccgttctcttaaattggcacttaattrttgtttttttattttttatttttttaggagttcaggagtcttggctcagcctcagcctcccaagtagctgggactataagcatgtgctgttgtgcccagt

SEQ ID NO: 250022 - DNA, 201 bp, Homo sapiens
gacggggtcacggccgggcagaggcgctcctcacatcccagacggggcggcggggcaaaggcgctccccacatctcagacgatgggcggccgggcagagaggcgctcctcacttcctagatgggatggcggctgggcagagacgctcctcactttccagactgggcagccaggcagaggggctcctcacatcccagacgat

SEQ ID NO: 250023 - DNA, 201 bp, Homo sapiens
tgctggaaagacatttccctagacccctcccaccttagcagttaggtgctctctcttctggttctcagagagttctggaagtggacagcaagctggggctygtgactcaccaggccactcttctgtgttttgattttctagtgcccaaggttgaagcaatgaataaaagactgggctccttggtggatgagtttaaggagc

SEQ ID NO: 250024 - DNA, 201 bp, Homo sapiens
ctgctcactgcagccttcacctcctggggtcaagcgatctttcacctctgcttcccaagtaactgggaccctgtgctgccatgcccagctaatttttttgttttttttttgtttggtagagatggagtctcactatgttgcccaggctggtctcgaactcctagggtcaagtgattctcccacctcagcctcccaaagtgc

SEQ ID NO: 250025 - DNA, 201 bp, Homo sapiens
gctggaggatcacttgagcctaggagttggagaccagcgtgggtgacttagagatactttgtctctacaaaaaatcttaaaactagctgggtgtggtggtrtgtgactgtagtcccagctattcaggaagcagaagtgggaagattgcttgagcttgggaggtcaaggctgcagtgagttctgattgcagcactgcactct

SEQ ID NO: 250026 - DNA, 201 bp, Homo sapiens
aaaataaagtgaagccagaagatgcctgtgtaacattaacactgcagatggccatgccattagctgtctaaaggactctgtcagaacaagattgtcttgattttttttttttttttttttttgagacggagtctcactctgtcccccaggctagagtgcagtggcacaatcttggctcactgcaacctccgccttccagat

SEQ ID NO: 250027 - DNA, 201 bp, Homo sapiens
cattgttctccttttcctcttggaaactatttttctttcctcagacaagtatcttgtcacctcttcacctgtcttgaaatgatgcgatgttgtttatactrcagtttggaagtctactacacattttggtggagatggatggggaggatagaatagtgggtaaatgtaggccttgttgtcagattgtttggattctagtcc

SEQ ID NO: 250028 - DNA, 201 bp, Homo sapiens
ctgtctcagcctcccaagtagcttttttttgagacagagtcttgctctgtcgcccaggctggagtgcagtggcgtgatctcagctcactacaagctccgcytcccgggttcatgccattctcctgcctcagcctcccgagtagctgggactacaggcacccgccaccacgccgagctgatttttttgtatttttagtagag

SEQ ID NO: 250029 - DNA, 201 bp, Homo sapiens
caggagaatcacttgaacccgggaggtggaggttgcagtgtggagatcgtgccattgcactccagcctgggcaacaagagcgaaactccatctttaaaaamaaaaaacaaaaaacaaaaaaaaacaaacaaaaaaggctgaccttgactaatttcagcgtatgagtcaaataattagttctaggaatctacgtagcaggaa

SEQ ID NO: 250030 - DNA, 201 bp, Homo sapiens
cagcctgggcatcatagcgagaccctgtctctactaaaaaactaaaaattagccaggcgtggtggtgcacagcctggggaagagagtacaaaaaaaaaaawaatatatatatatatatatatatatgtatgtatgtgtgtgtgtatatatatatctctctccaaacaatacaaataatctttgcagtagcgccatcatggt

SEQ ID NO: 250031 - DNA, 201 bp, Homo sapiens
agcctgggcatcatagcgagaccctgtctctactaaaaaactaaaaattagccaggcgtggtggtgcacagcctggggaagagagtacaaaaaaaaaaaawatatatatatatatatatatatatgtatgtatgtgtgtgtgtatatatatatctctctccaaacaatacaaataatctttgcagtagcgccatcatggtt

SEQ ID NO: 250032 - DNA, 201 bp, Homo sapiens; identical to SEQ ID NO: 49038

SEQ ID NO: 250033 - DNA, 201 bp, Homo sapiens
tcgagattgcgccactgcacgccagtgacagtgtgacagactgcatctcaaataataaataataataaatagatatggtttaagcatgctttgtgtgtcakggatggtgctgacaggtcagtacatttttttttttctttttttgggttggggggatagagttgctctggtacccaggttgcagtgcagtggcgccatctt

SEQ ID NO: 250034 - DNA, 201 bp, Homo sapiens
tctcaaataataaataataataaatagatatggtttaagcatgctttgtgtgtcagggatggtgctgacaggtcagtacatttttttttttctttttttgkgttggggggatagagttgctctggtacccaggttgcagtgcagtggcgccatcttggcacactgcatcctcgaactcctgggctcaagcgatcctccagt

SEQ ID NO: 250035 - DNA, 201 bp, Homo sapiens
tcgaactcctagggtcaagtgattctcccacctcagcctcccaaagtgctgggattgctacagatgtgagccactgtgcctggcctgaatatacgtattgktaattctctgatttcaatggcagggactgcttatacttctaatgtatacttactgcattctggtttttgttaaaatttgatatttatggccattactttc

SEQ ID NO: 250036 - DNA, 201 bp, Homo sapiens
ctcctgaattcaagcgattcttctgcctcagcctcccaagtagctgggactacaggcgtgcactaccatgcccagctaatttttgtatttttagtagagayggggttttaccatactggccaggttggtctcgaactcctgaccttgtgatccacccgcctgtgcctcccaaagtgctgggattacaggcgtgagccacca

SEQ ID NO: 250037 - DNA, 201 bp, Homo sapiens
tatacgtattgttaattctctgatttcaatggcagggactgcttatacttctaatgtatacttactgcattctggtttttgttaaaatttgatatttatgsccattactttcactgattcattacccctgaaggtagggatcttgccttattttagtgccatatacaaattcagtgcacatattttgagcaactaataggt

SEQ ID NO: 250038 - DNA, 201 bp, Homo sapiens
aactcatcccgggccccgggggtcctggggcccgagacctctcatttaccccgcgccgcctgcgctccacacatcctcgcctggcagctacagctcgagcrtcggcgccgccgctaggagccgcggctcggcttcgtctccgtcctctccattcagcaccacgggtcccggaaaaagctcagccgcggtcccaaccgcacc

SEQ ID NO: 250039 - DNA, 201 bp, Homo sapiens
atcggcgccgccgctaggagccgcggctcggcttcgtctccgtcctctccattcagcaccacgggtcccggaaaaagctcagccgcggtcccaaccgcacmctagcttcgttacctgcgcctccagcggccctgcgtcctctgcgctctcatccttacaggggccctagacggccagaactgagcgacgcggcctcgcctc

SEQ ID NO: 250040 - DNA, 201 bp, Homo sapiens
ccagcaccagctcccggggggcccaggtgccagccttatctacattcctcagggtctgatcaaagttcagctggtacaccagggaccggtaccgcagcgtmaggttgtccgcctcgggctgggggaccgccgggaccagggaagccgccgacacgttggagaccctgcggatgcccacagccacagaggggtggtccccac

SEQ ID NO: 250041 - DNA, 201 bp, Homo sapiens
cttggcagttgcagtgctgctgtctcgggggggttttcatctatgagggtgtttcctctaaacctacgagggaggaacacctgatcttacagaaaataccmcctcgagatgggtgctggtcctgttgatcccagtctctgccagaccaaggcgagtttccccactaataaagtgccgggtgtcagcagaactgtgtgtatg

SEQ ID NO: 250042 - DNA, 201 bp, Homo sapiens
gacactttggaagatggcataacctgtctcacctggacttaagcgtctggctctaattcacagtgctcttttctcctcactgtatccaggttccctcccaraggagccaccagttctcatgggtggcactcagtctctcttctctccagctgactaaactttttttctgtaccagttaatttttccaactactaatagaat

SEQ ID NO: 250043 - DNA, 201 bp, Homo sapiens
atttacctaagattacaaatcagaagtcatcttgctaccagtatttagaagccaactatgattattaacgatgtccaacccgtctggcccaccagggtccytttgacactgctctaacagccctcctctgcactcccacctgacacaccaggcgctaattcaaggaatttcttaacttcttgcttctttctagaaagagaa

SEQ ID NO: 250044 - DNA, 201 bp, Homo sapiens
tattaacgatgtccaacccgtctggcccaccagggtccttttgacactgctctaacagccctcctctgcactcccacctgacacaccaggcgctaattcarggaatttcttaacttcttgcttctttctagaaagagaaacagttggtaacttttgtgaattaggctgtaactactttataactaacatgtcctgcctatt

SEQ ID NO: 250045 - DNA, 201 bp, Homo sapiens
ggcataacctgtctcacctggacttaagcgtctggctctaattcacagtgctcttttctcctcactgtatccaggttccctcccagaggagccaccagttytcatgggtggcactcagtctctcttctctccagctgactaaactttttttctgtaccagttaatttttccaactactaatagaataaaggcagttttcta

SEQ ID NO: 250046 - DNA, 201 bp, Homo sapiens
aaatcagaagtcatcttgctaccagtatttagaagccaactatgattattaacgatgtccaacccgtctggcccaccagggtccttttgacactgctctawcagccctcctctgcactcccacctgacacaccaggcgctaattcaaggaatttcttaacttcttgcttctttctagaaagagaaacagttggtaactttt

SEQ ID NO: 250047 - DNA, 201 bp, Homo sapiens
taccccatggagctgggctaagtaaataggaattggtttcacgcctgaggcaattagacactttggaagatggcataacctgtctcacctggacttaagcrtctggctctaattcacagtgctcttttctcctcactgtatccaggttccctcccagaggagccaccagttctcatgggtggcactcagtctctcttctct

SEQ ID NO: 250048 - DNA, 201 bp, Homo sapiens; identical to SEQ ID NO: 49045

SEQ ID NO: 250049 - DNA, 201 bp, Homo sapiens
ttcatctatgagggtgtttcctctaaacctacgagggaggaacacctgatcttacagaaaataccacctcgagatgggtgctggtcctgttgatcccagtytctgccagaccaaggcgagtttccccactaataaagtgccgggtgtcagcagaactgtgtgtatgtcctgtgtcattgtcatttgggaattctttttctt

SEQ ID NO: 250050 - DNA, 201 bp, Homo sapiens
catctatgagggtgtttcctctaaacctacgagggaggaacacctgatcttacagaaaataccacctcgagatgggtgctggtcctgttgatcccagtctytgccagaccaaggcgagtttccccactaataaagtgccgggtgtcagcagaactgtgtgtatgtcctgtgtcattgtcatttgggaattctttttctttt

SEQ ID NO: 250051 - DNA, 201 bp, Homo sapiens
ggaatttcttaacttcttgcttctttctagaaagagaaacagttggtaacttttgtgaattaggctgtaactactttataactaacatgtcctgcctattwtctgtcagctgcaaggtactctggtgagtcaccacttcagggctttactccgtaacagattttgttggcatagctctggggtgggcagttttttgaaaat

SEQ ID NO: 250052 - DNA, 201 bp, Homo sapiens
ttggcagttgcagtgctgctgtctcgggggggttttcatctatgagggtgtttcctctaaacctacgagggaggaacacctgatcttacagaaaataccayctcgagatgggtgctggtcctgttgatcccagtctctgccagaccaaggcgagtttccccactaataaagtgccgggtgtcagcagaactgtgtgtatgt

SEQ ID NO: 250053 - DNA, 201 bp, Homo sapiens
tcccacctgacacaccaggcgctaattcaaggaatttcttaacttcttgcttctttctagaaagagaaacagttggtaacttttgtgaattaggctgtaaytactttataactaacatgtcctgcctattatctgtcagctgcaaggtactctggtgagtcaccacttcagggctttactccgtaacagattttgttggca

SEQ ID NO: 250054 - DNA, 201 bp, Homo sapiens
tacagttctgtggtttcatgttagttaccttatagttactgtgtaattagtgccacttaatgtatgttaccaaaaataaatatatctaccccagactagawgtagtattttttgtataattggatttcctaatactgtcatcctcaaagaaagtgtattggttttttaaaaaagaaagtgtatttggaaataaagtcagat

SEQ ID NO: 250055 - DNA, 201 bp, Homo sapiens
actatgattattaacgatgtccaacccgtctggcccaccagggtccttttgacactgctctaacagccctcctctgcactcccacctgacacaccaggcgstaattcaaggaatttcttaacttcttgcttctttctagaaagagaaacagttggtaacttttgtgaattaggctgtaactactttataactaacatgtcc

SEQ ID NO: 250056 - DNA, 201 bp, Homo sapiens; identical to SEQ ID NO: 49050

SEQ ID NO: 250057 - DNA, 201 bp, Homo sapiens; identical to SEQ ID NO: 49051

SEQ ID NO: 250058 - DNA, 201 bp, Homo sapiens; identical to SEQ ID NO: 49073

SEQ ID NO: 250059 - DNA, 201 bp, Homo sapiens
tctttagctgttgctttttttattgattggtaaaaagtctttatgtaataactcctgtcatattttgggaaggtgtagaagttgaaattttaggaatcacrgaacacccagaaataatgttcaaagacagcaaaccttgaaaacctataatgtgtgtgtgtgttcacagctccgccgcatgcaagagatgattgcaaggat

SEQ ID NO: 250060 - DNA, 201 bp, Homo sapiens; identical to SEQ ID NO: 49074

SEQ ID NO: 250061 - DNA, 201 bp, Homo sapiens
cccagcagctttatgtacaatttaccaagtaattttaattactgctatttcttctatgtacttgatgggtggttttttttctcatgagaatgtcatgtgcrtgatgccaccttggtgcattcctcttctctttcagcacccacatgcaggatctccaggaggtgacccaggaccttcattatgaaaacttccgttctgaga

SEQ ID NO: 250062 - DNA, 201 bp, Homo sapiens; identical to SEQ ID NO: 49075

SEQ ID NO: 250063 - DNA, 201 bp, Homo sapiens; identical to SEQ ID NO: 49076

SEQ ID NO: 250064 - DNA, 201 bp, Homo sapiens
tcatccagactgagaaatgtgtaaattattttttactcatcacttctgactcctctgctcacttttaaatagcttactaactgtttccgaactcttctctyctccaaagtgtaagctccatctttatgaggccagcataggacaaaagatgaggttagcatggatggatagtagaccaggaaaggggccgtaagatgagga

SEQ ID NO: 250065 - DNA, 201 bp, Homo sapiens
cgactaggccctgtctgcgggtaccttcggcgaggagaggcgacgaaggtctgcaccagcgaggcacggacaggcagcagggggtagggtatagggttggrggccgccgagttggcccggggatgaggagcaaacctgtggcttccgtggtctcagtggagtcccaactgtgacctggcctactggcccagacaaacctgg

SEQ ID NO: 250066 - DNA, 201 bp, Homo sapiens; identical to SEQ ID NO: 49062

SEQ ID NO: 250067 - DNA, 201 bp, Homo sapiens; identical to SEQ ID NO: 49078

SEQ ID NO: 250068 - DNA, 201 bp, Homo sapiens
agctcatttgaagcaggaagcagtgacaggtgtttgcttattttctctgagcttcattttcaacctttatggaatgaaaattttacttttagatcgataamattttatttctgtatactttctagttttgcagcatttccagtttccaggagcctcatgaatggctttttggtttagttaactttgtggtcatgtaagccc

SEQ ID NO: 250069 - DNA, 201 bp, Homo sapiens
ttttctctctgggtttttgtttttgttttgtttccgtgggatatttttgtctgggccactgtgtaaatgtttgataaccctgaggtggcagtgggttagcrtgttggtcttgtgtagactgccttataacaggcgacacagattttctcagtaccagagagatgggagaggacatttgaggtagggaagcatggagtaacc

SEQ ID NO: 250070 - DNA, 201 bp, Homo sapiens; identical to SEQ ID NO: 49063

SEQ ID NO: 250071 - DNA, 201 bp, Homo sapiens
atattggccgggcgcggtggctcacgcttgtaatcccagcactttgggaggcggaggcgggtggatcacgaggtcaggagtttgagaccagcctgaccaaygtggtgaaaccccgtctctactgaaaatacaaaaatcagctgggcgtggtggtgtgtgcctgtaatcccagctactcaggaggctgaggcaggagaatcg

SEQ ID NO: 250072 - DNA, 201 bp, Homo sapiens; identical to SEQ ID NO: 49082

SEQ ID NO: 250073 - DNA, 201 bp, Homo sapiens; identical to SEQ ID NO: 49083

SEQ ID NO: 250074 - DNA, 201 bp, Homo sapiens
gccactacactccagcccgtgcgacagagtgagacaccatctcaatataaaaagagaaatgataaatacatgtcattttaaattttaaagtagaatttttkgggggggtagcaaataactatttgttgcagtgttatgattctgatttctttcgattcttaggaaagtggagaatgaggacatgaataaagaccagatctt

SEQ ID NO: 250075 - DNA, 201 bp, Homo sapiens
tgagaccctgtctcaacaacaaaagtttcctgtgttgtaattcattaaaattctcacattctaataatttgatggatttctagatacatatgttgtacacrttgaagtctaattatgagtttggaaatgagacattaagaaagattttagaggcagcaagaaaattccaccctctggaagctgagtaggcgctggccctga

SEQ ID NO: 250076 - DNA, 201 bp, Homo sapiens
tggcgggcatctgtagtcccagccactcaggaggctgaagcaaaagaatcgcttcaacccaggaggcagaggttgtttgcagtccagcctgggtgacagagcaagactccgtctcaagaaaaaaaaaaaagaatttctgtaattacccacagaaagaacaactgttaagtatatatccttctagaacatagcttatgtttt

SEQ ID NO: 250077 - DNA, 201 bp, Homo sapiens; identical to SEQ ID NO: 49068

SEQ ID NO: 250078 - DNA, 201 bp, Homo sapiens
ctgtgtcaaacacaatttaatggttgtgtaagaagttaagcgcactcagcccctccagggctgcatccttgtggctatcctgatccccattattgaggggrgtgtagaggctgaagacagggtttggggactttactttagtgtcagttgtgtgtttctcacaatgaggtagagtgagccactccttggctatctcaatcc

SEQ ID NO: 250079 - DNA, 201 bp, Homo sapiens; identical to SEQ ID NO: 49070

SEQ ID NO: 250080 - DNA, 201 bp, Homo sapiens
tgagccgagatcgcgcctctgcactctagcctggcgacagagcaagactctgtctcaaaaaaaaaaaaaatttgatacagctatcacctaaagcttagaawttttattgtaggtttaatttgttttcgtacaatttgtcccatgtagaaagtatctgacacttttcaagaaaatgttacatacccccagctttccaattca

SEQ ID NO: 250081 - DNA, 201 bp, Homo sapiens
ctatgtctgctaaatcagatgtatttgttgtattactcagttcttctctgtccttgcacatactgtgtttactgaatctgtccggttctcagagaactctrttaaagtttctcacttgaatttttttttttaagtttgtatttttcctagtccttgctttatgtgtttatctacagtgattatttgaatatacaggcttat

SEQ ID NO: 250082 - DNA, 201 bp, Homo sapiens
ccgtccgttcaccaatcagaactcgatcttgcgctttcaggccgcgggacgggaaggctccgccctggcgccccgcaggccaatcgactgcgcgtccgcgkcgcgggggcggggtcagggcggggcgcgctgcgcgggggctgccggcgggcagttgggagcaggcgacgccgacgcgagtctggcggctgctgcttgcga

SEQ ID NO: 250083 - DNA, 201 bp, Homo sapiens; identical to SEQ ID NO: 49064

SEQ ID NO: 250084 - DNA, 201 bp, Homo sapiens; identical to SEQ ID NO: 49061

SEQ ID NO: 250085 - DNA, 201 bp, Homo sapiens
taatcccagcaccttgggaggctgaggcgggcgggtcatgaggtcaggagatcgagaccatcctggctaacacagtgaaaccccatctctactaaaaattwaaaaaaaattagccgggcatggtggcgggcgcctgtagtcccagctactcgggaggctgaggcaggagaagggcgtgaacccaggaggtggaggttgcag

SEQ ID NO: 250086 - DNA, 201 bp, Homo sapiens
tcatactgcaaacatagtagtactgtaggtactaaacacagaatgatgtttgtgaggtacttagcccagtaccaggccttatgtaaacacttaaccgattsaatggtgtcatatgaataaggtcatgacaaggtttttctttttatttaaaggtgaatcaggtctaggaaaatcgactctcataaacagcctattcctaac

SEQ ID NO: 250087 - DNA, 201 bp, Homo sapiens
gggaggctgaggcgggcgggtcatgaggtcaggagatcgagaccatcctggctaacacagtgaaaccccatctctactaaaaattaaaaaaaaattagccrggcatggtggcgggcgcctgtagtcccagctactcgggaggctgaggcaggagaagggcgtgaacccaggaggtggaggttgcagtgagctgagatcacc

SEQ ID NO: 250088 - DNA, 201 bp, Homo sapiens
caagattgcaccactgcactccagcctgggcgacagagcgagactctgtctcaaaaaaataataaattaaataaataaatttcacatattgtaacatgcayacattgcttttactcttgaaaaaagaggctgaggccgggtgcggtggctcatgcctgtactcctggcattttgggaggcccaggcgggcggatcacttga

SEQ ID NO: 250089 - DNA, 201 bp, Homo sapiens
ctttcttttctctacacacatcagtaacagtcctttggcccccttagttcattcccagcagaccagataatttagaattctgataatttattatgatgaamttgatggggctcttagacttgataaattggtttaaatcagcctttgcaagttagttcagagataaattagtgctaaagaacatattctgagaaaagcaga

SEQ ID NO: 250090 - DNA, 201 bp, Homo sapiens
tccatttccctggatcctgaatcaataggaacgtgttacaatgtttgctcattcttgcctgcttttaagtattttgaataagctaggcaattaaaaaaaawtttttaagagtgcttcataagatgaatggaaggttaagttgctgactaatattcttggatccagaatattagtccttcactttatggtcttgtacatagc

SEQ ID NO: 250091 - DNA, 201 bp, Homo sapiens; identical to SEQ ID NO: 49065

SEQ ID NO: 250092 - DNA, 201 bp, Homo sapiens
attcttgaaatcatccagactgagaaatgtgtaaattattttttactcatcacttctgactcctctgctcacttttaaatagcttactaactgtttccgarctcttctctcctccaaagtgtaagctccatctttatgaggccagcataggacaaaagatgaggttagcatggatggatagtagaccaggaaaggggccgt

SEQ ID NO: 250093 - DNA, 201 bp, Homo sapiens; identical to SEQ ID NO: 49066

SEQ ID NO: 250094 - DNA, 201 bp, Homo sapiens
tgttttcagactgttgacagtcgggacttatatgattcattatttttaatacaactgatacatttgattcattaacacaaagagttctaatttagttgtctttttttttttttttgagacgggagtcttgttctgtcaccaggctggagtgcagtggcatgatctcagctcactgcaacttctgcctcccacgttcaagcg

SEQ ID NO: 250095 - DNA, 201 bp, Homo sapiens; identical to SEQ ID NO: 49059

SEQ ID NO: 250096 - DNA, 201 bp, Homo sapiens
cctttggtacattgtgaacagtctaatatatggattatattcacagagaagacaggaaagcaaaaaaaaaaaacatgaaaaaataatgcctgggaattgtscaattttcagcaaagttgtaaatgcacagatccaagaagcttgacaaataccaggcaaaataaatataaagaaaactacaccaggacgcatcataacacg

SEQ ID NO: 250097 - DNA, 201 bp, Homo sapiens
attgaagataagaggagtgaccactgaattgtcattaggaataacataactggtcgggcgtgatggctcatgcctgtaatcccagcactctgggaggccaragcgggtggatcatttgaggtcaggagtttgagaccagcctggccaacatggcaaaaccccatctctactaaaaatacaaaaacctgggcgtggtggtgc

SEQ ID NO: 250098 - DNA, 201 bp, Homo sapiens; identical to SEQ ID NO: 49060

SEQ ID NO: 250099 - DNA, 201 bp, Homo sapiens
cctggctaattttgtttctgtatttttagtagagacggggtttcaccgtgttagccatgatggtctcgatctcctgacttcgtgatccgcccgcctcggcktctcaaagcgctaggattaatataaatcttacacagacatcttcatgaaatagatgagtaggaaacacctaccagcctattttattaagccagcattatc

SEQ ID NO: 250100 - DNA, 201 bp, Homo sapiens
ggtagggggatacagcagggggttcaggcaggaggatcacttgagcccagaagttggaggccaacctcagcaacatagcaatacgctgtctctaaaaaaawatatatatatattttatatatataatatataattaataaatatatataatatatattacatatatattatatctatattatttatattacatatgtaata

SEQ ID NO: 250101 - DNA, 201 bp, Homo sapiens
attatatatattatatatataatatatattataaatataatatataaatatatttataaatatatataaatattatatttatacattatatttatatacatattatatatacatttttatatattatatatatataaatataatatacatatattttttaaaataaaagagtttctaggccgagtgtggtggctcacgcct

SEQ ID NO: 250102 - DNA, 201 bp, Homo sapiens
cctggctatggtgacgctatcaactgcagagattggtatgctcccccatgcccagggatctgcatttgtttacttaatatacttcataaatttatagatartgttaatgagtgattattaagtttgggattgctgtatataataaaacacctagacaatttaaagcgtgttaaatgttgactttttaaataaggaatttta

SEQ ID NO: 250103 - DNA, 201 bp, Homo sapiens
ttatatatattatatatataatatatattataaatataatatataaatatatttataaatatatataaatattatatttatacattatatttatatacatattatatatacatttttatatattatatatatataaatataatatacatatattttttaaaataaaagagtttctaggccgagtgtggtggctcacgcctg

SEQ ID NO: 250104 - DNA, 201 bp, Homo sapiens
catgaggggagcatcccgcacagctgagcccagtcttggtgtgcctgggtctcagaccccatagttgtctcaggagaaatggaggttcccctgagccagcmtttctcctgtctgggcttctgggaaacgaagggtcaggtttcactctggaatccacagcaccataggaggagtctcttaagtgcccgggtgtttcctgaa

SEQ ID NO: 250105 - DNA, 201 bp, Homo sapiens
tatatatattatatatataatatatattataaatataatatataaatatatttataaatatatataaatattatatttatacattatatttatatacatattatatatacatttttatatattatatatatataaatataatatacatatattttttaaaataaaagagtttctaggccgagtgtggtggctcacgcctgt

SEQ ID NO: 250106 - DNA, 201 bp, Homo sapiens
ggtaagtgcctgctcttttctatcctcagcattggcatttaatctttccatgtgaacttaaagctcattttatccaatcctttaagaaaaaagccacaccrttagggattccagttagaaatggactaaataacatactcatttggggaaaataaaaatgatttgatttatgtaggacctgttttctagtttggtccctac

SEQ ID NO: 250107 - DNA, 201 bp, Homo sapiens
tggttttactacccaaatctaaatagatacttttgataatagataactgctcttttactaagacatagtctctacctatagaaatgtattttgaaaacacktattttacacagcaattttgtatccatttaaactaaccttttatcaataaagcactattgtttagatattaaatgagtatttctcttggttatttgcaag

SEQ ID NO: 250108 - DNA, 201 bp, Homo sapiens; identical to SEQ ID NO: 49081

SEQ ID NO: 250109 - DNA, 201 bp, Homo sapiens
cacctcactagacatttccacggccatactcattatcctgaaatcccagcagctttatgtacaatttaccaagtaattttaattactgctatttcttctaygtacttgatgggtggttttttttctcatgagaatgtcatgtgcgtgatgccaccttggtgcattcctcttctctttcagcacccacatgcaggatctcca

SEQ ID NO: 250110 - DNA, 201 bp, Homo sapiens
tcctaaattgtctcaagtgcctgccagttttttagaaagtatttgaacctttgaagaacccctggaagcgtagacgtttttatgctaataaatactttagyaattcctacttaagggaacttcaccttttgtactctgctatattaaatttctttgaggtagaaatgggggtggtgtcagggttagaatgctgtaattcta

SEQ ID NO: 250111 - DNA, 201 bp, Homo sapiens
tttatctttgaatcctgtgggtgttcattactgtccaatgcaaaatcatcataccagtttttgcattttataccagtgttagcatggaacacagataagcaaaaaaaaaaagtcattatttcaccactcaggaataaccactgttaatatgttacatatattctttttcacctgtgtgtgcatttgactatacatttacaa

SEQ ID NO: 250112 - DNA, 201 bp, Homo sapiens
taattttcagtcgcatacaactaaggagttatactagataagtttttctttttttaatgctcctagttgaatactactggttttctgatagaagtatgacyttctggaagtgtttatactttttaaaaaatttgtgaaaactgataacctatgtttgtttcatgtctaactgattatatcttaaaagcaactactaaggtg

SEQ ID NO: 250113 - DNA, 201 bp, Homo sapiens
agtttttctttttttaatgctcctagttgaatactactggttttctgatagaagtatgaccttctggaagtgtttatactttttaaaaaatttgtgaaaamtgataacctatgtttgtttcatgtctaactgattatatcttaaaagcaactactaaggtgtttattagtttgtttgttttttaatcttatttagcaacag

SEQ ID NO: 250114 - DNA, 201 bp, Homo sapiens
caagctacgcctgacagtggtagatacccctggctatggtgacgctatcaactgcagagattggtatgctcccccatgcccagggatctgcatttgtttasttaatatacttcataaatttatagatagtgttaatgagtgattattaagtttgggattgctgtatataataaaacacctagacaatttaaagcgtgttaa

SEQ ID NO: 250115 - DNA, 201 bp, Homo sapiens
acatattatatatacatttttatatattatatatatataaatataatatacatatattttttaaaataaaagagtttctaggccgagtgtggtggctcacrcctgtaatcccagcactttggaaggctgaggcaggcacatcaccagaggtcaggaggtcgagaccagcctggccaacatggcaaaactccgtctctaaaa

SEQ ID NO: 250116 - DNA, 201 bp, Homo sapiens
tacatttttatatattatatatatataaatataatatacatatattttttaaaataaaagagtttctaggccgagtgtggtggctcacgcctgtaatcccwgcactttggaaggctgaggcaggcacatcaccagaggtcaggaggtcgagaccagcctggccaacatggcaaaactccgtctctaaaaaattacaaaagt

SEQ ID NO: 250117 - DNA, 201 bp, Homo sapiens; identical to SEQ ID NO: 49116

SEQ ID NO: 250118 - DNA, 201 bp, Homo sapiens
cgattcttctgcctcagcctcccaagtagctgggattacaggcatgtgccaccacgcctaactaaattttgtatttttagtagagatggggtttcaccatrttgggcaagctgctttcgaactcctgactttaggtgatttgcctgccttggcctcccaaaatgctgggattacagtcatgtgccaccatgcctggctaat

SEQ ID NO: 250119 - DNA, 201 bp, Homo sapiens; identical to SEQ ID NO: 49119

SEQ ID NO: 250120 - DNA, 201 bp, Homo sapiens
gccatgttggtcaggctggtctcaaactcctgacctagtgatctgctcgcctcagcctcccaaagtgctgggattacaggtgtgagccactgtacctggcygatttctttcttttttttttttaagatgaggtctcgttctgtcacccaggctggagtgcaatggcacgatcttggctcactgcaacctctgcgtcccggg

SEQ ID NO: 250121 - DNA, 201 bp, Homo sapiens
tgccatgttggtcaggctggtctcaaactcctgacctagtgatctgctcgcctcagcctcccaaagtgctgggattacaggtgtgagccactgtacctggytgatttctttcttttttttttttaagatgaggtctcgttctgtcacccaggctggagtgcaatggcacgatcttggctcactgcaacctctgcgtcccgg

SEQ ID NO: 250122 - DNA, 201 bp, Homo sapiens; identical to SEQ ID NO: 249090

SEQ ID NO: 250123 - DNA, 201 bp, Homo sapiens
tcaaactgagcttaagcaatcctcctgccatggcttcccaaaactgtaggatttcaggcccttggatttctttctttttttttttttttttttttttttttgagacggagtcttgctcttgtcaccccggctggagtgcagtggcacgctcgctgcaacctctgcctccagggttcaagtgattctcctgccttagccttc

SEQ ID NO: 250124 - DNA, 201 bp, Homo sapiens
atcttgttaagttgcccaggctggtctcaaactgagcttaagcaatcctcctgccatggcttcccaaaactgtaggatttcaggcccttggatttctttcyttttttttttttttttttttttttttgagacggagtcttgctcttgtcaccccggctggagtgcagtggcacgctcgctgcaacctctgcctccagggtt

SEQ ID NO: 250125 - DNA, 201 bp, Homo sapiens
cagcctcccaagtagctgggatcacaggtgtgagccactgctcccagctgaaaggtaagtgtgtgtgtgtgtgtgtgtgtgtgtgtgtgtgtgtgtgtgtktgtattttgtttttgttttgagatagggtcttgcttcattgcctaggctagagtgcagtggtatgaacttggctcactgcaacctctacctcctgggttc

SEQ ID NO: 250126 - DNA, 201 bp, Homo sapiens
ggtacagaggttgcttcatgagtcatctggtgaaaaggtatagaataacatcacctagaataacatcactgtccgcctgtgtccaggttcaaggtcctgcyctgaaggtgacagctctacctgtactgaccaaacctctgtctgacctgttagcagagagaccgtcattccaggggtggggcttgtttcttcacagagcca

SEQ ID NO: 250127 - DNA, 201 bp, Homo sapiens
acctcagcctcccaagtagctgggatcacaggtgtgagccactgctcccagctgaaaggtaagtgtgtgtgtgtgtgtgtgtgtgtgtgtgtgtgtgtgtrtgtgtgtattttgtttttgttttgagatagggtcttgcttcattgcctaggctagagtgcagtggtatgaacttggctcactgcaacctctacctcctgg

SEQ ID NO: 250128 - DNA, 201 bp, Homo sapiens
ccccactctttttagagacaaggtcttgctctgtcacccaggctagagtgcagtggcaccatcagtgactcactgcagccttgaatactgggctcaagccwtcctatcccctctcacctcagcctcccaagtagctgggactacaggtgcacaccactgcattcagctaatttttaaattttttgtagagatagggtctca

SEQ ID NO: 250129 - DNA, 201 bp, Homo sapiens
attggggctggtgtttctttttcccccacatagataactgattgttccattactagcaacatttgttgaaaagacttgtgtattatctattgctctgtaayaaattattccaaaacttagcagtttaaaacagcaaacagttattacctcagtttctgagggctaggaattcagaagtggcccaggctagagtgaagtggt

SEQ ID NO: 250130 - DNA, 201 bp, Homo sapiens
ctatttttttttctttttcttttttgagatggagtctcactctgttgcccaggctggagtgcagtggcgcgatcttggctcactgcaagctctgcctcccrggctcacgccattctcctgcctcagcctcccgagtagttgggactacaggcgtgtaccaccacgcccggctaattttttgtatttttagtagagacaggg

SEQ ID NO: 250131 - DNA, 201 bp, Homo sapiens
acctgaagatgggcacgcggcagcatggcgatgacgcgtcagctgagaaggcagcccggcagatgcggaaatgcgagcagagcacatcagccacgctgggygtcagggtctgcggcatgcaggtgagttacctctgctcagagcctaggtgctgccacttgcatgatttgggttgtgctcatacctgcctgccatctatgc

SEQ ID NO: 250132 - DNA, 201 bp, Homo sapiens
gcccaccaccatgcccagctaattttttgtatttttagtagagacagggtttcaccgtgttggccaggatggtctcgatctcttgacctcgtgatccattygcctcggcctcccaaagtgctgggattacaggtgtgagccaccacgtccggccagttttacaggttttttgcaatacttttagactttaaaacgttagca

SEQ ID NO: 250133 - DNA, 201 bp, Homo sapiens
cagaaatgatctaagacaaagtaaggaagaaaccatgaagcctcttatgacctagtcatacactgtcacttctgccatattcttttcattagaatgagtcmctaagtctagcctgtactcaaggagagaggaggatttcactttttagagggaagaatgtaaaaaaatttgacatagtttaaaactaccaaaattttctct

SEQ ID NO: 250134 - DNA, 201 bp, Homo sapiens
tagataggtgagcagaaaagctcaggttggtcaaagtcccttccagacagtgtttgcccagggcactgtgagctcttcagacttccctggcactcaccctstctgcctcctggggtttcaggtgtaccagctggacacagggcattacctctgcaggaacaagtactatggccgtgggctctccattgaaggcttccgcaa

SEQ ID NO: 250135 - DNA, 201 bp, Homo sapiens
gactacaggcgtgtaccaccacgcccggctaattttttgtatttttagtagagacagggtttcaccgtgttagccaggatggtctcaatctcctgacctcrtgatccgcccccctcagcctcccaaagtgctgggattacaggcgtaagccaccgtgcccagcctatgcttctattttctttgactaaattgggcttcatt

SEQ ID NO: 250136 - DNA, 201 bp, Homo sapiens
tcatctgctcccctgtgggcagggttcaattcattgcatcttttttttttttccctcagcagcattttgatggcagagcacaggactcccgtgagtccccstcttcctaagctattctctgcctgggccctcaccccatctgagtatctcctcctctctttaccccatctcaatatctcctcctactcccaggaacccacc

SEQ ID NO: 250137 - DNA, 201 bp, Homo sapiens; identical to SEQ ID NO: 49121

SEQ ID NO: 250138 - DNA, 201 bp, Homo sapiens
aacctccaactcccgggttcaagcgaagcgattctcctgcctcagcctcccaagtagctgggattacagacatgtgccaccacgcccagctattttttgtrtttttagtagagacagggtttcaccatgttggccaggatggccttgatctcctgaccttgtgatccgcctgcctcggccttccaaagtgttgggattaca

SEQ ID NO: 250139 - DNA, 201 bp, Homo sapiens
tggcgcgatctcagttcactgcaacctccacctccagggttcaagtgattctcctgcctcagcctcccaagtagctgggatttacaggcatgtgccagcaygctcggctaatttttgtatttttagtacagacggggtttcaccatgttggccaggatggtctcgatctcctgaccttgtgatccactcgccttggcctcc

SEQ ID NO: 250140 - DNA, 201 bp, Homo sapiens
ttttttttgagacagagtcttgctctgtcgcccaggctggagtgcagtggcacgatctcggctcactgcaatctccacctccgtgttcaagcgattcttcwgcctcagcctcccaagtagctgggattacaggcatgtgccaccacgcctaactaaattttgtatttttagtagagatggggtttcaccatgttgggcaag

SEQ ID NO: 250141 - DNA, 201 bp, Homo sapiens
agcctcccaagtagctgggattacaggtgcgtgccaccatgcccggctaatttctgtatttttagtagagacctggtttcaccatgttgttcaggctgatstcgaactcctgacctcctgatccgcctgccttggcctcccaaagtgctgggattacaggcgtgagccactgtgcctggtcacgcgcctagcctactttgt

SEQ ID NO: 250142 - DNA, 201 bp, Homo sapiens
tctgtctttttttttttttttttttgagacagagtcttgctctgtcgcccaggctggagtgcagtggcacgatctcggctcactgcaatctccacctccgkgttcaagcgattcttctgcctcagcctcccaagtagctgggattacaggcatgtgccaccacgcctaactaaattttgtatttttagtagagatggggtt

SEQ ID NO: 250143 - DNA, 201 bp, Homo sapiens
gacacatctccgtacctgagctggccgcgctgccggccttcctcaagaacggcctctacttgcacaacaaccctttgccttgcgactgccgcctctaccayctgctacagcgctggcaccagcggggcctgagcgccgtgcgcgactttgcgcgcgagtacgtatgcttggccttcaaggtacccgcgtcccgcgtgcgct

SEQ ID NO: 250144 - DNA, 201 bp, Homo sapiens; identical to SEQ ID NO: 49125

SEQ ID NO: 250145 - DNA, 201 bp, Homo sapiens
ctcttggcctagagcggccggaagagcacctgtacgcgctggtgggtcggtccctgaggctttactgcaacaccagcgtcccggccatgcgcattgcctgrgtttcgccgcagcaggagcttctcagggcgccaggatcccgcgatggcagcatcgcggtgctggccgacggcagcttggccataggcaacgtacaggagc

SEQ ID NO: 250146 - DNA, 201 bp, Homo sapiens
aagccggccgctagaagcctatttttttattttttcgagactgcttacaggttgttagccactgcgcctggccttgttggtgattttgatgcttaaaatgrcccccaaacgtattgaagtgctgcctggtgtttttaaacacaagaaggctttgattaccttacaaggaatgtgtagggaagttttgttcaggcatgagtt

SEQ ID NO: 250147 - DNA, 201 bp, Homo sapiens
tagcaggcatcttttctagccgctgcagcagcttgatgttgtggggaggaaggggccacccaccaatcacctcttcttgaagctgcatttttttgtgttcrtagaagaggtctgtcttagagctccccaaattgacaatctttgggcagccatctctatccttctcctagatggtgcactccttacagtaataggcaccag

SEQ ID NO: 250148 - DNA, 201 bp, Homo sapiens
gacagggtcttgctctgttacccaggctagttttgaactcctagcctcaaggaatcctcccaccttggcctctcatagtgctgagatttaagagatcggayctcactatgttgcctgggctagtcttgaactcctggtctcaagtgatcctcctccatgaggcatgatacctcagcctcccaagtagctgggatcacaggt

SEQ ID NO: 250149 - DNA, 201 bp, Homo sapiens
tttggctgacactgtcaggcagaaggaaactagatctaaaggaggacacacacaggaaatggcagcataaagcacttaagtaactagagggttaagtgatrccaggtgtgggtgtcacctagcgaacacagttcttttgaatggtacaaaaaatcagtaattgaaagtgagagggccagataagagaaggggaaatataga

SEQ ID NO: 250150 - DNA, 201 bp, Homo sapiens
ttttgtattttgtagagacagggtctcaccatgttgcccaggcgggtctcaaacttctaagcttaagtgatctgcctgccttggcctcccaatgtgctggrattacagatgtgagccaccatgcctggccctgaaatagattaatttgactaataatatcttccactatgcttctatttttttttctttttcttttttgag

SEQ ID NO: 250151 - DNA, 201 bp, Homo sapiens
tcacactgtgtgcaagcccctcatctcccgggaacagcgcttttacgagtccctccctcccgaaatgaaggagttcacccctgaatacaaaggtcagtcaytggccagtttaatgaaagcagcagccttgggcttatagaccccttgccacagttttttcttggtttgtttgccatgatatatcattgtaggtcttttttc

SEQ ID NO: 250152 - DNA, 201 bp, Homo sapiens; identical to SEQ ID NO: 49124

SEQ ID NO: 250153 - DNA, 201 bp, Homo sapiens
aaaatatattaagttaaaaaggaagactatataacatatatattacatatatatgtgttacacacacacacacatatatatatatatatatttttttttttaagggaaagggtcttgttttgtcacccaggctggagtacagtggtgcaattatagctcactgccaccttgaacccaccttgggctcaagggatcttccca

SEQ ID NO: 250154 - DNA, 201 bp, Homo sapiens
taaaatatattaagttaaaaaggaagactatataacatatatattacatatatatgtgttacacacacacacacatatatatatatatatatttttttttttaagggaaagggtcttgttttgtcacccaggctggagtacagtggtgcaattatagctcactgccaccttgaacccaccttgggctcaagggatcttccc

SEQ ID NO: 250155 - DNA, 201 bp, Homo sapiens
attatatatataaaatatattaagttaaaaaggaagactatataacatatatattacatatatatgtgttacacacacacacacatatatatatatatatatttttttttttaagggaaagggtcttgttttgtcacccaggctggagtacagtggtgcaattatagctcactgccaccttgaacccaccttgggctcaag

SEQ ID NO: 250156 - DNA, 201 bp, Homo sapiens
tttatagttgcaattcggacaaaaaattggtttggtggtgagtattctggttttatgtgtgtgttgtgtgtgtgtgtgtgtgtgtgtgtgtgtgtgtgtgttttagagagagtcttgctaatgttactcatgctggtctcgaattcctgggctcaagtgatcctgctgcctcagcctcccatgtataccaccatgcctagc

SEQ ID NO: 250157 - DNA, 201 bp, Homo sapiens
cctggctggggctgatggtgagtgtggttgtcattctccttgaccgtggcccagagttcctcctgcttgagaacgtggtgcaccacttcaagtacccctgygtgttggacctgaagatgggcacgcggcagcatggcgatgacgcgtcagctgagaaggcagcccggcagatgcggaaatgcgagcagagcacatcagcca

SEQ ID NO: 250158 - DNA, 201 bp, Homo sapiens
ctttatagttgcaattcggacaaaaaattggtttggtggtgagtattctggttttatgtgtgtgttgtgtgtgtgtgtgtgtgtgtgtgtgtgtgtgtgtkttttagagagagtcttgctaatgttactcatgctggtctcgaattcctgggctcaagtgatcctgctgcctcagcctcccatgtataccaccatgcctag

SEQ ID NO: 250159 - DNA, 201 bp, Homo sapiens
tgtatgtatgtagatctggaaggttgtatattaattggttaatgaaaatatgactagatcatcttctactggctgagagtttattaaacaaaaaaaaaaaagaaattatgaccagaggcctacaggaacttaaccatttattttgtctaggtgcagtgactcagtattcaataactcagtgtacacaatgactttataaaa

SEQ ID NO: 250160 - DNA, 201 bp, Homo sapiens
tctgaggccaagtagctgtcttactatgtgtggaatttctttttcacaccatcatgggctgtattttcaagttgattcataataaacaaaattacaaaaasaaaagttctagccttgtagccaacgtgtgggagaagctctgaaatctgtgcctccttgttctcacttggacaactccctaccttgtgagcagactctagg

SEQ ID NO: 250161 - DNA, 201 bp, Homo sapiens
catgctgctgccttcttttcaattatcatactgtaaataagtgtccttttcttggtctatttagtaccatggttttttgcatttatttgctttttttttttactgagactgagtcttgccctgtcacccaggctagagtgcagtggtgctatctcggctcactgcaacctccgcctcccaggttcaagtaattttcctgcc

SEQ ID NO: 250162 - DNA, 201 bp, Homo sapiens
aggtgcggtagctcatgtctgtaatcccagcactttgggaggctgaggcgggcggatcacctgaggtcagtagttaagagattagcctatccaaaatggcraaatcccatgtctactaaaaatacaaaaattagctgggcgtggtggtgcatggaggctgaagcaggagaatcacctgaacccggaaagcggaggttgcag

SEQ ID NO: 250163 - DNA, 201 bp, Homo sapiens
tattagtagcctactgttgactggaagcctcactgataacatacacaatcaatatataatttgtttgttgtatatattttaaaatttttctcgttttagacacttgcttcgttgcccaggctgcagtgcagtggtacaatcataacgcactgcagcattgaactcctgaaattaagcaatcctcccacctcagcctcctga

SEQ ID NO: 250164 - DNA, 201 bp, Homo sapiens
attttttgaatctttagttcattataatcttggtaagaccagttccttgggcagttcttgaaaggagggggatattaaaatattagcttttctttctttcttttttttttttttgagacggaatctcgctcggttgcgctggctggagtgcagtggcatggtcttggcttactgcaagctccacctcctgggttcacgcca

SEQ ID NO: 250165 - DNA, 201 bp, Homo sapiens
gtgctgtgtgtatcctgtgtctatatgtgctggggcaaagaattgttggtaagaaatgcagggactttctggggcctggaagtcctgatatttgaaggaaraataatttattttaaaatataagtcaactttatagaaaagaacctcatgaatattaattataccagaattaactaactttattttaaaatctgatctttg

SEQ ID NO: 250166 - DNA, 201 bp, Homo sapiens
aggcgtggtggcgggtgcttgtaatcccagctacttggaagattgaagcagtagaatcacttgaacctggaaggcagaggttgcagtgagctgagattgcrccactgcactctagcctgggcagcaagagtgaaactctgtctcaaaaaaaaaaaaatcttttttgtttcctctggtagggcctaataatccttttctgac

SEQ ID NO: 250167 - DNA, 201 bp, Homo sapiens
gtatttttagtagagacggggtttcactgtgttagccaggatggtctcaatctcctgaccttgtgatccacccgctttggcttcccaaagtgctgggattwcaggcgtgaggcactgcacccggccaaccctgtctttaaaaaaaaaaattttttttaagttagccgggcatggtgaatatacttgtagtcccagctattt

SEQ ID NO: 250168 - DNA, 201 bp, Homo sapiens; identical to SEQ ID NO: 49118

SEQ ID NO: 250169 - DNA, 201 bp, Homo sapiens; identical to SEQ ID NO: 249092

SEQ ID NO: 250170 - DNA, 201 bp, Homo sapiens
tctgcatttttagtgtgtgtctgtgcctgcccaactaaagaatctggtgaccaggtattgtcttgcaattgctgtagagacagtgccttcctagctcttamagtagtcctgaccttgttcgccactatatctgattgcagtctctttttccctgccaaggttttttattcattgtcactttctaggcttgatgtgttgttg

SEQ ID NO: 250171 - DNA, 201 bp, Homo sapiens; identical to SEQ ID NO: 49122

SEQ ID NO: 250172 - DNA, 201 bp, Homo sapiens
agtcttgctctgttgcccaggctggagtgcagtggcgcgatctcggctcactgcaagctctgcctcccaggttccacgccattctcctgcctcagcctccygagtagctgggactacaggcgcccgccaccacacccgtctaatttttttgtatttttagtagagacggggtttcactgtgttagccaggatggtctcaat

SEQ ID NO: 250173 - DNA, 201 bp, Homo sapiens
ggcaggcaaggaggttggatgtggtggtgtgggatacaggagaagggcaaagggagctcataaatagggcccagcctggctctgggttcaaaggtggaggytccaggatggcacaggctgtgagggctaggcagctgaggaggtagtactcgtattggctcccttctcccagtcctctacagacacgatggtggttttgca

SEQ ID NO: 250174 - DNA, 201 bp, Homo sapiens
ttaatgaaagcagcagccttgggcttatagaccccttgccacagttttttcttggtttgtttgccatgatatatcattgtaggtcttttttctcaaagcaygaagtcactttgttagataaaattagaggctgaaagcatcagcaaggtctttagatcttgaaaattgaatttattaataggtaaagctgagaaaaagtca

SEQ ID NO: 250175 - DNA, 201 bp, Homo sapiens
tgttggccagactggtctcgaactcctgacctcatgatcaacccgcctccgcctcccaaattgttgggattacaggcatgagccaccgcgccaagcctactttttttttttttttttctgagacgaagtctcgttctctcacccaggctggagtgcaatggcacaatctcagctgactgcaacctctgcctcctgggttca

SEQ ID NO: 250176 - DNA, 201 bp, Homo sapiens
ccacctgcttccttttcctatccagaagagagagaacaatgctgcgtgtgtgtgtgtgtgtgtgtgtgtgtgtgtgtgtgtgtgtgtgcgcgcgcgcgcgsatgtgtgtgaaggagagagggggcggggagagggagagagggggagagagagagagagagagagagagagagagagagagagagagagagaagagatagg

SEQ ID NO: 250177 - DNA, 201 bp, Homo sapiens
gttggccagactggtctcgaactcctgacctcatgatcaacccgcctccgcctcccaaattgttgggattacaggcatgagccaccgcgccaagcctactttttttttttttttttctgagacgaagtctcgttctctcacccaggctggagtgcaatggcacaatctcagctgactgcaacctctgcctcctgggttcaa

SEQ ID NO: 250178 - DNA, 201 bp, Homo sapiens
cctctttttgctttaggagaaagtgagtattatggtgatgacttgattttatctcctaaagggatgctcgccataggagacaaaggaaacgtaggagtgtsttagaatcggaaaaagaaacttgtttttgttgtggatgatatggaactggcaaattaactgttttttttcttttttttcttttgagacagagtctctcgc

SEQ ID NO: 250179 - DNA, 201 bp, Homo sapiens
actagatgcgctgggtcgcggcgtcttcgtcaacgccagcggcctgaggctgctcgatctatcatctaacacgttgcgggcgcttggccgccacgacctcracgggctgggggcgctggagaagctgcttctgttcaataaccgcttggtgcacttggacgagcatgccttccacggcctgcgcgcgctcagccatctcta

SEQ ID NO: 250180 - DNA, 201 bp, Homo sapiens
cctcactgcttcgttactcctcctggcattttaggttggcccagctgctgcaagcacccagcaaaccagcccaggctttgctgctaaacaggtcagtctcytttgcatacttctatgcctgggatcccatctcttaaactcaggttagggcccagagccttgccctgtactcttgctcgtactttgccccagcatccaggg

SEQ ID NO: 250181 - DNA, 201 bp, Homo sapiens
gagcagagcacatcagccacgctgggcgtcagggtctgcggcatgcaggtgagttacctctgctcagagcctaggtgctgccacttgcatgatttgggttstgctcatacctgcctgccatctatgccaagtgtgtcctcctgagcccctctgtccttacctgttgactttgatatgggcctcaggtgcaggaccactgtg

SEQ ID NO: 250182 - DNA, 201 bp, Homo sapiens
attaatttttgagacggagtcttgctctgttgcccaggctggagtgcagtggtgcgatctcggctcactggctcactgcaggctccgcctcccagggtcaygccattctcctgcctcagcctcctaagtagctgggactacaggcgcccgccaccacgcccagctaattttttgtattttttagtagagatggggtttcac

SEQ ID NO: 250183 - DNA, 201 bp, Homo sapiens
catcctcctgccttggtctcctgaaatgttgggtttacaggtgcaagccatcacacctggccttttttctaagttgttaatgagaaccttaggttattaatttttttttttttttttttgagacggagtctcgcgctgttgcccaggctggagtgcagtggcacgatcttggctcactgcaagctccgcctcccgggttca

SEQ ID NO: 250184 - DNA, 201 bp, Homo sapiens
gaaaggaagttgagggagtggagaaatttggagaaatttggaaactgctcttaaggaatgatgtatctttggaaccacctctccgctttttgcttttcacttttttttttttttttttttttgagacgaagtctcactctgttgcccaggctggagtgcagtggcactatctcggctcactgcaacctctgcctcccgggt

SEQ ID NO: 250185 - DNA, 201 bp, Homo sapiens
tctgatttttagtgcctctcagaattcagtgatttaaaactgctttggagtcctaacagttttgtggtgtcattgagataccatagaaagatagaaggtattttttttttaattgtttatttatcaagataaactatttgctagcccacatattcatgtttcatagttcaggaacacaggttagtgacaaaactaatagga

SEQ ID NO: 250186 - DNA, 201 bp, Homo sapiens
agataaactatttgctagcccacatattcatgtttcatagttcaggaacacaggttagtgacaaaactaataggaaattcaacccaaagaaactgttgggttttttttttttttgagacagagtctcgctctgtcatccaggctggatcttggctcactgtaacctccgcctcctgggttcaagcgattctcctgtctcag

SEQ ID NO: 250187 - DNA, 201 bp, Homo sapiens; identical to SEQ ID NO: 49115

SEQ ID NO: 250188 - DNA, 201 bp, Homo sapiens
tgcagtctctttttccctgccaaggttttttattcattgtcactttctaggcttgatgtgttgttgcattaaaataaacacacacaaaaaaaaactcataygatttctcctaaatttggttcaacaagttctttagtctggttcttctccttactatcattattattgtcattgagacagcatcttgctatgttgcccaga

SEQ ID NO: 250189 - DNA, 201 bp, Homo sapiens
aaaggaagttgagggagtggagaaatttggagaaatttggaaactgctcttaaggaatgatgtatctttggaaccacctctccgctttttgcttttcacttttttttttttttttttttttgagacgaagtctcactctgttgcccaggctggagtgcagtggcactatctcggctcactgcaacctctgcctcccgggtt

SEQ ID NO: 250190 - DNA, 201 bp, Homo sapiens; identical to SEQ ID NO: 49117

SEQ ID NO: 250191 - DNA, 201 bp, Homo sapiens
agacattttgatcaaagacttttgaaggaggtgagggagttggccatgtggttatctgggggaagaatgtttaggcagagggaatgactagtgcaaagaasctagggaatatatatatgcctgatgtgtttgaggaacatcatgaaggccagtatggctggagtgggataataagcagtggggagacaagggtaggaagtg

SEQ ID NO: 250192 - DNA, 201 bp, Homo sapiens
taaactatttgctagcccacatattcatgtttcatagttcaggaacacaggttagtgacaaaactaataggaaattcaacccaaagaaactgttgggtttkttttttttttgagacagagtctcgctctgtcatccaggctggatcttggctcactgtaacctccgcctcctgggttcaagcgattctcctgtctcagcct

SEQ ID NO: 250193 - DNA, 201 bp, Homo sapiens
aaggaagttgagggagtggagaaatttggagaaatttggaaactgctcttaaggaatgatgtatctttggaaccacctctccgctttttgcttttcacttttttttttttttttttttttgagacgaagtctcactctgttgcccaggctggagtgcagtggcactatctcggctcactgcaacctctgcctcccgggttc

SEQ ID NO: 250194 - DNA, 201 bp, Homo sapiens
atcatgaaggccagtatggctggagtgggataataagcagtggggagacaagggtaggaagtgaaggcagagagaaaatgggggtgggaaggaatgcagakcttgtggactttttattttttgacagtctcatggcaaaaagtgaaatggcggccaggcatagtggctcatgcctgtaatcccagcactttgggaggctga

SEQ ID NO: 250195 - DNA, 201 bp, Homo sapiens
cacagcacaggtaatccagtggcttcttattaaagcataatcatgagcagagaatgtttcagcacctttgtttctcctttctttcttttttctttctttttttttttttttttgagatggagttttgcccttgttgcccaggcgctggagtgcaatggcgtgatctcggctcacctaaacctctgccttctgggttcaagt

SEQ ID NO: 250196 - DNA, 201 bp, Homo sapiens
agtgttcttcctggctgatggagaagtggatggccagcagctatttcatagttgtataattccttactctggagagttttcttgtttaaagctagtaacctttttttttttttttttttttttgagatggagtcttgttctgtcaccccaggctggagtgtagtggtgcgatctcagctcactgcaacctccgcctcccag

SEQ ID NO: 250197 - DNA, 201 bp, Homo sapiens
tgacagtctcatggcaaaaagtgaaatggcggccaggcatagtggctcatgcctgtaatcccagcactttgggaggctgaggcaggcaggtcatcttgagktcagaagtttcagaccagcctggccaacatgacaaaaccccgtctctagtaaaaatacaaaaataaaattagctgggcatggtggggtgcgcttgtagtc

SEQ ID NO: 250198 - DNA, 201 bp, Homo sapiens
aggtgagccgagattgcaccattgccactccagcctgagcaacaagagcgaaactcacacacacacacacacacatgcaaaagtgaaatggttccttgggttttttttttttgagatggagtcttgctctgttgcccaggctggagtgcagtggcgcgatctcggctcactgcaagctctgcctcccaggttccacgccat

SEQ ID NO: 250199 - DNA, 201 bp, Homo sapiens
taccttacaaggaatgtgtagggaagttttgttcaggcatgagttataatgctgttaactatagttcagtgttaatgaatcagttatttatattaaataakgtgtttttaaatagaaacatacctaaaaggttttatattgtatgtatgtagatctggaaggttgtatattaattggttaatgaaaatatgactagatcat

SEQ ID NO: 250200 - DNA, 201 bp, Homo sapiens
ttagtagcctactgttgactggaagcctcactgataacatacacaatcaatatataatttgtttgttgtatatattttaaaatttttctcgttttagacacttgcttcgttgcccaggctgcagtgcagtggtacaatcataacgcactgcagcattgaactcctgaaattaagcaatcctcccacctcagcctcctgagt

SEQ ID NO: 250201 - DNA, 201 bp, Homo sapiens
ttattagtagcctactgttgactggaagcctcactgataacatacacaatcaatatataatttgtttgttgtatatattttaaaatttttctcgttttagrcacttgcttcgttgcccaggctgcagtgcagtggtacaatcataacgcactgcagcattgaactcctgaaattaagcaatcctcccacctcagcctcctg

SEQ ID NO: 250202 - DNA, 201 bp, Homo sapiens
gttcaagtgattcttctgcttcagcctcccaagtagctgggattacaggcacgtgccaccatgccctgctaatttttttttttttttttttttttaagtaraaacagagtttgaccatgttggccaggatggtctccatctcctgacctcatgatctgcctgccgcggcctcccaaagtgctgggattacaggcgtgagcc

SEQ ID NO: 250203 - DNA, 201 bp, Homo sapiens
tcccatgttcaagtgattcttctgcttcagcctcccaagtagctgggattacaggcacgtgccaccatgccctgctaatttttttttttttttttttttttaagtagaaacagagtttgaccatgttggccaggatggtctccatctcctgacctcatgatctgcctgccgcggcctcccaaagtgctgggattacaggcg

SEQ ID NO: 250204 - DNA, 201 bp, Homo sapiens; identical to SEQ ID NO: 49123

SEQ ID NO: 250205 - DNA, 201 bp, Homo sapiens
gcttgaaccccctgagacagaggttgcagtgagccgagatggcgccattgcattccagcctgggtgacagaacgagactccatctaaaaaaaaaaaaaaaattaggcatgcctgtagtcctagttgttccagaggctgagggtgagaggatctcttttcattttgggaagatgaaaaagttctagctgggcgtggtggctc

SEQ ID NO: 250206 - DNA, 201 bp, Homo sapiens
gagaatcacttgataccaggaggcggaggttgcggtgagctgagatagtgccattgcactccagcctgggcaacgagcgaaactccgtctcaaaaaaaaaataaaataaaaaataacaaaaataaatcaacataaaaataccctagagcttaggttaaaaaaccaaaaaacaacaacaaaaaagtttgtgatatatacata

SEQ ID NO: 250207 - DNA, 201 bp, Homo sapiens
tcagtgactcactgcagccttgaatactgggctcaagccttcctatcccctctcacctcagcctcccaagtagctgggactacaggtgcacaccactgcaytcagctaatttttaaattttttgtagagatagggtctcactttgttgcccggggtggtctgaaactcctggcttcaagcagtcctcccaccttggcctcc

SEQ ID NO: 250208 - DNA, 201 bp, Homo sapiens
tgtgacttgacttagaagctgaaattgggaatttccttagatgagacagtacatagttcatctgtgatatcagatcagttcaccaatacatgctacatacytgtgcccctgaagctttgtaaaggcctaggacattccagttctcctcactcagtttggtgaacaaggacatgcccatgtcaagtacagtaccccatgaga

SEQ ID NO: 250209 - DNA, 201 bp, Homo sapiens
gcttgaacctgggaggcggagcttgcagtgagccgagatcacgccactgcactccagcctgggcgacagagcgagactctgtctcaaaaaaaaaaaaaaaagaactttaagccaataattattctacaacataaaagaaattgacaaaacatagggagatcctgtctctacaaaaaataaaccataaatgcttctcactga

SEQ ID NO: 250210 - DNA, 201 bp, Homo sapiens
gtctctgccactacctcttcaccagtgttgcacagctgacccttggagagggtcagcatttccagcacacaccagccctggtgttagcttgaatctgtgcracttatgccacacagttagaggagaggcctgcagttctggagaggagagtggcatttgaagttgctgggcgacagagcgagactctgtctcaaaaaaaaa

SEQ ID NO: 250211 - DNA, 201 bp, Homo sapiens
gggcaggccttcatctgctcccctgtgggcagggttcaattcattgcatcttttttttttttccctcagcagcattttgatggcagagcacaggactcccrtgagtccccctcttcctaagctattctctgcctgggccctcaccccatctgagtatctcctcctctctttaccccatctcaatatctcctcctactccca

SEQ ID NO: 250212 - DNA, 201 bp, Homo sapiens
ggctggagtgcagtggcacgatcttggctcactgcaagctccgcctcccgggttcacgccattctcctgcctcagcctctcaagtagctgggactacaggygcctgccattgcgcccggctaattttttgtatttttagtagagatggggtttcaccatggtcttgatctcctgacctcgtgatccgcccgcctcggcctc

SEQ ID NO: 250213 - DNA, 201 bp, Homo sapiens
aggactgccctgcatgtacctactgctctccccaccaccaagctgtggggcccacttacttgcaggacttgtggccacagggctggaacacagcagagatrgggtgggcatagcagatggggcagaggtcctcctcactggtgggctgcagggaggagagtgaagggtgggctggagttggatgcctggctatgtggatgt

SEQ ID NO: 250214 - DNA, 201 bp, Homo sapiens
accagggtgctcttgaactcctggcctcaagtcatcctcctgccttggtctcctgaaatgttgggtttacaggtgcaagccatcacacctggccttttttytaagttgttaatgagaaccttaggttattaatttttttttttttttttttgagacggagtctcgcgctgttgcccaggctggagtgcagtggcacgatct

SEQ ID NO: 250215 - DNA, 201 bp, Homo sapiens
cagttggctacctgaataagattggggctctattagcaatgaagtagcagagaaagacgttatgcaggcaaccaacatcatcatcatctacggccttctcrgacagtagttttcacagtagcctctgtggacaccagacttcaggagtaacctctggttgataaaaaaaaaagtcagggttgggcatggtggctcatgcct

SEQ ID NO: 250216 - DNA, 201 bp, Homo sapiens
cggggcgaggccggggccgtggggcggggccggcggctgctggaccgcggcgaagcagggaacaaggcctcgcccttggcgccagttccgcctttggatcygccaatggccagctgacccgcgggtcccggcccgggtctccatggcagcccggcgtactcgggcgctcattggctacgtctgtcgcagcgctgcgctcca

SEQ ID NO: 250217 - DNA, 201 bp, Homo sapiens
atttgaccatattttcattcagttgtaaatgtgctaggtgagacttagctgattcagggatggctcgcatgtactattttgtcacagcacaggtaatccagtggcttcttattaaagcataatcatgagcagagaatgtttcagcacctttgtttctcctttctttcttttttctttctttttttttttttttttgagatg

SEQ ID NO: 250218 - DNA, 201 bp, Homo sapiens
acgggtttcaccgtgttagccaggatggtcttgatctcctgacctcgtgatccgcccacctcggcctccctaagtcctgggattacaggcgtgagccacckcacccagccacctatccatctttctacccccctgcctctgcatgtcactgtccagccatccatctactcactcactactctaactgtccacccatccatc

SEQ ID NO: 250219 - DNA, 201 bp, Homo sapiens
tccagcctgggcaacagagcgagactccgtctcaaaaataaaaataaaaaatttaatatttacagcccttatttagcattgctcactttataacaggcacrgagctttcccggcatcctggagacaggatttgaacccaggcctgcctatgctcttctagtgagagcagtcctggctgggccaaggacacaaagatgaact

SEQ ID NO: 250220 - DNA, 201 bp, Homo sapiens
acccatccatcttctcactcactactctaactgttcacccatccatctactcactcactactctgtcacccatccatctactcactcactactctaactgkccacccatccatctactcactcactactctaactgttcacccatccatctactcactcactactctgtccacccacccatctactcactcactactctaa

SEQ ID NO: 250221 - DNA, 201 bp, Homo sapiens
gggtttcaccgtgttagccaggatggtcttgatctcctgacctcgtgatccgcccacctcggcctccctaagtcctgggattacaggcgtgagccacctcrcccagccacctatccatctttctacccccctgcctctgcatgtcactgtccagccatccatctactcactcactactctaactgtccacccatccatcta

SEQ ID NO: 250222 - DNA, 201 bp, Homo sapiens
ttcaccgtgttagccaggatggtcttgatctcctgacctcgtgatccgcccacctcggcctccctaagtcctgggattacaggcgtgagccacctcacccrgccacctatccatctttctacccccctgcctctgcatgtcactgtccagccatccatctactcactcactactctaactgtccacccatccatctactca

SEQ ID NO: 250223 - DNA, 201 bp, Homo sapiens
aaatgacagtgggccctgtagcagtggcagaataaactcagatgtgttcacagaagtctgtatgtctgcgtggatgaaggagcaatggaggagtgcaggggctagtgccctgaagaccttattttagggtcttccctgtctcccagcaaagaacctcagccatccctgtgggatgaccctgtctgtgtaacgccaagggtg

SEQ ID NO: 250224 - DNA, 201 bp, Homo sapiens
cgaactcctgacctcgtgatccgcccgcctcggcctcccaaagtgctgggattacaggtgtgaactaccgtgcccggccaaatgtttttttttttttttttgagtcggggtttcactattgttgcccaggatggaatgcaatggcgcgatgtcggctcactgcaacctctgcctcctgggttcaagcgattctcctgcctc

SEQ ID NO: 250225 - DNA, 201 bp, Homo sapiens
gtgatctgaacacgttggcctcccaaagtgctgagattacaggtgtgagctactgtgcccagccaattggctgtttttttgtttgtttgtttgtttgtttgtttttaacaattaaacagtctccccattgtatttgcttgtaggtctctgttcccctttcatctgcatttcttgttaaattggaaactttaactagaggtg

SEQ ID NO: 250226 - DNA, 201 bp, Homo sapiens
tagtagagacggggttttgccatgttggccaggctggtctcgaactcctgacctcaggtgatccacctacctcggcctcccaaagtgctgggattacaggygtgaaccaccgcgcctggcgtctgtttgttttcaaacttttatcatggccaggtgtggttcctcatgcctataatccctgcactttggggtaccaaggca

SEQ ID NO: 250227 - DNA, 201 bp, Homo sapiens
atgctgacccctcactgtccgcggcccctgatgaccgaggtgacgaggatgacgaggaaagtgacgatgagaccgatggcgaggatggcgaaggtggcggsccaggcgagggccaggcacctccttccttcccagactgtgctgctggcttcctcactgctgctgctgacagcgcgtgcgaggagccccctgcacccactg

SEQ ID NO: 250228 - DNA, 201 bp, Homo sapiens
ctgcacacagccgtaagcagcgccagcccgcgcgtttgcagctgccagcgcccccaacacctgccaaggctgaggggcctgatgctgacccctcactgtcygcggcccctgatgaccgaggtgacgaggatgacgaggaaagtgacgatgagaccgatggcgaggatggcgaaggtggcggcccaggcgagggccaggcac

SEQ ID NO: 250229 - DNA, 201 bp, Homo sapiens
ctttgatagctgtgctaccttgagcctcagtgtcctcatttggaaaacagggataatagcccctacccctatcatgagaatttccattaaaaattaattawaattaaatttccattaaattaaagttctaggtaactactcttaggtgagaccccagatgaggcctccagtcacctctggtaacgtcccccaggcaaagct

SEQ ID NO: 250230 - DNA, 201 bp, Homo sapiens
atctgaacacgttggcctcccaaagtgctgagattacaggtgtgagctactgtgcccagccaattggctgtttttttgtttgtttgtttgtttgtttgtttttaacaattaaacagtctccccattgtatttgcttgtaggtctctgttcccctttcatctgcatttcttgttaaattggaaactttaactagaggtgttg

SEQ ID NO: 250231 - DNA, 201 bp, Homo sapiens; identical to SEQ ID NO: 49152

SEQ ID NO: 250232 - DNA, 201 bp, Homo sapiens
gatctgaacacgttggcctcccaaagtgctgagattacaggtgtgagctactgtgcccagccaattggctgtttttttgtttgtttgtttgtttgtttgtttttaacaattaaacagtctccccattgtatttgcttgtaggtctctgttcccctttcatctgcatttcttgttaaattggaaactttaactagaggtgtt

SEQ ID NO: 250233 - DNA, 201 bp, Homo sapiens
tgatctgaacacgttggcctcccaaagtgctgagattacaggtgtgagctactgtgcccagccaattggctgtttttttgtttgtttgtttgtttgtttgtttttaacaattaaacagtctccccattgtatttgcttgtaggtctctgttcccctttcatctgcatttcttgttaaattggaaactttaactagaggtgt

SEQ ID NO: 250234 - DNA, 201 bp, Homo sapiens
gttcaacaccagcctgggcaacatagtgagagtccatctgttaaaaaaaaaaaaaagccaggcatggtggtgagcacttgtgagcgattctcctgcctcascctccctagtagctgttattacaggctcccaccaccgtgcctggctaacttttgtatttttagtagagacagggtttaaccatgttggccaggctggtct

SEQ ID NO: 250235 - DNA, 201 bp, Homo sapiens
gatctatccctctggtcaggcccctctctgtgctgtcatgtcaccaccctgcccttgccatgccttcatcccaaggcctcccgaagccagccatcctcacrcatgagcgggtactgcagatgagcaagatgctgtccttatctggggccacagctgatgatgtggtttacacggtcctgcctctgtaccacgtgatgggac

SEQ ID NO: 250236 - DNA, 201 bp, Homo sapiens
tactggccatggaccgcgaaggcttcctctacttccgcgaccgcctcggggacaccttccggtccgaggcagggtttctcggggcggggctggcgcggggmcacggacgctttcagatcctagagggagtcaggctgaagaggcgggactttcctgtcgtaagagggcggaacttggagtcaggacttctcacgcgaaggc

SEQ ID NO: 250237 - DNA, 201 bp, Homo sapiens
tgtcaaggcaaaaagacaccataggttacccagcaccctgtgttctcacttttgagaagggacacccaccaatgactaccagggccgcatggacagaagcytggacacccacacagtccctgatggccatgctttggtcaggaggtgacaagacctgatacgagtgatggtcacaggcatccaaggaaggtgtggtgctca

SEQ ID NO: 250238 - DNA, 201 bp, Homo sapiens
ggggctgactgggcctcctgatccccaaaaggggcggggcgggggcaagaggcggggcctctccttcccgggggcgtggtcacaagcgccggctccctccytgcagatggaagggcgagaacgtgtccacgcacgaggtggagggcgtgttgtcgcaggtggacttcttgcaacaggttaacgtgtatggcgtgtgcgtgc

SEQ ID NO: 250239 - DNA, 201 bp, Homo sapiens
ctggcctcgctgactacagtggtgccgggagagattttcttcggggagctgggtcagctgaggacgtatttccagacagctatgtatccacttggcacgasgaggatggcgctgtccccgaaggctgtcccactgagacccctgtccagcccgactgcatactgtctggatcccgcccgcctggtgtgaagaccccagggc

SEQ ID NO: 250240 - DNA, 201 bp, Homo sapiens
tggtagagttcctgtacagcggttcgctcgttgtggcgcagggtgaagccctgcaggtgctcacggccgcgtcagtgcttcgcatacagacagttatcgaygaatgcacgcagattatcgcccgcgctcgagccccgggcacctctgcgcccacgcccctgcccacccctgtgcccccgccactcgcacctgcgcagctgc

SEQ ID NO: 250241 - DNA, 201 bp, Homo sapiens
cgcagattatcgcccgcgctcgagccccgggcacctctgcgcccacgcccctgcccacccctgtgcccccgccactcgcacctgcgcagctgcgtcaccgyctgcgccacctgctggctgcacgtcccccggggcaccccggtgctgcacacagccgtaagcagcgccagcccgcgcgtttgcagctgccagcgcccccaa

SEQ ID NO: 250242 - DNA, 201 bp, Homo sapiens; identical to SEQ ID NO: 49154

SEQ ID NO: 250243 - DNA, 201 bp, Homo sapiens
aggtgtggtggtgcatgcctgtaatcccagctactcaggaggctgaggcaggagaatcacttgaactcagaaggtaaaagttgcagtgagctgagatggcrccattgcactgcagcctgggtgacagggcaagactccgtctcagaaaaaataaataggcgggcgcggtggctcaggcctgaaatcccagcactttgggag

SEQ ID NO: 250244 - DNA, 201 bp, Homo sapiens
tgagccaagattgcaccactgcactccactttaggcaacagagctgagagtctgtctcaaaataataataataatttttgaggctgggtgcagtggctgaygcctgtaatcccagcactttgggaagccgaggtgagtggatcatgaggtcaggagtttgagaccagcctggccaacatagtgaaaccccgtctctactaa

SEQ ID NO: 250245 - DNA, 201 bp, Homo sapiens
ccacattagaatcccatgtcttgatttggtaggcaacaagcagtggtggtttggtggtggatgtgacctcactccaacatacttgaatcaagaagacgctrtccattttcacagaactctgaaggaggcttgtgaccagcatggtccagatctctaccccaaatttaaaaaatggtaggtaaagttactgaactttcatga

SEQ ID NO: 250246 - DNA, 201 bp, Homo sapiens
agctttgctagtcaccagggcattagcagtgggtttaaaatgggatgcagttgatcatgcctcctgtgcacatagttccagcctgtcttttatctgatacyagatgtcagagtacatgtgcagtgccacacctattcttattggtgtctctgtaggtgatggcatttaaagtcactgctttaacttttcattttgaagcca

SEQ ID NO: 250247 - DNA, 201 bp, Homo sapiens
tgctgaaaaaattaagctgctaaattaagtgtcctaatatagccagtaatgctgaatctcaaaagtccacattagaatcccatgtcttgatttggtaggcmacaagcagtggtggtttggtggtggatgtgacctcactccaacatacttgaatcaagaagacgctgtccattttcacagaactctgaaggaggcttgtga

SEQ ID NO: 250248 - DNA, 201 bp, Homo sapiens
tggttttaagtggttgtattaaattatttacttagaaatatttaatataaattgagtagtaatatctttttattccaaatgatttagaatggtagactatraactataaggtcatctatgcttgagaatgagaggctttttaatctggagtgggttgttaaattcttattccagatgagaattattattcctgatgttgac

SEQ ID NO: 250249 - DNA, 201 bp, Homo sapiens
aagcccctcaaccttggacttctcagcttccataacttaagaaataagttccttttatttataaattatgcagtttcagctattctgttgtaagcagcagracactgactaggaaataagtagatcacttaattttgtaatgttttaaagagagattttgaaatagtatgatttgggttaaaaactgactttacaacttta

SEQ ID NO: 250250 - DNA, 201 bp, Homo sapiens
agccagtaatgctgaatctcaaaagtccacattagaatcccatgtcttgatttggtaggcaacaagcagtggtggtttggtggtggatgtgacctcactcyaacatacttgaatcaagaagacgctgtccattttcacagaactctgaaggaggcttgtgaccagcatggtccagatctctaccccaaatttaaaaaatgg

SEQ ID NO: 250251 - DNA, 201 bp, Homo sapiens
cctgggcgagctgcgaaggaggccgggcgacatgaagaccaagatggagctgctgattctggagacccaggcccaggtgtgccaggctctggcacaggtaracgggggcgccaacttttctgtggaccggtgggagaggaaggaaggtaaggaggccggcccctggcgggagttggagacagggaaaaagggtcaggttcc

SEQ ID NO: 250252 - DNA, 201 bp, Homo sapiens; identical to SEQ ID NO: 49163

SEQ ID NO: 250253 - DNA, 201 bp, Homo sapiens
gagtaaatttttagaaatttcttaaagaatgcatgtattttggaacatgttttttgtttgcttccataatttcttaaatatacctttaccactctttcctyctttcacttgatacttattttggggcccctgtgatgaggcactatcttggctacccggtggctgtaacatggacctgccaaaaagaacctcatagtttag

SEQ ID NO: 250254 - DNA, 201 bp, Homo sapiens; identical to SEQ ID NO: 49164

SEQ ID NO: 250255 - DNA, 201 bp, Homo sapiens
cagttcttctctggggctatcaacactgtctttggtttctaatactgcagtcatgaccagttttctgtatccttttcacttactgttacccactttgcctygtcttcaccctgtccaaacaccggtctccctttcagcagtcagtctcattcccttttgactttacagtctcttatttggcaatctcatccagtttcttgc

SEQ ID NO: 250256 - DNA, 201 bp, Homo sapiens
tccttcttacattccccttgtgaaaaagcactgtgatgactcattcaccccccaggagaagctgtggcagcagctcagaagaggacggtaagtgactggaraacgaattctttcatggctaagtgggggaggtggagcagctcttaataatagcgggtgttgtgttgtcagatactttgtaatagttgtgttaatttcttt

SEQ ID NO: 250257 - DNA, 201 bp, Homo sapiens
ggaaacgggaaaataaccatcttcatgcaagtgttgctttcagttttgcacatactcttacattctctccttttttacatttctatacacaggaggtggcrgcatcagctgtgtacttcaagatgggtgtgttttcgaaaaggctggggtgagcatttctgttgttcatggaaatctttcagaggaagctgcaaaacaaat

SEQ ID NO: 250258 - DNA, 201 bp, Homo sapiens
gagaaaggggcatccttcacgcaataaaggaaaggatccaacagaaaattcattaaggaatctttacaagggtctctgcgataggtcttcaaatacatcartataaactagagaaccatacccatcccctagagagatgtttcagaaagataatatcaggtgaaaaaggtagccaaaagatgaaattattttccatggtct

SEQ ID NO: 250259 - DNA, 201 bp, Homo sapiens
tcgctttgtacagagctgtgccagggctgtagttccttcttacattccccttgtgaaaaagcactgtgatgactcattcaccccccaggagaagctgtggyagcagctcagaagaggacggtaagtgactggaaaacgaattctttcatggctaagtgggggaggtggagcagctcttaataatagcgggtgttgtgttgt

SEQ ID NO: 250260 - DNA, 201 bp, Homo sapiens
acgtaaaagtcaatgataaatggtgagagttagaaagggagcatagataaaattctttacacttttgcagggcttttgacaagttccacatacaaaaggtscttttaaaaaattaaagtattgtgggccgggcgtggtggctcacgcctgtaatcctagcactttgggaggccgaggcgggcagatcacgaggtcaggaga

SEQ ID NO: 250261 - DNA, 201 bp, Homo sapiens
tgccagggctgtagttccttcttacattccccttgtgaaaaagcactgtgatgactcattcaccccccaggagaagctgtggcagcagctcagaagaggayggtaagtgactggaaaacgaattctttcatggctaagtgggggaggtggagcagctcttaataatagcgggtgttgtgttgtcagatactttgtaatagt

SEQ ID NO: 250262 - DNA, 201 bp, Homo sapiens
ttattaatagattattgttagctgtagttggcctttcaggtcagaagttttacaccatcttagtagtagtagttgtgggttacaggcagtgaaatgaaatstttgagtccaaaacattccagattatgaggaaggccagaaagagctgggttatcctgagaagggatgcatttctttttcttaattgttgttctgctttaa

SEQ ID NO: 250263 - DNA, 201 bp, Homo sapiens
tgtagaatttaatctgctgtatgatcggggcacaaagtttggcctcttcactccaggatccagaattgaaagtatcttgatgtctttacctctaactgccyggtaaggagataactcattttagtagttatccctacactcccaattcccaaacacccacaaaatatgaaagttaacactgcagatgttgtgcctaggtct

SEQ ID NO: 250264 - DNA, 201 bp, Homo sapiens; identical to SEQ ID NO: 49169

SEQ ID NO: 250265 - DNA, 201 bp, Homo sapiens
ttttttattcttaggattttatttttcatttattttaagtaaagaggtatgtgtgtcattttttatgacgttttttgcttttgttttggacatgcatagaygggagtacatgcattcaccctcagagaattccaaagaagctgaaattctggaagttctacgccatccaagggactgggtgcgttgatgcaggcagaatgg

SEQ ID NO: 250266 - DNA, 201 bp, Homo sapiens
agtccacattagaatcccatgtcttgatttggtaggcaacaagcagtggtggtttggtggtggatgtgacctcactccaacatacttgaatcaagaagacrctgtccattttcacagaactctgaaggaggcttgtgaccagcatggtccagatctctaccccaaatttaaaaaatggtaggtaaagttactgaactttca

SEQ ID NO: 250267 - DNA, 201 bp, Homo sapiens
ttttatgacgttttttgcttttgttttggacatgcatagatgggagtacatgcattcaccctcagagaattccaaagaagctgaaattctggaagttctaygccatccaagggactgggtgcgttgatgcaggcagaatggctgtgcaggggtttggagggcacacgatgtgtgctccccatgccactggtcggcactttg

SEQ ID NO: 250268 - DNA, 201 bp, Homo sapiens; identical to SEQ ID NO: 49176

SEQ ID NO: 250269 - DNA, 201 bp, Homo sapiens
agtcatagaggggaaaagactcaagaacagattaatagttttatgtgctgcctcacagggtaaactttcatatgtctgatatgacatatgaaataataaargatattatctgaacctttttttccaccaacttttccctgtctttcatgctatagaaccatcaaattttatttctgaaagagacctgagagattgtttata

SEQ ID NO: 250270 - DNA, 201 bp, Homo sapiens; identical to SEQ ID NO: 49177

SEQ ID NO: 250271 - DNA, 201 bp, Homo sapiens
agaggggaaaagactcaagaacagattaatagttttatgtgctgcctcacagggtaaactttcatatgtctgatatgacatatgaaataataaaagatatyatctgaacctttttttccaccaacttttccctgtctttcatgctatagaaccatcaaattttatttctgaaagagacctgagagattgtttatagtacct

SEQ ID NO: 250272 - DNA, 201 bp, Homo sapiens
ttgaagttccatcagtgcatcctgccacaaagaaaacacttgtgggaaaagctaccagtggcttaaattattatctactactagaaattaaaatcatcccrgagacttatgggacaaattagcccatgacaatagttctcacacttttacgtccaggaaccatggagctgtggtatggttacaggggagacaaagacctgc

SEQ ID NO: 250273 - DNA, 201 bp, Homo sapiens
ccaggacacaacctcaagtactagaccagctgtgtgatcctcagaagttacttttttatggctgttttcccatctatgaaatatatatgtatttcatctcwtttaatcctcatactacatatatatatatatccatatacatatatatatatatatggatggaatatatgtgaagtgcttagaatattgtctgaagcatag

SEQ ID NO: 250274 - DNA, 201 bp, Homo sapiens
taattttctatggtatggtgtgtgactgttcttcaaagacagcttctttctgcctcccttatctctggtccttaagatggcaataaactctggggcctaasataactccagttcttctctggggctatcaacactgtctttggtttctaatactgcagtcatgaccagttttctgtatccttttcacttactgttacccac

SEQ ID NO: 250275 - DNA, 201 bp, Homo sapiens
gttttgcacatactcttacattctctccttttttacatttctatacacaggaggtggcggcatcagctgtgtacttcaagatgggtgtgttttcgaaaagrctggggtgagcatttctgttgttcatggaaatctttcagaggaagctgcaaaacaaatgagaagcagaggaaaagttctgaagactaaagatggtaaatc

SEQ ID NO: 250276 - DNA, 201 bp, Homo sapiens
acattgattttcatgtctgtttttttccatttgatccctggtttggcgccgctgtgttttccaggtgtgatgattacttctttatagcccatcgtggagarcggcggggcattggtggtatcttttttgatgatcttgactctccgtccaaggaggaggtgtttcgctttgtacagagctgtgccagggctgtagttcctt

SEQ ID NO: 250277 - DNA, 201 bp, Homo sapiens
ggcactgtttattgaacttttcagattatgaatcagtctaaattcttttgagtagtagaaattatccttttgaaatgggagagggagacccgtttacatcytatgttaaaggcagatgcagggttttaaactggaaggagtccagatctgactaggggagttaacatattgaaccaagttttagttgatgctaagggtatt

SEQ ID NO: 250278 - DNA, 201 bp, Homo sapiens; identical to SEQ ID NO: 49160

SEQ ID NO: 250279 - DNA, 201 bp, Homo sapiens
cattagaatcccatgtcttgatttggtaggcaacaagcagtggtggtttggtggtggatgtgacctcactccaacatacttgaatcaagaagacgctgtcsattttcacagaactctgaaggaggcttgtgaccagcatggtccagatctctaccccaaatttaaaaaatggtaggtaaagttactgaactttcatgaccc

SEQ ID NO: 250280 - DNA, 201 bp, Homo sapiens
accggcagattttgagctgtgatactgacacatctatattaaatgaagttcagtctagttttccatcttatgttttcaagcaaagaccactgaaccaggayacaacctcaagtactagaccagctgtgtgatcctcagaagttacttttttatggctgttttcccatctatgaaatatatatgtatttcatctcatttaat

SEQ ID NO: 250281 - DNA, 201 bp, Homo sapiens
ggttctgaatcccttcagaatttgattacctactgtttcttaattgcttgtaaattaaaaggcaagcagcccactgagaaagaaatttttgaaacaatatwgatctcttaaattcagtaataatagaacacccttcaagtctacccattcctatttttaaccttagctttctctcatatatcataactgatagatgccatt

SEQ ID NO: 250282 - DNA, 201 bp, Homo sapiens
ctgaacagtagaatctgaagggagaatattccagtgatttattttagatgatggcaggagaatgttgaagaaatattcagtttagtgatatgagaaggtcyagtatttgcccaatattaatagcatatgtcataaagctaagctagttatctaattgtattgtacataaaatgataaatacactgatataaaagatttggg

SEQ ID NO: 250283 - DNA, 201 bp, Homo sapiens
agcttcatggccccgcctgtgaccgacctgggcgagctgcgaaggaggccgggcgacatgaagaccaagatggagctgctgattctggagacccaggcccmggtgtgccaggctctggcacaggtagacgggggcgccaacttttctgtggaccggtgggagaggaaggaaggtaaggaggccggcccctggcgggagttg

SEQ ID NO: 250284 - DNA, 201 bp, Homo sapiens
tttgcccaatattaatagcatatgtcataaagctaagctagttatctaattgtattgtacataaaatgataaatacactgatataaaagatttgggaaacrggaaaataaccatcttcatgcaagtgttgctttcagttttgcacatactcttacattctctccttttttacatttctatacacaggaggtggcggcatca

SEQ ID NO: 250285 - DNA, 201 bp, Homo sapiens
ttgggaggctgaggtgggcagatcacctgaggttaggagtttgagaccagcctggccaacatggtgaaatctcctctctactaaaaatacaaaaacttagstgggcgtgctggcacgcacctgtagtcccagctattcgggcagctgaggtggaagaatcacttgaacctgggaggcggaggttgcagtgagcggagattg

SEQ ID NO: 250286 - DNA, 201 bp, Homo sapiens
cgtctcaaaaaaacaaaacaaaacaaaacaaaaagaatggtattgactgactctaaccttcccatatttcctccaacatagaaggaatgaacctgaacttyagtgtgcacccagagttctttgcaaacataaattcattacatctgaaggaataccttatgtacgaggttaaattgaaattgagaacttgcttttggaaaa

SEQ ID NO: 250287 - DNA, 201 bp, Homo sapiens
cgtgacaagaaagcctcttttatctctcccgtcccttccacagcaccgtccccgccccactctcttcccttcggaccagcccttctgggcgcgtcggattsttatctcccgccccgcgcagggacgccgcaggcggcgataggatccggactacagctcccagcgcgccccagttcccgcccccgcctccggagcccgacg

SEQ ID NO: 250288 - DNA, 201 bp, Homo sapiens
aggtaaattgccattttgtgctatgggcgtgagctctgttatccaccccaagaatcctcatgctcctactatccatttcaactacagatactttgaagtaraagaagctgatggtaagggtctcaggagctacggaaagtactgtcgtgcaaaatgtgcattttaaaacagataagagggcataacatctaaaagcgagaa

SEQ ID NO: 250289 - DNA, 201 bp, Homo sapiens; identical to SEQ ID NO: 49175

SEQ ID NO: 250290 - DNA, 201 bp, Homo sapiens
ttttattcttaggattttatttttcatttattttaagtaaagaggtatgtgtgtcattttttatgacgttttttgcttttgttttggacatgcatagatgrgagtacatgcattcaccctcagagaattccaaagaagctgaaattctggaagttctacgccatccaagggactgggtgcgttgatgcaggcagaatggct

SEQ ID NO: 250291 - DNA, 201 bp, Homo sapiens
ctttcagttttgcacatactcttacattctctccttttttacatttctatacacaggaggtggcggcatcagctgtgtacttcaagatgggtgtgttttcraaaaggctggggtgagcatttctgttgttcatggaaatctttcagaggaagctgcaaaacaaatgagaagcagaggaaaagttctgaagactaaagatgg

SEQ ID NO: 250292 - DNA, 201 bp, Homo sapiens
aagtttatttaattcatctatacattagagactcatagtaggcatgtagtaagtacttcctgaatttaattctgctgatttctcttagtcttcttgtaatmccctccagccttatgtcaagatgtagacttcatttaatgtctttgctgctttgtaaatttggaatcacaccttttttcattcatcttaaagatttcacgg

SEQ ID NO: 250293 - DNA, 201 bp, Homo sapiens
tatcaaggcattcaaggtaactgaatatagctcatgactcatattttactttccaggtaaattgccattttgtgctatgggcgtgagctctgttatccacyccaagaatcctcatgctcctactatccatttcaactacagatactttgaagtagaagaagctgatggtaagggtctcaggagctacggaaagtactgtcg

SEQ ID NO: 250294 - DNA, 201 bp, Homo sapiens
acacaataatagtgggagactttaacactccactgacagtattagacagatcatctaagcagaaaattaacaaagatattcaggacctaaactcaacactrgaccaaatgtatctaatagacctctacagaactgtccatccaaagacaatagaaaatacattcttctgattgccacatgacacatactctaaaaatgacc

SEQ ID NO: 250295 - DNA, 201 bp, Homo sapiens
tcattctcatattagtgtgtgcttggcactggagaaacaggttagtacataactagttcacctgagtccaaaactaccaaatgtgaagtagaagctaaatrtagaagatgaaaatgtttacctgtttgagagtgagagttaaggtaattattaaaatgaaaatttcatgcttctcctttattcccattaaaaataaataag

SEQ ID NO: 250296 - DNA, 201 bp, Homo sapiens
acgctagctcctatgtcctttggtgatgtcctcatcattatttgagtacttctttatattctggcacaggatattctaggtttatcttgtgattgccctgytccagccctggaatcagccatttcttcagggaaccctggttctttttagtggagaatggtattagaaatcaatgtctggttgctaggtttagaccaatga

SEQ ID NO: 250297 - DNA, 201 bp, Homo sapiens
tatggccattttcctgatattgattcttcctatccacgagcatggaatgtttttccatttgtatccgctcttatttccttgagcagtgctttgtagttctscttgaagaggtccttcacatcccttgtaagttgtattcctaggtattttattctctttgtagcaattgtgaatgggagttctctcatgatttggctctct

SEQ ID NO: 250298 - DNA, 201 bp, Homo sapiens
ataattaaatataataaatgatcactgtctttttcctcaagtcctcccactagtctattgtttggatgaagttcatctttgaataggttgattccttaagragggcttatgttgcagattttgcatgtttaaaactgcttactttgtaaattttttatggcctttaggcttcagggggctgcttgatagtatttaaatctt

SEQ ID NO: 250299 - DNA, 201 bp, Homo sapiens
aagtaaggctaaatccagccaaaaggacagcttattcacagtataagagaaatgattatgggaagacattttagacattcaaaaagagaacactcaaccastccaagcagggggttaatttgtacatctccacctcactctggcccaccaagcataagacaatggtcctcaaagccagactttttaaagaaactactgatg

SEQ ID NO: 250300 - DNA, 201 bp, Homo sapiens
tatacactgtttgtgggagtgtaagtcagttcagccattgtggaagacagtgtggcaattcctcaaagacctaaagacagaaataccattcaacccagcamtcctattactggatatatacccaaaggaatataaattattctgtcataaagacataagcatgtgtatgttcattgcaccgctattcaatagcaaagactt

SEQ ID NO: 250301 - DNA, 201 bp, Homo sapiens
gactcacatgatcacaaagtgaagtcccacagtaggccatctgcaagctgaggagcaaggaagccattccgagtcccaaaacctcaaaagtagggaagccracagtgcagcttttagtctatggtcaaaggtccagaagtcccaaagctaagaacttggagtctgatgttcaagggcaggaagcatccagcatgggagaaa

SEQ ID NO: 250302 - DNA, 201 bp, Homo sapiens
gttgagataacacagcaggaaggacaggtttggtggagaatgaaaatgacttcatttgttcagccatgcaacaagtatttgaatatttggctgttaccctrtgtcaagtattgagccatgtgctggggattccagtgatgaaccccaaagcttacagattaggaacggatgcaatgcaaaaaaaactcccagctgtaacac

SEQ ID NO: 250303 - DNA, 201 bp, Homo sapiens
tgacctcagataaaagaatcagtatgttgtgtagcttacaaacctgtaccaaatttcaaatggctatattctattttagatgaatcttagcttccaaagatttttgaaacaaccaccttaatcaggaatttcttgatactaaaactttccaaagtcataatcatcttgggaaatctcatttaacagctcctaaaatcttat

SEQ ID NO: 250304 - DNA, 201 bp, Homo sapiens
gacctcagataaaagaatcagtatgttgtgtagcttacaaacctgtaccaaatttcaaatggctatattctattttagatgaatcttagcttccaaagatttttgaaacaaccaccttaatcaggaatttcttgatactaaaactttccaaagtcataatcatcttgggaaatctcatttaacagctcctaaaatcttatt

SEQ ID NO: 250305 - DNA, 201 bp, Homo sapiens
aggaaaagttcccatttcctcaagcaatttgatatatagaaatatgaatcaagacttccaacaactatgagaggactaataatttctactctaaagtagcrtaatctcaacaaatttcaactgttccacagaagcagccactaaatacttccttatacaaacaaccacatctatagtcctcataataggtattctctctaa

SEQ ID NO: 250306 - DNA, 201 bp, Homo sapiens
ctagtttatgggcataaataacctgcctagttattgcctagtacatgggcagaggggagttttggaccagacttgagagatcgtgctcttacccactgctrctctgaacacataataaataaagtataactcactgttattaaagcacagggtgtgagggggaggactgaggagtgccgctgttgagagggcagaagtcag

SEQ ID NO: 250307 - DNA, 201 bp, Homo sapiens; identical to SEQ ID NO: 49186

SEQ ID NO: 250308 - DNA, 201 bp, Homo sapiens
tgaaaacctgtctttactaaaaatataaaaaattagccgggcgtggtggtgggtgcctgtaatcccagctactcagggggctgaggcaggagaatcgtttrtttgtacccgggaggcgaaggttgcagtgagccaagactgcattactgcactccaacctgggcaacaagaatgaaactctatcccaaaataataataata

SEQ ID NO: 250309 - DNA, 201 bp, Homo sapiens; identical to SEQ ID NO: 49188

SEQ ID NO: 250310 - DNA, 201 bp, Homo sapiens
caagctgttagataaacctgaagagcatcttaatgattttaatgttttctatgtttttaatttttttggcatattaggagtgctgagaagagactacataygtgtttgtgctgtcctgtgctgtacagtggctctatccttcactgttgataaatactaatgtatttattagcttcctagatactgtgtaggtcacaaaat

SEQ ID NO: 250311 - DNA, 201 bp, Homo sapiens
ttgggaaactgcagagcaccttccagagaaggataaggcagggtactagataaacagaggcatcctcttctaggagaaagagtgttacatttataaagagwccactgtattttaaagaagttcttactgaacctttacatttatcttgggagatgggtggtggtatcctcatccgtgaggtagttgcatcctcaccagtat

SEQ ID NO: 250312 - DNA, 201 bp, Homo sapiens
tatagctaactaagtttgcaactgtcttaggaaatctgatgttggtgttttcagaaaacctgacgttcctcaggctgttattgattattggcttgccttcrcatttgtattctctcctgctctttctcacaatcacattatcctgccttcagagccccatctgagatctgcctgctctggacagccctctaggattaggga

SEQ ID NO: 250313 - DNA, 201 bp, Homo sapiens
gccggtctccagcccctaaccgcgagtgatccgccaacctcagcctcccgaggtgccgggattgcagacggagtctcgttcactcagtgctcaatggtgcycaggctggagtgcagtggcgtgatcttggctcgctacaacctacacctcccagccgcctgccttggcctcccaaagtgccgagattgcagcctctgccca

SEQ ID NO: 250314 - DNA, 201 bp, Homo sapiens
tcagcatcacaagcacatacttaaacaaaaaacacacttgatttggagtttaattagagtagcctaaaaaagcatgcattctttgttgcaataattcattrtcatttaaatacgtttaattttctttctcttttttctagggataagtagtaaaaaaaaaaaaaaaagggggggttttttcctgtaataatatcaaaattt

SEQ ID NO: 250315 - DNA, 201 bp, Homo sapiens
tgcattctttgttgcaataattcattgtcatttaaatacgtttaattttctttctcttttttctagggataagtagtaaaaaaaaaaaaaaaagggggggktttttcctgtaataatatcaaaatttgtatctggcttaacacatctgaccttacactcttcagaggaagtgaacacatgttctatgagtaattccctaga

SEQ ID NO: 250316 - DNA, 201 bp, Homo sapiens
cctcttcaaagagaactacaaaccactgctcaatgaaataaaagaggacgcaaacaaatggaagaacattccatgctcatggataggaagaatcaatatcrtgaaaatggccatactgcccaaggtaatttatagatcaatgccatccccatcaagctaccaatgactttcttcacaaaattggaaaaaactactttaaag

SEQ ID NO: 250317 - DNA, 201 bp, Homo sapiens
ccctatttaataaatggtgctgggaaaactggctagccatatgtagaaagctgaaactggatcccttccttacaccttatacaaaaattaattcaagatgrattaaagacttaaatgttagacctaaaaccataaaaaccctagaagaaaacctaggcaataccattcaggacacagacatggacttcatgtctaaaacac

SEQ ID NO: 250318 - DNA, 201 bp, Homo sapiens
ggtgattcctcagggatctagaactagaaataccatttgacccagccatcccattactgggtatatacccaaaggattataaatcatgctgctatagagayacatgcacacgtatgttcattgcagcactattcaaaatagcaaagacttggaaccaacccaaatgtccatgaatgatagattgaattaagaaaatgtggc

SEQ ID NO: 250319 - DNA, 201 bp, Homo sapiens
tgttcatgaaaagttgttggccaaggattagtttcatgaattcagtttttctgaaatagattattctgatgattcagacaattctaatgttagttctgttyagaaataactccaagaacagtttttatattttattttcacattgactatcagtcagatttgcttcagcctcaaagaacgtgtttatgtaaaattaaatga

SEQ ID NO: 250320 - DNA, 201 bp, Homo sapiens
tactttccagatgtaatttaaggcctagagcaaagaacaaaaacatgtttaagtggagaaatttagccctgacctctattgatttgaagtaccaatttttygttgtttttttaaagatatttcaaggaaacaaagattatcaccaggatgtgcgtaataactttttgccaccaattattgcacgttttattagagtgaatc

SEQ ID NO: 250321 - DNA, 201 bp, Homo sapiens
tggtgcatatcatcttgcttgcaagaggaggaagctctgaactccatcacatattttagaacattcttggcacgttacttgtggactgttcctgccctccycctacacaaggttatgaaaaaagacaactctgtaattattttcttcatcagcatgcatgcaaaagtcctgtttttcatcagttagtatttcttttgttaa

SEQ ID NO: 250322 - DNA, 201 bp, Homo sapiens
acaatgagatactatctcatggccagttagaatggtaatcattaaaaagtcaggaaacaacagatgctggagaggatgtggagaaataggaatgctgttayactgttggtgggagtgtaaattagttcaaccattgtggaagacagtgtggcgattcctcaaggatctagaactagaaataccatttgacccagccatccc

SEQ ID NO: 250323 - DNA, 201 bp, Homo sapiens
gttgaaagatgatgtggttaattttccctagtgatttctgcctttggtgttaatatggcttttgtttgtctgtttttgtctttgtaacttcagatgtagcrctggctgcagttcttgtccctgtgctggtcatggtcctcactactctcattctcatattagtgtgtgcttggcactggagaaacaggttagtacataact

SEQ ID NO: 250324 - DNA, 201 bp, Homo sapiens
aaagcataactctcatcagcttgctgtgtgactttggccagattacctgacctctccattttttctcttgtaaaaaatacagggaatgaactagtatgtgyaacgtgcttagaaaagtaaacagcacctaagatataatatatgcttagtaaatggtagtggccattgttgttgttcttgattaagagcagtggttctcaa

SEQ ID NO: 250325 - DNA, 201 bp, Homo sapiens
gcttagcagactatctcactttgtaaagctgatttgtacagccgaactcctgccctgctcctaatccttgcacagtatgacttcctcctgactgaaacctkgtcctcttcctctttatcagagcactgctacattggggaatgtgaattttgttttggcatgctttacactttgatggcacttttactttatatctggaaa

SEQ ID NO: 250326 - DNA, 201 bp, Homo sapiens
atggctgctggcaatcccgaaggcttacggttttaacacggagaaattctgtattttccctattgtacaaggtccaggaaagggtgagttggccctcacaytgacccagtgtgattcagtacccacccttggaccagtcaaataaccagggggcatgaggtcatattaaaactgttgggaaactgcagagcaccttccaga

SEQ ID NO: 250327 - DNA, 201 bp, Homo sapiens
aaaatgaggacaacactagcatctcctccatagagttcttatatggattacctaaagcacttagggtgctacctggcaattcattaagtttactgaattaytgtgttacttgtattaagttagatttcttgcggttatttcagcatgacttttcttcatagcagaatcaaaatcaattatttgtgtaagtattggtttaat

SEQ ID NO: 250328 - DNA, 201 bp, Homo sapiens
agcgtgaatgaatgcacctcttttaatacagcttaaattggatcaatagagggttggtaaaatgtattatggcatatccacagaatagaatatcatttagytcttaaatttgatgagtaggttttatagtagaaacatgtctaccattcattatgaaataaaataatcaaggcagtatgtaataagacaaaaaaatgtttc

SEQ ID NO: 250329 - DNA, 201 bp, Homo sapiens
agtgccagcaatttgggcacactttctcctttgcatgctttcagcttctgacttcaataggcatctccaatattataaaagtccccctagtttttgttctygtagttgcctgtctcctttttcttgccagtggatgttgctggggagcattcaggtagcttcactaatctggtgtaatagaaaagtaatgagaaatggagg

SEQ ID NO: 250330 - DNA, 201 bp, Homo sapiens
acatctgtggtgtaagtatatatgcaatttaaaaaatatatgctatatataattagcattctgggtagcattgggctaagaactagctagatctcagcagyatcactgttaatggtgttcatgaaagaacatttaggcagtaagcactcacattagtgtgctcagtgtctgtttttttgttttgttttgtttgagacagag

SEQ ID NO: 250331 - DNA, 201 bp, Homo sapiens
attagcattctgggtagcattgggctaagaactagctagatctcagcagtatcactgttaatggtgttcatgaaagaacatttaggcagtaagcactcacrttagtgtgctcagtgtctgtttttttgttttgttttgtttgagacagagtttcgctctcattgcccaggctggagtgcagtggcgtgatctcggctcact

SEQ ID NO: 250332 - DNA, 201 bp, Homo sapiens
tgtaagcaaggaaggttccttaagaaagatgacttttgaacttgtctgaagaagtaatcaattcgttcaacagaaaatacttactgagtgccttctctttrtgtgccaggcattgctctggttcgagtgatagagtaaagtgaacaaactcctgccttcctggagcttacattctagtagtgagagattgatgataagcaa

SEQ ID NO: 250333 - DNA, 201 bp, Homo sapiens
caaatgttaatctcctctagcaacaccctcacagacacacctgggaacaatacttttcatccttcaatcaagttgacactcagtattaaccatcacagtayttaattcgtaatagctttttgtttccattgtaatgagactctttttttaaggtagtgtttcagtaaagtggtcttgagacatctaaaataacggtctcct

SEQ ID NO: 250334 - DNA, 201 bp, Homo sapiens
tttattttgttttggtactgtaaataataccaataatcatctttaatctgttcattcccaggaagtcatcttacccagtagtcaaaatctattttacgacrttataaacacaagacaccaaaacagaatagttctttacttaattaatgcccacccataatccttcctctctctccaagggaataaggccaaggatttagt

SEQ ID NO: 250335 - DNA, 201 bp, Homo sapiens
acagtgatgatgggcagaaatggactgtgtacagagagcctggtgtggagcaagataaggtaaaatgattaccaaggtatttttaaaaaacattttttaartgggtggttgccaagtcacagagctctcctgtataaaagagatgtagaagtttagaatgtcttatactaccctcttgtggttattttaggtagtgttatt

SEQ ID NO: 250336 - DNA, 201 bp, Homo sapiens
tttaatatcctcatctgctaatgttatcctatgtcatatatgggtctttttatgttgattgatattatggatcatattttacctgcccgaattttttttaytggatgccagacattgtgttacattgtttggtgctggggttttttgttattaatattcccttaagtatttttgagctttattctggaatgtagttaagct

SEQ ID NO: 250337 - DNA, 201 bp, Homo sapiens
gtcacaggccaggcgtggtagctcacacctgtaattccagcattttgggggaggtctaggtgtgagtatacttgaggacaggagtttgagaccagcctgarcagcatagcaagacccctttctacaaaaataaaaaatcaccaggtgcagtggctcattcctgtaatctcagcactttgggaggctgaggcaggtggatcc

SEQ ID NO: 250338 - DNA, 201 bp, Homo sapiens
agatgggtcttattcagatgtgtatccctttgatctttaaatggagaagtccttgtgcctaaggaagatagatgtctcccatcagtaccaaaactatgggkctgggcatgatggctcactcctgtaatcacagcactttgggattgcttgagctcaggagtttgaaaccagcctgggcaacatggcaacacaccatctcca

SEQ ID NO: 250339 - DNA, 201 bp, Homo sapiens
ctatattaaatatttttgtttcataaacttttgataaaaatgtgcagcatcttaatatttttccaaattatgattattttcttaaaaattgatccttattrtcatactttccagatgtaatttaaggcctagagcaaagaacaaaaacatgtttaagtggagaaatttagccctgacctctattgatttgaagtaccaatt

SEQ ID NO: 250340 - DNA, 201 bp, Homo sapiens
aactatgggtctgggcatgatggctcactcctgtaatcacagcactttgggattgcttgagctcaggagtttgaaaccagcctgggcaacatggcaacacrccatctccactaaaaatacagaaaattagccaggcatggtggcgcatgcctgtagtcccagtttcttgggaggctgaggtgggagaatcacctgaaccca

SEQ ID NO: 250341 - DNA, 201 bp, Homo sapiens; identical to SEQ ID NO: 49183

SEQ ID NO: 250342 - DNA, 201 bp, Homo sapiens
gcccgaattttttttattggatgccagacattgtgttacattgtttggtgctggggttttttgttattaatattcccttaagtatttttgagctttattctggaatgtagttaagctactggaaacaatgtgatattttcaaggcttgcttttaaacttcattaggcaggacctggacagccttcagttttcttatttttc

SEQ ID NO: 250343 - DNA, 201 bp, Homo sapiens; identical to SEQ ID NO: 49185

SEQ ID NO: 250344 - DNA, 201 bp, Homo sapiens
tcttttactggccataggtcatttctttacatgcagctgaagatttaagggataactccttatatattctagaagtgtctctctctctctctctcactcaytctatctttatagctctcttctctcctaatctctgcctacaaattctagctaccttattggcctcccactctcagctctgtctctgcaactcagtgagac

SEQ ID NO: 250345 - DNA, 201 bp, Homo sapiens
tctattacagccctctgtgtccatattgagtttagaactcagcagtgtcacttttaatatagtttttgtgtaagtgctgtactgttccaaaaggtgatttrtaaataactgttttgaaggacaaaatgctgttattttaaaagcatatattcatcatcctactagaaagagatttatttgaatcttattgttatggaatgc

SEQ ID NO: 250346 - DNA, 201 bp, Homo sapiens
cccagttcctgcctggcttagtgcctggatattcagagtttcagtaaatgagttcctttgagaattccaaattttgtttttgagactagagatgctctatrctagttaaaaaaagaaaaaaaaaacctgttcgtaaataagtttgtaaattaggactgaggctctttaagcaagcttcatttccctccactgaaagtgggc

SEQ ID NO: 250347 - DNA, 201 bp, Homo sapiens
tttgagactaatttgaaattactttttcatagattaatgtacagtttccttattcaattaataaacatttatttagcatccaccacttactaaaaactacrtgaagttcttattcataggcttttgaaagttttcatcttttctagcaaatattagcactacatttgttcttaaaaataatcaacatagtagaaagttcta

SEQ ID NO: 250348 - DNA, 201 bp, Homo sapiens
actttgtggctggaacaactggactaagtggtttgggtttattaactccttgaatcttcactacaatcagctgagatagttattgttatcccagttcaaamgtaaggacattgagacacaaagaatataaggtaccttgatgcaggagggcatattactccataggcagagtactctgctttgcttgtttctggatctgat

SEQ ID NO: 250349 - DNA, 201 bp, Homo sapiens
gactaatttgaaattactttttcatagattaatgtacagtttccttattcaattaataaacatttatttagcatccaccacttactaaaaactacatgaarttcttattcataggcttttgaaagttttcatcttttctagcaaatattagcactacatttgttcttaaaaataatcaacatagtagaaagttctattaca

SEQ ID NO: 250350 - DNA, 201 bp, Homo sapiens
gtcattattttggtgctcagattgtcccaaatctccagtgggagcctcttcacgctagctcctatgtcctttggtgatgtcctcatcattatttgagtacytctttatattctggcacaggatattctaggtttatcttgtgattgccctgctccagccctggaatcagccatttcttcagggaaccctggttctttttag

SEQ ID NO: 250351 - DNA, 201 bp, Homo sapiens
cagtttttctgaaatagattattctgatgattcagacaattctaatgttagttctgtttagaaataactccaagaacagtttttatattttattttcacaytgactatcagtcagatttgcttcagcctcaaagaacgtgtttatgtaaaattaaatgagcgctggcagcaagccacacctttttttgaaaacaggaaaag

SEQ ID NO: 250352 - DNA, 201 bp, Homo sapiens
aacaaacatatgaaaaatgctcaacatcactagtcatcacagaaatgcaaattaaaactgcagtaagataccactttgccctagtcagaatggccattaaraagtcaaaaaacaatagatgttggcgcagacagggaacacttatacactgttggtgagaatgtaaattagttcaacctctgtggaaaacagtatggaaat

SEQ ID NO: 250353 - DNA, 201 bp, Homo sapiens
ccaatgaaacagaatagagaacccagatataaagccaaataactacaaccaactgatctttgacaaagcagactgaaacatacaatgggggaaaggacacmctattcattcagtggtgctggaaaattggatagccatacacagaagaatgaaactggttccctatctctcaccgtctacaaaaatttactcaagatggat

SEQ ID NO: 250354 - DNA, 201 bp, Homo sapiens
agaagggcttatgttgcagattttgcatgtttaaaactgcttactttgtaaattttttatggcctttaggcttcagggggctgcttgatagtatttaaatyttggattcaaatgttatttctggtcgggcacggtggctcacgcctgtaatcccagaactttgggaggctgaggtgggcagatcacgaggtcaggagatcg

SEQ ID NO: 250355 - DNA, 201 bp, Homo sapiens
ttggacagttcccaaacttgggcccatgtgataatccccattctctgctttctctggttctggatagctcatagttacaagattaagtcatgtggtcatcrtgattagatctgccacaaatgaggtctggctaatcaagtcccaagtggggattactgcttagcagactatctcactttgtaaagctgatttgtacagccg

SEQ ID NO: 250356 - DNA, 201 bp, Homo sapiens
cataactctcatcagcttgctgtgtgactttggccagattacctgacctctccattttttctcttgtaaaaaatacagggaatgaactagtatgtgtaacrtgcttagaaaagtaaacagcacctaagatataatatatgcttagtaaatggtagtggccattgttgttgttcttgattaagagcagtggttctcaattat

SEQ ID NO: 250357 - DNA, 201 bp, Homo sapiens
ctttccccatttgctctgagaatactcgccagtggcacttgcggctgcatcatttaccccaaagtaaatttgccacaaaatagcaccctatgattattatktttgcattgctctagtatatcaactttggaaacaaaagacattatcctatttatagcactccatttttagtagcggtatttccacttacaaaataaaatc

SEQ ID NO: 250358 - DNA, 201 bp, Homo sapiens
aattattgttccacccccagctcagtgagaggagtcagagcatgcaatagaggaatgtggcagaaaggcatgactgtctccagcccacccaaatcttaatrtgagttctgtgctctcctttttgacctttgctctgcctcttcagccttctgcctgttggtgtgcttcagtgttttttgatccccaccatctcagatcatt

SEQ ID NO: 250359 - DNA, 201 bp, Homo sapiens
gcattctttgttgcaataattcattgtcatttaaatacgtttaattttctttctcttttttctagggataagtagtaaaaaaaaaaaaaaaagggggggtkttttcctgtaataatatcaaaatttgtatctggcttaacacatctgaccttacactcttcagaggaagtgaacacatgttctatgagtaattccctagat

SEQ ID NO: 250360 - DNA, 201 bp, Homo sapiens
tgggcagatgggaattgttacaccctcttctttctacttttgtgtaattttgaaaattcctataaagaaaagtggttatgttaaaataaaacaagagaatyatatatttagataatacatagtggcactgttggtagagtggaagagtggcgtggggaagattctgagcacaggtttcaaattgctcgctgaattctagtc

SEQ ID NO: 250361 - DNA, 201 bp, Homo sapiens
gccaaatctgcaaatcactgatatccctgaattggatggggagaaagcaaacaacttggaaaacatatttcaggatatcatctatgaaaatttccccagcytcgctagagaggccaacagtcaaaattcaggaaatacagagaacccctgcaagattctacacaagatctccccaagacacataatcatcagattttccaa

SEQ ID NO: 250362 - DNA, 201 bp, Homo sapiens
atgaaatcagatacgttagttaacagttgcaacttactcttctgaacacttttctgtttcgtaaaagctccatgctttctcattttaagatctcgcagatrtattatgtgaccaaagtgacagttatttagagcaagtatagtcagactcaccagttcaccaaaaaaaaaccttgaaaactcactggaaaagtttaaacct

SEQ ID NO: 250363 - DNA, 201 bp, Homo sapiens
ataatatcaaaatttgtatctggcttaacacatctgaccttacactcttcagaggaagtgaacacatgttctatgagtaattccctagataaatgtgcagycaaagaatcattaagatcaaattccagtgtttattcttagctgaaataaaattaaaattcaaaaattaggttaacaggcttctaccctttttgatcagtt

SEQ ID NO: 250364 - DNA, 201 bp, Homo sapiens
tgatgttcacatttgaagtatatgggctaatgatttcgtgggatgtgtgtctgatgcttcctcattattagattccagtgacagacttttggcaagaataycacagatgcgctgttctcagtgtatcatatcatggcacatgagattgatttgtcccatttctggtgctattaactttgatattttggctaaggtgatgtc

SEQ ID NO: 250365 - DNA, 201 bp, Homo sapiens
taaaattctatgcagaggctgtcagtttaaaacgtagcaaataacaggcatgggggctcacatatgtcttctcaacagtttgggaggttgacgtgggaggmttgcttgaggctgggagttccagaccagaaaggtagtgagacccccatctttaccaacaatttaaaaaattagttgggtgtggtggcacatgcctgtagt

SEQ ID NO: 250366 - DNA, 201 bp, Homo sapiens
aagatacagcaaacccccatgacacaagtttacctatataacaatcctgcgcatatacccttgaacctaaaataaagttaaaaggaaaactacctgttggrtactatgttcactctcttggtggtggggtctgtaccccaaacctcagcaccatgcagtatacctatgtaacaaacctacacatgtaccccgtatctaaaa

SEQ ID NO: 250367 - DNA, 201 bp, Homo sapiens
gtgagttggccctcacattgacccagtgtgattcagtacccacccttggaccagtcaaataaccagggggcatgaggtcatattaaaactgttgggaaacygcagagcaccttccagagaaggataaggcagggtactagataaacagaggcatcctcttctaggagaaagagtgttacatttataaagagtccactgtat

SEQ ID NO: 250368 - DNA, 201 bp, Homo sapiens
tactctgtacaagtggctacaagctcactgccaacagggtctagacagatgaaataaaggagtgaaatggcctaggcatatgaagaataacagcatagccrtgatgataaatgatagctgagcttcaggactggtggcattgtggagtgatagggctgtggcaaactggagtgtgactttctttttcaaaggggacagctg

SEQ ID NO: 250369 - DNA, 201 bp, Homo sapiens
tttaatatgctttgaaagtagaactagttgcttttcaaaatctagcaaaactcctagtaaaagttgaaaaggtatttatcttttttcaaaaaattgaaagagcatggttttggctgttatagaattctgcagtgttgttactcaagtaccatttctactatttctcttctttatgcctttgtctcttgcctagacaacttc

SEQ ID NO: 250370 - DNA, 201 bp, Homo sapiens
gtatatttaatgactactaatttatatttacttttatttgttcagaattgaaatctccttgaacttataaattatataagtaaccattgattattttgacytaacttgtcttctcttgcctcctgtgaatagatatactaagaacaatgtcaggtcttgtgatttgttaaaggatacaaagttacagctagataggaggaa

SEQ ID NO: 250371 - DNA, 201 bp, Homo sapiens
aagttgcagattcctaaggagagcattgttccgtggcacacctcaggaagttgaatgagcttccatttaattgagaacataaataagatttctcaagtttygtaacaatattaattatacttctggtttatcagagtcagatgcactatctcccctcttttgaatacagaatgtttccatttaacaccttctagagcttaa

SEQ ID NO: 250372 - DNA, 201 bp, Homo sapiens
tctttatgcctttgtctcttgcctagacaacttctaatcgagttcctatttctgtttgctggctgccattcacactgctgccaagttgtttccaaaatacwtatctgatcatttccctgcataaaaatcttgagaaactacttattatgataaaaaacagttgtccagatttccttaacctggtcttctcgttctttcaca

SEQ ID NO: 250373 - DNA, 201 bp, Homo sapiens
cattttttgaaagtttgcctggattcagataactttctctgactttccccatgttggttctttcccatcttctgaagtattttcacaaagatgaattactytctcatgctgcaggtacagctagagagaatcaagggttctcagaggcaggagatctcagcatcttttaactgcttaccagttgtcagaaggcatgtacta

SEQ ID NO: 250374 - DNA, 201 bp, Homo sapiens
atgtgcttgggtctatttctggactttgggttgcactccacagatgtatctatccacataccagaatgtgactgttttgtaaaggctttcagaggctttayggtatgtgttaatgcctgatagggcttagtctcctttcagaaacgttcatttttagtgttttcctgggtcttccttcctgtttgtttatccatgtgaagt

SEQ ID NO: 250375 - DNA, 201 bp, Homo sapiens
gagaattccaaattttgtttttgagactagagatgctctatactagttaaaaaaagaaaaaaaaaacctgttcgtaaataagtttgtaaattaggactgakgctctttaagcaagcttcatttccctccactgaaagtgggcagagctgatgtgcttttgttctagcaagtaactctctaccctctggttcatccttctaa

SEQ ID NO: 250376 - DNA, 201 bp, Homo sapiens
tcaggagtttgaaaccagcctgggcaacatggcaacacaccatctccactaaaaatacagaaaattagccaggcatggtggcgcatgcctgtagtcccagyttcttgggaggctgaggtgggagaatcacctgaacccaggaggttgaggctgcagtgagctgtgatcactccactgcaatccagcctgggcgacagaggg

SEQ ID NO: 250377 - DNA, 201 bp, Homo sapiens
atttaccgttgtgaattctgagtgctttctagtctaagtcattatttctgtttatggacttctccatttttacagccaggctgagagtgatttcatggaaragattatgtcatggtcagatttgtgcctctgtagtttccaggtcctccctcagtggggcccgtggcaccagctggctgaccttctgaaaggctgcagtag

SEQ ID NO: 250378 - DNA, 201 bp, Homo sapiens
tgatgaaccccaaagcttacagattaggaacggatgcaatgcaaaaaaaactcccagctgtaacaccagccatagaatatatgccatgggaggaagctagkggatcccagcttcatgaacaggctgtctaagcagagacacagcaaattagtatgagaacaatagggaaaggaaaggactttaggaaattccaaagaggag

SEQ ID NO: 250379 - DNA, 201 bp, Homo sapiens; identical to SEQ ID NO: 49199

SEQ ID NO: 250380 - DNA, 201 bp, Homo sapiens
tagtcccagtttcttgggaggctgaggtgggagaatcacctgaacccaggaggttgaggctgcagtgagctgtgatcactccactgcaatccagcctgggygacagagggagactctgtctcaaagtggaaaaaaaagaactgaaacaatgatgacattttttcaaactttcctatgagtttgattttgattatatatttt

SEQ ID NO: 250381 - DNA, 201 bp, Homo sapiens
cctctgttcactgcagtgaaaagggggcttccttatgttgcccaaggctgattatatcacctgtgccctggttcccctcgatctacctctcagggacccartcttactgattatcctctccccctcctgtatcttcagcctctttctctcttttggatacagttgttttaaggaataaagaagatggtgcaggttagactc

SEQ ID NO: 250382 - DNA, 201 bp, Homo sapiens
tgtttgagtgaaggcacagagatatggaatgtaggcaaaatagtgagtcatcgcatgtacgcttggcgtgggagagtcctgagaaataaccatagaggttyagtctgggcctggatcaggaaaggcttttctggaagagagaaatttagatttcattctatagatggaaagtcacttgagtgtcaagcaaagaggtgatat

SEQ ID NO: 250383 - DNA, 201 bp, Homo sapiens
gcaatatatgcttattaatggtctttagaaactacctagttgatctgacctagagaacaaacagggctctttttagcttattggagtccatacttaagtcrgaagacccagagtcaagttgctgccctgtcattgactagctgtgcaatccacttacagattcctgtgccctcctatttcatagggttgtctgaattagtt

SEQ ID NO: 250384 - DNA, 201 bp, Homo sapiens
tggatttgaaaccttttacccaaatgccaagttagccctcttgttaagttcttaaatcatcttaaaatcatttctatattaaatatttttgtttcataaacttttgataaaaatgtgcagcatcttaatatttttccaaattatgattattttcttaaaaattgatccttattgtcatactttccagatgtaatttaaggc

SEQ ID NO: 250385 - DNA, 201 bp, Homo sapiens
catcttaaaatctgattgcatctcagaccctcaaggctaaaaagagtccttaaataatttccttccagaattaggatccctgtatgcccaaaaagaataasaaagaatgagttggtcttctcagagacctcctgtctcttttttagggggatggtagtatataaatttattttttgaacctaagaagatgttttaaagcct

SEQ ID NO: 250386 - DNA, 201 bp, Homo sapiens
tttgtatatggatcctgtgacttagctaagtttctttactagttctagagaggttttgttttgttttatttgtcaattccttagaattcactactcataagataaagtatcatccttgaaaatgatatccttggaggtccacattactcttattcaagtgatgttgccatagcttaaaacatttttggaagtccttattca

SEQ ID NO: 250387 - DNA, 201 bp, Homo sapiens
tcatttcaattgctggattattttctcttgtaaggaggataccatgatttattccctctcatttttgggcatttggattatttccaatttttcactcttaygcagaaacagggagaacatctttaaggatgcatctttttttagtttctgagaataaattctaggaatggaattgccaatagatttttgtacatattgccc

SEQ ID NO: 250388 - DNA, 201 bp, Homo sapiens
tcccagcactttggaggccaaggtgggtggatcacttgaggtcaggagttggtaatgagcctggctgacatgatgaaacctcgtctctactaaaaataccaaaaaaaaaaaaaaaattagctcagcatggtggcatgtgcctgtaatcccagctacccgggaggcggaggttgcagtgagccaagatcacaccactgcact

SEQ ID NO: 250389 - DNA, 201 bp, Homo sapiens
ttgtttgtctgtttttgtctttgtaacttcagatgtagcgctggctgcagttcttgtccctgtgctggtcatggtcctcactactctcattctcatattartgtgtgcttggcactggagaaacaggttagtacataactagttcacctgagtccaaaactaccaaatgtgaagtagaagctaaatatagaagatgaaaat

SEQ ID NO: 250390 - DNA, 201 bp, Homo sapiens
ttttatgtgtggcccaagacaattctttttccactgtggcccagggagaccaaaagatgaggcacctctgtgatagacattaaaggatgaaatttaggcayacagttttatatatgcatctgacattcaaggaaaaagctgtggatggaaggttaagcttgtgagttgtcagatcatagttaaagccatgggatcagatat

SEQ ID NO: 250391 - DNA, 201 bp, Homo sapiens
tattttctgttttctcctttcttatacgaactttaacattctttcaatattcttttgtactttgctttctccctacctatcagtgttttctggaaatcacygtgcatcattttgtaggatagtcctcattctttttatagcagtatagaactccatcatgtggatgtatcatagtttatttaatcactcttttatgaatgg

SEQ ID NO: 250392 - DNA, 201 bp, Homo sapiens
ttttcctgggtcttccttcctgtttgtttatccatgtgaagtttagtatcagcttatctaactccacaaaaaagctcgttggtgtttttattgacattatrctgtttataaattaactttatgatgttgagttatcttaagttcaaaaccaagagctctttttttttctcctttcttcacatctacttttgttgtctttaa

SEQ ID NO: 250393 - DNA, 201 bp, Homo sapiens
agcccattataaaaatctattccttttgattccttatttcctgccctatacttggcaccaaggaaacagcagtagataagacacaatcacaccttcatggracttgcagtatagggttggaaaaagatattaaacgattacttcattgcaactatgaaataaagtatggtgaaagaatcaccaaatgataggggccagagg

SEQ ID NO: 250394 - DNA, 201 bp, Homo sapiens
ggatattcagagtttcagtaaatgagttcctttgagaattccaaattttgtttttgagactagagatgctctatactagttaaaaaaagaaaaaaaaaacytgttcgtaaataagtttgtaaattaggactgaggctctttaagcaagcttcatttccctccactgaaagtgggcagagctgatgtgcttttgttctagca

SEQ ID NO: 250395 - DNA, 201 bp, Homo sapiens
aacttcgcctccatacctctatcaaattcaattatccaaaagcacaatattcttggactgtacactaaattcctggttgtattctgttttactttgcttcwtaataaattatcacaagcctacaacttaaaacagcgcagttttatcatctcacttcccatggatctgaagtctaggcattgcatggcatgactgaattct

SEQ ID NO: 250396 - DNA, 201 bp, Homo sapiens
cacatactagaggaaattttacaagtaaacacacattggaaaagttaatcaagaaaataacaagttaccagtctcttgatcaccaatactgctggggagarggggaataaattggtacagcctttttgtttaattagattccatttgtcagttttggcttttgttgccattgtttttggtgttttagtcatgcagtcttgg

SEQ ID NO: 250397 - DNA, 201 bp, Homo sapiens
ctagcagaatatgtataatcaaaatcagagctcaacctgaaggacagtgagacgcagaaaaacattcaaaaggtcaacaaatcaaggagttggttttttgaaaaaaattaatgataggccactagctagattaataaagaagagagaagggccaagagcggtagctcatgcctgaaatcccagcactttggaggccaaggt

SEQ ID NO: 250398 - DNA, 201 bp, Homo sapiens
atactgtatctggctgtactatactaacagtgatttgcctgcatgtgtttgatagagatttctaccatgtactgcttggtgctggatagtctatcacagcaaaaaaaaaaaaaaaagttggattataaaggcaagtttgtagagatatttgttatagaaatggcttaaatgcaacaggatttttctcttgatactactgtt

SEQ ID NO: 250399 - DNA, 201 bp, Homo sapiens; identical to SEQ ID NO: 49197

SEQ ID NO: 250400 - DNA, 201 bp, Homo sapiens
ggcttcagggggctgcttgatagtatttaaatcttggattcaaatgttatttctggtcgggcacggtggctcacgcctgtaatcccagaactttgggaggytgaggtgggcagatcacgaggtcaggagatcgagaccatcctggctaacaaggtgaaaccccgtctctactgaaaatacaaaaaaagtagccgggcgcgg

SEQ ID NO: 250401 - DNA, 201 bp, Homo sapiens
ctttcagtatgtaaattcaagtcttcctttatttctagaaaattgtcttggattatagttttaatacttcttatttaatgattttttaagtgacatgaaarttgtacatattttataaaatacctaggaatccaacttacaagggctgtgaaggacctcttcaaggagaactacaaaccactgctcaatgaaataaaagag

SEQ ID NO: 250402 - DNA, 201 bp, Homo sapiens
agtgttaccaattttgcagagaaagagaatttaaacacttaatctgttaagatggtgttaacctgaagaggcaattcacattacaggatagagtttattcsaagctgttagataaacctgaagagcatcttaatgattttaatgttttctatgtttttaatttttttggcatattaggagtgctgagaagagactacatat

SEQ ID NO: 250403 - DNA, 201 bp, Homo sapiens
ttagaggcagattagttcttgctcagctgtattggtttctaggcagaaaatgttaaattttagaagttttatttctttagagcaatgctactgcagcttcygtgtgcttaagaaattactgagaggacttgttaaaacagatttttgggcaccaccgccagagattctgtaagtctggatggagttcaagaatttgaattt

SEQ ID NO: 250404 - DNA, 201 bp, Homo sapiens
tatgtaaattcaagtcttcctttatttctagaaaattgtcttggattatagttttaatacttcttatttaatgattttttaagtgacatgaaaattgtacwtattttataaaatacctaggaatccaacttacaagggctgtgaaggacctcttcaaggagaactacaaaccactgctcaatgaaataaaagaggacacaa

SEQ ID NO: 250405 - DNA, 201 bp, Homo sapiens
tgctgacgaacaaagtgttaccaattttgcagagaaagagaatttaaacacttaatctgttaagatggtgttaacctgaagaggcaattcacattacaggrtagagtttattccaagctgttagataaacctgaagagcatcttaatgattttaatgttttctatgtttttaatttttttggcatattaggagtgctgaga

SEQ ID NO: 250406 - DNA, 201 bp, Homo sapiens
gtgacttcctgaggtgatgtagtaaacagtattgaggggacattgctccaaaaatcaagaaacttaatatcagaaagaaattgtgattaacaaaagttggyaaagtttttagtaccactttgacagtgccattgagatttttgaaaattagagtagtacagtttgggattctgagacacttggagtttcagcaaggtaatc

SEQ ID NO: 250407 - DNA, 201 bp, Homo sapiens
tatctttagatatgcttttatttccatacaaatgagtatgtataatgtttgtatgtataatataattaacacgcagaagaatatttgtagtttggtgtcartttgtagaacaaaggtgctgacgaacaaagtgttaccaattttgcagagaaagagaatttaaacacttaatctgttaagatggtgttaacctgaagaggc

SEQ ID NO: 250408 - DNA, 201 bp, Homo sapiens
gcagagatgattgaattaagaggtctcgttataaatgtaactagaattatgccagtttgtaaagactgtagagtcagacatatcttctatagggaacattycgatgaattagagtttatcttggtggaatttaagctctaggaagagtctttgagcattaggaagccctcttgggtaaagctctgagctacagtaatgccc

SEQ ID NO: 250409 - DNA, 201 bp, Homo sapiens
agatttaagaaggagggaggggagatatgaagtaagggagaaggaagcaagagaaggaagtgccagcaatgccagatgctgtagaaggtaacaaaagatarggatggaaaattctccattggcttttggcagctcagaaactgactgctttagtgaagagtttcattggatatgtagatctgtgtgtttcctagggcagct

SEQ ID NO: 250410 - DNA, 201 bp, Homo sapiens; identical to SEQ ID NO: 49181

SEQ ID NO: 250411 - DNA, 201 bp, Homo sapiens
gttacccttagtgttttaaagcttgtaaaactgcagatccaaggccccactgaagaactacaattacaggttataatttgcaaaaaaggcaaaatcagttrtcttgcaaatataagataaacacaccaaatattttgttcaactcattcattaatgagggaatcagtaaaatgttaaaactgtccatagagtatttgagaa

SEQ ID NO: 250412 - DNA, 201 bp, Homo sapiens
aactacaattacaggttataatttgcaaaaaaggcaaaatcagttgtcttgcaaatataagataaacacaccaaatattttgttcaactcattcattaatragggaatcagtaaaatgttaaaactgtccatagagtatttgagaagctaggtgtttataggcaatgttaggatatgatagctgcattagatggccaaaac

SEQ ID NO: 250413 - DNA, 201 bp, Homo sapiens
aaacacacaatcccacaaatttgaatcaggaagaaacagaaatcctgaatggaccaagtaataagtagtgagattgaatcagtaataaaaaatctcccaaygacaacaacaacaacaacgaatgcccaggaccagatggattcacagctgaattttaccagacatggaaagaagaactgatgccaattctactgaaactat

SEQ ID NO: 250414 - DNA, 201 bp, Homo sapiens
taaaagctccatgctttctcattttaagatctcgcagatgtattatgtgaccaaagtgacagttatttagagcaagtatagtcagactcaccagttcaccaaaaaaaaaccttgaaaactcactggaaaagtttaaacctttgctctccatttttggcatatttgtgcaagtgtatcctgcatttgctgttaaaggaaata

SEQ ID NO: 250415 - DNA, 201 bp, Homo sapiens
tgaagctggaaaccatcattctcagcaaactgtcccaaggacaaaaaaccaaacaccgcatgttctcactcataggtgggaattgaacaatgagaacactyggacacaggaaggggaatatcacataccaaggcctgtcatggggtagggggagcaggcttaccagtgaatttactctgtttgctaacttctcttctgtat

SEQ ID NO: 250416 - DNA, 201 bp, Homo sapiens; identical to SEQ ID NO: 49187

SEQ ID NO: 250417 - DNA, 201 bp, Homo sapiens; identical to SEQ ID NO: 49190

SEQ ID NO: 250418 - DNA, 201 bp, Homo sapiens
gaataaaatacctaggaatgcagctaactggggaggtgaatgatctctacaacaggaattacaaaacacagctcaaagaaatcagagatgacacaaacaartggaaaaacatgccatgctcatgaattggaggagtcattatcataaaaatggccattctgtccaaagtgatttacagattcaatgaaattgttatcaaac

SEQ ID NO: 250419 - DNA, 201 bp, Homo sapiens
aaagtgacactgggaagtgaagctcaggtagtaatgttggacattaattgaatgcatacaagtagacagtttctgcttccacttcttgatatatttggaargatatggaatgatgacccaacagtagaaggatgaggaaaagcttcataaagatagtgatatttgctaagtgtgattgttgaaatatgaagtgagacaatt

SEQ ID NO: 250420 - DNA, 201 bp, Homo sapiens
ctcagagagagtaattaataatgtgagtgtctttctggttaaactctaattacaatatcttcttaaagggatgttaaaaaaaatggttaccctattaaaaagttagttataagaatggtttccaaaattataagtggaagaagaaatagcatcattcataagataatgtaaatgagatcactttccaaatttaatctcaat

SEQ ID NO: 250421 - DNA, 201 bp, Homo sapiens
caacagtagaaggatgaggaaaagcttcataaagatagtgatatttgctaagtgtgattgttgaaatatgaagtgagacaatttggcaatttttctgatgyggctcctggattcggttttctttataacaaccttacggccataggactttgtatttatttttaaatattgtatggataacaatgattattactcaaaact

SEQ ID NO: 250422 - DNA, 201 bp, Homo sapiens
tcagagagagtaattaataatgtgagtgtctttctggttaaactctaattacaatatcttcttaaagggatgttaaaaaaaatggttaccctattaaaaagttagttataagaatggtttccaaaattataagtggaagaagaaatagcatcattcataagataatgtaaatgagatcactttccaaatttaatctcaatc

SEQ ID NO: 250423 - DNA, 201 bp, Homo sapiens
ccttgtcttctcggtaaactctcgatcagccttcaaaacccttcttgggtatcatccctttatgaagagttctcgaacagtccccacacactcatctccgrataatacattccacactgtattctaagtatttattcctgccagcggagagagttttattcattttcttatttctaatacttatcatagtgtctgtcattc

SEQ ID NO: 250424 - DNA, 201 bp, Homo sapiens
gttcatcccttggcaccggcatgcacttcatgctgttgtcctttgcctaatccccgtaaattagtggtcagttcaggagccgggaacagagccatgtcttsacccttactacctgtttgctcagagcctaacagtcttcccagcctttcccagtcccacctcttcccaggaggaagactcctttgctgcacacccttgact

SEQ ID NO: 250425 - DNA, 201 bp, Homo sapiens
aagagccttgtatgttttatttctgtgtgtatgcttataaaggtgagtagaatgcattgcctttctaaccaaattttataggttggtatggtaacctgacataaatatgcataattaagcatattaagtacagaaagatattattatggaaatagggagaaacaccaggagcttcagaaaggtttcacaaagaaaataaca

SEQ ID NO: 250426 - DNA, 201 bp, Homo sapiens
agagccttgtatgttttatttctgtgtgtatgcttataaaggtgagtagaatgcattgcctttctaaccaaattttataggttggtatggtaacctgacataaatatgcataattaagcatattaagtacagaaagatattattatggaaatagggagaaacaccaggagcttcagaaaggtttcacaaagaaaataacat

SEQ ID NO: 250427 - DNA, 201 bp, Homo sapiens
tgcctttctaaccaaattttataggttggtatggtaacctgacataaatatgcataattaagcatattaagtacagaaagatattattatggaaatagggrgaaacaccaggagcttcagaaaggtttcacaaagaaaataacattgagtaggtatttgctaggtggataaaaggaggagggacgttattcttggcagagt

SEQ ID NO: 250428 - DNA, 201 bp, Homo sapiens
agtttcattggatatgtagatctgtgtgtttcctagggcagctgtaacaaagtaccacaagcttaactgacttaaatttattgtctcacagttatggaggytagaattctgacagcagggtgtgcagagggccatgctctttcctaagactctaaggtaggatccttatctctttctagctttttggtgattgcaactctt

SEQ ID NO: 250429 - DNA, 201 bp, Homo sapiens
ctggaatctaaggggtttgagggaagcactttaagaatactactaattaatcatcaattcatttgtgagccacctgcctggatgaaatattttgttaattwttttttttagtccctcattattgttttgaaagagtatacatgtctttcacaggaaattaatctctataagttcagtgatgcatgtactgcttttcctttt

SEQ ID NO: 250430 - DNA, 201 bp, Homo sapiens
gctcactgctgaggcttcacttcctaagagccccatcctgccacccccattccctgactgggggcggtacagagtcctgcataagagcatggactccagascccatttgctacctgctaactgtgtgaatgggcatacagttccttaatttccctgtttcctaaaatgaggacaacactagcatctcctccatagagttct

SEQ ID NO: 250431 - DNA, 201 bp, Homo sapiens
aaaaaaaagaagtggtgggtctttgagggtagtgaaattatggtattcaccttgaactgaaaaatgtgtctgtgatatttttggggggttgcttttttccytgtaaaatacagcattatgtaaccttttgcttgttttcatttctcagtaagtactgcccagctggttgtctgcttccttttgctgagatatctggaacaa

SEQ ID NO: 250432 - DNA, 201 bp, Homo sapiens
tcctgtgtcctcacatgacgaggttggagggatgaggagagagaaacagcaggttctcttatgtctcttcttataagtacactaatcctgttggatcagcrccccaccttaggaaaactaaaaccatttaattttaattacctctctaaagagcctaactccaactctagtcatattaagagttgggacttcaacagcaat

SEQ ID NO: 250433 - DNA, 201 bp, Homo sapiens
agacacagtggaatactactcacccttaaaaagaatgaaataatgtcttcgcagctccttggatagaactggggatcattatcctaagtaaagtaactcargaacagaaaaccaagtaccatatgttctcacaaggggggactaaccttgtggataaataacagcatacagaatgctgtaatggacatcggagactcagaa

SEQ ID NO: 250434 - DNA, 201 bp, Homo sapiens
aggagtcatattacctgacttcaaactgtactgcagggctacagtaaccaaaacagcatggtactggtacagaaataggtgcgtagaccaatagaacagartagagagcacagaaataaggccacatatctgcaaccacctgatcttcgacaaagctaacaaaaataaacaatgtagaaaggactgcctatttaataaatg

SEQ ID NO: 250435 - DNA, 201 bp, Homo sapiens
ggcaatgttaggatatgatagctgcattagatggccaaaactgattaatggccaacaaagccttaaacttttacctataggttattttttcaactatagaraaattatgtgcatctttaccaaacaatctgtaagttaacatgtaaccaagactgcaacctttaatcagcattaaatagcaggtggtaattattttgccct

SEQ ID NO: 250436 - DNA, 201 bp, Homo sapiens
acagcaaaagaaactatcaacagagtaaacagacaacctacagaatggggagaaaatatttgcaaagtgtggatctggcaaaggtctgatatccaacatcrataaggaacttaaacaagtttacaagaaaaaagaaacattaaaaagcaggtaaagaacatgagcagacacttttccaaagaagacacatatgtggccaat

SEQ ID NO: 250437 - DNA, 201 bp, Homo sapiens
cagagagagtaattaataatgtgagtgtctttctggttaaactctaattacaatatcttcttaaagggatgttaaaaaaaatggttaccctattaaaaagttagttataagaatggtttccaaaattataagtggaagaagaaatagcatcattcataagataatgtaaatgagatcactttccaaatttaatctcaatcc

SEQ ID NO: 250438 - DNA, 201 bp, Homo sapiens
agagagagtaattaataatgtgagtgtctttctggttaaactctaattacaatatcttcttaaagggatgttaaaaaaaatggttaccctattaaaaagttagttataagaatggtttccaaaattataagtggaagaagaaatagcatcattcataagataatgtaaatgagatcactttccaaatttaatctcaatcct

SEQ ID NO: 250439 - DNA, 201 bp, Homo sapiens
tttacaataatctgttgtatattttgaaatagctagaagggaataaagcaaatgttttagcataaagaaaagtattcaaggtgatgaatatcccaattacwctgatttgatctttgtgaattctatgaatgtattaagttatcatatgtactccccaaaataggtacatctattatgtatcaataaaaaaatttaaaacaa

SEQ ID NO: 250440 - DNA, 201 bp, Homo sapiens
tcactgcttaatccagagttgtgatattctcatatatttttttctaaaagttttatagtttcagctcttgagtttagatccactttattttgtatgtagtktgaggtacgggtccaattcatttgtttgtttggtggatatccagttgtctcagcatcatttgtctaaaagataattcttccccccattgaattgtctagg

SEQ ID NO: 250441 - DNA, 201 bp, Homo sapiens
atttccattgcattttccattttattgcagtgggaaggataaggattggattgttacttattgctaggaagagagttttttaaaaagaaaattgttctctrcctttaagcccagctttatgttgctctcatggttttcagtgaagtatggaatcatggcctgtcattaagaagatgccgaaccttgacaggcatgtggaaa

SEQ ID NO: 250442 - DNA, 201 bp, Homo sapiens
ttcacatatggcttgtatttgtgtagagttctaagttggatatcaagaagttggtcttcgaaatcttttttattgaagactttttttctgtaaaatgtacmtctcaaaaaaattaaattggtgaaacttatgctggtagcatatttgctattgtattaaatttattggaagttgatggtttactatgattttaggtctctg

SEQ ID NO: 250443 - DNA, 201 bp, Homo sapiens; identical to SEQ ID NO: 49194

SEQ ID NO: 250444 - DNA, 201 bp, Homo sapiens
gttgggacttcaacagcaattaattttggggggcgtaccagtatctggtccataataggaagtatccactgatttccattaagtgttgttatcaagaaagactattgaattttgttgaaaagcttttttagcatctatggaggtaatgatatggtttttctacctaaatctattggtatagtgtattatattaatgggttc

SEQ ID NO: 250445 - DNA, 201 bp, Homo sapiens
cagcattaaatagcaggtggtaattattttgccctataactttgagtggcttttgctttttatgacatttaaaggatgtgctgcacactttttttttaccstatttccaagtttcaggtcatctttctgacatacttgttagaatccagggaggtggaaataggagcctgagaacctttaattagcctgtaagtgattcta

SEQ ID NO: 250446 - DNA, 201 bp, Homo sapiens
aaaagcatgcattctttgttgcaataattcattgtcatttaaatacgtttaattttctttctcttttttctagggataagtagtaaaaaaaaaaaaaaaagggggggttttttcctgtaataatatcaaaatttgtatctggcttaacacatctgaccttacactcttcagaggaagtgaacacatgttctatgagtaatt

SEQ ID NO: 250447 - DNA, 201 bp, Homo sapiens
gcaagacctgcatgaactctctcacgtgttttagctgctgtgggatgtgttcatttccccctgctatataggggtaccatgatgagaaagtttaataagtrttgctagtacaagaatatatcaaaacaatcatttaaatttttaacagttgattattttgatattcagcattgaattaagttaccatttaaaagtttaaat

SEQ ID NO: 250448 - DNA, 201 bp, Homo sapiens
atatagagatgtaagccagatataaacttatttgaaaattgtgatataactctatttttttagaactccagagtagttagaggtgtgttaatcatatatcmttatcttttgcctttttaagacattttttaatcatatgtgttttattctttttcttctgctaaaactgttgtgttacagtaccaataatctatttttgtt

SEQ ID NO: 250449 - DNA, 201 bp, Homo sapiens
ttagggggtcatgaaatactttagtgggtcatgagcgtgcatgcgagagtgtatagggtcacgatgtaaacggtatttcttttggaataagcaaaaaaaatatgtatatgtctagccttcccttttgaactggagtattctgaacatatatttcatagcagtaggtgcttagttaagctatttatccagtcaggttaaact

SEQ ID NO: 250450 - DNA, 201 bp, Homo sapiens
ccttccttaagtcctcgccattgtgcatggctggtgtgcatgcaggagtagtgtcaaacacgttgggcggccaaatcagtgttgtaattagtaaaggtatyccctattatgaaagttctttggctaacaacgtcacatctgtggtgtaagtatatatgcaatttaaaaaatatatgctatatataattagcattctgggta

SEQ ID NO: 250451 - DNA, 201 bp, Homo sapiens
catgctactataaaaacacatgcacacatatgtttattgcggcactattcacaatagcaaagacttggaactaacccaagtgttcatcagtaatagactgsataaagaaaatgtggcacatatacaccatggaatactatgcagccataaaaaaggatgagttcatgtcctttgcagggacatggatgaagctggaaacca

SEQ ID NO: 250452 - DNA, 201 bp, Homo sapiens
tattatgaaagttctttggctaacaacgtcacatctgtggtgtaagtatatatgcaatttaaaaaatatatgctatatataattagcattctgggtagcaytgggctaagaactagctagatctcagcagtatcactgttaatggtgttcatgaaagaacatttaggcagtaagcactcacattagtgtgctcagtgtctg

SEQ ID NO: 250453 - DNA, 201 bp, Homo sapiens
ttgccaattgataatgataaatagtgctcagtatagttgtaatttgcatttctcttactatgagtgaaattgaactgttttttcccatatgttgacggccttttttttttttttttttttttactttttatctcttcctgtcttttgcccgtttttctgtcaagtttttttttatttttaaagacaggtctttctatattg

SEQ ID NO: 250454 - DNA, 201 bp, Homo sapiens
gactatactttcagagatcacttctgtagtttattattagaaagtttctctgaatgtgtagaacactggaaaaaatgatctaagactactgtgaatatgtstgtgcacacaaactagaaagtctagaggaaatggataaattcctagaaacacacaatcccacaaatttgaatcaggaagaaacagaaatcctgaatggac

SEQ ID NO: 250455 - DNA, 201 bp, Homo sapiens
aatcaccatacacacatcagtactactgctatataccaataatgaccaagcagaatcaaatcaagaactcagtcccatttacaattgttgcaaaaaaaggaaaaaaaaaaaccctaggaatatacttaaccaaagaggtgaaagatctctacacatagaactgcaaaacactgatgaaagaaaccatagatgatacaaaca

SEQ ID NO: 250456 - DNA, 201 bp, Homo sapiens
ttctttctttctttctttctttctttttctttcttttcttttcctttttctttctttttttctctctctttttctttctctatttctctctctctctctckctctctttctctatctcttcttccttccatttccctttccctttccctttcctttccatcttactctgtcacccagtctggagtgcagttgtgcaatctt

SEQ ID NO: 250457 - DNA, 201 bp, Homo sapiens
gcattgctctagtatatcaactttggaaacaaaagacattatcctatttatagcactccatttttagtagcggtatttccacttacaaaataaaatctcarccactgaaaatgtcaaatcttagaaaacagcattcctacacatgatgctaacattgttcatgaaaagttgttggccaaggattagtttcatgaattcagt

SEQ ID NO: 250458 - DNA, 201 bp, Homo sapiens
ccatgctcatggataggaagaatcaatatcgtgaaaatggctatactgcccaaggtaatttatagattcaatgccatccccatcaagctaccaatgacttycttcacagaattggaaaaaactactttaaagttcatatggaaccaaaaaagagctggcattgccaagtcaatcctaagccaaaagaacaaagcgggaggc

SEQ ID NO: 250459 - DNA, 201 bp, Homo sapiens
cactgatttgatctttgtgaattctatgaatgtattaagttatcatatgtactccccaaaataggtacatctattatgtatcaataaaaaaatttaaaacaaaaaaaaaaaaaaaaagaaaacaactctactcacagagaatggaaaaaagcaaagcaggacaaccacccactcaggaacgacacagggccagaggagcct

SEQ ID NO: 250460 - DNA, 201 bp, Homo sapiens
gccagcacttcaagactctgtaggctgtgttgaaggctttgctgtctaacctaagagaaggaagccactgaaatggtgtgttttgttttgttttttttgctttttttttaaccaaagccactttttacatagcctatgaacttggtcttaattagaggcagattagttcttgctcagctgtattggtttctaggcagaaaa

SEQ ID NO: 250461 - DNA, 201 bp, Homo sapiens
ccaaatggaacccagccaagagctaaaccagatcttttttctgagattttctagctttaactctaagtcagcacttaacctcagcactattcacttttaargttgatcattctttgttctgagggacctcctgtgcatgataagatgttttagcagcttttctggcctttacctactagatgccaataacacccctccccc

SEQ ID NO: 250462 - DNA, 201 bp, Homo sapiens
ttaattagaggcagattagttcttgctcagctgtattggtttctaggcagaaaatgttaaattttagaagttttatttctttagagcaatgctactgcagcttccgtgtgcttaagaaattactgagaggacttgttaaaacagatttttgggcaccaccgccagagattctgtaagtctggatggagttcaagaatttga

SEQ ID NO: 250463 - DNA, 201 bp, Homo sapiens
taatgtgccattgttctcttaactttcgccagattgtagccaagtgtactgggtcaataaacaatgggcaaaagctgttctgatcttttatgacaataatrgtactcacaaatatttattgagcacattgttatggcttaggaccttgacaccagttgttttcgtatggtatgtcgtttaaatcttaaccttggtagcttg

SEQ ID NO: 250464 - DNA, 201 bp, Homo sapiens
actggggaccagagcaggcccctagtttactggagtagtcatggaaaagtggccagactgtttcttacatgggtctccactcccatatctcctcactgggmaagtcctccaggcttgggtttccagcctcccttcactgggactttggagccagtagcagctctgcagcaacctgggacagagctcccactgggagggtgg

SEQ ID NO: 250465 - DNA, 201 bp, Homo sapiens
atatctcattgtggttttattttcatttccttggtgtttaacggtgcagaacattttttctttttttattattatttaagttctaggatacgtgtgcacagtgtgcaggttttttacatatgtatgcatgagccatgttggtgtgctgcacccattaactcgtcatttacattaggtatatctcctaatgctttctctccc

SEQ ID NO: 250466 - DNA, 201 bp, Homo sapiens
cccctccacccaccccacaacaggccccagagtgtgatgttcccctgcctgtgtccaagtgttctcattgttcaattcccacctatgagtgagaacatgcsctgtttggttttttgttcttgcgatagtttgctgagaatgatggtttccagcttcatccatgtccctacaaaggacatgaactcatctttttttatggtt

SEQ ID NO: 250467 - DNA, 201 bp, Homo sapiens
agtagaattcaccatggaaaagatacggaatcaacctaagagtccatcaaaccaatgagtggataaagaaaatgttatatatatatgatgtaaacatatakacacagtggaatactactcacccttaaaaagaatgaaataatgtcttcgcagctccttggatagaactggggatcattatcctaagtaaagtaactcagg

SEQ ID NO: 250468 - DNA, 201 bp, Homo sapiens
gggacatttaagtctgtagaggtttttgctgacttttgtttggctatgccctgcccccagaggtggagtctacagaggcaggcaggcctccttgagctgcrttgggctccacccagttcgagcttcctggccgctttgtttacctactcaaccctcagcaatggtgggctcccctcccccagcctcctgctgccttgcagt

SEQ ID NO: 250469 - DNA, 201 bp, Homo sapiens
tcatcagacaaagggctaatattgagaatctacaaagaactcaaacaaatttacaagaaaaaaacaaccccatcaacaagtgggcaaatgatatgaacagrcacttctcaaaagaagacatttatgcagccaaaagacacatgaaaaaatgctcatcatcactggccatcagagaaatgcaaatcaaaaccacaatgagat

SEQ ID NO: 250470 - DNA, 201 bp, Homo sapiens
caaaagaagacatttatgcagccaaaagacacatgaaaaaatgctcatcatcactggccatcagagaaatgcaaatcaaaaccacaatgagataccatctsacaccagttagaatggtgatcattaaaaagtcaggaaataacaggtgctggagaggttgtggagaaataggaacacttttacactgttggtgggagtgta

SEQ ID NO: 250471 - DNA, 201 bp, Homo sapiens
ggtgatcattaaaaagtcaggaaataacaggtgctggagaggttgtggagaaataggaacacttttacactgttggtgggagtgtaaactagttcaaccaytgtggaagacagtgtggcgattcctcagggatctagaactagaaataccatttgacccagccatcccattactgggtatatacccaaaggattataaatc

SEQ ID NO: 250472 - DNA, 201 bp, Homo sapiens
tgcagcttttttttggttccatatgaactttaaagtagttttttccaattctgtgaagaaagtcattggtagcttgatggggatggcattgaatctataarttaccttgggcagtatggccattttcatgatattgattcttcctctccatgagcctggaatgttcttccaattgttgacctcttttgttgagcagtggtt

SEQ ID NO: 250473 - DNA, 201 bp, Homo sapiens
tgtgtgaggtaggagtcaaagtgtcaaggtacatttttcccttgcagcgtttattcactttaaaatgtgcagatatcagatctgctgcttaagaagaatarcaccaaaatagccacttttctaaaatcaagatgtacaatgactatgatatgttgtagaaaaacataatttaaaatacttttctaaaaccactatatttta

SEQ ID NO: 250474 - DNA, 201 bp, Homo sapiens
gtctgttattggtatataagaatgcctgtgatttttgtacattgattttgtatcctgagactttgctgaagttgcttatcagcttaagaagattttgggcktagatgatggggttttctaaatatacaatcatgtcatctgcaaacagggacaatttgacttcctcttttcctaactgaataccctttatttctttctcct

SEQ ID NO: 250475 - DNA, 201 bp, Homo sapiens
tctgttattggtatataagaatgcctgtgatttttgtacattgattttgtatcctgagactttgctgaagttgcttatcagcttaagaagattttgggcgkagatgatggggttttctaaatatacaatcatgtcatctgcaaacagggacaatttgacttcctcttttcctaactgaataccctttatttctttctcctg

SEQ ID NO: 250476 - DNA, 201 bp, Homo sapiens
ctggactttttttggttggtaggctattattgcctcaatttcagagcctgttattggtctgttcagggattcaacttcttcctggtttagtcttgggaggktgtgcatgtccaggaacttatccatttcttctagattttcttgtttatttgcgtagaggtgtttgtagtattctctgatggtagtttgtatctctgtggg

SEQ ID NO: 250477 - DNA, 201 bp, Homo sapiens
atccctggtatagattcaactaccttcccttctttttttttttttttttctagattattttatgcagaccctttcattcctttaccatgttatacctttaraaagatttagtgtttgtgaattctctctttcatactttaaaaaagaaaacagggataaattgcatcctcttgtaatggtttgtatgttggactaaaggca

SEQ ID NO: 250478 - DNA, 201 bp, Homo sapiens
atgatttctgttcttttacatttgctgaggagtactttacttccaactatgtggtcaattttggaataagtgcaatgtggtgctgagaagaacgtatattstgttgatttggggtggagagttctgtagatgtgtgttaggtctgcttggtgcagagctaagttcaattcctggatatccctgttaactttctttctcatt

SEQ ID NO: 250479 - DNA, 201 bp, Homo sapiens
tcttgtaatggtttgtatgttggactaaaggcaggagtgtacactgaaacttcttccatgagatgttgatttctcctaaaaaaaaaaaaaaaaagaaaaakaaatctattagtacccaacttttctcatgtttatccgaaaaaacttgagcctcattctctgagaattagaccttttagtgtattttcatcgaaagcattt

SEQ ID NO: 250480 - DNA, 201 bp, Homo sapiens
gatttggggtggagagttctgtagatgtgtgttaggtctgcttggtgcagagctaagttcaattcctggatatccctgttaactttctttctcattgatctgtctaatgctgacagtggggtgttaaaagtctcccattattattgtgtgggagtctaagtctccttgtagatctctaaggacttgctttatgaatctggg

SEQ ID NO: 250481 - DNA, 201 bp, Homo sapiens
gatctgtctaatgctgacagtggggtgttaaaagtctcccattattattgtgtgggagtctaagtctccttgtagatctctaaggacttgctttatgaatstgggttctcctgtattggctgcatatatatttaggatagttagctcttcttgttgaattgatccctttaccattatgtaatggccttctttgtctctttt

SEQ ID NO: 250482 - DNA, 201 bp, Homo sapiens
aaatgcaagacctgcatgaactctctcacgtgttttagctgctgtgggatgtgttcatttccccctgctatataggggtaccatgatgagaaagtttaatwagtgttgctagtacaagaatatatcaaaacaatcatttaaatttttaacagttgattattttgatattcagcattgaattaagttaccatttaaaagttt

SEQ ID NO: 250483 - DNA, 201 bp, Homo sapiens
ctgtagagtcagacatatcttctatagggaacatttcgatgaattagagtttatcttggtggaatttaagctctaggaagagtctttgagcattaggaagscctcttgggtaaagctctgagctacagtaatgcccgggttgtatcttgggctctctacctggagtcctcttccactttcatttctagttttcattaaatt

SEQ ID NO: 250484 - DNA, 201 bp, Homo sapiens
aaaatatatatcatttgaggtctgtagactaataaaaagcatttctttatgttaaagaaaaataaaacattccttttactttttttaaaaattggaaagtyggaacataaaactcttcagtataactgctgatctttgggggaaaaccagtctcttagtgaatagaacagcattaccctttgggccaaatggaacccagcc

SEQ ID NO: 250485 - DNA, 201 bp, Homo sapiens
cttttctgccttgcagccctcacctttgctgtttccaggctctggagagtccatgggactgaagcctggtctgaaccccaagcacagtacccatctcaccraaaagtggtcagacggttctccatgtagatcctggtcctcacttctcctcactggacagggctgcctgacctgggactccagcacaaccactgtaccccc

SEQ ID NO: 250486 - DNA, 201 bp, Homo sapiens
aataatgaaataagtatacctacgctttaaaatgaggatgcatttagtatcaaaaatatagtcttatactggagaatgtttcccagtaggaaaagcacatkgcttgggctttttatgaaaaccacatttgtggtgctcacttcggcagcacatatactaacattggaacgacacagagaagattagcatggcccctgtgca

SEQ ID NO: 250487 - DNA, 201 bp, Homo sapiens
actaaaaatacaaaaattagccaggtgtggtggtatgcacctgtaatcccagctactcgggaggctgagccaggaaaatctctgagacccaggagacagakgttgcagtgagccaagaaggtgccattgcactccagcctgggcgacaagagtgaaactccgtgtcaaaaaaaagaagtggtgggtctttgagggtagtga

SEQ ID NO: 250488 - DNA, 201 bp, Homo sapiens
gctttaaaatgaggatgcatttagtatcaaaaatatagtcttatactggagaatgtttcccagtaggaaaagcacatggcttgggctttttatgaaaaccwcatttgtggtgctcacttcggcagcacatatactaacattggaacgacacagagaagattagcatggcccctgtgcaaggatgacacgcaaattcatgaa

SEQ ID NO: 250489 - DNA, 201 bp, Homo sapiens
ttataaatatattctgtttacctctatttattatgttgatgtttcacatatggcttgtatttgtgtagagttctaagttggatatcaagaagttggtcttygaaatcttttttattgaagactttttttctgtaaaatgtacatctcaaaaaaattaaattggtgaaacttatgctggtagcatatttgctattgtattaa

SEQ ID NO: 250490 - DNA, 201 bp, Homo sapiens
ccagctaataaatattttaggctttacaggccacatgtcgctgcagcttattctttttttgttttatttatagctctttattcttaactcacggcccatayaaaacaggccatgcatgggcagtcatttgcccatccctggtatagattcaactaccttcccttctttttttttttttttttctagattattttatgcaga

SEQ ID NO: 250491 - DNA, 201 bp, Homo sapiens; identical to SEQ ID NO: 49196

SEQ ID NO: 250492 - DNA, 201 bp, Homo sapiens
catggcatgactgaattctctgcttggggtcccaccaggctgaaattaaggtgttagctgggaatacgtttctcatctggggctcacagttctcttccaadtgtactagttgttggtagaattcagttcattgcagttgtaaaactgaggtccccattttcttggtaactgttggccagggactgctttaactttctagag

SEQ ID NO: 250493 - DNA, 201 bp, Homo sapiens
gttcaatcccagactgctgtgctagcaatgagtgagcctccgttggcgtaggaccctccgagccaggcgtgggatgtaatctcctggtgtgccgtttgctrtaagaccattggaaaagtgcggtattagggcggaagtgacccgattttccaggtgccatctgtcaccccttcccttggctaggaaagggaattccccgac

SEQ ID NO: 250494 - DNA, 201 bp, Homo sapiens
gctagcaatgagtgagcctccgttggcgtaggaccctccgagccaggcgtgggatgtaatctcctggtgtgccgtttgctataagaccattggaaaagtgyggtattagggcggaagtgacccgattttccaggtgccatctgtcaccccttcccttggctaggaaagggaattccccgaccccacgcgcttcccaggtga

SEQ ID NO: 250495 - DNA, 201 bp, Homo sapiens
ttaaaagtctcccattattattgtgtgggagtctaagtctccttgtagatctctaaggacttgctttatgaatctgggttctcctgtattggctgcatatrtatttaggatagttagctcttcttgttgaattgatccctttaccattatgtaatggccttctttgtctcttttaatctttgttggtttaaagtctgtttt

SEQ ID NO: 250496 - DNA, 201 bp, Homo sapiens
atgtaatctcctggtgtgccgtttgctataagaccattggaaaagtgcggtattagggcggaagtgacccgattttccaggtgccatctgtcaccccttcmcttggctaggaaagggaattccccgaccccacgcgcttcccaggtgaagcgatgccagtacctcagttggaaatgcagaaatcacccatcttctgcgtcg

SEQ ID NO: 250497 - DNA, 201 bp, Homo sapiens
aaattctttcctttaagaatgttgaatattggcccctactgtcttctggcttgtagagtttctcctgaaagatctgctgttagtctgatgggcttcccttsgtgggtaacccaacctttctctctggctgctctcatcattttttccttcatttcaactttggtgaatctgacaattatgtgtcatgaagttgctcttctc

SEQ ID NO: 250498 - DNA, 201 bp, Homo sapiens
tgatgggcttcccttcgtgggtaacccaacctttctctctggctgctctcatcattttttccttcatttcaactttggtgaatctgacaattatgtgtcaygaagttgctcttctcgaggagtatctttgtggcattctctgtatttcctgaatttgagtgttggcctgccttgctaggttggggaagttctcctggataa

SEQ ID NO: 250499 - DNA, 201 bp, Homo sapiens
ccatcactttcaggtacaccaatcagacgtagatttggtcttttcacctagtcccatatttcttggaggctttgttcatttctttttagtcttttttctcyaaatttctcttctggcttcatttcattcatttgatcttctatcaccgataccctttcttccagttgattgaattatctactgaagcttgtgcattcgtca

SEQ ID NO: 250500 - DNA, 201 bp, Homo sapiens
ccgtatacccactggtcctccatttggtagcagcctatggttagtggtagaaaagtttcttaacgtattgcagagaaataaagataattcaagaatagtcrtttaacattctggttaagataggtctgcagagaattacaggatagaaacaaatacattgtgggcatcaggatttcagggataatgtcactgaatcttttt

SEQ ID NO: 250501 - DNA, 201 bp, Homo sapiens
gtgcaaaaatgtttacagcaaatatagttgtcattataccaacttattgtggtaagtgatggctactgacactactgagggtctttttcaattcattcaaraacacaaaacagtattgaaggaaaatctaaataaatatattttgcaaccctacaatctcagaaatagccaacactgtcaatcaaaaatatttctatgata

SEQ ID NO: 250502 - DNA, 201 bp, Homo sapiens
cttttgtttggctatgccctgcccccagaggtggagtctacagaggcaggcaggcctccttgagctgcgttgggctccacccagttcgagcttcctggcckctttgtttacctactcaaccctcagcaatggtgggctcccctcccccagcctcctgctgccttgcagttcaatcccagactgctgtgctagcaatgagtg

SEQ ID NO: 250503 - DNA, 201 bp, Homo sapiens
gcaagacccctttctacaaaaataaaaaatcaccaggtgcagtggctcattcctgtaatctcagcactttgggaggctgaggcaggtggatcccttgaggkcaacatggtaaaaccctgtctctactaaaaatgcaaaaattagccgggcgtgttggtgcacacctgtaatcccagctactcaggaggctgaggcaggaga

SEQ ID NO: 250504 - DNA, 201 bp, Homo sapiens; identical to SEQ ID NO: 49182

SEQ ID NO: 250505 - DNA, 201 bp, Homo sapiens
cagttttcatctaccacggccagactttctgaaaatttgaacgtgtatgtggacctttgtggtatcttggacttttatactggcaacccctgtttagaagytctatagaaactcctgagttactgctggtgttactgagtgaggcagaacctaccacagtaaggtccagactcaggtaacttggatcttttaatttagtat

SEQ ID NO: 250506 - DNA, 201 bp, Homo sapiens
cgtctagctcagggtttgtgaatgcaccaatcgacactctgtgtctagctaatctcgtggggatgtggagaacttttgtgtctagctcagggattgtaaaygcaccaatcagcaccctgtcataacggaccaataagctctctgtaaaatggaccagtcggctctctgtaaaatggactaatcagcagaatgtgggttggg

SEQ ID NO: 250507 - DNA, 201 bp, Homo sapiens
gcttagtgcctggatattcagagtttcagtaaatgagttcctttgagaattccaaattttgtttttgagactagagatgctctatactagttaaaaaaagaaaaaaaaaacctgttcgtaaataagtttgtaaattaggactgaggctctttaagcaagcttcatttccctccactgaaagtgggcagagctgatgtgctt

SEQ ID NO: 250508 - DNA, 201 bp, Homo sapiens
aattgcttgaacgtgggaggcagaggttgcagtgagccaagatcacgccactgtactccagcctgggtgacagagcgagactcctttaaaaaaaaaaaaawagaaatatcctagaagcattaaaagatcacatactagaggaaattttacaagtaaacacacattggaaaagttaatcaagaaaataacaagttaccagtc

SEQ ID NO: 250509 - DNA, 201 bp, Homo sapiens; identical to SEQ ID NO: 49189

SEQ ID NO: 250510 - DNA, 201 bp, Homo sapiens; identical to SEQ ID NO: 49191

SEQ ID NO: 250511 - DNA, 201 bp, Homo sapiens
tggcttgccgtcacaatgaaggttggtggaaaggaatgaagcagtttcttcctgcaaaagcagtggaccatgaggaaaccccagttcgctatagcagcagygaagttaatcacctgagtccaagagaagtcaccacagtgctgcaggctgactctgcaggtaactatgttgcagccttctggtaccaggcagagggagaaa

SEQ ID NO: 250512 - DNA, 201 bp, Homo sapiens
gttattaaaaaaaatcttggaacagtatagaatcagttacatgtctaccttccaaatgagggattgccttgtttttagaaaaggccagtctaccgggcgcrgtggctcacacctgtaatccgagcactttgggaggctgaggcgggcagatcacgaggtcaggagatcgagaccatcctgaccaacatggtgaaaccccgt

SEQ ID NO: 250513 - DNA, 201 bp, Homo sapiens
ttcgcatcaaatttggtgactttgacattgaagattctgattcttgtcactttaattacttgagaatttataatggaattggagtcagcagaactgaaatrggtaggacttttttttgtaaatgtacatgtaaatacatcattgtctcaatgatgtatttttttgatattaacattaaataaccatgcagtgtaaggtgct

SEQ ID NO: 250514 - DNA, 201 bp, Homo sapiens
gcaaaattacatgaatgagactttctggtatattattactatgagaagtactagacagtatgtttaattttaattttcaaagttcttacagattaagtatygatggcaacaaaagtatcctaaagaatgtttgcttttagtataatctgcagctgccaccctaaattatgcaatctctttactagtaaaatgacttttctg

SEQ ID NO: 250515 - DNA, 201 bp, Homo sapiens
catcagattatatgagtttgcaaatgaaacgtagggctgactagataattcctttctagcagagtccaaatttctgtaaccggttatttttttcctgcatrgaatgttttcggctttgaaaatagagtgtgaattccttagattgtttgccttcttaaccgtacagtaattttatagaatctgttttgtttccagtactac

SEQ ID NO: 250516 - DNA, 201 bp, Homo sapiens
gagaccaggaacttgaggctgcagtgagctaggatcatgccactgcactctagcctcggtgacagagcaaggaaaaagaaatgtaaattatatactgcccsgtactttgaacatatcactgatttttctagtattataggacatattaaagtggatccagcaagataagtgttttctcagtatttattataatctaagcac

SEQ ID NO: 250517 - DNA, 201 bp, Homo sapiens
tgtatctaatagacctctacagaactgtccatccaaagacaatagaaaatacattcttctgattgccacatgacacatactctaaaaatgaccacataatyggacataaagcaatcagcagatgcaaaagaaccaaaaccataccagacacactctcagaccacagtgcaataaaaatagaaatcaaaactaaaaaaaatg

SEQ ID NO: 250518 - DNA, 201 bp, Homo sapiens
aggtctgtagactaataaaaagcatttctttatgttaaagaaaaataaaacattccttttactttttttaaaaattggaaagtcggaacataaaactcttyagtataactgctgatctttgggggaaaaccagtctcttagtgaatagaacagcattaccctttgggccaaatggaacccagccaagagctaaaccagatc

SEQ ID NO: 250519 - DNA, 201 bp, Homo sapiens
tctagccttcccttttgaactggagtattctgaacatatatttcatagcagtaggtgcttagttaagctatttatccagtcaggttaaacttgtcaaataytttttgagatacaaagcattcaaatttgttcattgctgtagattggagacctgttgttaactttagtttctggtgcatatcatcttgcttgcaagaggag

SEQ ID NO: 250520 - DNA, 201 bp, Homo sapiens
agtttctggtgcatatcatcttgcttgcaagaggaggaagctctgaactccatcacatattttagaacattcttggcacgttacttgtggactgttcctgycctccccctacacaaggttatgaaaaaagacaactctgtaattattttcttcatcagcatgcatgcaaaagtcctgtttttcatcagttagtatttcttt

SEQ ID NO: 250521 - DNA, 201 bp, Homo sapiens
ataaatgcagaaaaggcctttgacaaaattcaacaacccttcatgctaaaaactctcaataaattaggtattgatgggacgtatcccaaaataataagagytatgtatgacaaacccacagccaatatcatactgaatgggcaaaaactggaagcattgcctttgaaaactggcacaagacagggatgccctctctcacca

SEQ ID NO: 250522 - DNA, 201 bp, Homo sapiens
ttgacaaaattcaacaacccttcatgctaaaaactctcaataaattaggtattgatgggacgtatcccaaaataataagagttatgtatgacaaacccacmgccaatatcatactgaatgggcaaaaactggaagcattgcctttgaaaactggcacaagacagggatgccctctctcaccactcctattcaatatagtgt

SEQ ID NO: 250523 - DNA, 201 bp, Homo sapiens
ttcaaagagaataaaatacctaggaatccaacttacaagggatgtgaaggacctcttcaaagagaactacaaaccactgctcaatgaaataaaagaggacrcaaacaaatggaagaacattccatgctcatggataggaagaatcaatatcgtgaaaatggccatactgcccaaggtaatttatagatcaatgccatcccc

SEQ ID NO: 250524 - DNA, 201 bp, Homo sapiens
attgaaatgttttatatcaatttaaaacattattattcacagtttaccacttcatagtgctgtgttaaagaccatactaccattattttcaaagaataagwtctcacatccccaggagtacctgaggagtgctgagacagcatgaaataaacatgggatatttctaaattgctaatgtttaggaggaaaatgtggtgtaaa

SEQ ID NO: 250525 - DNA, 201 bp, Homo sapiens
ttttttttaccagaacattttaacaaatacatttctctttaacagtgtcatcttatgtaaacatcaacataaatagaaatgattctgataattaaaagactttttttttttttagttcttctaaattgcttgggtaaattttgctaaatcatttaatatttaatctctttgtacctcagttttctacatcattaaggtgag

SEQ ID NO: 250526 - DNA, 201 bp, Homo sapiens; identical to SEQ ID NO: 49218

SEQ ID NO: 250527 - DNA, 201 bp, Homo sapiens
gaggctgaagggggtggatcacctgaggtcaggagttcgagaccagcctggccaacatggtgaaaccccatctttactaaaaatacaaaaattagctgggygtggtggtgggcgcttgtaatcccagctactcaggaggctgaagcaggagaattgcttgaacccaggaggtggaagttgcagtgagctgagatcgtgcca

SEQ ID NO: 250528 - DNA, 201 bp, Homo sapiens
tgtggtcgggtgcggtggcccacatctataatcccagcactttgggaggccgaggcaggcagatcacctgaggtcgggagttcaagaccagcctgaccaayatggagaaacccttctctactaaaaatacaaaattagccaggtgtggtggtgcatgcctgtagtcccagctacttgggaggctgagataggagaattgct

SEQ ID NO: 250529 - DNA, 201 bp, Homo sapiens
gaggctgaggtggggatcacctgagcccagtatgtcgaggctgcggtgagccatgattgcgccattgcactccatccgggtgagactgagaccccgtctcaaaaaaaaaaaaaaagaaagtgaaataatttgtggacaacacagaattacaaactttttattttgtctttttaaagttaccacaaattgtcaccaccattc

SEQ ID NO: 250530 - DNA, 201 bp, Homo sapiens; identical to SEQ ID NO: 49219

SEQ ID NO: 250531 - DNA, 201 bp, Homo sapiens
gcaatgtcggctcactgcaacctccgcctcccgggttcaagcgattctcctgcctcagcttcctgactagctgggactacagggtgtgccaccacgcccasctaatttttgtatttttagtagaaacggggtttcaccaggttggccaggatggtatcgatctcttgacctagtgatccgctcacctccgcctaaagtgtt

SEQ ID NO: 250532 - DNA, 201 bp, Homo sapiens
tcttctgtcataagccatatcccaatacccatctcgtgtattaatcccatcaatcattcaggtgtctggaatacaattctttagagtcatttaaaattacrtggtccttttataagatctaatttttcacttaaaagctctttctgtttgatttttgtttccatctccattaccctcattctggtctcgggtcttactcat

SEQ ID NO: 250533 - DNA, 201 bp, Homo sapiens
gtttcataggttagttttgcttgttttagaactttatataaatggaattattgaatgtacaatttttgtatctggcttctttcattctgcataatgtctaytgtaatctgtggtttattccttcttattactgaatagtattccattggatgaattatatcataatttgtttatccattctcctgttgatgggtgtttgag

SEQ ID NO: 250534 - DNA, 201 bp, Homo sapiens
tgcgtgccaccacacccagctaatttttttgtatttttagtagagacaagttttcatcatgttatccaggctggcctcgaactcctgacctcaggtgatcygcctgccttggcctcccgaagtgctgggattacaggcgtgagccaccgcgccctgtctaggttcatcttatacttgtttaaatagcattgaatgtattgt

SEQ ID NO: 250535 - DNA, 201 bp, Homo sapiens
gcgtggtggtgggcgcttgtaatcccagctactcaggaggctgaagcaggagaattgcttgaacccaggaggtggaagttgcagtgagctgagatcgtgcyactgtactccagcctagatgacagagcgagactctgtcaaaaacaacaacaacaacaacaacaacaacaacaaaaaactcctaagtcttctttttctttt

SEQ ID NO: 250536 - DNA, 201 bp, Homo sapiens
agctaatttttttgtatttttagtagagacaagttttcatcatgttatccaggctggcctcgaactcctgacctcaggtgatccgcctgccttggcctccygaagtgctgggattacaggcgtgagccaccgcgccctgtctaggttcatcttatacttgtttaaatagcattgaatgtattgtcaggttacagtgtgata

SEQ ID NO: 250537 - DNA, 201 bp, Homo sapiens
taaatccgtagattctcctttttcccatttttttcttgttgaatagagtttcctgcagtttgaattttgctgattacattcccatgtttttctttttttctttttttttttttttgagacagagtcttgctctgtcacccaggctggagtgcagcagtgtaatcttggctcactactgcaacttctctgcttccagggttc

SEQ ID NO: 250538 - DNA, 201 bp, Homo sapiens
gaattgcttgaacccaggaggtggaagttgcagtgagctgagatcgtgccactgtactccagcctagatgacagagcgagactctgtcaaaaacaacaacracaacaacaacaacaacaacaaaaaactcctaagtcttctttttcttttttttctggcttccttttcctgcaggaatgatgagaagacagcagctgatta

SEQ ID NO: 250539 - DNA, 201 bp, Homo sapiens
aattatcatctcatagccaatcttatttaatttaaactcaccaactccttttacctgatttttttaaagcaaattccagctagcatagcatatgttattcmtacatatttcagtgtttttctgtgaaagataaccttttttctaacataaccgtaatttttacatccaaaaatttaactgattgcttactatcatcaaatt

SEQ ID NO: 250540 - DNA, 201 bp, Homo sapiens
agttcgagaccagcctggccaacatggtgaaaccccatctttactaaaaatacaaaaattagctgggcgtggtggtgggcgcttgtaatcccagctactcrggaggctgaagcaggagaattgcttgaacccaggaggtggaagttgcagtgagctgagatcgtgccactgtactccagcctagatgacagagcgagactc

SEQ ID NO: 250541 - DNA, 201 bp, Homo sapiens
atacaaaaattagctgggcgtggtggtgggcgcttgtaatcccagctactcaggaggctgaagcaggagaattgcttgaacccaggaggtggaagttgcartgagctgagatcgtgccactgtactccagcctagatgacagagcgagactctgtcaaaaacaacaacaacaacaacaacaacaacaacaaaaaactccta

SEQ ID NO: 250542 - DNA, 201 bp, Homo sapiens
ccctcccctggatgcccagtaatgtatgtctactggtgggagactgtgaggatcccaggattcagtattcctggcccagagggcccttgctggctactggrtgttagtttgcagtcctgtgtgcttccctctcttatgactgtgtccctggttgtcaataaaatatttcctggcctcctggaatctttcttctgttgcaca

SEQ ID NO: 250543 - DNA, 201 bp, Homo sapiens; identical to SEQ ID NO: 49221

SEQ ID NO: 250544 - DNA, 201 bp, Homo sapiens
cttcctaaagtgctgggattacagccgtgagctaccatatctgacccctttttgaattattattatttttgttttgttttgcttttgagatggagtctcastctgtcgcccaggctggagtacagtggcacgatcttggctcattgcaacctccgcctcttgggttcaagcgatgctcctgcctcagcctcccaagtagct

SEQ ID NO: 250545 - DNA, 201 bp, Homo sapiens; identical to SEQ ID NO: 49222

SEQ ID NO: 250546 - DNA, 201 bp, Homo sapiens
ctcctccaggctgccatcagaggggccccggccggcccacgtggtagtgggagatgttctgcaggcagccgatgtggacaagaccgtggctgggcaggacrctgtcatcgtgctgctgggcacccgcaatgacctcagtactgagccccccctctgcccacggccctcccctacacctcggcccccagcgccacccccgcc

SEQ ID NO: 250547 - DNA, 201 bp, Homo sapiens
ttacactccaggcagaggacaaagcaagcaaagaggcctggaggccagacctagttggagggtaggaagcaaaatcatttatggcttttttcctcaagctytgaaatggaaaagtaatacacgagtaaacttgcgatttcagaatggttcactttttttttttttttttgagactttctgtcacccaggctggagtgcagt

SEQ ID NO: 250548 - DNA, 201 bp, Homo sapiens
gggactttcacctctggggagtggtgagggattgaaggttgaggggattaccactggctaatggtttaatccattatgtctatggattctggggcttcagmctcctgagtagctgggattacaggcctgcatcaccatgccccgccatggcttacatttctagtatgggagatagagattagatagatagatagatagata

SEQ ID NO: 250549 - DNA, 201 bp, Homo sapiens
caccatgcccagctaatttttgtatttttagtagagacagggtttcgccatgttggccaggctagtctcgaactcctgacctcaagtgtgtttcatgacayaaattgcctccctggaaagggaagtggcatgagggagggctgcctgatgattgtaattacactccaggcagaggacaaagcaagcaaagaggcctggagg

SEQ ID NO: 250550 - DNA, 201 bp, Homo sapiens
cctgagccgcgggcggagagtctgaggcgtggcccttcgagccagctccgccccgttgttcctggcttgagtagggcagagagcaccgcccagcagccagygggttcccgcgcgtgccgagactctgaggccttgcacccccacgatcccgtacgatggccgtcaagaagatcgcgatcttcggcgccactggccagaccg

SEQ ID NO: 250551 - DNA, 201 bp, Homo sapiens
ggagtgcaggaccagtctgggcaacacagcaaaactccatctctacaaaaaaaaatacaaaaaattagctgggtgtggtggtacacacctgtggtccccamtacttgggaagcttaggtaggaggatcctttgagcctagaaggcagaggttgcagtgagccgtgatggcaccactgcactccagccttggctgcagagca

SEQ ID NO: 250552 - DNA, 201 bp, Homo sapiens
agttcgagaccagcctggccaatatagtgaaaccccgtctctactaaaaatacgaaaaattagccgggcatggtggctggtgcctgtaatcgcagttactyggcagactgaggcaggagaatagcttgaatccgggaggcagaggttgtggtgagccgagattacgccactgcattccagcctgggcgacaagagtgaaac

SEQ ID NO: 250553 - DNA, 201 bp, Homo sapiens
agaggagccccagaggactcccctgtttttgcaactggaaagcaatggtcagccatggcagggttttgtcctggcatcaagacaagcgagcccttggctgkgcacaatggctcatgcctgtaattccagcactttgggaggtggaggagggtggatcacctgaggtcaggagtttgagaccagcctggccaacatggcaaa

SEQ ID NO: 250554 - DNA, 201 bp, Homo sapiens
gtacattgtatccctaagtttagttggttactgtcagatagacagatatatatctatctgacaaatatatatatatatatatatatatatatatatatttrttgttgttattgttgttgttgttgttagagacaaggtcttgctctgtcgtcccggctggagtgcagtgtcacgatcatggctcactgtagcttcaacttc

SEQ ID NO: 250555 - DNA, 201 bp, Homo sapiens
tgaatatatagttagattttgctgaatatattgtgaaaacatatatgcatatgtatatttggcttaatcatttgagaggaattgcaacattgtcgcacttmactcctaaatacctagacagccatctcctaaaagaaagatatttgcacacaaaacatgctcacacctaaggaaagtgacatttactctgtcatatcattt

SEQ ID NO: 250556 - DNA, 201 bp, Homo sapiens
tggtacattgtatccctaagtttagttggttactgtcagatagacagatatatatctatctgacaaatatatatatatatatatatatatatatatatatwtgttgttgttattgttgttgttgttgttagagacaaggtcttgctctgtcgtcccggctggagtgcagtgtcacgatcatggctcactgtagcttcaact

SEQ ID NO: 250557 - DNA, 201 bp, Homo sapiens
tgcctcccaggttcaagggattctcctgcctcagcttcctgagaatagctgggattacaggcatgcaccacgacacctggctaatttttgtgttttttttgttttgttttgttttgttctgctttgtttttgagatggagtcttgctctgtctcccaagctggagtgccgtggcgcgatctcagctcactgcaacctccgc

SEQ ID NO: 250558 - DNA, 201 bp, Homo sapiens
tagaccaggcgcagtggctcacgctgtaatcccagcactttaggaggctaaggcaggtggatcgcttgaggtcaggagttcgagaccagcctggccaacayggtgaaaccccgtctctaccaaaaatacaaaaactagccaggtgtggtggcacacgcctgtaatcccagctactcaggaggcttaggcaggagaatcact

SEQ ID NO: 250559 - DNA, 201 bp, Homo sapiens
gcggcgggtgcctatagtcccagctactcgggaggctgaggcaggagaatggcgtaaacccgggaggaggagcttgcagtgagctgagatcgtgccactgmactccagcctgggtgacagagcgagactgcctcaaaaaaaaaaagaaaaaagaaaaaagaaactaggggtaagttagagactggatttgagattgtgaac

SEQ ID NO: 250560 - DNA, 201 bp, Homo sapiens
atcctagcactttgagaggccaaggtgggcggattgcttgcgtccaggagtgcaggaccagtctgggcaacacagcaaaactccatctctacaaaaaaaaatacaaaaaattagctgggtgtggtggtacacacctgtggtccccactacttgggaagcttaggtaggaggatcctttgagcctagaaggcagaggttgca

SEQ ID NO: 250561 - DNA, 201 bp, Homo sapiens
cctccccactgcagcctcccaagcggctgggactacaggcatgcaccaccacacctggctaattttttgatatttttgtagagacaaggtcttacttttgktcgcagattggaatggtctgctgttaattttagttttgtttttttctcccatgtctttttttctttgagatgaagtctgactccattgcccaggctggag

SEQ ID NO: 250562 - DNA, 201 bp, Homo sapiens
ttgaacccatgagacggaggttgcagtgagccgagactgcaccactgcactccagactgggcaacagagcgagactccgtctcagaaaaaaaaaaaaaaaatgtgctgtgggtgaagagggcagaggcttcagcagagcctggagaggagaagccagatcccgaggggcctggaaggctggcatgaggagcatgggtttta

SEQ ID NO: 250563 - DNA, 201 bp, Homo sapiens
gccttgtcatctgtgtacctagatatgtgtaagatcatgacaaaactggtagtacttgccctagggctcttgggataattaaatgagatcttatataggargtacttagactagcattgaattttgcagtctctggatcagacttacttaggtaaaaattcaaccttctctacctactagctgtgtgatcctggcccggtt

SEQ ID NO: 250564 - DNA, 201 bp, Homo sapiens
ctaaaattgcaaaccttcctatgatattgtgacatatatatttggcctttgtccctgtttcctggcatacaactcctaaaatccttggaatctccaaaatrgtaaatgtctttttctatgctaatgagttcactgagagctggcagcccctaggcagcttcaggtctggtcaccagaaagactaaggctggattacagggt

SEQ ID NO: 250565 - DNA, 201 bp, Homo sapiens
tgcaaaaccccatctctttttttaatttttttattgtgtctttttgggttttttggttttttatgtttattgttgttgttgttgtttgttttgttttgttytgttttgtttgagacggagtttcgctcttgttgcccaggctggcgtgcaatggcacaatctcagctgactgcaatctctacctcctgggttcaagcgatt

SEQ ID NO: 250566 - DNA, 201 bp, Homo sapiens
tgatcctgccctgtgttccctccagctttcctgctctgggaccctaccaaggtgcccccacgactgcaggctgtgactgatgaccacatccggatgcacamggtgctgcgggaatcaggcctgaagtacgtggctgtgatgccgccacacataggtaagcagggcagggacctggtggcaccaatgccatctgcctgttcc

SEQ ID NO: 250567 - DNA, 201 bp, Homo sapiens
ccatttcatgctgcgctgcctcaccaccgatgagtacgacggacacagcacctacccctcccaccagtaccagtagcactctgtccccatctgggagggtrgcattctgggacatgaggagcaaaggaagggggcaataaatgttgagccaagagcttcaaattactctagagaaaccgactgtgtgactcttcctctctc

SEQ ID NO: 250568 - DNA, 201 bp, Homo sapiens
ggttaagttttgcttccatgaaaaagacaaacctgtaaaattgatttaatttgctttcttttttctcatttttttttgtttagattgttttctaaatattraagtcttaggtgtgccaggattttttttttcattaaaaaaaaaacaaacatagagacaaggtctcgctctgtcacccaggctggagtgcagtggcctgat

SEQ ID NO: 250569 - DNA, 201 bp, Homo sapiens
catgctgcgctgcctcaccaccgatgagtacgacggacacagcacctacccctcccaccagtaccagtagcactctgtccccatctgggagggtggcattytgggacatgaggagcaaaggaagggggcaataaatgttgagccaagagcttcaaattactctagagaaaccgactgtgtgactcttcctctctctgcctc

SEQ ID NO: 250570 - DNA, 201 bp, Homo sapiens
aaaaattagctgggtgtggtggtacacacctgtggtccccactacttgggaagcttaggtaggaggatcctttgagcctagaaggcagaggttgcagtgasccgtgatggcaccactgcactccagccttggctgcagagcaagaccctgtctcaaaacacaacaaaacagccgggtgctgtggctcacgcctgtaatccc

SEQ ID NO: 250571 - DNA, 201 bp, Homo sapiens
gcacttctttaaatggcccggggcgctagggaggggtgggcggatccggcgtctcggggcacgggcggatggctccgcccagccaatcgacgccccgcggygggcgggactccagccaatcgcggctcgcggctcggctccggggcggggctggtgggccagaggccagacggagaggccccgccgaggtgagcgaggctc

SEQ ID NO: 250572 - DNA, 201 bp, Homo sapiens
gggaaagatgtgagatccaagtttatgtgagtccaagccagagaggaattggccccgggagccccgggaggactccactggcacagtcgtgtgtaagtccrgggctcttatgcaatgcggttgtcattattgtggttgtggtggtggttgttcgcactcccagagaggatttactaagccaagcttgctctgtcgtctctt

SEQ ID NO: 250573 - DNA, 201 bp, Homo sapiens
tcctctctctctctccatgaatatatagttagattttgctgaatatattgtgaaaacatatatgcatatgtatatttggcttaatcatttgagaggaattrcaacattgtcgcacttaactcctaaatacctagacagccatctcctaaaagaaagatatttgcacacaaaacatgctcacacctaaggaaagtgacattt

SEQ ID NO: 250574 - DNA, 201 bp, Homo sapiens
atatgtatatttggcttaatcatttgagaggaattgcaacattgtcgcacttaactcctaaatacctagacagccatctcctaaaagaaagatatttgcayacaaaacatgctcacacctaaggaaagtgacatttactctgtcatatcatttagtatccactccgtagtaaaatttccccaactgtcaggccagcgtggt

SEQ ID NO: 250575 - DNA, 201 bp, Homo sapiens
ccacacaataggtaatcaataaggatttatcgaatgaatgaagcaaaggatatagatgagcacctgcatatggaaagtccattcttggctgtgacaccacmcaggctggacacacagtaggcaccctgggaaggtctttctgggggtcgaattttgggggaagggaaaggtgtctgctttatccagcccctcttgtcttta

SEQ ID NO: 250576 - DNA, 201 bp, Homo sapiens
gtctcaaaaaaaaaaaaaaaaagacaagagagcccaggctgatcctgccctgtgttccctccagctttcctgctctgggaccctaccaaggtgcccccacractgcaggctgtgactgatgaccacatccggatgcacaaggtgctgcgggaatcaggcctgaagtacgtggctgtgatgccgccacacataggtaagcag

SEQ ID NO: 250577 - DNA, 201 bp, Homo sapiens
gccatcagaggggccccggccggcccacgtggtagtgggagatgttctgcaggcagccgatgtggacaagaccgtggctgggcaggacgctgtcatcgtgytgctgggcacccgcaatgacctcagtactgagccccccctctgcccacggccctcccctacacctcggcccccagcgccacccccgcccccggccccgcc

SEQ ID NO: 250578 - DNA, 201 bp, Homo sapiens
taaaggaaccgcagggagcaatggtgacgatcttggagcgaggactgtagctgagtggaaggaagcggttctgttggaccggccgccctccaccccggagkcgctgccccgccccctgccagttgcacttctttaaatggcccggggcgctagggaggggtgggcggatccggcgtctcggggcacgggcggatggctccg

SEQ ID NO: 250579 - DNA, 201 bp, Homo sapiens
aggtgtgagaggtacggagctgagattctgagtatttggagaagcgagagaactagggtcaaggattcttgggactccaagacgcactggcgggggaaggrggttgccgggaagagttcaatgttcgggtcttggagccggacagcgagtttggaggtgaagtccaggggcgtttgaaagtcaggagactaggagaagtgg

SEQ ID NO: 250580 - DNA, 201 bp, Homo sapiens
catctgagaggattagaaagaaacccagagtaaggccaggcacagtggctcacgcctgtaatcctagcactttgagaggccaaggtgggcggattgcttgmgtccaggagtgcaggaccagtctgggcaacacagcaaaactccatctctacaaaaaaaaatacaaaaaattagctgggtgtggtggtacacacctgtggt

SEQ ID NO: 250581 - DNA, 201 bp, Homo sapiens
ccctaagtttagttggttactgtcagatagacagatatatatctatctgacaaatatatatatatatatatatatatatatatatatttgttgttgttattgttgttgttgttgttagagacaaggtcttgctctgtcgtcccggctggagtgcagtgtcacgatcatggctcactgtagcttcaacttccctggctcaag

SEQ ID NO: 250582 - DNA, 201 bp, Homo sapiens
tccctaagtttagttggttactgtcagatagacagatatatatctatctgacaaatatatatatatatatatatatatatatatatatttgttgttgttattgttgttgttgttgttagagacaaggtcttgctctgtcgtcccggctggagtgcagtgtcacgatcatggctcactgtagcttcaacttccctggctcaa

SEQ ID NO: 250583 - DNA, 201 bp, Homo sapiens
atccctaagtttagttggttactgtcagatagacagatatatatctatctgacaaatatatatatatatatatatatatatatatatatttgttgttgttattgttgttgttgttgttagagacaaggtcttgctctgtcgtcccggctggagtgcagtgtcacgatcatggctcactgtagcttcaacttccctggctca

SEQ ID NO: 250584 - DNA, 201 bp, Homo sapiens
tatccctaagtttagttggttactgtcagatagacagatatatatctatctgacaaatatatatatatatatatatatatatatatatatttgttgttgttattgttgttgttgttgttagagacaaggtcttgctctgtcgtcccggctggagtgcagtgtcacgatcatggctcactgtagcttcaacttccctggctc

SEQ ID NO: 250585 - DNA, 201 bp, Homo sapiens
tgtatccctaagtttagttggttactgtcagatagacagatatatatctatctgacaaatatatatatatatatatatatatatatatatatttgttgttgttattgttgttgttgttgttagagacaaggtcttgctctgtcgtcccggctggagtgcagtgtcacgatcatggctcactgtagcttcaacttccctggc

SEQ ID NO: 250586 - DNA, 201 bp, Homo sapiens
cattgtatccctaagtttagttggttactgtcagatagacagatatatatctatctgacaaatatatatatatatatatatatatatatatatatttgttrttgttattgttgttgttgttgttagagacaaggtcttgctctgtcgtcccggctggagtgcagtgtcacgatcatggctcactgtagcttcaacttccct

SEQ ID NO: 250587 - DNA, 201 bp, Homo sapiens
acattgtatccctaagtttagttggttactgtcagatagacagatatatatctatctgacaaatatatatatatatatatatatatatatatatatttgttgttgttattgttgttgttgttgttagagacaaggtcttgctctgtcgtcccggctggagtgcagtgtcacgatcatggctcactgtagcttcaacttccc

SEQ ID NO: 250588 - DNA, 201 bp, Homo sapiens
  misc_feature (1)...(201): n = A,T,C or G
ttcagatccgaaaccttaagaaaagtacgtgatgagttcgtgataagggatgaagatgtaataatattgacttaccccaaatcaggtaaggaggcagaatngtgaactgagaaaggctgtggttgtgttcctgtccattcagtgcatgattggagttcttcctttatgtcagacagtgtacaatgctttaaggggaagaga

SEQ ID NO: 250589 - DNA, 201 bp, Homo sapiens
tttgtagagacagggtctcactatatcgcccaggctggtctaaaactcccggactcaagtgatccgcctgcctcagcctcccaaagtgctggaattacagkcaggagccacggcgcccaacccatccttgcatcttttacatacttcatgccctctcttctttaccttttttctttctttctcctaattgcattcaactca

SEQ ID NO: 250590 - DNA, 201 bp, Homo sapiens
ggagattggttgagcagcactgggaatatacttaacacttaacactacgaaaccgtaggcttaaaagtggttgacaggctgggcatggtggctcatacctrtaatcccagcactttgggaggtcaaggcaggtggattgcctgaggtcaggagttcgacaccagcctggccaacatggcaaaaccccgtctctactaaaaa

SEQ ID NO: 250591 - DNA, 201 bp, Homo sapiens; identical to SEQ ID NO: 49239

SEQ ID NO: 250592 - DNA, 201 bp, Homo sapiens; identical to SEQ ID NO: 49242

SEQ ID NO: 250593 - DNA, 201 bp, Homo sapiens
aaagtcatgggaagaatattttgaatggttttgtcaaggaactggtgagtgtttcacaaaatatgggggtgcttggagtcttctagccgacctcttttgayacccagcctcacatctctacatctcaccaacccatgggttgaaaggctccaccacccctggaggccaaacctgctaagttcgcttactctcccgcatagc

SEQ ID NO: 250594 - DNA, 201 bp, Homo sapiens
gtgcagtggcgagcgcctgtaatcccagctactcgggaggctgaggcaggagaatcgcttgaacctgggaggtggagtttgcagtgagccgatatgccaaratcatgccactgcactctagcctgggcgatagagcacgactctgtctcaaaaaaaaaaaaaaaaaaaaatctagagaggttttttggcaccgggtgcagt

SEQ ID NO: 250595 - DNA, 201 bp, Homo sapiens
cttcattgccctgtttctggttgacccttgcccaagcttcacgctccttattttatcttaaaacatctaagccaggcacgttggctggcgcctgtaatccyagcactttgggaggccgaggtgggtggatcacaaggtcaggagttcaaggccagcctggacaagatgataaaaccccatctctactacaaatacaaaaat

SEQ ID NO: 250596 - DNA, 201 bp, Homo sapiens
tttaaaccatagtacacaaatatacatcactcacctttggaaaccttccatgttcttcccattgtgagcagactgtaatatcccagagggaaggaacgatrcttccttcttccattgatatattcctagtgcagtgactacttcataggcacgtcaaatttgattagtgagtgcagtaagtaatttgttaaaagaatccat

SEQ ID NO: 250597 - DNA, 201 bp, Homo sapiens
acgtttattctcctcccacctccccatccagttattccccaagtctttcttcagttccaaggccaaggtcagtgcataatggttaagacgtgtttgatcartgcctttcaaacactgatatgcctataagtcatctggagatcttgctgaaatgcattctccttcaacaggtctgtgttgttgagacctgagattccgtat

SEQ ID NO: 250598 - DNA, 201 bp, Homo sapiens
cttcctgttactgagttatgaggagctgaaacaggtaatcccatcatttttagagtcagtgcacaccctctcaccaccatccttactttccttaaattccytccatcccgctgtgtcttcattccaccctctcagttaaagtggagcctggtgaagagtcacaaagagcgggattaactccctggtcttcattgccctgtt

SEQ ID NO: 250599 - DNA, 201 bp, Homo sapiens
aacctcccgagtagctgggattaccggcgcccaccaccacaccctgccaatttttgtatttttagtagagatggggtttcaccacgttggccaggctagtstcgaactcctgatctcaagtgatccaaccgcctcagcctcccagagtgctgggattacaggcgtgaaccaccacgcccagccttgtctttctctttcgta

SEQ ID NO: 250600 - DNA, 201 bp, Homo sapiens
cagtgtgaaaactgactaatacactgtcattccatagtgtatgcgtacatcaaaacatctgttatatactgtaaatatataccatttgttggtccccttcraccaagtttcattcaagttttatttgtcaatcatacgttaacaagccggtggggggatgaacataatagactggatgcctgctctcataaaatttgtaac

SEQ ID NO: 250601 - DNA, 201 bp, Homo sapiens
atataagaagatattgtaaaactctgtgtgttattcaaaagctagttatgggaaacagtactatctgacagtacagccaggatttgaaatcaagccttcartctccatcagattctccctgaacctctccttgctaaccctaattactgtctagaagcctctctaaacgtctcttaggaaacccgaggctctgtgttttac

SEQ ID NO: 250602 - DNA, 201 bp, Homo sapiens; identical to SEQ ID NO: 49238

SEQ ID NO: 250603 - DNA, 201 bp, Homo sapiens
gcggaggttgcagtgagctgagatcatgccactgcactccagcctgggcgacagagtgagatcttgtctctaaataaatacataaataaaattttaaaaawaaaaatctattaatctcccaggatcatgtacctagtcctaattattgagatgaaatataagaagatattgtaaaactctgtgtgttattcaaaagctagt

SEQ ID NO: 250604 - DNA, 201 bp, Homo sapiens; identical to SEQ ID NO: 49240

SEQ ID NO: 250605 - DNA, 201 bp, Homo sapiens
ctcaccaccatccttactttccttaaattccctccatcccgctgtgtcttcattccaccctctcagttaaagtggagcctggtgaagagtcacaaagagcrggattaactccctggtcttcattgccctgtttctggttgacccttgcccaagcttcacgctccttattttatcttaaaacatctaagccaggcacgttgg

SEQ ID NO: 250606 - DNA, 201 bp, Homo sapiens
atttctggaagttagcttttcactggcttccgggacaacacaatcctgaccttccgccatttttttctgatgcctctttccaaaaccctcttaatattctrtttctatctgtctcagaactgattgcatgactctaggatcgctatatatttagttatgcagaattcctgggctttttcagtactttccattttgcaattg

SEQ ID NO: 250607 - DNA, 201 bp, Homo sapiens
gtgtatgcgtacatcaaaacatctgttatatactgtaaatatataccatttgttggtccccttcgaccaagtttcattcaagttttatttgtcaatcatasgttaacaagccggtggggggatgaacataatagactggatgcctgctctcataaaatttgtaacctatcactttttctgccaccccatgcagtgctatat

SEQ ID NO: 250608 - DNA, 201 bp, Homo sapiens
ttgccccatgataaaccatcctagctattttctaagtctctagagcctccaatactagcacaggaaacttatattctcctctagtctcctaatgctagatktctggaagttagcttttcactggcttccgggacaacacaatcctgaccttccgccatttttttctgatgcctctttccaaaaccctcttaatattctgtt

SEQ ID NO: 250609 - DNA, 201 bp, Homo sapiens
aaaagacacagaggtgttcctatgggaagcagcatgttcatcaatcaatgcctgtatccaggttgactgccccggggccaggactgggctctgtacacacytcgtcttactgtgtgtaaatatgtgttgatatcagcagccacatgcatctcccatggggcagaggggtgatcacaagagggacaaggcatatccaggacc

SEQ ID NO: 250610 - DNA, 201 bp, Homo sapiens
ctgcattgtattccatggtgtatacatgccacatttgagatctgatggtattataagtggctggcatttcccctgctggcactcactcctccctcctgccrccttgtgaggaagttgccttgcttccccttcctccatgattgtgagtttcctgaggctcccccagccacactgaactgtgagtcaattaggccactttcc

SEQ ID NO: 250611 - DNA, 201 bp, Homo sapiens
tgaattcaacaaatgcctcctgccacagaaaagacacagaggtgttcctatgggaagcagcatgttcatcaatcaatgcctgtatccaggttgactgcccyggggccaggactgggctctgtacacacttcgtcttactgtgtgtaaatatgtgttgatatcagcagccacatgcatctcccatggggcagaggggtgatc

SEQ ID NO: 250612 - DNA, 201 bp, Homo sapiens
aggtatatctcctaatgctatccctccccctccccccgccccatgacaggccctggtgtgtgatgttccccaccctgtgtccaagtgttctcattgttcarttcccacctatgagtgagaatatgtggtgtttggttttctgtccttgcgatagtttgctcagaatgatggtttcccgcttcatccatgtccctacaaagg

SEQ ID NO: 250613 - DNA, 201 bp, Homo sapiens
ttcttcccattgtgagcagactgtaatatcccagagggaaggaacgatgcttccttcttccattgatatattcctagtgcagtgactacttcataggcacrtcaaatttgattagtgagtgcagtaagtaatttgttaaaagaatccattgatattattaggcattatccaggaattggctttttctccatttttgtgaag

SEQ ID NO: 250614 - DNA, 201 bp, Homo sapiens
tgtagttccagctactcgggaggctgaccaagagaatcacttgaacccaggagatggaggtggcagtgagccaagatcatgccactgcactccagcctggktgacagagcaagactctgtctcaaaaaaaaaaaaaaaaaaaaaaaaaaagtggttgagagctggctgcagtggctcacgcctacagtcccagtgctttgg

SEQ ID NO: 250615 - DNA, 201 bp, Homo sapiens
catgtgctatgttggtgtgctgcacccattaactcgtcatttacattaggtatatctcctaatgctatccctccccctccccccgccccatgacaggcccyggtgtgtgatgttccccaccctgtgtccaagtgttctcattgttcagttcccacctatgagtgagaatatgtggtgtttggttttctgtccttgcgatag

SEQ ID NO: 250616 - DNA, 201 bp, Homo sapiens
cccgagtagctgggactacaggcgcccgccatcacacccggctaatttttttgtgtttttagtagagacagggtttcactgtgttagccaggatggtctcratctcctgacctcgtgatccgcccgcctcggcctcccaaagtgctgggattacaggtgtgagccaccgtacctggcctaggtttttttttaatttttttt

SEQ ID NO: 250617 - DNA, 201 bp, Homo sapiens
agactgcttctagaattgtactttcctggaaggtgtttataggtgtgtgaattattattattattattattttgagacacagtctcattctgtcacccagrctggagtgcattggtgcgatcttggctcactgcaacctccacctccccaggttcaagtgattctcctgctccagcctcctgagtagctaggactagaggt

SEQ ID NO: 250618 - DNA, 201 bp, Homo sapiens
gtgcctggtggagacaggtcaaggagatgtgtggtctgacctgagtttctgcttcttgtttccaggtgtatctggggactggaaaaatcacttcacagtgrcccaagctgaagactttgataaattgttccaagagaagatggcagatcttcctcgagagctgttcccatgggaataacgtccaaaacactctggatctta

SEQ ID NO: 250619 - DNA, 201 bp, Homo sapiens
taaacaaaatgtggtatatagctataatggaatgttattcatccttgagaaggaagaaaattctgatgcatgatacaacagagataaacatcaaggacattatgctaaatgaaataagccagtcacaaaaatacaaatagtgtgtgattccacttacataaggtacctggagtcatcaagtccatagaaacagaaagtaca

SEQ ID NO: 250620 - DNA, 201 bp, Homo sapiens
aggtggagtttgcagtgagccgatatgccaagatcatgccactgcactctagcctgggcgatagagcacgactctgtctcaaaaaaaaaaaaaaaaaaaaatctagagaggttttttggcaccgggtgcagtggctcacacttgtaatcccagcactttggaaggccgaggtgggagaatcacttgaggctgggagtttga

SEQ ID NO: 250621 - DNA, 201 bp, Homo sapiens
tgggccaatctgagagagcagcgttccaaggagaaggagcgtgggacgccaatagtctgaggagtggggatgcctgccacgtttgaggcagaatcagaagyccccgtgtgagtagagtgacggagagggtagttttaggggatgagctcagagaagccacaggggctggatcacctggagccctgtaagcgcctccagcac

SEQ ID NO: 250622 - DNA, 201 bp, Homo sapiens; identical to SEQ ID NO: 49244

SEQ ID NO: 250623 - DNA, 201 bp, Homo sapiens
ccaagatcgcgctactgcactccagcctgagggatagagcaagactccgtctctacaaaaaaaaaaagaaaaaaaagcagagaccagttacaagtgtactstaataatccaggtgaaaaatgatgttggcttgagtcaacgtggtagaaacagaggtggtgagacgtgacttgattctggacatatcagatgatatactgg

SEQ ID NO: 250624 - DNA, 201 bp, Homo sapiens
ttagccatgtgtggtggcgcccacctgtagtcccagctacttggggtggggctgagacatgagaatcgcttgaacccaggaggcagaggttgcagtgagcygagattacaacactgtactcctgcctgggagacagagcaagactccatctcaaaaaaaaaaaaaaagataaatgctgagactttgtataacttatctata

SEQ ID NO: 250625 - DNA, 201 bp, Homo sapiens; identical to SEQ ID NO: 49246

SEQ ID NO: 250626 - DNA, 201 bp, Homo sapiens
tgtccggctgagatggtacattttatatatttttttccttctttttccaggaacaaactggttggctgagattctctgcctgatgcactccaagggggatsccaagtggatccaatctgtgcccatctgggagcgatcaccctgggtagagagtgagattgggtatacagcactcagtgaaacggagagtccacgtttatt

SEQ ID NO: 250627 - DNA, 201 bp, Homo sapiens
gagttcgataccagcctgggcaacatggcgaaatcccatctctaccaaaaatataaaaaattagccaggcgtggtgttgtgcacctgtagtcccagctacycaggacccagctactcaggagaatcgcttgaacccaggaggcggaggttgcagtgagccgagatcatgccattgcactccagcctgggcaacagagcaag

SEQ ID NO: 250628 - DNA, 201 bp, Homo sapiens; identical to SEQ ID NO: 49236

SEQ ID NO: 250629 - DNA, 201 bp, Homo sapiens
aaacaaaatgtggtatatagctataatggaatgttattcatccttgagaaggaagaaaattctgatgcatgatacaacagagataaacatcaaggacattmtgctaaatgaaataagccagtcacaaaaatacaaatagtgtgtgattccacttacataaggtacctggagtcatcaagtccatagaaacagaaagtacac

SEQ ID NO: 250630 - DNA, 201 bp, Homo sapiens
gagtattgaaagaacaacttgaggccaagctcagtggctcacgcctgtaatcccagcactggggaggtgaaggcaggtggatggcttgagtccaggagttygagaccagcctggccaacatagcaagaccccatctctactaaaaatacaaaaaattagccgggcatggtggcaggcacctgtagtcccagctacttggga

SEQ ID NO: 250631 - DNA, 201 bp, Homo sapiens
aggtcatcatcatgtcggacgatttcttatggtttgaaggcatagctttccctactatgggtttcagatccgaaaccttaagaaaagtacgtgatgagttygtgataagggatgaagatgtaataatattgacttaccccaaatcaggtaaggaggcagaatcgtgaactgagaaaggctgtggttgtgttcctgtccatt

SEQ ID NO: 250632 - DNA, 201 bp, Homo sapiens
gtggctcctgggacaccccaggtccaagctctggttggccgctccctgggctggaacagtgacgtattgttgccccctggtggccacggagcaccataacrggtatgtggaagccgaggactctcccagttctgggggtgcccctgaatgaaccccatctctgatctgaccccactgtgtctctagagatacaactgcatc

SEQ ID NO: 250633 - DNA, 201 bp, Homo sapiens
tctgagatccaagtactggagtgaatagtgacggagaggaaaagctgtccgatgatactcagaaccagcgagtattgaaagaacaacttgaggccaagctsagtggctcacgcctgtaatcccagcactggggaggtgaaggcaggtggatggcttgagtccaggagttcgagaccagcctggccaacatagcaagacccc

SEQ ID NO: 250634 - DNA, 201 bp, Homo sapiens
cccagcacttggggaggccgaggcaggcagatcatgaggtcaggagatcgagaccatcctggctaacatggtgaaaccccatctctactaaaaatatattwaaaaaaaaattagccagacgtggtggtgggcgcctgtagtcccagctacttgggaggctgaggcaggagaatggcatgaacccgggatgcacagcttgca

SEQ ID NO: 250635 - DNA, 201 bp, Homo sapiens
atgaaggcatgtaatcaatttatctcactattctgagatccaagtactggagtgaatagtgacggagaggaaaagctgtccgatgatactcagaaccagcragtattgaaagaacaacttgaggccaagctcagtggctcacgcctgtaatcccagcactggggaggtgaaggcaggtggatggcttgagtccaggagttc

SEQ ID NO: 250636 - DNA, 201 bp, Homo sapiens
gcaagacgccggctctaaaaataaaaataaggagcatattccatgcattgaggcagagtgtgatgtctcctgctagcactggtgtatgtaaacatttctcygggtgagacctatggtgctgctgataaccaagcgttgagagggcgctggaagagaggatgggactgggtagaagtgatttagttcctgagatggttccga

SEQ ID NO: 250637 - DNA, 201 bp, Homo sapiens; identical to SEQ ID NO: 49241

SEQ ID NO: 250638 - DNA, 201 bp, Homo sapiens
aacccagtaggcagagcttgcagcgagccgagatcgcgccactacactccagcctggacgacagagtgagactccatctcaaaaaaaaaaaaaaaaaaaamaaacacataattaacacttaaggttgggtgctgccaattctttgtgaaaatccaaatattattaaggaaacagggagatgccactaactcttgattttcc

SEQ ID NO: 250639 - DNA, 201 bp, Homo sapiens
tagagaggttttttggcaccgggtgcagtggctcacacttgtaatcccagcactttggaaggccgaggtgggagaatcacttgaggctgggagtttgagaycagcaagactccagtctacgaaacagcaagactccagtctacaaaggaaaaaaaaaattagccagatgtggggggtgcacacctctaattccagctactc

SEQ ID NO: 250640 - DNA, 201 bp, Homo sapiens
gaacccagtaggcagagcttgcagcgagccgagatcgcgccactacactccagcctggacgacagagtgagactccatctcaaaaaaaaaaaaaaaaaaaacaaacacataattaacacttaaggttgggtgctgccaattctttgtgaaaatccaaatattattaaggaaacagggagatgccactaactcttgattttc

SEQ ID NO: 250641 - DNA, 201 bp, Homo sapiens
gggcatggtggcgggtgcctgtggtcccagctactcgggaggctgaggcaggagaatggtgtgaacccaggaggcggagcttgcagtgagccaagatcgtsccactgcactccagcctgggcgacagagcaagactccgtctcaaaaaaaaaaaaaaaaaaaaaaaaaagagatctgtcctggatgaagaaatgtgtgaag

SEQ ID NO: 250642 - DNA, 201 bp, Homo sapiens
tgaacccagtaggcagagcttgcagcgagccgagatcgcgccactacactccagcctggacgacagagtgagactccatctcaaaaaaaaaaaaaaaaaaaacaaacacataattaacacttaaggttgggtgctgccaattctttgtgaaaatccaaatattattaaggaaacagggagatgccactaactcttgatttt

SEQ ID NO: 250643 - DNA, 201 bp, Homo sapiens
atcctggctaacatggtgaaaccccatctccactaaaaatacaaaaaattagccgggcatggtggcgggtgcctgtggtcccagctactcgggaggctgargcaggagaatggtgtgaacccaggaggcggagcttgcagtgagccaagatcgtgccactgcactccagcctgggcgacagagcaagactccgtctcaaaa

SEQ ID NO: 250644 - DNA, 201 bp, Homo sapiens
tggctgaggatgaccaatgatgtcctgaaagaagaaatagcatttaaatggaaatgcaaagaatgagtatgaaattacttggggggagggctattttcagwtaggagaatcatcagggcaatggccaggaaccacaaaagagccaggcaatctcaaggggctgaaagatgaggatcatatgtctctgggagtggggctgtg

SEQ ID NO: 250645 - DNA, 201 bp, Homo sapiens
atatccactgacaggtgagtgaataaacaaaatgtggtatatagctataatggaatgttattcatccttgagaaggaagaaaattctgatgcatgatacarcagagataaacatcaaggacattatgctaaatgaaataagccagtcacaaaaatacaaatagtgtgtgattccacttacataaggtacctggagtcatca

SEQ ID NO: 250646 - DNA, 201 bp, Homo sapiens
cacgcggtacgtcatcagacagccaggagggcagggggcccctggggctggggcagccagactggattgggatgaggcaggaaagtcctctccccaagtcrcaggacttcattcttcactcattcgtcatctcacacttcctgatgggaatgccgggacacccagcgatggcaagtaggttttatttgatgtgccaattcc

SEQ ID NO: 250647 - DNA, 201 bp, Homo sapiens
aacctcagggacagggagagcagaggggcacagacacacacagcagctttgccccaccaggaggcctgttatttcttcttccctcccctaagcccacacckggcccacggtcagagggccaggtctcggggatcaagcagtgcgaaggccccgttcttgcggaagaatgactcaatgcggcacatcttgcaggagaccagt

SEQ ID NO: 250648 - DNA, 201 bp, Homo sapiens
ggctcaaaaagtaaagaaggctgatggcaagcctggggagaggcctggaaacgagggaagggctgagggctatgaggagtcccctagcgcaggtcttcggsagtgaacatgcccctggccctgcgcaggatggagtccttggcggcgtcatatgggtgctccttggaggggatctccaggacagcggggatggactgctgg

SEQ ID NO: 250649 - DNA, 201 bp, Homo sapiens
gtggggccacaaggagcctgcgcggggcaggggccgagcttagcgcgcccgggtccctttgaagtgagcgcactgcactctggcagtgactcggcggggckcgaggggcaggtgtgccaggtgctgccccgcccgccccactgagccgcggacgctcagcgctccgcaccgccaggaggacgcggctgggcggcggcgcgc

SEQ ID NO: 250650 - DNA, 201 bp, Homo sapiens
cttctccaccaccaggaaattgggatggcggttcttgttaagctcccctatgccgcccagcaggaaaccagtcaccgtgtcctcgtctccgatcactgcgrtgagcttacccctccccgccatccctgcagccgggcagagctcaccctagagcaccagaagccactgaaaccccgcctccgccgtacggcgccccgtcgg

SEQ ID NO: 250651 - DNA, 201 bp, Homo sapiens
acctctcatcagccccagatctgggtgaaaccgggagtggtgcagaccaagggtgggagagccctggaggacctgcagagcccacacgcggtacgtcatcrgacagccaggagggcagggggcccctggggctggggcagccagactggattgggatgaggcaggaaagtcctctccccaagtcgcaggacttcattcttc

SEQ ID NO: 250652 - DNA, 201 bp, Homo sapiens
  misc_feature (1)...(201): n = A,T,C or G
ccttatgaaatcccttttaactggtttttatggatgcagaacagctctccttcctccacagctgcaggggagcggcaacacatcatctctttttttagatntcttttgttaattatgaacacttgcagtttttaggccaggctctggcctaaaatttcatcttgaatttcctttgattttgctgtcagaaacaaagaaaag

SEQ ID NO: 250653 - DNA, 201 bp, Homo sapiens
tggcccctggggtctgcaggttccctctcaaacctgggcccaaagtgcttttcctttccaggacctggcccagagggaagagaggagtgaggcagagcctragacccagaaaagaaagctcactcccgggacccctgggccgggggacctgccctcccaaaacctgccttcccaagatgcccttgaagggctgggctcgga

SEQ ID NO: 250654 - DNA, 201 bp, Homo sapiens
tgcactttggcaggtgagggaggggcactgcctcagaaggaaggagacaggcggggacctgacaccatcttgcccctccaggtgcaagagggccgcgggtrtcccccagggctggagctgccccctgtactgctgcagatggagtggagccggcgggcccaggagcaggtaagggctggctgggggtgtggctgaggccag

SEQ ID NO: 250655 - DNA, 201 bp, Homo sapiens
cgcggtaccgtaccggaaagtgtcttcgatctcattgatggttgtatccttctccaccaccaggaaattgggatggcggttcttgttaagctcccctatgmcgcccagcaggaaaccagtcaccgtgtcctcgtctccgatcactgcgatgagcttacccctccccgccatccctgcagccgggcagagctcaccctagag

SEQ ID NO: 250656 - DNA, 201 bp, Homo sapiens
gggccagggttctacttgccatgcccccagcagaccccatgagcctggcttcctgaggcagcctgaggccagggcccactggttaagagccctgctccccccaaaactcccgcagggccctcgcgggatctggcatcacagactcccaggtttcgtgtgctttctgcttctgtcctttggatctggcccccttcccagccc

SEQ ID NO: 250657 - DNA, 201 bp, Homo sapiens
cacctagcctcttaatggagtgggaaggagcagggaattggaaatcagaggctcaaaaagtaaagaaggctgatggcaagcctggggagaggcctggaaamgagggaagggctgagggctatgaggagtcccctagcgcaggtcttcggcagtgaacatgcccctggccctgcgcaggatggagtccttggcggcgtcata

SEQ ID NO: 250658 - DNA, 201 bp, Homo sapiens
ttagtcctaagtgccagggaaaggcgagtccccagagtccagggaagaagatgctgcggtcttgggaaggcaatatctcacaagcctgggaggtggctccyggagaggccactgtgcagcccccagaggaaggcgacccccatagccatccgagggactcctgcgggtccctgaaagcacagactccaaagcctgtgggca

SEQ ID NO: 250659 - DNA, 201 bp, Homo sapiens
ggccagggttctacttgccatgcccccagcagaccccatgagcctggcttcctgaggcagcctgaggccagggcccactggttaagagccctgctccccccaaaactcccgcagggccctcgcgggatctggcatcacagactcccaggtttcgtgtgctttctgcttctgtcctttggatctggcccccttcccagccca

SEQ ID NO: 250660 - DNA, 201 bp, Homo sapiens
ctcagctcagctccctccccgctgatggccttgactcaacctcacagaaaaaagactcagccgagatggacaggcttcctgccaatgacatcccctacccsctctggctcagccctcctgcccccactcccatcagattccagcaacttgagctccctaggagatctcatggatttaaatagcacctataggccagccggt

SEQ ID NO: 250661 - DNA, 201 bp, Homo sapiens
tccgaatttgcatcttcagctctgacttcaatccagacttatagacacagccaccctacagacacttcaagcataacatagccaaacacacatggctaaayaggacctgttcatgcacgctccagccctgacctctcccagtcttccctgtcactgcagctttagctaaacaaacacctgggtgattgatctctcttcccc

SEQ ID NO: 250662 - DNA, 201 bp, Homo sapiens
tctcacattctatccatgggtgagttccaccgagtcttcccccaaaacatcctgaattgatttcagctctattgctgatccctcaggccactaccacaggrtaaccaaacagatgcccaactcatgtgccagattctaccatttcccctgaaaaagccactgcctacatacaggtcagggtgactttttaaaaggttcacc

SEQ ID NO: 250663 - DNA, 201 bp, Homo sapiens
aataaatagcagcacgtggccgctgcctccctgcccaccgccactccctagttctgtggaacgtgtcgacacttcttggccatctccttgctctgtttatrgtctggacccttcaccaggatgcccactccctagcacatggctagtgctctgtttttgaggtgatttccaagaggttgggctcacccagctgccagccat

SEQ ID NO: 250664 - DNA, 201 bp, Homo sapiens; identical to SEQ ID NO: 49260

SEQ ID NO: 250665 - DNA, 201 bp, Homo sapiens
aacaaattatttaaaaatagggctgatgagaccactgaaggcctcaaggtctatcctgatgagggtggtggaggggtcagagggaaagtttggcatgaacyaagatcacaagctaggaagaggacaccttgatgaaggaatcacactttctgcacaaaaagaacctggccttgtgctccttctctcctgtggtcacccacc

SEQ ID NO: 250666 - DNA, 201 bp, Homo sapiens
atagccaaacacacatggctaaataggacctgttcatgcacgctccagccctgacctctcccagtcttccctgtcactgcagctttagctaaacaaacacctgggtgattgatctctcttccccttattctcacattctatccatgggtgagttccaccgagtcttcccccaaaacatcctgaattgatttcagctctatt

SEQ ID NO: 250667 - DNA, 201 bp, Homo sapiens
tccctctgtcacccaggctggagtgcagtggtggatctcggctcactgcagtctccacctcccaggttcaaacaattctccttcctcagcctcctgatttsttgggattacaggcacccgccaccacgcctggctaatttttgtatttttagtagaaatggggtttcaccatattggtcaggctagtctcaaactcccgag

SEQ ID NO: 250668 - DNA, 201 bp, Homo sapiens
aacctgggaggcagaggttgcagtgagccaagatcgtgccactgcattccagcctgggtgacagagtcagactgtttcaaaaagaaaaagaaaaaaaaaaagcacctatattccaatgacctccgaatttgcatcttcagctctgacttcaatccagacttatagacacagccaccctacagacacttcaagcataacata

SEQ ID NO: 250669 - DNA, 201 bp, Homo sapiens
ggctcggacccgcacctgggccaggagagagcagaacttcaaagaccaccaaggatggacacccctgagtctgagaggaggaccctcaggatcagaaagcrgagacccctcagcgtaagagagccgaggcctcctggggcgagatcaaagatgctcctcagagtcagaaggtgaagacacacgggggccagagcccaaggg

SEQ ID NO: 250670 - DNA, 201 bp, Homo sapiens
gctatggagagaatgccctgcctggacactggagcctgggcccctgccctgcaaagacccccgccatgttgagtcaccagcagtaaactctaggcctgccygaaggcttccttgtgtgtgtgtgtatttcctcctggtgctgggacagaggctgggctgccaggaacatggggtccagtgatcagtggccgcagaatcacg

SEQ ID NO: 250671 - DNA, 201 bp, Homo sapiens
tctctgaggtcccttttggttggaaacataaaaaattcttgaagtaaaatttgtccttctcccatgataacttgggtcactttaccagacagcttagagawtggcagataacagcctcccaggtcagggactacctaatacaccaggcagcaggaaccagtctcagccagcagccctgggctggactgtttgggggaaaca

SEQ ID NO: 250672 - DNA, 201 bp, Homo sapiens
cgcagaatcacggcaccatgcttactccttgcacctgcatgcctgggctgccccacccagccactccctggtgctgtctgggaaaccctgcagtgggtagraggaggaccctggtgccctggtcttagccctgtgctcattctgtgtagcaggcatgacgtgtggccccatgtggtaccttctgtggatccatgtgggatc

SEQ ID NO: 250673 - DNA, 201 bp, Homo sapiens
atttctgcctactgtgctcaagactacaaggaaattccgaggccgcctgaggagacctgccaagagtgtgtacctggcttaccggaggcagaaagggttgrgattgggttcaaattctagctctgcctctgccgactcgtaactttagtgtgtgccttaccctctccgagctttagttttctcacctgtgagtaggacaaa

SEQ ID NO: 250674 - DNA, 201 bp, Homo sapiens
  misc_feature (1)...(201): n = A,T,C or G
cgctccgcaccgccaggaggacgcggctgggcggcggcgcgccctgcgggagcagctggagcaaatgcatcgggagaggacggagcggctgcgggccctcngggccaggtgaggggcgggcaaggaggggtgtggcggtggcaggaggcccctttccctggcctccgaaatgacaagccgctctctccccaggaacaccca

SEQ ID NO: 250675 - DNA, 201 bp, Homo sapiens
ccgaggggcggccggacgctgactgccgcctctgcaggtcctggaacgcctccacatcgccaggaaccgccactgccgggttcaccccgtggggctcccgsccagtccggctcaactcccgccacaggcaagacccctagaaggcggtggggccacaaggagcctgcgcggggcaggggccgagcttagcgcgcccgggtc

SEQ ID NO: 250676 - DNA, 201 bp, Homo sapiens
ttcctttccaggacctggcccagagggaagagaggagtgaggcagagcctgagacccagaaaagaaagctcactcccgggacccctgggccgggggacctkccctcccaaaacctgccttcccaagatgcccttgaagggctgggctcggacccgcacctgggccaggagagagcagaacttcaaagaccaccaaggatgg

SEQ ID NO: 250677 - DNA, 201 bp, Homo sapiens
gagtccagggaagaagatgctgcggtcttgggaaggcaatatctcacaagcctgggaggtggctcccggagaggccactgtgcagcccccagaggaaggcsacccccatagccatccgagggactcctgcgggtccctgaaagcacagactccaaagcctgtgggcagggagagcccaaacctccggagaaggactaccac

SEQ ID NO: 250678 - DNA, 201 bp, Homo sapiens
gcaaccatgcctcacctcacacagggccagggttctacttgccatgcccccagcagaccccatgagcctggcttcctgaggcagcctgaggccagggcccrctggttaagagccctgctccccccaaaactcccgcagggccctcgcgggatctggcatcacagactcccaggtttcgtgtgctttctgcttctgtccttt

SEQ ID NO: 250679 - DNA, 201 bp, Homo sapiens
tcaccccacacatgtcctttccagcacccaacccatctggagagaagcaagaatatgactttaatttaacatcaacaatgacactgtgtaacagcacaggraagaggtagtggagggagatggtcaggcttcctgttccttaaccagcagagccccagcaacctagaagcgcctcacctagcctcttaatggagtgggaag

SEQ ID NO: 250680 - DNA, 201 bp, Homo sapiens
aaaatttcatcttgaatttcctttgattttgctgtcagaaacaaagaaaaggctaaggaaggtttttctgaataagagtaaaaagtaagacgcccagagcrggtttcttctctgggcctgatgggcacaccagggcaaagtgggagtggccggtgctgaggaacccaggcacccagcaccgtgacccttctcactcccagg

SEQ ID NO: 250681 - DNA, 201 bp, Homo sapiens
  misc_feature (1)...(201): n = A,T,C or G
ctcctttgtttaaaaaactctttgaaagatgcgttttcacagagagtgcacccatttggttactgttaggaatattcacacgtctgtatattgcacaaganaacaagatgcagtattcttgggaaagttctcaatttcagaccttatgaaatcccttttaactggtttttatggatgcagaacagctctccttcctccaca

SEQ ID NO: 250682 - DNA, 201 bp, Homo sapiens
ttaacatcaacaatgacactgtgtaacagcacagggaagaggtagtggagggagatggtcaggcttcctgttccttaaccagcagagccccagcaacctaraagcgcctcacctagcctcttaatggagtgggaaggagcagggaattggaaatcagaggctcaaaaagtaaagaaggctgatggcaagcctggggagagg

SEQ ID NO: 250683 - DNA, 201 bp, Homo sapiens
  misc_feature (1)...(201): n = A,T,C or G
tgcacccatttggttactgttaggaatattcacacgtctgtatattgcacaagagaacaagatgcagtattcttgggaaagttctcaatttcagaccttangaaatcccttttaactggtttttatggatgcagaacagctctccttcctccacagctgcaggggagcggcaacacatcatctctttttttagatttcttt

SEQ ID NO: 250684 - DNA, 201 bp, Homo sapiens
gcgggccctcggggccaggtgaggggcgggcaaggaggggtgtggcggtggcaggaggcccctttccctggcctccgaaatgacaagccgctctctccccrggaacacccagaacttcctggaactactgtgttcccctggtgctgaggatcccgtgcctgcgaagtagtgctcgcccttcccagcaccctctggtcattg

SEQ ID NO: 250685 - DNA, 201 bp, Homo sapiens
tgctcgcccttcccagcaccctctggtcattgctgagtcctcaaagggatgattaaagtgatgagggttacggaaaaagcaagagggcaacttgcaggtcwgatagtttcagaaaggcctgaatgcaacctcagggacagggagagcagaggggcacagacacacacagcagctttgccccaccaggaggcctgttatttc

SEQ ID NO: 250686 - DNA, 201 bp, Homo sapiens
ccgatgggcccagagaggtgcatcagaggtagcccttgaactcctgtagggggcaggccggagacctctcatcagccccagatctgggtgaaaccgggagyggtgcagaccaagggtgggagagccctggaggacctgcagagcccacacgcggtacgtcatcagacagccaggagggcagggggcccctggggctggggc

SEQ ID NO: 250687 - DNA, 201 bp, Homo sapiens
agggagggtactgggggcggccacccgggactcaagtgtttggatgctggggtgggggtctcgggagactggcaggcagactccctcccattccagagccsatgggcccagagaggtgcatcagaggtagcccttgaactcctgtagggggcaggccggagacctctcatcagccccagatctgggtgaaaccgggagtgg

SEQ ID NO: 250688 - DNA, 201 bp, Homo sapiens
aggacgcggctgggcggcggcgcgccctgcgggagcagctggagcaaatgcatcgggagaggacggagcggctgcgggccctcggggccaggtgaggggcsggcaaggaggggtgtggcggtggcaggaggcccctttccctggcctccgaaatgacaagccgctctctccccaggaacacccagaacttcctggaactac

SEQ ID NO: 250689 - DNA, 201 bp, Homo sapiens
cagtcactgtcgccaggcaggagtgacacctacctggcgaggccccacgctgtgtggtgagggggtgatgcccgctgcaggttgggggaggctcagcacaragaagaagggcagcccggagggctcagggcaggaccaggccgggtatggcgagtctcgcaggggtacgcacagcaactggggcagtttcaggtgccttgg

SEQ ID NO: 250690 - DNA, 201 bp, Homo sapiens
ctcccacctcatcatcccaaagtggtggaactgcagatgtgaagcaccacacttggcctaggagaagttgctttctgagtcagtcttcttgcctataaagkggggataataatagagcctgcttcatagagttgctgcaaggaaggattatatgtacgaagcatcttcattcccgcacaagctaaactgttggtagcggct

SEQ ID NO: 250691 - DNA, 201 bp, Homo sapiens
tggtaccgccatcctggtgtgaccaggcatcagagagggaggctgggctcctgccgccagctgggagctggggacagtgctgttcccagtgcgaccacgawgtggtgccctgacctcactcacagggagcctgggagccagagtcctggagatccctggagactcctgggagatgcttggttttctgggagggtctgcgag

SEQ ID NO: 250692 - DNA, 201 bp, Homo sapiens
  misc_feature (1)...(201): n = A,T,C or G
gagcagttcccaccctggttagggctatggagagaatgccctgcctggacactggagcctgggcccctgccctgcaaagacccccgccatgttgagtcacnagcagtaaactctaggcctgcccgaaggcttccttgtgtgtgtgtgtatttcctcctggtgctgggacagaggctgggctgccaggaacatggggtccag

SEQ ID NO: 250693 - DNA, 201 bp, Homo sapiens
cctttccagcacccaacccatctggagagaagcaagaatatgactttaatttaacatcaacaatgacactgtgtaacagcacagggaagaggtagtggagrgagatggtcaggcttcctgttccttaaccagcagagccccagcaacctagaagcgcctcacctagcctcttaatggagtgggaaggagcagggaattgga

SEQ ID NO: 250694 - DNA, 201 bp, Homo sapiens
tggcttggggatactgagtgtgcaggcaccttctgggccactctgagagctagtgacacagggaccctatgcctggggtgagaaacagaagcaatagaccrcaatgcagtgtggacatgtacctgcgtgtgcacacagaaacacacatccctcagaaacccagataagcacgtgcaatgcatacctgcctgccttcacagc

SEQ ID NO: 250695 - DNA, 201 bp, Homo sapiens
ctgtgttcccctggtgctgaggatcccgtgcctgcgaagtagtgctcgcccttcccagcaccctctggtcattgctgagtcctcaaagggatgattaaagwgatgagggttacggaaaaagcaagagggcaacttgcaggtctgatagtttcagaaaggcctgaatgcaacctcagggacagggagagcagaggggcacag

SEQ ID NO: 250696 - DNA, 201 bp, Homo sapiens
cccccagggctggagctgccccctgtactgctgcagatggagtggagccggcgggcccaggagcaggtaagggctggctgggggtgtggctgaggccaggrtgggtgccccctcacgccctggcaccccatcttcctgcagctcctgtgggacttggaactgctgactggtgtggagctgggcctcttctggccaccccag

SEQ ID NO: 250697 - DNA, 201 bp, Homo sapiens
tgaacccaggaagtggaagttgtggtgagctgagatcgtgccactgcactccagcctgagcaacaagagcaaaattctgtctcaaaaaaaaaaaaaaaaaagaaggcttgttacctgaaccctcaagccttgctttgccactcactggctgtgtgaccttggacaagtgctgacctactctggccttggtctgtccttctg

SEQ ID NO: 250698 - DNA, 201 bp, Homo sapiens
cactgcactctggcagtgactcggcggggcgcgaggggcaggtgtgccaggtgctgccccgcccgccccactgagccgcggacgctcagcgctccgcacckccaggaggacgcggctgggcggcggcgcgccctgcgggagcagctggagcaaatgcatcgggagaggacggagcggctgcgggccctcggggccaggtga

SEQ ID NO: 250699 - DNA, 201 bp, Homo sapiens
  misc_feature (1)...(201): n = A,T,C or G
tgagcgcactgcactctggcagtgactcggcggggcgcgaggggcaggtgtgccaggtgctgccccgcccgccccactgagccgcggacgctcagcgctcngcaccgccaggaggacgcggctgggcggcggcgcgccctgcgggagcagctggagcaaatgcatcgggagaggacggagcggctgcgggccctcggggcc

SEQ ID NO: 250700 - DNA, 201 bp, Homo sapiens
ctgagccgcggacgctcagcgctccgcaccgccaggaggacgcggctgggcggcggcgcgccctgcgggagcagctggagcaaatgcatcgggagaggacsgagcggctgcgggccctcggggccaggtgaggggcgggcaaggaggggtgtggcggtggcaggaggcccctttccctggcctccgaaatgacaagccgct

SEQ ID NO: 250701 - DNA, 201 bp, Homo sapiens
  misc_feature (1)...(201): n = A,T,C or G
agccgctctctccccaggaacacccagaacttcctggaactactgtgttcccctggtgctgaggatcccgtgcctgcgaagtagtgctcgcccttcccagnaccctctggtcattgctgagtcctcaaagggatgattaaagtgatgagggttacggaaaaagcaagagggcaacttgcaggtctgatagtttcagaaagg

SEQ ID NO: 250702 - DNA, 201 bp, Homo sapiens
  misc_feature (1)...(201): n = A,T,C or G
gccgctctctccccaggaacacccagaacttcctggaactactgtgttcccctggtgctgaggatcccgtgcctgcgaagtagtgctcgcccttcccagcnccctctggtcattgctgagtcctcaaagggatgattaaagtgatgagggttacggaaaaagcaagagggcaacttgcaggtctgatagtttcagaaaggc

SEQ ID NO: 250703 - DNA, 201 bp, Homo sapiens
cctgcttttgttagaaagttatttccctgacttcccctttaggggcctgggggaaagggatgtttgggggcaaaatctcaactgagtcaatccccaaccayccaccttttctgcaagacactcaagcagctggagaagggtacagggctgaggagtctcacttgacattcatgagcacagacagcaatgggacgtgcagca

SEQ ID NO: 250704 - DNA, 201 bp, Homo sapiens
caagacccctagaaggcggtggggccacaaggagcctgcgcggggcaggggccgagcttagcgcgcccgggtccctttgaagtgagcgcactgcactctgrcagtgactcggcggggcgcgaggggcaggtgtgccaggtgctgccccgcccgccccactgagccgcggacgctcagcgctccgcaccgccaggaggacgc

SEQ ID NO: 250705 - DNA, 201 bp, Homo sapiens
ttactcatctcaagggcagggtctgggtctttatcgtgtatgtatgtgtgtaactatgacacatagttaacaagtaacacacgtttgttcagttaaaggamtgcaaaagttaatgatgatactgcctagtgaggtggaaagtcaagggaacaggcgactacaaagctgtgtgttaatggttagaatgtgaaaagtatatgg

SEQ ID NO: 250706 - DNA, 201 bp, Homo sapiens
  misc_feature (1)...(201): n = A,T,C or G
acacccagaacttcctggaactactgtgttcccctggtgctgaggatcccgtgcctgcgaagtagtgctcgcccttcccagcaccctctggtcattgctgngtcctcaaagggatgattaaagtgatgagggttacggaaaaagcaagagggcaacttgcaggtctgatagtttcagaaaggcctgaatgcaacctcaggg

SEQ ID NO: 250707 - DNA, 201 bp, Homo sapiens
ctgggccctggggccgcctctgccgagactgggaccagatgtttgcatttggtaaggcacaggtcgaggtggaaatgggggaatgtaaagctgtccagggrtagcgaggtattcacgtgccttctacccacgcagctcagaggcacgtggagcggcgagaggcagaggcagccatgaggaacggaggacagcccgagaagg

SEQ ID NO: 250708 - DNA, 201 bp, Homo sapiens
agcccctttcttctggcattggtcccccttcaccaagtcaccgtggtggagctggggggctggaggccctaggagctgaggtaaagacggttctctccagrgaaggaaagctgctctccccgcctgcccaccggccgtctctggatgagtgggaggagctgccagcgggtactgaaatgtcatccaggtgtctctacccag

SEQ ID NO: 250709 - DNA, 201 bp, Homo sapiens
gggtattcaaactattttttccctaccataatccctcacccttattaaccaagaagtcccctactggccacaggtgccacccaatcattgaccattctaayactaataatgcatgccctttaccaattggattaccaatgaatccccccattatagatatctttcatagtaatgctcaccttcttccctttccagatccta

SEQ ID NO: 250710 - DNA, 201 bp, Homo sapiens
gattttataccttccccagactggagagaccctaaccctctaaagttgtgagctctttcccctgacaagcataggaaatcatataagacctggtagaatgmatcttctgaaatatgataagcccattataggcctggagtgtaagtgagggtattcaaactattttttccctaccataatccctcacccttattaaccaag

SEQ ID NO: 250711 - DNA, 201 bp, Homo sapiens
ggccacagggcccagtgttacagaatttttgagaaaccctcctcccttttacctcccaccctcacccacccacacactctcacagtaccacttctgcaatrgtgtgaccaaccttctcatgcttcttatgtcttctttccaatagccctgtgaagccagaggagatggactggtctgagctatacccagagttcttcgctc

SEQ ID NO: 250712 - DNA, 201 bp, Homo sapiens
cagggagatagcagagaaaaatggccctctactcctggccaaaaagggtttggaagttggaaacaatgagaagggggctgcagcccctagcctcatcttgytgtctccattttgtgctttgcaacctagactgtaccctgtggtacctggaaattctcgtgtcccagacaaagacattcatgtgggtgactatattatccc

SEQ ID NO: 250713 - DNA, 201 bp, Homo sapiens
gggacagccagagagaacggatgcccatgaaataaggaaaaggcgagttgaggctgggggcggtgtggctacactcgggcagagcccgtcccgactcttakcagagggcgctgcgaaagcgccttctcgctgtcctgaggtgtggagatcctgcagataaagtacaagtgcgcgggagggggaggccggagtgggcagtac

SEQ ID NO: 250714 - DNA, 201 bp, Homo sapiens
ggaaccctgaacaacgtagtctgcgaccttgtgcggcgtctgaggcgccagcggggacgtggcacggggccgcccgccctggttcgggacgtggcgggggrattttacaagttcggactggaaggtgagtcccaggacagagctgggcaggcgtcgggggcgccctaccagagcctcccggaaccctgacggcgccccctc

SEQ ID NO: 250715 - DNA, 201 bp, Homo sapiens
gctacactcgggcagagcccgtcccgactcttagcagagggcgctgcgaaagcgccttctcgctgtcctgaggtgtggagatcctgcagataaagtacaastgcgcgggagggggaggccggagtgggcagtaccctccgcctgcttgcggcttaaagctacatgggttccttttcattcactgaggactcgtcctgagat

SEQ ID NO: 250716 - DNA, 201 bp, Homo sapiens
tggcttagcaccctgtagccccagactcttccataatctgcaccctctgctgggttctcacacccaacacctctcttgctttcacatgtttttcaggtgtmcaacacgctctcttgggctctgtatgagctctcccggcaccccgaagtccagacagcactccactcagagatcacagctgccctgagccctggctccagt

SEQ ID NO: 250717 - DNA, 201 bp, Homo sapiens
gacagcccgagaaggacctggagtctggggcgcacctgacccacttcctgttccgggaagagttgcctgcccagtccatcctgggaaatgtgacagagttrctattggcgggagtggacacggtgaggttctccctccgtgctgtgagccggttccagggcttagcctccgcagactccggctccatttttctgttgcagg

SEQ ID NO: 250718 - DNA, 201 bp, Homo sapiens
acacccaacacctctcttgctttcacatgtttttcaggtgtccaacacgctctcttgggctctgtatgagctctcccggcaccccgaagtccagacagcaytccactcagagatcacagctgccctgagccctggctccagtgcctacccctcagccactgttctgtcccagctgcccctgctgaaggcggtggtcaagga

SEQ ID NO: 250719 - DNA, 201 bp, Homo sapiens; identical to SEQ ID NO: 49291

SEQ ID NO: 250720 - DNA, 201 bp, Homo sapiens
cgaggctacacgagctgcaggtaggaagggacgcctttcccgagacagagtgctggggaaactggttttgacagcgtcagaaaggactgactagtgcagascaaatgtgggacagccagagagaacggatgcccatgaaataaggaaaaggcgagttgaggctgggggcggtgtggctacactcgggcagagcccgtcccg

SEQ ID NO: 250721 - DNA, 201 bp, Homo sapiens
gccctttaccaattggattaccaatgaatccccccattatagatatctttcatagtaatgctcaccttcttccctttccagatcctaacacattttgaggkgcagcctgagccaggtgcggccccagttagacccaagacccggactgtcctggtacctgaaaggagcatcaacctacagtttttggacagatagtcccat

SEQ ID NO: 250722 - DNA, 201 bp, Homo sapiens; identical to SEQ ID NO: 49292

SEQ ID NO: 250723 - DNA, 201 bp, Homo sapiens
ggagctgctgcgacaggagggaccccggcccgagcgctgcagcttctcgccctggacggagcaccgccgctgccgccagcgggcttgcggactgctcactrcgtgagtcttctctgcccccagaagcccagacgccctgcagcggccctctcctgctgcgggtcccgaaactatcaatctgggggcatggtgggaggtcgg

SEQ ID NO: 250724 - DNA, 201 bp, Homo sapiens
tgccctggagagtggagggggctgcctcaaatgcttcttaaaacctgggttgtcctttctggcgtcaatccctacatgagccatttcatctgccaggttcygggtcagtgagctggtcagcacaagcatcagagattagccgttgtggccagtgatcctgaactgtcttttctcagagattctaccatctcccctcccctt

SEQ ID NO: 250725 - DNA, 201 bp, Homo sapiens
gcactcgtcgaggagctgctgcgacaggagggaccccggcccgagcgctgcagcttctcgccctggacggagcaccgccgctgccgccagcgggcttgcgractgctcactgcgtgagtcttctctgcccccagaagcccagacgccctgcagcggccctctcctgctgcgggtcccgaaactatcaatctgggggcatgg

SEQ ID NO: 250726 - DNA, 201 bp, Homo sapiens
gagtctggggcgcacctgacccacttcctgttccgggaagagttgcctgcccagtccatcctgggaaatgtgacagagttgctattggcgggagtggacasggtgaggttctccctccgtgctgtgagccggttccagggcttagcctccgcagactccggctccatttttctgttgcaggggatccattatggccacgta

SEQ ID NO: 250727 - DNA, 201 bp, Homo sapiens
ggccaaaaagggtttggaagttggaaacaatgagaagggggctgcagcccctagcctcatcttgttgtctccattttgtgctttgcaacctagactgtacyctgtggtacctggaaattctcgtgtcccagacaaagacattcatgtgggtgactatattatccccaaaaatgtgagtaaagcctatgcaccctttctact

SEQ ID NO: 250728 - DNA, 201 bp, Homo sapiens
tctgcaccctctgctgggttctcacacccaacacctctcttgctttcacatgtttttcaggtgtccaacacgctctcttgggctctgtatgagctctcccsgcaccccgaagtccagacagcactccactcagagatcacagctgccctgagccctggctccagtgcctacccctcagccactgttctgtcccagctgccc

SEQ ID NO: 250729 - DNA, 201 bp, Homo sapiens
gacctgcctttgtccctgtctgaatatcctcttcttcatgcctgccctattctgagcccaaactgacaagtttgttttcctttgcaccagacgctggtcaytctgtgtcactatgccacttcaagggaccctgcccagttcccagagccaaattcttttcgtccagctcgctggctgggggagggtcccaccccccaccca

SEQ ID NO: 250730 - DNA, 201 bp, Homo sapiens
ccggtgtggctagccagctttgggacagtgcgcaccgtgtacgtggctgcccctgcactcgtcgaggagctgctgcgacaggagggaccccggcccgagcrctgcagcttctcgccctggacggagcaccgccgctgccgccagcgggcttgcggactgctcactgcgtgagtcttctctgcccccagaagcccagacgcc

SEQ ID NO: 250731 - DNA, 201 bp, Homo sapiens
atgctcaccttcttccctttccagatcctaacacattttgaggtgcagcctgagccaggtgcggccccagttagacccaagacccggactgtcctggtacstgaaaggagcatcaacctacagtttttggacagatagtcccatggaaagagactgtcatcatcaccctttcattcatcatagggataagattttttgtag

SEQ ID NO: 250732 - DNA, 201 bp, Homo sapiens; identical to SEQ ID NO: 49266

SEQ ID NO: 250733 - DNA, 201 bp, Homo sapiens
cctcaccgcgtcccacacgcgcgccgccaccccgaggcgggacccaaagttctgcgtgatggtcagcacatgcccacagaaacagaactggctcttctccragtaagagtctgcaaagagcccgacctcccgcgggaacaccgattccgactcagattcgggatctgggccggggtccgccatccggcccgccaagggagt

SEQ ID NO: 250734 - DNA, 201 bp, Homo sapiens
cacttattctgggtctggagatccgggtgaaggtctcagactatgtacaagaccggattcgggccctacgcgcagctcctgcaggtggcttccagaacatygcctgtctccgtagcaatgccatgaagcaccttcctaacttcttctacaagggccaggtggggaggggccctggtgggttaggctggtaggcaggtgggg

SEQ ID NO: 250735 - DNA, 201 bp, Homo sapiens
gccctggagagtggagggggctgcctcaaatgcttcttaaaacctgggttgtcctttctggcgtcaatccctacatgagccatttcatctgccaggttccrggtcagtgagctggtcagcacaagcatcagagattagccgttgtggccagtgatcctgaactgtcttttctcagagattctaccatctcccctccccttt

SEQ ID NO: 250736 - DNA, 201 bp, Homo sapiens
tgacctcccgggctcatgtaatccacctcagcctctcaaggcactacaggcatacgccaccatgcctggctaatttttgtattttttgtagagacagttcsactatgttgcccaggctggtctcagactcctgagctcaagcagtctgcccaccttagcctcccaaagtgttgggattacagtcatgagctgccgtgccca

SEQ ID NO: 250737 - DNA, 201 bp, Homo sapiens
ctatgttgctcaagcttgtctcaacctcctggcctcatgccatcctcctgcctcagcctcccaaagtgctgggattataggcatgagccaccacaggattytgaggctaaaagtagaaaggagctgctaaccagaaagccccccagaggagaccgagtcagctggggaattagaacatccacatccatttagctcctctaa

SEQ ID NO: 250738 - DNA, 201 bp, Homo sapiens
gccagtcccgtcgagccgtccccaccttcccgatgcgcactctctcctcaaccctgcagggaaggcgaagaatggcaaaggctccgcagtctcctggcccygctcctcctccggcctcaagcggccgcccgctacgccggaaccctgaacaacgtagtctgcgaccttgtgcggcgtctgaggcgccagcggggacgtggc

SEQ ID NO: 250739 - DNA, 201 bp, Homo sapiens
ctgaactgtcttttctcagagattctaccatctcccctcccctttgcccctccctcgccagatctcattccttctgccccactctcctgttttttgggttyctcttgtattgtctgtattgtcccacccatgcatgccaagccactccctatttttagatcttcccaaacagataacagcctgatagagaagaagagcatg

SEQ ID NO: 250740 - DNA, 201 bp, Homo sapiens
tagggtacaaggatctggatggaatgaatgtaaggttctgtgactcaagttacccgggaaccccggcccctgagggcaggaaatgagtaaagaggaagggrgctggaagacaggcgcaggccggtgcaggtttccgtaccccaagggggcagacgcaatccctctcctggccaccgcagccgaacgcgctccttcactgca

SEQ ID NO: 250741 - DNA, 201 bp, Homo sapiens
cccgccaagggagtgcctgggcaccgcggccggcgctcagatcccggatccggagcggggtagaggctgggggccgcgagccgtcgtggtgtccctgtggmacgagccccgcctccctgagtttgccctccttcctccagttcgatttcctggaggtggaatgaggagctgcccctcccgccccggccccgagcgcacact

SEQ ID NO: 250742 - DNA, 201 bp, Homo sapiens; identical to SEQ ID NO: 49282

SEQ ID NO: 250743 - DNA, 201 bp, Homo sapiens
cctgggcaccgcggccggcgctcagatcccggatccggagcggggtagaggctgggggccgcgagccgtcgtggtgtccctgtggaacgagccccgcctcsctgagtttgccctccttcctccagttcgatttcctggaggtggaatgaggagctgcccctcccgccccggccccgagcgcacactcgacgaaacccacac

SEQ ID NO: 250744 - DNA, 201 bp, Homo sapiens; identical to SEQ ID NO: 49264

SEQ ID NO: 250745 - DNA, 201 bp, Homo sapiens; identical to SEQ ID NO: 49265

SEQ ID NO: 250746 - DNA, 201 bp, Homo sapiens
acaagttcggactggaaggtgagtcccaggacagagctgggcaggcgtcgggggcgccctaccagagcctcccggaaccctgacggcgccccctcccgacraggcatcgccgcggttctgctcggctcgcgcttgggctgcctggaggctcaagtgccacccgacacggagaccttcatccgcgctgtgggctcggtgttt

SEQ ID NO: 250747 - DNA, 201 bp, Homo sapiens
tgcccagttcccagagccaaattcttttcgtccagctcgctggctgggggagggtcccaccccccacccatttgcatctcttccctttggctttggcaagygcagctgtatggggagacgcctggcagagcttgaattgcaaatggctttggcccaggtgagtgctctagattttataccttccccagactggagagaccc

SEQ ID NO: 250748 - DNA, 201 bp, Homo sapiens
tacgtgctaagagttggggtgagttgggatcggagggatgatggggtgagtggcctactcaggggcccttcactaagaattcagtgggggtgcatttaggractcacaccaccacttccttcatctggctgctgacgttgcatgcagcctcctgtctagggtgattttgcctatgcaggggctggtgtataccataaccga

SEQ ID NO: 250749 - DNA, 201 bp, Homo sapiens
ggggatggagcagggggaactccccgccctcatgcagggaacgggaggtcaatgtatactagtcttattgccagatgccctgtggccatggggtggggaayaggggtctacagcccctttcttctggcattggtcccccttcaccaagtcaccgtggtggagctggggggctggaggccctaggagctgaggtaaagacgg

SEQ ID NO: 250750 - DNA, 201 bp, Homo sapiens
aaacctgggttgtcctttctggcgtcaatccctacatgagccatttcatctgccaggttccgggtcagtgagctggtcagcacaagcatcagagattagcygttgtggccagtgatcctgaactgtcttttctcagagattctaccatctcccctcccctttgcccctccctcgccagatctcattccttctgccccactc

SEQ ID NO: 250751 - DNA, 201 bp, Homo sapiens
gcttctcgccctggacggagcaccgccgctgccgccagcgggcttgcggactgctcactgcgtgagtcttctctgcccccagaagcccagacgccctgcascggccctctcctgctgcgggtcccgaaactatcaatctgggggcatggtgggaggtcggctgtcccactctaccattgggcatcttggggttcccatccc

SEQ ID NO: 250752 - DNA, 201 bp, Homo sapiens
aactgacaagtttgttttcctttgcaccagacgctggtcactctgtgtcactatgccacttcaagggaccctgcccagttcccagagccaaattcttttcstccagctcgctggctgggggagggtcccaccccccacccatttgcatctcttccctttggctttggcaagcgcagctgtatggggagacgcctggcagag

SEQ ID NO: 250753 - DNA, 201 bp, Homo sapiens
caattccagaacttcagagctagctgactggcacagagcctgatagagttgcagtggggaatgagggagtaaggagcagagaggtaaactgtgggagattmttttattttaattttttttagagacaggccctctctctgttgcctaggctggagtgcagtggtacaatcataactcactgcagccttgacctcccgggct

SEQ ID NO: 250754 - DNA, 201 bp, Homo sapiens
atgtgcaatggcatagaccagggaacccacagacctgagcttgctgtttcttggggataagcatctgggaaaacagcaacaaaaagatgaaaagccatccytctagagctcagctcaccagagtgtcagcttcagcctcccagcagaggctgaaccaggaacagccccaagagatgaggggaagagaatgctctgggtgta

SEQ ID NO: 250755 - DNA, 201 bp, Homo sapiens
ctggagagggaattgaaggtcagccaaagagcaagccagtctggaaacctaaaggactctgtccaagtgtacaggaaccaggtggaattgctgagagtcckttttctggggaggcttacaggccactacgtaagacttgttctgtcgcttctctttgtacctgcagttcggatacttccctgaggtgagcttacacatggt

SEQ ID NO: 250756 - DNA, 201 bp, Homo sapiens; identical to SEQ ID NO: 49339

SEQ ID NO: 250757 - DNA, 201 bp, Homo sapiens; identical to SEQ ID NO: 49345

SEQ ID NO: 250758 - DNA, 201 bp, Homo sapiens
ctcttaccgaaaccaaaaccaaaaccaaatgccaacaaaaaactattctagagtttctaaggatcatgtctgcgagccaggattcctgatccagagacaayggccccaatgggatggagcccaaaggtgtcattgagagtaactggaatgagattgttgacagctttgatgacatgaacctctcagagtcccttctccgtg

SEQ ID NO: 250759 - DNA, 201 bp, Homo sapiens
cgaaaccaaaaccaaaaccaaatgccaacaaaaaactattctagagtttctaaggatcatgtctgcgagccaggattcctgatccagagacaacggccccratgggatggagcccaaaggtgtcattgagagtaactggaatgagattgttgacagctttgatgacatgaacctctcagagtcccttctccgtggcatcta

SEQ ID NO: 250760 - DNA, 201 bp, Homo sapiens; identical to SEQ ID NO: 49343

SEQ ID NO: 250761 - DNA, 201 bp, Homo sapiens
caccgcacccggcctatatgtgtaactctttaatggtaattggagaatcatgtttaatgacatttagtacaaaaggcttcagttaaaaaaaaaaaaaaaaagctacctttctcgtcttggttcatgacacatggaggctgcttgtttgtggttgccagtcataatgattgttcttccttttcaaggttggatggcaagcat

SEQ ID NO: 250762 - DNA, 201 bp, Homo sapiens
cggaggcggaggctgcagtgagccgagatcgtgccactgcactccagcctggtgacagcgagactcttgtctcaaaaaaaaaaaagtacattgctataagwgaagtgcacacggatactagtagttaattcagtcacatctgtgaaatagcttataaaatgctacttttaaacaagctgtttttatgaaagggcttgtaaa

SEQ ID NO: 250763 - DNA, 201 bp, Homo sapiens; identical to SEQ ID NO: 49350

SEQ ID NO: 250764 - DNA, 201 bp, Homo sapiens; identical to SEQ ID NO: 49369

SEQ ID NO: 250765 - DNA, 201 bp, Homo sapiens
aaaatgagctgggtgtgggtgcatgcctgtagtcccagctacttgggaggctaaggtgggacgcttgctcgagcacgggaaggggaggttgcagtgagccrataacacaccactgcacttccagcctaggtgagagtgagaccttgtctcaaaaaaacaaaaagaaacattaaataatatccttaatattgcaacttaagt

SEQ ID NO: 250766 - DNA, 201 bp, Homo sapiens
gcgcgagaccgggttgcgggcggggccgaacgtggtataaaaggggcgggaggccaggctcgtgccgttttgcagacgccaccgccgaggaaaaccgtgtrctattagccatggtcaaccccaccgtgttcttcgacattgccgtcgacggcgagcccttgggccgcgtctcctttgaggtcgggcgggcggcggcgtgcg

SEQ ID NO: 250767 - DNA, 201 bp, Homo sapiens
ttagtacaaaaggcttcagttaaaaaaaaaaaaaaaaagctacctttctcgtcttggttcatgacacatggaggctgcttgtttgtggttgccagtcatartgattgttcttccttttcaaggttggatggcaagcatgtggtgtttggcaaagtgaaagaaggcatgaatattgtggaggccatggagcgctttgggtcc

SEQ ID NO: 250768 - DNA, 201 bp, Homo sapiens; identical to SEQ ID NO: 49366

SEQ ID NO: 250769 - DNA, 201 bp, Homo sapiens
tcagtttgaacttgggtttaaagtttgaaccttgcagatttggcacacttcatggttatgttgtcagaagtgacatttttcctatatgttgacagggtggwgacttcacacgccataatggcactggtggcaagtccatctatggggagaaatttgaagatgagaacttcatcctaaagcatacgggtcctggcatcttgt

SEQ ID NO: 250770 - DNA, 201 bp, Homo sapiens
tcagctactctagaggctgaggcaggagaatcgcttgaaccccggaggcggaggctgcagtgagccgagatcgtgccactgcactccagcctggtgacagygagactcttgtctcaaaaaaaaaaaagtacattgctataagagaagtgcacacggatactagtagttaattcagtcacatctgtgaaatagcttataaaa

SEQ ID NO: 250771 - DNA, 201 bp, Homo sapiens
ctagccagaacagggcactgttgagttcagctggatttgcttttggtctgattcatccaaataaggcatggacagctccacattcctgaggttctgtgtcygctgatattttccacagttagacagtcccactcaacagataatgtcagaaaaggaacccccagaatatcagctccccacttaacaaacaaaacatgaaca

SEQ ID NO: 250772 - DNA, 201 bp, Homo sapiens; identical to SEQ ID NO: 49354

SEQ ID NO: 250773 - DNA, 201 bp, Homo sapiens; identical to SEQ ID NO: 49356

SEQ ID NO: 250774 - DNA, 201 bp, Homo sapiens; identical to SEQ ID NO: 49357

SEQ ID NO: 250775 - DNA, 201 bp, Homo sapiens
aagttgccctggggggaacggaacaaacactacttttcttcaacctttgcttccacagactttttcatccctaagatactagaagaagagcatacataaaygacaaatatagccaatgtgatacagaatgtcagatactatgatagaaacttggcccttagctgggtggttgaattaggtgctacttttttgagatggagt

SEQ ID NO: 250776 - DNA, 201 bp, Homo sapiens
tggattaccagtgattacctaattagttttgagagcgttaaatgagttcttaaagatcagttgtaattatagcatagtatctaaacttggcgcgtgtcttmaaagttaaatattgagtacgattccgttccagttaacatggatagaccttagggagtagcgaaataggatgttagtggttttattcctttaaatcacatc

SEQ ID NO: 250777 - DNA, 201 bp, Homo sapiens
tggcctgtagtctgggtggcaggagatggctgttctgatgcccaagctcaggctgttccctggaagggcctggctgatggccttggcaaggcctggagccrcccctgatgtgagtggtgctctctctgcagtgtgaagctgaacgagcacttcctgaacaccacggacttcctcgacaccatcaagagcaacctggacaga

SEQ ID NO: 250778 - DNA, 201 bp, Homo sapiens; identical to SEQ ID NO: 49378

SEQ ID NO: 250779 - DNA, 201 bp, Homo sapiens
aaaggggtcccagagtggccgcttggcttctccaaagttgccgtggtctatgtatgtccaggagagcatgtagtccttgtgaaggccccacactgtgtgtgcgttcatgggacaaaggttgagaactgtcacttccaactgtaagatctcaaagcacttgagaagaggaaaccagttgtatagagaaatctagatgtactt

SEQ ID NO: 250780 - DNA, 201 bp, Homo sapiens
caaaggggtcccagagtggccgcttggcttctccaaagttgccgtggtctatgtatgtccaggagagcatgtagtccttgtgaaggccccacactgtgtgtgcgttcatgggacaaaggttgagaactgtcacttccaactgtaagatctcaaagcacttgagaagaggaaaccagttgtatagagaaatctagatgtact

SEQ ID NO: 250781 - DNA, 201 bp, Homo sapiens
gtggagcttgcagtgagccgagatcacgccactgccctccagtgtaggcgacagagtgagactctgtctcaatacatacatacatacatacatacatacahgcatgcatacatacatacatgcatgcatacatacatacatacatacataaaatatacaaagttgctgtcctgccttcttgagcccccaggaattggaacc

SEQ ID NO: 250782 - DNA, 201 bp, Homo sapiens
ggtagtgccccctcctgaagtgggtggctctccaggtgggctggccagggattgttctgtcccacagggtcttctggactgcaggtccctaggacccccccgttgtcctggtaggcagcagcagctctgtttctctccctctgtctacccttctttcacatctggtccactaattgttcagaagtcgtcaggcgggggcct

SEQ ID NO: 250783 - DNA, 201 bp, Homo sapiens
gaggcaggagaattgcctgaacccaggaggtggagcttgcagtgagccgagatcacgccactgccctccagtgtaggcgacagagtgagactctgtctcamtacatacatacatacatacatacatacatgcatgcatacatacatacatgcatgcatacatacatacatacatacataaaatatacaaagttgctgtcct

SEQ ID NO: 250784 - DNA, 201 bp, Homo sapiens
aagtcaatgctgcagtaagctatgatggcatcagtgcattccagcctgaccaatggaacaggaccctgccaagaaagagagagagaaagggaggaaggaasgaaaggaaggaaggaaggaaagaaaggaaaggaaggaaagaaaggaaaggaagtaagtaaggatggatggatccaggtgctctaaaccagcagttcccaa

SEQ ID NO: 250785 - DNA, 201 bp, Homo sapiens
aataaataaataaataaattaatattaattaaataaaatggaggtaatgatacctccttggggttgtttttgggattaaatggaatcacattgtacagcaytggtacactgtaaggcacatagtaggcactcaatacctatctatactatttcctttatcaccacaagttagttgagggctcttgggtcgcacgcaacaga

SEQ ID NO: 250786 - DNA, 201 bp, Homo sapiens
gaggttgcagtgagccgagatcacgccattgcattccagcctgggtgacagaccaaagactctgtctcaaaaaataaataaataaataaataaattaatattaattaaataaaatggaggtaatgatacctccttggggttgtttttgggattaaatggaatcacattgtacagcattggtacactgtaaggcacatagta

SEQ ID NO: 250787 - DNA, 201 bp, Homo sapiens
cagaggttgcagtgagccgagatcacgccattgcattccagcctgggtgacagaccaaagactctgtctcaaaaaataaataaataaataaataaattaatattaattaaataaaatggaggtaatgatacctccttggggttgtttttgggattaaatggaatcacattgtacagcattggtacactgtaaggcacatag

SEQ ID NO: 250788 - DNA, 201 bp, Homo sapiens
tccccagtagctgggactacaggcgcctgccaccacgcctggctaattttttgtatttttagtagagtcagggtttcactgtgttagccaggatggtctcsatcttctgacctcgtgatccacccgcctcagccttccacagtgctgggattacaggtgcgagccactgtgcccggcagtaattcttttccttttagctaa

SEQ ID NO: 250789 - DNA, 201 bp, Homo sapiens
tttctcggctgcaggaggtgcagcctgcagcccatgggtctcacccccatgccctcgcccccggcccccgttaggggtggcccagcttgcgctatagcacrttgtagtaggccatctctttcatggcctgttcagtgaggacactggcctcggcgctgctgtccacgctcgcatagctgtaggcgttctcctcgaagtcct

SEQ ID NO: 250790 - DNA, 201 bp, Homo sapiens
agggcagcagggctcagctgggtggccccaggagaggcgaggccctgagagaaaggctttctaccctccaggctttggctcccttggcctgatgacgtccrtcctggtctgccctgatgggaagacgattgaggctgaggccgctcatgggaccgtcacccgccactatcgggagcaccagaaggtgagtgcagggcatgg

SEQ ID NO: 250791 - DNA, 201 bp, Homo sapiens; identical to SEQ ID NO: 49379

SEQ ID NO: 250792 - DNA, 201 bp, Homo sapiens
tatgagctacacagcgtagctcatagaattgcagggaaaactataaagaactaagtcttggacaaaagtaatatcttggcatgggcctgtagccccagctrctaaggaggctgaggtgcaaggattgcttgagccccggagtctgagcctggcttgggcaacagagagagataaagagaccctgactctaaacaataagta

SEQ ID NO: 250793 - DNA, 201 bp, Homo sapiens
atcgtgtgcactgcacggaggctggtgttaaacagtcgcgtgggcggcggggtaccgttcctggagagctgggccttgccctgggaggtgggaggttgccrgcaatcgccaggctagggcaccacgccagggccctgtctctccccctgcagtccatctcaggttttgcgcacagctgcttccagtatgccatccagaaga

SEQ ID NO: 250794 - DNA, 201 bp, Homo sapiens
agctggtgacacagatggatgttaatgtgctggtgatagccaccctccagtgccctccagccctgtgctgggccctggagacccacaggagggtgaagagrcctggaacagtccctgtcctcccagttgcagctgggggaggctgagtagagccacgaactatggcagctacaatattgggttgtagagggcagcagggct

SEQ ID NO: 250795 - DNA, 201 bp, Homo sapiens
aggctaattttttttctatttttagtagacacagagtttcaccattgtggccaggctggtctcgaactcctgacctcaagtgatctgccctcttcagcctyccaaagtgctgggattacaggcatgagccacggtgcccagccagtcttctgtccattttaacgttgagttatttgttttattgttgagatttactgattt

SEQ ID NO: 250796 - DNA, 201 bp, Homo sapiens; identical to SEQ ID NO: 49380

SEQ ID NO: 250797 - DNA, 201 bp, Homo sapiens
tttgaactggagttttactgcttcccagcagtgtgacattgagcaagtgtggtaacctctacgagccaaatggagctggcatcagctgcctcaccaaacakgatttacgggaaaggctggcgtggagctggggccctgggaggcaggtagttagaatccgtttaaagattttgcctcaattgcctccagctgctgctgtgc

SEQ ID NO: 250798 - DNA, 201 bp, Homo sapiens
aggctttctaccctccaggctttggctcccttggcctgatgacgtccgtcctggtctgccctgatgggaagacgattgaggctgaggccgctcatgggacygtcacccgccactatcgggagcaccagaaggtgagtgcagggcatggggcctcacaatgcccctctaccccaggggcctaaagcccactgggctgagggc

SEQ ID NO: 250799 - DNA, 201 bp, Homo sapiens
gaggctgggccagcagaaacatcgtgtgcactgcacggaggctggtgttaaacagtcgcgtgggcggcggggtaccgttcctggagagctgggccttgccstgggaggtgggaggttgccggcaatcgccaggctagggcaccacgccagggccctgtctctccccctgcagtccatctcaggttttgcgcacagctgctt

SEQ ID NO: 250800 - DNA, 201 bp, Homo sapiens
actttgtggcagaccgggccggcactttcaaaatggtcttcaccccaaaagatggcagtggtgtcaaggagtgggaagtgtacaacttccccgcaggcggygtgggcatgggcatgtacaacaccgacgaggtgaggctggcttgggcatcctgggcccctcctctcccagcttgtctcttcatctctgtctcgtggcttt

SEQ ID NO: 250801 - DNA, 201 bp, Homo sapiens; identical to SEQ ID NO: 49384

SEQ ID NO: 250802 - DNA, 201 bp, Homo sapiens
ggggctgaggtgggaggattgcttgaggctgggagctccagaccagcctgggcaatatagtgagaccccatctctacaaaaataaaaaataaaattagccmggcacgatggtgcatgtctgtggtcttagctactcaggaggatcatttgagcccaggaggtcaaggctgcagtgaggtacaattgtgccactgcactcta

SEQ ID NO: 250803 - DNA, 201 bp, Homo sapiens
aggcagaggttgcagtgagccgagatcacgccattgcattccagcctgggtgacagaccaaagactctgtctcaaaaaataaataaataaataaataaattaatattaattaaataaaatggaggtaatgatacctccttggggttgtttttgggattaaatggaatcacattgtacagcattggtacactgtaaggcaca

SEQ ID NO: 250804 - DNA, 201 bp, Homo sapiens
attttttttgactggtttaaatttttattattttggtaaaaaacgtataaaacttaccatcttagtcattgttcagtgtacagtattgttaagtacattcrcactgttgtgcagacattaccaccatccatcaccagaactttgtcaccttgcaaaaccgaaactctctacccatgaaacaatacctccccacttcccgtc

SEQ ID NO: 250805 - DNA, 201 bp, Homo sapiens
cgggaggcagaggttgcagtgagccgagatcacgccattgcattccagcctgggtgacagaccaaagactctgtctcaaaaaataaataaataaataaatwaattaatattaattaaataaaatggaggtaatgatacctccttggggttgtttttgggattaaatggaatcacattgtacagcattggtacactgtaagg

SEQ ID NO: 250806 - DNA, 201 bp, Homo sapiens
gttttaaatgtgccgaggtggtttctaggcctgcttttcacaggtattctgtcccttgtcagttcttcccacccagttttttttgtttgtttgtttgtttkttttgagatggagtctcgttctgttgcccaggctggagtgcagtgccgtgatcttggcttactgcaacctccacctcccgggttcaagcgattctcctgc

SEQ ID NO: 250807 - DNA, 201 bp, Homo sapiens
ctgttaggctttaatcacttttgttttaaatgtgccgaggtggtttctaggcctgcttttcacaggtattctgtcccttgtcagttcttcccacccagttytttttgtttgtttgtttgttttttttgagatggagtctcgttctgttgcccaggctggagtgcagtgccgtgatcttggcttactgcaacctccacctcc

SEQ ID NO: 250808 - DNA, 201 bp, Homo sapiens
ccgtggagcccaggctgaggctgaaacctgcagaactggccccaagtgagtctctccttagggctcctgattatgatagttcattttttttttttttttttaacaaatttgattagctgtcctcaaattaactcataggagatgctccccagaactaaactagctctgcaacagctcaacagactttccgcaggttctgca

SEQ ID NO: 250809 - DNA, 201 bp, Homo sapiens
accgtggagcccaggctgaggctgaaacctgcagaactggccccaagtgagtctctccttagggctcctgattatgatagttcattttttttttttttttttaacaaatttgattagctgtcctcaaattaactcataggagatgctccccagaactaaactagctctgcaacagctcaacagactttccgcaggttctgc

SEQ ID NO: 250810 - DNA, 201 bp, Homo sapiens
aaccgtggagcccaggctgaggctgaaacctgcagaactggccccaagtgagtctctccttagggctcctgattatgatagttcattttttttttttttttttaacaaatttgattagctgtcctcaaattaactcataggagatgctccccagaactaaactagctctgcaacagctcaacagactttccgcaggttctg

SEQ ID NO: 250811 - DNA, 201 bp, Homo sapiens
ctaagcagtgagggagctgatttgcagacgggggagtggacaccgggcagctggagccctggctttctgccactgtctcctggtgaagggcgggcctggcygggaggagagggcccccctccagcctccccaggggcatgatgcgctgtgtgtccctgcttctagatgccgacaaaaggatcaaggtggcgaagcccgtgg

SEQ ID NO: 250812 - DNA, 201 bp, Homo sapiens
tgatgttgagcatcttttcatgtgcttgttggccatttgtatatcatctttggacttgaaatgtctatttaagtcttttgtccattatatttatttatttwttttgagatggagtcttcctgttacccaggctggagtgcagtggcatgatctctgctcactgcaacctccacctcctgggttcaagcaattctcctgcct

SEQ ID NO: 250813 - DNA, 201 bp, Homo sapiens
ttttccacagcagctgcaccatttcacattcccaccaacagggcacaagagttccaatttctccacatccttgctagcactttattttctgttttgttttktttttcctgatagtagctctcttagtggttgtgaggggatagtggggtgatatctcattatggttttgatttgcatttccctgatgattagtgatgttga

SEQ ID NO: 250814 - DNA, 201 bp, Homo sapiens
tcagggtttcactgtgttagccaggatggtctcgatcttctgacctcgtgatccacccgcctcagccttccacagtgctgggattacaggtgcgagccacygtgcccggcagtaattcttttccttttagctaaggaacacccatactgttttccacagcagctgcaccatttcacattcccaccaacagggcacaagagt

SEQ ID NO: 250815 - DNA, 201 bp, Homo sapiens
gaacagggctggtgtgtagggcagtgacccagcctgcagttgtgacgagccaccatggcaaaggggtcccagagtggccgcttggcttctccaaagttgcygtggtctatgtatgtccaggagagcatgtagtccttgtgaaggccccacactgtgtgtgcgttcatgggacaaaggttgagaactgtcacttccaactgt

SEQ ID NO: 250816 - DNA, 201 bp, Homo sapiens
aaattaactcataggagatgctccccagaactaaactagctctgcaacagctcaacagactttccgcaggttctgcagctctttccactcaagcttcagaraaaagtgaaggaatattgtagattgggttcaaaatccccatcgcgtcttgggaaaggcagtagagccagcagccagccaccttttgttctctagggaatg

SEQ ID NO: 250817 - DNA, 201 bp, Homo sapiens
ctttattgttttccttgaatgtgcctccgggtcacgagccaggctgggtggcaggctgtgggggaccacaggactctgtggcctcttgggccctgtgggcsacaggctgtggggcgcctggagctggtgacacagatggatgttaatgtgctggtgatagccaccctccagtgccctccagccctgtgctgggccctggag

SEQ ID NO: 250818 - DNA, 201 bp, Homo sapiens
tctctagggaatggaatagtccaaggctgtgtttgtgttctgcttctctacatctgacccacgggtcttccagaggctgcatttgggtcagggacctgggytctatcttgcctctgatgcagaccacactctctgagtctcattattccccctaaatgatctctaagattatttttagatttaaaaaaaaaaacaaactct

SEQ ID NO: 250819 - DNA, 201 bp, Homo sapiens; identical to SEQ ID NO: 49386

SEQ ID NO: 250820 - DNA, 201 bp, Homo sapiens
gtgttctgcttctctacatctgacccacgggtcttccagaggctgcatttgggtcagggacctgggctctatcttgcctctgatgcagaccacactctctkagtctcattattccccctaaatgatctctaagattatttttagatttaaaaaaaaaaacaaactctttgcatatctttggaaagtcagttgtttgaggtc

SEQ ID NO: 250821 - DNA, 201 bp, Homo sapiens
ttgcatatctttggaaagtcagttgtttgaggtctgttaggctttaatcacttttgttttaaatgtgccgaggtggtttctaggcctgcttttcacaggtrttctgtcccttgtcagttcttcccacccagttttttttgtttgtttgtttgttttttttgagatggagtctcgttctgttgcccaggctggagtgcagtg

SEQ ID NO: 250822 - DNA, 201 bp, Homo sapiens
aagttgagagggagaggctgggccagcagaaacatcgtgtgcactgcacggaggctggtgttaaacagtcgcgtgggcggcggggtaccgttcctggagakctgggccttgccctgggaggtgggaggttgccggcaatcgccaggctagggcaccacgccagggccctgtctctccccctgcagtccatctcaggttttg

SEQ ID NO: 250823 - DNA, 201 bp, Homo sapiens
ctgaggttcaacaagccttgtccaaggcagctgtactgattcattgttaggtggccagttcctgagttttctttgaaattcacttcccagactgttgggtwttcctgcgagtcagactctccttcagtagcgtcccctgccccctaccctccactggtctccctggacctctgatcagcccctcattgagtcctttgatgc

SEQ ID NO: 250824 - DNA, 201 bp, Homo sapiens
tagcgtcccctgccccctaccctccactggtctccctggacctctgatcagcccctcattgagtcctttgatgcttctctggtaggactgacccacctgcrtcggctgggatcaagggttctgagttccattcgcaggtgctgtaagcctgtccttcctgttgaatagggtcagagtcctcgtgactctgctgttttcaag

SEQ ID NO: 250825 - DNA, 201 bp, Homo sapiens
gtagagggcagcagggctcagctgggtggccccaggagaggcgaggccctgagagaaaggctttctaccctccaggctttggctcccttggcctgatgacrtccgtcctggtctgccctgatgggaagacgattgaggctgaggccgctcatgggaccgtcacccgccactatcgggagcaccagaaggtgagtgcagggc

SEQ ID NO: 250826 - DNA, 201 bp, Homo sapiens
gagggcagcagggctcagctgggtggccccaggagaggcgaggccctgagagaaaggctttctaccctccaggctttggctcccttggcctgatgacgtcygtcctggtctgccctgatgggaagacgattgaggctgaggccgctcatgggaccgtcacccgccactatcgggagcaccagaaggtgagtgcagggcatg

SEQ ID NO: 250827 - DNA, 201 bp, Homo sapiens
ccctaggacccccccgttgtcctggtaggcagcagcagctctgtttctctccctctgtctacccttctttcacatctggtccactaattgttcagaagtcrtcaggcgggggcctgtccccagcagtccgtgttgtgatggtgccagatcccacacgttctgtcaactttgagaagcttcaaggttaatcctgtatcattt

SEQ ID NO: 250828 - DNA, 201 bp, Homo sapiens
agggtggggacggagtgatacaaatttttgtgcctccacagggaacttgcacgtgacctaaattcaatgacaaattggggtttgattgaaaatgtggaggrgtggaaattttcaattccactgaccccagatgggaggatctgagcccctttcctttaaacaccatctttctctgcagcagctttcagggccaatagttac

SEQ ID NO: 250829 - DNA, 201 bp, Homo sapiens; identical to SEQ ID NO: 49397

SEQ ID NO: 250830 - DNA, 201 bp, Homo sapiens; identical to SEQ ID NO: 49398

SEQ ID NO: 250831 - DNA, 201 bp, Homo sapiens
atccgctgcttggcagttctgaagtctggaggatgggaatgacttcacgctgttggaattcctagattgtctgctccagaagactgactctgctgggggtmtgccaatgagagctgaggccactgctagctataacaggcacaggttatgtcttaataaatgttcatttaacaaaatgtggttttggagcaaagggctggg

SEQ ID NO: 250832 - DNA, 201 bp, Homo sapiens
aacaagactcccccatgatgacctattcatccacctacctcctcactctgttccactgtctcccttaagagagatggcaccggccagagcaggatgctgcyccctgctgctgctgcttctggggctgtgggtggcagaggtcctagtcagagccaagcccaaggacatgacatcatctcagtggtttaaaactcagcatgt

SEQ ID NO: 250833 - DNA, 201 bp, Homo sapiens
atggcgtgtaactggaatctaggggtcatgggctgtaaaactggcccactctgagggtaatgacacagcacccataaaacagggctcagtggtgaagctgrgaccacagaagagctgcccaatagccttgggaccgaatctctactgggtgtgttctctgggcccctgagaacgtgtttccaaaaaatcacttgagaaggg

SEQ ID NO: 250834 - DNA, 201 bp, Homo sapiens
tcgtgacattcaggaaatatgttttgagcacatactgtattgccactaggtggggagacagacatgaaacaatcgcccaattacaattggctgactacaatttttttttttttttttgaggcaaaatcttgctttgttgcccaagctggagtgcagtggcatgatctcggcttactacaacctccatctcctaggttcaag

SEQ ID NO: 250835 - DNA, 201 bp, Homo sapiens
tagtaaataaaatgtgcagaaactgcgtccgttttcctagcagcaatttggctattcctaatcacgtaagtgaaacaacttttttattaaactgccttacwtgttgcattatataaaattttattaagccacttaataatttgtccttgggttaggacatttatttatggttcaaaatagtttgaacgtacttttgtcagt

SEQ ID NO: 250836 - DNA, 201 bp, Homo sapiens
ttctgtgatgctctgatttatgtttgggtatatgcttaactgaaatcatcatacaattatgtctacttactgcattcctctagcaactataaaattattaytgtacctttgaaaatgccagttggtccacttggtgggaacaataacaatatcagttaccatatctaagggctcacaccgtactaagcactgtgccctgtg

SEQ ID NO: 250837 - DNA, 201 bp, Homo sapiens
taatttttttgtcaacggttttcattgttacataaatgtggatttatttattttcatttttttagggaaaattttttctggaagatcctactggaacagtmcaactagaccttagtaaagctatatccttcacttgtctgtattttttaaaatctgcattacgtgaattggggaaattgattatatatccttctaaaattt

SEQ ID NO: 250838 - DNA, 201 bp, Homo sapiens
tgttattacaaatacttataatgcaagttatcatgttcacctagagtacttatgttttagtaaatcaggtctgtattttgtgggatgtttttcagagagcmcgttttcaatatcataggagcatttgatattccacgctttgtgtacaattcagaaagaaaaaaatttcttccgtaagtatgtcatccactgattttaaat

SEQ ID NO: 250839 - DNA, 201 bp, Homo sapiens
tttttgagtattctatttaaaaaaaaacagagttagcaatgagataatttaaattagatttcattttaaagacttaaatttttacattaagaaaaaaacctgtgtgtgtgtgtgtgtgtgtgtgtgtgtgtgtttatagtcatgataagtaagaattagtcctgaagttcaagaccagctggacaacatagtgagacccca

SEQ ID NO: 250840 - DNA, 201 bp, Homo sapiens
agctatatccttcacttgtctgtattttttaaaatctgcattacgtgaattggggaaattgattatatatccttctaaaatttacctatttgggttctcartgtaacttctctatgttgctggtgtaggaatgtagagatataatcctaaacagggacagaacaactttaattttctcttatttggagaatctagatgaat

SEQ ID NO: 250841 - DNA, 201 bp, Homo sapiens
cttacattactagatatttgtatgttaaattatgtgggttttcaaatttgtggagaataagtaatagtgacattagtttaaggacagtgtttcatcagggyactattttaatgaatcttatatttaaatgtctgtttcaggaattcatgtgaatctttcttttttatagaggacccacaggcatgaattatttactcctcc

SEQ ID NO: 250842 - DNA, 201 bp, Homo sapiens
gtcaccaagtgtctttttcatctgtgtttggtttcctgagaagacatcaggacagagtgtcttgtgcaggagcccagtttgcatagcctgaaattaggccygtagtgacctctggataaacggagagtactgggtttctgaacaagcaagctgcagagtatgtcctggtcccttggacatgctgttggctgtcttagaagg

SEQ ID NO: 250843 - DNA, 201 bp, Homo sapiens
tggggagactgaggtgggaagatcacttgagctcacttgagctcgggagtcagaggttgcagtgaactgtgattggtccacactgcactccagcctgggtracagctgtcaagtaccctgtctcatggtacttgcagttgatgctcactctttgtccactgaaatagttgcttcctttatctgctgtggcctcagatgctg

SEQ ID NO: 250844 - DNA, 201 bp, Homo sapiens
cggtcttggcctcccaaagtggctgggattacaggcatgagccactgcgcccagcctttttactgcagtttttataccaagaaattttaaaaatgtatatrtatctaaatatttgtacttattcagaactttctgatttacttaaatttctaagcctcaaagaagtaaatataatgtatttactactaatggaaaaaaggt

SEQ ID NO: 250845 - DNA, 201 bp, Homo sapiens
gcttgaacccgggaggcggaggttgcagtgagccaagatcgtgccactctgctccagcctggacaacagaatgagacttgtctctcaaaaaaaaaaaaataaaataaataaaataaaataaagaaagaatgggtagagattccagtgagtgatgggagcctctttccaaggcacaaggcgccaccttctcaatatggccac

SEQ ID NO: 250846 - DNA, 201 bp, Homo sapiens
agacatacatttgctttttgggagcagaaaagggggcatgagaatgacttattttttagagtctccttttgaatttgaaacagtatgtatgtattgacctrtttttaaaaatcaattaactatacctatttaaaaaaattaactacaactattagtaagtatacaacttaggtttccaaatatttaatttttttttctatt

SEQ ID NO: 250847 - DNA, 201 bp, Homo sapiens
attttacggatcaggaaactgaggcttaaagaagtttagtaatttgcccatagatcgtatatagtaagacaggattttaatccagcctgactctaaagccyaaccattgcctactatactttaccactttcaagtagcttacagtctatgaagttatagacatttgtgcaatacataaagtagaattttatatgtgctata

SEQ ID NO: 250848 - DNA, 201 bp, Homo sapiens
ccaaatatttaatttttttttctattttcagcaaacttcaaggcttttgagattcttaaagatcatctgaagaaaattcatcagttttctgcttaactctrtatcttatgtgattctgatattacaataaaattatggtaaactttaggatgttctgcttaaatttgtattttgtgaaattttgatactaagtgataaata

SEQ ID NO: 250849 - DNA, 201 bp, Homo sapiens
cttaaagaagtttagtaatttgcccatagatcgtatatagtaagacaggattttaatccagcctgactctaaagcccaaccattgcctactatactttacyactttcaagtagcttacagtctatgaagttatagacatttgtgcaatacataaagtagaattttatatgtgctataaaagagatacaaacaatgtattca

SEQ ID NO: 250850 - DNA, 201 bp, Homo sapiens
agcttaaaacaatagaaaccttattgggtagtacaaccaaaatcggagatgcgattgttcttggaatgataacgcagttaaaagaggtaacttaataagcrtcaaacttttatttttggccttggattgatgaaatgtcggttacatagaacatttttgtagtgggcacaggaatgtattctttattgaaaactcgcctca

SEQ ID NO: 250851 - DNA, 201 bp, Homo sapiens
tggtgggcttcaggtccctgtgggcctaacccttggcatgaatggcctcaagccgctgtagatacccagcaggagctgaaggatttgatcctaagtcaggragttgccatcgtccttcggcctttctctccattccacagtatatctctcttaaagaacggaagcagcagctgggcctcatgcttagcaccctactccctc

SEQ ID NO: 250852 - DNA, 201 bp, Homo sapiens
ttttgagtattctatttaaaaaaaaacagagttagcaatgagataatttaaattagatttcattttaaagacttaaatttttacattaagaaaaaaacctgtgtgtgtgtgtgtgtgtgtgtgtgtgtgtgtttatagtcatgataagtaagaattagtcctgaagttcaagaccagctggacaacatagtgagaccccat

SEQ ID NO: 250853 - DNA, 201 bp, Homo sapiens
gagctattccaaaatggccttctcttagaggagctgagctccctgtcacttgaattatttgggcagaacctgaatgatagtataaaaattgtacttggtgkcccatgggttgaaagtagtttatagacctttcttttcttctccccactttgaggtgtttaaaaacatttcgagttagtttccagtgtataaaaactagaa

SEQ ID NO: 250854 - DNA, 201 bp, Homo sapiens
tgggtgacacactgagactttgtccccctaccccccaaaaaagaagggttgggtaatttgtccatggtcacaaactttttttaagacggagttttgctctygttgcccaggctggagtgcaatggcaccatcttggctcaccacaacctctacttcccggtttcaagtgattctcctgccttagcctcccaagtagctggg

SEQ ID NO: 250855 - DNA, 201 bp, Homo sapiens
caccacactcagctaattttgtatttttagtagagacagggtttcgctatgttggtcaggctggtcttgaactcccgacctcaggtgatccactggcctcrgcctcccagagggaggctgggattataggtgtgagccactgtgcctggcccaaactttttattgttagagatgtgctttgatcccaaggtttccgactca

SEQ ID NO: 250856 - DNA, 201 bp, Homo sapiens
tgcaaataggtctacagcatggtcctatcctaaagagatttacactgactcaataccctccctaccattgtgtagttaatgcaaataatttttttttaaayggaagatgtgagtaaggcttttctgaagtttaatttctcaatatttagcttaataggtgtttctgtgatgctctgatttatgtttgggtatatgcttaac

SEQ ID NO: 250857 - DNA, 201 bp, Homo sapiens
ttaaaatttattttgttttattttagcttaaaacaatagaaaccttattgggtagtacaaccaaaatcggagatgcgattgttcttggaatgataacgcarttaaaagaggtaacttaataagcgtcaaacttttatttttggccttggattgatgaaatgtcggttacatagaacatttttgtagtgggcacaggaatgt

SEQ ID NO: 250858 - DNA, 201 bp, Homo sapiens
tgacaaagtaattttaaggcttaactaaataattattcttttcaaactgtcttaattctgtatctgtgatggcacattccctacttaaattacatttatcwacctgtataatatccttttaccaattgcaaaaatgatgtgctaaaaaatactgttatttttacttctcttgtgttgttttaggttctttttttttttttt

SEQ ID NO: 250859 - DNA, 201 bp, Homo sapiens
taacatttggcataaaacttgtagacataaaacagtctgcagccattcgtggtggctcacacctgtaatccagcactttgggaggccaaggcaggcagatracttaagtcaggagtttaagaccagcctgggcaacatggcaaggcctgttctctacaaaaaaatacaaaaaattagctgggtgtggtggcccacacctgt

SEQ ID NO: 250860 - DNA, 201 bp, Homo sapiens
gacttttttttttttttttttttttttttccctgagaaggagtcttgcactgtcgcccaggctggaatgcagtggtgctatttcggctcactgcatcctcygcctcctgggttcaaatgattctcctgcctcagcctcccgagtagctgggattacaggtgtgcgccaccatgcctggctaatttttgtatttttagtgga

SEQ ID NO: 250861 - DNA, 201 bp, Homo sapiens
tattttcacttttgcaaatgaactgaagtttgctttgttttgtgctcttttgtagtttgtaaagactatcttatcccaaggacatctgactcccctacctstttatgtctgcccagtgtattgggcatatgactatgctttgagagtgtatcctgtgcccgatctacttgtcattgcagacaaatatgatcctttcactac

SEQ ID NO: 250862 - DNA, 201 bp, Homo sapiens
gtgttatattggttgaagtgaaaacttaaggtactaaggaaacaacatttatagaatgaataagagaacacaaatgggtcccacaacctggccaacatagyaagacctcatctttataaacaataaaaaacattagccaggcgtgatgttgtgcacctgtggtcccagctactggagaggctgaggtgggaggattacttg

SEQ ID NO: 250863 - DNA, 201 bp, Homo sapiens
tgatgttgtgcacctgtggtcccagctactggagaggctgaggtgggaggattacttgagcttgggaggttgaggctgcagtgagctgagatcatgccacygtactccagcctgggtgacagtgtaaggacccctctcaaacaaacaaacaaaacttttattagagtataaattagattttagaaattgacattacttata

SEQ ID NO: 250864 - DNA, 201 bp, Homo sapiens
aggattcagtcattggtaagagcctgagtcgatgtggtgtttctttaggcatcatacacttgatcttacagcttttttgtaggacaaaattaaacatcctragtttaattttacaactttatttccattttatttgattttctactgtaaagtagctataaatgctgaaatgtgtaccccaaatatagttatttataaaaa

SEQ ID NO: 250865 - DNA, 201 bp, Homo sapiens
agacctttaaaatttttacattttttttgtcttaaattttaaaacttacattactagatatttgtatgttaaattatgtgggttttcaaatttgtggagartaagtaatagtgacattagtttaaggacagtgtttcatcagggcactattttaatgaatcttatatttaaatgtctgtttcaggaattcatgtgaatctt

SEQ ID NO: 250866 - DNA, 201 bp, Homo sapiens
tctcatttgtaaaaatagaatctaccaggataaattggttttaggacttaagactataatcaatccatgtatatataagtacaaattttcccaaggagcartggttcagtgtttgccaattcattgtttgtggagattttatagaacataatatcactaataacaagaatcaactggctgggcgtggtggctcatgcctgt

SEQ ID NO: 250867 - DNA, 201 bp, Homo sapiens
cagcctgggtgatgagagtgagaccatgtctcaaaaaaaaaataaataaataaaataaaaaataaaaaatatacatattgtgtttaaaaaaatttattttaaaaaaagtctgagcattcacttacaggcatttttctcccccaaagggctcttttccaagaagtggattttcattcaaagttttttatccttctaataaga

SEQ ID NO: 250868 - DNA, 201 bp, Homo sapiens
cccagactcatcaaatgactttctaattgtaaagaataggcattttaaatattatttcctgtaatttcaggcatcctaacatgtgatttctcagataactrtattttgaaaaagttcccaccactggttaagaacaagtgcccaggcagggcacggtggctcatgcctgtaatcccaggactttgggaggccgaggtgtgt

SEQ ID NO: 250869 - DNA, 201 bp, Homo sapiens
tactactaggtattaaaatgtttggtttatactctatgggaatttggtaatactggcaggagtgaatgtaagatagtacgtcatatctcagttactaaaargtgtcaggctttgtgtcaaaatggaaaaagcaatggaaaatgagaattagaagactgggttttgtatgtaatgtgaaaactagcagattggccaacaatt

SEQ ID NO: 250870 - DNA, 201 bp, Homo sapiens
caggagaatggcatgaacccgggaggcagagcttgcagtgagccgagatcatgccattgcactccagcctgggggacagagcgagactctgtctcaaaagaaaaaaaaaaaaagatgaccagaggacagagactgcagggagcagtacagggtagtgcaagaagctctggccctggggccagttttgtgtggggagggggc

SEQ ID NO: 250871 - DNA, 201 bp, Homo sapiens
tttgagcacatactgtattgccactaggtggggagacagacatgaaacaatcgcccaattacaattggctgactacaatttttttttttttttttgaggcraaatcttgctttgttgcccaagctggagtgcagtggcatgatctcggcttactacaacctccatctcctaggttcaagcgattctcctgcctcagcctcc

SEQ ID NO: 250872 - DNA, 201 bp, Homo sapiens
aatatgagctcaacagtcctgcacagagccatgtaccatatcgcatcagttttccttttcccaacccctattccacccccactcagtaaagccccttgtcyaggtgttgctcttgggggtaagaaagcagaaaagcaggctgggcgcagtggctcatgcccgtaatcccagcactttgggaggccgaggtgggcagatcac

SEQ ID NO: 250873 - DNA, 201 bp, Homo sapiens
acaaaattggctggatgcggtggcatgtgcctgtaatcccagctactcaggaggctgaggcaggagaattgcttgaacccgggagatgaaggttgcagtgwgctgagatcgcaccgctgcagcactgcactccagcctgggagacagcatgagactccgtcaaaaaaaagaaaaaaaaaaaaaaggaatcaactataacaa

SEQ ID NO: 250874 - DNA, 201 bp, Homo sapiens
actcttttaagggttcatgttttaaaactttttgagtattctatttatctttttgagtattctatttaaaaaaaaacagagttagcaatgagataatttarattagatttcattttaaagacttaaatttttacattaagaaaaaaacctgtgtgtgtgtgtgtgtgtgtgtgtgtgtgtgtttatagtcatgataagtaa

SEQ ID NO: 250875 - DNA, 201 bp, Homo sapiens
atatagtcattatttatcaagattagagtgcattttttaatttaaaaatatatatttaataagattattgtcgaagtaaaaatatgctattagtgaaacaytgaattaagtttctatacacagaaagttggtatacacagaaagttcttaaactttcagtatagtgactataaagtaacatgacttaaaaaacaaaaaaac

SEQ ID NO: 250876 - DNA, 201 bp, Homo sapiens
tttctatacacagaaagttggtatacacagaaagttcttaaactttcagtatagtgactataaagtaacatgacttaaaaaacaaaaaaacaagcataccmacaagcataccaaaacataaatccaaaagagtaattttctcctcttcagaacttatcttgggattcctttctgggaattgcttcagagcctgcatattgg

SEQ ID NO: 250877 - DNA, 201 bp, Homo sapiens
atcatgattctcatctagagtaaacaggtcctggtgatgccagttcagcaagggtggggtcaggtgccttaaagcctcagggcacatagcaacgaccaggmtgcttcctccaaccccagcccacttttgggcagctcctgctcccacacctgtcaggcctcaaaggcagggcacagggtagtttcagaggaggtgcatggc

SEQ ID NO: 250878 - DNA, 201 bp, Homo sapiens
tattttattacttaattttatgtagaaccttgaaattgcttcagaatcttgaggttgcttcagaatttctgcagaaatataattgacttttaggccaggtrtggtggctcacacctgtaatcccagcactttgggaggccgaggtgggtggatcacgaggtcaggagttcaagaccagcctgaccaacatggtgaaacccc

SEQ ID NO: 250879 - DNA, 201 bp, Homo sapiens
tcctctctttcttcatgttcttttttggaaagtcacatctgttgaaacatgcccaaagaagctagaatggggccaccaatacatgaactaaacctctgttycagttttttatgatttgcagtccatttcagccatatacttcggggagttttctgagacacctctctattcaacctgtcagtaaaactgtatcagcatgtt

SEQ ID NO: 250880 - DNA, 201 bp, Homo sapiens
aattttctgtgggttaggaattcaggtgtggcttagttgggtcctcaacttcagggtcttttcacaaggttgcagtcaagatggatcatctcaaatgttgyccagacagcattcgcttcaagctcattcagttgttggcaggattcagttcctgattgcctggcaggctgttggctggaggctatcctcagtcccttgcca

SEQ ID NO: 250881 - DNA, 201 bp, Homo sapiens
tcactgtgttagccagaatggtctccatctcctgacctcgtgatccacccgcctcggcctcccaaagtgttaggatcacaagcgtgagccactgtgcccarctcagtagtacgtcttttatgtcactgactggacttggccctgccttgcatttgaggtgcttatccctgtgatcagactgtggattcgttgtttatctcc

SEQ ID NO: 250882 - DNA, 201 bp, Homo sapiens
acttgtcattgcagacaaatatgatcctttcactacgacaaataccgaatgcctctgcataaaccctgtaagaatgtagttaatcttatatagtcattatytatcaagattagagtgcattttttaatttaaaaatatatatttaataagattattgtcgaagtaaaaatatgctattagtgaaacactgaattaagtttc

SEQ ID NO: 250883 - DNA, 201 bp, Homo sapiens
tttttgtaggacaaaattaaacatcctaagtttaattttacaactttatttccattttatttgattttctactgtaaagtagctataaatgctgaaatgtrtaccccaaatatagttatttataaaaagttttgtttcttgaaagaatatatttacagtctttaaaatttattttgttttattttagcttaaaacaataga

SEQ ID NO: 250884 - DNA, 201 bp, Homo sapiens
aagttcccaccactggttaagaacaagtgcccaggcagggcacggtggctcatgcctgtaatcccaggactttgggaggccgaggtgtgtggatcacgagstcaggagtttgagaccagcctgaccaacatggtgaaaccccgtctttattaaaaatacaaaaattacccgggtgtggtggcgtgtgcctgtaatcccagc

SEQ ID NO: 250885 - DNA, 201 bp, Homo sapiens
ggagaaggaggctaaggcaggagaattgcttgaacctgagaggtacaggttgagtgagcagagatggcgccactgcactccagcctgggcaacagagtgaractctatctcaaaaaaaaaaaaaaaaaaaaaaaaaaaaaaaaaccaacaaaaaaacaactgaccaaatcaagtaactcccctccaggttattgtcagaga

SEQ ID NO: 250886 - DNA, 201 bp, Homo sapiens
ctgagaggtacaggttgagtgagcagagatggcgccactgcactccagcctgggcaacagagtgagactctatctcaaaaaaaaaaaaaaaaaaaaaaaamaaaaaaaaccaacaaaaaaacaactgaccaaatcaagtaactcccctccaggttattgtcagagaatataatcttgaacacagcccagttgtctttttct

SEQ ID NO: 250887 - DNA, 201 bp, Homo sapiens
ctggtttcaaactcctgagctcaggcagtccacccgcctcggcctcccaaagtgttgggattacaggcgtgagccaccatgcccggcctgaattatatactttttttttttttcttttgagatggagtctcactctgtcacccaggctggagtgcaatggcacgatctcggctcactgcaagctctgcctcccgggttcac

SEQ ID NO: 250888 - DNA, 201 bp, Homo sapiens
actcccctccaggttattgtcagagaatataatcttgaacacagcccagttgtctttttctttttggaattaacatatttatttaaaataaaagtgaatayaaaatgaataattttcaaaacatgcttataaatataaaattaaaaaggaggccagacgctgtggctcttttccagcccacttgtctacgctggatatcct

SEQ ID NO: 250889 - DNA, 201 bp, Homo sapiens
tctgcctcccaaagtgctgggattataggcgtgagccaccgcgcccggctactttttttaaaaattagtctacctttataaaggacatatagttgttggcygggcgcggtggctcatgcctctaatcctagcactttttgggaggctgaggcgggtggatcacctgaggtcaggagttcaagaccagtctgtccaacatgg

SEQ ID NO: 250890 - DNA, 201 bp, Homo sapiens
ctccttaatataagtgaaagcatcataatattagagctattccaaaatggccttctcttagaggagctgagctccctgtcacttgaattatttgggcagarcctgaatgatagtataaaaattgtacttggtgtcccatgggttgaaagtagtttatagacctttcttttcttctccccactttgaggtgtttaaaaacat

SEQ ID NO: 250891 - DNA, 201 bp, Homo sapiens
aaaaaattttaaatttttgactctttttgtaataaacagcttaaaacacaaacacattctacagctgcacaaaaattgtttctttgtatcctgattttgtragcttttttcttttattgattaattgatttactgatacaactgtactctcttcttcaggctggaatgcagtgatatgattatagctcactgcaacctcaa

SEQ ID NO: 250892 - DNA, 201 bp, Homo sapiens
ggggcacaaagactgaaaagacagggcctctgctcagccacgtgagagtttcatagtagacaaacaattgtatgtgtgattattgctcagttgctttacakgcacataggaagggaatcaaacaggtacataggaatgcaaatcagttttgcattagagagaggggcaggaaagacttcttgaacttgctgattgtctcac

SEQ ID NO: 250893 - DNA, 201 bp, Homo sapiens
ctaagggctcacaccgtactaagcactgtgccctgtgggctttctgtacattatcacttgtattccttctagtaaccctgtgcagtagatatcagtttagtttttttttgcatttgaagagttaggttaagaagtgtcgatttgggaggctgaggtgggtggatcgcttgagctttggagttcagaactagcctgggcaac

SEQ ID NO: 250894 - DNA, 201 bp, Homo sapiens
acgtgagagtttcatagtagacaaacaattgtatgtgtgattattgctcagttgctttacaggcacataggaagggaatcaaacaggtacataggaatgcmaatcagttttgcattagagagaggggcaggaaagacttcttgaacttgctgattgtctcacatgcatatttggcgttacacagtctgtttattttttaca

SEQ ID NO: 250895 - DNA, 201 bp, Homo sapiens
ctcatgcctgtaatcccagcactctgagaggccgaggtgagcagatcacctgtgcccaagagttcaagactagcctgggcaacacagtgaaaccctgtccmtctttacaaaaaatacaaaaattagctaggcgtggtggcccatgcctgtggtcccagctacctgggaggctgagatgggaagatcgcttgaatcccggaa

SEQ ID NO: 250896 - DNA, 201 bp, Homo sapiens
caggtcctggtgatgccagttcagcaagggtggggtcaggtgccttaaagcctcagggcacatagcaacgaccaggatgcttcctccaaccccagcccacytttgggcagctcctgctcccacacctgtcaggcctcaaaggcagggcacagggtagtttcagaggaggtgcatggctcaggcccatccctggcctcagtg

SEQ ID NO: 250897 - DNA, 201 bp, Homo sapiens
tctttacaaaaaatacaaaaattagctaggcgtggtggcccatgcctgtggtcccagctacctgggaggctgagatgggaagatcgcttgaatcccggaartggaggttgcagtgagattgccccactgcactccagcctgggtgatgagagtgagaccatgtctcaaaaaaaaaataaataaataaaataaaaaataaaa

SEQ ID NO: 250898 - DNA, 201 bp, Homo sapiens
gaggtttctatgagatattgttcaaatggtgtactcatttcttctactttcagtgacataggaaattattattttaatgtttgctttagtcagtttttttkttttttttttgagacaagagtctcactgtcgcccaggttggagtgcagtggcgcaatctcggctcactgcaggctccgccccccggggttcacgccattc

SEQ ID NO: 250899 - DNA, 201 bp, Homo sapiens
tttatatgttatagccagcctacatggaggtccagtggggactgaatggtaaaggatttttgtaccttcaattgtcagagagtcattatatcataccacartagaggctcttgttctcatagatgaagagatggcatgagaagttcaataacttactcagactgatctaccagaaaatagtggagcagtgtctggagtcta

SEQ ID NO: 250900 - DNA, 201 bp, Homo sapiens
gataggtaagtgtgtgcacagacacagcaagaaagatctttctctaggtgttaaattactgaaaatgagatgttctatcagtgtgttgggatttttgaaamtgtctacagtggcccataaagaaatattattggctgagcttatcacggttatgctgtgtgacacagaattgtgggtacatgatggtacgtttgtgttgaa

SEQ ID NO: 250901 - DNA, 201 bp, Homo sapiens
aaaattgttggggttgggcatggtggctcatgcctgtaatcccagcagtttgggaggctgaggcaggcggatcacttgaggtcaggagtttgagaccagcytggccaatatggcaaaaccctgtctctactaaaaatacaaaaattagctgggtgtggtggcacatgcctgtaatcccagctacttgagaggcgggagaat

SEQ ID NO: 250902 - DNA, 201 bp, Homo sapiens
tgttgggatttttgaaaatgtctacagtggcccataaagaaatattattggctgagcttatcacggttatgctgtgtgacacagaattgtgggtacatgayggtacgtttgtgttgaaatagatcaagaactgttttctgggggaaatctcaggccagctgtggaggtgagctagttctcttacaggccaactcctgacga

SEQ ID NO: 250903 - DNA, 201 bp, Homo sapiens
tgctctcagggtgacacttggttgttcttcatatcctcagcctacaatgtgctgctgccatacacacaatagacctttaaaatttttacattttttttgtyttaaattttaaaacttacattactagatatttgtatgttaaattatgtgggttttcaaatttgtggagaataagtaatagtgacattagtttaaggacag

SEQ ID NO: 250904 - DNA, 201 bp, Homo sapiens
caggagtttaagaccagcctgggcaacatggcaaggcctgttctctacaaaaaaatacaaaaaattagctgggtgtggtggcccacacctgtagtcccagktactggggagactgaggtgggaagatcacttgagctcacttgagctcgggagtcagaggttgcagtgaactgtgattggtccacactgcactccagcctg

SEQ ID NO: 250905 - DNA, 201 bp, Homo sapiens
gaggcaggagaatctcttgaaccctggaggcggaggttgtggtgagccacgatcgagccattgcactccagcctgggcaacaagagtgaaactctgtctcaaaaaaaaaaaaatactgtagctcataagagtagtacatatagggagagatttctttaagatgtgactattgtttatataattcttctttttcaacagatg

SEQ ID NO: 250906 - DNA, 201 bp, Homo sapiens
gtgatcccagctacttgggaggctgaggcaggagaatcgcttgaacccaggaggcggagcttgcagtgagctgatatcccaccattgcactctagcctggrgaacaatagcgaaactctgtcttaaaaaagaaaaagaaaaagaaaaagaaattgtgtgcctggcctgagaaaatgtgaaaagtgtgttattacaaatact

SEQ ID NO: 250907 - DNA, 201 bp, Homo sapiens
accctgtctctactaaaaatacaaaaattagctgggtgtggtggcacatgcctgtaatcccagctacttgagaggcgggagaatcgcttgaggccgggagraagaggttgcagtgagccaagatcacaccccagcctgggcatcagagtgagactgtctcaaaaaacaaaacaaaaacaaaaaaaataaaaaattgttgga

SEQ ID NO: 250908 - DNA, 201 bp, Homo sapiens
atgaattgtgttgaattttgctacagtagtcgttttgtgtttgtacctggtccagaggatcctggatttggttccatcttaccaaggtaagttttgttcaratttttgcaacagtgtagaaaattttgtaaaacttaaaaagataaactatatcacataaattgtttttataggccaccacttgctgaaagcatcactaat

SEQ ID NO: 250909 - DNA, 201 bp, Homo sapiens
tgatcccagctacttgggaggctgaggcaggagaatcgcttgaacccaggaggcggagcttgcagtgagctgatatcccaccattgcactctagcctggasaacaatagcgaaactctgtcttaaaaaagaaaaagaaaaagaaaaagaaattgtgtgcctggcctgagaaaatgtgaaaagtgtgttattacaaatactt

SEQ ID NO: 250910 - DNA, 201 bp, Homo sapiens
atctcagtattaatatttgcaaattatttttgggaaaagagctgtctgtggaaagaactatttttttttttgtttttaaattttgactttgaaattctctyttcagtgtcatcaaacatgattgaacgatctgtggtggaagcagcagtccaggaatgcagtcagtctgttgatgaaactatgtatgtgggtacagttaac

SEQ ID NO: 250911 - DNA, 201 bp, Homo sapiens
taaatggaagagcctggactagaaataatagctgatttttaaaatccactttctccctattgtattctgttgtcaaacttgtagtttaatttttttgtcarcggttttcattgttacataaatgtggatttatttattttcatttttttagggaaaattttttctggaagatcctactggaacagtccaactagaccttag

SEQ ID NO: 250912 - DNA, 201 bp, Homo sapiens
tttgtagtttgtaaagactatcttatcccaaggacatctgactcccctacctctttatgtctgcccagtgtattgggcatatgactatgctttgagagtgyatcctgtgcccgatctacttgtcattgcagacaaatatgatcctttcactacgacaaataccgaatgcctctgcataaaccctgtaagaatgtagttaat

SEQ ID NO: 250913 - DNA, 201 bp, Homo sapiens
tctttaaaatttattttgttttattttagcttaaaacaatagaaaccttattgggtagtacaaccaaaatcggagatgcgattgttcttggaatgataacrcagttaaaagaggtaacttaataagcgtcaaacttttatttttggccttggattgatgaaatgtcggttacatagaacatttttgtagtgggcacaggaa

SEQ ID NO: 250914 - DNA, 201 bp, Homo sapiens
aagttataatcttctccctgtcagaacttataactgctaaaaaaaaaatagagaaattgaggatttttaattttacccttgcaaactcatttaaaatactrtagtgtgaccagatgcagtggcttatgcctgtaatcccagcactttgggaggccaaggtggctggatcacttgaggtcaggagttcaagaccagcctggc

SEQ ID NO: 250915 - DNA, 201 bp, Homo sapiens
cagctaagatgtcagtaggcaataagagcttttcagttccattatcattctgtgaaaccactcatatatgcagtccgtcattgccaaaacgtttttatgcygtgcatgacagtccatatgtagtagatcctcattaatttacagatttgtgctaaaatgtttttgtacctcctaaagtcaatactaaaggtgctttagtgg

SEQ ID NO: 250916 - DNA, 201 bp, Homo sapiens
ggggacccttttcctctccctgagagataaagagccctgtgcctgaaatgccaccagcagtactcattcctctggctaatcccaaacattcactgaatatwtgctctgggtgcttcgggcaggagccactgctcacttctggcctggcctgttcccccaggccaagtttacatctctccattccaggctttgtgtgtaaga

SEQ ID NO: 250917 - DNA, 201 bp, Homo sapiens; identical to SEQ ID NO: 49407

SEQ ID NO: 250918 - DNA, 201 bp, Homo sapiens
ttccctgagggcagggattttggtccgtcctgtctccccatgttcccagtacccaccgaggtgcctggcacacggggctctggcaaaatcgttgctgagtkaatgagtgacgtgggttgggtgagcaccctgtggcatgttgtatggatcaaatgccccagggctgcaccatccactgggttgtcttcactggtcacaggt

SEQ ID NO: 250919 - DNA, 201 bp, Homo sapiens
acaaaattagccggtgtagtggtgcatgtctgtagtcccagctactcaggaggctaaggcgggagaattgcttgaggcagaggttgtggtgagctgagatygcaccattgcactccagcctgggcaacaagagcaaaactccgtctcaaaaaaattaaaaaattaaaaaaaaaaagaaaagaaaaatagcccaccagaagg

SEQ ID NO: 250920 - DNA, 201 bp, Homo sapiens
ggactgaccctccagagggcagcctcacactacagagggagggtacagggacctgcttgggaggggctattgtccccaccgccaggaaggggacagtgagscttcgggaaggggcggagctgcccatgggctggaagcaggccaggaaccccctctcacagcagggagctgacaaggggacccacggccttgcccataagt

SEQ ID NO: 250921 - DNA, 201 bp, Homo sapiens
tggtctgaggtcggatgacccccagccccggaagatgcccctgaaggcccctgatggggtgtgggcagacacactaccccagtgggattcctccctggttscccacttcattcctgggacacaccagtccagattcgccttgatgggggagttgtgagcactggcgtgtcgtttggggagggggagcagttatgaaagatc

SEQ ID NO: 250922 - DNA, 201 bp, Homo sapiens
gtggagtgccagctccagggtagatcagggcaaggttctgcagtgtgggtcaggatccagggcctccggagcctcctggagtctgggcctcaccttggagktttcctgactttttggaccttgagcctcctttaagctgcaggagacccagacacggcgcactgtccagggtgacccgttcctgttggagttgggtagtgg

SEQ ID NO: 250923 - DNA, 201 bp, Homo sapiens
agctaagatactgagcacagccccgtcagagggcggctctcggggaggcctcagatgtgctgtcctctcattcccctccttagtcctgtgtgtgctgctaycacagaatacctgagactgggtggtctgtaaacagcagaactttctcacggatctggaggctgggaagtccagggtcgaggagctagcatatggcgaggg

SEQ ID NO: 250924 - DNA, 201 bp, Homo sapiens
aggaggggtggagtcctagcaggggtagatcccagctttgggaaccaactttcccaggcacttgccggccactccgtgggaaagtcctcaggcagcctgcrgggagctgggatcagctgatggggatgggtttggaggggagagagtggtgcacagggactggaggtgggggaggggtggggttgccatggaaagggctct

SEQ ID NO: 250925 - DNA, 201 bp, Homo sapiens
aggtgtaccagggctgggggcagtggatgggctacttcctgcccagaagtagagactgaggttgtttctggcatcctccaaaatgcccctcatggacattmcagggatgccctgagtgcccactgggtgttgggcctgctttactgctggacatgtgacagctggccccttctcccagttggaggagtgcccagtggctgt

SEQ ID NO: 250926 - DNA, 201 bp, Homo sapiens
ctgagggtgccagtcagggtgaagcagccccgcaattggcccacctccttttgtaccttaacaaaggtgtctttgttacctttcttaaaggtaataaagcyggtcaggagcaaggcctggcatattcagggggtcatctgtatttggtcgtccagcgggaaacccaaatggaaggaaagaaaaaaaaaaaaaaccatgcat

SEQ ID NO: 250927 - DNA, 201 bp, Homo sapiens
ggccatgagaatcacgagagggctgggctggacgtgaacggcagagagctgagggtgggggaactgcgtggtcctcatgcaattctgggaagactacatamgcagtgaggagtggccagaggcagggtggtctgcaaagacagcccctcttggcctcatgggcacccacccgcccagccaagtcattcagggtatcctgct

SEQ ID NO: 250928 - DNA, 201 bp, Homo sapiens
gagtaggttgctctggaagcttccgccatgctaaccccggctgcagtattgccttgtgtctggtcctggccacagcactcctagccccttttgctcacccwgctggtccagcccaactggtctcactttgccagacaagggctggaatccaaaatggagaatgaagtgcagaagacccacttcaaaatgttatcaaggagc

SEQ ID NO: 250929 - DNA, 201 bp, Homo sapiens
agctcccaagcactggtgagtccgtgctcagaagggcacagctggctatgagtaactagatcctgaaagccagccaaggggcagctgggtcaatctgaccycagcaggtccacggaggccctttacgccaagcaggctgtttccttgcctctctgagttcctcttaccttgctttgctaaagcctttgttcatgctgccag

SEQ ID NO: 250930 - DNA, 201 bp, Homo sapiens
gtaataatttactgtgctggacagagaggacataggccttgccctgaggagattagaatccattggggagcagatacccctggcaccgatgctccacctasccctgtgctggctgcttgggggcaaggaaagagtcactaaaagtagggattccagatctagtggcccggttcaaatcccggccctgcctctctcactgtg

SEQ ID NO: 250931 - DNA, 201 bp, Homo sapiens
tgggaggctgaggcaagagaattgcttgaacctggtagatggaagttgcagcgagccaggatctagccactgcacttcagcctgggtgacagagtgagacyctgtctcaaaaaaaaagtgagggggagagcatgacccagagaaagaatcaaaaataaagagaagccacagatgggaacattttaagaatatctaggtggg

SEQ ID NO: 250932 - DNA, 201 bp, Homo sapiens
ctgacccactcttttttttttttcttttgagaagagtctcactctgtcaccaggctggagtgcagtggcatgatctcggctcactgcaacctctgactccstggttcaagtgattctcctccctcagcctcccgagcagctgggagtataggcacgtgccaccatgcccagctaatttttgtatttttagtagagatgggg

SEQ ID NO: 250933 - DNA, 201 bp, Homo sapiens
aacaacttggttagacttagtgtccaatatggtagtatttatgaaaaatattaaatcaagaatagaaaaattgcatataaagccagagatagacctcaaatttttttttttttttttttagatggagtcttgctcttgtcacccaggttctggagtgcaatggcgtgatcatggctcactgcaacttccgccccctgggtt

SEQ ID NO: 250934 - DNA, 201 bp, Homo sapiens
gtgtacattccctgctctagggagcttatatgccagctgggaagacagacatctaggggaaaatgagcctagtgttgactggggctggggccgtgcatagktctctctgattcttacttgaaataagcagggcagagataatgatacccattttatacatggaggagttgaggctgagagaggtcaggtgacctgctctgt

SEQ ID NO: 250935 - DNA, 201 bp, Homo sapiens
gctgtcacttgccagctgcgagtttgaggccctgtgtgcctgtgggggtggaatgaagcgaggccagtagtgctacagtcttcacatcacccccaaccctytcacagccccaagcaccttccctgcacactggcccagccctcacgggctcccactgcctcctggctctgcacacagcaggtctgtggtcatgtgtggccc

SEQ ID NO: 250936 - DNA, 201 bp, Homo sapiens
gccaatcacctgcctaatgcccctgcaccctggtgtcaggcagccccccagagctgcatccctccctcctgtagttaaccaatgctctatgagcctctctyagccaagaccttggcatcagctcaccactgccccgcccctggccctccccttcatcacgggccgtctctcaggcttggcgccctgggatgctcccttgct

SEQ ID NO: 250937 - DNA, 201 bp, Homo sapiens
ctgtagttaaccaatgctctatgagcctctctcagccaagaccttggcatcagctcaccactgccccgcccctggccctccccttcatcacgggccgtctytcaggcttggcgccctgggatgctcccttgctccagctctgtgactgtccccatgagggtcctccctcagtgcagccccatctctccagcggtgctggca

SEQ ID NO: 250938 - DNA, 201 bp, Homo sapiens
tgcctggccagctcccaccatcacagccagtggcctccagagagcacctcccttctccctggccagaagcccctggctgggctccacctgagtcctgactrtgaggtcatggctgggtcatggagtttgggctcatcagcttccctccctcacagcccgtcaggcttccaagcagagctagagaaaaatggcacaagaagt

SEQ ID NO: 250939 - DNA, 201 bp, Homo sapiens
gcaggtttaggttttgctccctgttgccctgagataggacagcacccacctaggcttaggccctgccagggactcacctccaagcctctgcttctggtgtstccccacccaaaggctcactctttctcttctctgccaggctggggaataataatagaagagctagcacttatcattgagtgcttactgtgtgctaggcat

SEQ ID NO: 250940 - DNA, 201 bp, Homo sapiens
gcgtacccacaatgccttgtgcctcgcaccgcgggaggaagtggctgctctgtaggccccagaacggaaccacttgaaaggcgggaaacacgtgggggacscctctgagccctgagaggaatggcctagagcaaggccacgaggagccagggcacgacacggtgggccctcggagaaccgctggtgggcaagtggcaggag

SEQ ID NO: 250941 - DNA, 201 bp, Homo sapiens
  misc_feature (1)...(201): n = A,T,C or G
ggccaccacattgtccagcaaggtggcagcagaggcctcctaggtccccttcctaggaaaggagcctgggctgccctgatgagtctcctgtctctctctcncccgcaggatgaagatgagacgctacaagctctttctcatgttctgtatggccggcctgtgcctcatctccttcctgcacttcttcaagaccctgtccta

SEQ ID NO: 250942 - DNA, 201 bp, Homo sapiens; identical to SEQ ID NO: 49410

SEQ ID NO: 250943 - DNA, 201 bp, Homo sapiens
gtaacccagatcctgtgaccgagcccccgcctgtgttcgtagcctgggccccaccagctcttcatacaccgcgctcacccctgccccactgcccccgccakgctgtcatcctagcacttgctgcctctgcctcttcctggaagcaagtcccaggcagggcatgatgcccagagcttgcctaatgcactgggcaaatctctc

SEQ ID NO: 250944 - DNA, 201 bp, Homo sapiens
cactacactcagctaacttttgtatttttagtagagacagggtttcaccatgttggccaggctggtctcgaactcctgaccttgtgatctgcccacctcgscctcccaaagtgctgggattataggcgtgagccactgcactggccgacctcaaatttttatgcctggagattagtaaagggcatggaataatgaagggga

SEQ ID NO: 250945 - DNA, 201 bp, Homo sapiens
atgagttgcagagagggttgaatgagaggatgcacacagggtgcctggcacctgagcagcactcaagagatcgctggctgcggtattattacctggaaaaygaggatgccgatgccagctggcgggccaggccagcttcactgggcagcggccatgagaatcacgagagggctgggctggacgtgaacggcagagagctga

SEQ ID NO: 250946 - DNA, 201 bp, Homo sapiens; identical to SEQ ID NO: 49409

SEQ ID NO: 250947 - DNA, 201 bp, Homo sapiens
ggggtttcaccatgtgggccagatgttctcaagctcctgaccttgtgatccgcctgcctcggcctcccaaagtgctgggattacaggcctgagccaccacrcccagcctgcactgacccactctttacatcttagctgcagcatctctggctcagggaagcccacatgcttcctggtgttcttgctgtcagctcccagagt

SEQ ID NO: 250948 - DNA, 201 bp, Homo sapiens
agcccccactcctacccccgcccttccggccatcagtccttgccggccttcctctgcagagatggcaaggccctgtgcccttgggagtccccctgtccccsacaccacacagggcatcggttctattcttcccatgagggcctttcggcagccctccagggcaggtgccacacaatctgacacacagagacacgaggcaca

SEQ ID NO: 250949 - DNA, 201 bp, Homo sapiens
ggactctggctggcaggcctggtggtggatggctcccatggttgtcctccccaccttggcctccgggtcatcataatttgctgctctttatcaagcacttmctatgtgctgggcccagggccaaccaaccactttctatgcattctcccagagatgtctctaacttgctgagaggcaagcactattatcatccctgtttgg

SEQ ID NO: 250950 - DNA, 201 bp, Homo sapiens
tcggggtggcagaggaggcagagagaggtccatcctgggagcatttgggggaacggggcctgcaggctttcctgcccctctgccgggcatgtggtgaggcygcacccagctcagaggactggcctgtgtcaagactctggatgttatccgttttaatcccctcggggttgggatggcctcacattgctgatagaggcaccg

SEQ ID NO: 250951 - DNA, 201 bp, Homo sapiens
ccccaacccttgtaacccagatcctgtgaccgagcccccgcctgtgttcgtagcctgggccccaccagctcttcatacaccgcgctcacccctgccccacygcccccgccatgctgtcatcctagcacttgctgcctctgcctcttcctggaagcaagtcccaggcagggcatgatgcccagagcttgcctaatgcactgg

SEQ ID NO: 250952 - DNA, 201 bp, Homo sapiens
gcttggtctgattctggggccaccgcttgcgggcagtgaccggctgtggggtctcaccgtggggcttgcctagcaccaggcacttctaccagagcaagtgratctgcggcaggaggcctgtgttgctctaattcctggaaattgggtcatgggagcccaggcctggagctcctggaatgcagtgctctgagaattttgtcc

SEQ ID NO: 250953 - DNA, 201 bp, Homo sapiens
ttggtctgattctggggccaccgcttgcgggcagtgaccggctgtggggtctcaccgtggggcttgcctagcaccaggcacttctaccagagcaagtggayctgcggcaggaggcctgtgttgctctaattcctggaaattgggtcatgggagcccaggcctggagctcctggaatgcagtgctctgagaattttgtccaa

SEQ ID NO: 250954 - DNA, 201 bp, Homo sapiens; identical to SEQ ID NO: 49408

SEQ ID NO: 250955 - DNA, 201 bp, Homo sapiens
atgggagcccaggcctggagctcctggaatgcagtgctctgagaattttgtccaaacacctctgacctccttcctccggggctggtccagcctctttcttyccccgcgtcccccatgctccagcctcttgggcaattgtcatactccgtatgtgagcctcaccttcctacttcccggcctttgctgatactggtcccctgc

SEQ ID NO: 250956 - DNA, 201 bp, Homo sapiens
tgacccaaagcccatgcccactgccctccttgctgcccagcccagatcattcctgccaggtctgcacctcgctgtccctcactccgtctggcactgggccrcctgagcatgcaagtgtgcccaccacctgctgccctgtacacatgggtaggtgccgggggaacagcatccgctccccactgcctaggactcttggaccag

SEQ ID NO: 250957 - DNA, 201 bp, Homo sapiens
gcctctgcagggatgagcgctggggggacagcctggagagagggcttgcgggcgggggcagcacttcagccagctgctcaggggcccctgtctgacgagtrgcatcagagcatgcagggacctgaggaagggcgttccaggcggagggatcagccagtgcgaggaccctggaatggggccatgcctgaagagtgtaggaga

SEQ ID NO: 250958 - DNA, 201 bp, Homo sapiens
gacctgcccaagatcacggaggagggtttggaaagggcaggatttgaatccagccccttttgagtctagactccagagagctatggccccaaagcagcccycgccccacgctgactcctgagagattgggggtgggcacccaggacagcccagggtccaggagagccctctcacagaggcagaagcactcagcccagcccc

SEQ ID NO: 250959 - DNA, 201 bp, Homo sapiens
agacctagtggtctgaggtcggatgacccccagccccggaagatgcccctgaaggcccctgatggggtgtgggcagacacactaccccagtgggattcctccctggttccccacttcattcctgggacacaccagtccagattcgccttgatgggggagttgtgagcactggcgtgtcgtttggggagggggagcagttat

SEQ ID NO: 250960 - DNA, 201 bp, Homo sapiens
gtttccacatctgtgaaatggggaggttttgtttttgtttttgttttgagacagggtctcactctgtgatccaagctggagtgcagtggtgtgatcatagstcacagcagccccaacctcctgggctcaagggatccttctgccccaacctcctgggtagctaggactacaggcgtgagccaacacaccctgctaattttt

SEQ ID NO: 250961 - DNA, 201 bp, Homo sapiens
ctggctcagacccattctaagggtctgcctggtgcccttggtgtggtcagggctacttgaggcacactggtgattcctttttcttttcttttcttttcttytcttttttttgagatggagcctcactctgtcgcccaggctggagtgcagtggtgccatcctggctcactgcaacctctacctcctgggttcaagcaattg

SEQ ID NO: 250962 - DNA, 201 bp, Homo sapiens
ctttttgagacagagtcttgctctgttgcccaggctggagtgcagtggcatgatctcggctcactgtaagctctgcctcccaggttcacgccattctcctrcctcagcctcccaagtagctgggactacaggcgcctgccaccacacctggctaattttttttttcgtatttttagtagagacggggtttcaccatgttag

SEQ ID NO: 250963 - DNA, 201 bp, Homo sapiens
ggtctaccaggccctccctcgcccaggccacttgtgttgagcctggagcagaacccccagatctgtagtccgcctgtcagcttggggagtctccgtttccrtctgtttcattcccatcagctgtgtgtggctgagcaagtcacttaacctcttgaggcctccatgtcctcatctgcaaaatggagacacacatatctgcgt

SEQ ID NO: 250964 - DNA, 201 bp, Homo sapiens
tcgtttcgtttcgtttctttcagatggagtctggatctgtcgcccaggctagagtgcaatggcaatctcggctcagtctcaaaaaaaaaaaaaaaaaaaagaggtagaaccttcagatgcagacagagaacctagaatctgaaacttagaggaggaaacctggagcagcaaagctagaatgtgggtcttccagaacatgga

SEQ ID NO: 250965 - DNA, 201 bp, Homo sapiens
ctgcttgtggtgcggccttcaccaatcaccccctcctcagggcctccatctccctgctggtgtggagtgagggatgaattcacagcagggcttgccaggctttttttttttttttttttaactgtagaagctttccttccaacaaaatcttgcgaggagctcagtgtctgaaattgaaaagctgggagcatcttcttgatt

SEQ ID NO: 250966 - DNA, 201 bp, Homo sapiens
cctgctaattttttaaaaagtttttaatagagatgaggttttgctatgttggccaggctggtcttgaactcctgggctcaagtgatcctcctgcctctatstcccaaagtgctcggattccaggtgtgatcaaatgggggagaattttgaatggaatgagttgcagagagggttgaatgagaggatgcacacagggtgcct

SEQ ID NO: 250967 - DNA, 201 bp, Homo sapiens
ttgtccctccaagtctgttgctgcttctcatctgggctcctgtgtctttggactgttccatgtcatccagcagctgtccctgcagtgcatgctccagggcygactttgtcctggggggtggggaacagtggcgaccgaggcctgtggtgaccctgctctcctgtggcctcgccagcagggtgagggcggggcagacgtaaa

SEQ ID NO: 250968 - DNA, 201 bp, Homo sapiens
tgtttttgttttgagacagggtctcactctgtgatccaagctggagtgcagtggtgtgatcataggtcacagcagccccaacctcctgggctcaagggatmcttctgccccaacctcctgggtagctaggactacaggcgtgagccaacacaccctgctaattttttaaaaagtttttaatagagatgaggttttgctatg

SEQ ID NO: 250969 - DNA, 201 bp, Homo sapiens
gaattgcttgaggcagaggttgtggtgagctgagatcgcaccattgcactccagcctgggcaacaagagcaaaactccgtctcaaaaaaattaaaaaattaaaaaaaaaaagaaaagaaaaatagcccaccagaaggatccaggctgcctttccaagtcctgaaaccccaagagtaggttgctctggaagcttccgccatg

SEQ ID NO: 250970 - DNA, 201 bp, Homo sapiens
ttagctgcagcatctctggctcagggaagcccacatgcttcctggtgttcttgctgtcagctcccagagtatcacgccggtgtctttggcgtgtttgttaygtgttcctgatatactttcagcgacacaggtactgaggaggccctcagttaaatgtgcagatggatggatgaatggatgaatgaatgaaagaatgaatga

SEQ ID NO: 250971 - DNA, 201 bp, Homo sapiens
gtaaagaataacgaggcagcattgctgcaaacatgtctcgcctcccaccatagggcggtttttctctcatctcagaactgaacaaatgtacaatcgggatytataccgagacttttagttcccaggagcaggcaggagacagtggccttcctctatctcaactgcaagaggccttccttttttactaacccaccgcagcac

SEQ ID NO: 250972 - DNA, 201 bp, Homo sapiens; identical to SEQ ID NO: 49411

SEQ ID NO: 250973 - DNA, 201 bp, Homo sapiens; identical to SEQ ID NO: 49412

SEQ ID NO: 250974 - DNA, 201 bp, Homo sapiens
cgaagtcctgaactcaagcaatcctcccacctcagcctcccaagtggctaaaactataggcatgcaccaccacaccagttcattttttaaattttttgtaragttggggctgtatttcccaggctgttttgaactcctggcctcaagtggtcctccccactgggcctaccaaagtgctaggattataggtgtgagccacca

SEQ ID NO: 250975 - DNA, 201 bp, Homo sapiens
tctggcaaatgctcaaatgtgcattggaaagagccaaatatgagtccaagaaagtcacaaatgtgagtccaaaaaagcttggcttaggctgatggacagascccaagattggggccttgatcctgatggtggaaggagccgtttgggagtctggatcaattagcactaaccatatgacatgtagcaatgtaatgtgaaaat

SEQ ID NO: 250976 - DNA, 201 bp, Homo sapiens
gcagggaatcggcccgcccttcgtcctgcccctcgccctactctgtcaccgcccctgggaagagtggaacccatacttgctggtctgatccatgcacaagrcggggctgctaggcctctgtgcccgggcttggaattcggtgcggatggccagctccgggatgacccgccgggacccgctcgcaaataaggtggccctggt

SEQ ID NO: 250977 - DNA, 201 bp, Homo sapiens
gctcaaatccaaaggccccttctggcccaaatcatacttggctgattatgaaacaagatgaaccaggctccatttttgctcacctgaacctaatgtatcawtatctagctgagcagctggtgagagctacttctccctgaacctcagttccttcatgtgtaagatgcaggtatatcatcctaagatcttcgtcagctctga

SEQ ID NO: 250978 - DNA, 201 bp, Homo sapiens
ggaaagacccagacctcccaggctcccttcctttattggctgcctgtggactaccgggtactggactttagtctcaaagaaagtatataagtcgatgtcakaattagtagtggacaccagccttgcagctgctgaagcaaatatgaagcattcacaaaggaagctcctcttcccttgaggctcacggcatacactttattt

SEQ ID NO: 250979 - DNA, 201 bp, Homo sapiens
ggggccggggggggcgccttggaacacattcagcacaaactccatctgcttttagaatgcatttctcaagggcagtgtaaatgtgaggactctttgccacrtgccacacacctggagcacaccttgcaaagggcgggtgggggtggctctatccctgcccttctcattcgtttctgctactcctagttctctctgcttcta

SEQ ID NO: 250980 - DNA, 201 bp, Homo sapiens
aaatgtgaggactctttgccacgtgccacacacctggagcacaccttgcaaagggcgggtgggggtggctctatccctgcccttctcattcgtttctgctrctcctagttctctctgcttctatctgctcttcactagccacagtctgctcctctccccaggctttttccctggcatgctcttctgccttgttgatttcca

SEQ ID NO: 250981 - DNA, 201 bp, Homo sapiens
gcttctgcagacttcagtgtccttgcctgacatctctaaagacagcagtggttctcccagcacggagttcgtgctccgataacggacagactgcctccccragtgggtccctgacccccatgtagcttgactgaaaaacaccgcccagtaggggcggagagacacctcatacaggtgggtgcccctgtggaacaaagcttc

SEQ ID NO: 250982 - DNA, 201 bp, Homo sapiens
gcaccccaaaaaataactaaggatagaattttgagaatgatgtagacgagtaagaaagaaacctgggggcagggctgttctgagtgagaccctcaaatcayggaagtggctgctgctgcaaacccagctcatttctcacctctcagtcccaagaggggatgaagcctgtcacccatggtgggaactgtagaaagtgatgtc

SEQ ID NO: 250983 - DNA, 201 bp, Homo sapiens
tggctctatccctgcccttctcattcgtttctgctactcctagttctctctgcttctatctgctcttcactagccacagtctgctcctctccccaggcttyttccctggcatgctcttctgccttgttgatttccaacagagacgtaggcagctaatatgccaacaactacaacacttaatttacacacccacctgtcccc

SEQ ID NO: 250984 - DNA, 201 bp, Homo sapiens
ccaacagagacgtaggcagctaatatgccaacaactacaacacttaatttacacacccacctgtccccttttcagctgacaaaaagtaattattttttacragttgggaaatattaaatgctgctccttatttaaaatactaattctggtgaaatgaccagttgccactttataacatacatcctttaaaaaaataaaata

SEQ ID NO: 250985 - DNA, 201 bp, Homo sapiens
ggagcagggcgggcagggaatcggcccgcccttcgtcctgcccctcgccctactctgtcaccgcccctgggaagagtggaacccatacttgctggtctgakccatgcacaaggcggggctgctaggcctctgtgcccgggcttggaattcggtgcggatggccagctccgggatgacccgccgggacccgctcgcaaataa

SEQ ID NO: 250986 - DNA, 201 bp, Homo sapiens
gggacaccagagccatatgtcgagatttttgtttaggtcggtacatctgggccgaccttgcccagcctgtttctcacccaccattcttgtctatcctggtyctcatttctacaggactttgctagatgccagctcttcacaaaactaaaatacaaatgtaggtaaaatgctaatagctgacaaatgcaaaatgtgtaactc

SEQ ID NO: 250987 - DNA, 201 bp, Homo sapiens
acggcctccagcactttgaaaatgtaccagacattctatttgggcaccggaaagtcccccggaacccctcccccttacctagatgggacaccagagccatrtgtcgagatttttgtttaggtcggtacatctgggccgaccttgcccagcctgtttctcacccaccattcttgtctatcctggtcctcatttctacaggac

SEQ ID NO: 250988 - DNA, 201 bp, Homo sapiens
tggtgccagaaatggagaaacgagggtacagagagtgagagagagcctgggtgagaggggacaccacacgggctgagggcagtggtccacaatgggaagayggtcagctctcttctttttccagaggcggctcagtggtgatcgtgtcttccatagcagccttcagtccatctcctgtaagaacccttttgtctacctctt

SEQ ID NO: 250989 - DNA, 201 bp, Homo sapiens
ggaagagtggaacccatacttgctggtctgatccatgcacaaggcggggctgctaggcctctgtgcccgggcttggaattcggtgcggatggccagctccrggatgacccgccgggacccgctcgcaaataaggtggccctggtaacggcctccaccgacgggtgagtgctccggccggagtttctgaggccctggctgcc

SEQ ID NO: 250990 - DNA, 201 bp, Homo sapiens
caaaggcagtggtgccagaaatggagaaacgagggtacagagagtgagagagagcctgggtgagaggggacaccacacgggctgagggcagtggtccacamtgggaagacggtcagctctcttctttttccagaggcggctcagtggtgatcgtgtcttccatagcagccttcagtccatctcctgtaagaacccttttgt

SEQ ID NO: 250991 - DNA, 201 bp, Homo sapiens
gtgaaggccccagccctgatgacaaaggcagtggtgccagaaatggagaaacgagggtacagagagtgagagagagcctgggtgagaggggacaccacacrggctgagggcagtggtccacaatgggaagacggtcagctctcttctttttccagaggcggctcagtggtgatcgtgtcttccatagcagccttcagtcca

SEQ ID NO: 250992 - DNA, 201 bp, Homo sapiens
cattaatgtgaaggccccagccctgatgacaaaggcagtggtgccagaaatggagaaacgagggtacagagagtgagagagagcctgggtgagaggggacmccacacgggctgagggcagtggtccacaatgggaagacggtcagctctcttctttttccagaggcggctcagtggtgatcgtgtcttccatagcagcctt

SEQ ID NO: 250993 - DNA, 201 bp, Homo sapiens
ctgagaacacaggacaggcctgctgacaaggctgagtctaccttggcaaagaccaagatattttttcctgggccactggggaatctgaggggtgatgggaragaaggaacctggagtggaaggagcagagttgcaaattaacaacttgcaaatgaggtgcaaataaaatgcagatgattgcgcggctttgaatccaattga

SEQ ID NO: 250994 - DNA, 201 bp, Homo sapiens
atcctttagctcaattataattaaaggccaatctttggggatcatggccggagaaagcagcccaagttggagagtccccatgggttgaattactgcattgwtggctctcaaatcagttaggatgcaccatctgcctgattttttctgaattacaaacgcaggagaatgccaaggtgaaaatgaaggctcaatgtttccctt

SEQ ID NO: 250995 - DNA, 201 bp, Homo sapiens
tctgatccatgcacaaggcggggctgctaggcctctgtgcccgggcttggaattcggtgcggatggccagctccgggatgacccgccgggacccgctcgcraataaggtggccctggtaacggcctccaccgacgggtgagtgctccggccggagtttctgaggccctggctgcctggaaacaggcactggcctctcatcc

SEQ ID NO: 250996 - DNA, 201 bp, Homo sapiens
gccatgattacaggcatgagccacagctccttgcccagaaggaagtttttatcaacatgggtaaatgcacctcccttacttactgcagccctggtccagamcttacccctctctctaggctgtgaagcttcatggaggtatcgatatcctagtctccaatgctgctgtcaaccctttctttggaagcataatggatgtcac

SEQ ID NO: 250997 - DNA, 201 bp, Homo sapiens
ttgttgtttttaatataaagataaggtctcgctgcatggcccaggcttctctcaaactcctcagctcaagtgagcctcccaccttggcctcccaaagtgcyatgattacaggcatgagccacagctccttgcccagaaggaagtttttatcaacatgggtaaatgcacctcccttacttactgcagccctggtccagacct

SEQ ID NO: 250998 - DNA, 201 bp, Homo sapiens
taaaatcctttacagacaagcagatgctgagagagtttgtcaccaccaggcctgccttacaataagagctcctgaaggaagcactaaacatggaaaggaayaaccagtaccagccactgcaaaaacatacgaaattgtaaagaccattgatgctatgaagaaactgcatcaattaatgggcaaaataaccagctaacgtca

SEQ ID NO: 250999 - DNA, 201 bp, Homo sapiens
tttgacgatagttcctaagtaggaagattttgttgtcattgttgttgttgtttttaatataaagataaggtctcgctgcatggcccaggcttctctcaaaytcctcagctcaagtgagcctcccaccttggcctcccaaagtgccatgattacaggcatgagccacagctccttgcccagaaggaagtttttatcaacatg

SEQ ID NO: 251000 - DNA, 201 bp, Homo sapiens
gtggagtaaagaataacgaggcagcattgctgcaaacatgtctcgcctcccaccatagggcggtttttctctcatctcagaactgaacaaatgtacaatcrggatttataccgagacttttagttcccaggagcaggcaggagacagtggccttcctctatctcaactgcaagaggccttccttttttactaacccaccgc

SEQ ID NO: 251001 - DNA, 201 bp, Homo sapiens
gttttaagaaatagaagttattttgacgatagttcctaagtaggaagattttgttgtcattgttgttgttgtttttaatataaagataaggtctcgctgcrtggcccaggcttctctcaaactcctcagctcaagtgagcctcccaccttggcctcccaaagtgccatgattacaggcatgagccacagctccttgcccag

SEQ ID NO: 251002 - DNA, 201 bp, Homo sapiens
tgttttaagaaatagaagttattttgacgatagttcctaagtaggaagattttgttgtcattgttgttgttgtttttaatataaagataaggtctcgctgyatggcccaggcttctctcaaactcctcagctcaagtgagcctcccaccttggcctcccaaagtgccatgattacaggcatgagccacagctccttgccca

SEQ ID NO: 251003 - DNA, 201 bp, Homo sapiens
ccctactctgtcaccgcccctgggaagagtggaacccatacttgctggtctgatccatgcacaaggcggggctgctaggcctctgtgcccgggcttggaaktcggtgcggatggccagctccgggatgacccgccgggacccgctcgcaaataaggtggccctggtaacggcctccaccgacgggtgagtgctccggccgg

SEQ ID NO: 251004 - DNA, 201 bp, Homo sapiens
tggcaaagaccaagatattttttcctgggccactggggaatctgaggggtgatgggagagaaggaacctggagtggaaggagcagagttgcaaattaacarcttgcaaatgaggtgcaaataaaatgcagatgattgcgcggctttgaatccaattgacctgttcatttctcagtgttgggtgcttagctgagcagagagc

SEQ ID NO: 251005 - DNA, 201 bp, Homo sapiens
gacgagagactgagaaagagaaataagacacagagacaaagtatagagaaacaacagtgagcccaggggaccggcgctcagcataccaaggacttgcaccrgcaccggtctctgagttccctcagtttttattgattattatcgtcattatttcagtaaaaaggaatgtagtaggagggcagggtgataataaggagaagg

SEQ ID NO: 251006 - DNA, 201 bp, Homo sapiens; identical to SEQ ID NO: 49416

SEQ ID NO: 251007 - DNA, 201 bp, Homo sapiens
gggaatcggcccgcccttcgtcctgcccctcgccctactctgtcaccgcccctgggaagagtggaacccatacttgctggtctgatccatgcacaaggcgrggctgctaggcctctgtgcccgggcttggaattcggtgcggatggccagctccgggatgacccgccgggacccgctcgcaaataaggtggccctggtaac

SEQ ID NO: 251008 - DNA, 201 bp, Homo sapiens; identical to SEQ ID NO: 49419

SEQ ID NO: 251009 - DNA, 201 bp, Homo sapiens
gaggtgtgggacaaggtgagaggggattaaagcaggggggccggggggggcgccttggaacacattcagcacaaactccatctgcttttagaatgcatttstcaagggcagtgtaaatgtgaggactctttgccacgtgccacacacctggagcacaccttgcaaagggcgggtgggggtggctctatccctgcccttctc

SEQ ID NO: 251010 - DNA, 201 bp, Homo sapiens; identical to SEQ ID NO: 49420

SEQ ID NO: 251011 - DNA, 201 bp, Homo sapiens; identical to SEQ ID NO: 49421

SEQ ID NO: 251012 - DNA, 201 bp, Homo sapiens; identical to SEQ ID NO: 49422

SEQ ID NO: 251013 - DNA, 201 bp, Homo sapiens
gcttcccttattccccaggttaggcgagccagaggattgtgctggcatcgtgtctttcctgtgctctgaagatgccagctacatcactggggaaacagtgrtggtgggtggaggaaccccgtcccgcctctgaggaccgggagacagcccacaggccagagttgggctctagctcctggtgctgttcctgcattcacccac

SEQ ID NO: 251014 - DNA, 201 bp, Homo sapiens
gaattagcacattctcactaaatgaacctgactttaaggcacaagtatagattcctgaaaaagttctaagctgaacctgtacaaatggaatcattttaaasacaccatttactgtcacacagactccctgatactttagtgtgtgcacatgtgaaaccatttttttgaagtatgaaataattgctcaccattttatctata

SEQ ID NO: 251015 - DNA, 201 bp, Homo sapiens
aacccatacttgctggtctgatccatgcacaaggcggggctgctaggcctctgtgcccgggcttggaattcggtgcggatggccagctccgggatgacccrccgggacccgctcgcaaataaggtggccctggtaacggcctccaccgacgggtgagtgctccggccggagtttctgaggccctggctgcctggaaacagg

SEQ ID NO: 251016 - DNA, 201 bp, Homo sapiens
ctcatgctgtttccccttcttctcttggcttcagactctggacattaatgtgaaggccccagccctgatgacaaaggcagtggtgccagaaatggagaaaygagggtacagagagtgagagagagcctgggtgagaggggacaccacacgggctgagggcagtggtccacaatgggaagacggtcagctctcttctttttc

SEQ ID NO: 251017 - DNA, 201 bp, Homo sapiens
aatctttcagaaaacttgcaactgagtttcaatggttcatttaaaaaactgtacagatctacagagaggacaaataggacaaaatgtgaacaattggtgamtctaagtgaaggatatctagacattcattgtacttctatctccaatttttctgtaagattgaaatattttaatataagcagttgtctagaacagtgtaaa

SEQ ID NO: 251018 - DNA, 201 bp, Homo sapiens
cctgcccctcgccctactctgtcaccgcccctgggaagagtggaacccatacttgctggtctgatccatgcacaaggcggggctgctaggcctctgtgcchgggcttggaattcggtgcggatggccagctccgggatgacccgccgggacccgctcgcaaataaggtggccctggtaacggcctccaccgacgggtgagt

SEQ ID NO: 251019 - DNA, 201 bp, Homo sapiens
tgcagaaaggcagcagccaaagcctgcgggttcctgcaagggccaggggaggggcgagccctacaggcaacttgaacggagagctcacccgccagcccggraaggcaagccccagtcaggcggaaggtagatggtggaggggcgccgcggcggatggaggtgcccagggccacagaccgctcacagcggtaccggggcggg

SEQ ID NO: 251020 - DNA, 201 bp, Homo sapiens
acagtggcttgtttgtattttttaaaatgctataatcatagtaaatacctttatgcttatctttatgtacttagaatttgagttctgataatttatttttytatgggaggtggggaggtttattttttaaattgcagtccaaaggagtaaatttgatgttacattggacagtttattcagataccacaaactttacagatt

SEQ ID NO: 251021 - DNA, 201 bp, Homo sapiens
cagttgtttcccagctgtctgttgctttgttacattgtttcaggctgtgcttcaatgtgctctccaagtgttttgcttgacctccccatgggtatctgccttgctttagctcagtgctaagcagcagtttggtattcttctggtatccatttttctcatgtggtcagcctactggtcctgattttctgtgattgaggtttt

SEQ ID NO: 251022 - DNA, 201 bp, Homo sapiens
tcattggatctcagtaatttatggttgtttgtaaggcagtaagcaggtaatataaatagctgaaggaaaaagtaatctttgctcttttggattggatactrtctgtgatcacaactgatacttgatgattccatgatacttgcataatgattagatcctccccagcattttttccaaatcccctttattgaacttgatgga

SEQ ID NO: 251023 - DNA, 201 bp, Homo sapiens
attaaaggcgtgagccactgcgcctggcccacacctgggtaatttttgtatatttaatagagacggagtttcactgtgttggccaggctggtctcacactyctgacctcaggtgatctgcctgcctcggcctcccaaagtgctgggattacagacctgagccactgcacctggcttccattacagatttttactttgaatt

SEQ ID NO: 251024 - DNA, 201 bp, Homo sapiens
attcatgaccatatattctatctaatggttccagcattttaatgcattccccacctttaaatttgtgcacagaagcatgattttcagtgacagattgagcmaccttaggcagaatttcagtgtgattgaaatatgcctgttctctgtctctcccacttagtttatgggactcagattacttaaaacatttaagtttctttc

SEQ ID NO: 251025 - DNA, 201 bp, Homo sapiens
cagcattttttccaaatcccctttattgaacttgatggatatgtttgctgcagggcctatagttctgggataattttggaagtataatagcagttcttttmtctttataggttagaccaaagccattgcttttgaagttattaaagtctgttggtgcacaaaaagacacttatactatgaaagaggtaagctgaatcaaga

SEQ ID NO: 251026 - DNA, 201 bp, Homo sapiens; identical to SEQ ID NO: 49452

SEQ ID NO: 251027 - DNA, 201 bp, Homo sapiens
cactgcactccgcctgggcgacacagtgagactgtctaaaaaaaagagagagagagaaaatagttgacagagagaaaatagttgagaacagttagtagacrtagtagacgagaaggctgttgcctgaggaagtcgcagtaactaagaccgtatgattcagatgaaagagaatgtcagatcagtgaaacagaataaatgaac

SEQ ID NO: 251028 - DNA, 201 bp, Homo sapiens; identical to SEQ ID NO: 49454

SEQ ID NO: 251029 - DNA, 201 bp, Homo sapiens
cgtttcttaactggttatttttgggtcacatctctctttaataagctgataaaagcattgggttcttgttccagaaagatgcacatgtatatatacatggrtaagtcaataagtgttttacaacctactttccatgagaaaagccctgatttatgtgcttgctgacttccatagtataatactctcatttgaaggctaaaa

SEQ ID NO: 251030 - DNA, 201 bp, Homo sapiens; identical to SEQ ID NO: 49457

SEQ ID NO: 251031 - DNA, 201 bp, Homo sapiens
atcctggctaacacggcgaaaccccgtctctactaaaaatacaaaaaattagccgggcgtggtggcgggcacctatagtcccagccactggggaggctgargcaggagaatggcgtgaacccaggaggtggagcttgcagtgagccgagatggtgccactgcactccagcctgggtgacagagcgagactctgtctccaaa

SEQ ID NO: 251032 - DNA, 201 bp, Homo sapiens
gccactggggaggctgaggcaggagaatggcgtgaacccaggaggtggagcttgcagtgagccgagatggtgccactgcactccagcctgggtgacagagygagactctgtctccaaaaaaaaaaaaaaaaaaaaaaaatatatatatatatatatttatatttaaataatgtataaatatataatatataattataaatc

SEQ ID NO: 251033 - DNA, 201 bp, Homo sapiens
ctgggcgaggtggctcacaggtgtaatcccagcattttgggaggccgaggtggcggatcactagaggtcaggatttcgagaccagcccagccaacatgacraaaccccgtctccactaaaaacataaaaattagccgggtgtggtagtggacacctgtaatctcagctacttgggaggctgaggcaggagaatagcttgaa

SEQ ID NO: 251034 - DNA, 201 bp, Homo sapiens
gagaatagcttgaaccccggaggcggaggttgcagtgagctgagatcatgccactgcatttcatcttgggtgacagagcaagactcttgtctcaaaaaaaraaagggccgggcatggtggctcacacctgtaatcctaacactttgggaggccaaggcggttgaattgcttgaggtcaggagttcaagaccagcctggcca

SEQ ID NO: 251035 - DNA, 201 bp, Homo sapiens
tggtggctcatgcctgtaatcccagcactttgggaggcccaggcgggcggatcacctgaggtcaggagttcaggaccagcctcgccaacatgttgtgaaamcccatctctactaaaaataccaaaaattagctgggcatagtggcgggcacctgtaatctagctactcaggaggctgagacaggagaatcgcttgaacccg

SEQ ID NO: 251036 - DNA, 201 bp, Homo sapiens
gcgcctgtagtcccagctacttgggaggctgaggcaggagaattgcttgaacttgggaggtgtaggttgcagtgagctgagatcaggccactgcactccakcctgggtgatggagcaagattccatctcaaaataaataaaataagttaaatgatgttgtttaaggttaaattagctacttagtggcaagtgtagaataag

SEQ ID NO: 251037 - DNA, 201 bp, Homo sapiens
atgtttttgtaaagtctgaataatttaaagcatttttcttttatttgttgtgatgagacctgtagctataatttttatttttaggtgctggaatttgaacttttttttttttttttttaaacagggtcttacccttctcccaagctggagtgcagtggtgcaatctcagtgcactgcagcctccacctcccaggttcaagt

SEQ ID NO: 251038 - DNA, 201 bp, Homo sapiens
actgagttcctgaggtattataggtttttttaaaactattgtgctttagtttttgttcttaatattgcctttattatatttgaataggaaataaattccattttttctgagttatagacagttactaattattcaagtgcaaaaaaggatgaaaattcaagagtttccaaaatttttactgtattagaaaataaataacta

SEQ ID NO: 251039 - DNA, 201 bp, Homo sapiens
attaatgtaatccattatcttgaatagttaacctttcttgtgtgtatggttaaaatacctaaaatctattcttttagtaaatttccagtataccaatatataactaactatagtcctcatgctgtttacagtgactattttatataaaacatgaaacactgaatattgagccctatgatatactttaccttagacatagca

SEQ ID NO: 251040 - DNA, 201 bp, Homo sapiens
ttaatgtaatccattatcttgaatagttaacctttcttgtgtgtatggttaaaatacctaaaatctattcttttagtaaatttccagtataccaatatataactaactatagtcctcatgctgtttacagtgactattttatataaaacatgaaacactgaatattgagccctatgatatactttaccttagacatagcaa

SEQ ID NO: 251041 - DNA, 201 bp, Homo sapiens
taaataaacaaataaataaatacacacagatagtgttctgctgtaacagttggacagattcaataaaacagtgttaacttttgaactaattttattgaaastaagtttctgtacaaataggtactcaaaacagctcaattttctaaatcacagtacagcaatttattttttttccttacatatccagaagaaaattcagat

SEQ ID NO: 251042 - DNA, 201 bp, Homo sapiens
taatgtaatccattatcttgaatagttaacctttcttgtgtgtatggttaaaatacctaaaatctattcttttagtaaatttccagtataccaatatataactaactatagtcctcatgctgtttacagtgactattttatataaaacatgaaacactgaatattgagccctatgatatactttaccttagacatagcaaa

SEQ ID NO: 251043 - DNA, 201 bp, Homo sapiens
tatggcagtgtctcatggccattattctgggtattagtaatcattgtatagtactctagaagatgtaggaagtggaaccaattgtgatagtaatcctagtyttttacctattcttgttacttcctgtattatctttttttctcttccaaagcagtgattgtatgaacgcatacctgccctctagagttactgtacctaacg

SEQ ID NO: 251044 - DNA, 201 bp, Homo sapiens
  misc_feature (1)...(201): n = A,T,C or G
ttactcttctacattaaagttgaattattttatttacatctgcaacatttagtatgaggatgccacctggaaaatacatgtttaatgtttattgaaaggtnaaattgcataagggtttgtgttagactgatagcatatctactgagtagcgccccgccgccccccgcccaccaccaagtttctgatcctttttcttttctc

SEQ ID NO: 251045 - DNA, 201 bp, Homo sapiens
tactatttgattgctactggtaacttgctcaccaaaaggctctaacagtttcactcctgccaatactgaatatcaccaatctttaattattattattattwttttttttgaggcggagtcttgctctgtctcccaggctggagtgcagtggcacaatctcggctcactgcaatctccgttccccgggttcacgccattccc

SEQ ID NO: 251046 - DNA, 201 bp, Homo sapiens
cctgtttttgttttagtttttaaattttttttgtagaggtggagtctctcagtgtggcccaggctggtcttgaacacctagcctcaagcaaacctctagcrctgtctcccaaagtgctggggttataggcaagagccacctctcccagccagctgcctttctttctgtaaggaaaattttactggaatgcaaccatgcccg

SEQ ID NO: 251047 - DNA, 201 bp, Homo sapiens
ctagaaataggcctggtgcggtggctcacacctgtaatcccagcactttgagaggccaaggcgggtggatcacctgaggttgggagttggagaccagcctsaccaacatggagaaaccctgtctctactaaaaatacaaaattagctgggtgtggtggtgcatgcctgtaattccagctactcgggaggctgaggcagtag

SEQ ID NO: 251048 - DNA, 201 bp, Homo sapiens
actaagatttagaagaagatataataaatataatgtttttttgttttttgagacgaagtctcgctctgtcacccaagctggagtgcagtggcacgatctcrgctcactgcaacctccgcctcctagattcaagcccttcttctgccttacccttccaagtagctgggattataggcacctgccaccacgcctggctaattt

SEQ ID NO: 251049 - DNA, 201 bp, Homo sapiens; identical to SEQ ID NO: 49451

SEQ ID NO: 251050 - DNA, 201 bp, Homo sapiens
atctagtttcagtatgcaggatggatctgaggaggaaatgtgcgtggcaaccggctccgggatggctggctggggggcctagtcttctgcccgccgatctscctcgggaagtcccggatcagagcagcaggcccatcccccaactgttacaccctgctggcagcagcagaggcacagggatgagttaggaaacagatacag

SEQ ID NO: 251051 - DNA, 201 bp, Homo sapiens; identical to SEQ ID NO: 49449

SEQ ID NO: 251052 - DNA, 201 bp, Homo sapiens
tggttcggaggtctccgcgggagttcagggtaaaggtcacgggggccgggggctgcggggccgcttcggcgcgggaggtccggatgatcgcaggtgcctgwcgggtcactagtgtgaacgctgcgcgtagtctgggcgggattgggccggttcagtgggcaggttgactcagcttttcctcttgagctggtcaagttcaga

SEQ ID NO: 251053 - DNA, 201 bp, Homo sapiens
tttcttctagatttaaattttttaaatatttagatcttcacctgtaatttaccttcttgttcttcaatgtaagattacaaatgctattatcttttatagcygttttctcattaatacatgtcttttaagtcactaatatactgatggctttccattacagatttttttttttttttttttttgagactgagtcttggtctg

SEQ ID NO: 251054 - DNA, 201 bp, Homo sapiens; identical to SEQ ID NO: 49456

SEQ ID NO: 251055 - DNA, 201 bp, Homo sapiens; identical to SEQ ID NO: 49450

SEQ ID NO: 251056 - DNA, 201 bp, Homo sapiens
cctgtctctactaaaaatacaaaattagctgggtgtggtggtgcatgcctgtaattccagctactcgggaggctgaggcagtagaatcacttgaaccaggyaggtggaggttgtggttgaggtgagccgagattgcgacactgcactccagcctgggcaacgagcaaaactgcatctgaaaaaaaaatttttttaatatat

SEQ ID NO: 251057 - DNA, 201 bp, Homo sapiens
tacagttaaagtcaagtagtacccttagagatctgtttcccagaagtgactgcctttaacatttctagctatttccctattatttaatatctccatattakttatttatgaagtaaaaccacctagctgaatgttttgttttattcatcctaaacatcctttgtattgacttttaccattgtgggtaaggatttctctctc

SEQ ID NO: 251058 - DNA, 201 bp, Homo sapiens
agtaggaggtggctggggtgtggtggctcacgcctggctcacgcctgtaatcccggcactttgggaggccgaggctggcggatcacgaggtcaggagttcragaccagcctgaccaacgtggtgaaaccccatctctactaaaaaaaatacaaaaagtagctgggcctggtggcgcacacttgtaatccagctactcagga

SEQ ID NO: 251059 - DNA, 201 bp, Homo sapiens
tagttagccaactctctgttaagatagtaggaggtggctggggtgtggtggctcacgcctggctcacgcctgtaatcccggcactttgggaggccgaggcwggcggatcacgaggtcaggagttcgagaccagcctgaccaacgtggtgaaaccccatctctactaaaaaaaatacaaaaagtagctgggcctggtggcgc

SEQ ID NO: 251060 - DNA, 201 bp, Homo sapiens
ttctagaccatctacctcatctagaaggagagcaattagtgagacaggtatatatgaatatttatttgacgcattcacacagctttttgatattctttctstaatgaaattagtgcttttagacttaattaaattgttccctttttttggttgagatgaattaacctctgagtttttttcattcgtgattttatttgattt

SEQ ID NO: 251061 - DNA, 201 bp, Homo sapiens
agatttttgtcattagagaaattttaaagtaaaacctgaaaattccaggctttttgctccatgtttccttttagattttttgtgtgcgtacccacatatawttacatttgaatttaaatctatgttattgtcctgtttgttgtactaacaagatgaaactgtagttgttctgtgacttgcatccttgtcaataaataaagt

SEQ ID NO: 251062 - DNA, 201 bp, Homo sapiens
tgctaatttatctaacagtcttttaatgtcttgattatactttactcttctacattaaagttgaattattttatttacatctgcaacatttagtatgaggwtgccacctggaaaatacatgtttaatgtttattgaaaggttaaattgcataagggtttgtgttagactgatagcatatctactgagtagcgccccgccgc

SEQ ID NO: 251063 - DNA, 201 bp, Homo sapiens
aatgtaatccattatcttgaatagttaacctttcttgtgtgtatggttaaaatacctaaaatctattcttttagtaaatttccagtataccaatatataactaactatagtcctcatgctgtttacagtgactattttatataaaacatgaaacactgaatattgagccctatgatatactttaccttagacatagcaaag

SEQ ID NO: 251064 - DNA, 201 bp, Homo sapiens
taagcgtggttgaagttacgtttgttacgtgactgatttttttttcctttttgacctcccagtatttaatttttaaaaatggtttctaaaagtcaaaaaarttattcgtgcttgttttaaagatttttgtcattagagaaattttaaagtaaaacctgaaaattccaggctttttgctccatgtttccttttagatttttt

SEQ ID NO: 251065 - DNA, 201 bp, Homo sapiens; identical to SEQ ID NO: 49460

SEQ ID NO: 251066 - DNA, 201 bp, Homo sapiens; identical to SEQ ID NO: 49461

SEQ ID NO: 251067 - DNA, 201 bp, Homo sapiens; identical to SEQ ID NO: 49462

SEQ ID NO: 251068 - DNA, 201 bp, Homo sapiens; identical to SEQ ID NO: 49463

SEQ ID NO: 251069 - DNA, 201 bp, Homo sapiens
gctgggaggtcaggactgtagtgaactgtgatcatgccatccagtccaggtgacagagcaagacctcatctcttaaaaaagacaaaaacaaaacaaaacawaaaaacacctctcaggagcttgtttagttcctagaatgaattgaccactcccttgtacttcctctattccatattcagattttattgtaaaattgctttg

SEQ ID NO: 251070 - DNA, 201 bp, Homo sapiens
caaaagaaaaagtgtagggtactgaagaaattgaaacattaagaataccatatgagtaaattaaacactttggctcttttcggaaaaaaacagatgagctyttatattttaaagtttggttttgacagaaaaaaattcctagattttttggttaataaaaactttattagatagattaaattgtgatgtatggagataaag

SEQ ID NO: 251071 - DNA, 201 bp, Homo sapiens; identical to SEQ ID NO: 49464

SEQ ID NO: 251072 - DNA, 201 bp, Homo sapiens
aagtgatctgcccaccttggtctctcaaagtgctgggattacaagcatgagtcactgcccagctgaatttgtacattttgatgttattttggaaaatttcrgtgtatctccagtatactcatcacccagctttaactattaccaacattttgccaaccttgtcaaacgtaaacttttttttttttcaattgagatagggtc

SEQ ID NO: 251073 - DNA, 201 bp, Homo sapiens
caagtgatctgcccaccttggtctctcaaagtgctgggattacaagcatgagtcactgcccagctgaatttgtacattttgatgttattttggaaaatttmagtgtatctccagtatactcatcacccagctttaactattaccaacattttgccaaccttgtcaaacgtaaacttttttttttttcaattgagatagggt

SEQ ID NO: 251074 - DNA, 201 bp, Homo sapiens; identical to SEQ ID NO: 49466

SEQ ID NO: 251075 - DNA, 201 bp, Homo sapiens
tcaagtgatctgcccaccttggtctctcaaagtgctgggattacaagcatgagtcactgcccagctgaatttgtacattttgatgttattttggaaaattycagtgtatctccagtatactcatcacccagctttaactattaccaacattttgccaaccttgtcaaacgtaaacttttttttttttcaattgagataggg

SEQ ID NO: 251076 - DNA, 201 bp, Homo sapiens
cttcaatgtaagattacaaatgctattatcttttatagctgttttctcattaatacatgtcttttaagtcactaatatactgatggctttccattacagatttttttttttttttttttttgagactgagtcttggtctgttgcccaggctggagtgcagtggcatgatctcggctcactgcaacctctgcttcctgggtt

SEQ ID NO: 251077 - DNA, 201 bp, Homo sapiens
ttagtagagatagggtttcaccatgttgtccaggctggtcttgaacttctgacctcctgatctgcctgtcttggcctcccaaagtgctgggattaaaggcrtgagccactgcgcctggcccacacctgggtaatttttgtatatttaatagagacggagtttcactgtgttggccaggctggtctcacactcctgacctca

SEQ ID NO: 251078 - DNA, 201 bp, Homo sapiens
ttttatctaatttgaagctaatatagcatataataaaaattcaggagaaaaaaggttatttttaaatcttttttgagagagtccattctttagcctgaaartaaagtgcatatgtaagcacagttaaaaaaaaaaaaagtgatcagaaaaattaataattcaattctatatgtattttaaatttttcaattgttaaataat

SEQ ID NO: 251079 - DNA, 201 bp, Homo sapiens
tttccttacatatccagaagaaaattcagatgaattatctggtgaacgacaaagaaaacgccacaaatctgatagtatttccctttcctttgatgaaagcytggctctgtgtgtaataagggagatatgttgtgaaagaagcagtagcagtgaatctacagggacgccatcgaatccggtaatgttctcattttaagtaag

SEQ ID NO: 251080 - DNA, 201 bp, Homo sapiens
taactgcgtggagttaaaaactgttaagaactggtcagtatttttttagccatttgccacatttgctttaaaaattagttccattacattgttaagcgtgrttgaagttacgtttgttacgtgactgatttttttttcctttttgacctcccagtatttaatttttaaaaatggtttctaaaagtcaaaaaaattattcgt

SEQ ID NO: 251081 - DNA, 201 bp, Homo sapiens
gcatataataaaaattcaggagaaaaaaggttatttttaaatcttttttgagagagtccattctttagcctgaaagtaaagtgcatatgtaagcacagttaaaaaaaaaaaaagtgatcagaaaaattaataattcaattctatatgtattttaaatttttcaattgttaaataatatttgttttattgattagctggaaa

SEQ ID NO: 251082 - DNA, 201 bp, Homo sapiens
ctcaccctttttccctttccattgacttgggacagtccttgtcaaagtgccaatcacagtgggaaggaggagaaggggggaggtcacagtgcatgggattyaaggtcacagtgggcggagcaacggggatcaccaggcaagtaagtcaagttcccgctgctcaagtccagctgtctgccacggtagtgcaacccttggcgg

SEQ ID NO: 251083 - DNA, 201 bp, Homo sapiens
agtcaaggtagatatggttcttgccttcattgggagatagatcattaatgacaaaaatgaaaacatttaataaatccagtggaaaaaataggctcttgagmggaaatatatgtgataaaattgaatccaattaaaacttgatgagtatccaacctacaagtttggttaaaaagagaattattataccctatttatttattt

SEQ ID NO: 251084 - DNA, 201 bp, Homo sapiens
atttcggacggctctcgcggcggtgggggtgggggtggttcggaggtctccgcgggagttcagggtaaaggtcacgggggccgggggctgcggggccgctkcggcgcgggaggtccggatgatcgcaggtgcctgtcgggtcactagtgtgaacgctgcgcgtagtctgggcgggattgggccggttcagtgggcaggttg

SEQ ID NO: 251085 - DNA, 201 bp, Homo sapiens; identical to SEQ ID NO: 49458

SEQ ID NO: 251086 - DNA, 201 bp, Homo sapiens; identical to SEQ ID NO: 49459

SEQ ID NO: 251087 - DNA, 201 bp, Homo sapiens
tttagtagagaaagggtttcaccatgttgaccaggctggtctcaaactcctgacctcaggtgatcctcccaccttggcctcccaaagtgctgggattacargtgtgagccactgcacccacccagcctagggcttcctttttattacatcttttttgtagcatctgtttatactaatccaaaattcctggacaatataacc

SEQ ID NO: 251088 - DNA, 201 bp, Homo sapiens
cattgttaagcgtggttgaagttacgtttgttacgtgactgatttttttttcctttttgacctcccagtatttaatttttaaaaatggtttctaaaagtcaaaaaaattattcgtgcttgttttaaagatttttgtcattagagaaattttaaagtaaaacctgaaaattccaggctttttgctccatgtttccttttaga

SEQ ID NO: 251089 - DNA, 201 bp, Homo sapiens
tctcctgacctcgtgatccatccgcttcggcctcccgaagtactgggattacaggtgtgagccactgcgcccagccaaaagtagcttctaagtacaaaatsgttgttctacatagttgtggatatggttcctggttgtttacccctattcagataaataggatattattaaatgtatttacaactaacatttagttttctt

SEQ ID NO: 251090 - DNA, 201 bp, Homo sapiens
aaggcagtaagcaggtaatataaatagctgaaggaaaaagtaatctttgctcttttggattggatactatctgtgatcacaactgatacttgatgattccrtgatacttgcataatgattagatcctccccagcattttttccaaatcccctttattgaacttgatggatatgtttgctgcagggcctatagttctgggat

SEQ ID NO: 251091 - DNA, 201 bp, Homo sapiens
aaaaatctgttttgtgtataattgagacatataacgtgatgttttgacacacatgtaaatagtgaaatgatcactacagtcaagcaaattaatgtaatccrttatcttgaatagttaacctttcttgtgtgtatggttaaaatacctaaaatctattcttttagtaaatttccagtataccaatatataactaactatagt

SEQ ID NO: 251092 - DNA, 201 bp, Homo sapiens
ctttttctttggttttatgagctgtgaaaaacccccttctataacttgaaaaaagaagaatgaatagtctatctttattgctcctgtcttaacatcatttrtgaggcaatctcaaaatggttacggaaatacctcttacttaagagttttcacttgttaaatgtcctcaggcaagaaccatgcttcagctaaggcaagaag

SEQ ID NO: 251093 - DNA, 201 bp, Homo sapiens
tggtacattgttgcttcaaaactctctctctctctctctgtctgtctcaataaatggccaaagggattagtagtttacctgtggaggtcctccaagcattrtttggagttgataatacttcagctacaaccaagcagaatctcttttttttggaggtcctcgaagcattatttggagttgataatacttcagcttcaattt

SEQ ID NO: 251094 - DNA, 201 bp, Homo sapiens
gggacccccgactccaagcgcgaaaaccccggatggtgaggagcaggtactggcccggcagcgagcggtcacttttgggtctgggctctgacggtgtcccytctatcgctggttcccagcctctgcccgttcgcagcctttgtgcggttcgtggctgggggctcggggcgcggggcgcggggcatggggcacgtggctttg

SEQ ID NO: 251095 - DNA, 201 bp, Homo sapiens
ttttttttttacaattttttttctgctcatcagctattgttagtgtattttatgtgtggcccaagacaattcttccaatgtcgcccacggaaaccaaaggrttggatacattttttggtaatatggcagtgtctcatggccattattctgggtattagtaatcattgtatagtactctagaagatgtaggaagtggaacca

SEQ ID NO: 251096 - DNA, 201 bp, Homo sapiens
actgaaagaagtttggtaaaaaatttttttgttaacaagaatgcttgacaaatggaatattttgttttgtatgtctttaatcaagcttgtccaacccatgscctgtgggccatatgccaggatggctttgaatgtggcccaacacaaattcataaactttcttaaaatattatgatttttttttttacaattttttttctg

SEQ ID NO: 251097 - DNA, 201 bp, Homo sapiens
tttcccactgctggacagcaatctgtccaatccacagtcacataagaatattcctttaaggccgatgcctgcttagccagttaaatccaaagacagtgttygtaggaaagggccaggttaaatggtatttttaaggctaatttgggattgaccttattatcattggataatcagttaaggaaacaaaaaagtatggattta

SEQ ID NO: 251098 - DNA, 201 bp, Homo sapiens
gcaggtttattattgcatggatgacgggagagtatcagtactttctcattactaatacagacttccaaaatattagtgagcagcatttcttaagagatgtyactgaaagaagtttggtaaaaaatttttttgttaacaagaatgcttgacaaatggaatattttgttttgtatgtctttaatcaagcttgtccaacccatg

SEQ ID NO: 251099 - DNA, 201 bp, Homo sapiens
atggagttgggaagagatgtacacagtttgctttttttttttttttttttttgagaaggaatcttgctctgtcactcaggctggagtgtagtggcatgatytcgactcactgcaacctccgcctcccaggttcaagcaattcttctgcctcagcctcccgagtagatgggactacaggcgtatgccaccacgcccggctaa

SEQ ID NO: 251100 - DNA, 201 bp, Homo sapiens
ggctggagtgcagtggtgcgatctcggatcactgcaacctctgcttcccgggtttaagtgattctccttcctcagcctcccgagtaggtgggattacaggygcctgccaccacgtccggttaatttttgtatttttagtagagaaagggtttcaccatgttgaccaggctggtctcaaactcctgacctcaggtgatcctc

SEQ ID NO: 251101 - DNA, 201 bp, Homo sapiens
ttagccaactctctgttaagatagtaggaggtggctggggtgtggtggctcacgcctggctcacgcctgtaatcccggcactttgggaggccgaggctggmggatcacgaggtcaggagttcgagaccagcctgaccaacgtggtgaaaccccatctctactaaaaaaaatacaaaaagtagctgggcctggtggcgcaca

SEQ ID NO: 251102 - DNA, 201 bp, Homo sapiens
aatcccggcactttgggaggccgaggctggcggatcacgaggtcaggagttcgagaccagcctgaccaacgtggtgaaaccccatctctactaaaaaaaawacaaaaagtagctgggcctggtggcgcacacttgtaatccagctactcaggaggttgaggaaggagaatcacttcaacccgggaggtagaagttacagtg

SEQ ID NO: 251103 - DNA, 201 bp, Homo sapiens
gaggctgaggcaggagaatcgcttgaacctgggatgtggaggttgcagtgaaccaaggtcgcaccactgcactccagcctggggtacagagtgagactccmtctcaaaaaaaaaaaaaaaagaaaagaaaaaaaagtcttagagttcttaacattatcctagtaactccatttctagtaatctatcctaaggatgtaataa

SEQ ID NO: 251104 - DNA, 201 bp, Homo sapiens
ctgaggcaggagaatcgcttgaacctgggatgtggaggttgcagtgaaccaaggtcgcaccactgcactccagcctggggtacagagtgagactccatctyaaaaaaaaaaaaaaaagaaaagaaaaaaaagtcttagagttcttaacattatcctagtaactccatttctagtaatctatcctaaggatgtaataaaaaa

SEQ ID NO: 251105 - DNA, 201 bp, Homo sapiens
cgggaggctgaggttgaggtgggaggatcacttgagcccatgaggcagaggttgcagtgagccgagattgtgcctctgtactccagcctgggtgacagagyaagaccctttctcagacaataaataaataaacaaataaataaatacacacagatagtgttctgctgtaacagttggacagattcaataaaacagtgttaa

SEQ ID NO: 251106 - DNA, 201 bp, Homo sapiens
ggtgggaggatcacttgagcccatgaggcagaggttgcagtgagccgagattgtgcctctgtactccagcctgggtgacagagcaagaccctttctcagamaataaataaataaacaaataaataaatacacacagatagtgttctgctgtaacagttggacagattcaataaaacagtgttaacttttgaactaatttta

SEQ ID NO: 251107 - DNA, 201 bp, Homo sapiens
tttaatcaagcttgtccaacccatgccctgtgggccatatgccaggatggctttgaatgtggcccaacacaaattcataaactttcttaaaatattatgatttttttttttacaattttttttctgctcatcagctattgttagtgtattttatgtgtggcccaagacaattcttccaatgtcgcccacggaaaccaaagg

SEQ ID NO: 251108 - DNA, 201 bp, Homo sapiens
gcctaaaataatttcttaataactcgtgtggagtagaggggtatttctttttttctttttgttagtcctgtcctgcattctcttaaaaaatcctatctataaaaaatctcagccgggcgtggtggctcatgcctgtaatcccagcactttgggaggcccaggcgggcggatcacctgaggtcaggagttcaggaccagcct

SEQ ID NO: 251109 - DNA, 201 bp, Homo sapiens
tagtaaggataattaaaggtggaagagccttttcagttatggtattgacaaaggcttagtcaaagaaggatgaataggattttgaaactgaaattattctrgttagagggggaaagtgtggaagttgaaatgccaagattagttgaggaagcaatctagatctggcgggattatccatatttagtaagggaggaggggtgt

SEQ ID NO: 251110 - DNA, 201 bp, Homo sapiens
acatggtgaaaccctgtctctaccaaaaatacaaaaattatccaggcatggtggtgtgcacctttaatcccagctacttggaagctgaagtcacaagaatsacttgaacctgggaggcagaggttgcaatgagctgagaatgtaccactgcactccagcctgggtggtcgagtgtgactctgtctcaaaagaaaaagtgta

SEQ ID NO: 251111 - DNA, 201 bp, Homo sapiens
ttctttttgttagtcctgtcctgcattctcttaaaaaatcctatctataaaaaatctcagccgggcgtggtggctcatgcctgtaatcccagcactttggraggcccaggcgggcggatcacctgaggtcaggagttcaggaccagcctcgccaacatgttgtgaaaacccatctctactaaaaataccaaaaattagctg

SEQ ID NO: 251112 - DNA, 201 bp, Homo sapiens
tttctaaaattattcttttttttgtttgtttgttttgagagggagtcttgctctatggcccaggctggagtgcagtggcatgatcttggctcactgcaacmtccgtctcctgggttcaagtgattctcctgcctcggcttcccgagtagctgggattacaggtgcctgctgccatgcctaatttttgtatttttagtagag

SEQ ID NO: 251113 - DNA, 201 bp, Homo sapiens
aggcaatccgtgttgagccttagcattcattacattaataaatggaatgaatacgttcacctgagacaattaactagcttctgctagtatttaatgctcartagtatagctgaaaagatgataattaaatgggattttattttattaaaaaacataacttcctcagctgagcaagggattttataactttaaaacaacctt

SEQ ID NO: 251114 - DNA, 201 bp, Homo sapiens
cgaactcctgacttcaagtgatctgcctgtcttggcctcccaaagtgctgggattacagacgtgagccactgtgcctggtctgaatattgaatcttcggayaatgtttggaagtatgatttccttggacttgaattctaaatgttgagagataagaaataggagaaattactgacttgaaaaggatatgaattaaaaatat

SEQ ID NO: 251115 - DNA, 201 bp, Homo sapiens; identical to SEQ ID NO: 49567

SEQ ID NO: 251116 - DNA, 201 bp, Homo sapiens
acactttcacagtcggtgccgcatccccagcccgccgccatggccgcctacaaactggtgctgatccggcacggcgagagcgcatggaacctggagaaccrcttcagcggctggtacgacgccgacctgagcccggcgggccacgaggaggcgaagcgcggcgggcaggcgctacgagatgctggctatgagtttgacatc

SEQ ID NO: 251117 - DNA, 201 bp, Homo sapiens; identical to SEQ ID NO: 49569

SEQ ID NO: 251118 - DNA, 201 bp, Homo sapiens; identical to SEQ ID NO: 49570

SEQ ID NO: 251119 - DNA, 201 bp, Homo sapiens
ttcacaagagtactcagaaaaactaacaatagcagctgttttgcaaaaagtgcaaaagaaggttgaaagaatgagaacaacaaacagattgtgaaaattcrccacgttaactcttggaatagaagctgtaaatgtttcgatacaaaggggactcctctacaattcatctgcttatcctttaggaccagagtacatgacaaa

SEQ ID NO: 251120 - DNA, 201 bp, Homo sapiens; identical to SEQ ID NO: 49571

SEQ ID NO: 251121 - DNA, 201 bp, Homo sapiens; identical to SEQ ID NO: 49572

SEQ ID NO: 251122 - DNA, 201 bp, Homo sapiens; identical to SEQ ID NO: 49573

SEQ ID NO: 251123 - DNA, 201 bp, Homo sapiens
tctttcctatagctgccaaggagcctggagccagggtccctgtgctttaggcaggcacttctcacagcctcggagaagtccaggagctaggtcaaggcagrgggttgggggccacagacaaggccaaggcggggcatggaacagcaggggtcagatgttaggggaagtacgtcggcacccgggtggggatcttgaatacta

SEQ ID NO: 251124 - DNA, 201 bp, Homo sapiens
aagcgattctcctgcctcagccacccgagtagctgggattaaggtgtgcaccaccatgtccagctaatttttgtatttttagtagagagggggtttcgccwtgttggccaggctggtctcgaactcctgacctcaagtcttaagtgatctgcctgcctcggcctcccaaagtgctggggttacagacgttagccactgtac

SEQ ID NO: 251125 - DNA, 201 bp, Homo sapiens
cttctttgagcctattttctcaactaaaaaattaaagatctggatatggtggctcatacctgtaatcccagcaactcagggtgctgaagtggctggatagmttgaggtcagaagttcaagaccagcctgggcaacctagccagaaccatctctaaaaaagtttaaaaacatccaggtgtgctggcacaggcctgtagtccc

SEQ ID NO: 251126 - DNA, 201 bp, Homo sapiens
gtggaatccttgctcagtgcagcctcaaacttctgggctcaaataatcctgccacctcagcctttggactataaactacatgccactgtgcccagttaatytttaaaataaaaaaaaaaaaattccccctagcaagcagactcagaaagaaaaaaacaaatttttgtagagacagtgtttccttttgttgcccaggtttca

SEQ ID NO: 251127 - DNA, 201 bp, Homo sapiens
ttttggacatggcgaatctcagatgcctatacatactagtggagaggtccagagggcgttgaatatacagaagtggggtgagaagaatcaaggcctaaggygataaccgaagacatgaactcaactagggaatgagaagattgaggagaaaaccctgaagggacctttcctttgcctcccacaccagcatatgtgggagcc

SEQ ID NO: 251128 - DNA, 201 bp, Homo sapiens
tactatcaacatgttgtctggtttgctttaacacttgttatccagggctttggtcttttggtgagatagagtacaaagtcaacactctatccacaagttgygcatctgcggattcaacctagaatcaaaaatacttgggaacaaaaaccaactttaaaaattcaaataaaaaaatacagtataggccgggcgtggtagctc

SEQ ID NO: 251129 - DNA, 201 bp, Homo sapiens
cttttgcccatgctggagtgtagtggtggaatccttgctcagtgcagcctcaaacttctgggctcaaataatcctgccacctcagcctttggactataaamtacatgccactgtgcccagttaatctttaaaataaaaaaaaaaaaattccccctagcaagcagactcagaaagaaaaaaacaaatttttgtagagacagt

SEQ ID NO: 251130 - DNA, 201 bp, Homo sapiens
ccttcctgggcctattcagttacctggtctctctctcataatggcctttgcctgccttacactggcttgagaccttatttagtcaagactgggtgcttctstgtggccaccctgcttttgtttttagatagtgcagttctttaacagagatctttagcctgccacagagaagggcagccaggctggtggtctggttagtgt

SEQ ID NO: 251131 - DNA, 201 bp, Homo sapiens
gatccacccgcctcggcctcccaaagtgctgggattacaggcgtgagccaccgtgcctggccgagaatctctgtagttctgacaacctcctgggaacattyatttcattctcagagaagtggccccttcctgggcctattcagttacctggtctctctctcataatggcctttgcctgccttacactggcttgagacctta

SEQ ID NO: 251132 - DNA, 201 bp, Homo sapiens
cttctagtcccagctacctgggaggctgaatggaaaggatagcttgagcttgggaggtggagtttgcagtgagctgagatcacaccactgccctccagccyggacgttagagcgagactctgtctcaataaataagtaaataaataagctgggtgtggtgacatgtgcctgtagtcccagctactcgggattgctccagtc

SEQ ID NO: 251133 - DNA, 201 bp, Homo sapiens
tagcttgagcttgggaggtggagtttgcagtgagctgagatcacaccactgccctccagcctggacgttagagcgagactctgtctcaataaataagtaartaaataagctgggtgtggtgacatgtgcctgtagtcccagctactcgggattgctccagtccaggagttcgaagctgcaatgagccatgaatgggccact

SEQ ID NO: 251134 - DNA, 201 bp, Homo sapiens
gcctcggcctcccaaagtgctggggttacagacgttagccactgtacccagcctcaacttgtcttattattattattattttttgagacagggtctcgctytgttacccagactggagtgcagtggcactatatcagctcactgcaacctccgcctcccgggttcaggtgattctcatgtcttggcctcccaagtagctga

SEQ ID NO: 251135 - DNA, 201 bp, Homo sapiens
gagccttctcatgcgtgctgggtaatctgcgagaggccaacaggtcattgggcattaagcccaggaaacctgccttagaccctggtggcagcaggccaccwggttcctcttgtcaagtccagacttgcttgcttgatcccttggaaatttgattataaagagcattgccctggtagcttgtggtttgacactcagattgaa

SEQ ID NO: 251136 - DNA, 201 bp, Homo sapiens
agttcgagaccagcctggccaatacagtgaaaccccgtctgtactaaaaatacaaaaattagccgagcgtggtggcgggcgcctgtagtcccagctactcrggaggctgaggcaggagaatcgcttgaacctgggaggtggaggttgtggtgagccaagattgcgtcattgccctccagcctgggcaagaagagtgaaact

SEQ ID NO: 251137 - DNA, 201 bp, Homo sapiens
agttttgccatgtcccccaggctggtctcgaactcctggactcaagcaatctgcttgcctcagcctcccaaagtgctgggattaacaggcatgagccaccrcacgcaaccagatgtttttttttaaggcccaaatggattatactatcaacatgttgtctggtttgctttaacacttgttatccagggctttggtcttttg

SEQ ID NO: 251138 - DNA, 201 bp, Homo sapiens
catagtgctgtacacaggtgagtttgtttaggaagatttggggaagatgcctggagtctttggaatggcaactcctgctgatggagtaatctatctgtctstctttccaggtggatgggaagagagtcccaagggatgcagggcatcctctgtacccctttaatgacccgtactgagaccacagcttcttggcctcccttc

SEQ ID NO: 251139 - DNA, 201 bp, Homo sapiens; identical to SEQ ID NO: 49586

SEQ ID NO: 251140 - DNA, 201 bp, Homo sapiens
ttcatattttttgtagagactaagttttgccatgtcccccaggctggtctcgaactcctggactcaagcaatctgcttgcctcagcctcccaaagtgctgrgattaacaggcatgagccaccacacgcaaccagatgtttttttttaaggcccaaatggattatactatcaacatgttgtctggtttgctttaacacttgt

SEQ ID NO: 251141 - DNA, 201 bp, Homo sapiens
tgatctcagttcagactgcaaactcttaggggcaggggtagctacatatcaggctatgggtttggtgctagaatggtgttgatactgtggtgttctctgakgatggggatcccagccaatgccatctggcatagtgctgtacacaggtgagtttgtttaggaagatttggggaagatgcctggagtctttggaatggcaac

SEQ ID NO: 251142 - DNA, 201 bp, Homo sapiens
tatcaggctatgggtttggtgctagaatggtgttgatactgtggtgttctctgaggatggggatcccagccaatgccatctggcatagtgctgtacacagrtgagtttgtttaggaagatttggggaagatgcctggagtctttggaatggcaactcctgctgatggagtaatctatctgtctctctttccaggtggatgg

SEQ ID NO: 251143 - DNA, 201 bp, Homo sapiens
attgtgctgctatctacggcaatgagcctgagattggggaggccctgaaggaggacgtgggaccaggcaaggtaaggactggggttgtaaatagaggtggrataagagaacttagaagctgaagctagggctggggcccagctggagggaatctggcatcagcttccttccagttcctctcccagagttgagggtgggtga

SEQ ID NO: 251144 - DNA, 201 bp, Homo sapiens
aaagggagaagcaagattcaggtttcttcttccttttccccttaagccagggtgttgttcaagctctcaccccaggtgtaatttcagagccttctcatgcrtgctgggtaatctgcgagaggccaacaggtcattgggcattaagcccaggaaacctgccttagaccctggtggcagcaggccaccaggttcctcttgtca

SEQ ID NO: 251145 - DNA, 201 bp, Homo sapiens
ctgcaagttttaattgccatctttttgtttgctcacctatgtgctttttccagctgctccggctttcttatgcaggtgcagggatagttctcagaagtggrgagaagtggggataattctcttacttagacacctgctttgggtctgagaaagtctgacatgttattctgttgccccagaactctgttaaagtaagacaca

SEQ ID NO: 251146 - DNA, 201 bp, Homo sapiens
accctgacctcaggtgatccgtcgcatcagccttccagagtgctaggattacaggcgtgagccaccactcctggccacaacttgtcttattacttgctctrtcctacatccttttagaacctggaaactaagattatatttataaagatattgttggcaattaaatcaatcccaagagtgatattcatggtactgatgaga

SEQ ID NO: 251147 - DNA, 201 bp, Homo sapiens
tagtagagatggggttttaccatgttgacccaactggtcttgaactcttgacctcaggtgatctgcccgcctcagcctcccaaagtgctgggattacaggygtgagccactgcacttggcgctttgcagtattcttgacagtggaaatctgagacctgaacaacagcactaaccccaacaccattctcttcccatctgtgt

SEQ ID NO: 251148 - DNA, 201 bp, Homo sapiens
caacaagagtgaaactgtgtctaaaaaaaaaaaaaattataacacctatttacctagcatttagcatttatattgtattaggaattataagtatttagagktgattaaaatatacaggaagatgtacttaggtttatgcaaatactatgccattttatataagggactggagcatcccaggattttggtatctgaaggggt

SEQ ID NO: 251149 - DNA, 201 bp, Homo sapiens
tttgcagtattcttgacagtggaaatctgagacctgaacaacagcactaaccccaacaccattctcttcccatctgtgtttcagggggcaatggcggcttyctgtgttctactgcacactgggcagaagatgcctctgattggtctgggtacctggaagagtgagcctggtcaggtgagggatgggggaagaaaaaagaaa

SEQ ID NO: 251150 - DNA, 201 bp, Homo sapiens
tgcgtagccccacagcctaaactgtttcctctgtactctactgctggatttgatgagtacagttttggacatggcgaatctcagatgcctatacatactastggagaggtccagagggcgttgaatatacagaagtggggtgagaagaatcaaggcctaaggtgataaccgaagacatgaactcaactagggaatgagaag

SEQ ID NO: 251151 - DNA, 201 bp, Homo sapiens
cgaagacatgaactcaactagggaatgagaagattgaggagaaaaccctgaagggacctttcctttgcctcccacaccagcatatgtgggagccagaggasaggcccatgcagctaggaaacactcatgtagatattgtttcctttttttcctgtgtcttctacttccctgcagccaggcagcaactgtagagccctttga

SEQ ID NO: 251152 - DNA, 201 bp, Homo sapiens
tctgataatactcataaatgcctgcaaggaactacaaatactttctttagatggcttttatttatttattttttagacagggtttcagtctgtggcccaarctggagtgcagtggtgtgatttcagctcattgcaacctctgccccccaggctcaagggatcctcctgcctcagccccctgagtagctaggaccatagaga

SEQ ID NO: 251153 - DNA, 201 bp, Homo sapiens
gagtgatattcatggtactgatgagatcaagggaaaaggttgtatctacctcattggctcttggtgtgaacattctctctccttttctttcacttgaatarctcctgttcagttattctttaggacttgactcaggaagagattcctccaagaagccatcctagcaaggttacccttttcttgccacccttgtgcagctct

SEQ ID NO: 251154 - DNA, 201 bp, Homo sapiens
catgttggccaggctggtaataccctgacctcaggtgatccgtcgcatcagccttccagagtgctaggattacaggcgtgagccaccactcctggccacarcttgtcttattacttgctctatcctacatccttttagaacctggaaactaagattatatttataaagatattgttggcaattaaatcaatcccaagagtg

SEQ ID NO: 251155 - DNA, 201 bp, Homo sapiens
aaagaagtataggagaaagccaggtgtggtggctcacacctgtaatcccagcactttaggaggccaaggtgggagggtcacttgaggctagaagtttgagrgggcaacacagtgagaccctatctctacaaaagaaaaataaggccaggcatagtggctcacacttataatcccagcactttgggaggctgaggcagaagg

SEQ ID NO: 251156 - DNA, 201 bp, Homo sapiens
aggtccttcctcgggaggcggcgaaggcggtccaccctgcgcgtgatccttcatgcccggcccctgcccctccctccgggtggaacttccccctcaccgcyagacttaagctgaggatcgttggatctctggcggggtgcagaactgagcccaggccacagtaccctattcacgctctgtgcttgtgccaaggtgagtttc

SEQ ID NO: 251157 - DNA, 201 bp, Homo sapiens
agtcaagagctggccgaggatgattttctgtcctagagaaaaacatctatgtggcaccttcattcttccctagggagctcttgttctttgcagatctcctscatctttcatccctgttccccaagcctcagccttttcggtgttcagtttcaccagcaaaagaaagggagaagcaagattcaggtttcttcttccttttcc

SEQ ID NO: 251158 - DNA, 201 bp, Homo sapiens
aaagataacatgagggtttctgaatgctgccaaaggtccagataggcagttcctgacaagctcagagtctggaatctgttcacgcacagctaggctggaargcagttgtatcaagcagaagatgaggaagtcaagagctggccgaggatgattttctgtcctagagaaaaacatctatgtggcaccttcattcttccctag

SEQ ID NO: 251159 - DNA, 201 bp, Homo sapiens
gccatgatcacaccactgttctccaacctaggagacagaaccagaccctgagtctaaaaaagagttccttttttaggactccctttacctcccttgcaggmgcccactcgggcctaccagcatggctgaccagacctctgtgaaaggtacttggagaatctctgcagttctttttttttttttttttttgagacaaagtct

SEQ ID NO: 251160 - DNA, 201 bp, Homo sapiens
cagctcactgcaacctccgcctcccgggttcaggtgattctcatgtcttggcctcccaagtagctgagattacaggcatgtgccaccacgcccagctaatttttttttttttttttttttgagatggagtcttgctctgtcacccaagccggagtgcagtggctcaatctcggctcactgcaacctccacctcccgagttc

SEQ ID NO: 251161 - DNA, 201 bp, Homo sapiens
tgcagctaatgaggtcctgccacaacggaaagagggagttaataaagccattggagcatccatattgcttgcttgtcttatttgcctggtcaggcctgagwtggaggctgtttccctcagggatgacagacctcgggctgctggatgtgacctgcccttgaagcccaaatattcatatcctggttctggaggaacctgtga

SEQ ID NO: 251162 - DNA, 201 bp, Homo sapiens
ttttcagtaaagatggggtttcgccatgttggccaggctggtaataccctgacctcaggtgatccgtcgcatcagccttccagagtgctaggattacaggygtgagccaccactcctggccacaacttgtcttattacttgctctatcctacatccttttagaacctggaaactaagattatatttataaagatattgttg

SEQ ID NO: 251163 - DNA, 201 bp, Homo sapiens
taactctggaaaaaggaaggcagtctcacatggtgtgtaccccagggtatgcacctgtaaccctcctgctccctttattcatttagaaaaggtgctgactyttctgttgagcacctggggttacagtaataagtaagtctcagcagaagatgtgagaagagctcaccattagtgccgtgccctgtgctggaagaagggtgg

SEQ ID NO: 251164 - DNA, 201 bp, Homo sapiens
agtctccctctgtcacccaggctggagtgcagtggcatgatctcagctcactgcaacctccgcctcccgggttcaagcaattctcctgcctcagcctcccmagtaagtagctgggattataggcacccgccaccatgcccggctaatttttctatttttagtagagacggggtttcgctatgttgaccagggctggtctcg

SEQ ID NO: 251165 - DNA, 201 bp, Homo sapiens
catgccaccacgcctagctaatttttgtattttttggtagaaatggggtttcactctgttggccaggctggtctctaacttttgacctcaagtgatttgcytgccttggccttcctatgtgcttgtattacaggtgtgaggcacagcgcccggtctaacttcacttctttgagcctattttctcaactaaaaaattaaaga

SEQ ID NO: 251166 - DNA, 201 bp, Homo sapiens
actgacccagcacagctgtgagggtgatgacaggcaggttagcaggtgcgcacagaggggctttcttctaaattggaggtcaggttagatgattcagctcygcagagctcattcagtgctccgtcttctggtggcttcccttgatttctaataaaagctgcagatggagtcactcagttccacatggctggggaagcctca

SEQ ID NO: 251167 - DNA, 201 bp, Homo sapiens
gctgaaacctctgcttctctcacctggcaggtaaaagcagctgttaagtatgcccttagcgtaggctaccgccacattgattgtgctgctatctacggcartgagcctgagattggggaggccctgaaggaggacgtgggaccaggcaaggtaaggactggggttgtaaatagaggtgggataagagaacttagaagctga

SEQ ID NO: 251168 - DNA, 201 bp, Homo sapiens
aacctggaacttgtttccatggtctatacttcttttctctatttatccatctgtcttctgattgaaaaaaaaaattatttatttttgaaaatttttaaatytttatttatttatttatttatttaattttatttttgagatggagtcttgctctgtcgcccaggctggagtgcagtggcgcaatctcgcctcactgcaagc

SEQ ID NO: 251169 - DNA, 201 bp, Homo sapiens
gatcttggctcactgtaacctccacctcccaggttcaagcgattctcctgcctcagcctcccaagtacccgggattataggcatgcaccaccacgcccagstaattttgtatttttagtagagacggggtttctccgtgttggttaggctggtctcaaactcccgacctcaggtgatccacccacctcggcctcccaaagt

SEQ ID NO: 251170 - DNA, 201 bp, Homo sapiens
cttgacatgggatcttagcctcttctgctacagcagcttagctgtagctacaggagtttaactctggaaaaaggaaggcagtctcacatggtgtgtacccsagggtatgcacctgtaaccctcctgctccctttattcatttagaaaaggtgctgactcttctgttgagcacctggggttacagtaataagtaagtctcag

SEQ ID NO: 251171 - DNA, 201 bp, Homo sapiens
cccccaggctcaagggatcctcctgcctcagccccctgagtagctaggaccatagagacacatcactatgcctggctaattttcatattttttgtagagaytaagttttgccatgtcccccaggctggtctcgaactcctggactcaagcaatctgcttgcctcagcctcccaaagtgctgggattaacaggcatgagcca

SEQ ID NO: 251172 - DNA, 201 bp, Homo sapiens
tcagctcactgcagcctcccccgcctgggttcaagcgattctcctatctcagcctcctgagtagctgggactacaggcatatgccaccatgcacagctaatttttgtatttttagtagagaaaagaatttcaccatgttggccaggctggtctcaaacccctgacctcaggtgattcacctgcctcttcttcccaaagtgc

SEQ ID NO: 251173 - DNA, 201 bp, Homo sapiens
ctcagacctcaaggagtagccaggtttgtgggggaaatttatatataaacagaaaaatgtagtgatgtgcacatgctatcagtacatggaagtagccatcyatttatttatttatttattttctttttagagatggatgggggtctctcggtcttttgcccatgctggagtgtagtggtggaatccttgctcagtgcagcc

SEQ ID NO: 251174 - DNA, 201 bp, Homo sapiens
tactgtggtgttctctgaggatggggatcccagccaatgccatctggcatagtgctgtacacaggtgagtttgtttaggaagatttggggaagatgcctgragtctttggaatggcaactcctgctgatggagtaatctatctgtctctctttccaggtggatgggaagagagtcccaagggatgcagggcatcctctgta

SEQ ID NO: 251175 - DNA, 201 bp, Homo sapiens; identical to SEQ ID NO: 49601

SEQ ID NO: 251176 - DNA, 201 bp, Homo sapiens
ggccccccgtgcgctcccgggcgctcaggaggtaccggggtggccgccgggccgaggagccgttggccccctcaggcttctcctccggccgtcccgggggsggcctctccagcatcttggtgccgggtttgaagcagacgccgccggccttggtgcgcacgaaatactcggtggtgtcctcgggcagcaccaagtccaccc

SEQ ID NO: 251177 - DNA, 201 bp, Homo sapiens
taggacagggtcttgaagaagtgcaggaaggagatgaggcacaggccggccatacagaacatgagaaagagcttgtagcgtctcatcttcatcctgcgggrgagagagagacaggagactcatcagggcagcccaggctcctttcctaggaaggggacctaggaggcctctgctgccaccttgctggacaatgtggtggcc

SEQ ID NO: 251178 - DNA, 201 bp, Homo sapiens
ggcggatgccgtccagcccatacactgcctgcagcatgtccaccgtgcagcctgacaccacctccagggtgcccggctgcttccagaagaagccgtagagygacttgcgcatgtggaaggcgaagggctcggtccagccatcgtagagcttgaggaaaaggacgccgtcacgggccgggatctcgtccgcatcgtcaatga

SEQ ID NO: 251179 - DNA, 201 bp, Homo sapiens
aagtctgcttctctagctagcaaatgtgctttactgcctctcttagtgagcaagatggagatggactgatggcaatccagttaggtgaaataaaaacctgrcttactactgaaagaatcaggcagactgaagagaggtctgtacttatatgccatgtatctctatccctaactttgttcctttcagtaccttaacgtcagg

SEQ ID NO: 251180 - DNA, 201 bp, Homo sapiens
agatattcaaagaagaaaattcaaattccatgaatacagacttttttttttgtttttttttttttttgagacagagtttcactctgttgcccaagatggartacagtggtgcgatcaccgttcactgcaacctctgcttcccgagtttaagcgattctcatgcctcagcctcccaagcatctgggactacaggtacccaac

SEQ ID NO: 251181 - DNA, 201 bp, Homo sapiens
aggcaggaggatcacttgagcccaggagttggaggctgcagccaactatgatcatgccactgcactccagcatgggtgacagagtgagaccccatctcttaaaaaaaaaataattaaaaaaataaaaaaatagcaaatctgaattaactggacttcttaatgaactctatgcgtggagtgtgtgtatgtgtgttttgagaa

SEQ ID NO: 251182 - DNA, 201 bp, Homo sapiens
gctactcaggaggctgaggcaggagaatcacttgaacccaggaggcagaggttgcagtgagccgagatcatgccattgcactccagcctgggtgacagagygagactctgtctcaaaaaccaaacaaacaaaaaacaacagaaaaacaatctatgagcgctgcagttcaacagaaggtaagtgcaaatggaggctagcaga

SEQ ID NO: 251183 - DNA, 201 bp, Homo sapiens
acaattatattcgcagccagagtgctctgataatgaatattagtcactgttaaaatctccttttaccaaggtcttccctctactctggcacttctgcagayaattcacctgcagagtgccagagcagagggatgtaagaaatattgtaccctacgtaaagttgaatgtaagcggtttttacagttcttatgtgtttattta

SEQ ID NO: 251184 - DNA, 201 bp, Homo sapiens
tgaaacaggtttatgctgcttatacatttagttgttattataatagaagataaaattatccagaaccccccttttttttttagacagagtcttgctctgtygcccaggctggagtacagtggtacgatcttggcttactgcagcctccgcctccctagttcaagcaattctcctgcctcagccttccctgtatttaggatt

SEQ ID NO: 251185 - DNA, 201 bp, Homo sapiens
cgtttcatacatttttttttttttttgagacggagtttcgctcttgttgtccaggctggagtgcaatggcatcatctcggctcaccacaacctccacctcstgggttcaagcgattctcctacctcagcatcctgaactagctgggattacaggcatgcgccaccacacccagctaattttgtgtttttagtagagacagg

SEQ ID NO: 251186 - DNA, 201 bp, Homo sapiens
gaatactttgaacaaaatttaaatcgtgttcagaagagaggtttagaggttttttccttcataaattcaacacatgtttacaaaatatccatttcatgttyctctttagtgactgaatctattttgtgttgctgtttcagaatgccatagactgggcaattaataaacagtagaggtttttttggctcctacttctggagc

SEQ ID NO: 251187 - DNA, 201 bp, Homo sapiens
aattcatcagttccaggcagctataagaaaacaatctagccggacacagtggctcacacctgtaatcccagcactttggggaagctaaggcgggcagatcrtgaggtcaggagtttgacaccagcctgaccaacatggtgaaaccctgtctctactaaaaatacaaaaattagcccggtgtaggtgcctgtaatcccagct

SEQ ID NO: 251188 - DNA, 201 bp, Homo sapiens
atcattagaatatttaaatcatgaatgttgaacaaccaatattttaacaatttattgcatagagctactaataatattaaataaaactatggaaaaaaagsacattttactttgtgccaggtatgcttctaagcatagttctacatcttaacttctagtccctgtctacatattttcccttatgtgtagccttagttatac

SEQ ID NO: 251189 - DNA, 201 bp, Homo sapiens
tttagtttgccttttttttttcctgttaaccattttattgagatatgatttacatactacatagttcatccatttaaagtgtactcatttgccctcttttkttgttgttgttgttgttattgaggcagagtctcgttctgtcccccaggctggggtgcagcagtgtgatcatcgctcactgtaaccttgaactcctagact

SEQ ID NO: 251190 - DNA, 201 bp, Homo sapiens
cagtagaaaacatgactttcgctgggcgcggtggctcatgcctataatcccagcactttgggaggctgaggcgggtggatcgcgaggtcaggagattgagmccatcctggctaacacggtgaaaccctgtctctactaaaaatataaaaaaaaattagctgggtgtggtggtgggggcgcctgtagtcccagctactcggg

SEQ ID NO: 251191 - DNA, 201 bp, Homo sapiens
ctttcgctgggcgcggtggctcatgcctataatcccagcactttgggaggctgaggcgggtggatcgcgaggtcaggagattgagaccatcctggctaacrcggtgaaaccctgtctctactaaaaatataaaaaaaaattagctgggtgtggtggtgggggcgcctgtagtcccagctactcgggaggctgaggcaggag

SEQ ID NO: 251192 - DNA, 201 bp, Homo sapiens
tattttctactgtttttcttctcctgcctatttaatggcattatttggcatttgctgtaacttgagtttcatcaaatatgtgtttacttctctggttttakgctaacagcaacaccatgagatagtggtttaaggccatgagaagtattttttttaattgttttctttgaaagcccacattgtttcctttgaacagaatac

SEQ ID NO: 251193 - DNA, 201 bp, Homo sapiens
gtgcctggcctcatttccctttttaatctgctttctgagcttcctgttctctttcaatgaatatcatagagaatgaaaactgattagtatagtatcttgcmgtagaaaacatgactttcgctgggcgcggtggctcatgcctataatcccagcactttgggaggctgaggcgggtggatcgcgaggtcaggagattgagac

SEQ ID NO: 251194 - DNA, 201 bp, Homo sapiens
ctggacatgggctcagattgattgttccaggacctgtctttccagactcaaagcagcccagttggtgagggtgcgaggcctgggatcataaaggagtcaarctggttttttaaaataacagcaaaacttttaaaataaagaaaatctctttcccatatatgaaatactttgttcagatcaagagtagtaattgataaatga

SEQ ID NO: 251195 - DNA, 201 bp, Homo sapiens
ttgttcagatcaagagtagtaattgataaatgatattgcttatgatgctgaattaaatttgtattttaatcaactcaattttgtccaccactcctccatakaaacgctaaggcttaggtcctgctttttaagatgaaatgtctaattgttttgttttatagattggcataaacccgggactaatggctgcttacaaagggc

SEQ ID NO: 251196 - DNA, 201 bp, Homo sapiens
cagtggctaatgggagctgaatttaggcaatacaagggacttatatgggcctgttcatgtctgtaaagttggcatgtctggaatctgattctgacatgccragaattggtgttacatgaaagggcacactaaccaaaataaattagagcttaggaaaagagatatatgtagacaaagtgtggactttatcttgactttgtg

SEQ ID NO: 251197 - DNA, 201 bp, Homo sapiens
aaaaacaacagaaaaacaatctatgagcgctgcagttcaacagaaggtaagtgcaaatggaggctagcagagaaaaaggggtaaacaggaaaatgagggaragtgagaggtagtgaagaatatttgagactaagataaatgatgggggaagaaaagtgaacgaagagaaataaaatcaatcgtgcttgtaagtttaacatc

SEQ ID NO: 251198 - DNA, 201 bp, Homo sapiens
caaaatgattgtctgactggaaatggcagaatgaatatctgtaagacttaaagctcaagaccagtgaaggcatttaggagaagtttcaggtgttctaacasaatcatatgccttggcctgcgtgtgttgtgtttcaagggagaggccagattaaagcagtgttagaggatttgtagcaaatgtaagggacctggaaataaa

SEQ ID NO: 251199 - DNA, 201 bp, Homo sapiens
ggctagcagagaaaaaggggtaaacaggaaaatgagggagagtgagaggtagtgaagaatatttgagactaagataaatgatgggggaagaaaagtgaacraagagaaataaaatcaatcgtgcttgtaagtttaacatcaggaagttatacaaagtagaaagtctttggggtctgttttgagtctagacagatctagtcc

SEQ ID NO: 251200 - DNA, 201 bp, Homo sapiens
taaacaggaaaatgagggagagtgagaggtagtgaagaatatttgagactaagataaatgatgggggaagaaaagtgaacgaagagaaataaaatcaatcrtgcttgtaagtttaacatcaggaagttatacaaagtagaaagtctttggggtctgttttgagtctagacagatctagtcctatttcctatacattgtcca

SEQ ID NO: 251201 - DNA, 201 bp, Homo sapiens
tgcttgtaagtttaacatcaggaagttatacaaagtagaaagtctttggggtctgttttgagtctagacagatctagtcctatttcctatacattgtccayatatgtagaaatcactgaatctaattcctcattttcatggtgagggaatggataccccgagaggataaatgactaaatgctctttgttactgtccttctc

SEQ ID NO: 251202 - DNA, 201 bp, Homo sapiens
atttttgtgtagatgtaatgcttgcttctgccaaggaataagaatgttgtaatccaccatcttttattctggcttttaggcagctgttgaggtaaacaaaytaagtttaatgctcgaagatagtgtattcctcagaactaacacatttgattttccataggtttattttcctttacctgttctaatttaactttttgtaaa

SEQ ID NO: 251203 - DNA, 201 bp, Homo sapiens
ctaacacatttgattttccataggtttattttcctttacctgttctaatttaactttttgtaaaatgccacagtccatttttagaaagattaagggatatwtcattattatagataagtttctaggtttctttcaaacttgatatacctaatataaaagttcagattatttttcctctttatttttcactttttattcagc

SEQ ID NO: 251204 - DNA, 201 bp, Homo sapiens
agatgtatctcagtgtatatgaatattcaagaaaaagaattgttcatgatttctgaataaagctacttttaaaattgttgtacaaaatcagatttaaatcytttttaccttcctcacagaggatgcaaagaagatggctgttaaggaagaaaaatatgatccaggttatgaggcagcatatggtggtgcttacggagaaaa

SEQ ID NO: 251205 - DNA, 201 bp, Homo sapiens
acgttacagctcagcacagtttgtagtgaagaggggcatagaatgaatgccctgaaagcttatggggttggcttctaactcagactgatggctcagaggcygcttcccagagcagagaaataacaccagggctctgaaactccaacaatgtggaggcttcatcccgataaagatcagagtagggacatgtccaggctgagg

SEQ ID NO: 251206 - DNA, 201 bp, Homo sapiens
ttgccataggaccactgctcaagacttccagatctaacctagccatatccaactcatcattagaatatttaaatcatgaatgttgaacaaccaatattttmacaatttattgcatagagctactaataatattaaataaaactatggaaaaaaaggacattttactttgtgccaggtatgcttctaagcatagttctacat

SEQ ID NO: 251207 - DNA, 201 bp, Homo sapiens
aagggacctggaaataaacacgtgggttcctgttcttccagaggtggagtctgtcctctgttgacattgatcctgaacaaaatttttacttaatcaatggktactgagcatttttaaaagaaactaattgaccgggcacagtggctgacgcctgtaatcccagcactttgggaggccaaggcaagtggatcacctgaagtc

SEQ ID NO: 251208 - DNA, 201 bp, Homo sapiens
acacatttgattttccataggtttattttcctttacctgttctaatttaactttttgtaaaatgccacagtccatttttagaaagattaagggatatttcrttattatagataagtttctaggtttctttcaaacttgatatacctaatataaaagttcagattatttttcctctttatttttcactttttattcagccaa

SEQ ID NO: 251209 - DNA, 201 bp, Homo sapiens
ggctgaagctcctaatatggcagttgtgaatgaacagcaaatgccagaagaagttccagccccagctcctgctcaggaaccagtgcaaggtagtttcaccrtgagagcttagaaagttcaacatcggatcagccagcttatttgagaaagggtttcatggtgaattttagctctattttagtgttaaaaagtcaaatccac

SEQ ID NO: 251210 - DNA, 201 bp, Homo sapiens
agcttgcagtgagccaagatcgcgccaccacactccagcctgggcgacagggcgagactccgtctcaaaaaaaaaaaaaaaaaaagaaaaagaaaaagaamacatgactttcctctccaaatagtaaagcaaacttttccattttattttctactgtttttcttctcctgcctatttaatggcattatttggcatttgctg

SEQ ID NO: 251211 - DNA, 201 bp, Homo sapiens
aaaatggcagaaggaatcacacagtgaggcagcacttgtgacagagagataggaaagggagttgaactcatccactcatcgtgttatcaggaaccctctcytgtgataatagcattaacccactcctgaaggcagagccctcctcttgacctaatcaccattttttttttcttttgagacagaatcttgctctgtcaccca

SEQ ID NO: 251212 - DNA, 201 bp, Homo sapiens
tgggcagatctcttgagctcagaagttcaagaccagcctggccaacatggcaaaaccctgtctagacaaaaattacaaaaattagccaggcattggggctygctcctgtagtcccagctacttgggaggctgaggtgggaggatcacttgagatctcccacctcagaagtaacagtgaaccaagatcacactactgcactc

SEQ ID NO: 251213 - DNA, 201 bp, Homo sapiens
atcttaaccctgtatgggttgatagacctttcaagtctgtctactagaaaattccctcaaatcttatttcagagaaagtatgggctgacttgacaggactratcagttttatcagtgacacatcttatcatttaaacagtgcaagagttaatggttggttattaagcactcagtaaaggttggtgaacatgtacatacagg

SEQ ID NO: 251214 - DNA, 201 bp, Homo sapiens
attggttggtagacaacaagtcggaacttggaggcaggccgggcacagtggctcatacctgtaatccctgcactttggaaggctgaggcgggtagatcacytgaggtcaggagttcatgaccagcctggcgaacatggcaaaaccctgcctcacacaaattagccgggcatggtggcgcacacctgtgattccagctactg

SEQ ID NO: 251215 - DNA, 201 bp, Homo sapiens
gtttcatgtgtttggggggagcatggcaggatagtgggggagaaaggggagtccagaagtaactaccaggtttctggcattggcatttggttggaggaggbgccactcaccaagacagagaattagaagaaaataataggttccaggggtgggagagtggttggagagaagttaatgattttctccagtgtaacagtattt

SEQ ID NO: 251216 - DNA, 201 bp, Homo sapiens
attgttccaggacctgtctttccagactcaaagcagcccagttggtgagggtgcgaggcctgggatcataaaggagtcaaactggttttttaaaataacascaaaacttttaaaataaagaaaatctctttcccatatatgaaatactttgttcagatcaagagtagtaattgataaatgatattgcttatgatgctgaat

SEQ ID NO: 251217 - DNA, 201 bp, Homo sapiens
gggtgcgaggcctgggatcataaaggagtcaaactggttttttaaaataacagcaaaacttttaaaataaagaaaatctctttcccatatatgaaatactytgttcagatcaagagtagtaattgataaatgatattgcttatgatgctgaattaaatttgtattttaatcaactcaattttgtccaccactcctccatag

SEQ ID NO: 251218 - DNA, 201 bp, Homo sapiens; identical to SEQ ID NO: 49602

SEQ ID NO: 251219 - DNA, 201 bp, Homo sapiens
gtgttgtgtttcaagggagaggccagattaaagcagtgttagaggatttgtagcaaatgtaagggacctggaaataaacacgtgggttcctgttcttccasaggtggagtctgtcctctgttgacattgatcctgaacaaaatttttacttaatcaatggttactgagcatttttaaaagaaactaattgaccgggcacag

SEQ ID NO: 251220 - DNA, 201 bp, Homo sapiens
agcgtgattgggctgtcctacatcacgtgacggccagtacgcgtgggatttggctccgaggaggcggaagtgcagcacagaaagggggtccgtgggggacrgtagaagcctggaggaggagcttgagtccagccactgtctgggtactgccagccatcgggcccaggtctctggggttgtcttaccgcagtgagtaccacg

SEQ ID NO: 251221 - DNA, 201 bp, Homo sapiens
ccaagtaatactgtgtcgaaaataatagtctatgattattcttcccacgaacagctagcaggggaaggagagtggcatggggggttgcacgaacccagttmtagggagaaagaaagggaagatattgcagaggagactcatgttgggactgtaagagcttaattttggggagacaggtacaaaaggtgctagttgggtaac

SEQ ID NO: 251222 - DNA, 201 bp, Homo sapiens
ccataggaccactgctcaagacttccagatctaacctagccatatccaactcatcattagaatatttaaatcatgaatgttgaacaaccaatattttaacwatttattgcatagagctactaataatattaaataaaactatggaaaaaaaggacattttactttgtgccaggtatgcttctaagcatagttctacatctt

SEQ ID NO: 251223 - DNA, 201 bp, Homo sapiens
gcagcaaagatctctccaggtaagtacacagcatttgcttttatgggttggaaccttgagtatgctggtgccccaaatattctaggaacatcatatgtatmtagttcaagctgagctcaacaaatgtacaatatgctctttcattgaaagctgtctgaatttagcatattataaatattgtcatatttatatttttgacta

SEQ ID NO: 251224 - DNA, 201 bp, Homo sapiens
tttctttagttagaattgccataggaccactgctcaagacttccagatctaacctagccatatccaactcatcattagaatatttaaatcatgaatgttgmacaaccaatattttaacaatttattgcatagagctactaataatattaaataaaactatggaaaaaaaggacattttactttgtgccaggtatgcttcta

SEQ ID NO: 251225 - DNA, 201 bp, Homo sapiens
tatatgtgtgtatacacttgtgtgcgtatacatatgtgtgtgtctatatatagacacatacacacacacacacacacacacacacacacacacacacacayattacagaaagtatcttatggatttaaaagcaggaaaaaagaaaacaattatattcgcagccagagtgctctgataatgaatattagtcactgttaaaat

SEQ ID NO: 251226 - DNA, 201 bp, Homo sapiens
cattattatagcaaatttattatataccaggtactgttttggatgttttacataggccaactagcttaatgctcctaaccaattattaggtactattcccwttttacagatgtggaagcatgggcataaagagattaaggaacttgcccacagagctagtaaatgggagagctgaaatttgaatccagatgacctagcttc

SEQ ID NO: 251227 - DNA, 201 bp, Homo sapiens
agacatttaccgaagatggaaaataggatgccaaatcaaaagtaactggaagagagtagcatggaccactaagaataccaacaggaaagattaacccttgmatgagagtagactttatagaaatgttaaggagaccaggaaggactgttttggttagatgttgacaacaagaagaataaaaaagatttgggttttctcccc

SEQ ID NO: 251228 - DNA, 201 bp, Homo sapiens
tacacataagtatgtatgtctatatacatatatgtgtgtatacacttgtgtgcgtatacatatgtgtgtgtctatatatagacacatacacacacacacayacacacacacacacacacacacacacacattacagaaagtatcttatggatttaaaagcaggaaaaaagaaaacaattatattcgcagccagagtgctct

SEQ ID NO: 251229 - DNA, 201 bp, Homo sapiens
gtttatttagtacatgctataagtttaaaagattaatagagatgtatctcagtgtatatgaatattcaagaaaaagaattgttcatgatttctgaataaasctacttttaaaattgttgtacaaaatcagatttaaatcctttttaccttcctcacagaggatgcaaagaagatggctgttaaggaagaaaaatatgatcc

SEQ ID NO: 251230 - DNA, 201 bp, Homo sapiens
caaaaaccaaacaaacaaaaaacaacagaaaaacaatctatgagcgctgcagttcaacagaaggtaagtgcaaatggaggctagcagagaaaaaggggtamacaggaaaatgagggagagtgagaggtagtgaagaatatttgagactaagataaatgatgggggaagaaaagtgaacgaagagaaataaaatcaatcgtg

SEQ ID NO: 251231 - DNA, 201 bp, Homo sapiens
cggatcacctgaggttaggagttcgagaccagcctggccaacatggtgaaaccccatctccactaaaaaatacaaaaattagccaggcatggtggcatgcrctgtaatcccagctacgtaggaggctgaggcagaagaatcgcttgaacccaggaggcagctcattaggcggaggctcattatttttcacttcctgacttg

SEQ ID NO: 251232 - DNA, 201 bp, Homo sapiens
tttttaaaaagaaagagactgtaaatacacattcgtgtttcatgttctgtgtgtgtgtctgtacgtgaaaataagagagtttgaaatgatatgttactgtkaacattttagtctatgagaatggagggatgtgaataagagtactttctcttttgtttgaattgtttctaatgagttgtactacttttttttttttttttt

SEQ ID NO: 251233 - DNA, 201 bp, Homo sapiens
aggcctgggatcataaaggagtcaaactggttttttaaaataacagcaaaacttttaaaataaagaaaatctctttcccatatatgaaatactttgttcasatcaagagtagtaattgataaatgatattgcttatgatgctgaattaaatttgtattttaatcaactcaattttgtccaccactcctccatagaaacgct

SEQ ID NO: 251234 - DNA, 201 bp, Homo sapiens
gcctgggcgatagagtaagacccagtctctactttaaaaaaagcaaatatttctaaatggcataaactaactttgtttttcttttctggcagttgagagcvtggagttaagaggagaatcagctttcagtggcattcctaatgggcagtggatgacccagtcatttacagaccaaattccttcctttagtaatcactgtgg

SEQ ID NO: 251235 - DNA, 201 bp, Homo sapiens
aagtggttaccttttaaattaatttacttttaaattaggtatctttgttaacaggttttttcagaaaaaccaattgtgtttttaaaaagaaagagactgtraatacacattcgtgtttcatgttctgtgtgtgtgtctgtacgtgaaaataagagagtttgaaatgatatgttactgttaacattttagtctatgagaatg

SEQ ID NO: 251236 - DNA, 201 bp, Homo sapiens
tatgagaatggagggatgtgaataagagtactttctcttttgtttgaattgtttctaatgagttgtactactttttttttttttttttttttttttgagawggagtttcgctctttttgcgcagactggagtgcaatggcgcgatctcggctcaccacaatctccacctcccaggttcaagtgattctcctgcctcagcct

SEQ ID NO: 251237 - DNA, 201 bp, Homo sapiens
actgagttgctatatattcttgggcaggcatttgcctcaaccccctgtgaaaaggagataataatagtatcttgcaagataattatgatgattaaatccargcgctgtggctcacacctgtaatcccagcaattttggaggctgaggtgggaagatcacttgagcccaggaattcaagaccagcctgggcaacatggtgaa

SEQ ID NO: 251238 - DNA, 201 bp, Homo sapiens
aataagagtactttctcttttgtttgaattgtttctaatgagttgtactactttttttttttttttttttttttttgagatggagtttcgctctttttgcscagactggagtgcaatggcgcgatctcggctcaccacaatctccacctcccaggttcaagtgattctcctgcctcagcctccctagtagctgggattaca

SEQ ID NO: 251239 - DNA, 201 bp, Homo sapiens
aagagtactttctcttttgtttgaattgtttctaatgagttgtactactttttttttttttttttttttttttgagatggagtttcgctctttttgcgcaractggagtgcaatggcgcgatctcggctcaccacaatctccacctcccaggttcaagtgattctcctgcctcagcctccctagtagctgggattacaggc

SEQ ID NO: 251240 - DNA, 201 bp, Homo sapiens
tcaagtctgtctactagaaaattccctcaaatcttatttcagagaaagtatgggctgacttgacaggactgatcagttttatcagtgacacatcttatcayttaaacagtgcaagagttaatggttggttattaagcactcagtaaaggttggtgaacatgtacatacaggactagatctctcctctgtaatccactctaa

SEQ ID NO: 251241 - DNA, 201 bp, Homo sapiens
gatctcggctcaccacaatctccacctcccaggttcaagtgattctcctgcctcagcctccctagtagctgggattacaggcatgtaccaccacgcctggktaattttgtatttttagtagagacggggtgtctccatgttggtcaggctggtctcgaactcccggcctcaggtgatctgcccacctcagcctcccaaagt

SEQ ID NO: 251242 - DNA, 201 bp, Homo sapiens
aggtgcaatatacatttgacctacagcttgcccaaggtatgttactgtcctcattccttttattcattttgtgtgtgtatatatacacatatatacttacwtatatatacacatatacatatatacatatacacatatacatatgtgtgcacatatatgcacacgtgtatatatacatgtgtatatatacatatatacaca

SEQ ID NO: 251243 - DNA, 201 bp, Homo sapiens
tcattttgtgtgtgtatatatacacatatatacttacatatatatacacatatacatatatacatatacacatatacatatgtgtgcacatatatgcacaygtgtatatatacatgtgtatatatacatatatacacataagtatgtatgtctatatacatatatgtgtgtatacacttgtgtgcgtatacatatgtgtgt

SEQ ID NO: 251244 - DNA, 201 bp, Homo sapiens
tatatatacacatatatacttacatatatatacacatatacatatatacatatacacatatacatatgtgtgcacatatatgcacacgtgtatatatacatgtgtatatatacatatatacacataagtatgtatgtctatatacatatatgtgtgtatacacttgtgtgcgtatacatatgtgtgtgtctatatatagac

SEQ ID NO: 251245 - DNA, 201 bp, Homo sapiens
atatatacacatatatacttacatatatatacacatatacatatatacatatacacatatacatatgtgtgcacatatatgcacacgtgtatatatacatgtgtatatatacatatatacacataagtatgtatgtctatatacatatatgtgtgtatacacttgtgtgcgtatacatatgtgtgtgtctatatatagaca

SEQ ID NO: 251246 - DNA, 201 bp, Homo sapiens
cgggcaggtaataccggggccagcgccgcccctcccttgcgcccctcactgctgggcaggctggctggcgcgcgcgcgcgcacgcaggggtcttttaaatsccggccggaatacaaaggccggggccgcgcgtgcgcactgtggcctggtcggcctttccttccctggctgcggcggtggtggtggaggtcggggctgctc

SEQ ID NO: 251247 - DNA, 201 bp, Homo sapiens
ggtgattaaatactgaaggaaagtaggggcacaaattgtatttggggacatcttaaccctgtatgggttgatagacctttcaagtctgtctactagaaaaytccctcaaatcttatttcagagaaagtatgggctgacttgacaggactgatcagttttatcagtgacacatcttatcatttaaacagtgcaagagttaat

SEQ ID NO: 251248 - DNA, 201 bp, Homo sapiens
cagagcagagaaataacaccagggctctgaaactccaacaatgtggaggcttcatcccgataaagatcagagtagggacatgtccaggctgagggagctayacaggctgggtacagacacacacaagcatggcatggccagaaacagagcaattctgtgtccttggagtctgggatataacaaggaaatggtgagaggtga

SEQ ID NO: 251249 - DNA, 201 bp, Homo sapiens
ctatacaggctgggtacagacacacacaagcatggcatggccagaaacagagcaattctgtgtccttggagtctgggatataacaaggaaatggtgagagrtgaggctggatggggacagttgaaacttgttttttaatcccaaagaatttatattctatcatgaaggcaatagggagctgttgagagaatgtaagcaagg

SEQ ID NO: 251250 - DNA, 201 bp, Homo sapiens
gatctttgtcctcgttggattttataagtagtattgggggatcagctttacttaacagttgtccttgcaaatagcattttgctgaaaaggaccatttctamgaatccttttggtggtaaatggtgtcagcttcatgaggttgtgttatatgagagtgtttaagagggtgggctccaaatttagactgtctgggttcaaatc

SEQ ID NO: 251251 - DNA, 201 bp, Homo sapiens
tacactctcgagtagtcaatctaaaaatgacctttgagttttccagtggccttggggacgatcttaagaatccgtttttaaaaagtcctttgggggagtcragagaaaaatttgcaaaagcaggagatttagggacttgaactcctggcggaagactaaatttttaaaaaatggatatggtgacagttttttaaaagataa

SEQ ID NO: 251252 - DNA, 201 bp, Homo sapiens
acactctcgagtagtcaatctaaaaatgacctttgagttttccagtggccttggggacgatcttaagaatccgtttttaaaaagtcctttgggggagtcaagagaaaaatttgcaaaagcaggagatttagggacttgaactcctggcggaagactaaatttttaaaaaatggatatggtgacagttttttaaaagataaa

SEQ ID NO: 251253 - DNA, 201 bp, Homo sapiens
cagttttttaaaagataaagagtgatgatttacattgaaattaaaaggaaaaaaacctatgcctaatgaagaattatcctgactctcagtggctaatgggwgctgaatttaggcaatacaagggacttatatgggcctgttcatgtctgtaaagttggcatgtctggaatctgattctgacatgccgagaattggtgttac

SEQ ID NO: 251254 - DNA, 201 bp, Homo sapiens
  misc_feature (1)...(201): n = A,T,C or G
ttttggggagacaggtacaaaaggtgctagttgggtaacttttctgggaaagctgctaaagtttctaagttaagattttctgcatttctggaaattatttntatttcagaggctccaaaaggaagaaaaagaaaacccagaacaacagaaccaaaacaaccagtggaacccaaaaaacctgttgagtcaaaaaaatctggc

SEQ ID NO: 251255 - DNA, 201 bp, Homo sapiens
tgccttgaaaagctttcaccttcaggaactgtggaaaattctgtgtaatcttctgaaatgactcagaccccaggtaatccttaagagagtagttctctgtyacccttgactgtgctaatcaagaaatgtaatgtgggatgtgaaaaaaaataaatttactttttttttttttttttttgagacagagccttgctctgttgc

SEQ ID NO: 251256 - DNA, 201 bp, Homo sapiens
gactcagaccccaggtaatccttaagagagtagttctctgtcacccttgactgtgctaatcaagaaatgtaatgtgggatgtgaaaaaaaataaatttactttttttttttttttttttgagacagagccttgctctgttgcccaggctggagtgcagtggcggatcttggctcactgcaacctccatcacccgggttcaa

SEQ ID NO: 251257 - DNA, 201 bp, Homo sapiens
aattttgcttcttagttttaggttttatttacaacttttaaagaacaacacagtgcacagatttacatgttgtatatacaacatcttaactgatggagaarctaatttgctgccaggtttttgtggaaacctaaaaatgtttctgccacctaaatatatttaaatttctcctttaaaattgtttttgttcataatttctta

SEQ ID NO: 251258 - DNA, 201 bp, Homo sapiens
caaatgtgagccaccgggcccagccgacttttttagaagactaatttcagatattcaaagaagaaaattcaaattccatgaatacagacttttttttttgtttttttttttttttgagacagagtttcactctgttgcccaagatggagtacagtggtgcgatcaccgttcactgcaacctctgcttcccgagtttaagcg

SEQ ID NO: 251259 - DNA, 201 bp, Homo sapiens
agacaggcagcatcagaaggatgctggcaggaggtacctacagtagtcattattatagcaaatttattatataccaggtactgttttggatgttttacatwggccaactagcttaatgctcctaaccaattattaggtactattcccattttacagatgtggaagcatgggcataaagagattaaggaacttgcccacaga

SEQ ID NO: 251260 - DNA, 201 bp, Homo sapiens
aagaaaaaaaaaaacttcaaataagctgatacggtggctcacacctgtaatcccagtgctttgagaggctaggatgggaggatcactcaagcccaggagtytgaggctgcaaagagctgtgatcatgccactgcattccagcctgggcgatagagtaagacccagtctctactttaaaaaaagcaaatatttctaaatggc

SEQ ID NO: 251261 - DNA, 201 bp, Homo sapiens; identical to SEQ ID NO: 49606

SEQ ID NO: 251262 - DNA, 201 bp, Homo sapiens
atgtgagccaccgggcccagccgacttttttagaagactaatttcagatattcaaagaagaaaattcaaattccatgaatacagacttttttttttgtttktttttttttttgagacagagtttcactctgttgcccaagatggagtacagtggtgcgatcaccgttcactgcaacctctgcttcccgagtttaagcgatt

SEQ ID NO: 251263 - DNA, 201 bp, Homo sapiens; identical to SEQ ID NO: 49607

SEQ ID NO: 251264 - DNA, 201 bp, Homo sapiens; identical to SEQ ID NO: 49608

SEQ ID NO: 251265 - DNA, 201 bp, Homo sapiens
tgtctactagaaaattccctcaaatcttatttcagagaaagtatgggctgacttgacaggactgatcagttttatcagtgacacatcttatcatttaaacrgtgcaagagttaatggttggttattaagcactcagtaaaggttggtgaacatgtacatacaggactagatctctcctctgtaatccactctaaataaata

SEQ ID NO: 251266 - DNA, 201 bp, Homo sapiens; identical to SEQ ID NO: 49609

SEQ ID NO: 251267 - DNA, 201 bp, Homo sapiens; identical to SEQ ID NO: 49605

SEQ ID NO: 251268 - DNA, 201 bp, Homo sapiens
tttcccgtgacctcaggcgtgaaaaagacatttaccgaagatggaaaataggatgccaaatcaaaagtaactggaagagagtagcatggaccactaagaayaccaacaggaaagattaacccttgcatgagagtagactttatagaaatgttaaggagaccaggaaggactgttttggttagatgttgacaacaagaagaa

SEQ ID NO: 251269 - DNA, 201 bp, Homo sapiens
atggaccactaagaataccaacaggaaagattaacccttgcatgagagtagactttatagaaatgttaaggagaccaggaaggactgttttggttagatgytgacaacaagaagaataaaaaagatttgggttttctccccagtctactggcatggtggcagcagacaacagaacacctaagtactttgttctgatttgga

SEQ ID NO: 251270 - DNA, 201 bp, Homo sapiens
gtgaaggcatttaggagaagtttcaggtgttctaacagaatcatatgccttggcctgcgtgtgttgtgtttcaagggagaggccagattaaagcagtgttwgaggatttgtagcaaatgtaagggacctggaaataaacacgtgggttcctgttcttccagaggtggagtctgtcctctgttgacattgatcctgaacaaa

SEQ ID NO: 251271 - DNA, 201 bp, Homo sapiens
tggcgatcttgctatattgccccggccactcttgaattcctggcctcaagtgatcctcccgccttgccctcccaaagcactaggattacagacataagccmccgtgcctggcctcatttccctttttaatctgctttctgagcttcctgttctctttcaatgaatatcatagagaatgaaaactgattagtatagtatctt

SEQ ID NO: 251272 - DNA, 201 bp, Homo sapiens; identical to SEQ ID NO: 49631

SEQ ID NO: 251273 - DNA, 201 bp, Homo sapiens; identical to SEQ ID NO: 49572

SEQ ID NO: 251274 - DNA, 201 bp, Homo sapiens; identical to SEQ ID NO: 49633

SEQ ID NO: 251275 - DNA, 201 bp, Homo sapiens; identical to SEQ ID NO: 49624

SEQ ID NO: 251276 - DNA, 201 bp, Homo sapiens; identical to SEQ ID NO: 49635

SEQ ID NO: 251277 - DNA, 201 bp, Homo sapiens; identical to SEQ ID NO: 49636

SEQ ID NO: 251278 - DNA, 201 bp, Homo sapiens; identical to SEQ ID NO: 49637

SEQ ID NO: 251279 - DNA, 201 bp, Homo sapiens; identical to SEQ ID NO: 49627

SEQ ID NO: 251280 - DNA, 201 bp, Homo sapiens; identical to SEQ ID NO: 49628

SEQ ID NO: 251281 - DNA, 201 bp, Homo sapiens
tccagtgttcatctgagcataactgtactaaatcctttttccatatcagtataataaaggagtgatgtgcaatagcaaaaaaaaaaaaaaaaaaaaaaaawtaggcaaaggaccagaatagacatttctctaaagaaagcacacaaatggccaagaggtatatgaaaagatactaaacatcactaataatcagggatattc

SEQ ID NO: 251282 - DNA, 201 bp, Homo sapiens; identical to SEQ ID NO: 49652

SEQ ID NO: 251283 - DNA, 201 bp, Homo sapiens
tggcagtgaaatgcctcttggtcctgtccaagtgtatctttcactgatttctgaatcatgttctagttgcttgaccctgccacatgggtccagtgttcatytgagcataactgtactaaatcctttttccatatcagtataataaaggagtgatgtgcaatagcaaaaaaaaaaaaaaaaaaaaaaaaataggcaaaggac

SEQ ID NO: 251284 - DNA, 201 bp, Homo sapiens; identical to SEQ ID NO: 49641

SEQ ID NO: 251285 - DNA, 201 bp, Homo sapiens
atcgctcccaacgtgcctgggggaggcaggggcagggtctgtgaatgctgctcatccacggagggcttcacaggcccagaatttaccttagattcgaagaygaaggaatcatctggtactatcttagtttcctattgctgctgtaacaaattactgcaaacttaatggtttcaaacaatacacatttatatcttatggttc

SEQ ID NO: 251286 - DNA, 201 bp, Homo sapiens
cagttgaaaggccttccttatttcagattacttacagtccacaaaagctctgtgtcaacagtttatcattacacggggcataaaaatatactttcaaatcyacattaaacattttctttttgaggggttcattttattaagctacactgttaatgaccactgatgtggaatctctttcactggtttgaatttctttaaaag

SEQ ID NO: 251287 - DNA, 201 bp, Homo sapiens
tgaggcaggagaatggtgtgaacccgggagacggagcttgcagtgagccaagatcgcgccactgcactccagcctgggcgacagagtgagactccgtctcaaaaaaaaaaaaacaaaacaaaacaaaacaaaaatgcaggccccagtttcacttgcatgttgttgaatttggagagtcaatcaatcaagccaggtcccaca

SEQ ID NO: 251288 - DNA, 201 bp, Homo sapiens
gtatcttgggggtaaggagagctgatccttcagcctggctctgcagtttctgtctctccagatcaccctgggagaggcagaagggaccacagcatggcacrgattgtgtagctaaaaatttggaggcctctggcaggggttccagatacctacatgtgaaatagaaaaatagtattgcaaaagcaatgggttccaggcttc

SEQ ID NO: 251289 - DNA, 201 bp, Homo sapiens
gaatgaagcctctccagggagctgtgtgttgatggggctctcaagtttgggaagcaacccccctaacaggaagtgggggtgggagacagggagagaaaaamcaaagcaaacccataactcaaactgtatctttcttcttgcaaaagtgaaagacattgctgatcgttacacacacacacacaaacacacacggcagatgga

SEQ ID NO: 251290 - DNA, 201 bp, Homo sapiens
cgtggtttccacttacctactatgggacctagacaggctgtttcacttctcttatatctgtaatataagcagagtaactggagcccttttgttcacctgcrgttggatctcagtgatttggggaaggatcttgggcctccacttgcagtgactatagtcactatagcttcatcagcaggggcgggaaatgatgctgcctcc

SEQ ID NO: 251291 - DNA, 201 bp, Homo sapiens
gacattgctgatcgttacacacacacacacaaacacacacggcagatggagcttcctgtgtagtatttctgttacttatatctccagaaggaaggcctggrtatattttaattttattattttcttttcttaaacattaaaaaaatgatttccactagcccataccagagaccccaaaatacactgtaagtaaaaatgtga

SEQ ID NO: 251292 - DNA, 201 bp, Homo sapiens
taggcggcagggtgatttaaggtgaattgggcctttgcacggcctgcttggttaaaagctggagcataagtcatcgcaccattctgtgtgcgtgtgtgtgkgggcatgtgtgtgcatgtgtgcacgtgtgtgcctgtgtgtgcctgtgtgtgtgtgcccatcttcgtcttccttcccctcccagccttccctgcctgggct

SEQ ID NO: 251293 - DNA, 201 bp, Homo sapiens
agcgcttctcagaacaatgtcgtaggcgtattagctctgtaagtcaccacgaattcagaataataactgtggggtggggtgcgggctcactgattgactcrgaggcatctagagttcattttgtaaaacacttaaacaattcagggtgttttgttttgtgggtagatttttaaaaataattttaaaaatgtaaaattgtgg

SEQ ID NO: 251294 - DNA, 201 bp, Homo sapiens
tccctatctggaatttgatttctttgcagcagggaccatgattcttgtttttcagttcacatggatcccagagaatagagtaacactcagcaaatacttcyttttatgggagagggtgttaggtttttaaaatccttttctcataggctgttagatttgatttactgcttcgtacctgggctttctgttgaggccaagggg

SEQ ID NO: 251295 - DNA, 201 bp, Homo sapiens
acaggcaccctcagggattctagctgtgctgtgccactttgagaaacctagtccaggtgctaaatttacagtgatcaccttgggattctggtgtccgacaragatggaaacttcgcaggaaatgttccccaggcgggagggctaagaggacacagtaactcttgagagttgctccgacagaccttttattttggcaagggc

SEQ ID NO: 251296 - DNA, 201 bp, Homo sapiens
tgttccccaggcgggagggctaagaggacacagtaactcttgagagttgctccgacagaccttttattttggcaagggcttgtgctttctttgccaagccrtcattcgttacttggctagaggagggaccacagggaggggagaggggacatatacagctggctgtcagaacagtcgacctctaaatgggataacctcaga

SEQ ID NO: 251297 - DNA, 201 bp, Homo sapiens
ggcttctcaccggggtggactcaggcgcagtggcatgtgtgttaagaaaaccagatgccagactcctgactctggcactgctgagtcctgtttcttcgatstcacctcagtggcagcaggtgggcagcccgtgctgggctagatggctgccctgggagtctgaggactctctcgggtctggtgacttcaaagtaagctgta

SEQ ID NO: 251298 - DNA, 201 bp, Homo sapiens
acttaccagtcttaggacagaggatcctcactggtctcctcgaccttgagacacccagattaggaattcttttctcctctgacttcttgtagttccctccrtatactgttctattacccccgtccatgacacctttgtactgctgttccttctgcctgtaatgcctaccccttggcttacccatctgatcaactcagctct

SEQ ID NO: 251299 - DNA, 201 bp, Homo sapiens
gaggcaggagaatggtgtgaacccgggagacggagcttgcagtgagccaagatcgcgccactgcactccagcctgggcgacagagtgagactccgtctcaaaaaaaaaaaaacaaaacaaaacaaaacaaaaatgcaggccccagtttcacttgcatgttgttgaatttggagagtcaatcaatcaagccaggtcccacaa

SEQ ID NO: 251300 - DNA, 201 bp, Homo sapiens
aggcaggagaatggtgtgaacccgggagacggagcttgcagtgagccaagatcgcgccactgcactccagcctgggcgacagagtgagactccgtctcaaaaaaaaaaaaacaaaacaaaacaaaacaaaaatgcaggccccagtttcacttgcatgttgttgaatttggagagtcaatcaatcaagccaggtcccacaat

SEQ ID NO: 251301 - DNA, 201 bp, Homo sapiens
gagaatggtgtgaacccgggagacggagcttgcagtgagccaagatcgcgccactgcactccagcctgggcgacagagtgagactccgtctcaaaaaaaamaaaacaaaacaaaacaaaacaaaaatgcaggccccagtttcacttgcatgttgttgaatttggagagtcaatcaatcaagccaggtcccacaatgagcac

SEQ ID NO: 251302 - DNA, 201 bp, Homo sapiens
gatggggaggagaagggaaggtgtgcttcgccctcttcttcctaccggctccgggctggaggatgggaccaggaggggcggtagttttttttttttttttyttcttcttctttttttctttgtgtcccttgtctgtctgtctgcgaggtagcagggaaacggagaggtgtgggaagcaaccgggggtgaggggctggtttg

SEQ ID NO: 251303 - DNA, 201 bp, Homo sapiens
aggaggtatagaagaaaaacaatcattattccaccaccaagaggcaactggtactttaaaaatatattatagaatatatttatatatatttatatattctrtatttttctcaactatgcaaaatgcatatacatagttgagataacatcatgcattttgtatcctgtttgataataagtattttagacaaatacatcattg

SEQ ID NO: 251304 - DNA, 201 bp, Homo sapiens
tccctttaagcattttcacagaccatctcctgaagggatggtcatcgtggttcggtaggttagcaaggtctggcaggaaacaaaaatcaactcagagactstcatgaaggccccacttataaagatctgagcagggggctgggcatggtggctcatgcctataatcccagcactttgggaggttgaggcaggtggatcact

SEQ ID NO: 251305 - DNA, 201 bp, Homo sapiens
gcagtgaaggtgaagtggctattgctttatattcgacaaatatttattgagcatctactatatactaggccctgaagatagagcgttgaacaaacccaatrgtcttggccctcaaaaagctttatgtgacatagagcatccagctcgacaattagcaaacccctgatattattcatggacttgacatgaggtttggactat

SEQ ID NO: 251306 - DNA, 201 bp, Homo sapiens
ttggggcctggggtatcatctgtgtttagatgacgctcatgtctttcttcaacttggatgtgaccttgggtcgaagtctagttcatgtattacctcttgtrttaccatccatcccctcttggtcagaatgaggggatagatgtccttcctgtcatccctgtggtactttgtgtgtgtacatctctaatattactcattctg

SEQ ID NO: 251307 - DNA, 201 bp, Homo sapiens
aacttggatgtgaccttgggtcgaagtctagttcatgtattacctcttgtgttaccatccatcccctcttggtcagaatgaggggatagatgtccttcctstcatccctgtggtactttgtgtgtgtacatctctaatattactcattctgatacattgactccttcagggaaggggccatgtcttgtttagcacaatatc

SEQ ID NO: 251308 - DNA, 201 bp, Homo sapiens
tttgctaaaagaaggaatacactgatggtaattggtcactaagaagaaaatccccctttttgggatagcgggtatggaattttcaatgctgatttgatttwcattttgattctatggtgagctgtcacttaagagagccaagaacaaccccttttataccatggctaaatgtgaacagccaaaaagtgaacaactgtcaaa

SEQ ID NO: 251309 - DNA, 201 bp, Homo sapiens
tagaacccagttcatttttagactgaatgtttatatggctgagagctgcaggaaacaccatgcccaccttgcttggtttaaagcctttgagatctatggtrgctgaatgtgcttccaggagcagaatttaatgtgcagggagtgggtgactattaaattcagtgactgcagcaaaactttgctccttgctcctctttgtgg

SEQ ID NO: 251310 - DNA, 201 bp, Homo sapiens
tactccagttcctgcctgcaaaggggtcagggaagtatcctgcttcattaataatgggaaactgggggttaaggtatgagtgtatgtatatggaagctctmtatactttccactcaatttttctgtcaacctaaaactgctcaaaaaagagaatctattaatttaattaaaaacaaaactgggtggaccctacccaccttc

SEQ ID NO: 251311 - DNA, 201 bp, Homo sapiens
ctcagagtgtggagcagatgaatcatgcccagcctgttagcaagtccggagatttggaaagtgtccgaagtcaaccgagtattagagttgttttgccagcrgaaggagcagagacccatctggacttgggtgatttagtacagcagtgcttcatttcgaaatgttgagggaagtgacagtccaaaaatggtaggagttgta

SEQ ID NO: 251312 - DNA, 201 bp, Homo sapiens
atatttgtgttggaagcccagctgggcttgttggaaaagcaacctgcaggtgggggtgggcaccgcagttgtctttattttggccccttctgagtttgctstttgtctgcctgggctctggggggcccttcccacccactcaccttcccctgctggtcctggcctccaagggctccaagtccttcccccccaccctcccct

SEQ ID NO: 251313 - DNA, 201 bp, Homo sapiens
cctgggcaacagagagagaccctgtctgttaaaaaaaaaaaaaaagaaaaaaaaagaaagaaagaaagacctgaaaagaactaattaacgctcatacatasaatttttgatgagaaccttctggctctaaagaaagtattggtcaactatactgtctaggctaatttcttagaaaataatgagcatagttaaggataactg

SEQ ID NO: 251314 - DNA, 201 bp, Homo sapiens
gggtgacaaaattgagctgatttccccaaatctccaaggagatcccctctgaagagatgccgtgccgatgagagacagagcctgcaccacgaagcaaaggsaggagcttgtgagcttgtgagctgacccctctggccttggcctcttagtgtctatagcccgtcactgccttaaagccaccacatcacatgtcactgttct

SEQ ID NO: 251315 - DNA, 201 bp, Homo sapiens
ctaaagcaagcactgtttacttggaaactcttttgaatttactctttatacttaaaagtaattcaattgaatgtgattgaatattgtctttaattctgacrtagctagttaaaaaccaagcttttcctaatcaatatgaattagggaagactcttcactggctatctggccagtctctaagaaggcacaataaatgactcg

SEQ ID NO: 251316 - DNA, 201 bp, Homo sapiens
catcacagtgacctcagaagaggatgaggaagagctgggagatttaatgtcctttgagggctgactttgggtcccccaggtacaaaacagaattgcctgtytttgcaggagcagctccttctgaaggagctgggtattgctcactcctctaacttgatgaggttgaatcagacactgttctgtcttgacagatgggctggg

SEQ ID NO: 251317 - DNA, 201 bp, Homo sapiens
atactagaaagaaacttccaacttgtaattgtcactttgtgaaaatttccagcccttgttagtcttaagttgacttgaaagtgacatcatatcttttcagyctagccttttggaagaggcagagaaccttttctaagcttgtgctgaaaaagatcctctgtcgatgatcctgccccatcctttatgtccccctctagtcct

SEQ ID NO: 251318 - DNA, 201 bp, Homo sapiens
agcactcaaagtcctgaatcctggggatctccttggaccaggcaaactagactggttggtcactctagtttcatcacagtgacctcagaagaggatgaggragagctgggagatttaatgtcctttgagggctgactttgggtcccccaggtacaaaacagaattgcctgtttttgcaggagcagctccttctgaaggagc

SEQ ID NO: 251319 - DNA, 201 bp, Homo sapiens
aatttaaaaatggacctggcttgcattccggcaggcaggccttggttgcagtgggcagggccagacagccaggggtatctcagagtgccaagctccagggsccaccggagaccgggccagactcaccccagagcgccaggggactggtggtgtacagatacactcgggttcaaacagtttaaacaaggggccggtgatttg

SEQ ID NO: 251320 - DNA, 201 bp, Homo sapiens
aaggaaattaaactaggaaatgaaaggataaacaaacctcaaacaagaaaaaacaacagcaccaaataagatgagttgacagagcaccactctttatcctraagggtatccatctacctacaaattagggtgtggctcccagtggggccatcatctcttcttccaccctcaccagctctgcctgtcatgatcaagctcgtc

SEQ ID NO: 251321 - DNA, 201 bp, Homo sapiens
gaaatctgctaggaaagcagatcttaaatgttctgactacacgaaaaatgataactatgtgaggtgatagatgtgttacttagcttgattgtggtcatcaytttcactatctatctctctatctaagcatcatgttgtataccatgaatatatataatttttatttgccaaattaacctcaataagtctggggaagtttgt

SEQ ID NO: 251322 - DNA, 201 bp, Homo sapiens
aattacacaaaggaaagcagctccccgatgagttgagcccgtgggctcctgcaggcagcagctcaggccgtgtcccaggtcctgagtggctgtaagaaaaycagaagtttcaagacaaggtgaggagacagtcacgggagcagcatgtcttcaggcggaaattgttccaatttccccacaaatgatcactgatgtgtattt

SEQ ID NO: 251323 - DNA, 201 bp, Homo sapiens
gctcgctccgcctgatttctgcctcttccaaccctacctctccgccttcggcctcttcggggctcctggctgcccagagctcctggctgcccagatctacscgggtcaccgcgtcgggatggggaggagaagggaaggtgtgcttcgccctcttcttcctaccggctccgggctggaggatgggaccaggaggggcggtag

SEQ ID NO: 251324 - DNA, 201 bp, Homo sapiens
cagtaaactgactgaccattataaaatgaggtcctggccagacgcagtggctcatgcctgtaatccctacactttgggagtctgaggtgggaggatgacargagtttgagaccagcctgggccagatggcaagatcctgtctctacaaaaaatttaagaattagctgggcatggtgttgtgcaccaattgttccagctgac

SEQ ID NO: 251325 - DNA, 201 bp, Homo sapiens
actgtttaaaaaaatttaatgagatgcctatttattaatttaaatcaaactgtagctgccgcatggactggaatgtcctcatcagcagatcagcgcatackctccccagagtcagacctactggggcaccaaaccgcaatcaacaggttattcaacaagcccaggttcagagcccccagcaagatggccagaattactaag

SEQ ID NO: 251326 - DNA, 201 bp, Homo sapiens
gtcttcacagactaaagatagtgccttgacctgagcacagcactcaggctccgtctcaggtggccacagtaactttgcatagatccagtcttatcatctcrtgtcatctcctatgaagccaactatggcatgctggcagagctcagcgtgcatgcggtgactcttcgttggcctctgtggaatttgcaccgcaggacattc

SEQ ID NO: 251327 - DNA, 201 bp, Homo sapiens
gcatggactggaatgtcctcatcagcagatcagcgcatacgctccccagagtcagacctactggggcaccaaaccgcaatcaacaggttattcaacaagcscaggttcagagcccccagcaagatggccagaattactaagtgttccttagccttgggacatgaattctctgccacagccacagccaacaagaatggagca

SEQ ID NO: 251328 - DNA, 201 bp, Homo sapiens
gtggtgataactagcagcagcagcagtggcaggactggtggtaattattgttgttaacatttcttgaacactcgctctgtgctttacacacattatttcartcatcacaactctttaaggcagacactctgtttgacagatgacaatgccaaggcccaaagaagttaatcactttcctaaggtcacacagctggcatgtga

SEQ ID NO: 251329 - DNA, 201 bp, Homo sapiens
aggtagctgaagctatttataaaacgttgtgtaccttcttccgagctctctcccctttgtgaagggcgcagcaactatacccttgatggatggagatttaygcaatgtgttttactgggtagagtgacagaccttggctgtccctggaattgagaatctggaccttatttccaggcagagaacactgtcctcagaaatggg

SEQ ID NO: 251330 - DNA, 201 bp, Homo sapiens
atgaccttatcttaacttgatgacatttgcagagaccctgtttccaaataaggtcacattcataggtactggttggttaggacctggacatttctttttcrgggacaaaattcaacccacaacagtggggatgtctgtaaggcgggaatgtgcaggggcggagttgggctgaagggaagtgaactcacttctgcctctttc

SEQ ID NO: 251331 - DNA, 201 bp, Homo sapiens
taaaaggacggagtaaatatttggaattaatggtgttatatttgtcaagattttccttcatgaaatgattatataattcttacagtattctcaaagtaccygcatagagactagcttcattgaaactcacaattctctcaaggttggcaggggagatattatcttcccattttagacagtgcaaagagaaggaagatcaga

SEQ ID NO: 251332 - DNA, 201 bp, Homo sapiens
ggtctgctggtctcacctgggatcattcacatcactgtggtccgtggatggctggcagttggtgctggtctgcagtgccccagtcttcatcctccaggagrctggacaggtctttccatagcatgactgtctcagggcagcgttccaacagcgtgaaggctaggaactgcagggcttcctaataggcttcagaacgtgttc

SEQ ID NO: 251333 - DNA, 201 bp, Homo sapiens
aagagtgctcaaattggagctgaaattctagctcagtgacttagaggggcttggcttagactagtcacttaacttccttatggtactttttcccatctgcragatgagtaagataattttaccaaactcatgtgctgtttgtgagggtcagatgaagaaacatgagtgtattaggttataggactggctgctattccatgg

SEQ ID NO: 251334 - DNA, 201 bp, Homo sapiens
gaagcatgaagagcattacctggctcacaacgagcactcacccagtcagtgttaggtgtcatcatcatcctgatatatactgtgcaggagggaaaattagraaattctgcagcttgcttttgatatttcttggcatatgcctagtgtcacttatacttggagaactaaaaaatagcatcactggagatttggattgatggg

SEQ ID NO: 251335 - DNA, 201 bp, Homo sapiens
gaagggtaaggctcttgcccaggatcaagcccagaccttcttatttcaaatcttatcttcactgtactttacaagtaccctaatacactgtccttattctyctatataaaatagcctcttatatgatgttatcttctctttaaacttatagtttagtaccaacttgctcaaagttatcacttgaatgattgacctcctctt

SEQ ID NO: 251336 - DNA, 201 bp, Homo sapiens
ttgatagaggaatttcatcttactctcgtgatattcttgttctaaaaccaaaaattgcagtaaaaggcccccgcccccacaaccatggttgcagaggtgtrgaatagagtagaactcatgaatgacatgagacattggaattcatggataggcatatgctagcaagcctgagatccagtggggcctctaattttgatattt

SEQ ID NO: 251337 - DNA, 201 bp, Homo sapiens
ttattttccgcctctgcaactgaatgtaaaatgatatgctggtgtcatttccatttttcctgcctttgtggtcctgaatgcagtattaactggcatgctamctccctggggattcaggtggccagaaaattgtctccagctcaaaagaggttgggagggtgatgagggggagatccccttatttctctgctcatcttagta

SEQ ID NO: 251338 - DNA, 201 bp, Homo sapiens
ggtctcgaactcctgacctcaggtgatccactcgcctcagcctccctaaatgttgggattacagatgtgagccaccgtgcctggcttgtgcacattttagyaccattttatttttaataatttaaatcaacactagtctgaaaatatttttattttttgagacaaggtgcttactgtcacctgaaattattttaaaattaa

SEQ ID NO: 251339 - DNA, 201 bp, Homo sapiens
atagcctgtcattttgctcacatttcacttctctctctccaacttcagagcccctgctgtggaacaggtgctgtgctgggtggcaggggaggtctctggctttttttttttgatctccgtcttaacatctagcctactggaggaagtgtatttaatcatccacttatctgttaacaattatctctgagggcccgtcacatt

SEQ ID NO: 251340 - DNA, 201 bp, Homo sapiens
tcttctataaagtggagataccaacagcaacctcacagggcttttaagagaatgtttataaaacacttggcacagagcgaggcagatagaagatggtggtkattactgtgatgacagtgatgtttatgtcccatctcccctggtggttgtatgttcctttgaaagagcctccctgtccagttcatctttctattcctccag

SEQ ID NO: 251341 - DNA, 201 bp, Homo sapiens
gtcataggaccagcagtatcagcaccacagttgttagatgttagcagtgcagaatctcaggcctcacttgtccatatgatgtacttgtgtaaattttgcaygcctttgcttcattgttcttccacgtcatccacagcagcccatggtagcatgtctcattctcttcctttgatcgggaggagtctggatttttggatcgga

SEQ ID NO: 251342 - DNA, 201 bp, Homo sapiens
agggcattatttcctaaacagtatcatgtattcatttgtggcagtatagaagatttaatttatacatgtatttatgcatagacatatgaaagagatcatarctctggattcaatgtgataaaaagcagattcattctagagtcccatatacagtggattgtgaagaacaatcctttttattatataacatttactttcctc

SEQ ID NO: 251343 - DNA, 201 bp, Homo sapiens
tttagaataatctggtcttaatgtctgggagttctaatatgtgcatcccaatgaggttcttagacctcagggccagatctcacactgactctctttgaccrtgctgcattccacaggcaatgtggaatgttgcttacctcaaggaacataaaccttacattgtggaatagaggtatttgcaaatatcttctcctctcccat

SEQ ID NO: 251344 - DNA, 201 bp, Homo sapiens
ctgacgctgtcttcctgttcagatggtagcttgttttggggacctttcagcggagtgtctgtccttagtgcctcatgggctgccatgcactgggttttaastgcaaactgttttagaataatctggtcttaatgtctgggagttctaatatgtgcatcccaatgaggttcttagacctcagggccagatctcacactgact

SEQ ID NO: 251345 - DNA, 201 bp, Homo sapiens
ccctcagaaccgggcaaatagagcaaggacaatttcccagcaatatttttccaagttgcggttagtcacttgctgctcacggttcccatttagtgatttcsatttcaatgaactttttgcttagtgacttttgaattcgttcttatcacattacaaacacatacctgaaggttgccaggtggatggatttcagttgatccc

SEQ ID NO: 251346 - DNA, 201 bp, Homo sapiens
ttgactaaggaaggagagtgacagaatgaatatcaaggactctacccctcatttccattttctttgacagtgtgatatgggccacaaatgaagaccttgamcctgaaaccgtctgtggtttctctagcaattctcacgacttagcctcttcctccttcttccctcagaaccgggcaaatagagcaaggacaatttcccagc

SEQ ID NO: 251347 - DNA, 201 bp, Homo sapiens
gaaatggcctcagccaatggatgttcagagagacagagacaggcagcttttctggataagtctttttggctgtagctcatgtcccgttacaaaaatttccrttggattgggccgaggctgggaaattgaaggcatttatttagaatgaaactaaaatttacccccatccccaaatcctttcaatgaaattaaagttactta

SEQ ID NO: 251348 - DNA, 201 bp, Homo sapiens
ctccgcgtgataatgattcttctgagcacattttcttccaaactgtgctcccagaagacacttggagtcttagatggttcatggatcattatcacttgtcrgggacagtggaaacgtaggagctggttgcaagtgccaatcaataagcaatgaaaagaaggcactgtgaaatggcctcagccaatggatgttcagagagac

SEQ ID NO: 251349 - DNA, 201 bp, Homo sapiens
caggagcttttcaggatagagatggttcattgaaatttcacgtggatttaaggctcattaaggtgttggggaagccggatgccactctgtcagtataaatyccagtgaggctaatttagtggagctgtagccagctttcatgttttccatcagccacacttaccttcatctcttcccttctcctttctaaaatactgtatc

SEQ ID NO: 251350 - DNA, 201 bp, Homo sapiens
tgttctcttgcatgatttgcctctgtccctgtcttgagacctttttatacccagaggctggcaatgtaactagagtcctacaataagctcctgtgtgatgraaatggatcttaaagctggtgaggacattgacagtttagggagactagagcataaagtcttagcaatctacttggcagcttcattgacatactacaggaa

SEQ ID NO: 251351 - DNA, 201 bp, Homo sapiens
catcatttctggtcttagcctataaattcctccacgtcctcacttcttatttgatccccttattctccattttagcccatgttagcttgtgctttgttctmttgcatgatttgcctctgtccctgtcttgagacctttttatacccagaggctggcaatgtaactagagtcctacaataagctcctgtgtgatggaaatgg

SEQ ID NO: 251352 - DNA, 201 bp, Homo sapiens
cttgctctttaagcttggcgagggttgggtctgtttcccctcctccattcctgggctcctagtaccatgtggttgctcagtgaatatctgctctttctttytagccttcatgtgggaggcagttgttgtgtagagggaataagactagacttgggtccaatttacctgggttgaagtctttgccccaccactttgctcttg

SEQ ID NO: 251353 - DNA, 201 bp, Homo sapiens
ctgtgagcaagaagattcaaaagctaaaggcttctttgcctccagatcatttctggcagggcttgacactccaaagtgatttttcttcaggtgctcaatcwcatagtaaatttcaatgaaactggcgagcaaatgaaacctcctttaactcactcttcatttgcaaacgtaggaagaaattgttcagtgacaactctgttc

SEQ ID NO: 251354 - DNA, 201 bp, Homo sapiens
agacaactgataggcaaagaaaggcctgggagcaggaacatctgtccgtttgaaggaagtttcctgggtgtgttctgagtgagctgctgagtggccagcargtgctgttctgtggggttgggtggagtgcaggttgcagcctggcctgcatgagccagctgtcagggtaaaggatgccgagccacagagtggtcctcttct

SEQ ID NO: 251355 - DNA, 201 bp, Homo sapiens
ccacctcagcctcccaaagtgctgggattacaagtgtgagccaccacacccagccctaaaaaggtgtcttagtatttatttgcatataacctatgtgcctyctcccatatactttactctctagattacttaaaatacttaatacagtgcctatacatcacttcgtttgtgtgactcagtgtagcactggttgtgcagcaa

SEQ ID NO: 251356 - DNA, 201 bp, Homo sapiens
tctctaaagtagagatcatagtgtccacctcatggtgctcttgagagaattaaatgagatagtgcctctgaagctggaaccacagtgctcagggtttagcrggtctgcaaacaatgtaactgttggtgttatgatattattcctgtggcccctcactgcaaggctcttggagcctagttccctcccaatattaagccttgt

SEQ ID NO: 251357 - DNA, 201 bp, Homo sapiens
ggtctcgaactcctgacctcaagtgatccgcctgcctcggcctccctaagtgctgggattacaggtgtgagccactgtgctcggccattgttgagctgatrgtgtctgctgtgcttagaccgtgtccagcatgagggaaacactcaaagcagtcgttgtgatcacttccatagtagcctttttcactctcgctcaaggggc

SEQ ID NO: 251358 - DNA, 201 bp, Homo sapiens
cttaggcattattaatccaatccttatctcacagaggaccagaaagcctgcctgccgggcctgcccagggtccggtagctacgttgagttagggctgagtmtttgggggccctacctgagcatgagggacaggactttgtgaattctcatataggcaacagaggtggcaattcatgacgactggacatttgtctgcctctt

SEQ ID NO: 251359 - DNA, 201 bp, Homo sapiens
cctgctttgaaaaccttgccttgttcctcgaaggcaggggttggcaaactttgtttttaaagagccaagcagtaaactttgggttttgcagaccatacagyctgtcacaacttttcagttgtgcagttgtagagtgaaagcatccataggcaataagtacacaaatgagtgtggctgtcacccaataacactgtttacaaa

SEQ ID NO: 251360 - DNA, 201 bp, Homo sapiens
tagaggagatgacccagcgtccctgaggtatccaacacactagcttgtaagaataaggatcagaacatgactcgtatgtttgtattctgcagaatctctcyctctctctcacacacacacacacacacacacacacacacattttaaaagctttcatgtgccctgatcacgctgtgcttcttttgtgattaattgagagtc

SEQ ID NO: 251361 - DNA, 201 bp, Homo sapiens
accagaggtaataactgaatgataatacccctgcattttactttctagcaactttcatgtccactatttcatttttaacatcttggatgtgtaggaccaasttatgataagcaactaacttcatctttcctcaattgagaagagtgaggcatgcttctaaatgtagtgttgaacattgtggaggatatgctaacattttag

SEQ ID NO: 251362 - DNA, 201 bp, Homo sapiens
ttttaggacccccaagggttgttaccctaaagagtagttgatgattaaattaaatctctgaaccatcctcatgccgaaggggtgttgacaggggacagtgrcaaccagtgtgttagtccatttgtgttgctataaagggatacctgaggctgggcaatttatagaggaaagaagtttgattggcttacagttctgcaggct

SEQ ID NO: 251363 - DNA, 201 bp, Homo sapiens
ttatttatttatttattgtttcagactcttcaattcgttagagattaagtttgttttttgttttttgttttttttttttgagatggagtctcactctgtcrcccgggctggaggagattaggttttttaaaatgctctagtattatatataaacttagatttcagcttaaaatttcaaatcaaataaattgttcaattaag

SEQ ID NO: 251364 - DNA, 201 bp, Homo sapiens
gtttaattgattcacagttccgcatggctgggagagctcaggaaacttacaatcatggcggaaggtgaaagggaagcaaggcacgtcttacatggcagcargagagagagtaagggaggaagtaccacactttacaaccatcagatctcatgagaattcactcagtatcacgagaacagtatgggggaaaccacccccatg

SEQ ID NO: 251365 - DNA, 201 bp, Homo sapiens
tttaaaatgagtaggttggaggggaactttaaatatgtatattttacttaaaaaaataaaagcccaaaaccttttgtttgaaatgaccataaatcaaagcrttatgggagataaattttctagactttgtgtgtggaggaagttcattgagaaagataaggtggacaaaatgctggagaagtttgggacaacccctgggtt

SEQ ID NO: 251366 - DNA, 201 bp, Homo sapiens
gcgctgcagaagcttgagcagaggtctcttggggcagggaggcaaggaataagggtggaagcaatgtagcaagattgaaaatgaagtctcctacttgcacttttttttttttttttttgaggtggagtcttgctctgtcacctaggctggagtgcagtggtgcaatctgggctcactgcaacctctgcctcctgggcccaa

SEQ ID NO: 251367 - DNA, 201 bp, Homo sapiens
tttatgactcagttctaggctacctgctctgcgtgaggccctctgagaccatccttctctctgtctccctcccctccccaccgacgtggatcttctatacwcttctgagaaccttgagggcagagacagcacctagctctgagcctggtagttaatcagtgtttattgaattagttaagacttacactttattgttttgtt

SEQ ID NO: 251368 - DNA, 201 bp, Homo sapiens
ccaaatattggtcattggagggtttctgtggaaataagatatgtgatgccttttggtattacacaactaacaatctcctgagaaatcgtaaggtttctcayatagcccttatttgcatctttgctatgatgccgatttttaccaagctgttttttgcagttcaaggattggtgggaaacgtttgtatgtgttggggtgggg

SEQ ID NO: 251369 - DNA, 201 bp, Homo sapiens
atcttccctatgatgactttcttaaccagcttcccccaaacaagtagtaacattttccccacccaaatccatcttgaattgtgggaaggatcctgtgggasgtcattgaaccatgggggcaggtctttcctgtgctgttcttgtgatagtgagtaagtcttatgagatctgatggttctataagggggagtttccctgccc

SEQ ID NO: 251370 - DNA, 201 bp, Homo sapiens
gatcaaatcttatgactgtaatttattaaggtatccaatggaattctttccttttttctttcttttttttttttttttaagagacagtctcagttacatargctggaatgcagtatcatgatcatagttcacagcagccttcaactcctgggttcaagtgatcctagaacttgtggcctcaagcagtcctcctgcctcagc

SEQ ID NO: 251371 - DNA, 201 bp, Homo sapiens
gatgtccttgttctgcttttccatagtgaatctgaaaaccctttgcaaactgttgctgctacatcctccattataaacccttctattagactgtgagctcyttgagtatgggggctgcatttcacgcattctgggtctcttggaattagcagaatgccaaggtgctcactggatttgctgtgaatcgaattctgctgtgac

SEQ ID NO: 251372 - DNA, 201 bp, Homo sapiens
gtcagagagctagtgggctttgcagctagttcattcatttgtcctaatccaggatggactgtttaaaaatatatatccagccagaaaacagacatagacasgtatagggaatgagttcttgacagagaatttcagtatttaaccattggtataagcatccttccatccatccattcatctacttatccaccttaccatcca

SEQ ID NO: 251373 - DNA, 201 bp, Homo sapiens
gcaaagagaaatatatcagagaaagatgaaaaaaaccccaaatcaggaaatctgtccatttccacttcctgattctgtgaccttcagcaagtcattgaacyttagagagtgagccttggttcccttatttgtgaaatggagtgctcacattcctttccttagctttctcaagtgaaataatattttatgtaaaaatgcttt

SEQ ID NO: 251374 - DNA, 201 bp, Homo sapiens
tctctgagatggctttaagatggagtggtgagagtccacattgagtttcctatctgtttccagatgtgtgcgtggggtttcttgtctctgtctctgtcccycctcctctggctggcttaatactgggagaattcttttcgcttcctggaggacccacatgctttggagtgagggaagccaacttgaattctggctccaatc

SEQ ID NO: 251375 - DNA, 201 bp, Homo sapiens
attaaacagcttgtccctgaggcagctggagctggcaaggggcctgttcttaaaagcaacaggttgtgtgttggcagccgcacaaaggcagccctgggggsgtccagcccctgctgctctccgggcagggagtccaggtggatgagaaaggaaggtgtctgtcctccgggaaggaagggagagggattaccatcaggtggt

SEQ ID NO: 251376 - DNA, 201 bp, Homo sapiens
ttcatttgttcttttactcactcaatgctgtgttggcaaatggcagtcagtgttaacgtggggctttattaagtccacctccaaaatgttttgtcaatgcyaagcttgtgaaataagaaactctgattctagccacatcagggaggcaggtagcagtcgaggttgtgcacaccttgtggcttgctctctagagaaagggca

SEQ ID NO: 251377 - DNA, 201 bp, Homo sapiens
gtgcaatactgagatttctgtatatgattttctttctttcaacagaggcttccatgacttaaaaacaggtgaaaatgccagcactagctgccctcagagarccatcttatgctgaccgcatgtggttctcttatggttcctatgggcttgagccaggaccaaaacctaagaccctgagccagccaaccagtgatattgctt

SEQ ID NO: 251378 - DNA, 201 bp, Homo sapiens
gcatggaggtatgcacctatagtcccagctactcgggaggccaaggcgggaggatcctaggaattcaagactagcctgggcaacatagcaagatccccatytatgcaaaaaattttaaaaaattagccgagcctggtggcatacacctgtagtcctggctactcgggaggctgaggcgggaggatggctggagcccaggag

SEQ ID NO: 251379 - DNA, 201 bp, Homo sapiens
cagcctgggtgacagagggagacttggtctaaaaaaaaaaaaaaaaagaaatcagaaatttgagcagtcaatgatgtgccctgggggtcacagtccccccmccccggagataatggatttggtgctttctttttgatttttcaaaataatactaaagtcattttcgcttccctctgaattactgcagtaaatttatatagg

SEQ ID NO: 251380 - DNA, 201 bp, Homo sapiens
atagggtttgccttcagatgcagaaacttatctctgagatggctttaagatggagtggtgagagtccacattgagtttcctatctgtttccagatgtgtgsgtggggtttcttgtctctgtctctgtccctcctcctctggctggcttaatactgggagaattcttttcgcttcctggaggacccacatgctttggagtga

SEQ ID NO: 251381 - DNA, 201 bp, Homo sapiens
caggttggtttttctcccttctttgtggtccgcgttttgggattaaatccccctgcagacttttgtctggtcagcctggttgtgactgtggatcttggttwcgtatactgtcagagatggcaaggaattcaaagatgatgtcgttttacgtctttattttataaactcgggcccaaagtgaaatgacttgcccaagaatac

SEQ ID NO: 251382 - DNA, 201 bp, Homo sapiens
aataggaaacacgaagggagaccatgtagtgcagtggttaagagaaggagttccaggcagataagagttgaagctcaaccttggcagtattgacatttagrgctgaacaaaatctttgttgctggaagctgtcctgtgcaatggaggcagtttagtagcattcctggcctttactcactagatacttgttgtgataaccaa

SEQ ID NO: 251383 - DNA, 201 bp, Homo sapiens
cagaccatacagtctgtcacaacttttcagttgtgcagttgtagagtgaaagcatccataggcaataagtacacaaatgagtgtggctgtcacccaataayactgtttacaaaaacaagcagtgggaaggatttggcccacatgcctttgtttgccaaccatgattctaaggggtcttggatggaatggaaacctctgtct

SEQ ID NO: 251384 - DNA, 201 bp, Homo sapiens
gacagttaaaaggtgatattttctatattcagagattattaaattcgttagcaagaggaatgcagttcagacttctcagatttgggaggtaaatctccccsacccccagtgtttgcatttggtttgagtgtcttaattaccattccagaacgtttgtgaaattaaggtggaaaaaagaattctggcttaggtactaacata

SEQ ID NO: 251385 - DNA, 201 bp, Homo sapiens
caaactttgtttttaaagagccaagcagtaaactttgggttttgcagaccatacagtctgtcacaacttttcagttgtgcagttgtagagtgaaagcatcyataggcaataagtacacaaatgagtgtggctgtcacccaataacactgtttacaaaaacaagcagtgggaaggatttggcccacatgcctttgtttgcca

SEQ ID NO: 251386 - DNA, 201 bp, Homo sapiens
tgtttgaaacttgaaacacagaaacttagtgtttctgtgccatgtctcacatacacagagagaatactggttgcaataatttcagagacagttaaaaggtratattttctatattcagagattattaaattcgttagcaagaggaatgcagttcagacttctcagatttgggaggtaaatctcccccacccccagtgtttg

SEQ ID NO: 251387 - DNA, 201 bp, Homo sapiens
atattttgatctttctctgagcagaatggaaaatgtcctgctttgaaaaccttgccttgttcctcgaaggcaggggttggcaaactttgtttttaaagagscaagcagtaaactttgggttttgcagaccatacagtctgtcacaacttttcagttgtgcagttgtagagtgaaagcatccataggcaataagtacacaaa

SEQ ID NO: 251388 - DNA, 201 bp, Homo sapiens
tagtacccttccttgacttagtgtttgaaacttgaaacacagaaacttagtgtttctgtgccatgtctcacatacacagagagaatactggttgcaataayttcagagacagttaaaaggtgatattttctatattcagagattattaaattcgttagcaagaggaatgcagttcagacttctcagatttgggaggtaaat

SEQ ID NO: 251389 - DNA, 201 bp, Homo sapiens
cctgtgttataaaggcaaaactactttaagttagagatcagcatctggatattcagtcatcagccaaatattttgatctttctctgagcagaatggaaaaygtcctgctttgaaaaccttgccttgttcctcgaaggcaggggttggcaaactttgtttttaaagagccaagcagtaaactttgggttttgcagaccatac

SEQ ID NO: 251390 - DNA, 201 bp, Homo sapiens
tcattatttctcagctggctgtaaattgcaccgggagtcagaatcgatacctacctgacctctttgggctgttggtaaaactagaggcaccccttgtggcygtgccgagttgatgtccagaagaacactggttggaggcgaccgttctttttaggctttccagtctagagcttacgacccccagtgcaggagtagcttggt

SEQ ID NO: 251391 - DNA, 201 bp, Homo sapiens
gagaagcctggtggcacccaggtgaaaagaggccactcattatttctcagctggctgtaaattgcaccgggagtcagaatcgatacctacctgacctcttygggctgttggtaaaactagaggcaccccttgtggctgtgccgagttgatgtccagaagaacactggttggaggcgaccgttctttttaggctttccagtc

SEQ ID NO: 251392 - DNA, 201 bp, Homo sapiens
tgatctcactattgcattccagcctgggcgacagagtgagacctcatctccaaaaaaaagatgactaatttggaagacatggaccctgttttgaaacgatractcacttcagctagaggagaagcctggtggcacccaggtgaaaagaggccactcattatttctcagctggctgtaaattgcaccgggagtcagaatcga

SEQ ID NO: 251393 - DNA, 201 bp, Homo sapiens
gtccagcggagggcattccccttggatccatcacttttgcttaaatctcacttagctccagccatttatgtctgtgggggaggctgggaaaggtagtcttyattccgtgtggtcatgtgctaaacttgtgttttctttattctaaaggaagacagagaatggatattgggggtcaaccaggagttctgctgcaaaaggttc

SEQ ID NO: 251394 - DNA, 201 bp, Homo sapiens
tgtatttctgaaaagctcctgggttatgttgacgctgcctgtctggggaccacactttgcatagcaagttattttcagagcaattgatttcagagtgactyaggagtgggttggagtcacagctgtaccatcaactagctgcttgatcttggacaagttattttaacctctgtcaccttaagtttattcatctgcaaaatg

SEQ ID NO: 251395 - DNA, 201 bp, Homo sapiens
tgatttatgggttccacctcctaagaggtccagtgtgggaaaacaaaggaagggaagaaatcgatgtaaggagattaataattctggtaggaggcaccacrtgatgcacaggcctaaacttcctattgaagctggttggaaggccgaggcaggaggattgcttgagcccaggagtttgagactgctctgagcaacatagag

SEQ ID NO: 251396 - DNA, 201 bp, Homo sapiens
caggtgcaagcacacagcagtgcactcacagatgtgtgcatatacaaacacacatgtgcacatagacacatgcaggcatgcacacagatacaaacacatayagactcatgctcacaagcatgcatgtgcatacagacacagttttattcaacacatgcacatacacacaacacacatgtccatacacaatcatccttattc

SEQ ID NO: 251397 - DNA, 201 bp, Homo sapiens
tccagcggagggcattccccttggatccatcacttttgcttaaatctcacttagctccagccatttatgtctgtgggggaggctgggaaaggtagtcttcrttccgtgtggtcatgtgctaaacttgtgttttctttattctaaaggaagacagagaatggatattgggggtcaaccaggagttctgctgcaaaaggttct

SEQ ID NO: 251398 - DNA, 201 bp, Homo sapiens
atagcaagttattttcagagcaattgatttcagagtgactcaggagtgggttggagtcacagctgtaccatcaactagctgcttgatcttggacaagttaytttaacctctgtcaccttaagtttattcatctgcaaaatggagatcatatcacttagggccaaattagataatatgtgtaaagagcttaacacaggttat

SEQ ID NO: 251399 - DNA, 201 bp, Homo sapiens
gctgtgcagtcctgcatgggctggagtggggacagctgtggcagaaatgaggtggacagagtgaggtggtgggcatgtcaactgcaaagttccttcattayggatcgacatgctcctttacatatcctgctgggctagttgctcacagtggagagtctggagttattgcaattctgtggcaggcaaaatatatagaataaa

SEQ ID NO: 251400 - DNA, 201 bp, Homo sapiens
ctgtggaaggaatgtcccaaaaatcaggtgtctgatctgtgcgtttccattcaccatggttttagggaccatagagaaggatgacaagcgaacgcagatamccagtttcatcagtgtcctgaaatactcaagtcacctattgcaggagtatttcagagtgagttttgagtatgggattgagctttgttcaaagtccaacat

SEQ ID NO: 251401 - DNA, 201 bp, Homo sapiens
tccagaagtgaaaactggagcctcctgtgtgcagattcaccatgtttagtggggctgtgcagtcctgcatgggctggagtggggacagctgtggcagaaawgaggtggacagagtgaggtggtgggcatgtcaactgcaaagttccttcattacggatcgacatgctcctttacatatcctgctgggctagttgctcacag

SEQ ID NO: 251402 - DNA, 201 bp, Homo sapiens
ggtttctgatacctaaatgtctcatccaagtgaacagagtatttactcgtctatgacttgaaaaaagaatatctttttgatgttattgtaaataggactgtttccttccttctttccttccttccttccttccttcctctctccctccctccgtccctcttttccttcctttctcttgcattttttttttttggagttttg

SEQ ID NO: 251403 - DNA, 201 bp, Homo sapiens
tttcttgtcaggctacttcctgataggttcctgcagctgctttgatctaacttcctcttttccccactggacaaaaccaaaacaaagcaaaacaagtccaraaacaaaagagaagtggggataggaccagccacgtgtgtacccttgggcggttggtacatgctcagggcatgagcccaaacttgctgtgacaagtatggt

SEQ ID NO: 251404 - DNA, 201 bp, Homo sapiens
aaaagggaagaaaatttattattaaaattaatagtaatcatggtaacgacactaacaatgtttaaactttattgagagcttactctgttccaggttcttcyggtccctcctaatgatcttccctttgcatctcattgaccatagctgggttgcatgccctttcctagttgcaggagaggcaagaaaagtttggcaaaggaa

SEQ ID NO: 251405 - DNA, 201 bp, Homo sapiens
tgtcgtaaattagtgtccacttttggctgtgagtgccatgagggcaggggatggcctgtcttcttcattgctgtgtcccaaggaaagttctcaggaaatayttgctgaatacatgaaggatgcatgagcaaacacatacgtgatcgctcccaacgtgcctgggggaggcaggggcagggtctgtgaatgctgctcatccac

SEQ ID NO: 251406 - DNA, 201 bp, Homo sapiens
catccttccacagatcactgggcccctcctgagtcgtctggctccttctttcctcttggggagagataaagtgctggcccaagcctcccaccctggtgggyggggtgggccttgactcagtggtctgtatcctcgtggccagctggcctagctgagttgggaggtgaccctcacctcacaggttgggcagcacctgtcagt

SEQ ID NO: 251407 - DNA, 201 bp, Homo sapiens
gtgttcctctgaggctccctggtaacatgccatccattgaaaattggcctctttgcctgggggagcccctaggatgagttgatacctaagtcaccactggscatgctgaattaaaggcatgccttgctgtaaagaggaacggaagctcagggcaccaagcagaaggggcacattaggagagcctagcagaaatgtattttt

SEQ ID NO: 251408 - DNA, 201 bp, Homo sapiens
aatgttcctgtttgttcttccttctagagttacgaatggtaaaaaggcaataactgatgtttactgagcacttcttatgtgctctaagctctcttcatgcrttctctttccccccttccaaatcctctccatcatagctgttactgccacttaaagatgaaggaagagccttgagaggtttagtaacattcccaggctgag

SEQ ID NO: 251409 - DNA, 201 bp, Homo sapiens
tgcgtggtttcaggcagggctttagttccagtaaaacatcacccctcatgttaatgttgtgcatttgaatgtttatgtttgttttgaacttgtagttgtgyacctggttttatatttctgcacttttttttttttttttttttttttttttgttgagactgagtctcgctctgtcacccaggccggagtgcaatggtgcaa

SEQ ID NO: 251410 - DNA, 201 bp, Homo sapiens
tattcatcattaagacataatgtatgggttggcgaccagggattcaaatactcattaaatgtgtgacctcaggcaagtctctcagcctagttgagctccatttccatcacctagatgaacacttgcctgtaggactactgtgaggattatatgtttaatgtatgtggggtgcttggcacataatagcacttaataaatgct

SEQ ID NO: 251411 - DNA, 201 bp, Homo sapiens
aagctgttggcagggcatgctctctctgaaggctccagaggaatggatccttccttgcctcttcccagctgctggtggtggccggcagtccttggcatttyttggcctggagacacatcattgcagtctccgactctgtcctcacgtggcattctccctgcgtgtctctgtgtctctgctttctcttcttataaggacacc

SEQ ID NO: 251412 - DNA, 201 bp, Homo sapiens
gaggaaagagtgaatcattggtttctcgggacccccccctccggttatgaaagggtgaggagtaggaatcaggctggaaaagtaggttggcattgggctawggagaaccccaaaaggccagtgtatgaatgggggcttggttcctggggcaaggaggcaaccaagacaccacctcatctgtagctccagagcaactattcc

SEQ ID NO: 251413 - DNA, 201 bp, Homo sapiens
tcttttttgggtttcaatttccatagctataaaatgagaatagttgtagtatctatctcgtgaatttattatgagaattaaattattttctctgtggattwaaaaaaaggacttttgcccctgattcttgtttttgaatacagtcttgatccccagaagtgtggcagctctcttgtacacatgatgaagagtgtgaagggg

SEQ ID NO: 251414 - DNA, 201 bp, Homo sapiens
ttctttaatcttttttgggtttcaatttccatagctataaaatgagaatagttgtagtatctatctcgtgaatttattatgagaattaaattattttctcygtggattaaaaaaaaggacttttgcccctgattcttgtttttgaatacagtcttgatccccagaagtgtggcagctctcttgtacacatgatgaagagtg

SEQ ID NO: 251415 - DNA, 201 bp, Homo sapiens
tttgcttccaagtgccagcatctccgagtagtgtatctgacaccagcacactctggtgtcagaatcttgggtttatattctggctactcaaactgtgtggycctgggcaaattctttaatcttttttgggtttcaatttccatagctataaaatgagaatagttgtagtatctatctcgtgaatttattatgagaattaaa

SEQ ID NO: 251416 - DNA, 201 bp, Homo sapiens
gccaggagccgcaagattttccgttcaggttgtgtcgtctcagagctaagatgggtgcatgcgagtacttccccggccagttaacaaatgcgagcatccartaccgtgcccatgactgtgggtgcagggagcagagtgtaggcagatgagcaaatggggtttccatgcctgaggaacaagaagtcttaggctaagtggtga

SEQ ID NO: 251417 - DNA, 201 bp, Homo sapiens
tttaagtttttcttagctagcataataagggatagtctgagcaactcagactgcctatttagaaagctctgggttttgcttcaatatggatggaaaagggrattgaaaaagttgacacagaagggcatgcagtctcagaaagggccattgcagcacctggcgatttttttttccaggatggagaaaagttttcttgtcagg

SEQ ID NO: 251418 - DNA, 201 bp, Homo sapiens
gggagattgggggaccgtgggcgtgtttcatcagatgcagctccaatggccttttccctctgaccatatttcaacaaccacacttgacacacagcctagcytcccccaaagctcacgtgtgcaccctctgcccctgtctggggcctcccctattcattttcagatcgattctgacacctgcttttatctcccttacccctt

SEQ ID NO: 251419 - DNA, 201 bp, Homo sapiens
attgggggaccgtgggcgtgtttcatcagatgcagctccaatggccttttccctctgaccatatttcaacaaccacacttgacacacagcctagcctcccycaaagctcacgtgtgcaccctctgcccctgtctggggcctcccctattcattttcagatcgattctgacacctgcttttatctcccttaccccttcagca

SEQ ID NO: 251420 - DNA, 201 bp, Homo sapiens
tctcagctcactgcaacctccaccttccgggctcaggtgatcctcccatctcagtctccgtgcccatcctctagggtctgttttataaaggcatcaatccyacttatgagggctctaccctcattacctaattacctcccacaggctccaccttctaataccagcacattggggatttcgacacacgcattcagtccataa

SEQ ID NO: 251421 - DNA, 201 bp, Homo sapiens
cattccggtggacgagagtggagtcgacacagtcctcattactgcccaggtctaaattaaacaagacaagggaggttcttgaggagcaaggcagaagttamtgaaggcttgaacagtaaattgcaggaaaggagcttctgtcggggaaggttctccgactttccagggtgcatggaaccccaatgcatttctcctttggag

SEQ ID NO: 251422 - DNA, 201 bp, Homo sapiens
gatgtcgatgctgctggtccagggaccatacctctactcagaaggcctaacactgtatgccactttggtgtgacaagatgaaacactttgagcttcctcargatcttcctttcccatttgcccagatgttcttcctctggatcttttctgttttttgtattttttgttttttatttttctttgagacaggtcttactctgt

SEQ ID NO: 251423 - DNA, 201 bp, Homo sapiens
caaattctcacaacggcctcataaggtacatgttacctggacaaagacagcagctcagagaactcattccacttacccaaggttgcagatttcaactcggkcccaactcactccagagtctgtgcatccccccacttaagactttaatgtcttaaaaatgtccccacttcttctgtcttttagtggcttcacgtctgaagt

SEQ ID NO: 251424 - DNA, 201 bp, Homo sapiens
tgggtcataataacatgcaaactggatccgtggttcagtagcccaggcctctttgcacatatagattattgctctgccctttatagtggggataaatttgktgagtggtggcatttggtctgtgaataaccagaggtcggtaatttgccagttatttccaagctgggaaactccaggccaagctggttttaccaagtggaa

SEQ ID NO: 251425 - DNA, 201 bp, Homo sapiens
gctctcttctgggtttgcagatggctaacttctcaccatagcctcacatggttgaggatggctggagaactctctagggtctctctctctcttgctctctstctctctttttttaaaagcagcatctcactttgtcacccaggctagaatgcaatggtatgatctcagctcactgcaacctccaccttccgggctcaggtg

SEQ ID NO: 251426 - DNA, 201 bp, Homo sapiens
ctttactcggctgtcttcctttcattcctatctcagcaaaaacgtcaccacctagagaaactttgttttctcccatggcccaaatctaaagtagctcccaytgcctgttttagctcttagaagacagcctctgagatgatcttgttttgtatttctctctgtctctatgagaagaggagttctgcgagaacaaagcccttg

SEQ ID NO: 251427 - DNA, 201 bp, Homo sapiens
ttttccttgagatggagttttgctcttgttttgcccaggctggagtgcaatggcatgatcttggctcactgcaacctccacctcccaagttcaagtgattytccggcctcagcctcccaagtagctgggattacaggcgtccgccaccattcccagctaatttttgtatttttagtagagatggggtttcaccatgttggc

SEQ ID NO: 251428 - DNA, 201 bp, Homo sapiens
acagttgctggaggactcccttagtctttccctccaccggtggagctgccgcagttgccttacagagcatttgagatcggctgtggtcaaataatacacaygttagagtaagatggactgttaaatacaagaacacccagttaatattgaatttcagatagacaatgaataattttatagtatatgtatatcccatgtgat

SEQ ID NO: 251429 - DNA, 201 bp, Homo sapiens
tggggtcttaagagagacaaataaatgattatgaggtcattaggatgggccctaatccaatctgcctggtattcttgtaagaagagaaaatttggatgcayggaggcaccacggttgtgcacgcacagaggaaaggcctcatgggaggacacggcaagatggtggccgtctgcaggccgaagagaaaggccccaggagaaa

SEQ ID NO: 251430 - DNA, 201 bp, Homo sapiens
aaggcaataactgatgtttactgagcacttcttatgtgctctaagctctcttcatgcattctctttccccccttccaaatcctctccatcatagctgttaytgccacttaaagatgaaggaagagccttgagaggtttagtaacattcccaggctgagtggttaagtaactgggggaagctggaatttgatctctgcagcc

SEQ ID NO: 251431 - DNA, 201 bp, Homo sapiens
atcctcagagccttttattgcacccgcgcttggatgggtgtcttgaagccgatttaatcctggtctgtctacacaggggagcagcaagctgttgacagccwcattttatggtcatcagtgccctcttccttctgaagcttgtcaattttaatgtctggagaaccagggggtggtgtaggggcttccagacccctgtttgca

SEQ ID NO: 251432 - DNA, 201 bp, Homo sapiens
ctgcctggtattcttgtaagaagagaaaatttggatgcacggaggcaccacggttgtgcacgcacagaggaaaggcctcatgggaggacacggcaagatgrtggccgtctgcaggccgaagagaaaggccccaggagaaaccaaccctgcttgacaccttgatcctagacttccagcctccagaactgtgagaacgtaaaa

SEQ ID NO: 251433 - DNA, 201 bp, Homo sapiens
ttatggtcatcagtgccctcttccttctgaagcttgtcaattttaatgtctggagaaccagggggtggtgtaggggcttccagacccctgtttgcaatcaycacttgtacaccagagcttctcacacttagatgcatgtggaattccctggggttggagttaagttgcaggttgtgattccataggcctggcctggggtct

SEQ ID NO: 251434 - DNA, 201 bp, Homo sapiens
ggtgggtatattaggttcccagggctgccatacaaattctcattatcataaagtgggttgcttgaaacagacatttatcctctcatggttctggaggctcraagtctgagatgaaggcttggttccttctggaggctctgaagaagaatctttcccatgtctctctcctggcttctgtggtcgttggcaatccttggtgtt

SEQ ID NO: 251435 - DNA, 201 bp, Homo sapiens
tctgttgtgaaagccacctactctgtggtattttgttatggcagcccaggcaaatcaatacatgattaaactcctctgatgcttaagtacctcacgtattaaaaaaaaatgtttacatcctgttttctctacactgtttccttggtggtttcttcttaagttgttttctggggttttccatgaggaaccaaagtctcttgg

SEQ ID NO: 251436 - DNA, 201 bp, Homo sapiens
gggataacaatatctacttcaaagggttgttgtgaggatgaattgagataataaatgaagacatctagtgcaaggcaagtgcttgatcagtttaaaggttytctcttcttgcagtctcttaccagcctgttgtggagtacctggaaggaaaggtacaacacttctctagtaacacatcactgggtggcagtgagtacagct

SEQ ID NO: 251437 - DNA, 201 bp, Homo sapiens
ctatagagacagaaactagattagtggttgcatagggcttagaaagggcatagacagaatcttttgggggtgataaatatattctaaaattaggttacagygatgattgcacaactctgtaaatacatgaaaaaccactaaatcgtgcattttaaatggatgaattttatggtacataaattatatctcaagctgcttttt

SEQ ID NO: 251438 - DNA, 201 bp, Homo sapiens
gtcctctggccacactgaagtccctagttctagatgccatcaccctcaccctacttcagaggctgtaccaaattcttagaagagaaattttgcctcaaaarcgacctgggaacctgacctcaggaagaatttcatctctgtgggaatgtggaatcggagtgatagaggtgaatgacaaggatgtggtgttccttaagctga

SEQ ID NO: 251439 - DNA, 201 bp, Homo sapiens
ggtccagaaggagctgcccatactactttcttatgagcatgctcagtatggcatatggacatgtaatgtcacatctttgtggagtgtgattttcttttttyacatatttgtatgcagtagagagcctgttgtagaaaacgctccctgtatcttgctgtactgttaaagaaagctgaattccacattgccaacaaaagcgtg

SEQ ID NO: 251440 - DNA, 201 bp, Homo sapiens
tagcagagcgagtcctcaaaaccaaggggcttccccaccactctgaatccaccagcaatctctgcctctgcacggcacccagggcagggtggtccttcccygcttttctattccagaccgtccatgaactgcctccatttcctccacccacccccaacatagcctccttcatggagcatatacacatgtgcaagtgcatat

SEQ ID NO: 251441 - DNA, 201 bp, Homo sapiens
acacatccatacacacgcactcacactcatgcacactctcccacacatacccacacacacacaaatatactctcacacatacccctgcatacacacacatyatacatacacaccacatatacacacacactcccacacatacccctcacatacacaaaccaatacacacccacacatacactctcacacacaccccacata

SEQ ID NO: 251442 - DNA, 201 bp, Homo sapiens
ccccaggcaatgagactgtcctagacaactcatttaacatgtagcacagcacattcacaaaccgtttgtttcgacttttcgacctacttaaaatcacttgraatttgttgccgtgtgaccttgggcaagttccttaacctctctgagtctggcagaacattccctggaagggctgctgaaagattaaatgtggtcagcctc

SEQ ID NO: 251443 - DNA, 201 bp, Homo sapiens
acagtagggtgccaccactccgtgaaggtctctgagcctctgggtgctggagacgcaggtggtggcagagcaggcagagtgccctcctgtttcctgttctrggtagactgtgagtactggtttggactgggagtgaatggcctttggggagaaacttttgctcttagaattcagaggaacacacacatcttcccaagcatt

SEQ ID NO: 251444 - DNA, 201 bp, Homo sapiens
aaccaacatatcctggggtttgatctctctggtggtgtcagaggagtccaaagtgagcatctgtaagctcggctgtgatccagcctatttgggaggatctstattaaaccagtgactgccctccccaccccacctctactcctaaagggttctgtttcacaagagccaggctcaggtacctgtttttctccacccacacct

SEQ ID NO: 251445 - DNA, 201 bp, Homo sapiens
gcacgtttcttataaacaatagaaacttgtttttcacagtctggaagctgaaactctgggatccaggtggcagctagttggttgttagtgaggctctcttytgggtttgcagatggctaacttctcaccatagcctcacatggttgaggatggctggagaactctctagggtctctctctctcttgctctctgtctctctt

SEQ ID NO: 251446 - DNA, 201 bp, Homo sapiens
aacagttagtggtcttgacgtgtctgacaacctacaaaaccaacatatcctggggtttgatctctctggtggtgtcagaggagtccaaagtgagcatctgwaagctcggctgtgatccagcctatttgggaggatctgtattaaaccagtgactgccctccccaccccacctctactcctaaagggttctgtttcacaaga

SEQ ID NO: 251447 - DNA, 201 bp, Homo sapiens
catcagggaatggcccgtttgagggtggggagggcagggcccagccccatgagctgcctcagggcttctgcagagctggccacatgttgggctttattgayatcaggtgttgtgacccatggacttgatcaatcatttcggccttcccttgtggagcctgtccaggagaatggatgtggactgtgttctgatggaggaaaa

SEQ ID NO: 251448 - DNA, 201 bp, Homo sapiens
tgtctgagcagccctattattaccctgcagagtaaaagggagacaaagacccaaggtgaatttcgttacaaattgaaaagcaaaaaaatcaatccattcattgccttcttaaattctctgtcatgttcctccacactcagaggtttaaggaccatcagggaatggcccgtttgagggtggggagggcagggcccagcccca

SEQ ID NO: 251449 - DNA, 201 bp, Homo sapiens
ctgaattactgcagtaaatttatatagggtggatgttggccttgccacagcaattatgtcgtttcgaagtatgccattgttttgtcctgcagctgaaaaaygggtgggtttattaggtccacagggcagcgtccttgttctgagaagagggaggcatgcaggaatggccagcattcctttttgttgggcttgtccctgtgg

SEQ ID NO: 251450 - DNA, 201 bp, Homo sapiens
gatcccccttcctcagcctcccaaagtgctgggattacaggcgtgagccaccatgccctgcctgttttcactttcatatgctgtcttttatatgtgtatgwgtgtttacacaaccaaggtcccgacctacataatattttgaattctgttgctttaacttaaagcagcggtttaagtggttaatttaacttaaactccatt

SEQ ID NO: 251451 - DNA, 201 bp, Homo sapiens
ttgtcacccaggctggagtgcaatggtgagatcttggctcactgcaacctccgcctcccggttcaagcaattctcgtgcctcagcctcccgagtagctggrattgtaggcatgtaccaccacacttggctaattttttgtatttttagtagagatggggttttgccgtgttggccaggctggttttgaactcctgacctca

SEQ ID NO: 251452 - DNA, 201 bp, Homo sapiens
ggtgggaagagacggtcatacctcagcaggcagcattagtactttatggtactttataattgggcagcagaaaaggcacaagacttgaatttgaaagatarggtttctagttccagttcctccacttatggagtggtcttggatttgtcatttaacctctacaagcttagtttctgcaggtgatgtccttgttctgctttt

SEQ ID NO: 251453 - DNA, 201 bp, Homo sapiens
atggtgagatcttggctcactgcaacctccgcctcccggttcaagcaattctcgtgcctcagcctcccgagtagctggaattgtaggcatgtaccaccacrcttggctaattttttgtatttttagtagagatggggttttgccgtgttggccaggctggttttgaactcctgacctcaagtgatccacccacctcagcct

SEQ ID NO: 251454 - DNA, 201 bp, Homo sapiens
cataatgaatatagcatcctttagctggggatgttgggaggatttattttttatctgtgatccaatattaatttgccttaaacaaaagaagcaatttactstgtaattctgaggtttatggtgtttctactaagtcctttcatctttgaaagatggtgttatgcattttaatagaaaccatttttttcttaaaatcttttc

SEQ ID NO: 251455 - DNA, 201 bp, Homo sapiens
taagacgctctatcaccagtatttgaggagtcttcaggcagcggggcagggagtaagagacagaacaaatgctccaggatgaggagacccaggggatttgygcggctccggcatcgccagcatagttgttaggaaacctgggctaattagggtgctctgttgttcttctcagcaggcccttgaaattgggcagacttctgg

SEQ ID NO: 251456 - DNA, 201 bp, Homo sapiens
gaaattctatagcaaacatctttgcgcgtccatcttttagtttctgttgaattaatccctcggtgtaatttcccaagagggaaattgctggatttgaaggrtgtaaacatcatcatggctccagtaatgcagtgcacgtggggagatttttaaaatcagtgttctctccgttggcatcttgtgccagaaaaatgtcagaag

SEQ ID NO: 251457 - DNA, 201 bp, Homo sapiens
acacctcccgcccaatacatttaaatctgaggttctttatcaggaccaatttgcaaaacttgttgctgtctctaaagaatggagtacactatcacactgayaaagtagtgtatcccttacgcttgccagtttgagctgcaggaatatttgggaaaatgagctgcatgtgtcagatgggccacatcacctggagcaggcaga

SEQ ID NO: 251458 - DNA, 201 bp, Homo sapiens
ttcgactctcctggagcttataaaattgggatgtctgtttccactagcatttctttcccagttatattaatcaataatgtgaaattaaatcaagaaattcyttatgccggcactggcttctccaatacatttatctctgtattctagtatttgctttggctctttttctcagaaggggatttttccacacaatttaggagc

SEQ ID NO: 251459 - DNA, 201 bp, Homo sapiens
gattacatgagattgtatggtgtgtaggatacacctcacttcgtgtttggcatttagtgggtcttcatgtggaggtccgagctttcaagacagccttttgyctgatgtagatgtatttacgtgtattggtgtagggttctcaggcaggcttgatcatcagaattacctggtgtactttaaaataatcccagcatgagcatc

SEQ ID NO: 251460 - DNA, 201 bp, Homo sapiens
gggttttggggatgaaaagtcaaataagacaggatctctgacctcaaggagcctacagtctgcggtacaggatgttttcctaaattttaagtcaaattctyccttgacacatacctatttttattttgttttggttctcatctctgtgaacagagcaaagcatgcaaccattgtaacactttcatttgtttttataaactc

SEQ ID NO: 251461 - DNA, 201 bp, Homo sapiens
cttcgaatcacattttggaggtggccctatggttttgttagggtttcagacctctaaaggtctaaatccagctgtggctacactgaacaattttcctgtartggttgggagcaactttgtggggttgaaatatggtattcagaaatatggatagattttcccaggaaatagtaagatatgagattcccctttcagccaccc

SEQ ID NO: 251462 - DNA, 201 bp, Homo sapiens
actgtgccaggttttagccatcccaggtactagtacctatggagcatccacctcccaggcaaaagggggcagggcactcacttattccttcacaaatccamccccaacacccccttctctccctgccattatctcttccacagttttaaatttttctcccaggaagccttcatcaaatccctcaggcaaggtggcacaaag

SEQ ID NO: 251463 - DNA, 201 bp, Homo sapiens
cctcgtgacacatgttctgcatcaatccacgttggctgagcagtgagaaggcagcatgttacagtcttgcctctccacagacgttggtggcatctttcttscctgcccgtgtctttatggctgctcggttttcctctgctgtcagctctcccggcctctgttgaatggcctgcacttagttttagtcgatttcctcccctg

SEQ ID NO: 251464 - DNA, 201 bp, Homo sapiens
tcaatccacgttggctgagcagtgagaaggcagcatgttacagtcttgcctctccacagacgttggtggcatctttcttccctgcccgtgtctttatggcygctcggttttcctctgctgtcagctctcccggcctctgttgaatggcctgcacttagttttagtcgatttcctcccctgagtctgatttctctgcagttt

SEQ ID NO: 251465 - DNA, 201 bp, Homo sapiens
tggctgctcggttttcctctgctgtcagctctcccggcctctgttgaatggcctgcacttagttttagtcgatttcctcccctgagtctgatttctctgcrgtttccagcacagataaggctgtacatttcagactgcggtcccagagcaggatttttttgctggcttctttggggaggatgtttgttaatacagaatcaa

SEQ ID NO: 251466 - DNA, 201 bp, Homo sapiens
ttccatttgctcctgataggggaggagactagtggtctcttctagctttttatgcttttaaactgttttgcagagaaatgtggtgttttcccccaaccccytcccatccttctcgtccctggactcggctcagagtcttacaggagtccaggagtataagttgagggaaattaatgcatttggttggatcctgcctgatgt

SEQ ID NO: 251467 - DNA, 201 bp, Homo sapiens
gcctccatgacgcaaacacctccccctaggcccacgcccaacattagacgtcacatttcaacatgagatttggaggggacaaaccatccaaactgtgtcaygcagtatttttccaggcttagtttttacattagcaggacaggcatttttggcaacatgtcatattttgtgtttccatttgctcctgataggggaggagac

SEQ ID NO: 251468 - DNA, 201 bp, Homo sapiens
cttttaaacaaccagatcccatgtaaactcacagtgtgagaactcactcattaccaagaggatagcaccaagccattcttgaggtatcagcctccatgacrcaaacacctccccctaggcccacgcccaacattagacgtcacatttcaacatgagatttggaggggacaaaccatccaaactgtgtcatgcagtattttt

SEQ ID NO: 251469 - DNA, 201 bp, Homo sapiens
atagcggcattattcacaatagccaaaaggtgaaaacaactcacgtgtccatcgagggatgaatggataaaccaaatgtaatataaacatacactggacarctattcattcaggcttaaaatgaaagaaaattttgacacatgctacaacatgggtgaaccttgaagacatgatactaagtgaaatcagccagacacagaa

SEQ ID NO: 251470 - DNA, 201 bp, Homo sapiens
cttgggggagagatcgtctttccagctatctttgcttctggagaaaagatgctcacagtacttgttcaacagccgcacttcagcctcctgcacttgcctcrtactcaccttcagcaatgccaaagcgcttaggcctccagcatacatcatcaacgccttctgtctgttaactgtgcaacagctcctctctgatttgtgaaa

SEQ ID NO: 251471 - DNA, 201 bp, Homo sapiens
tatgttcatagcggcattattcacaatagccaaaaggtgaaaacaactcacgtgtccatcgagggatgaatggataaaccaaatgtaatataaacatacamtggacaactattcattcaggcttaaaatgaaagaaaattttgacacatgctacaacatgggtgaaccttgaagacatgatactaagtgaaatcagccaga

SEQ ID NO: 251472 - DNA, 201 bp, Homo sapiens
gacacacaagatgggaacccatgtgtatcagtttgctagggctgccatgacaaattcccacacactgggtggctttaaaccacagaaatttgttctcccayggttctaaagggagaccagaggtccaaaatcaaggtgtcagcagggccgtgttccctctgaaggccctagggaagaatccctccttgcctcttcctggct

SEQ ID NO: 251473 - DNA, 201 bp, Homo sapiens
atcacctctttctttcaaatccccctgttgggcataggatatttactttgaatgaatttgtctgaattttagagactctcttgctttgctccatctcatgsggaaattgggaaaacaaatgagaaaaagggcagtgcaaataacttcaggtcagctaatctggaggggaaagaagtgtcttaggagtaaagatggttatta

SEQ ID NO: 251474 - DNA, 201 bp, Homo sapiens
aagcaagtactcttaacattttttaaatgtctgtggtgggctagtggatattctgaaatagagttttggcatcacctctttctttcaaatccccctgttgrgcataggatatttactttgaatgaatttgtctgaattttagagactctcttgctttgctccatctcatgcggaaattgggaaaacaaatgagaaaaaggg

SEQ ID NO: 251475 - DNA, 201 bp, Homo sapiens
aatgaataaagcctactttaaaattgatatatatttaaaatttttaaaattgtaatttgggagccataaaaaagaatacaggtagtgtctcagatttaggaaaagtcattatttttagctaagaaccatcaattctagacttgttaatcttatcttcactttaatcaatagctctggcaggccactttttggggagagcca

SEQ ID NO: 251476 - DNA, 201 bp, Homo sapiens
gtggaacccatgaatgtggaactcatgaatatggaggctgattgtacaggacaaaaagtcataaataaaatgaatgaataaagcctactttaaaattgatrtatatttaaaatttttaaaattgtaatttgggagccataaaaaagaatacaggtagtgtctcagatttaggaaaagtcattatttttagctaagaaccat

SEQ ID NO: 251477 - DNA, 201 bp, Homo sapiens
gcagttggtaaaggaagcacctttcagaccattagctaaagccaacttcctttaaacttaaaggagggcacagcatgatagatggagatctgccccagtgygtcatcataaatgcctcgaggcagccacaggatgggttttgacctcagtggggataggtttggttagagggttgggtagaaccccctaacctgtagaaga

SEQ ID NO: 251478 - DNA, 201 bp, Homo sapiens
tttgacaccagcattttgcatgatagcctgttagatttgcttggctcagattgatattttcattcctctaaggctgcagcatggaaacatggttgagtggkgtttgccaagatgggatgatttcctgtgctgtggcaggaccaggacagctgttctgagaactgtttcggcaaagccttcacagttggttttgttgaaggc

SEQ ID NO: 251479 - DNA, 201 bp, Homo sapiens
tgataacactagtaattttagctagtatttactgagcacgttctatacaccaaacaagcatgtgcctcacctaactgtcacaacatcctttcaggtaagcrtattttcaagtaaatttgagccagctttatctgggagatggcatagcccagctgtgagcaagaagattcaaaagctaaaggcttctttgcctccagatca

SEQ ID NO: 251480 - DNA, 201 bp, Homo sapiens
gatcgcgccactgcactccagcctgggcgacagagtgagactccgtctcaaaaaaaaaaaaacaaaacaaaacaaaacaaaaatgcaggccccagtttcayttgcatgttgttgaatttggagagtcaatcaatcaagccaggtcccacaatgagcacaatgccaatctgcagaatctttcagggcaaaagggaatttaga

SEQ ID NO: 251481 - DNA, 201 bp, Homo sapiens
gggcaaaagggaatttagaaagatgagggagaaaggatctgaagactgatccgttcctctttcaatgttcaaagtataaaatttttctcctcagttttatsagttaatactgtcctttacttggctaatatttattatatagcataagatgtaacaaaattttcttaggctaggaatggaaagaaagcaatgattctaact

SEQ ID NO: 251482 - DNA, 201 bp, Homo sapiens
ttatggttataagacctaagactgctcactgtcccaatgatcctacaatgctcctgagctacatcatcccctacagttcccctccccaccccagacagtgkcccccacacccaccataaccctctggatggtctcatgctatgagggacttccctctcatgcaaccctgtttaagtgctgttgtgtgtcactgccaaatct

SEQ ID NO: 251483 - DNA, 201 bp, Homo sapiens
ttcctgattgtgggaatgcaagaatggatgttgggcatgattcaccatcctcccccaccatgtgggccaactccatgatctctgtgactcacagggaattrgacttctgatctcttccttgaccctgtgacttcccaaactgccttgtgcatgtccaggctttggggcaggtaactgaagtctttggcctatgaggtgaga

SEQ ID NO: 251484 - DNA, 201 bp, Homo sapiens
cacacacactcccacacatacccctcacatacacaaaccaatacacacccacacatacactctcacacacaccccacataaacacacacccacacatacaytctcacacacactcccacacataccccccacacctatacatatacaccaacagaaacacacacatacatacatgcacatacatgcacactcacacacaca

SEQ ID NO: 251485 - DNA, 201 bp, Homo sapiens
ttttagagatgaacaaacaaacaaggcccaagaaacaaaaagtgttcagtaacttcttgtccagtatcacccagtttataagtggtgaagctgggattcamacccaggccctcttgagtccagcagctctgctctgagccaccacccaggactgtccctcattaaatgcctgaataatttcgaagagtcagagttccataa

SEQ ID NO: 251486 - DNA, 201 bp, Homo sapiens
ttttctctcactggttttgcagttctatatctaggatataatgcccttgtcttcttgcctgtgtatggtataaaaaggatggtctttcaaacccagatacygtgtaacctgggcaagtcacgtaacctctctgagcctcacttttcaggggttaataacatttaacgcattaaatgtgctaatgtatgtaaagtgtcgggc

SEQ ID NO: 251487 - DNA, 201 bp, Homo sapiens
taaataaggtgagaatccagttaatagctttctattaaagtggagttgacggaaagaattgcattggaaggattttgttttgggactccgtgaggatttaracattcccttcctgtctctgggtctctgtgcattctgaagtttgaatcatttcatttgtatttctcttttcaatttgctaaaaactattcttaaagttgc

SEQ ID NO: 251488 - DNA, 201 bp, Homo sapiens
gatactgtgtaacctgggcaagtcacgtaacctctctgagcctcacttttcaggggttaataacatttaacgcattaaatgtgctaatgtatgtaaagtgycgggcataataacaggtcctgatacatagtgacttgaaaaataaaatacaaaatactttgcatttttccgaagaaaggtactgcgtaactcttaaggtat

SEQ ID NO: 251489 - DNA, 201 bp, Homo sapiens
gctcagtaccttcacactgttgtgcaacagctcgccagagctgcttcatcttgcaacgtggaatctctataccgtttgaacaataactccccatttctccygcccgccagcctctcgtaaccaccattctactttctgtttctatgagtttgatgcttttagatacctcatataagtggattcatatagtatctgtccttt

SEQ ID NO: 251490 - DNA, 201 bp, Homo sapiens
gcatttcacgtcccctctgcacgcccttctcatggggccaatcactgttgggaacactcagagataataaacatttccctgctgtatcatcctagaggatctgtcatttattaactgtgtaccgttggcaagaacctctctgcacttgtttcctcatctgtatgatagaaataatacatctcgggatggtagtgaggaagg

SEQ ID NO: 251491 - DNA, 201 bp, Homo sapiens
catttcacgtcccctctgcacgcccttctcatggggccaatcactgttgggaacactcagagataataaacatttccctgctgtatcatcctagaggatctgtcatttattaactgtgtaccgttggcaagaacctctctgcacttgtttcctcatctgtatgatagaaataatacatctcgggatggtagtgaggaaggg

SEQ ID NO: 251492 - DNA, 201 bp, Homo sapiens
atttcacgtcccctctgcacgcccttctcatggggccaatcactgttgggaacactcagagataataaacatttccctgctgtatcatcctagaggatctgtcatttattaactgtgtaccgttggcaagaacctctctgcacttgtttcctcatctgtatgatagaaataatacatctcgggatggtagtgaggaaggga

SEQ ID NO: 251493 - DNA, 201 bp, Homo sapiens
tgaaagaaagtgtaaaaagtactctattttaacaaagttgttttctttctctttcttcttttttttttttttttcacagcgtcttactctgtcacccaggstggagtgcagtggtagaatctacgctcactgcaacctctgcctcccgggttcaagcgcttcttatgcctcagcctccccagtagctgggactacgggtat

SEQ ID NO: 251494 - DNA, 201 bp, Homo sapiens
cttttatatgtgtatgtgtgtttacacaaccaaggtcccgacctacataatattttgaattctgttgctttaacttaaagcagcggtttaagtggttaatttaacttaaactccattttcatgtcttcatgttattttaataacagtagcattttttgattggtccaagattataggaataatttcataaatgatagttca

SEQ ID NO: 251495 - DNA, 201 bp, Homo sapiens
ttttatatgtgtatgtgtgtttacacaaccaaggtcccgacctacataatattttgaattctgttgctttaacttaaagcagcggtttaagtggttaatttaacttaaactccattttcatgtcttcatgttattttaataacagtagcattttttgattggtccaagattataggaataatttcataaatgatagttcat

SEQ ID NO: 251496 - DNA, 201 bp, Homo sapiens
tttatatgtgtatgtgtgtttacacaaccaaggtcccgacctacataatattttgaattctgttgctttaacttaaagcagcggtttaagtggttaatttaacttaaactccattttcatgtcttcatgttattttaataacagtagcattttttgattggtccaagattataggaataatttcataaatgatagttcata

SEQ ID NO: 251497 - DNA, 201 bp, Homo sapiens
ttatatggatgattttttttttctttttaattaagctagcttgttaggggcccagggcttctgagaattggctttgcacatgggaaccacgttcaaaggamggagaaagatgttgctgcccaagatggcaggtgcaggtgagggtgctgtggagggtgaggaggtgctccacatgcaaagccccttggggagcctgagagt

SEQ ID NO: 251498 - DNA, 201 bp, Homo sapiens
ttatatgtgtatgtgtgtttacacaaccaaggtcccgacctacataatattttgaattctgttgctttaacttaaagcagcggtttaagtggttaatttaacttaaactccattttcatgtcttcatgttattttaataacagtagcattttttgattggtccaagattataggaataatttcataaatgatagttcatat

SEQ ID NO: 251499 - DNA, 201 bp, Homo sapiens
tatatgtgtatgtgtgtttacacaaccaaggtcccgacctacataatattttgaattctgttgctttaacttaaagcagcggtttaagtggttaatttaacttaaactccattttcatgtcttcatgttattttaataacagtagcattttttgattggtccaagattataggaataatttcataaatgatagttcatatc

SEQ ID NO: 251500 - DNA, 201 bp, Homo sapiens
catcttttagtttctgttgaattaatccctcggtgtaatttcccaagagggaaattgctggatttgaagggtgtaaacatcatcatggctccagtaatgcwgtgcacgtggggagatttttaaaatcagtgttctctccgttggcatcttgtgccagaaaaatgtcagaagaaaataatgcgaatgaacaattaaaaagct

SEQ ID NO: 251501 - DNA, 201 bp, Homo sapiens
gctgatgctaagctcctgtgtggcagccacaggctctaagccagaaatctccaccagaagatgaggtgggggctgcgggtttaggcacaggaagcccacgmggcctcattggccgtcttgtgacccgaacaatccctgctgtcccaaagtcattcatgcattcaacaaagctttcagtgtccaccgtatgtgaagcactgg

SEQ ID NO: 251502 - DNA, 201 bp, Homo sapiens
tctgctactttgcagctgtgtgaccttgggcaagtgacttaacctctctgtgccttggtttctttatctgtaaaatgggataatagtatctagctcatggwattgttgtaagaatcaaaggagctaatcaaagtaaggcacttagagcatgaccaatatatattaataggaggctcacaaaaaaatctagctcttactgca

SEQ ID NO: 251503 - DNA, 201 bp, Homo sapiens
ttgtaagaatcaaaggagctaatcaaagtaaggcacttagagcatgaccaatatatattaataggaggctcacaaaaaaatctagctcttactgcaactcstactactcctattttttttttttaaaacaacttttatttttgcacccctgtactggaatagatgatcttgggcctggtttctgtaagcaacactgactgt

SEQ ID NO: 251504 - DNA, 201 bp, Homo sapiens
tgagtagcttaaataaaggttacctggactatttcctttctccagcagctacgttactctgtctctgaagccatgggggaaccccagaggcagacatcagygtgtccaggttgtaaaatcagacttggagcgccaggcagggaagaaagcacttcggcatgttttctgcctcactgcaaaataaatgtataagcattccag

SEQ ID NO: 251505 - DNA, 201 bp, Homo sapiens
atcttgggcctggtttctgtaagcaacactgactgtcatcatctgtaaggataagcacttagtgactaaactgaaatctccaagtcttgcttttaaaaaaraaagacccttggctggctaggcacagtggctcacacctgtaatcccagcattttgggaggctgaggcaggtggattgcttgatcccaggagtttgagacc

SEQ ID NO: 251506 - DNA, 201 bp, Homo sapiens
cagggaagaaagcacttcggcatgttttctgcctcactgcaaaataaatgtataagcattccagggaaactgcagggagaggggaacattcttcagcaggygaggaaggataaatgcaaagtaaacgtataaggcttataattactcatttgaagtgtgtaaaatgtaattaatatgatctgtgttgcagtgctgtctctc

SEQ ID NO: 251507 - DNA, 201 bp, Homo sapiens
agggaagaaagcacttcggcatgttttctgcctcactgcaaaataaatgtataagcattccagggaaactgcagggagaggggaacattcttcagcaggcraggaaggataaatgcaaagtaaacgtataaggcttataattactcatttgaagtgtgtaaaatgtaattaatatgatctgtgttgcagtgctgtctctct

SEQ ID NO: 251508 - DNA, 201 bp, Homo sapiens
tatctccctgtgttttctggggtgaaagacagaagctctgatctgcaacctcaaagctgcagtgttcaggaaagccagatatttttgttttctttctttctttttttttttttttttgcctctcaattggagtcatatagtgctgcagcaagacttgttttctggattagttactgacccaaagtatttttcttgcgaata

SEQ ID NO: 251509 - DNA, 201 bp, Homo sapiens
catgagccagctgtcagggtaaaggatgccgagccacagagtggtcctcttctgaaggaggctgttctgcaggcaacaggtttggaggccactgcttcgtyagaagggcccgtcctgccctttcctacttcggcagtgctcagaaattgcttatcggggtattccttggtctctgcctggggagtagaggaactcaacatt

SEQ ID NO: 251510 - DNA, 201 bp, Homo sapiens
tatggttataagacctaagactgctcactgtcccaatgatcctacaatgctcctgagctacatcatcccctacagttcccctccccaccccagacagtggyccccacacccaccataaccctctggatggtctcatgctatgagggacttccctctcatgcaaccctgtttaagtgctgttgtgtgtcactgccaaatctt

SEQ ID NO: 251511 - DNA, 201 bp, Homo sapiens
atcctgtatcggtgctgcatggtttctggtgtgagtggtgcctggccttgaagctctgctaatctccagacggccagactgaagagcataatgcatgtgtrggctgatttcttgggagcttttgttttgattattttcatttgcatactgatttattaagcaccagaatgtaagggctagaaatctttttatttcatctta

SEQ ID NO: 251512 - DNA, 201 bp, Homo sapiens
tatttaaagatgtctcattttacccccttgcactttcacttgatcaggttgaacctaaaatgcattttgtattataattttaaacgaattgtaaacataayatgtgctcattttagaaaatttaggaggtggccaggtgcgatggctcacacctgtaatcccagcactttgggagtccaaggcaggtggatcacctgaggt

SEQ ID NO: 251513 - DNA, 201 bp, Homo sapiens
attggcctgatagaatcatcacggggcagcgatcaagagcaggttcccaggacagcccgacccactgaaccagaattactcagggtggtgtctgggaaccmgcattgcatcagattcccgctgtgattcttacatacactgaacattgagaaatgctgtcaggtgaaaggcaaagcaacattcctgctatcctgcccccgg

SEQ ID NO: 251514 - DNA, 201 bp, Homo sapiens
taatgcccatcagtggatgaatgaatagtggtatgtatgatgggatattattcagaataataatatgtcagaataacgaaattctcatacatcctacagcrtggatggacttagaaaacattacgctaagtgaaaaaagccagacacaaaaggacagacactgtatgatcctacttgtatgaagtacttagaatattctaa

SEQ ID NO: 251515 - DNA, 201 bp, Homo sapiens
tcaattattctttcttcgcagaagccaagtttctgattagctataccaaccccatctccattaggcaatttaagatgtgaattatacattttttaaaaagyagctaattatggtaaagcctgacacatttatatttctgtgaaacccctgtggcaaagattctggctagaagatgacatcatatggggttataaaatcact

SEQ ID NO: 251516 - DNA, 201 bp, Homo sapiens
atttccaagctgggaaactccaggccaagctggttttaccaagtggaacccgaaaatatatatatggtgcccttgcttctctggaatctggctgagggtcycagcatcgtatcccggctaggaccctcagctctcctgtttttcagctctcctgttgcagttatttattgctgggcaacaaatcaccccaaaacttagtgg

SEQ ID NO: 251517 - DNA, 201 bp, Homo sapiens
atagtggtatgtatgatgggatattattcagaataataatatgtcagaataacgaaattctcatacatcctacagcatggatggacttagaaaacattacrctaagtgaaaaaagccagacacaaaaggacagacactgtatgatcctacttgtatgaagtacttagaatattctaattcagctgggtttggtggctcaca

SEQ ID NO: 251518 - DNA, 201 bp, Homo sapiens
ctggtttggactgggagtgaatggcctttggggagaaacttttgctcttagaattcagaggaacacacacatcttcccaagcatttccctttgccctctaytgaggctgacagctctctgccctggcacctcctagactatgagtgatttaggttatgtctctttgcagtgctgagcagagcactttatacatcatgaggt

SEQ ID NO: 251519 - DNA, 201 bp, Homo sapiens
aggcagatagaagatggtggtgattactgtgatgacagtgatgtttatgtcccatctcccctggtggttgtatgttcctttgaaagagcctccctgtccarttcatctttctattcctccaggccggcttctctgtgcctggaacatgtttgatggctgaagggatagttgtgcagcactaccatctgtaccttaagatcc

SEQ ID NO: 251520 - DNA, 201 bp, Homo sapiens
gacttgaaaaataaaatacaaaatactttgcatttttccgaagaaaggtactgcgtaactcttaaggtatatttttactatatttaccttgctgtggtcartctagtataggtgtctctgttatattaatgttttagtggtgatcactctaagcagttacatatattaaaatattctggccaaatgaaaagtttataaaga

SEQ ID NO: 251521 - DNA, 201 bp, Homo sapiens
cttcacttctctgtctctgcatctgaaaaatggggataataataatattggtacctccctggaggctttaataagataatgcaccacacctagtagttagygtttgtttttgttattttttagcatttattacaaatacaactgctgtatttcctgaattaaaagtatggggacatggatgaaaaattgcaagtgtctgta

SEQ ID NO: 251522 - DNA, 201 bp, Homo sapiens
aaaataaaatacaaaatactttgcatttttccgaagaaaggtactgcgtaactcttaaggtatatttttactatatttaccttgctgtggtcagtctagtrtaggtgtctctgttatattaatgttttagtggtgatcactctaagcagttacatatattaaaatattctggccaaatgaaaagtttataaagaaatgctt

SEQ ID NO: 251523 - DNA, 201 bp, Homo sapiens
taaggtatatttttactatatttaccttgctgtggtcagtctagtataggtgtctctgttatattaatgttttagtggtgatcactctaagcagttacatrtattaaaatattctggccaaatgaaaagtttataaagaaatgcttttaaaattgaaccagaagtagatgacgatagtcgtcattattttaaaaagagagg

SEQ ID NO: 251524 - DNA, 201 bp, Homo sapiens
aaattcagtgactgcagcaaaactttgctccttgctcctctttgtggaaacactgtttgtacagcatgtctttcataatcaatacaagggagacattaatsaagagaatgtcttgtttggcagacaaagccttccctttgttcggattgagatgctcagttaatttcctgggagtgtatttatgagaagttggttagtgat

SEQ ID NO: 251525 - DNA, 201 bp, Homo sapiens
gtaatggctcccatgctggcttcccctacaggggagaagttgcatttcatatcctctattccactttccagggccctgcgagatccactccccgcatcccrttagtctgccctccttccatgcctcgcttccaccccactttctcctcctccttttctctcttgctgcaacctcttggtggcctttgctggcagtgttcct

SEQ ID NO: 251526 - DNA, 201 bp, Homo sapiens
tgaggtgggaggattgcttgagactggaaggcagaggttgcagtgagccaagattgtaccactgcactccagcctgagtgacacagcaagatcttgtctcaaaaaaaaaaaaaaaaaaattcaaattcatagagacaggaaatagaatgggggttaccagggacaagagagacgggaatggggagttgttatttaataagt

SEQ ID NO: 251527 - DNA, 201 bp, Homo sapiens
agagctcagtaaattattgtgcagagactgctgctgatagacgaggcacactggcatccctcagtgcccctggtggctctgaaaacagtgccctggcagcyctgggcacccaaagggcactccatcaattacttggttttagaagaaaatttcccccacagtgcagatggatggatgagagaaggattggcagaagtcaga

SEQ ID NO: 251528 - DNA, 201 bp, Homo sapiens
gaggtgggaggattgcttgagactggaaggcagaggttgcagtgagccaagattgtaccactgcactccagcctgagtgacacagcaagatcttgtctcaaaaaaaaaaaaaaaaaaattcaaattcatagagacaggaaatagaatgggggttaccagggacaagagagacgggaatggggagttgttatttaataagta

SEQ ID NO: 251529 - DNA, 201 bp, Homo sapiens
ggagaattgcttgaatccgggaggaggaggctgcagtgagccaagatggcgccactgcactccagcctgggcaacaaagcgagactctgtctcaaaattarataaataaataaataaataaatgaagatgcctcaccctagctggcccgtcccttggctattaggtgccgcatgacccttgtaagtacctacacccaggcc

SEQ ID NO: 251530 - DNA, 201 bp, Homo sapiens
cacgcctgtaatcccagctacttgggaggctgaggcacaagaattgctcgaacatgggaggtgggggttgcagtgagccaatatcgcaccactttactccrgcctgggtgagagaacgagaccctgtcttaaaaaaaaaaaagaatatagcaaagaatgggaggaacaggagagagaggaagtgaggccatgggagacagt

SEQ ID NO: 251531 - DNA, 201 bp, Homo sapiens
ctcccctcccctcccctcttctcccctcctctcccctcccatctcctctcctcccttccccttctctcccttactctccctttctctcttctcccttcccrtctctcatgctctcagtgggtgggcagcataccccactggccaggaggattatgtttgaggtttgtgtcttaatctgttcagggtgctacaacaaaatac

SEQ ID NO: 251532 - DNA, 201 bp, Homo sapiens
gccccaggtacccgagagactgagggaggtcaggttgaggctgcagtaagccatgatcatgccactgctccccagcttggggagaccctgtctcaaaaagaaaaaaaaaagatacagaatcaacttacatgtccatcaatggatgaatggataaagaaaatgtgagtgagatagatagatagatagatatagatatataga

SEQ ID NO: 251533 - DNA, 201 bp, Homo sapiens
actaatacagggacagtatgctaagtgaaataagccaggcacagaaagacaaataccgcatgatctcacttatatgtagaatctaaaaaggttgaactggyagaagcagagagcagaatggttaccagaggtggtgaaaacagggagatgttggtcaaggggtacaaagtttcattagatagaatgaataaattctggaga

SEQ ID NO: 251534 - DNA, 201 bp, Homo sapiens
gaatggtggaattattgaggtggtcactccagttcattttgtggttgaggatacctgcctgagtttcataactgacatgtaatttgatatgacaggttagatggagttgtttgtggccatttgtattcttgatatagttaaaatttttttaggttaactgaaaatggaaggtctggtgtctagatgaacaaaaaatgggaa

SEQ ID NO: 251535 - DNA, 201 bp, Homo sapiens
tgtacgtgggggtgatttgggtagtgggcaggatagggtattgtgaggtaagggttggggtaacaaaaaatagccttgcatttctgccagaaatccccttytttaagcctgctaactttgcagaagaatgggtgtgggacatttgtctcaagttccttatcctgtgttgctttggctgaaatctccgatgaatatgtgcag

SEQ ID NO: 251536 - DNA, 201 bp, Homo sapiens
gatcccctttattttccgttaaaacatcaccatcatcaccaccaccaccaccaccaccaccgcgaccactacaaccacgacagggagaactcttccaaagkcttaattgaaaaagaaactaatataatgtaatcacagatatgcagcgtgttttaaagggggcatgtggacaggcaagctaaaagggtttctggatttaca

SEQ ID NO: 251537 - DNA, 201 bp, Homo sapiens
accttttctaagcttgtgctgaaaaagatcctctgtcgatgatcctgccccatcctttatgtccccctctagtcctattttctcccattgtttattatttrgatctctataaatatacttttctgatatttccctccagtccatagcaaatactactttcaaaacattgtgttgaatgtagaattacagatagttcagttg

SEQ ID NO: 251538 - DNA, 201 bp, Homo sapiens
cctttgttagaaacgtatgccatcctggagtttgcagggcatgtggcaggaacttctgattaatatgctttgaaattcaggtctggagtcacataacccaygttggcatttctggtatcagttcacatagtttgaagtataataagacatacttgtgtattacaggttgaagattaagatggcaaaatactttaacaccac

SEQ ID NO: 251539 - DNA, 201 bp, Homo sapiens
taaatgtctcatccaagtgaacagagtatttactcgtctatgacttgaaaaaagaatatctttttgatgttattgtaaataggactgtttccttccttctytccttccttccttccttccttcctctctccctccctccgtccctcttttccttcctttctcttgcattttttttttttggagttttgttcttgttgccca

SEQ ID NO: 251540 - DNA, 201 bp, Homo sapiens
cacatagtttgaagtataataagacatacttgtgtattacaggttgaagattaagatggcaaaatactttaacaccactggtcacagcccaaggactatayataaatagcatcaatcctaaaggccccaaactggaaacaaatgtccataagcttgtgaatggatacacaaaatatggtatatccatacaattgataccca

SEQ ID NO: 251541 - DNA, 201 bp, Homo sapiens
atgagccagctgtcagggtaaaggatgccgagccacagagtggtcctcttctgaaggaggctgttctgcaggcaacaggtttggaggccactgcttcgtcrgaagggcccgtcctgccctttcctacttcggcagtgctcagaaattgcttatcggggtattccttggtctctgcctggggagtagaggaactcaacattg

SEQ ID NO: 251542 - DNA, 201 bp, Homo sapiens
tgggagcacctcccatggctgcagtctctggtcatttccaaagcccaggagaaggctgcatttggtcaaccacccacttccatttagccagggcctttaawtcattcccaaatccttaaaaatcacctggaatgtgtttaaaagggcagatttctgggcctcgagataggcctattgaatccggatctggattttgggggc

SEQ ID NO: 251543 - DNA, 201 bp, Homo sapiens
atttattcattcagccctgaatttaggccccttttaggaaccgaggatattgtgatagacaagacagtccaagtccttttgctcatgaaacttagggtctygtggtggcaacagacaacagccaataaagcatttaagataaaaagacaggagagaatcaatgccttgaagaagcatatggcaggcggggcgcagtggctc

SEQ ID NO: 251544 - DNA, 201 bp, Homo sapiens
agagctctttttggaacactccaggaaagaagggctgtgtacacactaggtgcttaataagtgctttcagatgacagtggggtggtgggattatcggggtrgtaggctacattatcatggattaagtaagcattcccactctgtactttcttaggcaacttaacttcagtctgtaatgctgaggcagacactagtgagcta

SEQ ID NO: 251545 - DNA, 201 bp, Homo sapiens
gactctacccctcatttccattttctttgacagtgtgatatgggccacaaatgaagaccttgaccctgaaaccgtctgtggtttctctagcaattctcacsacttagcctcttcctccttcttccctcagaaccgggcaaatagagcaaggacaatttcccagcaatatttttccaagttgcggttagtcacttgctgctc

SEQ ID NO: 251546 - DNA, 201 bp, Homo sapiens
gtgttgggagagggactccaggctgacagagcagtgagtgcaaaggccctgaggctcatgcttggttttttggagaaagagcaagatgaccagtatggtgraggaggggcagaggcaggcggggctatatcatggggggcctctgggccgtggaaagactttggattttgttctaagatggtggcaggtctttggagcagg

SEQ ID NO: 251547 - DNA, 201 bp, Homo sapiens
tttgttaggtccagaaggagctgcccatactactttcttatgagcatgctcagtatggcatatggacatgtaatgtcacatctttgtggagtgtgattttyttttttcacatatttgtatgcagtagagagcctgttgtagaaaacgctccctgtatcttgctgtactgttaaagaaagctgaattccacattgccaacaa

SEQ ID NO: 251548 - DNA, 201 bp, Homo sapiens
ctactttcttatgagcatgctcagtatggcatatggacatgtaatgtcacatctttgtggagtgtgattttcttttttcacatatttgtatgcagtagagrgcctgttgtagaaaacgctccctgtatcttgctgtactgttaaagaaagctgaattccacattgccaacaaaagcgtgaaaatgttcatgaaccttcctc

SEQ ID NO: 251549 - DNA, 201 bp, Homo sapiens
ctcagagtgaaagctcagagcctccttgtggcctgtgaggcctggcactgcccactccattccaggctcactgtgtggttcctcgcatgtaccaggcacawgctaagcacacaccaggcacatgcctttgccttgctgtcaacgctgcctgtaacacccttcctccaggtttccccattagttccctcacttccttcaggc

SEQ ID NO: 251550 - DNA, 201 bp, Homo sapiens
ctttttccccctgggtgatacagactcataactttccaatattcatttttcttattttctcttagctatgtaatgtgagtagggtgtattactatctcctrttcacaggatccaattaactgaggccataagaaataaatgaatgaatgaatgaaccgaactaacaaccgctgttatgagccgagtgcttactcagtgcca

SEQ ID NO: 251551 - DNA, 201 bp, Homo sapiens
ttaatggcgatttcccaattaatcttgggaacgacccaaggacaatgtcagccaatttataattgaatccaaagtgggggatggcaggagtgggaagtgaraggtttattctcttctcagccatgtgcactgacatttttttaagcctacaagggtgaatttaaaagggcctgagagggtgaagtagaggtgacagccaga

SEQ ID NO: 251552 - DNA, 201 bp, Homo sapiens
ttccattaattgctgttgattccttcaaggactctgacagaggtacacccctgttttgtggatgaggaatttgtgctcggagaaggtgggggcttactcarggtcacgtgtgctgtggtcaggaggtgtaggctaaaatccaggtctgactccagagccaaggttcacaagctacatccccgcatgcctcgactggtcaac

SEQ ID NO: 251553 - DNA, 201 bp, Homo sapiens
ggtctgactccagagccaaggttcacaagctacatccccgcatgcctcgactggtcaactcctataattctgtctgcataggaaagacctgttcaatgatyatctttttatattgttttgatttttgagtcatgtatctcatttgagcaagagatcagcctgcagttagggcaccgtattggtttccaattgctgctgtaa

SEQ ID NO: 251554 - DNA, 201 bp, Homo sapiens
ttggaggagcatagagatagacctagactaggcatgtgtatgtgtgtgtgtgcatgtgtgtatgcatgcatgcttatgcatgtgtgtgtgcatgcatgcttgtgtgtgtgtgtgtgtgtgtgtgtagagccttggtcatcccgacagagcaaagacacaggagggtggcacacggaagaacaagtgactccaccctccctt

SEQ ID NO: 251555 - DNA, 201 bp, Homo sapiens
tggaggagcatagagatagacctagactaggcatgtgtatgtgtgtgtgtgcatgtgtgtatgcatgcatgcttatgcatgtgtgtgtgcatgcatgcttgtgtgtgtgtgtgtgtgtgtgtgtagagccttggtcatcccgacagagcaaagacacaggagggtggcacacggaagaacaagtgactccaccctcccttg

SEQ ID NO: 251556 - DNA, 201 bp, Homo sapiens
ggaggagcatagagatagacctagactaggcatgtgtatgtgtgtgtgtgcatgtgtgtatgcatgcatgcttatgcatgtgtgtgtgcatgcatgcttgkgtgtgtgtgtgtgtgtgtgtgtagagccttggtcatcccgacagagcaaagacacaggagggtggcacacggaagaacaagtgactccaccctcccttgc

SEQ ID NO: 251557 - DNA, 201 bp, Homo sapiens
tgttattgtaaataggactgtttccttccttctttccttccttccttccttccttcctctctccctccctccgtccctcttttccttcctttctcttgcattttttttttttggagttttgttcttgttgcccaggctggagtgcaatggtatgatcttggctcactgcagcctccacctcccatgttcaagcaattctcc

SEQ ID NO: 251558 - DNA, 201 bp, Homo sapiens
gcttttcaaatacatcattccccattttacagatgaggcacctgaggcatagagaggcgttttgttgttggtgtgcagcatcatccagcctattcggggarttgcagaaccatgattcagtccagctctggagcttgtttattgctcatgggaccaggcgaggccacctccaccagctcaactggggtcgactcattgatt

SEQ ID NO: 251559 - DNA, 201 bp, Homo sapiens
atcattagtctgtgttctccagcagatgtataccagtcacgggcagtcttcctgcttcacttcacatccatggggaaaaagtgttttaaagtcagtgtgattttttttttttttaatgacacagaaatgaatattagactagagggccgctctgtcgaatggctgtttggacaggaatcggggaatgcagcggggtgctcc

SEQ ID NO: 251560 - DNA, 201 bp, Homo sapiens
gggagaaacggttcccttagccaataggtgagcccagccaactcctcagcccggaagctttgtcattctataattgtcattcccggtgagccttcatcctrggtctgatggggccacttgaagatctcattgaattttgtagggaaattgcatgctaaagagacatttggaaattagcaggcttgaaggctgccttgagac

SEQ ID NO: 251561 - DNA, 201 bp, Homo sapiens
agtgtggaggtggttaagaatggggacgtgggagccagagggcctggatttgcatcctgccctctgtgatcctgggcaagtcacagataataatcaccctscttcatgaggttgttgcaagtgttaaatgatttaatacttgtgaagagcttagcacatagtatttattagtcattattattatgtctaatttttagcccc

SEQ ID NO: 251562 - DNA, 201 bp, Homo sapiens
ggtctcactgtcttccaggcaggagtgcagtggcatgatcatagctcactgcagccttgacttcttgggcttaagcgatcctcccacctcagcctcacaastagctgggactacaggcacatgccaccacacctggttaatttttaaactctttgtagagacaaggtctcagtatgttgccccggctggtcttgaatgcct

SEQ ID NO: 251563 - DNA, 201 bp, Homo sapiens
taataatgcctccctcaagagctggtgagacaatggaagctgtttgtaaactgtaaagtaccgtgcctgatttggttattagtgttttattgctgatgtayggtcgaggtccaggccacccgtggtagataaaagtgcatgtgggctggacgaagtggctcacgcctgtaatcccagcactttgggaggccgaggcaggtg

SEQ ID NO: 251564 - DNA, 201 bp, Homo sapiens
tgatctcacctgtcccaggacttggggctctaagtagcattacactggctgggcaggtagtcaccctcatcctctgacctgtcagactggctggtgtcagytgacagcggagctacactgaaaacagagacagtactggggcctccgtctagggccttgtactcactggtttgcttccagtcgactctgaaagctccctgc

SEQ ID NO: 251565 - DNA, 201 bp, Homo sapiens
caaggtctcagtatgttgccccggctggtcttgaatgcctgagctcaagcgatgctcccgcttcaacctcccaaagtgttagtattacaggcatgagccaytgctcctggcattgtcttgtttaatacagctttagagatgttttcattgtccttattttactgatgaggaagttgggcttggagaggtaaagatatttat

SEQ ID NO: 251566 - DNA, 201 bp, Homo sapiens
gggaatggcctgttttccatgtgatttgttttttaatagacttgatttttttttttagagcagttttaggttcatggcaaaatcgagcagaaggcacagaraattcccagacacccctgcccccagacatgcacggcctcccccgtcatcagcatcctccactgaagtggtccatttgttacaactgatgaacctgtattg

SEQ ID NO: 251567 - DNA, 201 bp, Homo sapiens
agcctcctgagtagctgggactacaggcatgcaccaccacgcccagctaatttttgtatttttggtagagagttggccaggatggtctcaatctcttgacytcgtgatctacccacctcggcctcccaaagtgctgggattataggcatgagccactgcgcccggccagaataccctatccttaaacatgaatttagggga

SEQ ID NO: 251568 - DNA, 201 bp, Homo sapiens
gaatggcctgttttccatgtgatttgttttttaatagacttgatttttttttttagagcagttttaggttcatggcaaaatcgagcagaaggcacagaaawttcccagacacccctgcccccagacatgcacggcctcccccgtcatcagcatcctccactgaagtggtccatttgttacaactgatgaacctgtattgac

SEQ ID NO: 251569 - DNA, 201 bp, Homo sapiens
acagctcacctctttctctttccctagcagcacatgagtggactcctaggacaccacacgtgtgacctcaactgttctttccttatttcttcttttttacttttttttttttctaggacagtgtctcactttgtcacccaggctggagtgcagtggcatgatcatagctcactgcagcttgaactgctgggctcaagggat

SEQ ID NO: 251570 - DNA, 201 bp, Homo sapiens
gagtttgaggccaacttggctaacatggtgaaatcccatctctactaaaaatacaaaatttaactgggtgtggtggcacgcacctgtaatcccagctactmaggaggctgaggcagaagaattgcttgaacccaggaggtggaggttgcagtgagctgaggtcgcggcactgcactccagcctgggcaagagttaatggga

SEQ ID NO: 251571 - DNA, 201 bp, Homo sapiens
gtagttattctccactcactcaacaaaagtgactgtggaaggaatgtcccaaaaatcaggtgtctgatctgtgcgtttccattcaccatggttttagggaycatagagaaggatgacaagcgaacgcagataaccagtttcatcagtgtcctgaaatactcaagtcacctattgcaggagtatttcagagtgagttttgag

SEQ ID NO: 251572 - DNA, 201 bp, Homo sapiens
tcggtttggcctcaaatccttttctgggatgacttaaagttcccagcactttgggaggctgaggcaggcggatcacctgaggtcaggagttcaagaccagygtggtcaacatggtgaaaccccgtctctacgaaaatacaaaaattagctgggcgtggtggcacatgcctgtaatcccagctactcgggaggctgaggcag

SEQ ID NO: 251573 - DNA, 201 bp, Homo sapiens
ttatacctcagaactctggatgccatgattgcaatacctcatcaaccctgagatgctcagatgcttgccaagttaatctcactgattagaacctatgtctrtgagaggagtctctagaagggtcaccagaactctctgcttattcactttggagacgcgggcacagtgcgagggggagtgggacacaggagggaggaaatg

SEQ ID NO: 251574 - DNA, 201 bp, Homo sapiens
tggatctctgtctgtctgtgtctctcttatctcttcatggaattctgggaaacactcagaaagtggtggttggtgagggcacattcatgtccagtaatagytgatggaaatggcagagggctttgtcaagttgacggggaaggtttctgcatgccttgcttttggtggaagggtgagcgacttcgcagagcctagagcggg

SEQ ID NO: 251575 - DNA, 201 bp, Homo sapiens
ccctttgttcggattgagatgctcagttaatttcctgggagtgtatttatgagaagttggttagtgattcttgtaagtgtatgtgagtttcttgttttttytttttttaagagaggagtcaacaacccattgtattactgtaaaatatttgatagcttgtactttgaggaatgtactcatgagagcctagtcttatagatt

SEQ ID NO: 251576 - DNA, 201 bp, Homo sapiens
aaatgtgccatcgtaaccatttttaagtgtacagttctgtagagctcagtaccttcacactgttgtgcaacagctcgccagagctgcttcatcttgcaacrtggaatctctataccgtttgaacaataactccccatttctcccgcccgccagcctctcgtaaccaccattctactttctgtttctatgagtttgatgctt

SEQ ID NO: 251577 - DNA, 201 bp, Homo sapiens
atcattttgaacctaaggaacacatttgagttaaaaagtccctgagtacaaaaggggtgctgtgctcgtgtataaaccagggtgggcccattcaggtatargtgacagagagttcttctgccccgctccctgtatagttgcttatgtaaattcagggtgtttttctctcttgttgcaagaagtcaaagttggagttactct

SEQ ID NO: 251578 - DNA, 201 bp, Homo sapiens
cgttggcctctgtggaatttgcaccgcaggacattcccagccccagacttactgcgactggtctcactaacgcacaagtagcccctgccggctttgctcaygggatgttgggatgttgtcctcagccagtgagacacagatacacactcacaaaccatcttcgtgaccacagtggggggttgctggtttaaagccagagac

SEQ ID NO: 251579 - DNA, 201 bp, Homo sapiens
aggagatgcggcagaactagcagcggggcagagctccagatccccaagatggtggcattatttatgagaaaggactcctcttgcaaaactgtgcgtagacrcatgggtgtggctcttcccccaaaggactggctttcctttccttccttcttgaaggattacagaataaataggaattggtacaaaatgtggatggatgga

SEQ ID NO: 251580 - DNA, 201 bp, Homo sapiens
tctgtgaaaaatccaaattttcctcctatgtgtgtgtcgggtaagggcagcccacagttatgactggggctccagtttcaaatgccgctgactcaagacckatctggttgagaaccaaacaaatgggcctttttatactgaagaggagatttttcttaccacgtgtcaacaaaagatctgtagacaatcttgttatacatt

SEQ ID NO: 251581 - DNA, 201 bp, Homo sapiens
atctcccctctaccacctgctcccccttgacccccaactagaccatctcctttttcaattttttaaaatttatctttatttttaaaaacagggccttgctstattgcccaggctggagtgtagtggtgagatcacggctcactgcatcctcgaactcctgggctcaagggatcctcctacatcatcagcctcccaagcagc

SEQ ID NO: 251582 - DNA, 201 bp, Homo sapiens
tttcttttcctgcatttgggtagaatcaatctttggctctgagcagatctttctgtttgagtgtctttcctaagatctttatctttctggttgcattttcmgaaccccctgcctctattgtgatgagagcgctgggtccgttggctgtctctctgggatgacagcacgagttgaaaagtggagaattgagtcatcggcttt

SEQ ID NO: 251583 - DNA, 201 bp, Homo sapiens
ttgccccaccactttgctcttgtccctggacaagtcacttgatgttgcccagcctccatttttgttgcatcaatagagtggagatgccagcgattgatctygtgaccttgggggcatcacttaacctccctgaccttggatttctcatctttaaaatgagggacactgaagatgagtgtggagcacatgtcggaacagaca

SEQ ID NO: 251584 - DNA, 201 bp, Homo sapiens
cagggcggtgaggacagagacatgctgatgggtggggcatagcagacagaaaagggaatttaagaaaattcctcactgtttggtcacagctaggggcatgrtggtggcatccactgtgatggtgaacattgtgggagggaaattttagctgtggaagccatgagttctctttatcaatgtttaacatattccattcataag

SEQ ID NO: 251585 - DNA, 201 bp, Homo sapiens
ggcagtggtggggggattgaaattttaaataggattgtcagggaagttctctctgcaaaggtcgctttaaagattgaaggagatgagggtagatgggagaygaaccaatgaaatagtaaagatatttattggatattatttaccgaaggccaacttgggtcaggcattgaatatagattactcccccatgggactcgtata

SEQ ID NO: 251586 - DNA, 201 bp, Homo sapiens
aggcacaggaatagcagcagctgatgcttgtttatttttttattctgtataagttagttacatgtattatctctaacatctaagatggtgtggggccctgtgggaccccattttacagaggagaaactgaggctctgagacctcaggagacttattctaggtggttcagctggctccaaagccccccttttcccagctaag

SEQ ID NO: 251587 - DNA, 201 bp, Homo sapiens
gatggtgtggggccctgtgggaccccattttacagaggagaaactgaggctctgagacctcaggagacttattctaggtggttcagctggctccaaagccycccttttcccagctaagagattatatgagggctacaggaagaggatccctgtgatcctggagtttggcagggtgggtatattaggttcccagggctgcca

SEQ ID NO: 251588 - DNA, 201 bp, Homo sapiens
aagagcatggtgggagggaaggaagtgggaagagaggcgaggaaaccagctcactccatctcactgaccgcggattcttctcccagggaaatgtgggaacsaaattaatcctgaagcttccccaggtttctgtgattctcaaccagtgtgggctggagcaatcagagaagccttcgtgggggtgtaggtctgacttggggg

SEQ ID NO: 251589 - DNA, 201 bp, Homo sapiens
aaaagggcctgagagggtgaagtagaggtgacagccagattctttaaagacaagtgatgctttaaaaattaaaaaaaaataaaaaataaaaaactttggarggaaatagctaaacaggacttagatgagtcttacatctctgggttccaggtccacctggggctcaggattttacaaacttgcactgtctcattccaacaa

SEQ ID NO: 251590 - DNA, 201 bp, Homo sapiens
cacatcacactgccttccgtgtgttactaatgaagaatgaatttctagaaaatgaatattttcaaaacactccctgccacctgcagtccctttgaggagtrgcgattgtttgtagttccccaggccccccatagaggtaagcaatcactcctactttagaactgaaattgggggcgtctcctccctgccacccaggactgt

SEQ ID NO: 251591 - DNA, 201 bp, Homo sapiens
aacacagtgtaagtgcctctgtaaagtggatgaattgtgcctttgcagacgttcaaaaatggtgaggatgagttttatttctaacacgtcatcgtttctgyttgtggaagaggacgggctatggtggacgtagcctggcacctgttccttcctgtgatctggttctctcttccagccttgctgtctggagtcgttgctgga

SEQ ID NO: 251592 - DNA, 201 bp, Homo sapiens
gtcttgaagcagccattacgccatcttttgtaagtggtttcatttcaatgagctttagatgcctgtcctgttttcttaaaacacttgctggggagactttytagcatgatctagatccttctgggtgtggagatgcctgaatgttgggaagacagacagcagctgtgctgttggagaagggacagtgtggaaatcttcctt

SEQ ID NO: 251593 - DNA, 201 bp, Homo sapiens
cttcagtgatttaacctcccctcttctatttaacacatgggaggacatctcccaggcttctcccataggtatatgggcaggtgtgacttccagctctgaarcatctctccagcaaacttctctacagcttctttccccatctcctaaaatccaacccttttgtgctccatgtgggcaaagttgagtgggactgtggttaca

SEQ ID NO: 251594 - DNA, 201 bp, Homo sapiens
gatctcctgaccttgtgatcggcctcccaaagtgttgggattacaggcatgagccactgcacccggcctccctgcctcctttcctaaggaagctgcagctyacttgggaaatccaggataaccttcccacctcaagacccttcactctaccgcagctgcaaattctccttttgccatggaaggtcacattcacaggttcca

SEQ ID NO: 251595 - DNA, 201 bp, Homo sapiens
gtgggactgtggttacaagttgagagtagttcaccagctattagcctctatcgtagagtctgcttttagtccaggacctcttttggatcgagcatctagtrtattttgatgttttagcaaaacttccattttaacatcctgttgcaattatcaaatatttgcgtggggggtgtatattctttcttcttccctagagcaact

SEQ ID NO: 251596 - DNA, 201 bp, Homo sapiens
tttaaaactggaaatgacaacatggaaggagcctttaaacagtgcatgtccaaggcatgtccaaggaaaagccgttttcaaaagagtcacctgtctttacytggcatttccaaacttgcctcagatatctttctgagggactcttaacgtattggtagaaattggatgcaactccttcctttcccaacccaactcaaattg

SEQ ID NO: 251597 - DNA, 201 bp, Homo sapiens
cctgcgacttgctttccgaggccacctttgagctacaagagctgcttctcccatgcccagagatgggaaggaggctgggaagttacctcttcatgggggaccctcagcctggctcccttaagtcaggacaaattcagaggagtaaagttatgttccagagctccccatgggatcagaattaagcctggcatgaaggcctga

SEQ ID NO: 251598 - DNA, 201 bp, Homo sapiens
ctgcgacttgctttccgaggccacctttgagctacaagagctgcttctcccatgcccagagatgggaaggaggctgggaagttacctcttcatgggggaccctcagcctggctcccttaagtcaggacaaattcagaggagtaaagttatgttccagagctccccatgggatcagaattaagcctggcatgaaggcctgaa

SEQ ID NO: 251599 - DNA, 201 bp, Homo sapiens
gtttcaaactcactttctcaaaatgaactcggggccatttggaaatcgtttctattatcatcatttaatgggaggtaagattattcatgaacgactaaagwgcaaagtaagaaagagcttaaaggcactctgtagtgggatttgaaactcctctgttttgcattgctcgggccaaaattataggccatggaggttaaattt

SEQ ID NO: 251600 - DNA, 201 bp, Homo sapiens
tgcgacttgctttccgaggccacctttgagctacaagagctgcttctcccatgcccagagatgggaaggaggctgggaagttacctcttcatgggggaccctcagcctggctcccttaagtcaggacaaattcagaggagtaaagttatgttccagagctccccatgggatcagaattaagcctggcatgaaggcctgaat

SEQ ID NO: 251601 - DNA, 201 bp, Homo sapiens
taactttttcctgtaacaccaaagggcaggaggatgctggtctccaccttttctttctccaaggcaagttgaacgaccatctgtgccataagatggatgakgcccagtgatcctcttgttgatttggtatttgtgtcttcccacaagaatctttgctgattccaatgctcgattcactggaatactccctgctgttctctg

SEQ ID NO: 251602 - DNA, 201 bp, Homo sapiens
gcgacttgctttccgaggccacctttgagctacaagagctgcttctcccatgcccagagatgggaaggaggctgggaagttacctcttcatgggggaccctcagcctggctcccttaagtcaggacaaattcagaggagtaaagttatgttccagagctccccatgggatcagaattaagcctggcatgaaggcctgaatt

SEQ ID NO: 251603 - DNA, 201 bp, Homo sapiens
ttagaaaagatgatgtattagtctgtttccacactgctgtaaagaactacctcagactgtgtaatttataaagaaaagaggtttaattgattcacagttcygcatggctgggagagctcaggaaacttacaatcatggcggaaggtgaaagggaagcaaggcacgtcttacatggcagcaagagagagagtaagggaggaa

SEQ ID NO: 251604 - DNA, 201 bp, Homo sapiens
gaggcacaagcaccaggcaatggtttaccagtggtatgttgtgacctattgtaaaatgggtcttccgggtcataaccaaccttggaagcaggggaaaaggmggaggagaaaggaggagcaaaatgagaaggagctggaggaaaagaaggaggaagagagaaagaaaaagaacagaacaaaacaaaatagaaaatatcagaa

SEQ ID NO: 251605 - DNA, 201 bp, Homo sapiens
tgggaggctgaggtgggcggatcacttgaagacaggagttcaagaccagcctggccaacatagtgaaacctcatctctactaaaaatacaaaaaattagcyaggcatggtggcacaagcctgtaatcccagccaattgggaggctgaggcacaagaatctcttgaaaccgggaggtggaggttgctgtgagccgagattgc

SEQ ID NO: 251606 - DNA, 201 bp, Homo sapiens
gaggtcggtggtctcaaccagcttgtgtttgcaaaacacatacctaaaaaaagactcatataccaaatatacagagaactcttaaattcaacaataagagaacaaacagcccagttaaaaatgggtgaaagatacaaacagatgtcgccaaaggagatctacagatggcaagtaagcataagaaaggatgctctacatcat

SEQ ID NO: 251607 - DNA, 201 bp, Homo sapiens
aacctcatctctactaaaaatacaaaaaattagctaggcatggtggcacaagcctgtaatcccagccaattgggaggctgaggcacaagaatctcttgaamccgggaggtggaggttgctgtgagccgagattgcgccattatagttgagcctgggagacagagtgagactctgtctcaaagcactattactgtataagaa

SEQ ID NO: 251608 - DNA, 201 bp, Homo sapiens
aggtcggtggtctcaaccagcttgtgtttgcaaaacacatacctaaaaaaagactcatataccaaatatacagagaactcttaaattcaacaataagagaacaaacagcccagttaaaaatgggtgaaagatacaaacagatgtcgccaaaggagatctacagatggcaagtaagcataagaaaggatgctctacatcata

SEQ ID NO: 251609 - DNA, 201 bp, Homo sapiens
ttgagaggcaagaggatcgcttgagcccaggaggttgaggctgcagtgagctatgattgtggcaacagagggagatcctgtgtccaaaaaaaaaaaaaaagagagagagagagagaaagattaagtgacatggatacaaaggatgggaaaatcctgcaaagaaagattgaagtcattgttgatttattttttctttccctc

SEQ ID NO: 251610 - DNA, 201 bp, Homo sapiens
ggtcggtggtctcaaccagcttgtgtttgcaaaacacatacctaaaaaaagactcatataccaaatatacagagaactcttaaattcaacaataagagaacaaacagcccagttaaaaatgggtgaaagatacaaacagatgtcgccaaaggagatctacagatggcaagtaagcataagaaaggatgctctacatcatat

SEQ ID NO: 251611 - DNA, 201 bp, Homo sapiens
gagaggcaagaggatcgcttgagcccaggaggttgaggctgcagtgagctatgattgtggcaacagagggagatcctgtgtccaaaaaaaaaaaaaaagagagagagagagagaaagattaagtgacatggatacaaaggatgggaaaatcctgcaaagaaagattgaagtcattgttgatttattttttctttccctcat

SEQ ID NO: 251612 - DNA, 201 bp, Homo sapiens
gtcggtggtctcaaccagcttgtgtttgcaaaacacatacctaaaaaaagactcatataccaaatatacagagaactcttaaattcaacaataagagaacaaacagcccagttaaaaatgggtgaaagatacaaacagatgtcgccaaaggagatctacagatggcaagtaagcataagaaaggatgctctacatcatatg

SEQ ID NO: 251613 - DNA, 201 bp, Homo sapiens
taactctggctctgtctggtggggaaacttcctgccttcctgaactgtgacacggacccagtttaaactaatcaggcgccagacaggagctttcaccgtgrcctaaatttgcagcccgtgaggtgtaggcagctgaggcactgctctgtgtcctggattctggagaaggttggtcttgtttagccacttagatggattcta

SEQ ID NO: 251614 - DNA, 201 bp, Homo sapiens
taattcatagaattgattaatttgcaaatttgagtaattggtcatcagttgcacaagggtttagcagaagtgggccttgtcagtaggatagttacatttasaagtttttgatactctgagttaatagtcttccttaagaatattttatagggcaaggaccaggttttagactccattttaatcccgatgttttttgcacgg

SEQ ID NO: 251615 - DNA, 201 bp, Homo sapiens
tcgagaaaagttgtgaaaataatacagataatatagttttcatctgctcctcccagtacctccctgctttttttttttttttttttggagacagggtctcaactctgttccctaggctggagtgcagtgatgccatcatggctcactacagcctcaaattcccgggctctggtgatcctcacacctcagcctcctgaatga

SEQ ID NO: 251616 - DNA, 201 bp, Homo sapiens
tttatgagaagttggttagtgattcttgtaagtgtatgtgagtttcttgttttttctttttttaagagaggagtcaacaacccattgtattactgtaaaawatttgatagcttgtactttgaggaatgtactcatgagagcctagtcttatagatttgggatatttatacatactttaaaatgagtaggttggaggggaac

SEQ ID NO: 251617 - DNA, 201 bp, Homo sapiens
agtgtcttaggagtaaagatggttattagttaggcacggaggcaggtgcctgtaatcccagatactcgggaggctgagacagggaaaattgcttgaacccrggaggcggaggttgcagtgagctgagattgcgccactgcactccagcctgagagacagagcgagactccgtctcagaaagactgtcagctaccagttgct

SEQ ID NO: 251618 - DNA, 201 bp, Homo sapiens
cagaaaacttggaagcaatggagcccagcctcagctccgggctgtcagcccaagcccatgctgccatcccagtttgtttttcctgttacctaacagtcaargggaatcatatttcctggtttagcaagcatcttcaatccactatttgcatgtctttcttctcatctctgggagcgaaacaaaaagagtaaaccttaaagg

SEQ ID NO: 251619 - DNA, 201 bp, Homo sapiens
atgctgtaagggttaaatacataccatattttgaagaataagtaccaaaaaatgtaaatgatctcatgaataatttttatattgattttatgttgaaatgraaatgttttaggtatgttgggttaaataaagatatattattaacattaattatggccaggcacagtggttcatgcctgtaattccagtgctttgggaggc

SEQ ID NO: 251620 - DNA, 201 bp, Homo sapiens
agtatagaaagtatagaaaataaatgcaagtcaaatgaataaggtaaaaatcaccagcaaatccaccacccagagataatcattgctaacaattttgatamatatctttccagactttttctctgatattcatgtttgtattttttaaaaaatgaatactcctagcttatattgtttggtaacctgtttttattcatgtgt

SEQ ID NO: 251621 - DNA, 201 bp, Homo sapiens
tattttggggatttagatttttttttttacaatgaacatttattacttttataattaaaacaagaatactttttaaaattaagaaattatgcaactagatrtgtagtcaagtagaggttgcttaaatactaaggtttattttcaactactaattactttcaaaagtattttaaggaacacattgtcataccaattagatgc

SEQ ID NO: 251622 - DNA, 201 bp, Homo sapiens
cagctctggggtcagactgtttgggtttaaagctggttcatgtcatttatttaaagcttcatgaccctggcaagtttctcaccctctctgggcttcaggtscttcctctgtaaagtaagtatcgtaaccttcttccttctctgccagggttgtcgtgtggattaaataagaattgtaaagcacgtatcagtgactacaaaa

SEQ ID NO: 251623 - DNA, 201 bp, Homo sapiens
tgatgtggcgacgccatggcatcagaagcccagacccctcccatcttgttgttctgcccccacactgagggttgaccttatccatgtagcccaggatggcyctccactacattcttatcccttgcagggaaagggggaacagtgacaaagggtgtcttcataatcccattggccagaactgggccatgtggtgtacttctt

SEQ ID NO: 251624 - DNA, 201 bp, Homo sapiens
aaaatatatacttttatagttatagaaattgagacccagagacttaagtatctagtgtaaggcagtcttcttgtaaggtgaatgaatataaatatatatasacacacatgtatatgtaaattttatgttggcaagttttgcaaattgttcctgatggaacacctcccgcccaatacatttaaatctgaggttctttatcag

SEQ ID NO: 251625 - DNA, 201 bp, Homo sapiens
ttcccctagagacagacatgcaaatagcttcatatcctcttgtagctgtaaccatttgcagacaccttattgtcttacagctttttaatttgcctgcacamatagacctgcctggccaacttggagggaattttaatatctaagtgcggccacatacatatgtgttgtatactggggccatgccttcctgcttatcaaggc

SEQ ID NO: 251626 - DNA, 201 bp, Homo sapiens
cctctctgggcttcaggtgcttcctctgtaaagtaagtatcgtaaccttcttccttctctgccagggttgtcgtgtggattaaataagaattgtaaagcamgtatcagtgactacaaaaaacaaaaaggaaatgctcaatagatgtttgcttttgtaaagcagagtttacattttccctgttgctgttgaagcaagggtgt

SEQ ID NO: 251627 - DNA, 201 bp, Homo sapiens
acttgcatatttgctgttcccactcctggaacatacttccctgagatctttctgtggttggtgccttctcatcaagtctcagatgaaatatcacctccttygagaggccttctccaaccttccaggcactgcttcttgcattgccttgttttattgtcttcatagcacttgtcaccatcagaagtgatcttgctcattaat

SEQ ID NO: 251628 - DNA, 201 bp, Homo sapiens
taattagctccccacagggctgccagaatcatggcaggctcctcacagcatctctgactcttgtcaaagggtggcggccctgactgtccagaggaagaggyctccccacaacaaaacccctctggtttgtttttgttgttggtttgtttttttactgccccaggaatcagggttatctgctggaccaccttataatttgca

SEQ ID NO: 251629 - DNA, 201 bp, Homo sapiens
agacagatcttaggtttgaatctcagtcttgccacttaatggctgtgtggtcttggacaagtctcttaaagtctctggacctcaataacactggggataayaatatctacttcaaagggttgttgtgaggatgaattgagataataaatgaagacatctagtgcaaggcaagtgcttgatcagtttaaaggttttctcttc

SEQ ID NO: 251630 - DNA, 201 bp, Homo sapiens
gttgtaggctgggcatggtggtgcacacctgtaatgccagcactttgggaggctgaggcgggaggatcactcgaggctgggagttcaagactagcctgggmaacatagtgagacccctgtctctacaaaaaaattaaaaaattagctgggcatgacggcacatgcctgtagtcccagctacttgtgggaggctgaggcggg

SEQ ID NO: 251631 - DNA, 201 bp, Homo sapiens
cagtaacagatttcttccaatatgctcttttcaagaactccagcacatttaggggatttccatttgaggaacttaagaggacattcagagactttttcttmacacacacacacacacacacaaagttctcatgacttttttttgttgttgcacttgaggagtttttcctatctggaaaattcctttgcctggaatggctta

SEQ ID NO: 251632 - DNA, 201 bp, Homo sapiens
cggggtttcaccatgttagccaggatggtctcgatctcctgacctcgtgatctgcccacctcggcctcccaaagtgctgggattacaggcgtgagccaccrcgcccggccttccacttttaaattaataataatagttcccatggttggagggcacccactctgagccaggtacttggcaataatcctctgaggtggaatc

SEQ ID NO: 251633 - DNA, 201 bp, Homo sapiens
gccaaggcgggaggatcctaggaattcaagactagcctgggcaacatagcaagatccccatttatgcaaaaaattttaaaaaattagccgagcctggtggyatacacctgtagtcctggctactcgggaggctgaggcgggaggatggctggagcccaggagtttgaggctgcagtgagctatggttgaatcactgcactc

SEQ ID NO: 251634 - DNA, 201 bp, Homo sapiens
tctcagggtacctttccctaacctccctaaactgatttctcatggaaccctggagttcaccttcatcgtagtggtgattaaaccattatttctggccgggygcagtggctcacccctgtaatcccagcactttgggaggccgaggtgggtggatcacgaggtcaagagatcaagaccatcctggccaacacggtgaaacct

SEQ ID NO: 251635 - DNA, 201 bp, Homo sapiens
atggtgaaactgtgtctctactaaaaatacaaaaattagctgggtgtcatggcagacacctgtcattccagctactcaggaggctgatgcaggagaatcasttgaacctgggaggcggaggttgcagtgagctgagatcgtgccactgcactccagcctgggtgacagagggagacttggtctaaaaaaaaaaaaaaaaag

SEQ ID NO: 251636 - DNA, 201 bp, Homo sapiens
aagagatcaagaccatcctggccaacacggtgaaacctcacctctactaaaaatacaaaaaatagctgggcatggtggcacgtgcctgtagtcccagctaagttgagccgagattgcgccactgcactccaacctggcgacagagcaagactccgtctcaaaaaaacaaaataacttattatttcctttgcacccctctcc

SEQ ID NO: 251637 - DNA, 201 bp, Homo sapiens
actcaggaggctgatgcaggagaatcagttgaacctgggaggcggaggttgcagtgagctgagatcgtgccactgcactccagcctgggtgacagagggakacttggtctaaaaaaaaaaaaaaaaagaaatcagaaatttgagcagtcaatgatgtgccctgggggtcacagtccccccaccccggagataatggatttg

SEQ ID NO: 251638 - DNA, 201 bp, Homo sapiens
agagatcaagaccatcctggccaacacggtgaaacctcacctctactaaaaatacaaaaaatagctgggcatggtggcacgtgcctgtagtcccagctaarttgagccgagattgcgccactgcactccaacctggcgacagagcaagactccgtctcaaaaaaacaaaataacttattatttcctttgcacccctctccc

SEQ ID NO: 251639 - DNA, 201 bp, Homo sapiens
gttgaacctgggaggcggaggttgcagtgagctgagatcgtgccactgcactccagcctgggtgacagagggagacttggtctaaaaaaaaaaaaaaaaaraaatcagaaatttgagcagtcaatgatgtgccctgggggtcacagtccccccaccccggagataatggatttggtgctttctttttgatttttcaaaata

SEQ ID NO: 251640 - DNA, 201 bp, Homo sapiens
gagatcaagaccatcctggccaacacggtgaaacctcacctctactaaaaatacaaaaaatagctgggcatggtggcacgtgcctgtagtcccagctaagttgagccgagattgcgccactgcactccaacctggcgacagagcaagactccgtctcaaaaaaacaaaataacttattatttcctttgcacccctctcccg

SEQ ID NO: 251641 - DNA, 201 bp, Homo sapiens
agtgaggctctcttctgggtttgcagatggctaacttctcaccatagcctcacatggttgaggatggctggagaactctctagggtctctctctctcttgytctctgtctctctttttttaaaagcagcatctcactttgtcacccaggctagaatgcaatggtatgatctcagctcactgcaacctccaccttccgggct

SEQ ID NO: 251642 - DNA, 201 bp, Homo sapiens
tctgggtttgcagatggctaacttctcaccatagcctcacatggttgaggatggctggagaactctctagggtctctctctctcttgctctctgtctctctttttttaaaagcagcatctcactttgtcacccaggctagaatgcaatggtatgatctcagctcactgcaacctccaccttccgggctcaggtgatcctcc

SEQ ID NO: 251643 - DNA, 201 bp, Homo sapiens
aggaaacaaaaatcaactcagagactctcatgaaggccccacttataaagatctgagcagggggctgggcatggtggctcatgcctataatcccagcactytgggaggttgaggcaggtggatcacttgcggtcaggagttcgagaccagcctggctaacatggagaaaccccatctctactaaaaatacaaaaaaaaatt

SEQ ID NO: 251644 - DNA, 201 bp, Homo sapiens
ctgggtttgcagatggctaacttctcaccatagcctcacatggttgaggatggctggagaactctctagggtctctctctctcttgctctctgtctctctytttttaaaagcagcatctcactttgtcacccaggctagaatgcaatggtatgatctcagctcactgcaacctccaccttccgggctcaggtgatcctccc

SEQ ID NO: 251645 - DNA, 201 bp, Homo sapiens
agggagagagttgcaacagaatgacattactttacacttggtattttgcaataatgaaaattacctactctatcttcagcactggatgtgtagcaaaaaawttaggaacttctctggtctatatcctttggatgcttcctgaaatggaaaagtggacttgatgagattgtgctggggaggtcacagggtggaggatgggct

SEQ ID NO: 251646 - DNA, 201 bp, Homo sapiens
aaaattagccaagcatggtggtgcatgcctgtagtcccagctatgggaggctgaggcaggagaatcgcttgagcccaggagctcaaggttgcagtgagctrtgatcttgccattgcatcccaccttgggtgacagaccctgtctcaaaaaaaaaaaaaaaatttaaatttcccttttaagtttttcttagctagcataata

SEQ ID NO: 251647 - DNA, 201 bp, Homo sapiens
cgcacaccaccacacctggctaatttttcatttttttgtagagatgaggtctcactatattgcccaggctggtctcaaactcctgggctcaagtgatcctyctaccttggcctaccacagtgctaggattacaggtgtgagccaccgcgcccagacttcctctagatctttactcggctgtcttcctttcattcctatctc

SEQ ID NO: 251648 - DNA, 201 bp, Homo sapiens
tagcttatattgtttggtaacctgtttttattcatgtgtcatttttgagcagtttttctccataacattcaactgctttgcttagactggtgttcaaaggsggctcatacagaccaaccctaatttaaaaaaatcttactaggaatggtttgcccaagtgcattgtgccgttgtagagagctgtgcatttctgtttgggtc

SEQ ID NO: 251649 - DNA, 201 bp, Homo sapiens
tcctgccttagcctcccaagtaactgggacttcaggtgtgtgccaccacgcccagctaattttgtattttttggtagagacagggtttcaacatgttgccmaggctggtcttgaactcctgacctcaagtgatctgcccacgttggcctcccaaggtgctgggattacaggcttgagtcaccgcacctggcctagaaattt

SEQ ID NO: 251650 - DNA, 201 bp, Homo sapiens
attttgacttcctaagactaccatagatttataaggaaataattcctccaatgggcctaagtgacatcctaaagttttacacgagccggttatgaaattgsaagaactgtttcatggaaacatttccatgtcaccaatgtaggcccatttattaaatttatggaacttgctgtatgtgcttttttaaagataccaaaatat

SEQ ID NO: 251651 - DNA, 201 bp, Homo sapiens
ccttgccatcccccaaaactatgcccagggtagctggccaggactctgtctgcatcacactcctgccagtgtatggcatggggcctggcaaataggaggtrcctttaaaacgcttgttgagcagaacattccagttgacctgatagttcttcatgaacatagtcattcattttcattgacagaacttatgttaaatgatac

SEQ ID NO: 251652 - DNA, 201 bp, Homo sapiens
gactgtgtgatcttggacaagttacttaacctctctgggcttcagttttctcaagtgcaaagtgggactagatgatatcattattacatctaacttaaagkgtttttttatgaggattcaatgaaacaatgtgagaaaaaggctgagcattgtgtcaggcatcagatacatggtacattctcgctacgtggtagtttattt

SEQ ID NO: 251653 - DNA, 201 bp, Homo sapiens
aagctgcctcccatttggaccattccctttaagcattttcacagaccatctcctgaagggatggtcatcgtggttcggtaggttagcaaggtctggcaggraacaaaaatcaactcagagactctcatgaaggccccacttataaagatctgagcagggggctgggcatggtggctcatgcctataatcccagcactttgg

SEQ ID NO: 251654 - DNA, 201 bp, Homo sapiens; identical to SEQ ID NO: 49667

SEQ ID NO: 251655 - DNA, 201 bp, Homo sapiens
ctgggaaaaagagcagcatgaaggcttttaaacttgctgggtaatttaaggtatttatcgctatttggagagctttgcttgttttgaatccattccccctscagctctcagaaatggtgcaaatgattttttttcccccttgaaaagggatgcttctaggtctttccactgtccccgaggccggattctgaatgcaggcct

SEQ ID NO: 251656 - DNA, 201 bp, Homo sapiens
tttaaacttgctgggtaatttaaggtatttatcgctatttggagagctttgcttgttttgaatccattccccctgcagctctcagaaatggtgcaaatgattttttttcccccttgaaaagggatgcttctaggtctttccactgtccccgaggccggattctgaatgcaggcctccagacctgggtgcattcgctgaggt

SEQ ID NO: 251657 - DNA, 201 bp, Homo sapiens
ttttgaatccattccccctgcagctctcagaaatggtgcaaatgattttttttcccccttgaaaagggatgcttctaggtctttccactgtccccgaggcyggattctgaatgcaggcctccagacctgggtgcattcgctgaggttttgttcattcataaacgttaattgggcatctccctgctccaggcctacattgtg

SEQ ID NO: 251658 - DNA, 201 bp, Homo sapiens
atcgctggagattactagtgtttccacctccttaagcccaggagttcaagaccagcctgggcaatatggtaataccccatctctactactactactactamtaataataataatacaaaaaattagctggatgtggtggtatgcacctgtagtcccagcagcttgggaggccgaggtgagaagatcacttagcttgggagg

SEQ ID NO: 251659 - DNA, 201 bp, Homo sapiens
tggaggggacactagtgctctggttggtgttgttcctagcagcactgtcatccacccgaaatggaattgattcgcagaaatacgggtcaccacggaggagsctgctcatgctggtaggagagggcttaggtcccacagaggtcaagtgggcagggttaggaaaaccagctctaggtggacagatatgatttgggaattacc

SEQ ID NO: 251660 - DNA, 201 bp, Homo sapiens
cgaatggtggtaggtggagaaaccagctgtatctacctctgaattcctatcctggaagggactcttgggaccacctgggcagcctccatgttttctaggatttttttttttttttttttttttttggagacagtgtctcattctgttgctcaggctggagtgcagtggcatgatcttggctcactgtaacctccacctccc

SEQ ID NO: 251661 - DNA, 201 bp, Homo sapiens
gaatggtggtaggtggagaaaccagctgtatctacctctgaattcctatcctggaagggactcttgggaccacctgggcagcctccatgttttctaggatttttttttttttttttttttttttggagacagtgtctcattctgttgctcaggctggagtgcagtggcatgatcttggctcactgtaacctccacctccca

SEQ ID NO: 251662 - DNA, 201 bp, Homo sapiens
aagatgtattatcaaatccagccactggttagactagaaaaaggagctattaggagtggtgacagagggcatccctgtcttgtgccggttttcaaagggamtgcttccagtttttgatcattcagtatgatattggctgtgggtttgtcatagatagctcttattattttgagatacgtcccatcaatacctagtttattg

SEQ ID NO: 251663 - DNA, 201 bp, Homo sapiens
ccagctaatgttttgtattttaatagagatggggtttcaccatgttggccaggatggtcttgatctcccgacctcatgattcgcccgcctcggcctcccaragtgctgggattacaggtgtgagccaccgcacccggcctctttctcttttaatcttatttagactatcatgtgtagaattaagattgaatactttattta

SEQ ID NO: 251664 - DNA, 201 bp, Homo sapiens
agtttcagaaggaatggtaccagctcctccttgtacctctggtagaattcggctgtgaatccgtctggtcctggactttttttggttggtaagctattaaktattgcctcaatttcagagcctgttattggtctattcagagattcaacttcttcctggtttagtcttgggaaggtgtatgtgtcaaggaatttatccatt

SEQ ID NO: 251665 - DNA, 201 bp, Homo sapiens
atgctctgttgaagatggggcagaacatacttcccagcagctgtgaggctgagacgaggtgagcaagtccttttgaattctctttcatgcattcattcagyaaccttgtatcatgcacttactataattacgtgattaatcattgcaactacatttatgtgattcttctccttgccaggcactgtggtagatgctgcctta

SEQ ID NO: 251666 - DNA, 201 bp, Homo sapiens
ttacaaggatgtgaaggacctcttcaaggagaactacaaaccgctgctcaatgaaataaaagaggatacaaacaaatggaagaacattccatgctcatggrtaggaagaatcaatatcgtgaaaatggccatactgcccaaggtaagttatagattcagtgccatccccatcaagctaccaatgactttcttcacagaatt

SEQ ID NO: 251667 - DNA, 201 bp, Homo sapiens
acagaattggaaaaaactactttaaagttcatatggaaccaaaaaagagcccgcattgccaagtcaatcctaagccaaaagaacaaagctggaggcatcaygctacctgacttcaaactatactacaaggctacagtaaccaaaacagcatggtgctggtaccaaaacagagatatagaccaatggaacagaacagagccc

SEQ ID NO: 251668 - DNA, 201 bp, Homo sapiens
ttgcaatctactcatctgacagagggctaatatccagaatctacaatgaactcaaacgaatttacaagaaaaaaacaaacaaccccgtcaacaagtgggcraaggatatgaacagacacttctcaaaagaagacatttatgcagccaaaagacacatgaaaaaatgctcatcatcactggccatcagagaaatgcaaatca

SEQ ID NO: 251669 - DNA, 201 bp, Homo sapiens
gttgagcgactcccccgcactggggcaaatcatctctccctccccattctctcagctccttcccagattccaccctgcccccagcagtctcttcaagcacsttgtgaacattaagttatcccctgctattcatctgagctgatgttggctcagacagtaccaattcgacgtttctccaagggcggacagcgggtcggcgag

SEQ ID NO: 251670 - DNA, 201 bp, Homo sapiens
gcagcacaccaacatggcacatgtatgcctatgtaacaaacctgtacattgtgcacatgtaccctaaaacttaaagtataataaaaaaaaaagaaaaaaaraaagaaaaaggaactattaaaaatgactgtagaggccgggcgtggtgactcatgcctgtaatcccagctctttgggaggccaaggcaggtgaatcatttg

SEQ ID NO: 251671 - DNA, 201 bp, Homo sapiens
ggtcacctggtgtatacagtgttactgtttgctaagtggaagcatcatggcctggagggtttggagccagggagacccaggcttcggctccaaattcatcrctgattccctgtgttgccttcacctctcagagcctccgttttattatctctagaatgggaatgatagtaaccactttgcagggtttctatgaggaccagg

SEQ ID NO: 251672 - DNA, 201 bp, Homo sapiens
acttaaagtataataaaaaaaaaagaaaaaaaaaaagaaaaaggaactattaaaaatgactgtagaggccgggcgtggtgactcatgcctgtaatcccagstctttgggaggccaaggcaggtgaatcatttgagttcactagttcaagaccagcctggccaacatgatgaaaccccatctttactaaaaatacaaagaaa

SEQ ID NO: 251673 - DNA, 201 bp, Homo sapiens
aagaattattcagttccgtgaatttggtccagcagagtctggtttttaacagtcatttggcctgagctattgactgcaaacttttaagattcttccaggcygtctcattagaagttgacagcactttggcaccacggagacctacaggtgtccttattcccccaccacgcttctggtaatgagaaatgaaagtcgtccagc

SEQ ID NO: 251674 - DNA, 201 bp, Homo sapiens
gtcctaactttttcatctgcatttccatccagtgttggagctaggacttccgcatgcatccagactctgctttctgctcatttcatgaccttaggggagcyatgaattcctctgggcctcagtttcctcatcggtaaagcaagcaagtcatggacctacctcaggctggttgtgaggatggaatgagatgctgcctgtcag

SEQ ID NO: 251675 - DNA, 201 bp, Homo sapiens
agattcttgccttcaagcaactcgggaatttagaaggaatagcaacagtattaacaattgctaccatttattcagtttcagtatatgtaagccactgcactttttttttttttttgagactgagtctcgctctgtcacccaggctagagtgcagtggcgtgatctctgctcactgcagtctctccctcccaagtgcaagtg

SEQ ID NO: 251676 - DNA, 201 bp, Homo sapiens
cttatgcatgtgtgtgtgcatgcatgcttgtgtgtgtgtgtgtgtgtgtgtgtagagccttggtcatcccgacagagcaaagacacaggagggtggcacayggaagaacaagtgactccaccctcccttgcacagttaaaatctggccaaggtgagaggggagatgggagaggggagaggggagaaaggagaagaggcact

SEQ ID NO: 251677 - DNA, 201 bp, Homo sapiens
ctctaggggtatgcacccatgagttcatggtttttaaaatcctcagagatgatttgtgtgcctagtcaggattgaaaccactaattctaaaggaactggaytcatggggttttgtctttaggagggagtctagccagtagagccaacccacagaagctggagtaagaatacttgggttccaatcccggtaccacccctggc

SEQ ID NO: 251678 - DNA, 201 bp, Homo sapiens
gggccaggcgcggtggctcacacctgtgatcccaatatcttaggaggccaaggcaggaggattgtttggggccaggagtttgagaacagcctggccaacayggcgaaactccttctctacaaaaaatacaaaaattagccggtcatagtggtatgcgcttgtaatcccagctactcaggaggctgaggcagagaattgcct

SEQ ID NO: 251679 - DNA, 201 bp, Homo sapiens
ggaccaaatttgaatgggagaaacggttcccttagccaataggtgagcccagccaactcctcagcccggaagctttgtcattctataattgtcattcccgrtgagccttcatcctaggtctgatggggccacttgaagatctcattgaattttgtagggaaattgcatgctaaagagacatttggaaattagcaggcttga

SEQ ID NO: 251680 - DNA, 201 bp, Homo sapiens
tttgcttttcttttatagcacttcattcaacaaatattttttcagtacttactatgccaggctgttgtgacatagcaattaacaaaacagacacaaagctyggtccttatagaactggtaatctaagctcattgccattgtgttgatgagtaattattcagcaattggtttgttaacttgtcttctccactagactggaag

SEQ ID NO: 251681 - DNA, 201 bp, Homo sapiens
cggggctttgtgtttgccctaaacaggatacacaatccagtaaacaagtattttctgagtgtctgctgtgtgccagacagtgttcttgctatgaacagaaraggccccaggagcttgccattaagggatgcaggaggaactggggacagggatgaggccatgtcgggtggggacagtgctctgaggaagacatgaaaggta

SEQ ID NO: 251682 - DNA, 201 bp, Homo sapiens
gctgtgtgccagacagtgttcttgctatgaacagaagaggccccaggagcttgccattaagggatgcaggaggaactggggacagggatgaggccatgtcrggtggggacagtgctctgaggaagacatgaaaggtagtggcattgcagggatgagggtgccaggaaggcctctgcgagtcctctgtgataatccgggtga

SEQ ID NO: 251683 - DNA, 201 bp, Homo sapiens
tctcttggtgtgttctagagaagcacggctttatgtaaaaatgtaagatttatttttgccagtaaaatataacacacagcccagcccagcaacagcatacmtcctcactggatgccagcaacagtcactgtgaaatgttacaagtgcaaacagccccagtccctcctcagacagagcatgctgcccatgccggcaacagtc

SEQ ID NO: 251684 - DNA, 201 bp, Homo sapiens
actgttcccctagaaaaatggggagtgccccgagggattgggccaaagactagggagcacccgggaggatccagcaggctggcctgtgttgggtcagtgcwacaaggcttccttccagaggcctgggcgagccctgtctaacctactccatcctcacctccgtgcgacttccatctcgtgacgttctactgaatctgtgat

SEQ ID NO: 251685 - DNA, 201 bp, Homo sapiens
tgggaggtagacagcctgctgggcaggggtgaggggtgagctgaccagtctgaagctcatccagggcaaagcgggacctgcaggtggcagacgctgtcagygggaggttgggaaccaacgccggtgtgtgccagaggagcccgggtagtgggtgcgggcaagagcaggcctgagcgttctctccctctccacctggaacac

SEQ ID NO: 251686 - DNA, 201 bp, Homo sapiens
tttatttaatgtgatttggtttgtacagctgttcctcaccacagacaaaggaaaaacaaacaccaactgttcccctagaaaaatggggagtgccccgaggsattgggccaaagactagggagcacccgggaggatccagcaggctggcctgtgttgggtcagtgcaacaaggcttccttccagaggcctgggcgagccctg

SEQ ID NO: 251687 - DNA, 201 bp, Homo sapiens
tagttcctcctccttatcattgcggttagtgataattgtgtatctttttcatttgacttgggtaaatattagccaattcccagtcatgactcaaactagayatttttcaaatgataacgatttttaggccatttcctaactcttgcaatgaaatatggatcgtgtttgctttctggagtcagaaattcagattttttccat

SEQ ID NO: 251688 - DNA, 201 bp, Homo sapiens
tgagaagatcacttagcttgggaggttgaggtgggctttgagtgagctatgatggcgctgctgaactccagcctgggcaacagagtgcagtggcaccatcrctgcacattttaaaaagcagcaaacagcgcttagcatgtggtagacatttaggaagcaagagagccccttctctcctgggtcctgagtgctagtttttct

SEQ ID NO: 251689 - DNA, 201 bp, Homo sapiens
tatatgcttttccagaagaagaagaaaggtgattcaactttgaatttcctttgatcttttcttgatcttcttaacccgttttcagaatggctaccactctmcctctccagaactttcagtggctcactattgccagtcctcattcttttttcctcccatggctggtttaatttagatctccctatctggaatttgatttct

SEQ ID NO: 251690 - DNA, 201 bp, Homo sapiens
aatgagcctagatgaccacatcctcagctcgatccactctgtccacttccagactgccatgagcctgggaagggtgatgtagctgaatctatgagaagagygattcacctgtgcccaaatcctgacatagcttcgcctgagttctgtgtctctgagcaagtgacaacttctccgagactcagtttcctcatccataaaaac

SEQ ID NO: 251691 - DNA, 201 bp, Homo sapiens
gcctctcctctggcagccttggtgcttgcgaagggtttagtggcctcttgtttttttacattgggaggtaagaatttagatttattagtcccagcttggcratgagtggcacagagaattttaaatgatttgttttaagccacgtagctaatcaggggacaaaatgaaccaaggatactagaaatgaacgagcaaggaaga

SEQ ID NO: 251692 - DNA, 201 bp, Homo sapiens
gccttgtgaagatagaagtgtactccttctatcccaggccctttttcacacccccttcttctcagaagaaaatccgaaacccagctcttgtaaaggggtgygtatctgccattcctctttgaccttacatttatgaaaactgagtctagctccacctgcaatcttgatcaatcccaagatttgaggccactgggtggagca

SEQ ID NO: 251693 - DNA, 201 bp, Homo sapiens
tccacagttttaaatttttctcccaggaagccttcatcaaatccctcaggcaaggtggcacaaagcctgcctgaaatggagggggcgtggagaagtggaartaggaggataacacacacaaatgaatatttcaataaattatcatgccatgaatgtcaaagtgtgctcaagaaatgctaatgtccttactgaggagcagca

SEQ ID NO: 251694 - DNA, 201 bp, Homo sapiens
gcttactgtcacctgaaattattttaaaattaaaaaattataaaaaccaattaaaatgtatttttaaaaacattaatagtagaggcccaggtgaatttctstcttggatttgagaagcattctcttgacccctaccccagagtcttcctgaggggaaactgtgtgtgccttgttgtggcaggtgcaccatttgccccttaa

SEQ ID NO: 251695 - DNA, 201 bp, Homo sapiens
gaaatgaacgagcaaggaagaaggcaaatgaacttctgacttcttctaccctttgatgttttaccaacacgagacttattcgttttttagtttggtatttmtctgtgaaatgagcagaaagaatgacatgagctaagagaggaacaaataggcaagggatttgtgaacacagtgctctgataatgatgacattggctctct

SEQ ID NO: 251696 - DNA, 201 bp, Homo sapiens
gaaaacgaattaatttcattcttttacttcttaaaattgtggctattggaaagcttaaaattaaatatgtagctcacattatacttctattggactgtacygggctagactagaaatgagacgctccagggaccacatctgttttgcttatcgctgtatcccagcacctagcccagatcctggctttacagtagatgctca

SEQ ID NO: 251697 - DNA, 201 bp, Homo sapiens
acacacaaatgaatatttcaataaattatcatgccatgaatgtcaaagtgtgctcaagaaatgctaatgtccttactgaggagcagcaagaggcaggcagrgggcctggaaagactccatagaaagacctggatgatctggtggatggggccagcagaggcgctggcaggggcaaagtgaaaaaaacacagtgaaggcacc

SEQ ID NO: 251698 - DNA, 201 bp, Homo sapiens
cagcggctgcccgggagccgataactcccgggtgggtctccagaccccaggaggctgcaccatgcagggtctcagaccacagtctgcctggactcgaaccycagacccggttcctagctccctgagcttgagcaagttaattattctccctgtgcctgtttccttatccacaagttgaaaatactaatgatacctacctca

SEQ ID NO: 251699 - DNA, 201 bp, Homo sapiens
aggttacagtgagctatgatggcactgccgcactccagcctgggcaacagagtgagaccctgtctctaaaagaaaacgaattaatttcattcttttacttyttaaaattgtggctattggaaagcttaaaattaaatatgtagctcacattatacttctattggactgtactgggctagactagaaatgagacgctccagg

SEQ ID NO: 251700 - DNA, 201 bp, Homo sapiens
gggtcccacagacctggtcctcagtaagggagggagaggagtctttcgggcctaaactaggtggaggagcaaaggcggcatcagaaagtcagacaaggcckggcgcggtggctcacgcctgtaatcccagcactctgggaggctgaggcaggcggatcacttgaggccaggaattggagaccagcctggccaacatggtga

SEQ ID NO: 251701 - DNA, 201 bp, Homo sapiens
tccagaccagatcgtttctttaaaggcccaatatttttctcctttcttttctaaacctaagaggttttgagcattatgtaattcttagtgcttcccctaaratgcacccaaagatgtctgagacctgtgaccttctagacctttgacccctggctctactgaatgaaaagtcccctatcttaaacctgaggaccaggaagg

SEQ ID NO: 251702 - DNA, 201 bp, Homo sapiens
tataaattctacaagatcgtcaacataaataagactttctcctcaaccagtttttcagggccatgccaggctttaaaatgggcaggcccctggccgggcgyggtggctcacgcctgtaatcccagcactttgggaggccgaggtgggcggatcacgaggtcaggagatcgagaccatcctggctaacatggtgaaaccccg

SEQ ID NO: 251703 - DNA, 201 bp, Homo sapiens
atctgcagaactagctccacctctctcttgggggaggaccagccttcctctcactggaagcatgcaacatgcagaaacgaaaggcccagagcatggctcaygcgtgcctttggaacaatggagaaatcgggtattgttaaaacatgctgcttgactaagaaataaatggacctctttgggtgcctctcaattcatagttca

SEQ ID NO: 251704 - DNA, 201 bp, Homo sapiens
tatgccttcggagtccttcaggatcttgaggatcagagggtatctaagtttttctgccttataaaaaagtggaggagcttttcagagcattctagaataasagataagactagagtctgggaacggagtagaaagatgctcaaggaaggactcctcttccttgtttccacagctgggccacaagcccaggtctcttttgcc

SEQ ID NO: 251705 - DNA, 201 bp, Homo sapiens
aattagccgggcgtggtggcacgtgcctgtagtcccagctagtcgggaggctgaggcaggagaatggtgtgaacccgggagacggagcttgcagtgagccragatcgcgccactgcactccagcctgggcgacagagtgagactccgtctcaaaaaaaaaaaaacaaaacaaaacaaaacaaaaatgcaggccccagtttc

SEQ ID NO: 251706 - DNA, 201 bp, Homo sapiens
tggagggagggcatgagttgagctcacattgttcatagtgacattaactatgatcaggatggagcaggttgaggcaaaggggtgaaggtaaaggtggtggraatggctccgttggggccccaggcttggtggtggtggttactggggagagaacgagggtgtcttccaggcaggggtaggaggagggctttggagccccat

SEQ ID NO: 251707 - DNA, 201 bp, Homo sapiens
gcctccatttcctccacccacccccaacatagcctccttcatggagcatatacacatgtgcaagtgcatatgttcagacccccccacacacacacactcayactcatacacactcacacaaacacatccatacacacatgcactcacacttacacacacactcccacacatacacacccacacatgcactcacactcatac

SEQ ID NO: 251708 - DNA, 201 bp, Homo sapiens
taacggattagacttttttttttcagcccctgccttgagacaagtgtagatttttctctcactggttttgcagttctatatctaggatataatgcccttgwcttcttgcctgtgtatggtataaaaaggatggtctttcaaacccagatactgtgtaacctgggcaagtcacgtaacctctctgagcctcacttttcaggg

SEQ ID NO: 251709 - DNA, 201 bp, Homo sapiens
caccaggctggagtgcagtggcgcaatctcggctcactgcaacctccgcctcccgggttcaagggattattctgccccagcctcccaagtagccgggactrcagacatgtgccaccacgcctggctaatttttgtatttttagtagagatggggtttccccatgttggccaggatggtctcgatctcctgaccttgtgatc

SEQ ID NO: 251710 - DNA, 201 bp, Homo sapiens
gagatggggtttccccatgttggccaggatggtctcgatctcctgaccttgtgatcggcctcccaaagtgttgggattacaggcatgagccactgcacccrgcctccctgcctcctttcctaaggaagctgcagctcacttgggaaatccaggataaccttcccacctcaagacccttcactctaccgcagctgcaaattc

SEQ ID NO: 251711 - DNA, 201 bp, Homo sapiens
agccccagacactttggggacgtgctggaaatatctgcctgacagagtgtttctgttttgcaccggtatgattcgtgtatctgagggctgcagcccttcattttttttttttttttttttttttttttggtatttaagaaaatggtaaaatacacataacataaaatttaccattttaaccatttttagtgtacagttcag

SEQ ID NO: 251712 - DNA, 201 bp, Homo sapiens
attctcctgcctcagcctcccgagtagatgggactacaggcacccgccaccacacccggctaatttttttttgtatctttagtagagacggggtttcaccrttttagccaagatggtctcgatctcctgacctcgtgttccacctgcctcggcctcccaaagtgctgggattacaggcgtgagccaccgcgcctggcctgt

SEQ ID NO: 251713 - DNA, 201 bp, Homo sapiens
aagaagagtggtatgcaaccccatgtcaggagggccacagctgcagggagcggggctcggaggagctgcagatcctaagaaggatccacgacctttgggarcctcgctgtttctggccttctgctcaccgcagagggtgaactggccatctgacacccagctccaacttcagggttgttcaatgtctgtgtgcagttgtga

SEQ ID NO: 251714 - DNA, 201 bp, Homo sapiens
gccccagacactttggggacgtgctggaaatatctgcctgacagagtgtttctgttttgcaccggtatgattcgtgtatctgagggctgcagcccttcattttttttttttttttttttttttttttggtatttaagaaaatggtaaaatacacataacataaaatttaccattttaaccatttttagtgtacagttcagt

SEQ ID NO: 251715 - DNA, 201 bp, Homo sapiens
aatgagaagatagatgtcaaggccagtttagctcaagattcttttttaaagaaatggcctttcctgcctagaatgatcctgtttcaaacagcggcccccgccccccccaaaatttttttttccctttgcagctttggattttagtaacaccaacaatatttcctggagaaatactccagatgcagttttctggtacaaggg

SEQ ID NO: 251716 - DNA, 201 bp, Homo sapiens
ttaagcaatgagagagagatgcttgaagaagagcagaagctctgcttgctctttaagcttggcgagggttgggtctgtttcccctcctccattcctgggcwcctagtaccatgtggttgctcagtgaatatctgctctttctttttagccttcatgtgggaggcagttgttgtgtagagggaataagactagacttgggtc

SEQ ID NO: 251717 - DNA, 201 bp, Homo sapiens
atttattcccatgtagccacaggaaatcaattgagcagagaaaggattgagcagagcaagcgagatttagttttcattaaaataacacagtacctataaawaaggtgagaatccagttaatagctttctattaaagtggagttgacggaaagaattgcattggaaggattttgttttgggactccgtgaggatttaaacat

SEQ ID NO: 251718 - DNA, 201 bp, Homo sapiens
taaataacttactgtattagcctgctctgacaggcataatgaaacatcacagactgggtgacttaaaccaggggtccctaatgcccctggccacagacccrtaccagtccctggccttttaggaaccaggccccacagcaagaggtgagtggcaggcgagcaagcattactgcctgagctccacctcctgtcatatcagtg

SEQ ID NO: 251719 - DNA, 201 bp, Homo sapiens
tttctgtgcatttcacgtcccctctgcacgcccttctcatggggccaatcactgttgggaacactcagagataataaacatttccctgctgtatcatcctagaggatctgtcatttattaactgtgtaccgttggcaagaacctctctgcacttgtttcctcatctgtatgatagaaataatacatctcgggatggtagtg

SEQ ID NO: 251720 - DNA, 201 bp, Homo sapiens
tcagctcagccccctccaaggcctgatagtttgaaggcactgaggtagaggttttgtgtctgttcctagaattaggcagtttggttccagaatcaacatcyttaaccattagatgacactgtctgtgaagagaaagaaaactcatgaaaacacaattcacaacacaatgagtgtgtgtgtgtgtgtgtgtgtgtgtatgtg

SEQ ID NO: 251721 - DNA, 201 bp, Homo sapiens
ttctgtgcatttcacgtcccctctgcacgcccttctcatggggccaatcactgttgggaacactcagagataataaacatttccctgctgtatcatcctagaggatctgtcatttattaactgtgtaccgttggcaagaacctctctgcacttgtttcctcatctgtatgatagaaataatacatctcgggatggtagtga

SEQ ID NO: 251722 - DNA, 201 bp, Homo sapiens
tctgtgcatttcacgtcccctctgcacgcccttctcatggggccaatcactgttgggaacactcagagataataaacatttccctgctgtatcatcctagaggatctgtcatttattaactgtgtaccgttggcaagaacctctctgcacttgtttcctcatctgtatgatagaaataatacatctcgggatggtagtgag

SEQ ID NO: 251723 - DNA, 201 bp, Homo sapiens
ctgtgcatttcacgtcccctctgcacgcccttctcatggggccaatcactgttgggaacactcagagataataaacatttccctgctgtatcatcctagaggatctgtcatttattaactgtgtaccgttggcaagaacctctctgcacttgtttcctcatctgtatgatagaaataatacatctcgggatggtagtgagg

SEQ ID NO: 251724 - DNA, 201 bp, Homo sapiens
tgtgcatttcacgtcccctctgcacgcccttctcatggggccaatcactgttgggaacactcagagataataaacatttccctgctgtatcatcctagaggatctgtcatttattaactgtgtaccgttggcaagaacctctctgcacttgtttcctcatctgtatgatagaaataatacatctcgggatggtagtgagga

SEQ ID NO: 251725 - DNA, 201 bp, Homo sapiens
tcaggtttgctgaagatcagatagttgtaggtgtgtggtcctatttctgggttctctattctgttccattggtctatgtgtctgtttttgttccagtaccrtgccgtttcggttactatagccctgtagaatagcaagtagggtagctgatgcctccagctttgttctttttgcttaggattcccttggctattcgggctc

SEQ ID NO: 251726 - DNA, 201 bp, Homo sapiens
tgcatttcacgtcccctctgcacgcccttctcatggggccaatcactgttgggaacactcagagataataaacatttccctgctgtatcatcctagaggatctgtcatttattaactgtgtaccgttggcaagaacctctctgcacttgtttcctcatctgtatgatagaaataatacatctcgggatggtagtgaggaag

SEQ ID NO: 251727 - DNA, 201 bp, Homo sapiens
aaccctgggtagtagattatgtcattatccagtttccgtatgtggagcatctctgtaactcctctaaggtcacgggtgttaaacccactcccgagacaccrtgacaacacagaacacactgcgttgggacgtcagctgggtcagctgaaggacttgtgagtgcagctccctgagctgcagctgaccacacaagtgggcaac

SEQ ID NO: 251728 - DNA, 201 bp, Homo sapiens
gattagctgtgttgtgcagaagggaagaggcattccaggtctttccagctgtcttgcctgtgaacatttatcgtcccctagttccgacgtttattatcccyccgggtggatagcactaattcataccagtctgtctgatggcagcaacccccatagatgtatgggtcatggcggaagagggagaaaccccagactcttgct

SEQ ID NO: 251729 - DNA, 201 bp, Homo sapiens
ctcctcaagactgaattacacagcctgttagagggaatataagaggagccgagctggctccaccacagggctgccgggcctggagctggtccctgaagaaytccagggcctgcaggatgctcacggtttgtcctttgccacgtgcccgacacgtctcgcaccatttccaaaccgctcctcgagggtctctcccctcttcaa

SEQ ID NO: 251730 - DNA, 201 bp, Homo sapiens
caggtctttccagctgtcttgcctgtgaacatttatcgtcccctagttccgacgtttattatccctccgggtggatagcactaattcataccagtctgtcygatggcagcaacccccatagatgtatgggtcatggcggaagagggagaaaccccagactcttgctatttggagggaatgagattctgatagtcacagccc

SEQ ID NO: 251731 - DNA, 201 bp, Homo sapiens
gtaacttattgccttcagaattgtccttagtgattcaaatggcagaattgatgggccctgtttccttcctagtcctttcatttcctttaaacacaggtttkgttttgtttaatggcattgttcaatagcccaagaggcccatgaatgcttctcttagggtgatgaatacatcggctaagaagtcatgaattgcaaaggtca

SEQ ID NO: 251732 - DNA, 201 bp, Homo sapiens
tttattcattcagccctgaatttaggccccttttaggaaccgaggatattgtgatagacaagacagtccaagtccttttgctcatgaaacttagggtctcrtggtggcaacagacaacagccaataaagcatttaagataaaaagacaggagagaatcaatgccttgaagaagcatatggcaggcggggcgcagtggctca

SEQ ID NO: 251733 - DNA, 201 bp, Homo sapiens
tcctcagacatcccgctccatttctttgttcaacgctaccaccctctaccctggccagactgggttcctctctaactcaaagacacatgatgggacacacwgtgctttacagggaaggacagtggaggccaggagagagaaggctgaaccaaagaaacttcctaaggctcaactgtttatacagttctctccgtctgttct

SEQ ID NO: 251734 - DNA, 201 bp, Homo sapiens
cagcaacccccatagatgtatgggtcatggcggaagagggagaaaccccagactcttgctatttggagggaatgagattctgatagtcacagccctcagcraactgttctctttggaaccaatacagttgttttcctgtaagaacacagagaagacccaggcaactctgggttctagaaatgaaggcctccttgagaagcc

SEQ ID NO: 251735 - DNA, 201 bp, Homo sapiens
cagagctggtgaaatttgtctttgagattcctatccaggcgttctttttcagatttcttttttcttctttgataaaagaatgcctacgtattaactacctrttttgtgccataccttgtccaaatcctgtactagagttgatcttatttactgaatgctgaaatgtaccttatttgctgtagtcaccacccctgcggggta

SEQ ID NO: 251736 - DNA, 201 bp, Homo sapiens
ctgccaatgttccctgtctctacttgtgaaacactttcctgtcacctagaagtcacttggtaagctcagttcttacccagggagctttcctcgggctccartgcaggactatctttttccttgtctgcttccgtagagttatctacctatcatcacctgtctcttcagctacagtgcgcgctctgtaattccaaagttctc

SEQ ID NO: 251737 - DNA, 201 bp, Homo sapiens
atttaagataaaaagacaggagagaatcaatgccttgaagaagcatatggcaggcggggcgcagtggctcatgcctgtaatcccagcactttgggagactraggcgggcagatcacttgaagccaggagttcaagaccagcctggccaacatggtgaaaccctgtgtacttaaaaatgccaaaaattagctggacatggtg

SEQ ID NO: 251738 - DNA, 201 bp, Homo sapiens
atatggcaggcggggcgcagtggctcatgcctgtaatcccagcactttgggagactgaggcgggcagatcacttgaagccaggagttcaagaccagcctgkccaacatggtgaaaccctgtgtacttaaaaatgccaaaaattagctggacatggtggcacacgcctgtaatcccagctacttgggaggctgaggcacaag

SEQ ID NO: 251739 - DNA, 201 bp, Homo sapiens
agtggaaatgaactattgcggtaggttggcaagtaagtctggtgacgttagggagtaaactgggaggaagttccctaggctctgatctctgtaggatcacrggtgggagggcaggtttgatctctgcccttgtgaggaggttggatggagccctttgattccatccctacctccgctagctcagcatttacagcaaacagc

SEQ ID NO: 251740 - DNA, 201 bp, Homo sapiens
tccttcatggaaaaagccaaggcttatttgtgtaaacaatataggttaattggccaaattacttgacatttcagatcagttcccccaattgccagtgcatrttctaattcagcattataacatctggcagtgagaaacagaaatttactatctttattttgagaagtgttgatttttgagtaattgaggcctagaagttcc

SEQ ID NO: 251741 - DNA, 201 bp, Homo sapiens
tggtatttctgtctttaggtctttgaggaattgacacactgtcttccacaatggttgaactaatttacactcccaccaacagtgtataagtgttccttttyctccgcaaccttgccagcatctgttattttgactttttagtaatagccattctgactggtgtgagatggtatctcattgtgggtttgatttgcatttctc

SEQ ID NO: 251742 - DNA, 201 bp, Homo sapiens
ctgcattctaaccccaaatctgcattctaaccccacacttcctggctatgtggcctcgggcaaatcgttaacactatcagagcctcactgcacacctgcaygttggggctggcatttaatacccaccttctaaagtgtgtgcatgtttaggaataaaagagcaaatccatgtaaatgcttagaacagctcctggcacacct

SEQ ID NO: 251743 - DNA, 201 bp, Homo sapiens
taagtaccaaaaaatgtaaatgatctcatgaataatttttatattgattttatgttgaaatgaaaatgttttaggtatgttgggttaaataaagatatatyattaacattaattatggccaggcacagtggttcatgcctgtaattccagtgctttgggaggccaaggcagaaggattgcttgaggccagaagttcgagac

SEQ ID NO: 251744 - DNA, 201 bp, Homo sapiens
caaaacgttctctcacttgatctccatcaaaaaagagcaccattggaggggctcagaggaatgggttctaacatgtgatgtgtctggatccgtgctcaagractgggatgatgccatggataagagcacagctctgtgttctgcatcacagactctgcattgactagctgtgtgactttgggcaagtgatgtagcctctct

SEQ ID NO: 251745 - DNA, 201 bp, Homo sapiens
tagtcccagctagtcgggaggctgaggcaggagaatggtgtgaacccgggagacggagcttgcagtgagccaagatcgcgccactgcactccagcctgggygacagagtgagactccgtctcaaaaaaaaaaaaacaaaacaaaacaaaacaaaaatgcaggccccagtttcacttgcatgttgttgaatttggagagtca

SEQ ID NO: 251746 - DNA, 201 bp, Homo sapiens
gttcctctccaaacaactggaatgtttctcttttctgataactagagcaagaagatttaatcatatttccccttttgtccttgctgctaggaagcccacarccaattgagattctaaatcccagccctcatagaatattttttttctatttttatttcatactgcacatatgtcctttgttatggtctcttcaaaaccttt

SEQ ID NO: 251747 - DNA, 201 bp, Homo sapiens
ggccttatcccagctgccctggagggagggcatgagttgagctcacattgttcatagtgacattaactatgatcaggatggagcaggttgaggcaaagggrtgaaggtaaaggtggtggaaatggctccgttggggccccaggcttggtggtggtggttactggggagagaacgagggtgtcttccaggcaggggtaggag

SEQ ID NO: 251748 - DNA, 201 bp, Homo sapiens
cccttcacatcttaccaagggctcccaaaacgttctctcacttgatctccatcaaaaaagagcaccattggaggggctcagaggaatgggttctaacatgkgatgtgtctggatccgtgctcaagaactgggatgatgccatggataagagcacagctctgtgttctgcatcacagactctgcattgactagctgtgtgac

SEQ ID NO: 251749 - DNA, 201 bp, Homo sapiens
gagtactgtttggctcattttacagtgaggaaatagaggctttaggagaaagcccggacctcatagctagtaggtgctagatctgggaatctgacactagygtcttctcttggccactaaattacactccagctgccacactgcattgccatcttttctgttccttgtccctgttagaatgtgtgctttctccctgaaatc

SEQ ID NO: 251750 - DNA, 201 bp, Homo sapiens
cccaagggcacgctgctagtaagtggtgaagctgggatttgaacccaggcagtctggctgcagaggatactttataaaccacttctacttcacttaatagrcgtaatattccacttgaagcccttcacatcttaccaagggctcccaaaacgttctctcacttgatctccatcaaaaaagagcaccattggaggggctcag

SEQ ID NO: 251751 - DNA, 201 bp, Homo sapiens
acacacccaggcaagggcctggtctggccttcctgacttcatcctcacacccgccccatgatgcaatgaggcgtttcctgagcacttacctgcaggggcaygtgcaactccctcctctcatctgagctttacagccacctttaaagcagggagtactgtttggctcattttacagtgaggaaatagaggctttaggagaaa

SEQ ID NO: 251752 - DNA, 201 bp, Homo sapiens
tgccgttctcattgtataaacaagggaactgaggcacagagagatttagtaacttgcccaagggcacgctgctagtaagtggtgaagctgggatttgaacycaggcagtctggctgcagaggatactttataaaccacttctacttcacttaataggcgtaatattccacttgaagcccttcacatcttaccaagggctcc

SEQ ID NO: 251753 - DNA, 201 bp, Homo sapiens
tttgagctcctgctctgggggcaggcatggtgctcaacacaggggattccaggatgagcaaggcaacagtcctgaacttcagggagcagaggtagggatcyatgggtaaacagacagttacagtatgttgtgagaagagagtaagctccagagtccagttacctgggttcaaatcctggctgcaccaccggctagctttgt

SEQ ID NO: 251754 - DNA, 201 bp, Homo sapiens
gagcccagcctcagctccgggctgtcagcccaagcccatgctgccatcccagtttgtttttcctgttacctaacagtcaaggggaatcatatttcctggtytagcaagcatcttcaatccactatttgcatgtctttcttctcatctctgggagcgaaacaaaaagagtaaaccttaaaggttttcacatccttcacccta

SEQ ID NO: 251755 - DNA, 201 bp, Homo sapiens
ttttttgagctcctgctctgggggcaggcatggtgctcaacacaggggattccaggatgagcaaggcaacagtcctgaacttcagggagcagaggtagggrtctatgggtaaacagacagttacagtatgttgtgagaagagagtaagctccagagtccagttacctgggttcaaatcctggctgcaccaccggctagctt

SEQ ID NO: 251756 - DNA, 201 bp, Homo sapiens; identical to SEQ ID NO: 49666

SEQ ID NO: 251757 - DNA, 201 bp, Homo sapiens
ccaaatccttattttttttgttgctgtttactgtctttctgttcaacaagctttcaatgaccccatctaggtgttaaggctacagaggtgacagtcccagktccctacctctagttcatacttcagaagtttcaatgtttctaagatatggtgttccttacaaaggcacagcatgctgggaaagaccttcaggcatcgtct

SEQ ID NO: 251758 - DNA, 201 bp, Homo sapiens
aactggcgctctgcctcctgggagctttatggcaaagtaacagcaagagaacacagacaaaagacagataatatggagatccagaggaggagggtttgggrtgcttagacaagggtggggcctgcgtttatctgataaataacacagtgattctgtatcatcatcgtgttgtttacgtgaaccctgccaggcaccacatgc

SEQ ID NO: 251759 - DNA, 201 bp, Homo sapiens
attctttcctgattgatgcgtgagatgccagtgtgaaggcagctctgcccctccagcctcggcaggatagctagggatggattccaccactgctctcactscccccagcatccctttatcctggatcccggggtttctcagcaaaggtttgaggaatttgactttccttttgggagcaggagtcctggggaggtggagaag

SEQ ID NO: 251760 - DNA, 201 bp, Homo sapiens
cttactttgccatggggaggaatgaggacctggggttattgccctgtagttcattccacccttcaccccatgggatacccagtcagccaccaacagccttycctggtaggcactcagggaagtgccccagggtgaggaggatttgtgagaactggcgctctgcctcctgggagctttatggcaaagtaacagcaagagaac

SEQ ID NO: 251761 - DNA, 201 bp, Homo sapiens
catgccttgcttttggtggaagggtgagcgacttcgcagagcctagagcgggcttccagctgctcagtacaaatccccctgaccttcgcgccggaggcgckggcaggtattttccacttcacagcatttcttttaattctttcctgattgatgcgtgagatgccagtgtgaaggcagctctgcccctccagcctcggcagg

SEQ ID NO: 251762 - DNA, 201 bp, Homo sapiens
attcatttaaatctcaccccgggcccgttgtatagttgcagaaactggggctcagagaggtcagcttgcccaaggctgtgctgctaacaagggcagggctrgaccttaagatccggacccaaatgcctgctgtttctcccgcccctagttctgaatacggtcacaggtggaaaacggggtggcctgtgatattccagtccc

SEQ ID NO: 251763 - DNA, 201 bp, Homo sapiens
atttttcttatttaaaaattttaaatccaactatcttgaaatagttggaggtacagagctgcttgaggaaaattcagccccaaaattcatcagaaagatgrttggcctcaggatcacaggggcacgatccctcctgaaggaccagcagttccgggccctgtgtaggcacaagatgaatgtcattcatttaaatctcacccc

SEQ ID NO: 251764 - DNA, 201 bp, Homo sapiens
tccctgttctgaaaatgggctcgagggctgtggctctaaggccacattttgtaataggagagtaagcaaactgggtgtaaacccccgcacccctgagactygggaccacggactcagcctctgcgggcctcagcgtttccatctgtaaattggagctgagcatgtccacctctcagggttgaaaggattcggggtataatg

SEQ ID NO: 251765 - DNA, 201 bp, Homo sapiens
gctgaggcagagaattgcctgagcctgggaggcagaggttgcagtgagccaagatcgcaccactgcctgggagacagagcgatactctgtctcaaaaaataaaaaaaaaaagaaatttaaaattaggcatggtggaacatgcatgtagtcccagctactggggaggctgaggcaggaggattgcttgagtgcagaagtttg

SEQ ID NO: 251766 - DNA, 201 bp, Homo sapiens
ttctattagctgaaaaaaatgaataactttccactgtaggggacccagtctcctaaatctccactgacatacatgggatcatttacacactcacatacaartgcacacacacacagatacatgtatcatatatacccactgacaacgaggacacatagacacatacatacatgcaggcagatacatccatacattcaaaca

SEQ ID NO: 251767 - DNA, 201 bp, Homo sapiens
gtgctgtgtctgcacacggggtgccaagggctctgtcatatttagccctttgaatatcagccccagagccaatgtcgcagacatctgctttaaatggggaytcccttcctttagggtagagagaaaccttagaggccagagtcacaccgtccttcttctctgggatggcccccatcccttgtcatttcagatgcagcatag

SEQ ID NO: 251768 - DNA, 201 bp, Homo sapiens
ggacagccagggtggaacctgggcctcaccacttgcaaggcctgagccttgggacatgaattcaagccctctgagcctcagttgactcatttgtaagttgsggatatcactttggggattattgtgaggattaactgagatggtgactgtcaagtacttcgtgggatgcctgacgcatcacagagccctgcaggtgagttt

SEQ ID NO: 251769 - DNA, 201 bp, Homo sapiens
cctgattctgggggcacctttaaacccagcaagttcccccgtgttcaaccctccctcccagggctgcatgatggaacccttgaaccaggatcagttgttgsgagtcgcagccaacactttgacacacactgtgtttcaggcagtcttctgaatgctttgcatattctgtgaggttggtacttccattaggtgggtgcaaaa

SEQ ID NO: 251770 - DNA, 201 bp, Homo sapiens
gttctcacagctaggtgttgcttttccattccctgcctctcctggcctcagattctttcctcctacaccaattactgtttcactgctccccacccaccacrccttccaccttgactccccaaacctgagcaattctagggcttgtttaacccatggttctacagggagatgccccaccgccctgtgtttggaagttaggaa

SEQ ID NO: 251771 - DNA, 201 bp, Homo sapiens
ttcgtgagctttgctggcatggacctggctgtgccaggagcctgtccttctgttcgcctatgtgccataagccagaccccagcaaggcttctcccaaagaygtgggtgcctcagaaagatgaaagcagtgatccctatttccctaagggcctccccagcctttgacagggtcctggcagaaaagctagactcagtggctgg

SEQ ID NO: 251772 - DNA, 201 bp, Homo sapiens
tgagtttcagagattaggaagttgacccaaggtcccaagcctagttaatgggtaaaactaggacttgaatccaattctggttgaagcttctccttccaaakggtgttgctgggtgagcaactcatcttggtttgcctggaacttacttggttttagcactcaaagtcctgaatcctggggatctccttggaccaggcaaac

SEQ ID NO: 251773 - DNA, 201 bp, Homo sapiens
atgcctggctgagtcctgcctcaggactgaggccctgtggctcagttttttgatctgtggtgtgagcgtagtatcacctcccctgggagtcatgatagcartcagcagtattaacaacaatgacaacaacggcagctgggcccctcaaggactgtatttaatactcacgatatccctaatacagctgtgagccctttgttt

SEQ ID NO: 251774 - DNA, 201 bp, Homo sapiens
gggtacagtggagctcagcttctagggagggtccgaaccttcgcacagcatcagcagtaggagatgttctacagctcttattgtagatgctacagtgtctyctgaggtagatggagccaggttgtgtggaaattgtttattctgtaattggatgctcaagaatcagaaagcataaagagtataatttgtgtctctcttccc

SEQ ID NO: 251775 - DNA, 201 bp, Homo sapiens
tccgaaccttcgcacagcatcagcagtaggagatgttctacagctcttattgtagatgctacagtgtcttctgaggtagatggagccaggttgtgtggaawttgtttattctgtaattggatgctcaagaatcagaaagcataaagagtataatttgtgtctctcttccccatggtggggaagtcttattaaaatgcagat

SEQ ID NO: 251776 - DNA, 201 bp, Homo sapiens
tggtctggaggggacccaggcttggagcccagaaactaggggattgtcagcagcagtcgaggctcaaggggatgtggtttgtaccagggttgccaggatgsggggttgtggccaggctgtggggagtgggtgcctaggtacctggcagggaacctgggcagacagcagtgccattccctgagatgggacacaggaagaggg

SEQ ID NO: 251777 - DNA, 201 bp, Homo sapiens
ctgtcacccagccgagatcgcctgggtgacagagtgagactccatctcaaaaaaaaaaaaagttcatgtgcccttggtgtaaaatactgggctctatctcrccgtctctgctgtctgcagttgcattatgaaatcaggaaagggttatttaatttcaatcactttcaacttgttttggggtatgagaaacacaccagcctc

SEQ ID NO: 251778 - DNA, 201 bp, Homo sapiens
tctgcatgccttgcttttggtggaagggtgagcgacttcgcagagcctagagcgggcttccagctgctcagtacaaatccccctgaccttcgcgccggagscgctggcaggtattttccacttcacagcatttcttttaattctttcctgattgatgcgtgagatgccagtgtgaaggcagctctgcccctccagcctcgg

SEQ ID NO: 251779 - DNA, 201 bp, Homo sapiens
tggcagggaagcttgctttgccattcctatggggggtaatgtcccccatgccaccccctgcccccagcccagtgctccagagacttcggcctgtccactcrccaggagcaaggaactgtacctgctaaccccagctcatagctgaggctggatgctgcaaggtcacacgcagacagacgccaacctctagcctccccacag

SEQ ID NO: 251780 - DNA, 201 bp, Homo sapiens
gaatgatattccactggatatatgtactgcgttttctttctccattcatctgttcatagacatttggctttcttccaccagagtttacccttctttaacawgtactgagtacctactgcgtggtagacagtaccccattatcttagtgctaaaatgtgtactcatggaggggcagtatgagtgaatccgagtacctgagag

SEQ ID NO: 251781 - DNA, 201 bp, Homo sapiens
ggggagaacctggtatccctgttctgaaaatgggctcgagggctgtggctctaaggccacattttgtaataggagagtaagcaaactgggtgtaaaccccygcacccctgagactcgggaccacggactcagcctctgcgggcctcagcgtttccatctgtaaattggagctgagcatgtccacctctcagggttgaaagg

SEQ ID NO: 251782 - DNA, 201 bp, Homo sapiens
agtaccttcacactgttgtgcaacagctcgccagagctgcttcatcttgcaacgtggaatctctataccgtttgaacaataactccccatttctcccgccygccagcctctcgtaaccaccattctactttctgtttctatgagtttgatgcttttagatacctcatataagtggattcatatagtatctgtccttttgtg

SEQ ID NO: 251783 - DNA, 201 bp, Homo sapiens
cgtattgtcttctcgcaacttgaaccttgctggagaagtgagaagtgggtgtgcagaatcgtacggtgtgcagacggtggcctggtgaagtgccgtgtacytaggagttgagggggagctcgatggcgctggggcagaggtctgcggagagtaggttgggtttagaaaaatgaagaggaggagcagcacaggccatctgga

SEQ ID NO: 251784 - DNA, 201 bp, Homo sapiens
gtacattcccaaggcccaagacagaggaagtgatttacaaacctagcccaggaagggccaccctgttcatcttgggggaagacccgaagccccaacagggytcccgggttgaaatgaagctgctaatggatgagtcttgttggtttcgatcctgacctctgtttgcctgtggaagctggcccaaggggccagtggctttgc

SEQ ID NO: 251785 - DNA, 201 bp, Homo sapiens
ggtctagcgtattgtcttctcgcaacttgaaccttgctggagaagtgagaagtgggtgtgcagaatcgtacggtgtgcagacggtggcctggtgaagtgcygtgtacctaggagttgagggggagctcgatggcgctggggcagaggtctgcggagagtaggttgggtttagaaaaatgaagaggaggagcagcacaggcc

SEQ ID NO: 251786 - DNA, 201 bp, Homo sapiens
gcagcagctcaggccgtgtcccaggtcctgagtggctgtaagaaaaccagaagtttcaagacaaggtgaggagacagtcacgggagcagcatgtcttcagrcggaaattgttccaatttccccacaaatgatcactgatgtgtattttgctggactgcctctggagaacagagctcagatttggaatggtttagatgctat

SEQ ID NO: 251787 - DNA, 201 bp, Homo sapiens
gtataataccaattaaaacataccccaaaaagctgggaaaacatcaaaacagggataataattacctctggttaatgggaatttaggggaattttattttygtgttattgttttcctctaattattaccattagtttctgcagttgttttaaggataacagcaagcaggaaacaaaagagacagaaaaaacacagaggcca

SEQ ID NO: 251788 - DNA, 201 bp, Homo sapiens
tggatgctgctctgagaagctcccaatcgatgcatttgggaagatccccttgcagggttctccaactgcacctcatctaatagagttaacatttcgttctsattctttccttgcatgagccacagcccctgacttctgcatttcctggctgggtgacgttagacaaggaagatacttttcctgagcagggataattatacc

SEQ ID NO: 251789 - DNA, 201 bp, Homo sapiens
aaggggttggaggaggaatttcagacaggagccacccatctgtctgaggttaggatgaatttcagagttcccaactgtgttttacaggtgccctgtggaargtgccagctcctgtacttcattggccatgatgtgctcttgtcccactggtttgactcaagaaaacactggggacccttgaagtcctgaactgagggcctt

SEQ ID NO: 251790 - DNA, 201 bp, Homo sapiens
tcggaagaaaaacagcttaaataaaatattaccttggaaccctcgccaaaaggattggggtaggagtgggagaagcccagacctctcttgctcagcctctycttgacctgggggccagtcctgcttaggattctctggccttgacccctggtcactcctcctttgtgccttgagaagaactgaccagaagtgacccaccca

SEQ ID NO: 251791 - DNA, 201 bp, Homo sapiens
aagtattgaacacctactctgttggaggtgccgtgccgttcatcactgcacacctcaacagtgttacccaccactgtttttcggaagaaaaacagcttaartaaaatattaccttggaaccctcgccaaaaggattggggtaggagtgggagaagcccagacctctcttgctcagcctctccttgacctgggggccagtcc

SEQ ID NO: 251792 - DNA, 201 bp, Homo sapiens
agtctgtgcacacacttagcacccagcattttgtgttctatggagaaacatctgaaatgatcagaccatcttcaactccaaactcttccttaaaaaaaaamaaaaactgagttgttctctttaaaaagcaaggggttggaggaggaatttcagacaggagccacccatctgtctgaggttaggatgaatttcagagttccc

SEQ ID NO: 251793 - DNA, 201 bp, Homo sapiens
aggaaatgatatcttagccaagcctggcaagcaagttaaaaatcaggcaggcacaggggagagagacgtggatccaggcgtggatccaggcacagctgtgycttccggcatgtctggggataaaatccagtgttgaaagagttgatgccctctggacatagcatgatgttaaaaacaatgtcagcaataatagtaataata

SEQ ID NO: 251794 - DNA, 201 bp, Homo sapiens
gaagcttatggactagtgggaggataaggagacggttagagaactgagaacagggaccctaagctactcaggaaagtccctccaaggaaatgatatcttakccaagcctggcaagcaagttaaaaatcaggcaggcacaggggagagagacgtggatccaggcgtggatccaggcacagctgtgccttccggcatgtctgg

SEQ ID NO: 251795 - DNA, 201 bp, Homo sapiens
ggcacttgggaaaccaccctctgtaaggtttacagtagctacttcctgagtgcctactatgtgccaggtaccatgctatgtgctttccttgtgggctctcmtctaatcctcaaaatgaccctgagaagtagactttattgttgtccccattttgcagatgaggaaactaaggcctgaagggctcaagtgattaggccaaaa

SEQ ID NO: 251796 - DNA, 201 bp, Homo sapiens
acagaggaggcaacatgcatcttcctcccctcctctcccccaagacagagaagctcaacaaccctgcttcaggatggggttttctggaaagggccaggctsgtctataggtgtaatgggctgggaaagggtgtgccaggatttgagcggcatcaaaacctgctgtagggctgagacattagagtgtaattcctcaaaaata

SEQ ID NO: 251797 - DNA, 201 bp, Homo sapiens
ataagtgagaacatgtggcatttggttttctgttctgcattcgtttgctaaggattatggcctccagctccatccatgtcccagcagaggacatgatctctctttttttatggctgcatagtactccatggtatatatgtaccacattttctttatccagactattattgggcatttaggttgattccatgtctttgctat

SEQ ID NO: 251798 - DNA, 201 bp, Homo sapiens
gccctttagttacattagatcccacttgtcagtttttgcttttgttgcaattgctttcggtatcttcatcatgaagtcttttcccgtgtgtatgtcctgartgggatcgcctaggttgtcttctagggtttttatagttttgggtttcacatacaagtctttaatccatcttgagttaatttatgtctgtggtgtaaggaa

SEQ ID NO: 251799 - DNA, 201 bp, Homo sapiens
ttctgggtggacatgaatttgggagggacattatttgtcacagtacagctctatgaaagaactttatgataatcaacaaacaattgggaaatttatttacwtatttatttatttatttatttatttatttatgtatttttgagacagagtctcactctgtcgcccaggctggagtgcagtgccgcgatcgcggctcattgc

SEQ ID NO: 251800 - DNA, 201 bp, Homo sapiens
tctatgaatatatatgatcaaatgattttaaattattgagtggtgttggaagccagagaacagtgagggaaagaactgcatgtgctcctctccctctgtctttttttttttttttttttttgagatggagtctcactctgtcacccaggctgaagttcagtcgcgtgatctcggctcactgcaacctctgtctcttgggtt

SEQ ID NO: 251801 - DNA, 201 bp, Homo sapiens
ggtgtgggacatttgtctcaagttccttatcctgtgttgctttggctgaaatctccgatgaatatgtgcagcttacctaaaggaagaatttctctatctgratggatccaggtcctgcaacttctttcatagggtataactttagttttcagccgctttttttctgcttcctagaactcgaaaggtacaggcagtctgcaa

SEQ ID NO: 251802 - DNA, 201 bp, Homo sapiens
attggcagaagtcagagagggcaggggagagggagagagttgcaacagaatgacattactttacacttggtattttgcaataatgaaaattacctactctrtcttcagcactggatgtgtagcaaaaaatttaggaacttctctggtctatatcctttggatgcttcctgaaatggaaaagtggacttgatgagattgtgc

SEQ ID NO: 251803 - DNA, 201 bp, Homo sapiens
aaatgagtttggaaaggctcagtatctgcctgaggtcacaaaatctgtagtagagctaggattaaactcaggtctgttttactctaaactccaagtgcttytgtctaaaagcagtctagaccaacctaagggggagtaggcgaaccaatgtggtttctgtatgaagctttcaatgccttcttccacagtggagcaataatt

SEQ ID NO: 251804 - DNA, 201 bp, Homo sapiens
cctcttgctggttcctcctgttggccaaactgaaacagaggtcagccagctgccagcatggagcccggctgatgtaggatgggaatcagcctcagggatgrgggaagcagagtagagaagggtggggaatggatggggctaggggtgggaaaatgagggaatgggaaagccaacacattcagtcaatattcttggaacatc

SEQ ID NO: 251805 - DNA, 201 bp, Homo sapiens
ctaaaaatacaaaaaaaaattagccaggtgtggtggtgtgtacctgtaatcccagctactcgggaggccagggcaggagaatcacttgaacacaggaggtrgaggttgcagtgagccgagatcacaccactgcattccagtctggacaacagagcgagactctcaaaaaaaatagaaaagaaagatctgagcagggactag

SEQ ID NO: 251806 - DNA, 201 bp, Homo sapiens
ctgttgtggggattaaatatgtgaactgcttggcgaagcattggtgccctctaaaagttagctgccaccatctgggccttggttactcaaacttccctaaygccacttgtaagatacatgtgaggtgaatatactcatgtgcataattgctggtccttcctttgcatcccaggcaacagagtaggtcctcattgttaccat

SEQ ID NO: 251807 - DNA, 201 bp, Homo sapiens
acagggttaggagcagcagccagggtcccgggaggcaaagaaacttgtcctcaggcctcccctctgcacctctgaggctcaccgtgggctttctgggccgytccttgcccagaacagttgctggaggactcccttagtctttccctccaccggtggagctgccgcagttgccttacagagcatttgagatcggctgtggtc

SEQ ID NO: 251808 - DNA, 201 bp, Homo sapiens
ccaaccagagtttcaaagttacaacttaggagcagagtcattttggggccatacccaaagctgcctcccatttggaccattccctttaagcattttcacasaccatctcctgaagggatggtcatcgtggttcggtaggttagcaaggtctggcaggaaacaaaaatcaactcagagactctcatgaaggccccacttata

SEQ ID NO: 251809 - DNA, 201 bp, Homo sapiens
tgagaatggtagtagtacccgcaccatgggactgttgtggggattaaatatgtgaactgcttggcgaagcattggtgccctctaaaagttagctgccaccrtctgggccttggttactcaaacttccctaatgccacttgtaagatacatgtgaggtgaatatactcatgtgcataattgctggtccttcctttgcatccc

SEQ ID NO: 251810 - DNA, 201 bp, Homo sapiens
ggagctttcaaggtggtgccctcacatggttatcaagttcgtacttttccacgtggcctttccactagactgcttgagtgtccttacaacatggtggctgscttccccaagtgaacggtctgagagaaagaggcaggtggaggatatgccttttctatgacttggtctcagaagccacatgctgtcacttgcatggtattc

SEQ ID NO: 251811 - DNA, 201 bp, Homo sapiens
cagcagaagcctgccgttaaatgtcctcagggcctcagggatttcttttgcggggcttttgatcatcagacctttcatttttcaaaggaaaaaaaaataaycatagcctaatgctactggcagttttctccttatatagcaagaaccaaacctctctgatgctcttaaaggaagtgttaaatcttctatcattcataaacc

SEQ ID NO: 251812 - DNA, 201 bp, Homo sapiens
tcatagtctttttttaattctaagaaatgctgctctagctattacctacttcagggcaaatgactggctggcgttatcagcatttttcaagttataaacamcccctcttagctgggacccctctttattttcagtgttcttcagaatgaggagttggggcatggccagccggccctggctgtggcatggaggatggactgg

SEQ ID NO: 251813 - DNA, 201 bp, Homo sapiens
tctgtggtttgggctgtagtcagatgttggctggggctgccatcatctgaagactggattggagctttcaaggtggtgccctcacatggttatcaagttcrtacttttccacgtggcctttccactagactgcttgagtgtccttacaacatggtggctgccttccccaagtgaacggtctgagagaaagaggcaggtgga

SEQ ID NO: 251814 - DNA, 201 bp, Homo sapiens
ttaaatctcggagtggattagcttcagatgtagttttcgggaggacttattggcttctgtttacctctcatatttatgagaacggtttaggattgaaccawgtctaagccaaactgtgatgtagaaggcttcgggcttctgtactctccctcctcttctcccccatccccgcttttattttgctttttcttctctttcctc

SEQ ID NO: 251815 - DNA, 201 bp, Homo sapiens
aaatggacccaggccagggtttgcctggctgccaaaggatgctgctgccctaactcccaggagggcccccacatgcaccagcccctcccggcttaggctcmtgtgactcccctccccctgacaggaagccttgccaccttgctgtccccacccctgggggatatcgctcagggatgaaagggttctggggctgcaggctgt

SEQ ID NO: 251816 - DNA, 201 bp, Homo sapiens
tcttgttcctttcatttaaaagattgtgagtactttttactttgctaaatatcgtttcaaaataagatttttacctctgtgtgatatttccatatatatatgttatctattggtatgctctatccccccaaaagttagcagcttaacaataatcgtgatctctcctgatttctgtgggtcaggaatttgagagtggcttag

SEQ ID NO: 251817 - DNA, 201 bp, Homo sapiens
ttcatgcggcttgcagtaaggacatagggaaaatggttagcacacagcagcgtgttcttaaggatctgctggcagctacagaagacaaataatgaatgccytgtaacccagcctggccacaccattccaggagctcagccttatcaaacacaggccaggttgtagatatttccaccccgggccctcctccgaatccaatag

SEQ ID NO: 251818 - DNA, 201 bp, Homo sapiens
atcctggataagaaagagcccattgtcatgatgctgcaagtggaggctcctgaaggtccctcttacctccacgattctctggttctctggaggatgccatygggtggctgctgttgtgtggctgtcagagtccggcagcagcatgcaaggtagacatctttgttttttcctgatggaagccaactggcttctcttgaaaac

SEQ ID NO: 251819 - DNA, 201 bp, Homo sapiens
aggtttctttttgaaataacaaaaactgaaaaccattgaataatgtactctaaatgggtgaaatgtatggtatgtgactcatatctcagtaaagctgttaytcaaaactttcagctgggcatggtggctcatgcttataatcccagcattttgggacaccgaggtgggaggatcacttcagtccaggagtttgagaccagc

SEQ ID NO: 251820 - DNA, 201 bp, Homo sapiens
agtgagcaaagccaagtacctgctgtcagaccagccactcattctgtgtgtgttcaataagtgatcaacaggaagaggaatgcctattcattctcacatayacttttaatgatgagcattgccagccaatagactggctgcctcatgtggaggtgagctccccatcacaggaagtattcaataagatcctggataagaaag

SEQ ID NO: 251821 - DNA, 201 bp, Homo sapiens
tccggtagagggacaggcactgtcctcatagtgatgcccaccattgcaaagcatgctggagatttctctgccagctctgggtggggccggggagctggagkgagcttgtgcaaatgaaagagttgactgggaacatcttatttaatccttaccaccttcctttgaggcaggtgctactgtgacctgccgagaacccaagac

SEQ ID NO: 251822 - DNA, 201 bp, Homo sapiens
aaatgtggagaagtgcttgctgcctacggagcctgcttttgggaagatcttggtgtgggtcacctggtgtatacagtgttactgtttgctaagtggaagcrtcatggcctggagggtttggagccagggagacccaggcttcggctccaaattcatcgctgattccctgtgttgccttcacctctcagagcctccgtttta

SEQ ID NO: 251823 - DNA, 201 bp, Homo sapiens
acgacctacctcctggctggtggtaagtaatagagagagacagtaatgaaggctcatgtttactgggtcttggagagttcatttaaggcacatcacagcascacgacagcatatcatattaatttttctttttgatttaactactttggctaaggtaattaaaccactttgaggaagcattggcactttgagaagaatttt

SEQ ID NO: 251824 - DNA, 201 bp, Homo sapiens
cagtccttaacttctttgagcctcagcttccttgtctgtaaaatgggtgtgatacgacctacctcctggctggtggtaagtaatagagagagacagtaatraaggctcatgtttactgggtcttggagagttcatttaaggcacatcacagcaccacgacagcatatcatattaatttttctttttgatttaactactttg

SEQ ID NO: 251825 - DNA, 201 bp, Homo sapiens
ttgctgaggatacaacagtgagcaaagccaagtacctgctgtcagaccagccactcattctgtgtgtgttcaataagtgatcaacaggaagaggaatgccyattcattctcacatatacttttaatgatgagcattgccagccaatagactggctgcctcatgtggaggtgagctccccatcacaggaagtattcaataag

SEQ ID NO: 251826 - DNA, 201 bp, Homo sapiens
gtgctgaatgttttgtaaagctcctgaaggcctgattggtgggaggatatcgggtcaacatttgggactgcctatttgcttggtctctatcagtcccaaayatctgtaagctgtgacatgtcccatttcccaggagtgggggaaagcatgctggtttgtgggtttgaatcccaactctgacattcactagctatgtcgctg

SEQ ID NO: 251827 - DNA, 201 bp, Homo sapiens
ccaatgtgccaggctcagcgctgaatcatcagagcctaaagtgtctgataaatactacttattcattcatccattcatttactcaatcattcattccacarataatccctgagtgcttattctgtgctgggtaccatgctagttgctgaggatacaacagtgagcaaagccaagtacctgctgtcagaccagccactcatt

SEQ ID NO: 251828 - DNA, 201 bp, Homo sapiens
gtgaatacaagcgtgctgaatgttttgtaaagctcctgaaggcctgattggtgggaggatatcgggtcaacatttgggactgcctatttgcttggtctctrtcagtcccaaacatctgtaagctgtgacatgtcccatttcccaggagtgggggaaagcatgctggtttgtgggtttgaatcccaactctgacattcacta

SEQ ID NO: 251829 - DNA, 201 bp, Homo sapiens
gacaggttaggctgaaccctattttcacctcactgtttcgaggctcctgaaaagtcagttgtgaatacaagcgtgctgaatgttttgtaaagctcctgaargcctgattggtgggaggatatcgggtcaacatttgggactgcctatttgcttggtctctatcagtcccaaacatctgtaagctgtgacatgtcccatttc

SEQ ID NO: 251830 - DNA, 201 bp, Homo sapiens
atgtcagtaaatctcacggctcttggatgaagctgcatcttttcccaagctataccaagcacattcacgtaattcttagatttactcccttgaccttcatmtgccaagtttaattcactttagttctacaaccaccttctacaggctgggcgtcgggaggggctcttgctttgaggagctggagtaggagaggccaacacg

SEQ ID NO: 251831 - DNA, 201 bp, Homo sapiens
tgatagccccagaaccctggcctttggaggcctcagaaccccggcctttggagggctcagatgcctggctcatttgttcttggtggcttggccccgaggtrtggaggaaagcggaaggttgttgtcacatcccgcatcatccggccaccttggcccctcagtactcctcctggggcactgagaggagcgcacccagcttca

SEQ ID NO: 251832 - DNA, 201 bp, Homo sapiens
ggtcaagagatcaagaccatcctggccaacacggtgaaacctcacctctactaaaaatacaaaaaatagctgggcatggtggcacgtgcctgtagtcccakctaagttgagccgagattgcgccactgcactccaacctggcgacagagcaagactccgtctcaaaaaaacaaaataacttattatttcctttgcacccct

SEQ ID NO: 251833 - DNA, 201 bp, Homo sapiens
ctgcctctcagctggaggctttagccagaagagtctgagaatgaaggccatggcccaagtcttttgttctctttccagggcataaaaaccttgtcaatctkctgtttagagtagttcaaaaaatacaaacagctgttgtccctaaccaaaatcatgctgctgatagccccagaaccctggcctttggaggcctcagaaccc

SEQ ID NO: 251834 - DNA, 201 bp, Homo sapiens
ttaggtgagccaagacaagattagagctttattaaaaggaaattaaactaggaaatgaaaggataaacaaacctcaaacaagaaaaaacaacagcaccaartaagatgagttgacagagcaccactctttatcctaaagggtatccatctacctacaaattagggtgtggctcccagtggggccatcatctcttcttccac

SEQ ID NO: 251835 - DNA, 201 bp, Homo sapiens
tggtcctggcctccaagggctccaagtccttcccccccaccctccccttggcttagctgtggactaatcccttttcccattaggtgagccaagacaagatyagagctttattaaaaggaaattaaactaggaaatgaaaggataaacaaacctcaaacaagaaaaaacaacagcaccaaataagatgagttgacagagcac

SEQ ID NO: 251836 - DNA, 201 bp, Homo sapiens
ataaatgaagatgcctcaccctagctggcccgtcccttggctattaggtgccgcatgacccttgtaagtacctacacccaggcccctggcctcgttggccycatctggcacagtttctccccctcctcttctccagatggcctgcacgtgcgctgtctatgtgcgcacctgttcctcatgtctagctgatccagcatcccc

SEQ ID NO: 251837 - DNA, 201 bp, Homo sapiens
aatccccaaagtcctggaatacagaagtgcctgcctccttcattattccacaggagtcactgtaggcttaaatggctctgaaaattacatatttactatgktggtcaaaagagcggtcttcaaaatccaatcatctaggctcatatcccatccctacatcttactagttatgtgactttggacaaatgaactgagcacctc

SEQ ID NO: 251838 - DNA, 201 bp, Homo sapiens
tttttttaaatcagattagaagtaaatgtcttattcttccaactaaattccagtactacaaggatagcaaaacaatgaaacagtaatacactgggggtgtygggaatgcagcaataaacatttattaaaaatactgatagaataaaatttttaaactaccaaaaataaaaaagaaaatcatatgaacccattctgaaatcc

SEQ ID NO: 251839 - DNA, 201 bp, Homo sapiens
tgggatgagaccccttagaggcttcagtctggaagatagtgcaggagcagagctggtaggatttgctgtagagaccagccctgtgctggaacaggcccatkgcttatctgcatgaaacctgaggacagatcactgcagcgagccttcttccactttttttgttttgttttgttttttgagacagagtcttgcactgtcatc

SEQ ID NO: 251840 - DNA, 201 bp, Homo sapiens
tgcacccctgtaactgttgctatggcctctcattacctgcagaacccaacccaaatgccttagcctggccatcaaggcatttcatcatcccaacctcaacscatttctccagcatcatctccatcttctccacctcctcacccacatgactccaagcacttgatgacaatgttcttgctccctctgccaatgttccctgtc

SEQ ID NO: 251841 - DNA, 201 bp, Homo sapiens
ttattgctgctcagaggctgctgggaaatctctgccgcagccaccctcccagcgtgcacctcctggatatctgtccatggaagctcctggacaccccctascttccctgcatctgggtggactcccgcatgcacttgctgcatttcgtctcaggttgccttttgactctccaccgcttatgattccactcggtggcctccc

SEQ ID NO: 251842 - DNA, 201 bp, Homo sapiens
ataacgttattggaggtgtccatataaagaggaccttgtgtaaataaatgatgtgaccctcccacccccactttggcagggctgcggagctgagaaagggragcacaggaaatgtgtttattttgcctttgctgagcagtcgttctgagggtacacaatgcaacattaaaccccaggggagcctcctaggtatgttaactc

SEQ ID NO: 251843 - DNA, 201 bp, Homo sapiens
ggcgggggaaatccattacccagaagcggccccagctcccccttcacagccctcctttcttgtgggtagctggcattgccacgtacagagtaacttggacrtgacgcttcaccgtgaagtcacactcctggcctgctgggaacagtggggcagccctggaggagccaacccgatgaataacgttattggaggtgtccatat

SEQ ID NO: 251844 - DNA, 201 bp, Homo sapiens
cacccagcatgtgccttagcttacaattgatagatttttttaattctgtgaccacagagctctttgccagaaatgggggcgggggaaatccattacccagragcggccccagctcccccttcacagccctcctttcttgtgggtagctggcattgccacgtacagagtaacttggacgtgacgcttcaccgtgaagtcaca

SEQ ID NO: 251845 - DNA, 201 bp, Homo sapiens
aggcctcaatctagagattaggcctctgggctcgggcacacccctactctctgggaccgcttatataaaatgagatacagtttacatcaaggatctgtcactttttcttaaaaagtcagatagtaaatattttagattctgtgggccaagaggcaatatcaaggatattacataggaacttgtatagttacttaaaacaaa

SEQ ID NO: 251846 - DNA, 201 bp, Homo sapiens
aagacagatgtaggcacagatcatcctgtcacagactgtgaagcagagccccgtccccgaggtgtctgcaatgtggggaggtgatgctgcctgggaacacragacctcctggattccaggccagggttccgtcttctgccccaaatgatggatgaatagaattgggggtgatgatatgggggaaggatggggcaccacttc

SEQ ID NO: 251847 - DNA, 201 bp, Homo sapiens
cttctgctctcttcatttgagtttctctcatccatagaacagttaatctcagttcagaatctcagcctcggctctccataggttttccttcattttccagrataaatgagctggagtttgaaaagaagtgtgacttcttcaaggaactggcagatactaggggagttcagaagcagctgacatccaattattcacggtcat

SEQ ID NO: 251848 - DNA, 201 bp, Homo sapiens
taaatgagctggagtttgaaaagaagtgtgacttcttcaaggaactggcagatactaggggagttcagaagcagctgacatccaattattcacggtcatgsgggaaagggattgaatgagaaatagaaatccacagataatctccaaaccttatgctcatccatagccttctcttccaacatgcctttaacagtaccaaga

SEQ ID NO: 251849 - DNA, 201 bp, Homo sapiens
cagtgccctggcagccctgggcacccaaagggcactccatcaattacttggttttagaagaaaatttcccccacagtgcagatggatggatgagagaaggrttggcagaagtcagagagggcaggggagagggagagagttgcaacagaatgacattactttacacttggtattttgcaataatgaaaattacctactcta

SEQ ID NO: 251850 - DNA, 201 bp, Homo sapiens
gcccttaccatgtgcctgacagtggtctgatgtctgtatttgtgtctccatcttatgtgatctcattcaatcattaacaaccctatatgcagaaaccttcyccatcaacttaacattatctccagtgaggaacggaggctcgaggagattaagtgacctcccgagatcatgtagcaggtagtggcagaaccaggattcaaa

SEQ ID NO: 251851 - DNA, 201 bp, Homo sapiens
cacagtggttcatgcctgtaattccagtgctttgggaggccaaggcagaaggattgcttgaggccagaagttcgagaccagcctgggcaacatagtgagacccccccccgcccccaccatctctacaaataatttttaaaaattagctgggtatggtggcgtgcccctgtagtcctagctactagggaggctgaggtggga

SEQ ID NO: 251852 - DNA, 201 bp, Homo sapiens
caactgctttgcttagactggtgttcaaagggggctcatacagaccaaccctaatttaaaaaaatcttactaggaatggtttgcccaagtgcattgtgccrttgtagagagctgtgcatttctgtttgggtcgctttaatgtcatttcaagggcactgacataataagaatgcccttccccctttctttagcccatttaag

SEQ ID NO: 251853 - DNA, 201 bp, Homo sapiens
agattctgatagtcacagccctcagcgaactgttctctttggaaccaatacagttgttttcctgtaagaacacagagaagacccaggcaactctgggttcyagaaatgaaggcctccttgagaagccacattaaccctgacatttctttctccccatttctgtgggcaaggaacacggcccccaggcaactctgggttcca

SEQ ID NO: 251854 - DNA, 201 bp, Homo sapiens
cagtgagccaagatggcgccactgcactccagcctgggcaacaaagcgagactctgtctcaaaattaaataaataaataaataaataaatgaagatgcctmaccctagctggcccgtcccttggctattaggtgccgcatgacccttgtaagtacctacacccaggcccctggcctcgttggccccatctggcacagtttc

SEQ ID NO: 251855 - DNA, 201 bp, Homo sapiens
gtaagtgtatgtgagtttcttgttttttctttttttaagagaggagtcaacaacccattgtattactgtaaaatatttgatagcttgtactttgaggaatrtactcatgagagcctagtcttatagatttgggatatttatacatactttaaaatgagtaggttggaggggaactttaaatatgtatattttacttaaaaa

SEQ ID NO: 251856 - DNA, 201 bp, Homo sapiens
gcagtggactgtgtttctaactcatgcgcagtaaacgaggtcagagagcctggctttgggatccaggctgacccaaggtcaagctgcgccctgcaaattarctgtgtgaccctggacaccgttctcagcttctccagaacacagtttttcatctgttaaatgggtatgatgacagctcgtagcttacttgctttggaggcc

SEQ ID NO: 251857 - DNA, 201 bp, Homo sapiens
gattggctcacgggatggagaactgcttcctctgaagagagggacttctgcttcctcctcactgtgcttattgctgctcagaggctgctgggaaatctctkccgcagccaccctcccagcgtgcacctcctggatatctgtccatggaagctcctggacaccccctaccttccctgcatctgggtggactcccgcatgcac

SEQ ID NO: 251858 - DNA, 201 bp, Homo sapiens
gggagctgctactgtcctctagtgggttgaggccagggatgctgctgaacgtcctatggtgcacaggacaatccttacaacagagtcatctgatcctgtaygtcattagtgacacttctgagaagcccaaatgaggaactgggtaggtacatagtactcatctcagtattgttcacagtagtgagaaattagaaatgatca

SEQ ID NO: 251859 - DNA, 201 bp, Homo sapiens
agacactgtatgatcctacttgtatgaagtacttagaatattctaattcagctgggtttggtggctcacatctgtaattccagcactttgggaggccgagrtgggtggattgcttgagtccaggaattcaaggcaagcctgggcaacatggcgaaacccatctctataaaaaaaattcaaaaattagtcaatgatggtggc

SEQ ID NO: 251860 - DNA, 201 bp, Homo sapiens
tctggcacttctaggagtttatcctaaagccatggttctcaaccaggggggattttgcaccccatccaccccagggaggacatttggcaacatccgaagayagttttgattgtcagagctggggagctgctactgtcctctagtgggttgaggccagggatgctgctgaacgtcctatggtgcacaggacaatccttacaa

SEQ ID NO: 251861 - DNA, 201 bp, Homo sapiens
ccaggagttgcatagatacctgaacacccgtgttcatagcagcatgagtcacggtggccagaaggtggaagcaaccctaatgcccatcagtggatgaatgratagtggtatgtatgatgggatattattcagaataataatatgtcagaataacgaaattctcatacatcctacagcatggatggacttagaaaacattac

SEQ ID NO: 251862 - DNA, 201 bp, Homo sapiens
cactccttcccctttttagctccccttcctgctgaaagccactttcactggcaataaaatcccccacattggccatcttcaagtcatttgtgtgacctcaytcctcctggatgccagacaagaactcaggtgccacaaatgtgaatgcaaaagggtgtctgtcacatggaccatccactgagctgttaacacttaatctgt

SEQ ID NO: 251863 - DNA, 201 bp, Homo sapiens
ctcgggctcacaaacagctttaagacttagttaagtgagagctgactgaagtccatcccggcgatgtttgacctaaggtcactgttctaaagttctgtacrtgacagccatgctccattgcccacctgccatccttacagcaccaacttggaggccaccagccaacctgctcaccagcagcctctgggctccgcctcaggg

SEQ ID NO: 251864 - DNA, 201 bp, Homo sapiens
gaaactaaacatcctcttatcatgtgatccagcagttgcactccttagtatttactcaaatgagctaaaaacttatgtatccacaaaaatctgcacacaartgtttatggcagctttattcataattgccaaaacttggaagctaccatgatacccttatacaggtgaagggataaacacactatgatgcatccatacaac

SEQ ID NO: 251865 - DNA, 201 bp, Homo sapiens
caggtggcttccttatgtcttgattccttccttgcctgcctcgggctcacaaacagctttaagacttagttaagtgagagctgactgaagtccatcccggygatgtttgacctaaggtcactgttctaaagttctgtacgtgacagccatgctccattgcccacctgccatccttacagcaccaacttggaggccaccagc

SEQ ID NO: 251866 - DNA, 201 bp, Homo sapiens
cccagctaatttttttttattcttcatacagttggggtttcaccatgttggccaggatggtctcgatcatctgacctcatgatccgcccgcctcagcctcmtaaagtgctgggattatgggcgtgagccaccgcccccagcctagaggcacaatttaacacaggtattgtcacctaagggcaggacaagggacaccaggct

SEQ ID NO: 251867 - DNA, 201 bp, Homo sapiens
caatattggggtcaccttctcaagccacttttcgggttacagcctcagaaggctgaagctgctttcttcagagctgagctctgctctgagtgggttcctgyagcctatgacccagacttgagtcacagactggctcattccaatgtcttgccgccaaagaccagacccacccaggtggcttccttatgtcttgattccttc

SEQ ID NO: 251868 - DNA, 201 bp, Homo sapiens
ggctagattgacgtattgggaagtcttctgaataaattgcttcttcctctcacttgttttgctagaaacataaattaatgttaaaacatcaacctgaaacrtgtatttaaaaacctgtaagatattctcaagataatcttcagaaatatgtgaaaaataaaatgttaaggatccttaaggatgttcacacaggtattattt

SEQ ID NO: 251869 - DNA, 201 bp, Homo sapiens
gaaagttacctgacttaaagtgtgatgatattagcaataggtgtcaaccacttgactcaacctgaactcctgcccttcccaatggagtgggatgggaaaaygcagtcagcatccaactgccacttgaattaccaacatccactactctcatgataaagggtgtacgtgggggtgatttgggtagtgggcaggatagggtat

SEQ ID NO: 251870 - DNA, 201 bp, Homo sapiens
tttaagaaaacaattttggcatctcaaacaatattggggtcaccttctcaagccacttttcgggttacagcctcagaaggctgaagctgctttcttcagarctgagctctgctctgagtgggttcctgtagcctatgacccagacttgagtcacagactggctcattccaatgtcttgccgccaaagaccagacccaccca

SEQ ID NO: 251871 - DNA, 201 bp, Homo sapiens
cacctcttaaaaaaaaaaaaaaaaaaaaaaaaaaagacaacatagtgattcatagggttgacctgacttttcctaggagtctaatggacagctgcttagcygctgatccagcgcttggctgactgattccaggtgccagaatgtgggacagctgtgctctgagagagagtcctctgctcactcaggtgcagaagacagtaa

SEQ ID NO: 251872 - DNA, 201 bp, Homo sapiens
tgctggtgctgaacatgtgttctctgcctattcccttgctgagacatgaattattaatattttatgccatttattcctgtgctatttggggacttctctgrcagactctggtgttttctgatggttccagaaattcgtgcaaaacatttctataggctgggcacagtggcttacaccaataatcacaacactttaggagtt

SEQ ID NO: 251873 - DNA, 201 bp, Homo sapiens
agctcaaactgaaagccaagacacctttgttttgtttgatatggtttggtttggtttggtttggttttgttagagacggagtctcactctgttacccaggytggagtgcagtagcgcgatctcagctgactgcaacctctgcctcccaggttcaagtgattctcctgcctcagcttcacaagtagctgggattacaggcat

SEQ ID NO: 251874 - DNA, 201 bp, Homo sapiens
tgtggagcctcccactggtgtcctgtcattcgagggtttatttctgcttattgggtcagtgattcagctcctgcacctgctccatgtgggaaggaaatgcwgtgcactcagtaaagtcagttcctctcaatccctcctcctctggtatgtgcccacccaaaccacgtttgaaatcatcaggtcaccctgacttttaactta

SEQ ID NO: 251875 - DNA, 201 bp, Homo sapiens
atggctagttttagcttttctcattaacacggggtgggagcagatgaccttttccttttagctgacagctagtctgctggccatgggcacaccctcctccrcaaagcctcttgtgatctccagtctgactggacacggcttcttgctgcgcccgtgatcctaagcatggggtgtgggtggtagggaaaagcctggagcagg

SEQ ID NO: 251876 - DNA, 201 bp, Homo sapiens
cccttaataaatctaagttcccttttcccctctcgctttcctaaagcttcacctaagccaacagctggacagaggcggaagcttgccaagagagtcagaaraatctggactccacaccgcctgctgcagggcctgctggcctcacagggagagggaggaaggggggtccaccctggccaggtgcactctggtgagagcagc

SEQ ID NO: 251877 - DNA, 201 bp, Homo sapiens
acttcactaaatcctcacgtctgtaattttttttttcctctttctaatagcctggataaagaggaaaataaggtgagtgctgatggtccgtacttgagacrcactacagcttatttcttagcacttttcaggctttgggctatttcaaaggcgacctactctgtcatgttgaagtgtgggttgggattcacttgcatatcc

SEQ ID NO: 251878 - DNA, 201 bp, Homo sapiens
ttattctataaaatgtgcagatgcagctttcatattttaaaagtcttctgtgggcatgtctgttatactcccaatgcctagttaggtactctgtaatggtkgctaaataagacctcatctctgggttgtgttcatgtgaaagcattgatctcattgattcgtccacatttaactcaagctttctttataggcagttgttct

SEQ ID NO: 251879 - DNA, 201 bp, Homo sapiens
ggttggatgtgagcaccaactgaggctggctcataattcttccttgacaaatgcctcatttgggacaataactcatgatttcttcactgcctcctattaarcaattaaaagaaggcacacattattctatgaatatatatgatcaaatgattttaaattattgagtggtgttggaagccagagaacagtgagggaaagaac

SEQ ID NO: 251880 - DNA, 201 bp, Homo sapiens
actcagctttgcccttgtgaatgaaagcagccaagacaatatgtaaatgaatgggcgtggccagatttcatccacaggggttccctgctttagactgtgcygagagccagaggtcttgagttcaagtcccagcctcaccacactgcaagggtgttcttgagcaagtcaggaaggctccccagagtcaggcccttagcctct

SEQ ID NO: 251881 - DNA, 201 bp, Homo sapiens
gaaaccaggattgggctctgggcagctgcactccaaaactggtgctcttaatccccacatcatgtgttggtctcatctctgtctatcctcttctcccaccrtctctttccctcacaccctggcttccagccccacgaatcggctttcatgtccctgtcttgttgccatcaacagcatgacttgaagttgcccatgtcatgg

SEQ ID NO: 251882 - DNA, 201 bp, Homo sapiens
taaatagcaactctgtttgatcagcctttcacaggtcatgtgatgtttctccttcagggtgtccatttgaaagtgggagaaaccactaggaatttgggggsaatagagcagagagagagaggtagggaaatttggtccatttgcagattcacggaagttcaaatgtggcgcatagctgcgcacagcttcccctcctccttg

SEQ ID NO: 251883 - DNA, 201 bp, Homo sapiens
tgaattttagcatatttatagagccgtacagcatccccgcagtctaattttagaacatttccatcaccctagaaagaaactctgtgtctatttattgtcayttgccatccccacccctggccttaggcaattgctggtctactttctgtgtctatgtacttaccagttctggacattttttgcacttcatttgcaatcatc

SEQ ID NO: 251884 - DNA, 201 bp, Homo sapiens
tctgggaagtgaggaggtactacgagttgaaatgagaagatagatgtcaaggccagtttagctcaagattcttttttaaagaaatggcctttcctgcctaraatgatcctgtttcaaacagcggcccccgccccccccaaaatttttttttccctttgcagctttggattttagtaacaccaacaatatttcctggagaaa

SEQ ID NO: 251885 - DNA, 201 bp, Homo sapiens
cctttaggtgcgctctggtaccgtctttctctatggcaccttttgtggccttcaggtaaagagccaagaaggaacaccccttttatttccccttgattttygtgccgtttatttatttatcagtattgtctagccttttaagagcctggatgtgagtctcggctctgctactttgcagctgtgtgaccttgggcaagtgac

SEQ ID NO: 251886 - DNA, 201 bp, Homo sapiens
tgaaacaggatctcagttggttcagtttaagaataagggcctctcattaacactagtgagacccctaataacgtgaacagggttattaggtctcactgacrtgtggtcaggaggaggcccgcctgggaatttgccccacgaagtgtgcgttttgctggagaggagagtgttcagaatcgatttgttgctccgtctgggatg

SEQ ID NO: 251887 - DNA, 201 bp, Homo sapiens
tctctcagatatgaagaaatgagcataattggatatcctggcaacttgtgtcagcagctgcaccccaaagtttatgtctgccttaagggaaggctttcttytgaaacaggatctcagttggttcagtttaagaataagggcctctcattaacactagtgagacccctaataacgtgaacagggttattaggtctcactgac

SEQ ID NO: 251888 - DNA, 201 bp, Homo sapiens
tttgggctttgagatggggatggggatgggacggagggaggtggaaaggaagtaagggatgcactacgtcattatcgtcagcatcatcattctatccttayttcatccagtctaagaagactatggttgtaggatgcatccttatttgcgagaaattgaaatatggaaatgtgcgcctgagagttgtggcagccaatgcac

SEQ ID NO: 251889 - DNA, 201 bp, Homo sapiens
gaataatagccaatccctcaaaaggtggcaagagaactgagttgatgcatatcaaatacttgtgcttagcacatagaaattgctcaactcaacaaatgttagtttagaggaggcccttaataaatctaagttcccttttcccctctcgctttcctaaagcttcacctaagccaacagctggacagaggcggaagcttgcca

SEQ ID NO: 251890 - DNA, 201 bp, Homo sapiens
gagaagccaggctgacggggaaagaagacaccagagaatatcaatgacttggtaaattggccttcccgaaagggaaactgacagcttctactccaccaggygaaaatgggcaaagcaggtggaaagctgtatcaagttactaaagcaaattggatctacgtgggtgcacgtgcccctattttagttcgtttcatgaaaaca

SEQ ID NO: 251891 - DNA, 201 bp, Homo sapiens
tgctgaagacccactacctctgtctaacctgacagagacttccccagctgttcatgacatccagggcagtgaccttggctgtgtgaggagtggctcgggcmcaggtggtctcaaagggcctgttaccctggagctgcctccctgcatcttagcaagcctcagaaggcacagggcattttgatgctgtggcactttgccatt

SEQ ID NO: 251892 - DNA, 201 bp, Homo sapiens
atcatttgtgactttccccctacatttggggaatgggggatagaatatcttttgtggtttttgtttacaagaaggaagatttcaggcttgagctggagtaygaaaggaaattgaaactaaagattgggttctggatttgactaaagtttctaatattgttcagccacaataaagccaaaagcgttcactgtatgctctggc

SEQ ID NO: 251893 - DNA, 201 bp, Homo sapiens
tgtttcctgattgaaaaaagatggaaggaaagggaagggagagaaggagaagctagggaagtcctgtgtggaacagtagagctgggatcaggtacctcatmagagaggcggggcaaggtctgataaccccttttttcaccgttctacagtaccgtgtgcggtggggtctggagtgagccagaacagataagtcgttgcccc

SEQ ID NO: 251894 - DNA, 201 bp, Homo sapiens
tggagataaaagctaaatgtctaaggtctagcagtatcaagatgaccagaagtgatgcattggatcctctgctgcttctgaatcatctgggttaattaccrtactctccaccagctttggtcatcaaggagcacacagaatcattgcttataattgaagactgtggacaatgatcacataagatcatccctaagttaccag

SEQ ID NO: 251895 - DNA, 201 bp, Homo sapiens
tcatgattcgcccgcctcggcctcccaaagtgctgggattacaggtgtgagccaccgcacccggcctctttctcttttaatcttatttagactatcatgtrtagaattaagattgaatactttatttaaattgctactaattgcaagttctgtttggtaggggtttagaatatgcttagcatttgaaatgatcacgggtat

SEQ ID NO: 251896 - DNA, 201 bp, Homo sapiens
gctattgaggttattaggcctgatcttgtgactaagcagctatgcaaaaccttttaaagccactagaatcactgtttcctgagatgccaaactggagatgycccagtgttctagaaaagcaaatagacttccagtaacttatgtccttctgtgttagtgcctgactctgctattcagagatgccagtgaccatcctttttc

SEQ ID NO: 251897 - DNA, 201 bp, Homo sapiens
tgctttgtacaaagttgtaagcatggtgtttgggatatgtttgttgaatgaatgaatgatttgtgcttgccatatcaaatgaatgaaggtgggaaaaatgmatgaagaagttaaaaaggttaagaattcatgtaaaatgaagataataatcatacataccttacacgactactgtgagaatgaggtggtataatgcactta

SEQ ID NO: 251898 - DNA, 201 bp, Homo sapiens
tattaacttagttcatcaacctaaagtgctttgcacagcatcgggtacatcatgttcaataaatgtaagtagttgtatttctaatttttaactttttatgsctattgaaaacttgaacactctgcatttaaatttgaaacaacatacttggaattttctctggatgccaagcaaatgtccatgatttgtggggtggggggt

SEQ ID NO: 251899 - DNA, 201 bp, Homo sapiens
tggttatgtcactgtcctactctgggcttatttttacatctataaaaggccagcatactaatagcactcatctcaggatttgaggggaaacagaactttgsgaggagcaaggagcagcatggaagaaaagaagagagtctagtcttaaaaacgtttacaaatgtatcatagtccagaaagtcttgtttcaaactgtgccat

SEQ ID NO: 251900 - DNA, 201 bp, Homo sapiens
atctggtcactcttggatgaatagcagatgtatgagaataaccttgagatttgggatcgaaaggcctgactctgagatctgattctaccccatttattatktactgtgtggccttggttatgtcactgtcctactctgggcttatttttacatctataaaaggccagcatactaatagcactcatctcaggatttgagggg

SEQ ID NO: 251901 - DNA, 201 bp, Homo sapiens
acagcatacatcctcactggatgccagcaacagtcactgtgaaatgttacaagtgcaaacagccccagtccctcctcagacagagcatgctgcccatgccrgcaacagtcactgtaaaatgttacaagtgcagacagccccagtcccctcctcggacagagcatgctgccctttttccagggaagtggggttatttctttt

SEQ ID NO: 251902 - DNA, 201 bp, Homo sapiens
gcgtattttcaagtaaatttgagccagctttatctgggagatggcatagcccagctgtgagcaagaagattcaaaagctaaaggcttctttgcctccagaycatttctggcagggcttgacactccaaagtgatttttcttcaggtgctcaatctcatagtaaatttcaatgaaactggcgagcaaatgaaacctccttta

SEQ ID NO: 251903 - DNA, 201 bp, Homo sapiens
gttactggaaaatccagtttccgagcttgtgatctcaactatttcattcattcactcactcagttgttcatttgttcttttactcactcaatgctgtgttsgcaaatggcagtcagtgttaacgtggggctttattaagtccacctccaaaatgttttgtcaatgccaagcttgtgaaataagaaactctgattctagcca

SEQ ID NO: 251904 - DNA, 201 bp, Homo sapiens
gtcagactttcctctcttgctgcagtgtgttgttgctgctctgctgtctagcagctaccgttgccatggagcagcaagaggtactgtgccagtggcccccstcccactgtccttgcaacagctcctctgtctgcctccttagccctcagccctgccatgggatgggaacagaggagactgcagcagcaagtgtggctgatt

SEQ ID NO: 251905 - DNA, 201 bp, Homo sapiens
gcctggagtgccttccctctcccttttgactggcaaagtttcactccaaggtctagttcacagcccttttgtgatgattcccacccccaccccgttataaraatgagccaaagacggtgtattggttcctaggttgtttcttcacaacagactgcacctaacagtctcaaaaacctgtaggttccaaactcaatttttaaa

SEQ ID NO: 251906 - DNA, 201 bp, Homo sapiens
tgagccaaagacggtgtattggttcctaggttgtttcttcacaacagactgcacctaacagtctcaaaaacctgtaggttccaaactcaatttttaaaatrtttatgagtttattacaaagaataccaaggaacagtccgatgcagaggtacatagggcaaggtgcgggaggggtgtagagcgtccatgccctctccaggc

SEQ ID NO: 251907 - DNA, 201 bp, Homo sapiens
ggttccaaactcaatttttaaaatatttatgagtttattacaaagaataccaaggaacagtccgatgcagaggtacatagggcaaggtgcgggaggggtgyagagcgtccatgccctctccaggcatgccatcctcccaccacctgtgtgttcaccagctcagaagctctctacaccccttcccaacctcaaatttttaca

SEQ ID NO: 251908 - DNA, 201 bp, Homo sapiens
attttgggcctggtcctactcaaagtagcaacaaaaagcaacttgatgctgtctttgaccagaagaagccatgagaaggtgcccaggtacttatcaaaggscttggttacatgcccctgtttccttgttacccttaagcaatgagagagagatgcttgaagaagagcagaagctctgcttgctctttaagcttggcgaggg

SEQ ID NO: 251909 - DNA, 201 bp, Homo sapiens
cacctaacgataagttttcctgaattgaatattcttccgaaaatcatttatagatttggtgacttctccatttttcttttcctgcatttgggtagaatcartctttggctctgagcagatctttctgtttgagtgtctttcctaagatctttatctttctggttgcattttcagaaccccctgcctctattgtgatgagag

SEQ ID NO: 251910 - DNA, 201 bp, Homo sapiens
atatctgcctgacagagtgtttctgttttgcaccggtatgattcgtgtatctgagggctgcagcccttcattttttttttttttttttttttttttttggkatttaagaaaatggtaaaatacacataacataaaatttaccattttaaccatttttagtgtacagttcagtggcatgaagtacattcacgttgtgttcat

SEQ ID NO: 251911 - DNA, 201 bp, Homo sapiens
aatgaaagcagccaagacaatatgtaaatgaatgggcgtggccagatttcatccacaggggttccctgctttagactgtgccgagagccagaggtcttgarttcaagtcccagcctcaccacactgcaagggtgttcttgagcaagtcaggaaggctccccagagtcaggcccttagcctctaaaaatgggaataataatg

SEQ ID NO: 251912 - DNA, 201 bp, Homo sapiens
gttcagtctaaggctccaggtggggtgcttcaacaaaagaccatggtcactcagggccagggcaaaggttattatcagcagccccagacactttggggacrtgctggaaatatctgcctgacagagtgtttctgttttgcaccggtatgattcgtgtatctgagggctgcagcccttcatttttttttttttttttttttt

SEQ ID NO: 251913 - DNA, 201 bp, Homo sapiens
tgacctgtaaaagatggaaaaggcacagaacagattttcccttggagcctccagaaggaacgcaagcctgctaaccccttgactttaggacttgtgacctycagaatggaagcagttgtttgtagtgatttgttacagcggcaatagaaaactaacatgcacacacccctttttagttggagctaagcttccctctcccaa

SEQ ID NO: 251914 - DNA, 201 bp, Homo sapiens
gcctgtaatcccagctctttgggaggccaaggcaggtgaatcatttgagttcactagttcaagaccagcctggccaacatgatgaaaccccatctttactraaaatacaaagaaatgagccggcgtggtggcatgcacctgcaattccagctactcaggaggctgaggcacaagaatcacttgaacccaggaggcagaggt

SEQ ID NO: 251915 - DNA, 201 bp, Homo sapiens
ggaagaagtgataagtatcttgttaagataagtctttgccaaaaacaacccatggcaaattgctgccatttgttatctaatactgagcgcagagtgtagtstttcttgagcctcagaaaccctgcttgtctctatcagttcatttcaaatttaacttgctaaatatcattgtccaaagccttggcagactttcaaaagcag

SEQ ID NO: 251916 - DNA, 201 bp, Homo sapiens
gcctaggcacagtaaccatgtgtaattttcttatcaattcactcttctcgtcaggggagggctatttttagccactccactgggtcgtgtttcgagcgctytcttctaagccccaaccaagagttggtgttcaaacaggaatcagaatgattcggggtctctttcctaattaacaagaagccctaagtgagtgaaagcaag

SEQ ID NO: 251917 - DNA, 201 bp, Homo sapiens
ctattcggggagttgcagaaccatgattcagtccagctctggagcttgtttattgctcatgggaccaggcgaggccacctccaccagctcaactggggtcractcattgattaaatgagtgacctgaattcctttgattcttaatttactggtctttaagtcaagatgaaaccccctccctctccagtggtttgtggaagg

SEQ ID NO: 251918 - DNA, 201 bp, Homo sapiens
aatgacgagttaatgggtgcagcacaccaacatggcacatgtatgcctatgtaacaaacctgtacattgtgcacatgtaccctaaaacttaaagtataatwaaaaaaaaagaaaaaaaaaaagaaaaaggaactattaaaaatgactgtagaggccgggcgtggtgactcatgcctgtaatcccagctctttgggaggcca

SEQ ID NO: 251919 - DNA, 201 bp, Homo sapiens
agagaggcgttttgttgttggtgtgcagcatcatccagcctattcggggagttgcagaaccatgattcagtccagctctggagcttgtttattgctcatgrgaccaggcgaggccacctccaccagctcaactggggtcgactcattgattaaatgagtgacctgaattcctttgattcttaatttactggtctttaagtc

SEQ ID NO: 251920 - DNA, 201 bp, Homo sapiens
ctgttatgcctggggtaagaacataatgaagtgggggagattccaagctaggaatttggggcccagattctaggggatgcctccagggttttcaggctgcwccttctccattgatctgcccagtttatggagccacaggggaataagtcctgctattgaaggtgatgttggtgcaggtggtattggggtggcaccattgac

SEQ ID NO: 251921 - DNA, 201 bp, Homo sapiens
tttaaaaggaaaattgtaatcatgatttgggtcctagtaagtgtgttttaagagaagtttcttttgcccagtgactttcttactccctcacattcagacarcctttcactgcttttcaaatacatcattccccattttacagatgaggcacctgaggcatagagaggcgttttgttgttggtgtgcagcatcatccagcct

SEQ ID NO: 251922 - DNA, 201 bp, Homo sapiens
tttggagacagtgtctcattctgttgctcaggctggagtgcagtggcatgatcttggctcactgtaacctccacctcccaggttcaagcgattctcctgcytcagcctcccgagtagctgggactacaggtacgtgccaccatgctgggctaatttctgtatttttagtagaggcggggtttcaccatgttggccaggctg

SEQ ID NO: 251923 - DNA, 201 bp, Homo sapiens
gtctcgaactcctgaccttgtgatctgcctgcctcggcctcccaaagtgctgggattataggtgtgagccactgtgcctggcttcttcttcttttcttttytttttttttttttttttaaagcagggtgttgctctgttgcccaggctggagtgcagtggcgcgatcatggctcactgcaggtttggcttcctgggcgcaa

SEQ ID NO: 251924 - DNA, 201 bp, Homo sapiens
tgttactcaggcacaaaggcagagaggagcaaatggtccctgggagcaaatgagcaggtggaggctaagatcacttggacaatggaactccatcgtctgcyggataatctgccatcatcttataaatccactatgtctaaaagaaacaccatcttttagtgcaggggttcacagctttggctgtactttagaagcaaaaaa

SEQ ID NO: 251925 - DNA, 201 bp, Homo sapiens
ttgcctggattcctgcctcatgtcccatccagtgtttggagaaaagctctgagagaaagatgaatgtctgaggccacacagcctagaagtagtcaagagcrcaggctctagaactagccccacgtgggctgaaatcccagcaccagcgcctgccggctgtgtgatgtaggagagcttcttaccagctctgtgcctcacttg

SEQ ID NO: 251926 - DNA, 201 bp, Homo sapiens
ccctgccccacctctctgttccctctgcctggagcatcctccacattctttctaggggaccctggtgcccccagctagcttaggtcctctcctattccctycccttgacttttgcttttcttttatagcacttcattcaacaaatattttttcagtacttactatgccaggctgttgtgacatagcaattaacaaaacaga

SEQ ID NO: 251927 - DNA, 201 bp, Homo sapiens
aatgctctaaagtttgagttttattcttggtaccagggagccacagaaggtttagtgtctcctgtttttcagatgatgaaatttaagctgaatttaaactstcttgtttcattagaaaggcagtagtttcaaactcactttctcaaaatgaactcggggccatttggaaatcgtttctattatcatcatttaatgggaggt

SEQ ID NO: 251928 - DNA, 201 bp, Homo sapiens
ggccccgggtctgtgtccctgccattgtgtgtgactctgttcctggatatctgtatcttcatgtcctcggccatggcctaagaagccgcagagatgtctgrcttcctcagtgaacagcagatggatggatttagacgtgcttgtccctctagcactccacgatggtcttcctgttccactttcactatgattgagaatggg

SEQ ID NO: 251929 - DNA, 201 bp, Homo sapiens
tcataatcttactttacagttggaggaagaggacgggttgcgaaaggaacttcctttgcatgcggtcagagtgctgggccatctgaacagccccctccacrgtctgcaacatttctacattctgatagaaacagttagtggtcttgacgtgtctgacaacctacaaaaccaacatatcctggggtttgatctctctggtgg

SEQ ID NO: 251930 - DNA, 201 bp, Homo sapiens
gagacatcatcttagaggaagtgaggaatatggtgaggtctgaaagccccacagttagcgggaagaagagagtgagcaaatccagagagacttgggggcargggacttgctcctgggcaggtcccttaggtgcaagaaagcgcagtacttctagagaaatcacaggggtccagtgccctgcatgggacagggctgctgaga

SEQ ID NO: 251931 - DNA, 201 bp, Homo sapiens
tttgggcagtgaatgaagccatttgttcctgtgcctcatgtgacttcagcatggggaggtgaccagggcttcactcccctagaggtgcagaggcggctggmcatcagggtggacggtttcctgggacccagtgaagagtatggcgcttttgtcccaagtctccgattcatgctgatgcccgatgtttcccccagaagttcc

SEQ ID NO: 251932 - DNA, 201 bp, Homo sapiens
ccatttgttttaaaaatagccaaaacaagcagatttctagccattcagggcctgcctactttgcataccccacagaactatacccaccgtgtgccagccaytgatgagacagagccttatggttataagacctaagactgctcactgtcccaatgatcctacaatgctcctgagctacatcatcccctacagttcccctcc

SEQ ID NO: 251933 - DNA, 201 bp, Homo sapiens
gaattttattttcgtgttattgttttcctctaattattaccattagtttctgcagttgttttaaggataacagcaagcaggaaacaaaagagacagaaaaracacagaggccaagatgagctgacagaagcagacacatggccagaatgaccaacagactaggggagactgacctcctgccccacatactctgtccccttg

SEQ ID NO: 251934 - DNA, 201 bp, Homo sapiens
tttcccagctctaaattcaattacacagttctcaggttcctttcaaattcaaaagtgtacatgatacctcaataaagctgttaattttttttttttttttwaattctgagcctgcctcccctgtgtctcctccccgccgtggttgttttctcacctaatacttgcaatcgtgggaagtgggtgtcacttctccacttaaat

SEQ ID NO: 251935 - DNA, 201 bp, Homo sapiens
gactttttttcttgttgaccagtgagttgacttttatataacacttgaggcaaagagttcagtgttgtgggaattattttcacaaatggatcattttcttaaaaaaaaaaagaaaagaaaagaaaaagaaaagaagggagaatttctcttggtgtttttgttccatggaaggtagttctacatactgtttatagaggcctt

SEQ ID NO: 251936 - DNA, 201 bp, Homo sapiens
tacaggattggggcagagcacatgaaatcatgtgtgagagagggttctgtacatttgtttttcttaattgccatttctgacttgggcagcctccccacccaaaaaaaaaaaaaaaaaaacatggtcaaaatatacttgtgcatgtaaatgtggtatttcctgggagagtcctgagggaatggcctgttttccatgtgattt

SEQ ID NO: 251937 - DNA, 201 bp, Homo sapiens
caaaataaatgtataagcattccagggaaactgcagggagaggggaacattcttcagcaggcgaggaaggataaatgcaaagtaaacgtataaggcttatrattactcatttgaagtgtgtaaaatgtaattaatatgatctgtgttgcagtgctgtctctcttgttttatttaagtgaacataaaatgtaatttatgagg

SEQ ID NO: 251938 - DNA, 201 bp, Homo sapiens
tttcctttctccagcagctacgttactctgtctctgaagccatgggggaaccccagaggcagacatcagcgtgtccaggttgtaaaatcagacttggagckccaggcagggaagaaagcacttcggcatgttttctgcctcactgcaaaataaatgtataagcattccagggaaactgcagggagaggggaacattcttca

SEQ ID NO: 251939 - DNA, 201 bp, Homo sapiens
gtgagattatcctgggcagaactaaacagctttctggactcaaggggaggaggcaggtttggagttaatgccccgccatgcttgagtagcttaaataaagrttacctggactatttcctttctccagcagctacgttactctgtctctgaagccatgggggaaccccagaggcagacatcagcgtgtccaggttgtaaaat

SEQ ID NO: 251940 - DNA, 201 bp, Homo sapiens
gctctctttgcatggaaatttctcccatgacagatgagaaagttctggggcagcattcagctttctagttggattaggcaacagaatcctttgaaaatgtstgtgcacagaccaggtggctctctgggccagtgtactctgaaagatgtgtgtcctggcctagctggttgaggaaaagcagggcaagcctagccaaatcac

SEQ ID NO: 251941 - DNA, 201 bp, Homo sapiens
cctgagtgaggtggggttgccgggcacagtcagactgtgtgaagactgtgtgagtgtgagattatcctgggcagaactaaacagctttctggactcaaggsgaggaggcaggtttggagttaatgccccgccatgcttgagtagcttaaataaaggttacctggactatttcctttctccagcagctacgttactctgtct

SEQ ID NO: 251942 - DNA, 201 bp, Homo sapiens
ggaattcttgaggaggcaaaagccaacagtgttaattggagatagagagataggaattcttgaggaggctgtgaaaagccaacagtgttaattggagatasactgccatgtgagagccaaacccctcatgttctcaggtaaaagctaggaaaatgttaggctcttgtgacatgcagttgtctcagcttcaaagctggatta

SEQ ID NO: 251943 - DNA, 201 bp, Homo sapiens
tcgaattgtagtccccagtgttggaggagggacctggtgggaggtgattggatcatggggtggatttcccccttgctgttctcatgatagtgagtgagttytcatgggaattggttgtttgaaagtgtgtagcacctcccccttctctctcttcctcctgctctggccatgtaagatgtgcctgcttccccttcgccttct

SEQ ID NO: 251944 - DNA, 201 bp, Homo sapiens
acaaagaatgggcgaaaatcccttgggcttttaaaaggttgtgtggccgggagggactggagccctgggcgagatgcctgcctgagtgaggtggggttgcygggcacagtcagactgtgtgaagactgtgtgagtgtgagattatcctgggcagaactaaacagctttctggactcaaggggaggaggcaggtttggagtt

SEQ ID NO: 251945 - DNA, 201 bp, Homo sapiens
gtgtcccgggctccgcgcagagctgagcaggtgtggagagtggtcgggtgcccagcgttgcccctccaccacgcgccggccgtttgcccccggggtccggstccgcagtgaccttgcggctggtgccccggggcctgctccagcccccagccctgagctggaaactccgagctcctgggtcacgccttgaccactgcagtt

SEQ ID NO: 251946 - DNA, 201 bp, Homo sapiens
gggacactgtgcagtccactgtaccatggtcatagccaggacctgttcctgccttctaggacaagagtggagaaaagggaaagaaagcagaagcctgggtrggctcagggtttgcccaggtgctcttgagatggacaaagaatgggcgaaaatcccttgggcttttaaaaggttgtgtggccgggagggactggagccctg

SEQ ID NO: 251947 - DNA, 201 bp, Homo sapiens
aaggaagtgcaagcagcatctgaaacagacaccagcactctcactgtagcagagttgcagcattgttcacaacagtaagatacggaatcaggctgggcgcrgtggctcatgcctgtaatcccagcactttgggaggctgaggcagccagattgcttgaggcccaggagtttgagaccagcctgggcaacatggcaaaaccc

SEQ ID NO: 251948 - DNA, 201 bp, Homo sapiens
ggaagggacactgtgcaatccactatatcacggtcatagcacgtcacagtggattgtacactgcaatccatggttgcaggtccctagtggatatgaatttkggagggacactgtgcagtccactgtaccatggtcatagccaggacctgttcctgccttctaggacaagagtggagaaaagggaaagaaagcagaagcctg

SEQ ID NO: 251949 - DNA, 201 bp, Homo sapiens
ttctgtgtcagtctgtatgaatataatctgacatatttaaactggagaagggcattcaagtgaccaaatgacctcggcagtttccacatggtaacacagcygtacaatctgccattttcagaaagttatttcctgaattaccctcaattataagaggcctccacataatttgatttttctgtaaatgacacaactcaagta

SEQ ID NO: 251950 - DNA, 201 bp, Homo sapiens
tgtatttggaagggacactgtgcaatccactatatcacggtcatagcacgtcacagtggattgtacactgcaatccatggttgcaggtccctagtggatawgaatttgggagggacactgtgcagtccactgtaccatggtcatagccaggacctgttcctgccttctaggacaagagtggagaaaagggaaagaaagcag

SEQ ID NO: 251951 - DNA, 201 bp, Homo sapiens
ctcatagaaggctcgtgtgatatgttatcatccagtcttgctggctttcttctgggtcttctggcttccctgagtttgaatctgcattatgttacagcaartgcagttgacagtcagtggtatagttggagcatgcatggcccatttcatggcttttttagtatgctgaatgttatgccacctcggctaggtcatgaaatc

SEQ ID NO: 251952 - DNA, 201 bp, Homo sapiens
ccttctgaggttcccagtggatatgtatttggaagggacactgtgcaatccactatatcacggtcatagcacgtcacagtggattgtacactgcaatccayggttgcaggtccctagtggatatgaatttgggagggacactgtgcagtccactgtaccatggtcatagccaggacctgttcctgccttctaggacaagag

SEQ ID NO: 251953 - DNA, 201 bp, Homo sapiens
tctgcaaagactctatttccggaggtcaccttctgaggttcccagtggatatgtatttggaagggacactgtgcaatccactatatcacggtcatagcacrtcacagtggattgtacactgcaatccatggttgcaggtccctagtggatatgaatttgggagggacactgtgcagtccactgtaccatggtcatagccag

SEQ ID NO: 251954 - DNA, 201 bp, Homo sapiens
ttaggacatgtctgtagccacatctgccatctctgacatcaactgagtgttactaattcccattcctctcttttaatgaaggaagagttcatcagtgctgrtctcatccaaagaagcaaattagggagtctgttctttgcaaatgttggggcgtggttggtgattgctcagtggagaagcagctgctggtgatcaagtcct

SEQ ID NO: 251955 - DNA, 201 bp, Homo sapiens
actcctcctggggcactgagaggagcgcacccagcttcaatctcaggggacttgacaaagggtatttagtggcataggtttctacctgtttatgttccgtrtgccttagtgtgttgagaaacaaaaagcatggacattttttatgaataatattataatatgaaactctccttcccctcagagaggatgggccagctgttt

SEQ ID NO: 251956 - DNA, 201 bp, Homo sapiens
cctcctgagtagctgggactacaggcatgcaccaccacgcccagctaatttttgtatttttggtagagagttggccaggatggtctcaatctcttgacctygtgatctacccacctcggcctcccaaagtgctgggattataggcatgagccactgcgcccggccagaataccctatccttaaacatgaatttaggggagg

SEQ ID NO: 251957 - DNA, 201 bp, Homo sapiens
taagacatctcttatactcaatgttattggggacaggcaaaaataaatcattgaggttgaaatgagaaggtccctgctttctgtgagccccagactgaccrtaggtgcatgaagtgaacccggcgggcacactgcgtggggtgggctaataacctccagtacgagaggcccagatctgagaagatggggcgggctgcctgg

SEQ ID NO: 251958 - DNA, 201 bp, Homo sapiens
cagatgcctgccatagtccagtcccatgacacacacagtctcatctcctctttataacccctccatctgacacagatgaggctcagaggggttgagtaacygggccaaagttaactaacctgctgctaagtggccaaactgaatccaaacccatgtctttctgcccagaatgtgtcccctctttctactgactcagttctc

SEQ ID NO: 251959 - DNA, 201 bp, Homo sapiens
tggaatacagaagtgcctgcctccttcattattccacaggagtcactgtaggcttaaatggctctgaaaattacatatttactatggtggtcaaaagagcrgtcttcaaaatccaatcatctaggctcatatcccatccctacatcttactagttatgtgactttggacaaatgaactgagcacctcagtttcctcatctg

SEQ ID NO: 251960 - DNA, 201 bp, Homo sapiens
tggtttccaagccttctgtttggctcccacccaccctaccttttttcttttttccttttgtctacttgggaaatttttgaagataaagtgcagcagatgayataataaacactttttactcaccatcctgaattcacaaatgtaacattgtggcatatttgcttcagatcttttatagatctgcctatataatagaaataa

SEQ ID NO: 251961 - DNA, 201 bp, Homo sapiens
ggggtcacagatcagcgcaacacgcccagtgtgacaccactgaaaaatggagggctgagattggaacccagaggccatgctcttaagctactatgccatamctagggtagcagtactatataatttatcctccaaattgggacactttgagagggaaggatcgtcattaatatttgtgctgggtcaacaggcataagatga

SEQ ID NO: 251962 - DNA, 201 bp, Homo sapiens
ctgaattacacagcctgttagagggaatataagaggagccgagctggctccaccacagggctgccgggcctggagctggtccctgaagaattccagggccygcaggatgctcacggtttgtcctttgccacgtgcccgacacgtctcgcaccatttccaaaccgctcctcgagggtctctcccctcttcaacttctgtgta

SEQ ID NO: 251963 - DNA, 201 bp, Homo sapiens
agatgtgtgtcctggcctagctggttgaggaaaagcagggcaagcctagccaaatcacacatcttgaacagccctcattcgttatactaactttcccaccytctggtgtgtataggagataaagatggcagacgtgctattaggctgccaatgggagtgggctctgatatggtctttcaaatatgaatcacccctggcatg

SEQ ID NO: 251964 - DNA, 201 bp, Homo sapiens
aagcacaatgatttcctttcttgaaaagttcaacaaaagcaagagagagagattggagttgatgctgcatttttattctgtgttaagtcttgaacctgctkttgctgaacattggtcaggggaatttgagaagtggaaagtgggcttttttcaccctttgaaaagagaggatggattcttcaccagaactgacatttaaaa

SEQ ID NO: 251965 - DNA, 201 bp, Homo sapiens
cctctgcttccctagtagctaggactacaggtttgtgccaccacacctggctaattgaaaaaagaaattttttttcaatagagacagtgtcttgctatgtycccaggctagtctcaaactcctggcctcaagtgatcctcctgtctcatcctcccaaagtgttggaattacaggtgtgagctactatactcggccagtacc

SEQ ID NO: 251966 - DNA, 201 bp, Homo sapiens
ttcttcccaaaggctgtgtgatttccatcagtcagtcttagctcgtatacctccttggagacacctcttctgaccaaccagtccaaagaatctcctcttaycatgtcactctgttttatttatttatttagagatggagtctcgctctgtcacccaggctggagtgcagtggcgcgatctctgctcactgcaagctccacc

SEQ ID NO: 251967 - DNA, 201 bp, Homo sapiens
ttgttctcccacggttctaaagggagaccagaggtccaaaatcaaggtgtcagcagggccgtgttccctctgaaggccctagggaagaatccctccttgcstcttcctggcttctggtggctcccagcaatcctaggcatgtcctggcctgtagctgcatcacttgaatctctgcctctgtcttccatggccctcttccct

SEQ ID NO: 251968 - DNA, 201 bp, Homo sapiens
ttgagatactctcaaataattagaaagacaagggagtggacaattagaaatgggaactaattatggcttattgagcacttaccttgggccaggccctgctygaaacacgtgacatggatgaacttattcagtccccacaacaactctactaggtaggcaaattgttctccccattttataggtgagataactgaggccaag

SEQ ID NO: 251969 - DNA, 201 bp, Homo sapiens
attaatgtgtatgttttaaaacagtgagattttgggttggaatagaagagggttttgagatactctcaaataattagaaagacaagggagtggacaattaraaatgggaactaattatggcttattgagcacttaccttgggccaggccctgctcgaaacacgtgacatggatgaacttattcagtccccacaacaactct

SEQ ID NO: 251970 - DNA, 201 bp, Homo sapiens
cctcctgcacttgcctcgtactcaccttcagcaatgccaaagcgcttaggcctccagcatacatcatcaacgccttctgtctgttaactgtgcaacagctyctctctgatttgtgaaataattgtgtgtccactgattaatgtgtatgttttaaaacagtgagattttgggttggaatagaagagggttttgagatactct

SEQ ID NO: 251971 - DNA, 201 bp, Homo sapiens
ggtgggttagcatggctcattgcacaggacagcatcaattggccctatgtctccacattgggcttgttctgtgctgaggaggactttaagggctcttcctrtataggggtcagtccttcccactgcttaactgcaggtgtcatggagcttgctctgtggctggcatttgtagctggggcacagacccatttcctcccttct

SEQ ID NO: 251972 - DNA, 201 bp, Homo sapiens
tttcccaagagggaaattgctggatttgaagggtgtaaacatcatcatggctccagtaatgcagtgcacgtggggagatttttaaaatcagtgttctctcygttggcatcttgtgccagaaaaatgtcagaagaaaataatgcgaatgaacaattaaaaagctaatcccctctttaactcttaaaaatatggaaatgaaat

SEQ ID NO: 251973 - DNA, 201 bp, Homo sapiens
ctcaggttcccattagctttaactagtgacacttgggaaataacaggcactggtcaatgccatttctgaagctgaactccgaggaggatgaaaagcagtcrtttcagaaaaataacagtggtagcatggcagcctgtatgtgagcagttgttgggtgggttagcatggctcattgcacaggacagcatcaattggccctat

SEQ ID NO: 251974 - DNA, 201 bp, Homo sapiens
gggaggccgaggcaggtggatcacctgaggctgggagttcgagaccagcctgaccaacatggagaaaccccgtctctactaaaaatacaaaattagccagrcatggtggcacatgcctataatcccagctactcgggaggctgaggcaggagaatcgcttgaacctgggaggcagaggttgcggtgagccgagatcgcgcc

SEQ ID NO: 251975 - DNA, 201 bp, Homo sapiens
tgggttcaaagcctagtttcatcatttcttagctatgtgactatggggtgtttacttaacctctctgagatttctttccttgatttataatgtggcatgarcaatacctgccttgcagtgttgcatgtggtgatgtgtcttgcttggagcttcctgtggagtttgctccttcatgggttcattcactcctttttttcattc

SEQ ID NO: 251976 - DNA, 201 bp, Homo sapiens
acctggtaatggaagtgtttcagtccttatcattctctggcttgaatcgttatcttaaatgccttgggagaagaaactcacaaaggcaactcaagtgaaakaagctggtggctgggtttctgttagaaactgttaacttcgaagaatctcagaagagggaaaccacagaggcccctctaaggtagtgttgtaacaggacac

SEQ ID NO: 251977 - DNA, 201 bp, Homo sapiens
gctgggattacaggcgtgagccaccatgccctgcctgttttcactttcatatgctgtcttttatatgtgtatgtgtgtttacacaaccaaggtcccgaccyacataatattttgaattctgttgctttaacttaaagcagcggtttaagtggttaatttaacttaaactccattttcatgtcttcatgttattttaataac

SEQ ID NO: 251978 - DNA, 201 bp, Homo sapiens
acgaggtcaagagatcaagaccatcctggccaacacggtgaaacctcacctctactaaaaatacaaaaaatagctgggcatggtggcacgtgcctgtagtcccagctaagttgagccgagattgcgccactgcactccaacctggcgacagagcaagactccgtctcaaaaaaacaaaataacttattatttcctttgcac

SEQ ID NO: 251979 - DNA, 201 bp, Homo sapiens
ccttccctcccttcttccctccttcctccttctcggcttccttttttcctttcctccttcctttcctccctcttttcctctctccttcttcccttcccttycttccttcgcttgctcccctccctttccttctcctttcctccttccctccttccttctctccctctctactgctctctttccttccctcctaccttcctt

SEQ ID NO: 251980 - DNA, 201 bp, Homo sapiens
atagaaaatgttagtttgtcacacatagtaaggatagtacttttaaaataaaacttgtctcggttttctatatatatttgtatgtaaatcacatgcaaaargagaaagggatgaggccaggaatcaggagatcttcattttagctgcaactcggcctatagccagcagtgtgtccttggacagatcaccttctatcctgca

SEQ ID NO: 251981 - DNA, 201 bp, Homo sapiens
tggatttaatgagttgtgactagtagttcataaaagaacaatagaaaatgttagtttgtcacacatagtaaggatagtacttttaaaataaaacttgtctyggttttctatatatatttgtatgtaaatcacatgcaaaaagagaaagggatgaggccaggaatcaggagatcttcattttagctgcaactcggcctatag

SEQ ID NO: 251982 - DNA, 201 bp, Homo sapiens
tgtgaccagccagtggggccccagaagctcagttagaactgcttgtacctcctggtcccctgccttcatggagtggaaagggatgaattagggactccaartccaggtcctgggctgttctccagcccaccctaagcctggagcagcaactggtgattgggccattaactttatgtagttctggggccagactgtgtatcc

SEQ ID NO: 251983 - DNA, 201 bp, Homo sapiens
gttggcaagaacctctctgcacttgtttcctcatctgtatgatagaaataatacatctcgggatggtagtgaggaagggagggttatataaaatgacttcyactgaagtgcctgcctggcattcagcattgtatagagccggaactccaaatgtcttctgcttgtacctgttttccttctccccaagtcacccagctcaca

SEQ ID NO: 251984 - DNA, 201 bp, Homo sapiens
actgccgcgccaccaccaccatcactaccaccactaccaccatcatcaccaccatcaccccagctcaaccagaatgactataatccttcacacccctgccrggttatcttccctatgatgactttcttaaccagcttcccccaaacaagtagtaacattttccccacccaaatccatcttgaattgtgggaaggatcctgt

SEQ ID NO: 251985 - DNA, 201 bp, Homo sapiens
tagttatagaaattgagacccagagacttaagtatctagtgtaaggcagtcttcttgtaaggtgaatgaatataaatatatatacacacacatgtatatgwaaattttatgttggcaagttttgcaaattgttcctgatggaacacctcccgcccaatacatttaaatctgaggttctttatcaggaccaatttgcaaaac

SEQ ID NO: 251986 - DNA, 201 bp, Homo sapiens
gtactatctatgtttatatatgtatatctgtgtttatgattcaagcacagctgtgtcaactgtttaacaaagttttatgggagaaagcttgataattgagraaaatttatccctatttatttatttgaaccacaacttcttgtagtttttcagactttgagaaagctggttatgatttgatgtagtggccaaacattgtcg

SEQ ID NO: 251987 - DNA, 201 bp, Homo sapiens
cctccttagccctcagccctgccatgggatgggaacagaggagactgcagcagcaagtgtggctgattttaattgatttctgcttggtacacatttactgrtgagctgtaggtcagcaacttccaacagagctgagatgggaagagaatggctggctgcctagttgcttcctgggactttgaatggcatcttggcatttta

SEQ ID NO: 251988 - DNA, 201 bp, Homo sapiens
tggagcagcaagaggtactgtgccagtggcccccctcccactgtccttgcaacagctcctctgtctgcctccttagccctcagccctgccatgggatgggracagaggagactgcagcagcaagtgtggctgattttaattgatttctgcttggtacacatttactgatgagctgtaggtcagcaacttccaacagagctg

SEQ ID NO: 251989 - DNA, 201 bp, Homo sapiens
ggtgctcacactctagatggggagccgggtaataaacagataagcaagcgaaatattaatatatagcaagtccggaaggtaagggctgcaggttaaataaygtgggcagggccaggcgcggtggctcacacctgtgatcccaatatcttaggaggccaaggcaggaggattgtttggggccaggagtttgagaacagcctg

SEQ ID NO: 251990 - DNA, 201 bp, Homo sapiens
aaatctaatgcctcaaacttagaaatatggtgaatcttaagatttatttatttatttatttatttatttatttatttattgtttcagactcttcaattcgytagagattaagtttgttttttgttttttgttttttttttttgagatggagtctcactctgtcacccgggctggaggagattaggttttttaaaatgctct

SEQ ID NO: 251991 - DNA, 201 bp, Homo sapiens
tggaggatttcacggatacagctgcattctcaggactcaaagccacccacagtctggcctggaggaggcggtgactctggggctccgagtccctgtgaagygagtggccacaggagttgagaaaaccaagaatgaactagacaggagggttgtgctatgaagcacactcagtgttgtgggtgttcagtggagggaatggtt

SEQ ID NO: 251992 - DNA, 201 bp, Homo sapiens
tctgtctcaaagcactattactgtataagaaagagaggtgggatactggggacaacttgcagtatctatccaagagttaaatgctcaataaatgttagttrtcactaccaccaccaccaccatcattataatcatcatgatcatcatcatttctggtcttagcctataaattcctccacgtcctcacttcttatttgatcc

SEQ ID NO: 251993 - DNA, 201 bp, Homo sapiens
taacatctaaacatgcttctcatttccagccattgctgatgcttctcagttgaagtttgagccacatccctcttacagctagtgaatgagttggtagcagmtactgtatataataataataatagttttaataataggggagggtgggatggggtgtgggtaagttttgccttttgttttgtttttgatgccgtatatagt

SEQ ID NO: 251994 - DNA, 201 bp, Homo sapiens
ctctgaccctggcccagaggtgcctaggaaacatttaaagagtaaataattgattctcaaagataagcctttccacctcggtcaccacccaatccatgtgygcagaactcagaaggaggagccaggttggattgtcatgtacaaacagcatctgctgtggtctagtccctttgtctcccaaatctctttgcttctgttctg

SEQ ID NO: 251995 - DNA, 201 bp, Homo sapiens
tctgtagggagcggtcatggattctctcacgcgtcgatggggggcaacgatatcagatatggcaaagattggctaagaaagggaaggcatttttggagagkgctttggggtttctgatacctaaatgtctcatccaagtgaacagagtatttactcgtctatgacttgaaaaaagaatatctttttgatgttattgtaaat

SEQ ID NO: 251996 - DNA, 201 bp, Homo sapiens
ggcaacgatatcagatatggcaaagattggctaagaaagggaaggcatttttggagagggctttggggtttctgatacctaaatgtctcatccaagtgaayagagtatttactcgtctatgacttgaaaaaagaatatctttttgatgttattgtaaataggactgtttccttccttctttccttccttccttccttcctt

SEQ ID NO: 251997 - DNA, 201 bp, Homo sapiens
atggacagaacccaactggaggtgccatctggaattccagagtgtgaagagcagcctcaggtgcgcagcctttttaggtttcaccaatcagcatatctcakatgttttcttggagactccattaggctttaacaattgccttaaaaattccccagcaaaagcattgtgggaatagggaacaactccaggttgcacatgaga

SEQ ID NO: 251998 - DNA, 201 bp, Homo sapiens
gttaagagagacaccagcgtggggcatcatcaggaaagagttcatgaaagaattttaacaatggaaagttataaatcttcagttagaatccaagcactacsgaggcccagaacccaggagaggagaattcagaggcaggcccttctactgagtcagcaagaaaagtgccatatcagcgcccctcaaatctgcacatgcata

SEQ ID NO: 251999 - DNA, 201 bp, Homo sapiens
caggcccattttgcagaggggaagactgaggtgcagtgatgcaaaatgtgtggtggagggctgggcctggaatctgggagttctggttccgggtgaccgtmcactagaaagggaaaggtggcagaaccatatatatgagcctgttacttgttcaaggacttggtcaggggcctcacagaacttggaaaagagcaacggact

SEQ ID NO: 252000 - DNA, 201 bp, Homo sapiens
ggcagggctggaccttaagatccggacccaaatgcctgctgtttctcccgcccctagttctgaatacggtcacaggtggaaaacggggtggcctgtgataytccagtcccatgtttcttactttgccatggggaggaatgaggacctggggttattgccctgtagttcattccacccttcaccccatgggatacccagtca

SEQ ID NO: 252001 - DNA, 201 bp, Homo sapiens
ctgcaggtgtgtgggacccacttgtgcccctgcccagctgtacggcattggaccagctccctgggcccagatacctcttttgtaaagtgaggatctcctawctctggcaggatcctggtgaggaggaaacaaggctctgtatgaggagtgacagctccgaggctggccaagcttgcaaggtgctcagggtgtccctactcc

SEQ ID NO: 252002 - DNA, 201 bp, Homo sapiens
tgaaagacacagtatcttatttcatttttaattgaattagtaatgacttgataaggcacaaaggttagtctaactaacattttttttttccctgacatacragtgatccctacactattggctgtgtccactttattgattgtgaaacagcctaaatgcatggaattggaaactggaagtcattctacacaatacaagaaa

SEQ ID NO: 252003 - DNA, 201 bp, Homo sapiens
ctggacttggttgaggtggcttcctaggggcattttctcaccccctcccagctaagactgctgttaattttgaataatttggaggatgctctaccctttgrggtagcagagttttgcaacccacagatcccttttgccttgaggaatggtggtgatggtgggtgtcagagattctgtctgtataagtccccgggaaagctc

SEQ ID NO: 252004 - DNA, 201 bp, Homo sapiens
aaatgagagacttatattccaggcaaaggctttgtgcaaatgcccatctaagccatgccctctgcaaggaatcccctttcttagtgatgatggtggggagrtggggagggtgcagtgcaactcccattcctgatctcctatcaccagagcagaagaatcactggagaacgactctgtctgaagcttgttcagcctggcttc

SEQ ID NO: 252005 - DNA, 201 bp, Homo sapiens
agtcattctgctgattcatttttttttctttttagtttttcttttgaatttttgggacaccacctttataacaaataaaaggggaggcagttcttcctatraacaatctgatctgtcagttaaaatttcctagaacttgtaatttgatgcatcttagatccaatgtgagtgattgaaacttacaagcagacttgttctcct

SEQ ID NO: 252006 - DNA, 201 bp, Homo sapiens
agctcagctgtaaactctgtaagtgggacattcaatgatagccccttctcttcttaccctacacgctatccctggtgagctcatcctctcttggggcctgsggtatcatctgtgtttagatgacgctcatgtctttcttcaacttggatgtgaccttgggtcgaagtctagttcatgtattacctcttgtgttaccatcca

SEQ ID NO: 252007 - DNA, 201 bp, Homo sapiens
tgggccacaagcccaggtctcttttgcctttgactgtacaacctgctgcctgggagttcctgggagggacaggtttcagagtgtgtccttgatggacacayagtagagccctgggatccaggaagtaacaagagggcacttcccagtccctgaaagcaaacaccttaattttgctaggtaattttggggaggcaccaaacc

SEQ ID NO: 252008 - DNA, 201 bp, Homo sapiens
tgtctcctgtttttcagatgatgaaatttaagctgaatttaaactctcttgtttcattagaaaggcagtagtttcaaactcactttctcaaaatgaactcrgggccatttggaaatcgtttctattatcatcatttaatgggaggtaagattattcatgaacgactaaagtgcaaagtaagaaagagcttaaaggcactct

SEQ ID NO: 252009 - DNA, 201 bp, Homo sapiens
gaggatgctctaccctttggggtagcagagttttgcaacccacagatcccttttgccttgaggaatggtggtgatggtgggtgtcagagattctgtctgtrtaagtccccgggaaagctcagctgtcgcctgacccgagggtcgtgcagtttccttaaccctgactttaagtcagccctctttaaccccgactcccaagct

SEQ ID NO: 252010 - DNA, 201 bp, Homo sapiens
accgttctactttctgtttctatgagtttgataacttgagacacttcagatgcgtggagtcatacagtatttctgtttttgggactgggttattttgcttmgcttaatgtcctcagagttcgtccatgttgtagcatgtgacaggattccttcctttttaaggctgaataattcattgtatgtgtacaccacattttgttt

SEQ ID NO: 252011 - DNA, 201 bp, Homo sapiens
gctcctctttgccttccaccatgattgtgaggtttccccagccatgtggaactataagctcatgaaatctctttcttttgtaaattgcccagtcttgggtwtgtctttatcagcagtgtgaaaagggactaagacagcattctattattttgtatcttgtacctgcttctgttttaacacagtgtatttgaagtacagttt

SEQ ID NO: 252012 - DNA, 201 bp, Homo sapiens
ttgaggttcagtgtaggctcttgattctgcttcataatcttactttacagttggaggaagaggacgggttgcgaaaggaacttcctttgcatgcggtcagwgtgctgggccatctgaacagccccctccacggtctgcaacatttctacattctgatagaaacagttagtggtcttgacgtgtctgacaacctacaaaacc

SEQ ID NO: 252013 - DNA, 201 bp, Homo sapiens
gtttgttgttagcggggcccagcagtgctctgggagcacatcctgaacccaggcggtgacaaggggcttgtccccacaggtggcccggcagtctctgaccrtgttcgttctcatcatgaatggctgccacatcgagattgatgcccaccggctgaatgatggggggctcctgctctcctacaatgggaacagctacaccac

SEQ ID NO: 252014 - DNA, 201 bp, Homo sapiens
cagcctcctggcaaggacccgagcctggattgacccctagctacccgactcctatgcagccacttgaacccgccaccctgtgcagtctggggttgtccccrccccctccccgctccccagcaaagagaccacactccctaatgtcgggtctcccagcacagtggctggggtgggacagagagcctagaggtactctgaagg

SEQ ID NO: 252015 - DNA, 201 bp, Homo sapiens
tcccacctttccacccactgtcttcctgccaccattttgaggggtctttactggtttgagcttaaaccaaggtttttctgagctggtacatttataaaggygaaaactatctctctctttctctttctttcttctttttttatttttttggacagagtctcactctgtcacccaggctggagtgcagtggcatgatcttgg

SEQ ID NO: 252016 - DNA, 201 bp, Homo sapiens
ccattcttcatgtccagtttccccttcgggtgccctttacaaaaacttcctttaactctgcagccaacatggttgcttctcaccttccctagctctaaaartctagtgcttttacttgatgcatgtattttcttgttgtgtgatgttgtttcataaatatttttccttttcccaactgtactatttgctccactgtgaaaa

SEQ ID NO: 252017 - DNA, 201 bp, Homo sapiens
aggcaattctggtcgatctaactccctgtattactgacattttaaaacaaattattgaagtgccattacacattgcagaaaattagaaaaggaaccccccaaaaaagtaattttgcagcttctatcattctggtatagttccctctcatcttctgtctttatgtggtttatttatagtgaatatgcagttttgtattctac

SEQ ID NO: 252018 - DNA, 201 bp, Homo sapiens
gaagctcatggaacagctaggtaagggggtcccaaaggcttcacctctcagaggtcaagagaggcccagctggcccactgctgggggtttctaggatgttmaaaataaaatgaaaaaataccaaaatacagctataataactgtgagatttttaaagatattcacatttgtctgtttgttttgttttgtttttttgaggtc

SEQ ID NO: 252019 - DNA, 201 bp, Homo sapiens
cacattgcagaaaattagaaaaggaaccccccaaaaaagtaattttgcagcttctatcattctggtatagttccctctcatcttctgtctttatgtggttwatttatagtgaatatgcagttttgtattctacttttttcactgtattaaaacattttccttgttgaaaagtctctatacttaatgtctgctcaaatctca

SEQ ID NO: 252020 - DNA, 201 bp, Homo sapiens; identical to SEQ ID NO: 49688

SEQ ID NO: 252021 - DNA, 201 bp, Homo sapiens
ttcaggtcattccagatcttctgccaagaaccccaagtcacaaatgtcagtttgtattcccaagtgccccttttccccatctgcatgccatctgttaccaytctctgcaaccaatctctttttctttcttttaagatgtttttcctcctatctgaccatatatagcagtagcaaccctttcctgcgtttctgtaacttccc

SEQ ID NO: 252022 - DNA, 201 bp, Homo sapiens
ctcagcctcccaaaatgctggggttacaggcatgagctaccatgattggaggacattcacatttctaaatcaacctttttaacattttatatatatatatatatatatatatatatatatatatatatatatatatattgccatcgtgaatttatttctcagcatacacaaaagatagcaattgaagtatttggggctgat

SEQ ID NO: 252023 - DNA, 201 bp, Homo sapiens
cttctctggaagaaggggttgggggttggcccaggcacttcacgtgcgagttccattcctttccaccaccttgatccacccctgttgtgcagatgaggaagctgaggcacagagaggtgaaggcatttgtccatggttatgcagagacggaatcaagtctgcttggctccagaacccagccctttccttttatgacctagg

SEQ ID NO: 252024 - DNA, 201 bp, Homo sapiens
caggccacaagggctaacaacccctttgggcatcagaaggtggccttgggtgctctccccagaaaacttcacagacactggcactctgaattccatcttargagagccatggacaggagccctgttgtatgccactgttggtgggaggctgcaatgcttgcatgctttccaagctgggcagctcacccttcagccttgtag

SEQ ID NO: 252025 - DNA, 201 bp, Homo sapiens
aacgtggccctcgtcacagaaagttctagtggttcatgctgctccaggccctataccatcccagccctcctctgatggttcttgcctcaaaaagggcaccrataggtctgctacctttcgaggctcttaccatttgggggctttttctttgccttccaataaaataatccgccagattaaaaagagcattctcctccacgt

SEQ ID NO: 252026 - DNA, 201 bp, Homo sapiens
ttattattattactatttcctgagtcttggatgccaaaatagtcgtgaagattaaatgaactaatatttctcaggtacttggcaagagaataaagcatccrtatttggtagataataaatagaaaggggggcaagtctcccacctttccacccactgtcttcctgccaccattttgaggggtctttactggtttgagctta

SEQ ID NO: 252027 - DNA, 201 bp, Homo sapiens
ctgtgagtccttgttaactgggtgacatcactgagcctcagtttccctcctttgtaaaagggggttaagaacaggaccaacctcagagggccgaggtaagrgtctgatgagctaattgctgacatgcagtgtgattgtcagtgctgttattattgcattcttgttttcatgtagggtgcctggggacctggagagatgtgt

SEQ ID NO: 252028 - DNA, 201 bp, Homo sapiens
actaccactcatggggtgctttcagtatgccaggccaagtgctttgtaggtgtggtctcatgccatcttcaaaataccactgtgggggcactaagtggagrgtgttgtacccatttcacaaaccactttaatggaaaaaaagaaaaacctcacacaaatttggaattgtcccagcaagtccaggacgtggggtccccctat

SEQ ID NO: 252029 - DNA, 201 bp, Homo sapiens
aagggggcagggggagaataaggggtaaataaaaatgttggaaatgaggccaggcgtggtggctcacgcctgtaatcccagcattttgggaggctaagggsggcagatcacttgaggccaggagttcaagaccagcctggccaacacagtgaaaccccgtctctactaaaaatacaaaaattagctgggcatggtggtaca

SEQ ID NO: 252030 - DNA, 201 bp, Homo sapiens
ctaccactcatggggtgctttcagtatgccaggccaagtgctttgtaggtgtggtctcatgccatcttcaaaataccactgtgggggcactaagtggagastgttgtacccatttcacaaaccactttaatggaaaaaaagaaaaacctcacacaaatttggaattgtcccagcaagtccaggacgtggggtccccctatt

SEQ ID NO: 252031 - DNA, 201 bp, Homo sapiens; identical to SEQ ID NO: 49689

SEQ ID NO: 252032 - DNA, 201 bp, Homo sapiens; identical to SEQ ID NO: 49691

SEQ ID NO: 252033 - DNA, 201 bp, Homo sapiens
aataaaaatacaaaaattagcagagcgtggtagcacacatctgtagtcccagctactcgggaggctgaggcaggagaatcacttgaacctgagaggtggargtagcagtgagctgagatcacaccgctgcactccagcctgggcgacagagcaagactccctttcgaaacaaacaaacgaaacaaaacaaaaaacaatcta

SEQ ID NO: 252034 - DNA, 201 bp, Homo sapiens
tacctggacatcagcctctacaaagaagtgactgactccagatctggaaatgtaaggctggcccgcgccgtgggggtctaagtcaaagcagaagcaggctkcttgggccatcaatttgtagattaagatggcatttggaggcggtcttgccttgctctcccatgtcattctgggttggggtagccccctctgagtgttatg

SEQ ID NO: 252035 - DNA, 201 bp, Homo sapiens
taggattgtgggcgattcaaaggctatgatatggtgaacgaaggagtgatgtgctgcatgaacttgggtgagtcccttcccctctctgagtctccaatttmtcatctttagaatgaggaggctgaggctgggcctgatggctcatacctgtaattccagcactttgggtggccgaggtgggtggattgcttgagctcagga

SEQ ID NO: 252036 - DNA, 201 bp, Homo sapiens
gggcgattcaaaggctatgatatggtgaacgaaggagtgatgtgctgcatgaacttgggtgagtcccttcccctctctgagtctccaatttctcatctttrgaatgaggaggctgaggctgggcctgatggctcatacctgtaattccagcactttgggtggccgaggtgggtggattgcttgagctcaggagttcaagac

SEQ ID NO: 252037 - DNA, 201 bp, Homo sapiens
cgggaggctgagggaggaaaattgcttgaacctgggaggtggaggttgcagagagccgagattatgccactgctctccagcctgggcgacagagtgagackcagtctcagaaaaataaaataaaataaaataaagaaataattatatcaaaagacacctgtacttgtatagttatcacagcactattcacagtagcaaaga

SEQ ID NO: 252038 - DNA, 201 bp, Homo sapiens
agtgtcctgggggcccccagccacctggccctccagcctgggcttctgcccttctgtccacagctctgaagggaacgtggcagagcggattctttgaccayggcagtttcaaggaaatcatggcaccctgggcgcagaccgtggtgacaggacgagcaaggtaatcatgaagacgggagcaggctgcccatgtctgactca

SEQ ID NO: 252039 - DNA, 201 bp, Homo sapiens
gagctctaaatctggtccagctcactgaagcttcaggagtaggagcagctcgtagagttgggtctgcaagcagctgcctcatccccgacttgccatcaccytacaggatgaccgtgcccatcagcatcaccaaccctgacctgctgaggcacagcacagagctcttcatggacagcggcttctccccactgtgccagcgca

SEQ ID NO: 252040 - DNA, 201 bp, Homo sapiens
tatccaaagctttatttttctagctaagacacatccttttcttaatgtcttcattttttttttcagtttagtttccagtactgtcagttgctttcttttcsgggaccaatttccaccaagaaaccaggggttagtggcttcatgagaattgccacaggctgtgacagatggagaacagcctggtcacgctggcaggtgata

SEQ ID NO: 252041 - DNA, 201 bp, Homo sapiens
ggatatccggcttctgtatggagagtcaccatggggagtgactcccatttcttttgaaaccccctcaaaccctcccctcgcccgaggccacgtcattgccrccagaatcaccagcgaaaacccagacgaggcaagttatgggggcccctgtgtttccaccatctcagatctcccagcatgtgggggaccctggatgttagc

SEQ ID NO: 252042 - DNA, 201 bp, Homo sapiens
taaaacaggaaattgacattggcacaggactgttcgcaccaacactgaccacgttcggatttcaccagcgtttccatgcatgcctgttgttgggagtgtgwgatgccttgatcactgtatttttggaactgcattccacagcccctgttgtcccttcttgttctggccctccacagtggtgaagaagggagttttacgtag

SEQ ID NO: 252043 - DNA, 201 bp, Homo sapiens
gtgtgatgccttgatcactgtatttttggaactgcattccacagcccctgttgtcccttcttgttctggccctccacagtggtgaagaagggagttttacrtagcccaggcactcactttgtcatgccatgtgacatgctttgcttcccccacctgcattttcattgaggactgggcagaaataaattgggggagatgtgt

SEQ ID NO: 252044 - DNA, 201 bp, Homo sapiens
gatggaaacatatatatattattatatatataattatatataataatatatataatatattatataatataacatataatatacataatataatatataatatgttatataacattatatatacataatataatacatattatatgtatttatataaatatatatttatataaatgtatatataattattatatatatata

SEQ ID NO: 252045 - DNA, 201 bp, Homo sapiens
atcaaccagcaagtagaagaagagagagaataggagaggggaaaaatgcataaaccagtaggccagtgtaggaatttcaacatccagataataggacttcrggaaaaaatagagaaaaaaagaggcaaggacatcatcaaggaggtatttgtttcttgttgttgttgttgttgtttgagatggagtctcactctattgccc

SEQ ID NO: 252046 - DNA, 201 bp, Homo sapiens
aacaatggtgatgtaggggcctagaggacagccagtacctacggaaggagaacagaggccttcaggagagatgtcaccagtggaaaaaaacagaactgatmaattatttattattattatttttaatgagatggggtcttgctacattgcccaggctggtctcgaactcctggtctcaagcagtcctcctgccttggcctc

SEQ ID NO: 252047 - DNA, 201 bp, Homo sapiens
caacccagtgctttcagaggctgagggaggaggatcacttgaagccaggagttcaagaccagcctgggcaacatagcaagaccccatctccagaaaaagtaaaaaaaaaaaaaattaactggttatggtggtgcatacctgtagtcccaactactgaggaggctgaggcaggagggtggcttgagcctaggaggtcgaggt

SEQ ID NO: 252048 - DNA, 201 bp, Homo sapiens
ggcttagcatttttagtgcagtcaggtttgctgatgcagagagttgcgtaatttttttaaatgcaagggatggctgtggagttctcagtccctcccaaggstgaccacaaccctgtcttttctttcaggggccaggtcctcccagcggattcactactgaacctcgtagatgtggaattaatttacggaggtgttaagtac

SEQ ID NO: 252049 - DNA, 201 bp, Homo sapiens
tggccgatgcgatgttcagaacgtgcatgacagatttcttacactccctggaaaggtaggggctgtggcagttcccttctgcttttgtgatatgtgttagyggcttaggaggctgaatctgtctcctttatttgtgtggccagttagtcaccaggcaattggtgagtctctcctccggtcttgcctctgggaaattcctct

SEQ ID NO: 252050 - DNA, 201 bp, Homo sapiens
gagttaaacagcctgcagcaccggcagctcccggacggcacctgcgtggtagaattccagttcatgctgccgtcctcccacccaaaccggtatggagtggracacacccagggacggcctgtgtttctgttcttcctgacctctgtcgtcctgtctctggaaggacctggcaagtgtgtttgggcacgctgctggggagac

SEQ ID NO: 252051 - DNA, 201 bp, Homo sapiens
tgggttgtggttgtgcagagacatctgatccccgcagctctgtgttccagataattcagcaggcaggacaggtgtggttcccagactcagcctacaaaacygcccaggccatcaaggacttcaaccgggagaagttgcccctgatgatctttgccaactggagggggttctccggtggcatgaaaggtaagcccctccctg

SEQ ID NO: 252052 - DNA, 201 bp, Homo sapiens
gtgttggattttgtcaaatgcttttcctgcatcaattgggatgatcatgtggtttttttccctttgttccattaatgtggcatgttacattgacattgagycacccttgactgacttttctttaaaaaaaacacatgatgatcttgaaaggaaaaaacccctctgaccctgtgtactacctagaaaatagccttggcaaca

SEQ ID NO: 252053 - DNA, 201 bp, Homo sapiens
gcgagaccttgtctcaaaaaaggaaaaaaggaaagaaatcattccttgtgcatctactgcatgcacagggctcgatgccatgaaactgactttctagaagrcctcagcctagttggggaagatgaccttgtgtttagttataatttaagctgaatgagccaaggctggcaagagccacaagtgatgatggtagtctagagg

SEQ ID NO: 252054 - DNA, 201 bp, Homo sapiens
aggggccaggtcctcccagcggattcactactgaacctcgtagatgtggaattaatttacggaggtgttaagtacattctcaaggtaaatgcccccgtgcytctccgatgtctccaacactctgcaagcttcagggagtttctttcttccatgaaccatccctggagtggatttgctcatgcttgggtttgagctcttgtg

SEQ ID NO: 252055 - DNA, 201 bp, Homo sapiens
gatccccctcggctgggaagctgacacagtacacagtggaggatgggggccacgttgaggctgggagcagctacgctgagatggaggtgactgcagagccsgccgtggggaatcctgaaccctcaaactcccactcttctggctttgtcccatgtctgaacaaacaggcctacctctccccttgaccactgtctgcaaatt

SEQ ID NO: 252056 - DNA, 201 bp, Homo sapiens
gggaatgtagagggtacactccccctttaggaaggggaaatggtattgaaagccggactagggcttgctgagttggtagtcctcatcagtctccctacccsactcctcctctctcccagttaccgaattaccatcggcaataagacgtgtgtgtttgagaaggagaacgatcctacagtcctgagatccccctcggctggg

SEQ ID NO: 252057 - DNA, 201 bp, Homo sapiens
ctgaaccgttcacaggagaactccctgcccagcagacactgcccatcctcggagagaaactgcaccaggtcttccacagcgtcctggaaaacctcaccaaygtcatgagtggcttttgtctgccagagcccgtttttagcataaaggtaaagtcacctatgagcgcaggcgtgtagaccagtgcggagggtcagaagatct

SEQ ID NO: 252058 - DNA, 201 bp, Homo sapiens
gccggcagatctgtcctgcctcccattctgcccggtcccatttggaattcccagagttttcctgacctgtcgttcttgtggtgtctcatcaggctgaaccrttcacaggagaactccctgcccagcagacactgcccatcctcggagagaaactgcaccaggtcttccacagcgtcctggaaaacctcaccaacgtcatga

SEQ ID NO: 252059 - DNA, 201 bp, Homo sapiens
ctcggggtagcacgtggcccccagcgcaggtagatgtgcatctacagctccttccttgtcttcccatgcaggtgcttattgccaacaacgggattgccgcygtgaagtgcatgcgctccatccgcaggtgggcctatgagatgttccgcaacgagcgggccatccggtttgttgtgatggtgacccccgaggaccttaagg

SEQ ID NO: 252060 - DNA, 201 bp, Homo sapiens
agtgaggcgaagcacattctgtttttaaaaaaaaattttatagacaggatctcgccatgttggccaggctggtctcgaactcctgggctcaagtgatcctyctgccttggcctcccaaactgctggggttataggcgtgagttactgcacctggctgggaggcatattcttgaaggaagattgttgctcacccctttctgt

SEQ ID NO: 252061 - DNA, 201 bp, Homo sapiens
ttttatagacaggatctcgccatgttggccaggctggtctcgaactcctgggctcaagtgatcctcctgccttggcctcccaaactgctggggttataggygtgagttactgcacctggctgggaggcatattcttgaaggaagattgttgctcacccctttctgtgtttgcaggcggtgtgggctggctggggccatgct

SEQ ID NO: 252062 - DNA, 201 bp, Homo sapiens
cttctgtgtccaagatgctgcccttatgtggtgactgagagcttgaaagtggccagtgtgactgaggaactgaattttacattttatttcattttgatcartttaaatagctgtgtgtggttaggggtcaccgtatcagacagggcagatctaaagtgttccattgcaaggttgttggcttgctaattttgttctaatttt

SEQ ID NO: 252063 - DNA, 201 bp, Homo sapiens
gtaaaagatcagcagagtcctggatgagtaccctaaacacatcactgcgtttgttttatgttctctcctgagaacttccagaagcttccagagctggtttycccatgaagatcaggctgctctgcttcccccgacaggtacagagtgagatcccaggctcgcccatctttctcatgaagctggcccagcacgcccgtcacc

SEQ ID NO: 252064 - DNA, 201 bp, Homo sapiens
gcacctgctggaacctctattgaaggtgcttctcccagagccctttgtgcagtggactccctccccacccagcctgtaggtctcaacatgatcatcgcatytctctcagagaacctcatttattttcttcccagcactgacctgagtctgtagttattgtgtttattttcttgtttatcttctccaacataaaagaaaaac

SEQ ID NO: 252065 - DNA, 201 bp, Homo sapiens
ctgggcctttgctgagacagaatagtgggcccgggtctgtttccaggggctctgaggctggttttgttctctgtctctgcaccacgtgtagattactggcrtcttccctggtttactactggagtccctggggcttattccggttgctctcctctgtcagaagtgcctagttgccctttgtgggccatccaaggtcaattc

SEQ ID NO: 252066 - DNA, 201 bp, Homo sapiens
cacaaggggtggagggtccagatcccacaaggctccaaattcctgggctgatgtaacacagaaaagagtgttcaagtgaggcgaagcacattctgtttttwaaaaaaaattttatagacaggatctcgccatgttggccaggctggtctcgaactcctgggctcaagtgatcctcctgccttggcctcccaaactgctggg

SEQ ID NO: 252067 - DNA, 201 bp, Homo sapiens
gagagctgggaccagagaattttctctgtcatctgctccttacctggccccaccaccgtgcactcggtcggccttcagcctcgagggtcttgtgactgacyggattctgcttcccttcttgtccccgattcctcaggccctcccagtgaggccatgtgggccttaggagataagatcgcctccaccgttgtcgcccagacg

SEQ ID NO: 252068 - DNA, 201 bp, Homo sapiens
ctgtcatctgctccttacctggccccaccaccgtgcactcggtcggccttcagcctcgagggtcttgtgactgaccggattctgcttcccttcttgtcccsgattcctcaggccctcccagtgaggccatgtgggccttaggagataagatcgcctccaccgttgtcgcccagacgctacaggtcccaaccctgccctgga

SEQ ID NO: 252069 - DNA, 201 bp, Homo sapiens; identical to SEQ ID NO: 49694

SEQ ID NO: 252070 - DNA, 201 bp, Homo sapiens; identical to SEQ ID NO: 49697

SEQ ID NO: 252071 - DNA, 201 bp, Homo sapiens; identical to SEQ ID NO: 49676

SEQ ID NO: 252072 - DNA, 201 bp, Homo sapiens
ggcctgcgcaacagagcaagaccctgtatctaaaaaaaataataataactaaaataaaataaaaagttttcccccaaagaaacaaactcattttccttgtrcattcatccccttgccaggtgggcatggtggccttcaaaatgaggtttaagacccaggagtacccggaaggacgggatgtgatcgtcatcggcaatgaca

SEQ ID NO: 252073 - DNA, 201 bp, Homo sapiens
aggaagcctgtctggccgctcacttcatcatctctggaatctccccgttggccgacacttctgtgtttgataaacataggaggcaggcaggccggaaggarcagctgctctgggatttctttctgtgtttgcatataaagtgccacattgttcaatttcaggatcttagcaattctatagtacagatgtcccaacccctgt

SEQ ID NO: 252074 - DNA, 201 bp, Homo sapiens
tttctcagatgtaaccactattagcagctgccgatggtggggggctcttttcagcactgtcactgtatatacttttacatagacattcatacagttgtttyattattttttgcatgacttcatcctatacattattgcaaatttgttaaacttaatttgtcttagaaatcattgcacgtgaatacttttcacattgtcttt

SEQ ID NO: 252075 - DNA, 201 bp, Homo sapiens
gtctgggaagcagagccctagtccatgtccaggtgtcttagtccatttgggctactgtcgtaaaataccaaagactgagtggcttctaaaccacacactgratttctcacaattctctaggctgggaaggtcaatatcaagatactggcagatttggtatctactgaggacccacctttcgtttcatagatgctgtccttt

SEQ ID NO: 252076 - DNA, 201 bp, Homo sapiens
gaggcaaagatgagatctgaaccatggccatcaggattctgactctgtgctcttcgcccccacgttatgctgcctgatgattattaccaccattgcaacattttttttttttttttggagacagggtcttgctctgtctcccaggctggagtacagtgggggaaacactgctcactacaacctcgacctctgggttcaagc

SEQ ID NO: 252077 - DNA, 201 bp, Homo sapiens
gcccccagcttacacacagtttttgagctcttactctgtgccaagcaccaagctgggtacaaggatccaaaatgaatgacacttggtctatgtccccaagsaccacccagtcggtcagggagaacagacaaccgaacaagccacttccatgccatgttttctgtgtcatcatgatggaagtctgtacccaggcctcccagg

SEQ ID NO: 252078 - DNA, 201 bp, Homo sapiens
cccaagactacaccagaatcagctccctgaactccgtccactgtaaacacatcgaggaaggaggagagtccaggtaaataacttatcaggtagctccttarttttgctcatggttaatttcagctgtcttctttcctcggggcttgtggcgatattttccagtggggtggtggtgtttgtatgatgggaaccaatgcctgt

SEQ ID NO: 252079 - DNA, 201 bp, Homo sapiens
atttctcacaattctctaggctgggaaggtcaatatcaagatactggcagatttggtatctactgaggacccacctttcgtttcatagatgctgtcctttygctatgtccttagatgtcagaaatgggccacagagctctacaggggatcttttataagggcactaatctcttttacaagggccccaccttcatgatctca

SEQ ID NO: 252080 - DNA, 201 bp, Homo sapiens
  misc_feature (1)...(201): n = A,T,C or G
agtacatcaagcgtccaggtgccgtgctggaagcaggctgcgtggtggccaggctggagctcgatgacccttctaaagtccacccggtatgtggctccacngcccaagtgctctggctggtgcaggtgcactcgtgacctccactggttcagtgagacaggtggactcaaggctggtagcgcttctcctgcctccacctgc

SEQ ID NO: 252081 - DNA, 201 bp, Homo sapiens
atcaccgtgccagatgactttgagggggtttataccatcctggagtggctgtcctatatgccaaaggtgcagtactccccctgcagcttagaacctggaaractcttattaagctcattggctaattctgtccctgtcacctcctgggtggtgtgggaggctgaggagcaggaagcactgcacatgtggctggggttgatt

SEQ ID NO: 252082 - DNA, 201 bp, Homo sapiens
gtgttaagggtgatcacaatgacaccaaaggaataaaaaaaaaatcattcactgggctcggcacagtggctcatgcctgtaatcccagcactttgggaggrtgaggtgggcagatcatttgggcccagcctgggtttgtgttcaagttcaagaccagcatggacaacatgacaaaatcctgtctctgcaaaaaaattaaaa

SEQ ID NO: 252083 - DNA, 201 bp, Homo sapiens
tactcaggaagctgaggtgggaggatcgcttcagcccagggggtctaggctgcagtgagctgtgattacaccgctgcattccagcctgggaaacagactgmgactctgtctcaaataaaacaacataaacctaaaagcataactcaggtccgagcacagtggctcacgcctgtaatcccagcactttgggaggccaagatg

SEQ ID NO: 252084 - DNA, 201 bp, Homo sapiens
gaggtgggaggatcgcttcagcccagggggtctaggctgcagtgagctgtgattacaccgctgcattccagcctgggaaacagactgagactctgtctcarataaaacaacataaacctaaaagcataactcaggtccgagcacagtggctcacgcctgtaatcccagcactttgggaggccaagatgggcgaatcacttg

SEQ ID NO: 252085 - DNA, 201 bp, Homo sapiens
ggacagtggaatacctctatagtcaggatggcagcttccacttcttggagctgaatcctcgcttgcaggtggaacatccctgcacagaaatgattgctgaygttaatctgccggccgcccagctacaggtgagaaaatgggcttggggccctgggacttctctgccctgggtcaggggtccatgtgctgctcccattagtc

SEQ ID NO: 252086 - DNA, 201 bp, Homo sapiens
gtgatctcagctcactgcaaccccacaggctcaagaaatcctcccacatcagcctcctgagaagctgggactacaggcatgcatcaccatgtctggctacttttttttttttttttttttttttagtatttttagtagacactgggtttcaccatgttggctaggctggtcttgaactcctgagttcaagcaatccaccca

SEQ ID NO: 252087 - DNA, 201 bp, Homo sapiens
caccacgcctggctaatttttgtatttttagtagagacagaatttcaccatgttgcccaggccggtttcgaactcctggcctcaggccatctgcctgcctyggcctcccaaagtgctgggattacaggcgtgagccaccacgcctggccttctctttacattttcatacatgtttgtccattgttaccatagaaatctgca

SEQ ID NO: 252088 - DNA, 201 bp, Homo sapiens
tatgcatatttttatgcgcccctgagtgaaatgccaaggatcttcctgtaatgtttaatttattcatttattgacttaggaaggggctgggagaaactctsttttcaagtctctttagctcctaaaatgtttactttttctttttctttttctttttttcttttcttttcttttttctttcttttttttttttttgagacg

SEQ ID NO: 252089 - DNA, 201 bp, Homo sapiens
atgcatatttttatgcgcccctgagtgaaatgccaaggatcttcctgtaatgtttaatttattcatttattgacttaggaaggggctgggagaaactctcktttcaagtctctttagctcctaaaatgtttactttttctttttctttttctttttttcttttcttttcttttttctttcttttttttttttttgagacgg

SEQ ID NO: 252090 - DNA, 201 bp, Homo sapiens
catttacactggggatatttgggggatgaatacttgttggttttggtttgaatctctaaaaatcaggatacagtgggttacttttttggaggaggtgaagrcaaggctgtgaacaccttcccagaaacttgaagaactgagaattttgtttatctgttttttttcttaaacctgttgttgaaatgttatttaatatatggt

SEQ ID NO: 252091 - DNA, 201 bp, Homo sapiens
ctccggtggcatgaaaggtaagcccctccctgcctatgttaccccaaagccttggggtcagcacccaggacagcaccctctgggtggtgatgctaatgtcstagtctgtgcccatcatcatcttagctgtgtctcccaacaaccctgaggagaaaatattgttcaggtgccccactaccccgttttaaagatgaggaactg

SEQ ID NO: 252092 - DNA, 201 bp, Homo sapiens
cccaccccaccaggatggtcacactgggccggctcccggtctggctcgatatctggcctctgatcaagttgaactccttgagacccacttatagcctaacrtatcaggggccgagggtttccttttgagccttgtctgcagaatcctatcatttactcaaagcaacagttgtttgaatgaacatcagtattccttaggcct

SEQ ID NO: 252093 - DNA, 201 bp, Homo sapiens
atctgccggccgcccagctacaggtgagaaaatgggcttggggccctgggacttctctgccctgggtcaggggtccatgtgctgctcccattagtccatcycgcccatctcttggccgactgtcccaggggaatgactggccaaagagcactttgagaaatctgtaaaagctatagttctccctgggaaaatatcttttat

SEQ ID NO: 252094 - DNA, 201 bp, Homo sapiens
gtcccttcttgggaaatgcatccaccttggattttttggggctagagcccagcctttaacctgtgcttgcttttgaagatacatgatcacggatatcatcrggaaggatgatggcttgggcgtggagaatctgaggggctcaggcatgattgctggggagtcctctctggcttacgaagagatcgtcaccattagcttggt

SEQ ID NO: 252095 - DNA, 201 bp, Homo sapiens
gctcctagcttacctctttgatctagctttctgccttccctccaaagtgaattttgtatatgccactgtagcctaggttgtaactcacaacaggtttacartccacatacgttgaaagttgactgatgcaatagcagactaacagattatttttcttccctgacatgaggttaagctccttgagagctgggaccagagaat

SEQ ID NO: 252096 - DNA, 201 bp, Homo sapiens
agttcaagaccagcctgggcaacatagcaagaccccatctccagaaaaagtaaaaaaaaaaaaaattaactggttatggtggtgcatacctgtagtcccarctactgaggaggctgaggcaggagggtggcttgagcctaggaggtcgaggttacagtgaactatggtggcaccactgcactccagcctgggtgatgagac

SEQ ID NO: 252097 - DNA, 201 bp, Homo sapiens
actactgaggaggctgaggcaggagggtggcttgagcctaggaggtcgaggttacagtgaactatggtggcaccactgcactccagcctgggtgatgagaycctgtctttaaaaggaaacaacaacccatcttacatttcctagtttgtgactttttttttcctcactaatgaatatctttctatgtaaaaaatacacttt

SEQ ID NO: 252098 - DNA, 201 bp, Homo sapiens
gacagagtttcaccatgttggctgggctggtctcaaactcttggccttgagtgatccacccgccctggcctcccaaagtgctgggattacaggtgtgatcygctgcgccctgcctgatcaattttaactgtaggaacgaattgcacatttacttactggtagctagttttcctcttttaaaaccttatgtccgttatcagc

SEQ ID NO: 252099 - DNA, 201 bp, Homo sapiens
ttgctttttaaaaaatagactttatttattagagcagttttagggtcacagcaaaatggagcggaaagaatagagagttcccacataccccaggccctcaygtgcacacagatgcccaagcttttttattttacttatatgagtgcactatgaatatgttcttaatgtagagagtcagtcaagtcagccatgtgttaagaa

SEQ ID NO: 252100 - DNA, 201 bp, Homo sapiens
gagacccatcagtggactccaaaagccatgcctatctttgggacaagcagccaggtttagaaccctagtccttggatttctggccccgtgtgctttttgcyacagtatgaagtctggctcattgtagagagtccctttgtgacttggccttacttgggtcttaaaaaacaaaccaactggcatcccttacagtttacatgc

SEQ ID NO: 252101 - DNA, 201 bp, Homo sapiens
cagctcttaacaggatgaagtaagtttgtccttagattccacccgggagagctagctgagaaagtgcagtaagtggaagaaaaagacaaccacagattagkgtgttttggtcccattttcattcaaagaaactttctctgtatgtgttgctatatgcatagaagaaagccagtttggacaccaaactctttaacagtgcaa

SEQ ID NO: 252102 - DNA, 201 bp, Homo sapiens
gaatgactggccaaagagcactttgagaaatctgtaaaagctatagttctccctgggaaaatatcttttatacaatttcaggacattcatagacctagagraatgtttcttaaccttgttatcattatcactccctgcaaggatcctttggacacattttatatcctaatccctgtcttgtgaaattttaatatcacaaat

SEQ ID NO: 252103 - DNA, 201 bp, Homo sapiens
cccactagcttctttaggagagaaatcacttgattatgtaaatcctaaaatgtctctccttttctccttacagattttctgaatggtcttgcttctttgtytatcttgtctgattttctcctgtctgaccttttcctggttaaaaatctgggggaaaatgacggactccaagccgatcaccaagagtaaatcagaagcaaa

SEQ ID NO: 252104 - DNA, 201 bp, Homo sapiens
gcccccactcatcagactggtgattaaaaaacttactcactggctgggcacggtggctcatgcctgtaatcccagcactcgggaggccaagactggaggaycacttaagcccaggaatttgaggccagcctgggcaacatgtgagaccctgtctctacaaaaaatagacacacaaaaaaaagagccacgatgttggcgcac

SEQ ID NO: 252105 - DNA, 201 bp, Homo sapiens
tcctttacatttaaaccttatcagtagttccctaatgggttgtatttcacaccgaagactaaattttaaggagtgtgtcctgctgtgaaccacccaccacyctgaggcctgtgacagcagccccatgtccccagctcagccaagtcctcccatacttgtgatagtttctgcagagctgagaagcccacattgacagaggga

SEQ ID NO: 252106 - DNA, 201 bp, Homo sapiens
aggctggtctcaaactcctgacctcagatgatctgcccacctcaacttcccaaagtgctaggattacaggcatgagccactgcacctggcctgtaccacaytttctttatccaatcatctgttgatggacatttaggttgattccaaatcttggctattgtgaatagtgctacaataaacatgggagtacagatactcttc

SEQ ID NO: 252107 - DNA, 201 bp, Homo sapiens
cttctgtctgtttgtataattttagggggctcaatcttttttttttttctttgagatggagtctcgccctttcacccaggctggagtgcagtggtgcgatsttggctcactgcaacctccacctcccaggttcaagcgattctcctgcctcagcctcccgagtagctgggattataggtgcctgccaccacacccagctaa

SEQ ID NO: 252108 - DNA, 201 bp, Homo sapiens
tgtagagatcgggtctcattatgttgcccaggctggtctccaactcctaggctcaagcgatctgcctgcttcagcctcccaaagttctgggattacaggcmtggacactggcatttttgaggagctcaggcagaatgtccctcattggatttctctgattgtttcttcctggttcgattcctgctacacattttggcagaa

SEQ ID NO: 252109 - DNA, 201 bp, Homo sapiens
ggatgatggctcgttcccaggttcctaggaggatggaggaccaggtatggtaacagcccaggcacttgggtcgctccatctctcacttctacatacctctycccaaatccttcatcccttagttcaggagccctaatcccagtgagaggtgccatgtccacccactcttaccaaaattgtacttagagggagacgggccgt

SEQ ID NO: 252110 - DNA, 201 bp, Homo sapiens
tattgctgttagtgagagtccagtagggggatcaactgtcctcgttttcctggcaccggtttctcaggttgaaggacttctcagtgctaaaatggggaccrccccaaggaaactgggacaagtcactcacccgtgagaccagcgggttaactctcatacccagcttccagacccacagctgacttttcatggcctatggat

SEQ ID NO: 252111 - DNA, 201 bp, Homo sapiens
gtccttccccgttacctgctgacagcacacaggatgctgcaagacatgaaagcttactcggccaggcacagtggctcatgcctgtaatcccagcactttgrgaggccaaggcgggcagatcacttgaagccaggagttcaagaccagcctggccaacatgacgaaaccccgtgtctactaaaaatactgaaattagccggg

SEQ ID NO: 252112 - DNA, 201 bp, Homo sapiens
gcagtgggattacaggcatgaaccaccatgcctggctggttctttctctactaatcattaactattatagtcaataattataacaataataactaatcacrttcattgtagttaacatttattgatcagtgaccatgtgcattacatggattgtctcatttcaattctcgaacaccctcatgaagtcagggctatttcccc

SEQ ID NO: 252113 - DNA, 201 bp, Homo sapiens
ctcatgaagtcagggctatttccccattttccatatgaggaaactgaggcccagagttctcaagtcacttggccaagattagccaggcagtaaaccctggygctgattcaatgcactggctgtgtcagtcagagccctctcttaactcttctttttttttttttttggagacagagtcttgctctgtcgcccagcctggag

SEQ ID NO: 252114 - DNA, 201 bp, Homo sapiens
cagcaactctgttgatgtatgcatgaatttggaaaatgatccatgtgcctttcccttcaaggaacatggtggtggctttgaaggaactgtccatccgaggygactttaggactaccgtggaatacctcattaacctcctggagaccgagagcttccagaacaacgacatcgacaccgggtggttggactacctcattgctg

SEQ ID NO: 252115 - DNA, 201 bp, Homo sapiens
ggcaacagagcaagaccctgtctcttaaaaaaaaagtataagtaatcccctataagtagcggatattcaggctgtttctctctgttttttttttttttttkggggggggctattatcaacagcacagtgaggagtacccctgtagctgaatctctgcctccatcctttattttcttaggatatgtttacctggtccataaa

SEQ ID NO: 252116 - DNA, 201 bp, Homo sapiens
acattgcccaatgtcccagggttaggagtagaataatcacccccagttgagaactgctgcaagaggcaaaggaactatcaaaaagaaaataaaaggataawcttttttttttttgagacagagtcttgctctgtcatccaggctatcacccaggctagagtgcagtggtatgatcacagctcactgcagcctggacttcct

SEQ ID NO: 252117 - DNA, 201 bp, Homo sapiens
tcagggttgaaaactcgtgcctagcttggggtcagcagactgctattataaacggccagacagtaaatatttttggctttgtggccatgtggtctctgttrtaactactcaactctgctgtttcctgcaccagaagccatagttatgtaattgaacaggcctggctgtgtttcaatcagacattatttatagatggggaaa

SEQ ID NO: 252118 - DNA, 201 bp, Homo sapiens; identical to SEQ ID NO: 49682

SEQ ID NO: 252119 - DNA, 201 bp, Homo sapiens
cccgtcacctggaagttcagatcctcgctgaccagtatgggaatgctgtgtctctgtttggtcgcgactgctccatccagcggcggcatcagaagatcgtkgaggaagcaccggccaccatcgccccgctggccatattcgagttcatggagcaggtacacttctcagagcccagggggcagcttcagagagagccgtctc

SEQ ID NO: 252120 - DNA, 201 bp, Homo sapiens
caggatctgttccgagcctccccagcttctggtgctgctggcagtccctggtgatttttggcttgtggatgccttgccccagtctctgtctctgttttttkttgttgttgttgttgttgttgttttttcaaacggagcctcactctgtcacccaggctggagtgcagtggctcaaccttggctcactgcaacctccatctc

SEQ ID NO: 252121 - DNA, 201 bp, Homo sapiens
gcttctggtgctgctggcagtccctggtgatttttggcttgtggatgccttgccccagtctctgtctctgtttttttttgttgttgttgttgttgttgttktttcaaacggagcctcactctgtcacccaggctggagtgcagtggctcaaccttggctcactgcaacctccatctcccaggttcaagcaattcttctgtc

SEQ ID NO: 252122 - DNA, 201 bp, Homo sapiens
acctggttggtggggattcagagctgaacgggacatgactcccagctctgtggcctgcgaggtgtgtgaccaggtgcctgctgcctgtgcatctgggctcyggcatccacccagttagtgcggcagtgacctactaagctcctccgtaccaggcgctgtgctgggtgttgggatagcattctgggtgtgactcgtggagct

SEQ ID NO: 252123 - DNA, 201 bp, Homo sapiens
acggccttagacaatacaaacagcccatcctgatctatatcccgccctatgcggagctccggggaggctcctgggtggtcatagatgccaccatcaaccckctgtgcatagaaatgtatgcagacaaagagagcaggtgggtgtgttgcccttagcctggcttagccttttcttgttctcccagccttgagagcccatgac

SEQ ID NO: 252124 - DNA, 201 bp, Homo sapiens
tcagcacacatttcctgtgctgggttaatgaggcagggcctgcccacccattccctgcagcctcacataaatgcttgtgagacagactgggagatcgagtracttcacttggtgagtgtagttagaagaccgcccttggccctgggctgtggggacccacatggagaagctatgatcagattgtgtaggggaaaaccctca

SEQ ID NO: 252125 - DNA, 201 bp, Homo sapiens
cagaaataaattgggggagatgtgtgattctctctcactctctgttttccctcctttctggtccagatcatgtttcactccttcggcaacaagcaagggcsccagcacgggatgctgatcaatactccctacgtcaccaaggatctgctccaggccaagcgattccaggcccagaccctgggaaccacctacatctatgac

SEQ ID NO: 252126 - DNA, 201 bp, Homo sapiens
tcaactctgaaagtgctgagattataggcgtgagccactgtgcctggtaagaaatgtttttagtgtttggttatgcttttgaacggtagtagaatcacagyccctgctctggtttctttcataagccgaaggcaggatcccatatgtgaaatttttccaagagaccgttatggattttgctcctgaaaagcctttgtaaga

SEQ ID NO: 252127 - DNA, 201 bp, Homo sapiens
tgtgagctgggcctttgctgagacagaatagtgggcccgggtctgtttccaggggctctgaggctggttttgttctctgtctctgcaccacgtgtagattwctggcatcttccctggtttactactggagtccctggggcttattccggttgctctcctctgtcagaagtgcctagttgccctttgtgggccatccaaggt

SEQ ID NO: 252128 - DNA, 201 bp, Homo sapiens
atgctttcacaatcatcctcctttgcccctaatgcctcttggctacctttggggacctagctgcccccaacttgattttaaatgtcacatatgcacaatgyagaaaatttcaaaatttcaagcgagcataaaaaatcaggaaaacaaatccatcatgtgctaatgcctagaggtaatcctggtaaacattttagcaaatct

SEQ ID NO: 252129 - DNA, 201 bp, Homo sapiens
cattttatttcattttgatcaatttaaatagctgtgtgtggttaggggtcaccgtatcagacagggcagatctaaagtgttccattgcaaggttgttggcytgctaattttgttctaatttttgttgttattacaaataatgctgcaatacacattcctctatttcttgctgccttgtgtcataaactgtgaattttatag

SEQ ID NO: 252130 - DNA, 201 bp, Homo sapiens
agcaatctttgttaaccatgttatttccagataggaatccaagctcaataaagtggcctgaagaataggcttttgcctctactgtggtttggctccaaatygggttgccattggtcaaaacataacttccatttggtcccagcaggttcctggactcttccctgctgtggggggtgggtccctcgccactctccagaattc

SEQ ID NO: 252131 - DNA, 201 bp, Homo sapiens
gtttcaaaatgactttcccttcagggttaaaacaaatgcaactttcttatcatgttggctcaggtacactggaccccttctgattggttgctattgttttytggaaaactggtcagtttcaaagttcagactgattgcgaggcagttggccaggagtgatccgtcgttttggtttggtctgtaggggctaagcacaggagc

SEQ ID NO: 252132 - DNA, 201 bp, Homo sapiens
gctgcaatacacattcctctatttcttgctgccttgtgtcataaactgtgaattttataggttgaaggccctttagggtgtgtgttttctgagagaaaacygaactgaagtaccagatggggcaggcgctcttcctggagggagatgtagtgctggggccagggcttggctgtgtctctctcacgtgtcccaaagctcttg

SEQ ID NO: 252133 - DNA, 201 bp, Homo sapiens
cttcaaggggctgtctccttcctgcagtgcccagagcatcccagagttctcacaactgtgttcctgttttgggagttcgcactgggttccctctgaactgraacactctctttctcccaacccctgaacccagacctcccaccagggccagcttcacaggcatgccctgtgcttcaagggaccccgtgcttgttttgacgc

SEQ ID NO: 252134 - DNA, 201 bp, Homo sapiens
cagtctgcatttggtgaaggaactgatagtcaccatttacagttccctgaaaagacctctggaacccccttggcctctttctgtttcttcacagtgtgccrtccgcctggccaagaccgtgggctatgtgagtgcagggacagtggaatacctctatagtcaggatggcagcttccacttcttggagctgaatcctcgctt

SEQ ID NO: 252135 - DNA, 201 bp, Homo sapiens
ccacctacatgaaggaagaggttgacaggtgcgtgggggtgcgagtcccactgtgggctgggcatgcacagctctctgtcctaggcatggaaaacacagcrctggcctgtgtgcaggtccaagggtcttagagaaggtgcctttctggtaaattctgggggtgtgcagagaagttaatctcttggttggaattctgtgcaa

SEQ ID NO: 252136 - DNA, 201 bp, Homo sapiens
tcacttcctcaaagggccttccctgtccctttctcacatttaaaaaatctaccccccaattaccttcagtatctttatcaatcactctgattagttgtctytgcaacatttaattatttcttgagattatgtctgtttttgtttgtttgtttgtttgtttgttttgacacagtttcactctgtcacccaggctggagtgct

SEQ ID NO: 252137 - DNA, 201 bp, Homo sapiens
tcccactgtgggctgggcatgcacagctctctgtcctaggcatggaaaacacagcactggcctgtgtgcaggtccaagggtcttagagaaggtgcctttcyggtaaattctgggggtgtgcagagaagttaatctcttggttggaattctgtgcaactggcagatatttaggggaggatcctaggaggcccttttctagta

SEQ ID NO: 252138 - DNA, 201 bp, Homo sapiens
atgtgatgaatgagtgtgggaatggatgaacgaatggatgaatgaatggatgaatgaatgaatggattaattaattaattaacaggtgaataggcattttrtagttgttgctctttagcagcagtaaatttttgttttcataaaattctttctccttgtatcttgtgactttggagactagttctggggtgaaactccaat

SEQ ID NO: 252139 - DNA, 201 bp, Homo sapiens
ggggaggatcctaggaggcccttttctagtaacctggttggtggggattcagagctgaacgggacatgactcccagctctgtggcctgcgaggtgtgtgaycaggtgcctgctgcctgtgcatctgggctccggcatccacccagttagtgcggcagtgacctactaagctcctccgtaccaggcgctgtgctgggtgttg

SEQ ID NO: 252140 - DNA, 201 bp, Homo sapiens
aaatttttcttctgtctttgataggatcatgcaaactcagcctttctctcctttctcccagctggcaagggctggctgagaatatgaatccaacaacctcrttaagctctctcctcccatctcctcccctttgggttgatctcagggcagggattagaacttggcctttccttggacttggaaacagtccctgaggtttgg

SEQ ID NO: 252141 - DNA, 201 bp, Homo sapiens
gcatatgctaccacgcccagctatttttttttttttattttttgtagaggcagggtctcactgtgttgcccaagcttgtcttgaactcctggcctcaagcsatcctcccacctcggcctcccaaagaaagcatcacagccttggccaggcacagtggctcacgtctgtaatcccagcactttgggaggctgaggcgggcgg

SEQ ID NO: 252142 - DNA, 201 bp, Homo sapiens
tggcctttccttggacttggaaacagtccctgaggtttggaaatcccatgcaacacttagaaacagagctaatgagaacattacatgatgtggcaaaatcrctgcttacatgctctgaaatgagcacggttacaagaacctcctgttctgtgtgatcccattttgttggacaaacagcatgtggttagtagtgcatagtgg

SEQ ID NO: 252143 - DNA, 201 bp, Homo sapiens
atgtggctccacggcccaagtgctctggctggtgcaggtgcactcgtgacctccactggttcagtgagacaggtggactcaaggctggtagcgcttctccygcctccacctgcagacagagctcgtcgcagcagccaccgtgatggtgcagaaacacaaggaagccgcgccctgctttactcagatccctctctgtggctc

SEQ ID NO: 252144 - DNA, 201 bp, Homo sapiens
tagtaattatttatcctattctgctgctgaaatattaatatgataatgtggaacagaaagttttaccttcctaaaaacaataatttccaagttccaaaacrtatcaggccctgggaatttcagataagggattatggactatatataacatgcttagaatagttcctggcatatagtaagcacaaaaaatgcttctgctta

SEQ ID NO: 252145 - DNA, 201 bp, Homo sapiens
attatggactatatataacatgcttagaatagttcctggcatatagtaagcacaaaaaatgcttctgcttagtaaatgtgcctaataaatgtgtgtgtgtrtatgcgtatgtgtttgtatgtgtgtgtcttagagggactgtaaagagtgtctccaaatagtaaataatcattttatgtggtatgattatgagtgatttaa

SEQ ID NO: 252146 - DNA, 201 bp, Homo sapiens
atagtaaataatcattttatgtggtatgattatgagtgatttaaattttcttctgcattttctaactttctgctctaaatgtcattttataatgcattttracaatgtataataataaaacagtataaaaatattgggagaaagagtaaaccaatcatctcacttcctagataggaagctgaagcccagagacattccagg

SEQ ID NO: 252147 - DNA, 201 bp, Homo sapiens
gtgctgatcagaggtattattgacaagcaccacagactgagtcagagacttggctttcttttttaggataatcacagccctgtccctatcatcacacccaytgaccccattgacagagaaattgaattcctcccatccagagctccctacgacccccggtggatgcttgcaggaaggcctcacccaagtaagttctaaagt

SEQ ID NO: 252148 - DNA, 201 bp, Homo sapiens
ttacgtggcagccaacagtggcgcccgtattggcatggcagaggagatcaaacacatgttccacgtggcttgggtggacccagaagacccccacaaagtaygtcgtgaaactggcggggcagggtgattctgctcagctactactgtattttcagtgggagtgctagcacctgcaagaggtgaaaaaaatctcacttatgt

SEQ ID NO: 252149 - DNA, 201 bp, Homo sapiens
ctgcagaccctgccaacctggattctgaggccaaggtgagggggccgggagctgtggctgctggtttagccagcggtactgtcgagagtgggtcctgggcrtgggggtcccatccctgccctgccaacttaggtggagaagcaggggacccagtgcagtccctggccctggggggctcagtgcctgtttctctgacacttt

SEQ ID NO: 252150 - DNA, 201 bp, Homo sapiens
caccgtgcccggccaagtcatctcttaaaaggggagaaaagcctgcagggctaggggtggggatgggtgtgggtggaggggtagagggtgggcaggaaacrgagtgttctctgctgggagaacagcaccccagcactgtgcgtcatgcacagtaggtatttgtagaatgaatgagtagacgaatgagcacatttagtctgt

SEQ ID NO: 252151 - DNA, 201 bp, Homo sapiens
ctaggggtggggatgggtgtgggtggaggggtagagggtgggcaggaaacagagtgttctctgctgggagaacagcaccccagcactgtgcgtcatgcacrgtaggtatttgtagaatgaatgagtagacgaatgagcacatttagtctgtgttgccctctagggagctttttatttttccatgtgtttacctaagactga

SEQ ID NO: 252152 - DNA, 201 bp, Homo sapiens
ctgagagaatgtccgtgtgtttctgccttgtcaggtttacgtgcggaggggctacatcgcctatgagttaaacagcctgcagcaccggcagctcccggacrgcacctgcgtggtagaattccagttcatgctgccgtcctcccacccaaaccggtatggagtgggacacacccagggacggcctgtgtttctgttcttcct

SEQ ID NO: 252153 - DNA, 201 bp, Homo sapiens
gcttgagcccacccacccagctcctgagatcttatggggaagctgcttatcactagcttcaggtgttttctatctatcaggagattgcctttccctggagscagctgtgaccaatattaattttagagagacactttagcaactgcctaactatcacctgatggttgccttcctctcctgccctgctcatgtctgcttaac

SEQ ID NO: 252154 - DNA, 201 bp, Homo sapiens
tctagattatatgtatagtctttttattttgaagtcatctaggacccaccgtaagttataagatactacagagaatttccaagtacccttcacccagcttyccctatggtacttacataaccgtagtacattatcgaaaccaggaaactgacattggcacaatattgttaactcagtacagaccttattttgaatttcacc

SEQ ID NO: 252155 - DNA, 201 bp, Homo sapiens
ccccactatgaggtaatgtgcattttctccttgtaactgaggagtgcagagttcaggtggggtccacacccttcccaacctgtgcccaccttgatcaagcygtttgctgatgccaaagcttcaagggtggctatgcacaaaaggagaagacacgagccttctcagaagtttccttccttccttctttccttctttccttcc

SEQ ID NO: 252156 - DNA, 201 bp, Homo sapiens
caggcatggtggctcacacctgtaattccagcactttgggaggatgaggcaggaggatcgcttgaggccaggagttcaagaccagcctgggcaatatagtragacctcatctctaaaaaaaaaattaagaatttgccagacattgtggtgcatacctatagttctagctacttgagaggctgaagcaggagggtcacttga

SEQ ID NO: 252157 - DNA, 201 bp, Homo sapiens
catgtgacatgctttgcttcccccacctgcattttcattgaggactgggcagaaataaattgggggagatgtgtgattctctctcactctctgttttcccycctttctggtccagatcatgtttcactccttcggcaacaagcaagggccccagcacgggatgctgatcaatactccctacgtcaccaaggatctgctcca

SEQ ID NO: 252158 - DNA, 201 bp, Homo sapiens
cacacctgtaattccagcactttgggaggatgaggcaggaggatcgcttgaggccaggagttcaagaccagcctgggcaatatagtgagacctcatctctaaaaaaaaaattaagaatttgccagacattgtggtgcatacctatagttctagctacttgagaggctgaagcaggagggtcacttgagcccagaagtttgt

SEQ ID NO: 252159 - DNA, 201 bp, Homo sapiens
ttttaaaaattgtggttaaatacacataacaaaatttaccatcttagccatttttaaatgttctcttgagcagtattaaatccattcacattgttgcacarccatcaccatcatccatctccagcacttgcaaaactgaaacttgacactcgttaaatggtaactcctgagtccctcctccctccagcccctggcaaccat

SEQ ID NO: 252160 - DNA, 201 bp, Homo sapiens
cagaacttcagtttatggctgttattaatacggtatttacatgagatgtgttaatgtgtcattgacatgttactaacatgttattaacatccatccctacratgttcacattaagaaaaaaaaaacagtggctttcagtgcagggaactggattcgtagcctcactaaagtattttttaagggatttaaatacctgtacct

SEQ ID NO: 252161 - DNA, 201 bp, Homo sapiens
gtttcaccatgttggccagtctggtcttgaactcctgacctcaagtgatccacccgccttggcctcccaaagtgctggaattacaggcatgagccatcacrtctagcctacttaactatctttcatagggaaaatgaaaccaaaatgttgagtgaatttcctgccctcgtgtcttcatggcatagaaacctaacattgtag

SEQ ID NO: 252162 - DNA, 201 bp, Homo sapiens
tccactgatggacacttggattgtttctacctgttggctactgtgaataaggcagctatgaacatgagtgtacgattttcttagtttttacctattgtccrggatcccatccaggttagcacattgcatatagttgtcaggtctctttcaaccgccctttaaaaaattgtgctcacctccacccacgtgcaaacacacacc

SEQ ID NO: 252163 - DNA, 201 bp, Homo sapiens
tgaggtgggagaatcacttaagcccaggaggcagaggttgcagtgagctgagattgccccactgcatcccagcctgggtgacacaggcagaccctgtctcaaaaaaaaaaaaaaaaaaaaaatgaatgaggaggctgcaccagactcctgagatgtgacctgtggccctaaagctcactgacatacagttagttattttgt

SEQ ID NO: 252164 - DNA, 201 bp, Homo sapiens
ggatcccatccaggttagcacattgcatatagttgtcaggtctctttcaaccgccctttaaaaaattgtgctcacctccacccacgtgcaaacacacaccrtacctcacaaagatgatctcactgattgtcttgttgctttattatttggcctccaggagactggaaacaccgtgagaacagggccttttggctttcttgc

SEQ ID NO: 252165 - DNA, 201 bp, Homo sapiens
tccttagggagaccagggcaaggggtctgagagcccacaggccagggcattccccatcatttttacagagagagctgtggaatagttaagagcacaacacrctggtggctgaggctggaggctggtgtgctggcttctccacctagccatcatgtgacttggggccaagttctgtgattttctgtgcctcagtttcctctg

SEQ ID NO: 252166 - DNA, 201 bp, Homo sapiens
gttgagaatttagaattttagcacccaggggcaatgcgggtggttctgctggcacctcctgagacactggcacttcctcaaggaacattcccagccccagratcaggggcttctgacagagaagactcatgtgtgcttgttgtttctaatgaactgtagtgagaatcccacatcaaagaatcttcagggagtcaagcctta

SEQ ID NO: 252167 - DNA, 201 bp, Homo sapiens
tcaggaccaccagggggtgcaccagagtgtctgtcatgtgaccctgagctcaggctcttgggggcacctccaatttagattcctcttaatttgtcaagctstgtcattaccgatgagtccctgaggtcaaggactactttcgatgtccactgttgtgatcctggggcttagcacagtgctcggagcatagtgggtgctcag

SEQ ID NO: 252168 - DNA, 201 bp, Homo sapiens
gtttgctggttacccattgactcttttgcacacatacaggcagggtagtaatacctcttccctggtgttcacaggtcaacacccaagcagttttgggtgtrggccatggaaggtggtgtcaaaagacaaaatcacagcaaatttgatttaaaactcgaattggcttttatttacaattctaggatcatgcagcacctcatt

SEQ ID NO: 252169 - DNA, 201 bp, Homo sapiens
taaaataattagtacatctgtccagtaaaaaaaaaatttaaaaatatcacatggtctcttttctccagagtattctattaattgtatttgttttctttttwaaaaaaattataattattatgggtacataataggtgtacatgtttatgggggtacatgtgatcttttggtataggcataccgtctaataatcaaatcagg

SEQ ID NO: 252170 - DNA, 201 bp, Homo sapiens
ccccatctctactaaaaaaaaaaaaaaatagaaaaattagctgggcgtggtggcaggtgcctgtaatcccagctcttcaggaggctgagttaggagaatcrcttgaacctgggaggcagaggttgcagtgagccaagaccacgccactgcactccagcctgggcgacagagtgagactctgactcgaaaaaaaaattatta

SEQ ID NO: 252171 - DNA, 201 bp, Homo sapiens
tatgggggtacatgtgatcttttggtataggcataccgtctaataatcaaatcagggtgattggggtatctattacctcaagcatttttcatttctttgcrctaggaacattccagttctactcttttggttagtttaaaatgtacagtcgattttaattgactgtagagtcaccctgttgtgctatcaatactatatctt

SEQ ID NO: 252172 - DNA, 201 bp, Homo sapiens
tgttcattgacctgggttttccctctgcaataccagtaagtaaaattgagcttctagtaagtctgagaggaagggcttaatgcatgagacagcaactaccrccatgcttgaactgtttcatcaaaaagcacaacaatggatgtttgtataaaggtggtgttgtgcttggaggtggatattaggttggtgcaaaagtaatcg

SEQ ID NO: 252173 - DNA, 201 bp, Homo sapiens
aatcccagctcttcaggaggctgagttaggagaatcgcttgaacctgggaggcagaggttgcagtgagccaagaccacgccactgcactccagcctgggcracagagtgagactctgactcgaaaaaaaaattattattattttttcttgataagttgctaaataatctgtatcctctggcaaatcttctaaccgtttgag

SEQ ID NO: 252174 - DNA, 201 bp, Homo sapiens
gcgcaggcgtgtagaccagtgcggagggtcagaagatctaccccgtgacagcagaggtcattattgagtaagaaatgagaaaatggtcggtcctctgttgkttttattttatttattttattttttcagacaaggtctcactctgtcacccagactcactgcagcctcgacctcctgggctcaagagatcctaccacctca

SEQ ID NO: 252175 - DNA, 201 bp, Homo sapiens
ctttgtaggtgtggtctcatgccatcttcaaaataccactgtgggggcactaagtggagagtgttgtacccatttcacaaaccactttaatggaaaaaaaraaaaacctcacacaaatttggaattgtcccagcaagtccaggacgtggggtccccctatttataataatatggacatactttgttgggggactacattgt

SEQ ID NO: 252176 - DNA, 201 bp, Homo sapiens
ggctgtgaacaccttcccagaaacttgaagaactgagaattttgtttatctgttttttttcttaaacctgttgttgaaatgttatttaatatatggtcagrgcatagctatccactgctgtcaggcatggctgcttaaacaggggcccagggtgtttatgttgtggccaagtacttggcacccccgggaagtgtggccctg

SEQ ID NO: 252177 - DNA, 201 bp, Homo sapiens
attctctctcactctctgttttccctcctttctggtccagatcatgtttcactccttcggcaacaagcaagggccccagcacgggatgctgatcaatactscctacgtcaccaaggatctgctccaggccaagcgattccaggcccagaccctgggaaccacctacatctatgacttcccggaaatgttcaggcaggcaag

SEQ ID NO: 252178 - DNA, 201 bp, Homo sapiens
caaatgataacatgaaaagaaagttcctagaacactgtctggcactaagcaagtatcctataaacatcagctcatcatgtgaccttatgtttgatcccccmcaccatgctggctttctgatgcacagagagggggagtcagggtcttcctatgtagggaaactgagtattcccctgtggtcagggggccattccactctgg

SEQ ID NO: 252179 - DNA, 201 bp, Homo sapiens
acacacaaatttaattaatgtgtacactgggagaaccgcagagtgattacccagaagggaatttactggccagcatttacattatttttggttggtttgtkggctatgaaagtaggctacctttattattactgcgatgacttctaggtagtgttttggttctttgcatttattacattacttgaagaagcattcattcat

SEQ ID NO: 252180 - DNA, 201 bp, Homo sapiens
cctcagtctctcgagtagctgggactacaggtgtgcaccaccatgcccggctaatttttgtattattagtagagacagggtgtcaccatgttggccaggcyggcctcaaactcctgacctcaagcgcctgcctcagcctcccaaagtgctggtattacaggcatgagctaccaggcccggcctcattcgtttattctaact

SEQ ID NO: 252181 - DNA, 201 bp, Homo sapiens
cgtccggaaggcggggccctcctggggcggggtcggtgtgggggcggggcctgggtggggcctaggcgggcgcgatggcccgggactctggcgcgcagggygcatttcgggatggagcaagcgcagcgcgaagttgggcgcccgccggctgcagcagaaccccgcccgcggcgctctaggactgcatctcggcctccgggt

SEQ ID NO: 252182 - DNA, 201 bp, Homo sapiens
tggcccgggactctggcgcgcagggtgcatttcgggatggagcaagcgcagcgcgaagttgggcgcccgccggctgcagcagaaccccgcccgcggcgctstaggactgcatctcggcctccgggtcgcgacctggctgtcctgctgggtcccgggcctcgggtcggcttcaggcggttaaggggtgcatgctctgcaccc

SEQ ID NO: 252183 - DNA, 201 bp, Homo sapiens
tgttttagagtattttaaagccagcccccatcatgtcttttcatccataaatacgtaagggtagatctttaacagataatgactctcaccctcttcccccrgtttttaaaaacataactgaaatactaatattacacccaacagaatcagcaatatcattgaaacccagtgtggtttaacagttatctcaaaatacccttt

SEQ ID NO: 252184 - DNA, 201 bp, Homo sapiens
ggttgcagtgagccgagatggtgccacttcactccagcctgggtgacagagctagactctgtctcaaaaaaaaaaaaaaaaccaaccaaccaaacaaaaamcctcagcattatacatgtttgtctcttatttgagaggaatataagaggccatatgtgtaatgcatgttttaaaagtccagttaatagaggggcttccatt

SEQ ID NO: 252185 - DNA, 201 bp, Homo sapiens
agatatggaatcaacctaagtgtccaccaacagatgactagatacagaaaatttggtgtatatatatatataattttttatggctcagtagtattcttttktgtgtatgtgtgtgtgtggtgtgtgtgtgtgtgtatacctacatgtatacatgggtgttcctcttacaaaattaatagcttttttcttattgaaaataac

SEQ ID NO: 252186 - DNA, 201 bp, Homo sapiens
ggaatcaacctaagtgtccaccaacagatgactagatacagaaaatttggtgtatatatatatataattttttatggctcagtagtattcttttgtgtgtrtgtgtgtgtgtggtgtgtgtgtgtgtgtatacctacatgtatacatgggtgttcctcttacaaaattaatagcttttttcttattgaaaataacacatca

SEQ ID NO: 252187 - DNA, 201 bp, Homo sapiens
ctgccctctggtgggagggttccccaccatcatcatccacccacccacaaattggtgatttgggaaaccagaggacagtgtagttcaggccattctcggargttaggagttctatgggttggaatgttgttcagccaaagaaagaaagaatactgattcatgctcccacgtggatgaacctattgtgctaagggaaataag

SEQ ID NO: 252188 - DNA, 201 bp, Homo sapiens
ttccccgttccccccggggctccaggctgacctttactgtccaggcagaagactggaaaacttctccctggggaatctggccagcgagagagaaagacacraagatactgactcaggggatccccaacgcactcctacctcaccctacattgagctcagggtcaaccaggtccaccacagtctcagaaattctgttctcac

SEQ ID NO: 252189 - DNA, 201 bp, Homo sapiens
attcctctttttttttttttttttttttgagacctcccgaatagttgggattacaggtgtacaccaccattcccagctatttttttgtatttttttagtgragatgggttttcaccatgttggccaggctggtcttgaactcctgacctcaggtgatctgcctgcctcggcctcccagagtgctgggattacaggcatgag

SEQ ID NO: 252190 - DNA, 201 bp, Homo sapiens
caaccaaaacttcaccagccagagggaaacctctgttctcattgttctacttcttccttctagtgtgtttttctcctctggagtgaagttttactggctaktcttttaagcatctcctgtactctctcccaaattagaaaaatctagaggtggtcttccatacatgtccatgttagcagtgagcttggttttaaccctggt

SEQ ID NO: 252191 - DNA, 201 bp, Homo sapiens
ggctggagcgcagtggcacaatcttggctcactacaacatccgcctcctgggttcaagtgattctcctgcttcagcctctcaagtagctgggattacagaygcacaccaccatgcccggctaatttttgtatttttagtagagacggggtttcaccatgttggccaagctggtctctaactcctgaccttaagtgatcttc

SEQ ID NO: 252192 - DNA, 201 bp, Homo sapiens
cgttcatgaagaaggaagtagattagtggccgccaggggctgcagtgcagggaaaatggagagtgagcgctaatgactacaaggtttctttttagagtgaygaaaatgctttaaaattagatggtggtgatagttgcacaactttatgaatacactaccaaccactgaatgtacactttaaagggagatggtggaatatga

SEQ ID NO: 252193 - DNA, 201 bp, Homo sapiens
cactgcagccttgacttcctgggctcaagtgatccttctaccttagcctcctgagtagctaggactacaggcaggtgccaccatgcctagctaatttaaatttttttttttttttttttgagatggagtctgaccctgttgcccagtctggagtgcagtggtgcaatctcggctcactgcaacctccacctcctgggttca

SEQ ID NO: 252194 - DNA, 201 bp, Homo sapiens
aagcctgcaattgtaatgaccatgatcttttacaaacttacgcagtcttccttccccttgaagtcaagctgtgtgtcctcttagcaccgccccctttaccsccacccccatccaaagaaacacgggcttgagttggctgctggggagatgatgcccgccttggaaactctagctggccttggcgggaggggaggaaggagg

SEQ ID NO: 252195 - DNA, 201 bp, Homo sapiens
gcaatggggaggggctgtaaatacagatgaagcttcgctccctcacccactgcttacctcccactgttcagccagttcctaacaggccacggaccagtgcycgtttgggtactggtttggggaccctttctttaggggactgctgtgtgtcatctgaatcatcagcagtcagacctgtcttgttttcccatccagatagcc

SEQ ID NO: 252196 - DNA, 201 bp, Homo sapiens
actgcagccttgacttcctgggctcaagtgatccttctaccttagcctcctgagtagctaggactacaggcaggtgccaccatgcctagctaatttaaatttttttttttttttttttgagatggagtctgaccctgttgcccagtctggagtgcagtggtgcaatctcggctcactgcaacctccacctcctgggttcaa

SEQ ID NO: 252197 - DNA, 201 bp, Homo sapiens
ctcccaaagtgctgggattacaggcctgagccaccatgtctggcctataaatgtattaagttttgtgaagtgctgacaaatagtaaatacttgatagatayattagattgagacaatgggatgaaatagctttatgtatgataaaacactgcaaaaattgttattgtggcttttgggacaattgcaaaggaaagtggatga

SEQ ID NO: 252198 - DNA, 201 bp, Homo sapiens
ctcacaagattgcatacacttgttgtttaggactatggagatgtgtaattgctagaaaaaatcagcatcagtttcctctggtgtggagggacagagcaggwaacctgttttgttgttaaacatttaaaaaattgttttcagttttctaaagaaattttgtgggctgggcgtggtggctcatgcctgtattttggaaggccg

SEQ ID NO: 252199 - DNA, 201 bp, Homo sapiens
ggagagagattttagtgtggattccccacaaactgcaagtttcacagccaagggctaggaagggagtcctcctaaaacacatagactgctaaccttaagcycatcctttaagcttcagagaaacatctaggaaaaatgaaccattaataaattaactgaattttctagcaagttttctgtgctgaccataaatattaaagc

SEQ ID NO: 252200 - DNA, 201 bp, Homo sapiens
gtagaaaagtacatgaaagatattaataccatgtaacaagtcggaacgattagaatgtgtggacttcttccctgatcataaaactctcacccttgttatargttttttagtattattcaggttcctaaacaatgggcatgtaaagtaaaaattaacttaggattaaaaatctaaacatccaccttgggacaggtagaagaa

SEQ ID NO: 252201 - DNA, 201 bp, Homo sapiens
ctgctaaccttaagcccatcctttaagcttcagagaaacatctaggaaaaatgaaccattaataaattaactgaattttctagcaagttttctgtgctgamcataaatattaaagccctgtcctgtattgtgtaagtatgttttaaaatcacatttgtatcagagtcttttagcatcttggtctgttttgttgtgatttgg

SEQ ID NO: 252202 - DNA, 201 bp, Homo sapiens
tacaaaaatgtttaaaagtcggctgggcttggtagtgccctctgtggtcccagctacccaaggaggtcgaggctgcagcgagccacgattgcaccactgcrtactagcctaggtgacagaatgagatcccgtctcaaaaaaaaaaaaaaaaaaaaaaaaaaaaccgaaggtgcttcctgaccttgagcctccttgtaaatt

SEQ ID NO: 252203 - DNA, 201 bp, Homo sapiens
tcggttatgaaagagccctctggagttgggaggcatttgggatcttgtgctgaaggctcgggccatctaagaagccagaactcctgagaaggtgaggtcgsaaatgatgactgatttttcatggcatgagaacggggtcacagttcagagagtagagaaatgattgtggatcagagtgcagaagggcttgaaataaagttg

SEQ ID NO: 252204 - DNA, 201 bp, Homo sapiens
atttttggaagaacatccaggttaaaactttgttttaaaagaagcggctaggtgcgatggctcacacctataatcccagcactttgggaggccaaggcggrtggattgcttgagctcagaggttcgagaccagcctgggcaatatggtgaaaccctgtctacaaaatatacaaaaattagccaggcttggtggtggccacc

SEQ ID NO: 252205 - DNA, 201 bp, Homo sapiens
tgcctgcatgcaaatattggctgtagacctatcaggggttttcactcttggctacacattagaatttcctggtggggagatttttgaaaaatctggatgcyggggaccccacctctaccccctagacatgctgatgggaccccgacatcagaatcttataaagtttttcatgtcagggttgaaaactcgtgcctagcttgg

SEQ ID NO: 252206 - DNA, 201 bp, Homo sapiens
ctcagcctcctatgtagctaggaccacagtcatgcgctaccactcccggctaatttttttgatttttttgtaaagacaaggtctcaccttgttgcccaggytgctcttgaacttctgagctcaaatgatactcacgcctcagcctcccaaagtgctgggattattggtgtgagccaccatgcctggccttaatttttttgt

SEQ ID NO: 252207 - DNA, 201 bp, Homo sapiens
attgaacaggcctggctgtgtttcaatcagacattatttatagatggggaaattcaaagttcatataatttttatgtgtcacaaaacaggattcttttgattttttttttttttcgatgacttaaaaatgttggctgggcatggtggcttatgtctatagtcccagcactttagaagaccaagacaggagggttgcttgag

SEQ ID NO: 252208 - DNA, 201 bp, Homo sapiens
gatgatcctccttcagtggaagcaaatgctggccgaaggtcagctctctagagccaatgttggttggcttccagctttatcaaaaagaattaaaatagccmcttgcccggagattgggcctgaaacaaggccagtccggcagctttgtgtgttcgcttgcctagcctgcggtaatgggcttgtggcctgcctgatggaggg

SEQ ID NO: 252209 - DNA, 201 bp, Homo sapiens
tggaaggtcgaagctgcagtgagctgtgattgcaccactgtactccagcctgggtgacagagcaagactctgtctcaaaaaaaaaaatatatgtatgtgtrtatatatatatatatatatatatatatatatatttcagacaaacagccatccatccatccatccatttgatgatccattcatgtggatggcagactttga

SEQ ID NO: 252210 - DNA, 201 bp, Homo sapiens
cacctccctatactccgaggatgactgcaaggtaagcgtctaagcccagggagcaacctggggagcaggtgggccgtggcccccaggctttccagccctaycccttgcttctccctctcagagcctcagagaagagcccatccacattctgaatgtgtccatccagtgtgcagaccacctggaggatgaggcactggtgcc

SEQ ID NO: 252211 - DNA, 201 bp, Homo sapiens
gtaatcccagcactttgggaggctaaggtgggaggattgcttgagcccttgagtttgagagcagcctgggtaacataataagaccctgtctctacaaaaawtaaaaataaaaaaattaactgggtatagtggcacgcacctgtagtctcagctactcaggaagctgaggtgggaggatcgcttcagcccagggggtctagg

SEQ ID NO: 252212 - DNA, 201 bp, Homo sapiens
tccagcctgggcaacagggtgagattctgtctcaaaaaataaataaaagaaaaagtaagccagcaagtaaattttttagactttgcaggttggtgtggtckctgtcgtgaccactcaacactgcctttgtacaatgtaagggaatgggcatggctgtgttcccataaaactttgttgggagcccgaggtgggaggatcact

SEQ ID NO: 252213 - DNA, 201 bp, Homo sapiens
actattgaactgtacactcaaaaatggttaagatggtaaattttgtgtgtgttttttttttaccataatttaaaactctggattgtatttttgtttgtttstttgttttttgagacagggccttgctctgtcacccaggctggagcgcagtgacatgatcacgactcattgtagcctcgaccttctaggctcaagtgatcc

SEQ ID NO: 252214 - DNA, 201 bp, Homo sapiens
acttggacttggcttatagtagaaaggggtttggcaatttttttttttttttttttgagatggagtcttgctctgtcgcccaggctggggtgcaatggcayaatcttggctcactgcaacctccgcctcccgggttctatctatcttctatctatctttttttttttttttgaggcagagtctcactctatcccccaggct

SEQ ID NO: 252215 - DNA, 201 bp, Homo sapiens
ctttgtcatgccatgtgacatgctttgcttcccccacctgcattttcattgaggactgggcagaaataaattgggggagatgtgtgattctctctcactckctgttttccctcctttctggtccagatcatgtttcactccttcggcaacaagcaagggccccagcacgggatgctgatcaatactccctacgtcaccaag

SEQ ID NO: 252216 - DNA, 201 bp, Homo sapiens
gtagcctcgaccttctaggctcaagtgatcctcctgccttggcctcccaagtagctgggactataggcatgcaccaccattcctggctactttttttggatttttttttttttttttttttgtggagacaaagtctctgtgtgttgcccaaactggtcttgaattcttggcctcaagtgatcctcctgcctctgcctccca

SEQ ID NO: 252217 - DNA, 201 bp, Homo sapiens
gagatggagtcttgctctgtcgcccaggctggggtgcaatggcataatcttggctcactgcaacctccgcctcccgggttctatctatcttctatctatctttttttttttttttgaggcagagtctcactctatcccccaggctggagtgcagtggcacgatctctgttcactgcaacctccacctccagggttcaagca

SEQ ID NO: 252218 - DNA, 201 bp, Homo sapiens
cccaggctggagtgcagtggcacaatctcagctcactgcaacctctgccttccaggttcaaacaattctagtgcctcagcctcctgagtagctgggattayaggcgtgtgccaccacacgcagctcatttttgtctttttagtagagacagagtttcaccatgttggctgggctggtctcaaactcttggccttgagtgat

SEQ ID NO: 252219 - DNA, 201 bp, Homo sapiens
ttgggaattgggacattttcctggacctccttggtgatagaggctaaaaatgttgaaccaattacagtctcgggataaatgtgagattcattattcttctractttcttggtcccatttgttagaaaatagtgagttctctgcacctgatggtatttggtacctgagaggttttgaacaaagacttgtgaattgaatgatt

SEQ ID NO: 252220 - DNA, 201 bp, Homo sapiens
acaatctcagctcactgcaacctctgccttccaggttcaaacaattctagtgcctcagcctcctgagtagctgggattacaggcgtgtgccaccacacgcrgctcatttttgtctttttagtagagacagagtttcaccatgttggctgggctggtctcaaactcttggccttgagtgatccacccgccctggcctcccaa

SEQ ID NO: 252221 - DNA, 201 bp, Homo sapiens
cttggtgaatgtgatcctatccttttctcttcaaggtagctatgttaatagtcccatcttacagaggaaggaactgaggctcagagaggtcaagtgacttatgcaacgtcacacagctagaaagtggcagaaccaggttttgcattattgggtctgcctcattccagattccatgctagttaccactgctgtctcatgtca

SEQ ID NO: 252222 - DNA, 201 bp, Homo sapiens
cttcccttccattgccttcctgccttcctttcttccttccttcctcccctcttctgccctcccctccccttccatcccttcccctcccttccttcctcccktccttcctcctccccttcccttctttcctcccttcctccctccttccttcttttcctgacttctctgctttcctccccctccctttcttcctccttcttt

SEQ ID NO: 252223 - DNA, 201 bp, Homo sapiens
tcagagaggtcaagtgacttatgcaacgtcacacagctagaaagtggcagaaccaggttttgcattattgggtctgcctcattccagattccatgctagtyaccactgctgtctcatgtcattccagcctcttccaggcagggcacattaaatactaatccctgagagccaagtctgaggcacctcatctaaactttctga

SEQ ID NO: 252224 - DNA, 201 bp, Homo sapiens
gtgtgtgtatacctacatgtatacatgggtgttcctcttacaaaattaatagcttttttcttattgaaaataacacatcattgcagaacattttttaaaayatagcaaagagataacggctcttaatactttagcatttttttcccccagatcaggggtctgtctacaaatgatgtcccttgggttgcatctacctttttt

SEQ ID NO: 252225 - DNA, 201 bp, Homo sapiens
ttccattgccttcctgccttcctttcttccttccttcctcccctcttctgccctcccctccccttccatcccttcccctcccttccttcctcccgtccttyctcctccccttcccttctttcctcccttcctccctccttccttcttttcctgacttctctgctttcctccccctccctttcttcctccttctttccttcc

SEQ ID NO: 252226 - DNA, 201 bp, Homo sapiens
tttgtatttttagtagagatggggtttcaccatgttgtccatgctgctctcaaactcctgaactcaggtgattcacctgcctcggcctcccatagtgctgrgattacaggcgtgagccactgcacccggccctgaggtccagtttctcatatgtaagtcaaggtccaaaccagtagacacaggaagcttggaagaaacaga

SEQ ID NO: 252227 - DNA, 201 bp, Homo sapiens
ctctgcctcctgggttcaaatgattctccttcctcagcctccccagtagctgggcctacaggcgcccaccaccacacctggctaatttttgtattgttagyagagacagggtttcaccatgttggccaggctggtctggaactcctgacctcaagtgatctgcctgcctcagcctcccaataaatctgctgcccttttaga

SEQ ID NO: 252228 - DNA, 201 bp, Homo sapiens
aaatgcataaaccagtaggccagtgtaggaatttcaacatccagataataggacttcgggaaaaaatagagaaaaaaagaggcaaggacatcatcaaggargtatttgtttcttgttgttgttgttgttgtttgagatggagtctcactctattgcccaggctggagcgcagtggcacaatcttggctcactacaacatcc

SEQ ID NO: 252229 - DNA, 201 bp, Homo sapiens
tgtgccagcgcatgggagccatggtagccttcaggagattcgaggacttcaccaggtacccagcatggcccggtctccaacaccctgagcatgggggctgsgcagacttcccttgaatccccccccaattcactggacagatggggtgggagagacccagacacgtggcacagcatgtcaataacaacagaataataatag

SEQ ID NO: 252230 - DNA, 201 bp, Homo sapiens
ggccaagctggtctctaactcctgaccttaagtgatcttcccacttcagcttccaaaagtgctgggatcacaggcgtaagccaccatgttcagcccatcarggaagtatttgaagacaaattcccaggatggaagtttccagattgagagggcctgagagatgtgcagcctcattggtggaagcagacacatacttgagcc

SEQ ID NO: 252231 - DNA, 201 bp, Homo sapiens
ggagagacgggatttacttaaggtcatccgtgaggggaagggtaagttcaagcccatggatggcacagtctttctaccacgctgctggccacatgcatgcrgattttcttgttgattttgtgtgtgtattgttcattgacctgggttttccctctgcaataccagtaagtaaaattgagcttctagtaagtctgagaggaa

SEQ ID NO: 252232 - DNA, 201 bp, Homo sapiens
ggaagggcttaatgcatgagacagcaactaccaccatgcttgaactgtttcatcaaaaagcacaacaatggatgtttgtataaaggtggtgttgtgcttgkaggtggatattaggttggtgcaaaagtaatcgtggtttttgcaatcccttttaatggcagaaactgcaattagttttgcaccgactgaatattattcatt

SEQ ID NO: 252233 - DNA, 201 bp, Homo sapiens
accttgggacaggtagaagaaactgctccttctagttcatgtgctggtaccttagctggcctcttaaggtgctttcagttgggtacagtggttcacgcctrtaatcccaatgctttgaaaggctttgacgtcacttgacatcaagagtttggacgagcctgggcaacatagtgagaccccatctctacaaaaatgtttaaa

SEQ ID NO: 252234 - DNA, 201 bp, Homo sapiens
ttgaactcttgagctaagcaatcctcacaactcagcttcccaaagtgctgggattacaggcatgagccaccatgcccggctctttcttggttcgttgagaytctgtgtggaagtcgctggtcttgagtactgccctgggtcagcacaaacattgatgaaaactaataagtaaagacagagttcggttatgaaagagccctc

SEQ ID NO: 252235 - DNA, 201 bp, Homo sapiens
ggaagtagttgtaattacagaattgcctggctcagaatcagctcttagcagtgcgggtagccgttaccatctctattttatagaagaaaagagagggaagraattgaaggtctgattaatgccggggccctagcctaatggcccagcctgggctcctgtaatgctatcctgcagacgtacatggtagctaaagtgttgcaa

SEQ ID NO: 252236 - DNA, 201 bp, Homo sapiens
tctaccagagtttctaaactgcggctctgttgacacttggggctgtccagttctttgtggggctgtcctgtgcattgcagggtgttgagcagcatccctgrtctccacccactagatgccagtagcgcatcccccaagttgtgacaatcaaagatgtctccaggtattgctccccggggagcaaaatttcccccagttaag

SEQ ID NO: 252237 - DNA, 201 bp, Homo sapiens
gggaagtatttgaagacaaattcccaggatggaagtttccagattgagagggcctgagagatgtgcagcctcattggtggaagcagacacatacttgagcycatcactgtgaaatcatagagttctggggacagagggacgctcctataagcatctggatatgaaaaaacaggtcacctacaaaggatcaaggatcagaat

SEQ ID NO: 252238 - DNA, 201 bp, Homo sapiens
ttcctctacagatcaacctaggctacccttgaagaggctgtgggttagggaatgggattctcgaggccagggtggcagtcagtgaacaggctgttgtgtayggatccatgctgacttgtgtaaggtacatcataatagtcaggagttctgagttcaaggaggtggatttgggaagcaaagcggcttaaaggtcatctctac

SEQ ID NO: 252239 - DNA, 201 bp, Homo sapiens
ttacctcccactgttcagccagttcctaacaggccacggaccagtgctcgtttgggtactggtttggggaccctttctttaggggactgctgtgtgtcatytgaatcatcagcagtcagacctgtcttgttttcccatccagatagccaccatcctggactgccatgcagccaccctgcagcggaaggctgatcgagaggt

SEQ ID NO: 252240 - DNA, 201 bp, Homo sapiens
tgtagggctgtgcattctgcagagggcacaatggagcgtggataagtttcctgtagctgcggtaacaaggtaccacaaactggtttaaaccaacaaaaatktattgtgtcccagttctggaagccaagtctaaaatcgaggtgttggcgggccgtggtctctctgaaggcgctggggcaggatctgttccgagcctcccca

SEQ ID NO: 252241 - DNA, 201 bp, Homo sapiens
catggcccggtctccaacaccctgagcatgggggctgggcagacttcccttgaatccccccccaattcactggacagatggggtgggagagacccagacaygtggcacagcatgtcaataacaacagaataataatagcattgtagccaagagtatgagcctacatgtcagcttgcctggcacagcacatcaataacaaca

SEQ ID NO: 252242 - DNA, 201 bp, Homo sapiens
tttcttaaaagggccagaaagtggctgggtgcggtggctcatgcctgtaatcccatcactttgggaggctgaggcgggcagatcacttgaggttaggagtktgagaccagcctggctaacatagtgaaacctcgtctccactaaaaatacaaaaattagctggccatggtggtgcatacctgtaatcccagctacttggga

SEQ ID NO: 252243 - DNA, 201 bp, Homo sapiens
ctgtgcattctgcagagggcacaatggagcgtggataagtttcctgtagctgcggtaacaaggtaccacaaactggtttaaaccaacaaaaatgtattgtktcccagttctggaagccaagtctaaaatcgaggtgttggcgggccgtggtctctctgaaggcgctggggcaggatctgttccgagcctccccagcttctg

SEQ ID NO: 252244 - DNA, 201 bp, Homo sapiens
ccccctcttcagcgaggcccgcacctccctatactccgaggatgactgcaaggtaagcgtctaagcccagggagcaacctggggagcaggtgggccgtggyccccaggctttccagccctaccccttgcttctccctctcagagcctcagagaagagcccatccacattctgaatgtgtccatccagtgtgcagaccacct

SEQ ID NO: 252245 - DNA, 201 bp, Homo sapiens
tagtagaaatgggatttcaccatgttgcctaggctggtcttgaactcctgagctcaagtgatctgccctgccttggcctcccaaagtgctgggattacagkcatgagccaccccccggcctctgcctctgtgtgtgtgtgtgtgtgtgtgtgtgtgtgtgtgtgtgtgtgtgtgtgtgtgtgtgtgtgtgtgtgtgtgtgt

SEQ ID NO: 252246 - DNA, 201 bp, Homo sapiens
gaggatgactgcaaggtaagcgtctaagcccagggagcaacctggggagcaggtgggccgtggcccccaggctttccagccctaccccttgcttctccctmtcagagcctcagagaagagcccatccacattctgaatgtgtccatccagtgtgcagaccacctggaggatgaggcactggtgccgattttacggacattc

SEQ ID NO: 252247 - DNA, 201 bp, Homo sapiens
gagtgcagtggcaccatcatgactcactgcagcctcaacttccctgggctccgagatgatccccccacctcagtcccccaagttgctgggactacgggcaygtgccaccacgcctggctaatttttgtattttttgtagagacggggttttgccatgttgctcaggctggtcttgaacttctggactcaagcagttggcca

SEQ ID NO: 252248 - DNA, 201 bp, Homo sapiens
acttcagagccacagacctggcttcccactctagctctgctcgcctcatagctggcgaccttgggcagatgtggctgaacgtggggtcagcatttctctcrctcacggtgttgcaatgattcaatgacaaagtatatacacggcttagccagtcccaggtacggagggcacacccaataaatagtttggagattttctggg

SEQ ID NO: 252249 - DNA, 201 bp, Homo sapiens
gttagcagtcactcccctctgtccccaacccaaaaaccctctccccaccacagccctaggcaaccactaatctactttctctctatatagatttgcctatkctggacgtttcatataaatggaatcagatcacaggaggtctcttatgattgacatcttccacttagcataatgtttacaggttcatccgtgtggtaacat

SEQ ID NO: 252250 - DNA, 201 bp, Homo sapiens
tgtgtgtatgtgtctgtcttctctctctggtccgcctacagtttgcagaagatcgcatttaccgtcacttggaacctgccctggccttccagctggaactyaaccggatgcgtaacttcgatctgaccgccgtgccctgtgccaaccacaagatgcacctttacctgggtgctgccaaggtgaaggaaggtgtggaagtga

SEQ ID NO: 252251 - DNA, 201 bp, Homo sapiens
gagactctgtctcaataaataaataaataaataaaatgaggctgagcattttattatcttgtagagcttttggctttggattttggcatctttgggatccktggtagcctggtgtttgctggttacccattgactcttttgcacacatacaggcagggtagtaatacctcttccctggtgttcacaggtcaacacccaagc

SEQ ID NO: 252252 - DNA, 201 bp, Homo sapiens
atacatgtgtatatgtatatatacgcacatacatgtgtatatgtgtatatatacatgtatgtgtatatacgcacatacatgtgtatatgtgtatatatacrtgcatgtatatacacatatatacatgtatgtgtgtatatacatataaacatatatatgtatatatataatattttttaagaattatactgaggtcgggtg

SEQ ID NO: 252253 - DNA, 201 bp, Homo sapiens
tgtatatatacgcacatacatgtgtatatgtgtatatatacatgtatgtgtatatacgcacatacatgtgtatatgtgtatatatacatgcatgtatatayacatatatacatgtatgtgtgtatatacatataaacatatatatgtatatatataatattttttaagaattatactgaggtcgggtgcattggctcacac

SEQ ID NO: 252254 - DNA, 201 bp, Homo sapiens
acacatatatacatgtatgtgtgtatatacatataaacatatatatgtatatatataatattttttaagaattatactgaggtcgggtgcattggctcacrcctgtaatcccagcacgttgggaggccagggcaggtggatcacttgaggtcaggagttcgagaccagcctggtcaacatggtgaaaccccatctatacta

SEQ ID NO: 252255 - DNA, 201 bp, Homo sapiens
agcaattctccctcctcggctttccaaggtgctgggattacaggtgtgagccaccacgcctggccctgaatagcctttcttagaaagctacttgaggatgycttccactgaaaacagagggtaaaccaaggaagagcaacacacaggagacaggaaacaggagattcaacatagactgaaagggagtctccagggtgatgg

SEQ ID NO: 252256 - DNA, 201 bp, Homo sapiens
cctcggctttccaaggtgctgggattacaggtgtgagccaccacgcctggccctgaatagcctttcttagaaagctacttgaggatgccttccactgaaamcagagggtaaaccaaggaagagcaacacacaggagacaggaaacaggagattcaacatagactgaaagggagtctccagggtgatggtgataaggaagcc

SEQ ID NO: 252257 - DNA, 201 bp, Homo sapiens
ccctgtctctactaaaaatacaaaattagccaggtgtggtggtgcctcaacccgggaggttgaggcaggagaatcactgaatccgggaggcagaggttgcrgtgagctgagattgcgccattgcactccagcctgggcaacaagagaaaaaaaaaatagaaaaagtaatttgcggaaggatgtgtacagtgtggtactctt

SEQ ID NO: 252258 - DNA, 201 bp, Homo sapiens
agtggtggtagtagtggtggtggtagtagtagtagtggtagtagtgtttgtggtggtgaatctgtatgggtctaaggcagagtgagagaccgaggcaagtytctcagcaggagtgaaagtttattaaaaagttttaaagcaagaatgaaatgaagtacacttggaagagggccaaacaaggcaacctgagagatccaagtg

SEQ ID NO: 252259 - DNA, 201 bp, Homo sapiens
ccaggaaaaggcaaaaagaaaggaactaaaatctggtacactgcagctctcatatgtgaataatgatcacaaacttcatatgtgaataatgatcacaaacwagtaaaacattgaatacccagtttgctaaattacagtagacttctatggtattgaccagctggtggaggggagccgatggggtggccttgtgagataact

SEQ ID NO: 252260 - DNA, 201 bp, Homo sapiens
ctgtattttggaaggccgaggtgggaggatcacttgaagccaggagttcaagaccagcctgggcaacaaagtgagacccctgtctctacaaaaaagaaaayttaaaaacttctgaaatacaaatgtagaaaagtacatgaaagatattaataccatgtaacaagtcggaacgattagaatgtgtggacttcttccctgatc

SEQ ID NO: 252261 - DNA, 201 bp, Homo sapiens
gagccacgattgcaccactgcgtactagcctaggtgacagaatgagatcccgtctcaaaaaaaaaaaaaaaaaaaaaaaaaaaaccgaaggtgcttcctgmccttgagcctccttgtaaattgcttcaggggctctggagagcaagtgcaaagcaggggggctctggtgcagtttggctcctctgctccactggctttaca

SEQ ID NO: 252262 - DNA, 201 bp, Homo sapiens
agtggctcatgcctgtaatcccagcactttgggaggatgaggtgggcagatcatttgggcccagcctgggtttgtgttcaagttcaagaccagcatggacracatgacaaaatcctgtctctgcaaaaaaattaaaaaattagcaggatgtggtggtgtacacctgtagtcccagctactcgggaggctgaggtgggagga

SEQ ID NO: 252263 - DNA, 201 bp, Homo sapiens
ttgttgtgatggtgacccccgaggaccttaaggccaacgcaggtacctgggccttgaccctctcctcccatcacgctccatccttgcctgccctcgcctcyttcccctgtgcctaggcaagtccatcctggactcccgatggtcaggacctctcatgagtctgtatttatttgtccttccttctttatttaattaaaacgt

SEQ ID NO: 252264 - DNA, 201 bp, Homo sapiens
tctttcccctgtgcctaggcaagtccatcctggactcccgatggtcaggacctctcatgagtctgtatttatttgtccttccttctttatttaattaaaaygtctgctgacatcaagaacaactcatgtgccttacaaaaatgcagatggttaacatgcagagaggaaattcgatctttgagaaatgtctgtgttctagca

SEQ ID NO: 252265 - DNA, 201 bp, Homo sapiens
aaaaaaaaaaaaaaagcaaaacaaaaaccaacataagtcaggtcttcaggtctttttgtgcttctccttaaaatgcatcagaggctgtgtgctgttcccartattagcaacctcagcaccatcccctaagccttcctgccccaagctcttcacagacatggcctcatttgttacttacagctctgttttacagatggcaca

SEQ ID NO: 252266 - DNA, 201 bp, Homo sapiens
cataaaatgaaaaagttgtggacatctgtttcacaatataaatatacttcactattgaactgtacactcaaaaatggttaagatggtaaattttgtgtgtgttttttttttaccataatttaaaactctggattgtatttttgtttgtttgtttgttttttgagacagggccttgctctgtcacccaggctggagcgcagt

SEQ ID NO: 252267 - DNA, 201 bp, Homo sapiens
caggagccctagggaggggatattgctgcataaccaggcataatcatagtcagaggagcaaagtgctgatcagaggtattattgacaagcaccacagactragtcagagacttggctttcttttttaggataatcacagccctgtccctatcatcacacccactgaccccattgacagagaaattgaattcctcccatcca

SEQ ID NO: 252268 - DNA, 201 bp, Homo sapiens
aagaaatggaaatcattcataatcctatgacccagtgttgaacatttattacattgtaggtatctacctttccaacctttttctgggcatattctttgggaaaaaaaaaaaaaaaagacagatcttggccagtggctcatgtctgtaacccaaccccccaacccagtgctttcagaggctgagggaggaggatcacttgaa

SEQ ID NO: 252269 - DNA, 201 bp, Homo sapiens
ttgtgcagagacatctgatccccgcagctctgtgttccagataattcagcaggcaggacaggtgtggttcccagactcagcctacaaaaccgcccaggccrtcaaggacttcaaccgggagaagttgcccctgatgatctttgccaactggagggggttctccggtggcatgaaaggtaagcccctccctgcctatgttac

SEQ ID NO: 252270 - DNA, 201 bp, Homo sapiens
tcttcccggattcaagctattctcatgcctcagcctcctgagtagctgggactaccggcgcgtgccaccatgcccagctagtttttgtatttttagtagaracagggtttcaccattttggccaggctggtctcgatctcttgacctcgtgatctgcctgcctcggcctcccaaagtgctgggattacaggcatgagccac

SEQ ID NO: 252271 - DNA, 201 bp, Homo sapiens
ggtcttgctcccgggagcaagaattcaggtcttcttgaattcaggaaccaagaagtgttgtgttggttccaggaaatcagagttttaaatctgctcttttwttattattattattattattttgagactcgcttgtgcctagggtggagtgcagtggcactatctcggctcactgcagcctctgcctcctgggttcaaatg

SEQ ID NO: 252272 - DNA, 201 bp, Homo sapiens
catcctgacatacactgaattagtgttggactctcagggccagctggtggagatgaaccgacttcctggtggaaatgaggtaatagctcagcggagcctarcccctggctggagtcacccccttaaaaatatttttgggccaggtgcagtagctcacacctgtaatcccagtgctttgggaggccaaggtgggtggatcac

SEQ ID NO: 252273 - DNA, 201 bp, Homo sapiens
ccttaaaaatatttttgggccaggtgcagtagctcacacctgtaatcccagtgctttgggaggccaaggtgggtggatcacttgaggtcagaagttcaagrccagcctgggctacatggtgagaacctgtctctacataaaattttaaaattagctgtgtgtggtggtgtgctcctatagtcccagctactcgagagactg

SEQ ID NO: 252274 - DNA, 201 bp, Homo sapiens
ggtcggtaggtgcagcaaaccaccatggcacatatatacctgtgtaacaagcctgcacgttctgcacatgtatcctgtttttttttttagaagaaataagaaaaaaagtgtacaatttaatatatttttagtatattcaccaggttgtacaaccatcaccagaatcaattttaggacattctcatcactccatagaaaaac

SEQ ID NO: 252275 - DNA, 201 bp, Homo sapiens
gacagtcatcctttccattcagagcatgcattctcgggggcgatattgcccactacccccaagaagacagaaaaataatttttggggtggcaataaaataktttttaacatatatacatatacagagtatgtaaatagtggttaaacagtgtatcttgaaaattaaaatttcatgttggggtgctggcaataagaaataaa

SEQ ID NO: 252276 - DNA, 201 bp, Homo sapiens
ttgatggaaacatatatatattattatatatataattatatataataatatatataatatattatataatataacatataatatacataatataatatataatatgttatataacattatatatacataatataatacatattatatgtatttatataaatatatatttatataaatgtatatataattattatatatata

SEQ ID NO: 252277 - DNA, 201 bp, Homo sapiens
gcatgcattctcgggggcgatattgcccactacccccaagaagacagaaaaataatttttggggtggcaataaaatattttttaacatatatacatatacrgagtatgtaaatagtggttaaacagtgtatcttgaaaattaaaatttcatgttggggtgctggcaataagaaataaaaatgagatagtccttagaggaga

SEQ ID NO: 252278 - DNA, 201 bp, Homo sapiens
tatgttatataacattatatatacataatataatacatattatatgtatttatataaatatatatttatataaatgtatatataattattatatatatatwtttttttggagatggagttttgctcttgttgcccaggctggagtgcaatggcacaatctcagttcactgcaacctccgcacccccgggttcaaacaattc

SEQ ID NO: 252279 - DNA, 201 bp, Homo sapiens
  misc_feature (1)...(201): n = A,T,C or G
acaccagaatcagctccctgaactccgtccactgtaaacacatcgaggaaggaggagagtccaggtaaataacttatcaggtagctccttaattttgctcntggttaatttcagctgtcttctttcctcggggcttgtggcgatattttccagtggggtggtggtgtttgtatgatgggaaccaatgcctgttgggggcac

SEQ ID NO: 252280 - DNA, 201 bp, Homo sapiens
ccctaggggctttaaaggagcctgaaccactgacattggtgatgtgaatgtctcttcattttccaggattgctttggaatgacattatatatatatatatwttatttatttatttatttattatactttaagttctagggtacatgtgcacaatgtgcaggtttgttacatatgtatacatgtgccatgttggtatgggat

SEQ ID NO: 252281 - DNA, 201 bp, Homo sapiens
cctaggggctttaaaggagcctgaaccactgacattggtgatgtgaatgtctcttcattttccaggattgctttggaatgacattatatatatatatatattatttatttatttatttattatactttaagttctagggtacatgtgcacaatgtgcaggtttgttacatatgtatacatgtgccatgttggtatgggatc

SEQ ID NO: 252282 - DNA, 201 bp, Homo sapiens
catcacacatgctaaagtgcattgtgaatctctaacagaggctggcgggacagtgtttctcattatgtggccctggaatttttgattgattgattgtgaaygggtttcctctgtgtacccccatctctctgtagaccgttggaggaatatgggccgagggtgatatttcactgagacagcccctgaacaggcagatatctt

SEQ ID NO: 252283 - DNA, 201 bp, Homo sapiens
agtcgaggcacagggatgtgaatttatcacttgtccagggtcacacaaccatcatgtgatgcgggtgggatgggaaccctggtctgggttcagagcatcayccagtgggtcctcccatcttggttagtctaaaattcaaaattgtcacccaggcctattaagtcccctcctggctccatctcgaacctcttgccctccatc

SEQ ID NO: 252284 - DNA, 201 bp, Homo sapiens
attatgtggccctggaatttttgattgattgattgtgaacgggtttcctctgtgtacccccatctctctgtagaccgttggaggaatatgggccgagggtsatatttcactgagacagcccctgaacaggcagatatctttggttgtataaaccaaaaagtatctgagacaggtctcaatcaattgagaagtttattttgc

SEQ ID NO: 252285 - DNA, 201 bp, Homo sapiens
gtctgggttcagagcatcacccagtgggtcctcccatcttggttagtctaaaattcaaaattgtcacccaggcctattaagtcccctcctggctccatctygaacctcttgccctccatcagccgggtaccagtcaccctgacctctggtagctcctgggcctgttgcagagtcttggcacctgctggaacctctattgaa

SEQ ID NO: 252286 - DNA, 201 bp, Homo sapiens; identical to SEQ ID NO: 49690

SEQ ID NO: 252287 - DNA, 201 bp, Homo sapiens
ctttgtgcagtggactccctccccacccagcctgtaggtctcaacatgatcatcgcatctctctcagagaacctcatttattttcttcccagcactgacckgagtctgtagttattgtgtttattttcttgtttatcttctccaacataaaagaaaaactggacaaggaccaggaagcctgtctggccgctcacttcatca

SEQ ID NO: 252288 - DNA, 201 bp, Homo sapiens
tcacaatataaatatacttcactattgaactgtacactcaaaaatggttaagatggtaaattttgtgtgtgttttttttttaccataatttaaaactctgkattgtatttttgtttgtttgtttgttttttgagacagggccttgctctgtcacccaggctggagcgcagtgacatgatcacgactcattgtagcctcgac

SEQ ID NO: 252289 - DNA, 201 bp, Homo sapiens
acagtagagcaccatgttgtctatagagtagtgtctgtatatcctaaatcattgactgaacctccgttgcatctaccactgtgcctggtgttttggggccrtgttctggtaggactgacagtctgtgggttggatctcttgattttagatcgccatgggcgtgccactgcaccggctgaaggatatccggcttctgtatgg

SEQ ID NO: 252290 - DNA, 201 bp, Homo sapiens
agcctgggcaacaagagaaaaaaaaaatagaaaaagtaatttgcggaaggatgtgtacagtgtggtactctttatttaaagtttgcagtgcaaaacgataytgtatgtttccaatgtatgcatacaggataaaggaaaatgaaaaaaaaagcatgcataggactgggtaggcactgaattcaagggaatggtcacctgtgg

SEQ ID NO: 252291 - DNA, 201 bp, Homo sapiens; identical to SEQ ID NO: 49700

SEQ ID NO: 252292 - DNA, 201 bp, Homo sapiens
ctgagacaggtctcaatcaattgagaagtttattttgccaaggttagggacacatccagaagcaaagaacacggaatcatagaaaccgtctgtggcgtgtrcctttcttcaaagatgatttggagggcttcagtatttaaaggagaaaagcaggctggaggggaaagagggaagttctggtaatcacatgttgcaggagaa

SEQ ID NO: 252293 - DNA, 201 bp, Homo sapiens
gttgcgggcagagagctgcttgaggccaccacgctgcaggaagtgcagcttctgggcccggcgccgctgcttcaggatctgctgcttggtcttgagttccrggcggactcggcctgcaggggtgcctggggcgtggggccgggatgcacctgctgggacagggattcagggagctcagctgttgggatcactcccaagatc

SEQ ID NO: 252294 - DNA, 201 bp, Homo sapiens; identical to SEQ ID NO: 49762

SEQ ID NO: 252295 - DNA, 201 bp, Homo sapiens
tgctggaattacaggcgtgagccactgtgcccagccgcccacaggacatttctgtatacatcctagaatgggaatgcatgggacagacaatagcaatcacyatggcctccatctgtgggcctccaactatgggcctccacctgcagtcctgctggttcccgggccctggacacatcttgtctcatttgtccatctgtgcta

SEQ ID NO: 252296 - DNA, 201 bp, Homo sapiens
gtcactaataaattggctccatcacttcccatccaccagctcaccacctcgttacagtagtgggggctcacctccttctgggcctgcagggcctggtctgyatctaccagctcttgcctcttctccaggagacgcagtactggtgggacatgatcctcagcctgctctggcagctttctgaagaggctcaagtaggaggtg

SEQ ID NO: 252297 - DNA, 201 bp, Homo sapiens
ggtccgctgggtcccatcaatccaattatgtctcccactctccctctgcagcctgagcatcagcggggaagggggagcctttgagcagcaggcagctggcrctgtcctggacttgatgggggatgaagcccagaacctgacgaggggccggcagcagctcaagtggtgagtgatcgagtgagccgcccctccatgctcggg

SEQ ID NO: 252298 - DNA, 201 bp, Homo sapiens
ctcgcccgacccctcaaggagccctcaggtgagtggaggctgggtggggataggggtccccgtggagttcatgggccctgttttggctgtgggaggaggtrgggctgggtttgaccccagcagaagatgattccttttatttattttattgtattttatttgttttgtttattttttgagacagagcctcgctctgttgcc

SEQ ID NO: 252299 - DNA, 201 bp, Homo sapiens; identical to SEQ ID NO: 49765

SEQ ID NO: 252300 - DNA, 201 bp, Homo sapiens
gctgcacctgtcccatcccaggaggttgtgtccaggtgggccctgcaggccctgggccaggaccccgtaagccaacacgtgatgccctctccccacagacytccttcttcctcgtgcgggaggacaccaaggctgccgtgctgctccacctgctgcacaacgtggtgcggccccaggaccagaccgtggtgtttgtggcca

SEQ ID NO: 252301 - DNA, 201 bp, Homo sapiens
tggccggccggccgcagtttgttgacccctgtcagtgtattcaagtgtctggctctctagctcctccctgagtgctggtgttctttgcagtgattattttrtagccatttacctgtgattcaggggccagggtgaggcccaagagtggtggtcgggcagtggacaggcgggccaggctgaaagacctctgacaaggtgctg

SEQ ID NO: 252302 - DNA, 201 bp, Homo sapiens
ggctctgtgggctgtgtgatccagggtggctcttcaaccctggccttgtagtgcaaaaacagctggagaccatgcgtaagcaagtagtgagctgtgctccygtagagctatttccagaagcagcaggcagctggccggccggccgcagtttgttgacccctgtcagtgtattcaagtgtctggctctctagctcctccctg

SEQ ID NO: 252303 - DNA, 201 bp, Homo sapiens
ttgctagtctcccagagcactgtgtcagcttgggcacactctcacagatcaacctagggaccgggattaaacttccctgtgcgtaggtggggacagcagcygtgtgaggttcgaggcttggccaggctcacctgctcagggtctggcctgtggaactcatgctgggtccgggtccttctttgcttaattaagcttgaacgt

SEQ ID NO: 252304 - DNA, 201 bp, Homo sapiens
tcctccccaaactggcatcacccagcaagctgggattcagaccaagggtgccagactccagaacccgtggtcttgtctctgcacctcagtgcccgtccccygccatggtctggcttcctttcctttctcctccaagtctccttctcactttgctaccatctttgctctgagcagctgctgacgacccagcgggtgagctgc

SEQ ID NO: 252305 - DNA, 201 bp, Homo sapiens
aggtcacgtggtcaccgcacctacccccccccccacgcagttggtgcgctcctcaggccacgcccccttctgcgttcccagcgcgcggcccgaatggcggycgacaagggcccggcggctggacctcggtcgcgagctgccatggcccagtggaggaagaagaaagggctccggaagcgccgaggcgcggcctcccaggcc

SEQ ID NO: 252306 - DNA, 201 bp, Homo sapiens
cttgtttgtagcagaatccggataaggcttgtgcactgaggtggcatttgcagcttccctgagagggccctctgcacacatcatctctgatcctcagacawccctgcagagaggtgggaggtgttgtaagctccattcctccccaaactggcatcacccagcaagctgggattcagaccaagggtgccagactccagaacc

SEQ ID NO: 252307 - DNA, 201 bp, Homo sapiens
gcatgtggctgtggaaatgagcctgaagctgcagagtgtggaatacgtggtgttcgatgaagctgaccggtaaggctgcaggtccagccctgagcacttgwgtctgaactgggaaagcagaggcagagaggtcaaccagaggaaggctctgccaggagagccctgtgtggctgagatcgaagcagtgtcttcccagatgtg

SEQ ID NO: 252308 - DNA, 201 bp, Homo sapiens
ccacccacagcctcacaccttgctgctttcctaccaggctcgcgttttgaggaggaggagctgcagcggctgaggctggtggacagcataaagaactaccrctcccgggcggtgagtggggccgggtggagaccacgctctgagtcctggctctgtggagcccagagacagatggcctgtggcctggggtcacacagtgac

SEQ ID NO: 252309 - DNA, 201 bp, Homo sapiens
aagctaaccccttctctcctctctaggatggaagaccagtttgcagccctgcacgaaaatcccgacatgtgagtttgtggattggggatgactccctgagrtcccttcctagtggtgggggtgtaagagaactgtggtggtggccctggccctggggtcacctggcctgtgcaccctcttccagaattattgccacgcccg

SEQ ID NO: 252310 - DNA, 201 bp, Homo sapiens
gggaggagggggcggggctgagcggcttaagcagccgcatctccaatagatgggacctggtgctgggggcggggccgagcagcttcagcagcagcatctcsaactagtgggacctgtgctgggggcggggcccagcagcttcagcagcagcatctccagtaagtggggcctgtgctgggggcgggcccagcagcttcagca

SEQ ID NO: 252311 - DNA, 201 bp, Homo sapiens
gacagtggtctgcagagcaccctggaggcatcgctggagctacggggcctggcccgcgttgctgataacgcccagcagcagtatgtgcgctcacgcccggygccctcgcctgagtccatcaagagggccaaggagatggaccttgtggggctgggcctgcaccccctcttcagtgagtccttctacaaggcagggggtggc

SEQ ID NO: 252312 - DNA, 201 bp, Homo sapiens
cagctcccagccacctatattatcacccagggcttgtgattattcttcttagacatttcgcccagtgggagccatttctctggggttctgaggaggaggastagacgggaggtagagtctggctcctccgaagaagggtgttccagcaatggaaagagttggggtagtgagccgctcatccttggaggcatgctaacaggc

SEQ ID NO: 252313 - DNA, 201 bp, Homo sapiens
tggtcaccgcacctacccccccccccacgcagttggtgcgctcctcaggccacgcccccttctgcgttcccagcgcgcggcccgaatggcggccgacaagsgcccggcggctggacctcggtcgcgagctgccatggcccagtggaggaagaagaaagggctccggaagcgccgaggcgcggcctcccaggcccgcggcag

SEQ ID NO: 252314 - DNA, 201 bp, Homo sapiens
acacttccaagaggcgcaggaccttaccacgcctaaaacgaaggcacagcttcttagtgtcacctaagaccccgttagtgttcagagatccctgctgtctyatgacatcaagagtgggttcacatcagaaaatcagataaggttcaggtgccccagtcagatctgtctcctaagtctcatttcacctttcagtttgtgctt

SEQ ID NO: 252315 - DNA, 201 bp, Homo sapiens
tgccaacacccatccagaggaaggtgaggggtggggcggtcgacgggtgagggcgagggaggagtgacatggccctcctctctggccccttgacagccacyccttgtcccacctgtcacatctcctgccccctttactctgctgaagccccagctagcgtgcccacttcctaggtggagaaggttgggccgagccgagcag

SEQ ID NO: 252316 - DNA, 201 bp, Homo sapiens
gatcttgggagtgatcccaacagctgagctccctgaatccctgtcccagcaggtgcatcccggccccacgccccaggcacccctgcaggccgagtccgccyggaactcaagaccaagcagcagatcctgaagcagcggcgccgggcccagaagctgcacttcctgcagcgtggtggcctcaagcagctctctgcccgcaac

SEQ ID NO: 252317 - DNA, 201 bp, Homo sapiens
gcttttttttttcccttgctgtttattgttgatgaagctgtcatttgtcctgtaaagttctctggggttggtgctgtggggactccctcggccccctgacygtttcatgtctctcccaggcctgagctacccggtgttcaaaggcatcatgaagaaggggtacaaggtgccaacacccatccagaggaaggtgaggggtgg

SEQ ID NO: 252318 - DNA, 201 bp, Homo sapiens
gagctcccagcctcctgccccggactcaccccgggcagcagctccagcgcttgctccagcaggcgcgcgcagggctccaggcgcttaagccggcgctgcasccgcgcgtgttcccgccgtagctcctggagctgggtccacagacgcagcgcctccacctcccgacggcccgcctggtgcctctcctccgccgccctccgc

SEQ ID NO: 252319 - DNA, 201 bp, Homo sapiens
ggtaagggtggggttaggagtaggaggccagtgggcaaaggactgggtgtcccctccacagactatctttgagatcaacgcctccagccgagacctgtgcrgccaggtgatgcgcgccaagcggcagaaggaccgcaaggccatcgcccgcttccagcagggacagcaggggcggcaggagcagcaggagggcccagtggg

SEQ ID NO: 252320 - DNA, 201 bp, Homo sapiens
atatagtaggcatttcgattggctctttaatgtatttaggggctgggtgtggtggttcatgcctgtaatcccaacactttgggaggccaagaagggaggartacttgaggccaggaattcaagactagcctgggcaatgcagtaagacctcatctctacaaaaaaaaaaaaataaatacaaaataaaaaaattagccagat

SEQ ID NO: 252321 - DNA, 201 bp, Homo sapiens
aggcccggcagcgggaccaggaattctacatcccctaccggcccaaggactttgacagcgagcgggggtgagtggctggctgggtcctgggtggggcagtygggtccgctgggtcccatcaatccaattatgtctcccactctccctctgcagcctgagcatcagcggggaagggggagcctttgagcagcaggcagctgg

SEQ ID NO: 252322 - DNA, 201 bp, Homo sapiens
tcccaacactttgggaggccaagaagggaggaatacttgaggccaggaattcaagactagcctgggcaatgcagtaagacctcatctctacaaaaaaaaawaaataaatacaaaataaaaaaattagccagatgtggtagtatacgcctgtagtcccagctactcagaagtctaaggtgggagactcacttgagcctagga

SEQ ID NO: 252323 - DNA, 201 bp, Homo sapiens
actggcgaaagctcagcggaggtcacgtggtcaccgcacctacccccccccccacgcagttggtgcgctcctcaggccacgcccccttctgcgttcccagmgcgcggcccgaatggcggccgacaagggcccggcggctggacctcggtcgcgagctgccatggcccagtggaggaagaagaaagggctccggaagcgccg

SEQ ID NO: 252324 - DNA, 201 bp, Homo sapiens
gaagcatcattggcttgaatgggggagagagggcaacagcacaggccccttccctgccccctgtggtcccactgtgcctggagtgacaccacctctctgtycttccctcccagctgggacctggaagacccctgcccaccttccccacctcggaatgcacctcggatgtggagccggacacccgggagatggtgcgtgccc

SEQ ID NO: 252325 - DNA, 201 bp, Homo sapiens
cgctgggtcccatcaatccaattatgtctcccactctccctctgcagcctgagcatcagcggggaagggggagcctttgagcagcaggcagctggcgctgycctggacttgatgggggatgaagcccagaacctgacgaggggccggcagcagctcaagtggtgagtgatcgagtgagccgcccctccatgctcggggtga

SEQ ID NO: 252326 - DNA, 201 bp, Homo sapiens
ggacatttctgtatacatcctagaatgggaatgcatgggacagacaatagcaatcaccatggcctccatctgtgggcctccaactatgggcctccacctgyagtcctgctggttcccgggccctggacacatcttgtctcatttgtccatctgtgctagagggagggctgtcatcacctctgcttcacagatgagagaacg

SEQ ID NO: 252327 - DNA, 201 bp, Homo sapiens
tcaggacccaacaggggagccaagaggcggagggaggaggcccggcagcgggaccaggaattctacatcccctaccggcccaaggactttgacagcgagcrggggtgagtggctggctgggtcctgggtggggcagttgggtccgctgggtcccatcaatccaattatgtctcccactctccctctgcagcctgagcatca

SEQ ID NO: 252328 - DNA, 201 bp, Homo sapiens
gcggggcggcctggcagaggcgctcctcacctcccagaaggggtggtggctgggcagaggcgcccctcacatcccagacgatgggcagccgggcagaggcrccccccacctccctgatggggcagccgggcagaaacgccccccacctcccagacggggtgtccgggcagaggcgccccccacctcccagatgaagggcgg

SEQ ID NO: 252329 - DNA, 201 bp, Homo sapiens
ggcggcctggcagaggcgctcctcacctcccagaaggggtggtggctgggcagaggcgcccctcacatcccagacgatgggcagccgggcagaggcgcccyccacctccctgatggggcagccgggcagaaacgccccccacctcccagacggggtgtccgggcagaggcgccccccacctcccagatgaagggcggccag

SEQ ID NO: 252330 - DNA, 201 bp, Homo sapiens; identical to SEQ ID NO: 49775

SEQ ID NO: 252331 - DNA, 201 bp, Homo sapiens
cctcacctcccagacggggtggcggcagggcagaggcgctcctcgcctcccagacagggtggcagccgggcagaggggctcctcgcttcccagacggggcrgccaggcagaggtgctcctcgcttcccagacggggcggccgggcagaggctgtaatcttagcactttgggaggccaaggcaggcggctggaaggtggagg

SEQ ID NO: 252332 - DNA, 201 bp, Homo sapiens
ggtggacacagcagcagtctccttcagcacggtgtggtgtgtccctggacacagctcttcattctactgacttagaggcaacaggattgatcattcttttrtagagcatatttgccaataaagcttttggaagctggaaaaaaaaaagagagaaagagagaaggggagggaggggaggaagggagggagggaggaaggaag

SEQ ID NO: 252333 - DNA, 201 bp, Homo sapiens
tggaggctgcagtgagccatgatcacaccattacactccagcctgggtgacagagcaagtccttgttccaaaaaagaaagagaggagcgcagcactgccgyccggcccctccagcttcccggaccacggccaacctcgagcgcaccttcatcaccatcaggccggacagcatgcagtgcggcctggtgggcaagatcatca

SEQ ID NO: 252334 - DNA, 201 bp, Homo sapiens; identical to SEQ ID NO: 49778

SEQ ID NO: 252335 - DNA, 201 bp, Homo sapiens; identical to SEQ ID NO: 49779

SEQ ID NO: 252336 - DNA, 201 bp, Homo sapiens; identical to SEQ ID NO: 49780

SEQ ID NO: 252337 - DNA, 201 bp, Homo sapiens
cgccacgggcagtcggctccccagccacggcgacccctgacctggtgtccatggcaacgactcagggtgttcgagcggtcacttctgtgacagcctcggcygtggtcactaccaacctgaccccagtgcagaccccggcacggtctttggtgccccaagtgtcccaaggtaaagccaggctgggagctttctctgccacac

SEQ ID NO: 252338 - DNA, 201 bp, Homo sapiens
agcaaacctcttcatagccacaggagttcagctccctggaaaaaccatcacacctgcacatttccagcttctcaggcagcagcagcagcagcagcaacaavagcagcagcagcagcagcagcagcagcagcagcagcagcagcagcaacagcagcagcagcaacagacgacgacgacctctcaggtgcaagttccacagat

SEQ ID NO: 252339 - DNA, 201 bp, Homo sapiens
atatttaataagtatctttatattgaatagaattttattaaattccgtgcttttaatttattaacctggcacagttatcggggcacttgatcatgttgtgraggatgtaaaaatatttttctctagatttataaacatcattgttttatggacctagatatatttattcaggctgtgctgtgtttgttcaacacaccagtt

SEQ ID NO: 252340 - DNA, 201 bp, Homo sapiens
atatatttactggcagtttgagtactttttaaagaaatgccaaggcttttcccaattttttttaaattggattttctctatttctttttttttctttttcttttttttttttttaagacggagtcccactcatcgtccaggctgcagtgcagtggtgtgatctcagctcactgcaacctccacctcccaggtcaaagtgat

SEQ ID NO: 252341 - DNA, 201 bp, Homo sapiens
cccatccgctgcctctcaggccatgtgcacaggttatgttgtttccagtgaggaaaccttcgtgtttcattctaattgaccatgaaggcccgaaagcaggtctgtctttggcaggtgctttctgtggcctctttgcccaggcacctccagacttgcctgacctgtttcctttgtcttttgcctgcccgtgtggaatctcct

SEQ ID NO: 252342 - DNA, 201 bp, Homo sapiens
ccatccgctgcctctcaggccatgtgcacaggttatgttgtttccagtgaggaaaccttcgtgtttcattctaattgaccatgaaggcccgaaagcaggtctgtctttggcaggtgctttctgtggcctctttgcccaggcacctccagacttgcctgacctgtttcctttgtcttttgcctgcccgtgtggaatctcctg

SEQ ID NO: 252343 - DNA, 201 bp, Homo sapiens
ttgatgaagttgtccatccactatttccctttatcacgtatttagttcctttgtttgtgtctgggttcacgtcttcactttccgtgctgttccctatgatkgtttctctttaatatttaggatccttttaatttggaattttctgaaaaaaattttgttttcatctctgaaaatcatgctgttaaagttgtttaatgtgag

SEQ ID NO: 252344 - DNA, 201 bp, Homo sapiens
tgggaggatgtattatttgtggacacgttagtgttgggctgtggatacgatgtgatttgtctgcttgcatcgtggagcggaaggtgctggcagtgcgcgtytctggtgctgtgggcgctcaggtatttggcaccgtgggctgccccgacatcttttcttcaccttgctccacttgtgccctgcccttacagatggtagcat

SEQ ID NO: 252345 - DNA, 201 bp, Homo sapiens
ttaatatttaggatccttttaatttggaattttctgaaaaaaattttgttttcatctctgaaaatcatgctgttaaagttgtttaatgtgagcttttttgrggtttagcatttagcattttacaggcagatgagcctcatgggaaggcaatagactgcatggtctgttctgtgtccccagtgatggaatcttgaggaagcc

SEQ ID NO: 252346 - DNA, 201 bp, Homo sapiens
gagtgctaagcaagcccacctctgcccgtcacacacgttgcagtgttgcctctcaggttgttgcttgtccttggccttttcatgatgctttttcttatatyggcaacattttaatgagaaattgtatttatcagccttatgttttatggcttctggattttagttcatgtatagaaaggcctcccttttccaagatgataa

SEQ ID NO: 252347 - DNA, 201 bp, Homo sapiens
accacgctctggtgtatctctgtactgtgtgcgtccgtgtgccacacagacgctgaaatcatatgcgcagaatcacacctgcagagaataggagctgtgcyaaattggggaaacccacactttggactaccaggcaggcataaaaatatttttgttacatagaaccatttcctgcagtagtttttagaaaattgtttgctg

SEQ ID NO: 252348 - DNA, 201 bp, Homo sapiens
ttttattttttgatattttttgatatttcttgttcatcaagttctacctggtgtctttgggagaactgagttcctgatttcatgtgtgcagtgtgccctcycgtcttcctctctgcctagagcttttatgtcctgcttcctcccagagcttatggagttacctccctgcatccttctctaagagcgggggagtggtacctt

SEQ ID NO: 252349 - DNA, 201 bp, Homo sapiens
tgacgctttgtcggtgtggagagtctctgcaggatgttattgacaggtactgcagacctcgtgaccttttcggtgctctctggctgcattgcaccccggcmagaccccttcttgtctcgtggatgtacatcttactcccatcggcttctccccacgctgtcccttagcggtctgttttgaagttagtctttgaggtcttca

SEQ ID NO: 252350 - DNA, 201 bp, Homo sapiens
tagctgaatatcatatttattattcagttttaaatattttctgatttcccctgtatatatattttattgacccatgagttatttagaaggatgtttcttartttccaaacaatacagggttttcaatatatatttttattattattctacattaattgcattttgatcagacagaagatgtatgggattctcactgacctg

SEQ ID NO: 252351 - DNA, 201 bp, Homo sapiens
tttgagactatgttagtatgtgcatatataggtttagaattgttatcctattacgtcatcagttttacttgattctagataattttatcacatctgtgttstattttatgaattctcttttaagctcttcctagtcttttgttaacccattgattaagtgttaaattccagttaccagtttgttttaagacattcccaatg

SEQ ID NO: 252352 - DNA, 201 bp, Homo sapiens
ggggccactggagtatccgtccgcatctctaatcctgaaggcactggagagagatttctggaaggtaagtggaggatccagaaagcggaattactgttggrtatcttttctaggcacattatagataaaaccattcttggaaatgggttctcaaccagctcttctgcaattgcaattgcagctccgcgatacatggcaccg

SEQ ID NO: 252353 - DNA, 201 bp, Homo sapiens
tataagcagtggggatacagggtcgaaaaaagacaaaaatttcatgaagcttttattctagtaaggagagaggcagaaaccaaacctagtgagtaaagcaygtaatttattcacatgagaagttgtgaagtgctgaatccaggggagaatgtggtcaccacagcagacaggttagtgtggctgagggggtggggagggtgt

SEQ ID NO: 252354 - DNA, 201 bp, Homo sapiens
gaggctggagtacagtggcgcaatcttggctcactgcaggctcctcccgggttcacgccattctcctgccacagcctcccaagtagctgggactgcaggcrcctgccaccacgcccggctaattttttgtatttttagtagagacggggtttcgccatgttagccaggatgatctcgatctgctgaccttgtgatccaccc

SEQ ID NO: 252355 - DNA, 201 bp, Homo sapiens
gacccataagtaaaagtgaagaatgtgtttggcctccttcatgggaaggaagagctgttgagcgcagaagtgtgtcaggaggaagggacggagctgcgctrtgatgagtgcgtcttcaacacccagtgttttcattgagcaccaaggattcatctcaggttcagagaactcagcaagcgtgtccagtttttttccccttgt

SEQ ID NO: 252356 - DNA, 201 bp, Homo sapiens
aggaagctttcgagcaccagagtcagcaacgtgtgcactctcctgggctgttgcttgttggcctttgaatgagctgctcgtgcctccgtctgtcttgcacrggggatgcacctcagctgtggctgccctctgaggtgcttcatgccgtggaggggctctgggcattgtttcagggttagcgtgagtcaccaccacggttac

SEQ ID NO: 252357 - DNA, 201 bp, Homo sapiens
tacagtcttgtatacaaagactttgtatacagtcttgtatacaaagactttgtatacagtcttgtatacaaagactttgtatacagtcttgtatacaaagwctttgtatacagtcttgtatacaaagtctttgtatacttctctgaagagtttttcctttataatccttgttccttttatactactttttcttgccgtttt

SEQ ID NO: 252358 - DNA, 201 bp, Homo sapiens
aaagcagagacgccctcgccaagcatggggggccttgggaacgaactgtgctccttgtctctctagggaaagaattgagacctaaaggatttgacgcattmcaggaaagttctctggtaagtttggggttgttactgtgctgtgtgagaaggagtagaagcagctccagtagagtgggccttttcattcttatccagagga

SEQ ID NO: 252359 - DNA, 201 bp, Homo sapiens
gcgccttcctgccgagttctcagtggccccggccgaagcctgatggggaggacacaagcggagaggaaggtgcgctcccagcctttggaagaattcagggttaaaagcagaagccggagtacttacaaagacttaaaataagatttagaaaatttcttttagtttgataaaataaaaaattagaaatatttaataagtatc

SEQ ID NO: 252360 - DNA, 201 bp, Homo sapiens
ctggtctggaactcctgagctcaagtgatccacccacctcagcctcccaaagtgctgggattacaggcgtgagacaccgtgcccagccttttttttttttyttttttttttaggagctgttgcccaggttggagtgcagtggcatgatcagggctcactacagccctgacttcccaggtgcaagtgatcctcccacctcag

SEQ ID NO: 252361 - DNA, 201 bp, Homo sapiens
atttagtaaatactcacttttgtgttcggttttttaatgttttggttttttttttttcctgtcacctaccagaaggaacgttttgatttttctttctttctttttttttttttacattaaatgtaaaacttggaaagttagcttataaaaatgctttatttatttatttatttatttatttgcttgtttgagacagttttg

SEQ ID NO: 252362 - DNA, 201 bp, Homo sapiens
aacaagtgcagaggggcctgcctgggatgtggacttgaatggccactctgtctaactcattaagcggacctagaaaatctgctcctgcctgcctttctggmgttgggacagtcgatggtgagggtgggactatgtccatgtgccgtttggattgaatgcttcgtgtttctttctccacgggcagcactcaggaggccttga

SEQ ID NO: 252363 - DNA, 201 bp, Homo sapiens
atggcagagacttgctaaggatttgtgccctgcctagccatggaagggtacagtggcgtgggtccctggatggccgtcgtgggaaggaggccgggccagcrcacagttacacttcatcctcagaaagtccaagtgagctgatgttgacgctttgtcggtgtggagagtctctgcaggatgttattgacaggtactgcagac

SEQ ID NO: 252364 - DNA, 201 bp, Homo sapiens
agagggtgggggcaccgccaggtggaatgagctggggaggatgggacaggtggctgtgtgaatgtcgtggagtttggatttgattctgaatgaagtggaarcctttggaggatttatgcaggggagagcctgacgtgaaattcaaatggattttttttttttaaataggcaggaaccattaaaacatcagttactgggacg

SEQ ID NO: 252365 - DNA, 201 bp, Homo sapiens
agattgtactgggctttggatattgggctaaagattggatttttttttttttttttttgagacagagtctctccctgtcacccaggctaaagtgcagtggkgcgatctcggctcactgcaacctccgcctcctgggttcaggttattctgcctcagcctcctgagtagctgggattacaggtgcccgccaccgtacctggc

SEQ ID NO: 252366 - DNA, 201 bp, Homo sapiens
cgcagggagcctggtagcaggggccggaagcacagtagagacggacctgtttaagaggcagcaggcgatgccctccacaggtatggcaggtacgtcggcayggctagcgtggcctcgggaatgcccccctctccttgggctgccgaggtacagttgccatgagtttctgaagagcagttgctaaacttggtttcttcctac

SEQ ID NO: 252367 - DNA, 201 bp, Homo sapiens
gggtgacagagcgagactccgttaaaaaaaaaaaaaagttatgctttctattttaaggaaatagaagattgagagtatctgaatatctgtaagcaggaaaytatgtttagaaagtatatagagaacttttagaaaagtctgattaccaaaactgggggaaacaacccaaacttaagaatgggcttaatatcacacaattga

SEQ ID NO: 252368 - DNA, 201 bp, Homo sapiens
tttaaggaaatagaagattgagagtatctgaatatctgtaagcaggaaactatgtttagaaagtatatagagaacttttagaaaagtctgattaccaaaaytgggggaaacaacccaaacttaagaatgggcttaatatcacacaattgaggagaaaatgagggaagtggaggcaaaaatcagaagacatcctacacacaa

SEQ ID NO: 252369 - DNA, 201 bp, Homo sapiens
caccgggcatcctcctctattttcttctacatgttgcattgttttatgtttgctatttaggtgcaccacctatctggcaataagttctgtgtatcgtgtcraagtagtgttatatcactttgagggttttgccagattgccctggaaacagattgtaccagtttttaatttgtatcttctaactaaaaaccatacctccat

SEQ ID NO: 252370 - DNA, 201 bp, Homo sapiens
gttatatcactttgagggttttgccagattgccctggaaacagattgtaccagtttttaatttgtatcttctaactaaaaaccatacctccatgtcagatrtcttttgcccacatctgctagtaactatagatgtgtgttcctagctgtttcagcagatgaacagtggcatctcgtcattctaacttgtgtatcttgcact

SEQ ID NO: 252371 - DNA, 201 bp, Homo sapiens
ccctcgcagggagcctggtagcaggggccggaagcacagtagagacggacctgtttaagaggcagcaggcgatgccctccacaggtatggcaggtacgtcrgcacggctagcgtggcctcgggaatgcccccctctccttgggctgccgaggtacagttgccatgagtttctgaagagcagttgctaaacttggtttcttc

SEQ ID NO: 252372 - DNA, 201 bp, Homo sapiens
agctcggcctcaaggaagaggactcagcgccaggctgaggatgaggtctaggtggctcgatctcctgcagggcacattgggcaccttgctttacgccctcrtctcttgggctggagctgccccagcacctggcagcatggtgtttctagggtacgtggtacttgtctgtcttaaaacttgcctgtatgtttttaacctttg

SEQ ID NO: 252373 - DNA, 201 bp, Homo sapiens
atcgctgggactctagcgtctgggagcacagacccatcatttgattgatgttgtcgattaaatgaagagttaattcaccctactaatatttatggaccgcrggcctgcgcggcgtggagcctgggcattctcgggggagcgagagaggcacagtcccgccctccctttacctccctggagaggaactcgagggcatcctca

SEQ ID NO: 252374 - DNA, 201 bp, Homo sapiens
atccctgcatgtcagccactttctgctgtctgcctgtctgctgtctgcctgtctgctgcagggctagcgatcacacgcccatccgctgcctctcaggccaygtgcacaggttatgttgtttccagtgaggaaaccttcgtgtttcattctaattgaccatgaaggcccgaaagcaggtctgtctttggcaggtgctttctg

SEQ ID NO: 252375 - DNA, 201 bp, Homo sapiens
actttcaagggaacatgatggatttcttagctttcaagaagaaacattatgccccattacaagcatatcttaggcagaatgatttggacattgaagaagargaggaggaggaggaagaggaggaagaaaaatctgaggttatcaatgacgaggtaagaaacaggagttaatttgtttagtacaaatcttctagatgatcag
